United States Patent Application Publication US 2020/0163878 A1 - sequence listing, part 27

SEQ ID NO: 98733 - RNA, 1701 nt, Artificial Sequence
  derived and/or modified CDS sequence (opt2) from hemagglutinin__InfluenzaA__ACQ83310
augaaggccauccucgucguccuccucuacaccuucgccaccgccaacgccgacacccucugcaucggcuaccacgccaacaacuccaccgacaccgucgacaccguccucgagaagaacgucaccgucacccacuccgucaaccuccucgaggacaagcacaacggcaagcucugcaagcuccgcggcgucgccccccuccaccucggcaagugcaacaucgccggcuggauccucggcaaccccgagugcgagucccucuccaccgccuccuccugguccuacaucgucgagaccuccuccuccgacaacggcaccugcuaccccggcgacuucaucgacuacgaggagcuccgcgagcagcucuccuccauguccuccuucgagcgcuucgagaucuuccccaagaccuccuccuggcccaaccacgacuccaacaagggcgucaccgccgccugcccccacgccggcgccaaguccuucuacaagaaccucaucuggcucgucaagaagggcaacuccuaccccaagcucuccaaguccuacaucaacgacaagggcaaggagguccucguccucuggggcauccaccaccccuccaccuccgccgaccagcagucccucuaccagaacgccgacgccuacgucuucgucggcuccucccgcuacuccaagaagcucaagcccgagaucgccauccgccccaagguccgcgaccaggagggccgcaugaacuacuacuggacccucgucgagcccggcgacaagaucaccuucgaggccaccggcaaccucgucgucccccgcuacgccuucgccauggagcgcaacgccggcuccggcaucaucaucuccgacacccccguccacgacugcaacaccaccugccagacccccaagggcgccaucaacaccucccuccccuuccagaacauccaccccaucaccaucggcaagugccccaaguacgucaaguccaccaagcuccgccucgccaccggccuccgcaacguccccuccauccagucccgcggccucuucggcgccaucgccggcuucaucgagggcggcuggaccggcauggucgacggcugguacggcuaccaccaccagaacgagcagggcuccggcuacgccgccgaccucaaguccacccagaacgccaucgacgagaucaccaacaaggucaacuccgucaucgagaagaugaacacccaguucaccgccgucggcaaggaguucaaccaccucgagaagcgcaucgagaaccucaacaagaaggucgacgacggcuuccucgacaucuggaccuacaacgccgagcuccucguccuccucgagaacgagcgcacccucgacuaccacgacuccaacgucaagaaccucuacgagaagguccgcucccagcucaagaacaacgccaaggagaucggcaacggcugcuucgaguucuaccacaagugcgacaacaccugcauggaguccgucaagaacggcaccuacgacuaccccaaguacuccgaggaggccaagcucaaccgcgaggagaucgacggcgucaagcucgaguccacccgcaucuaccagauccucgccaucuacuccaccgucgccuccucccucguccucgucgucucccucggcgccaucuccuucuggaugugcuccaacggcucccuccagugccgcaucugcaucuga

SEQ ID NO: 98734 - RNA, 1701 nt, Artificial Sequence; identical to SEQ ID NO: 98692
  derived and/or modified CDS sequence (opt2) from hemagglutinin__InfluenzaA__ACQ84451

SEQ ID NO: 98735 - RNA, 1701 nt, Artificial Sequence; identical to SEQ ID NO: 98692
  derived and/or modified CDS sequence (opt2) from hemagglutinin__InfluenzaA__ACQ84457

SEQ ID NO: 98736 - RNA, 1701 nt, Artificial Sequence
  derived and/or modified CDS sequence (opt2) from hemagglutinin__InfluenzaA__ACQ84477
augaaggccauccuccucguccuccucuacaccuucaccgccgccaacgccgacacccucugcaucggcuaccacgccaacaacuccaccgacaccgucgacaccguccucgagaagaacgucaccgucacccacuccgucaaccuccucgaggaccgccacaacggcaagcucugcaagcuccgcggcgucgccccccuccaccucggcaagugcaacaucgccggcuggcuccucggcaaccccgagugcgagcuccucuucaccgccuccuccugguccuacaucgucgagaccuccaacuccgacaacggcaccugcuaccccggcgacuucaucaacuacgaggagcuccgcgagcagcucuccuccgucuccuccuucgagcgcuucgagaucuuccccaaggccuccuccuggcccgaccacgagaccaaccgcggcgucaccgccgccugccccuacgccggcgccaacuccuucuaccgcaaccucaucuggcucgucaagaagggcaacuccuaccccaagcucuccaaguccuacgucaacaacaaggagaaggagguccucguccucuggggcauccaccacccccccaccuccaccgaccagcagucccucuaccagaacgccgacgccuacgucuucgucggcuccuccaaguacaacaagaaguucaagcccgagaucgccacccgccccaagguccgcggccaggccggccgcaugaacuacuacuggacccucgucgagcccggcgacaccaucaccuucgaggccaccggcaaccucgucgucccccgcuacgccuucgccaugaagcgcggcuccggcuccggcaucaucaucuccgacacccccguccacgacugcaacaccaccugccagacccccaagggcgccaucaacaccucccuccccuuccagaacauccaccccgucaccaucggcgagugccccaaguacgucaaguccaccaagcuccgcauggccaccggccuccgcaacauccccuccauccagucccgcggccucuucggcgccaucgccggcuucaucgagggcggcuggaccggcaugaucgacggcugguacggcuaccaccaccagaacgagcagggcuccggcuacgccgccgaccagaaguccacccagaacgccaucgacggcaucaccaacaaggucaacuccgucaucgagaagaugaacacccaguucaccgccgucggcaaggaguucaaccaccucgagaagcgcaucgagaaccucaacaagaaggucgacgacggcuuccucgacgucuggaccuacaacgccgagcuccucguccuccucgagaacgagcgcacccucgacuaccacgacuccaacgucaagaaccucuacgagaagguccgcucccagcucaagaacaacgccaaggagaucggcaacggcugcuucgaguucuaccacaagugcgacgacaccugcauggaguccgucaagaacggcaccuacgacuaccccaaguacuccgaggaguccaagcucaaccgcgaggagaucgacggcgucaagcucgaguccacccgcaucuaccagauccucgccaucuacuccaccgucgccuccucccucguccuccucgucucccucggcgccaucuccuucuggaugugcuccaacggcucccuccagugccgcaucugcaucuga

SEQ ID NO: 98737 - RNA, 1701 nt, Artificial Sequence
  derived and/or modified CDS sequence (opt2) from hemagglutinin__InfluenzaA__ACQ89900
augaaggccauccucgucguccuccucuacaccuucgccaccgccaacgccgacacccucugcaucggcuaccacgccaacaacuccaccgacaccgucgacaccguccucgagaagaacgucaccgucacccacuccgucaaccuccucgaggacaagcacaacggcaagcucugcaagcuccgcggcgucgccccccuccaccucggcaagugcaacaucgccggcuggauccucggcaaccccgagugcgagucccucuccaccgccuccuccugguccuacaucgucgagaccuccuccuccgacaacggcaccugcuaccccggcgacuucaucgacuacgaggagcuccgcgagcagcucuccuccgucuccuccuucgagcgcuucgagaucuuccccaagaccuccuccuggcccaaccacgacuccaacaagggcgucaccgccgccugcccccacgccggcgccaaguccuucuacaagaaccucaucuggcucgucaagaagggcaacuccuaccccaagcucuccaaguccuacaucaacgacaagggcaaggagguccucguccucuggggcauccaccaccccuccaccuccgccgaccagcagucccucuaccagaacgccgacgccuacgucuucgucggcuccucccgcuacuccaagaaguucaagcccgagaucgccauccgccccaagguccgcgaccaggagggccgcaugaacuacuacuggacccucgucgagcccggcgacaagaucaccuucgaggccaccggcaaccucgucgucccccgcuacgccuucgccauggagcgcaacgccggcuccggcaucaucaucuccgacacccccguccacgacugcaacaccaccugccagacccccaagggcgccaucaacaccucccuccccuuccagaacauccaccccaucaccaucggcaagugccccaaguacgucaaguccaccaagcuccgccucgccaccggccuccgcaacguccccuccauccagucccgcggccucuucggcgccaucgccggcuucaucgagggcggcuggaccggcauggucgacggcugguacggcuaccaccaccagaacgagcagggcuccggcuacgccgccgaccucaaguccacccagaacgccaucgacgagaucaccaacaaggucaacuccgucgucgagaagaugaacacccaguucaccgccgucggcaaggaguucaaccaccucgagaagcgcaucgagaaccucaacaagaaggucgacgacggcuuccucgacaucuggaccuacaacgccgagcuccucguccuccucgagaacgagcgcacccucgacuaccacgacuccaacgucaagaaccucuacgagaagguccgcucccagcucaagaacaacgccaaggagaucggcaacggcugcuucgaguucuaccacaagugcgacaacaccugcauggaguccgucaagaacggcaccuacgacuaccccaaguacuccgaggaggccaagcucaaccgcgaggagaucgacggcgucaagcucgaguccacccgcaucuaccagauccucgccaucuacuccaccgucgccuccucccucguccucgucgucucccucggcgccaucuccuucuggaugugcuccaacggcucccuccagugccgcaucugcaucuga

SEQ ID NO: 98738 - RNA, 1701 nt, Artificial Sequence; identical to SEQ ID NO: 98705
  derived and/or modified CDS sequence (opt2) from hemagglutinin__InfluenzaA__ACQ89902

SEQ ID NO: 98739 - RNA, 1701 nt, Artificial Sequence
  derived and/or modified CDS sequence (opt2) from hemagglutinin__InfluenzaA__ACQ89904
augaaggccauccucgucguccuccucuacaccuucgccaccgccaacgccgacacccucugcaucggcuaccacgccaacaacuccaccgacaccgucgacaccguccucgagaagaacgucaccgucacccacuccgucaaccuccucgaggacaagcacaacggcaagcucugcaagcuccgcggcgucgccccccuccaccucggcaagugcaacaucgccggcuggauccucggcaaccccgagugcgagucccucuccaccgccuccuccugguccuacaucgucgagaccuccuccuccgacaagggcaccugcuaccccggcgacuucaucgacuacgaggagcuccgcgagcagcucuccuccgucuccuccuucgagcgcuucgagaucuuccccaagaccuccuccuggcccaaccacgacuccaacaagggcgucaccgccgccugcccccacgccggcgccaaguccuucuacaagaaccucaucuggcucgucaagaagggcaacuccuaccccaagcucuccaaguccuacaucaacgacaagggcaaggagguccucguccucuggggcauccaccaccccuccaccuccgccgaccagcagucccucuaccagaacgccgacgccuacgucuucgucggcaccucccgcuacuccaagaaguucaagcccgagaucgccauccgccccaagguccgcgaccaggagggccgcaugaacuacuacuggacccucgucgagcccggcgacaagaucaccuucgaggccaccggcaaccucgucgucccccgcuacgccuucgccauggagcgcaacgccggcuccggcaucaucaucuccgacacccccguccacgacugcaacaccaccugccagacccccaagggcgccaucaacaccucccuccccuuccagaacauccaccccaucaccaucggcaagugccccaaguacgucaaguccaccaagcuccgccucgccaccggccuccgcaacguccccuccauccagucccgcggccucuucggcgccaucgccggcuucaucgagggcggcuggaccggcauggucgacggcugguacggcuaccaccaccagaacgagcagggcuccggcuacgccgccgaccucaaguccacccagaacgccaucgacgagaucaccaacaaggucaacuccgucaucgagaagaugaacacccaguucaccgccgucggcaaggaguucaaccaccucgagaagcgcaucgagaaccucaacaagaaggucgacgacggcuuccucgacaucuggaccuacaacgccgagcuccucguccuccucgagaacgagcgcacccucgacuaccacgacuccaacgucaagaaccucuacgagaagguccgcucccagcucaagaacaacgccaaggagaucggcaacggcugcuucgaguucuaccacaagugcgacaacaccugcauggaguccgucaagaacggcaccuacgacuaccccaaguacuccgaggaggccaagcucaaccgcgaggagaucgacggcgucaagcucgaguccacccgcaucuaccagauccucgccaucuacuccaccgucgccuccucccucguccucgucgucucccucggcgccaucuccuucuggaugugcuccaacggcucccuccagugccgcaucugcaucuga

SEQ ID NO: 98740 - RNA, 1701 nt, Artificial Sequence; identical to SEQ ID NO: 98737
  derived and/or modified CDS sequence (opt2) from hemagglutinin__InfluenzaA__ACQ89905

SEQ ID NO: 98741 - RNA, 1701 nt, Artificial Sequence; identical to SEQ ID NO: 98692
  derived and/or modified CDS sequence (opt2) from hemagglutinin__InfluenzaA__ACQ99607

SEQ ID NO: 98742 - RNA, 1701 nt, Artificial Sequence; identical to SEQ ID NO: 98692
  derived and/or modified CDS sequence (opt2) from hemagglutinin__InfluenzaA__ACQ99608

SEQ ID NO: 98743 - RNA, 1701 nt, Artificial Sequence; identical to SEQ ID NO: 98692
  derived and/or modified CDS sequence (opt2) from hemagglutinin__InfluenzaA__ACQ99609

SEQ ID NO: 98744 - RNA, 1701 nt, Artificial Sequence; identical to SEQ ID NO: 98692
  derived and/or modified CDS sequence (opt2) from hemagglutinin__InfluenzaA__ACQ99611

SEQ ID NO: 98745 - RNA, 1701 nt, Artificial Sequence
  derived and/or modified CDS sequence (opt2) from hemagglutinin__InfluenzaA__ACQ99614
augaaggccauccucgucguccuccucuacaccuucgccaccgccaacgccgacacccucugcaucggcuaccacgccaacaacuccaccgacaccgucgacaccguccucgagaagaacgucaccgucacccacuccgucaaccuccucgaggacaagcacaacggcaagcucugcaagcuccgcggcgucgccccccuccaccucggcaagugcaacaucgccggcuggauccucggcaaccccgagugcgagucccucuccaccgccuccuccugguccuacaucgucgagaccuccuccuccgacaacggcaccugcuaccccggcgacuucaucgacuacgaggagcuccgcgagcagcucuccuccgucuccuccuucgagcgcuucgagaucuuccccaagaccuccuccuggcccaaccacgacuccaacaagggcgucaccgccgccugcccccacgccggcgccaaguccuucuacaagaaccucaucuggcucgucaagaagggcaacuccuaccccaagcucuccaaguccuacaucaacgacaagggcaaggagguccucguccucuggggcauccaccaccccuccaccuccgccgaccagcagucccucuaccagaacgccgacgccuacgucuucgucggcuccucccgcuacuccaagaaguucaagcccgagaucgccauccgccccaagguccgcgaccaggagggccgcaugaacuacuacuggacccucgucgagcccggcgacaagaucaccuucgaggccaccggcaaccucgucgucccccgcuacgccuucgccauggagcgcaacgccggcuccggcaucaucaucuccgacacccccguccacgacugcaacaccaccugccagacccccaagggcgccaucaacaccucccuccccuuccagaacauccaccccaucaccaucggcaagugccccaaguacgucaaguccaccaagcuccgccucgccaccggccuccgcaacguccccuccauccagucccgcggccucuucggcgccaucgccggcuucaucgagggcggcuggaccggcauggucgacggcugguacggcuaccaccaccagaacgagcagggcuccggcuacgccgccgaccucaaguccacccagaacgccaucgacgagaucaccaacaaggucaacuccgucaucgagaagaugaacacccaguucaccgccgucggcaaggaguucaaccaccucgagaagcgcaucgagaaccucaacaagaaggucgacgacggcuuccucgacaucuggaccuacaacgccgagcuccucauccuccucgagaacgagcgcacccucgacuaccacgacuccaacgucaagaaccucuacgagaagguccgcucccagcucaagaacaacgccaaggagaucggcaacggcugcuucgaguucuaccacaagugcgacaacaccugcauggaguccgucaagaacggcaccuacgacuaccccaaguacuccgaggaggccaagcucaaccgcgaggagaucgacggcgucaagcucgaguccacccgcaucuaccagauccucgccaucuacuccaccgucgccuccucccucguccucgucgucucccucggcgccaucuccuucuggaugugcuccaacggcucccuccagugccgcaucugcaucuga

SEQ ID NO: 98746 - RNA, 1701 nt, Artificial Sequence; identical to SEQ ID NO: 98745
  derived and/or modified CDS sequence (opt2) from hemagglutinin__InfluenzaA__ACQ99616

SEQ ID NO: 98747 - RNA, 1701 nt, Artificial Sequence; identical to SEQ ID NO: 98692
  derived and/or modified CDS sequence (opt2) from hemagglutinin__InfluenzaA__ACQ99617

SEQ ID NO: 98748 - RNA, 1701 nt, Artificial Sequence; identical to SEQ ID NO: 98692
  derived and/or modified CDS sequence (opt2) from hemagglutinin__InfluenzaA__ACQ99618

SEQ ID NO: 98749 - RNA, 1701 nt, Artificial Sequence; identical to SEQ ID NO: 98692
  derived and/or modified CDS sequence (opt2) from hemagglutinin__InfluenzaA__ACQ99619

SEQ ID NO: 98750 - RNA, 1701 nt, Artificial Sequence; identical to SEQ ID NO: 98692
  derived and/or modified CDS sequence (opt2) from hemagglutinin__InfluenzaA__ACQ99620

SEQ ID NO: 98751 - RNA, 1701 nt, Artificial Sequence; identical to SEQ ID NO: 98745
  derived and/or modified CDS sequence (opt2) from hemagglutinin__InfluenzaA__ACQ99621

SEQ ID NO: 98752 - RNA, 1701 nt, Artificial Sequence; identical to SEQ ID NO: 98692
  derived and/or modified CDS sequence (opt2) from hemagglutinin__InfluenzaA__ACQ99622

SEQ ID NO: 98753 - RNA, 1701 nt, Artificial Sequence
  derived and/or modified CDS sequence (opt2) from hemagglutinin__InfluenzaA__ACR01014
augaaggccauccucgucguccuccucuacaccuucgccaccgccaacgccgacacccucugcaucggcuaccacgccaacaacuccaccgacaccgucgacaccguccucgagaagaacgucaccgucacccacuccgucaaccuccucgaggacaagcacaacggcaagcucugcaagcuccgcggcgucgccccccuccaccucggcaagugcaacaucgccggcuggauccucggcaaccccgagugcgagucccucuccaccgccuccuccugguccuacaucgucgagaccuccuccuccgacaacggcaccugcuaccccggcgacuucaucgacuacgaggagcuccgcgagcagcucuccuccgucuccuccuucgagcgcuucgagaucuuccccaagaccuccuccuggcccaaccacgacuccaacaagggcgucaccgccgccugcccccacgccggcgccaaguccuucuacaagaaccucaucuggcucgucaagaagggcaacuccuaccccaagcucuccaaguccuacaucaacgacaagggcaaggagguccucguccucuggggcauccaccaccccuccaccuccgccgaccagcagucccucuaccagaacgccgacgccuacgucuucgucggcuccucccgcuacuccaagaaguucaagcccgagaucgccauccgccccaagguccgcgaccaggagggccgcaugaacuacuacuggacccucgucgagcccggcgacaagaucaccuucgaggccaccggcaaccucgucgucccccgcuacgccuucgccauggagcgcaacgccggcuccggcaucaucaucuccgacacccccguccacgacugcaacaccaccugccagacccccaagggcgccaucaacaccucccuccccuuccagaacauccaccccaucaccaucggcaagugccccaaguacgucaaguccaccaagcuccgccucgccaccggccuccgcaacguccccuccauccagucccgcggccucuucggcgccaucgccggcuucaucgagggcggcuggaccggcauggucgacggcugguacggcuaccaccaccagaacgagcagggcuccggcuacgccgccgaccucaaguccacccagaacgccaucgacgagaucaccaacaaggucaacuccgucaucgagaagaugaacacccaguucaccgccgucggcaaggaguucaaccaccucgagaagcgcauggagaaccucaacaagaaggucgacgacggcuuccucgacaucuggaccuacaacgccgagcuccucguccuccucgagaacgagcgcacccucgacuaccacgacuccaacgucaagaaccucuacgagaagguccgcucccagcucaagaacaacgccaaggagaucggcaacggcugcuucgaguucuaccacaagugcgacaacaccugcauggaguccgucaagaacggcaccuacgacuaccccaaguacuccgaggaggccaagcucaaccgcgaggagaucgacggcgucaagcucgaguccacccgcaucuaccagauccucgccaucuacuccaccgucgccuccucccucguccucgucgucucccucggcgccaucuccuucuggaugugcuccaacggcucccuccagugccgcaucugcaucuga

SEQ ID NO: 98754 - RNA, 1701 nt, Artificial Sequence; identical to SEQ ID NO: 98705
  derived and/or modified CDS sequence (opt2) from hemagglutinin__InfluenzaA__ACR08419

SEQ ID NO: 98755 - RNA, 1701 nt, Artificial Sequence
  derived and/or modified CDS sequence (opt2) from hemagglutinin__InfluenzaA__ACR08429
augaaggccauccucgucguccuccucuacaccuucgccaccgccaacgccgacacccucugcaucggcuaccacgccaacaacuccaccgacaccgucgacaccguccucgagaagaacgucaccgucacccacuccgucaaccuccucgaggacaagcacaacggcaagcucugcaagcuccgcggcgucgccccccuccaccucggcaagugcaacaucgccggcuggauccucggcaaccccgagugcgagucccucuccaccgccuccuccugguccuacaucgucgagaccuccuccuccgacaacggcaccugcuaccccggcgacuucaucgacuacgaggagcuccgcgagcagcucuccuccgucuccuccuucgagcgcuucgagaucuuccccaagaccuccuccuggcccaaccacgacuccaacaagggcgucaccgccgccugcccccacgccggcgccaaguccuucuacaagaaccucaucuggcucgucaagaagggcaacuccuaccccaagcucuccaaguccuacaucaacgacaagggcaaggagguccucguccucuggggcauccaccaccccuccaccuccgccgaccagcagucccucuaccagaacgccgacgccuacgucuucgucggcaccucccgcuacuccaagaaguucaagcccgagaucgccauccgccccaagguccgcgaccaggagggccgcaugaacuacuacuggacccucgucgagcccggcgacaagaucaccuucgaggccaccggcaaccucgucgucccccgcuacgccuucgccauggagcgcaacaccggcuccggcaucaucaucuccgacacccccguccacgacugcaacaccaccugccagacccccaagggcgccaucaacaccucccuccccuuccagaacauccaccccaucaccaucggcaagugccccaaguacgucaaguccaccaagcuccgccucgccaccggccuccgcaacguccccuccauccagucccgcggccucuucggcgccaucgccggcuucaucgagggcggcuggaccggcauggucgacggcugguacggcuaccaccaccagaacgagcagggcuccggcuacgccgccgaccucaaguccacccagaacgccaucgacgagaucaccaacaaggucaacuccgucaucgagaagaugaacacccaguucaccgccgucggcaaggaguucaaccaccucgagaagcgcaucgagaaccucaacaagaaggucgacgacggcuuccucgacaucuggaccuacaacgccgagcuccucguccuccucgagaacgagcgcacccucgacuaccacgacuccaacgucaagaaccucuacgagaagguccgcucccagcucaagaacaacgccaaggagaucggcaacggcugcuucgaguucuaccacaagugcgacaacaccugcauggaguccgucaagaacggcaccuacgacuaccccaaguacuccgaggaggccaagcucaaccgcgaggagaucgacggcgucaagcucgaguccacccgcaucuaccagauccucgccaucuacuccaccgucgccuccucccucguccucgucgucucccucggcgccaucuccuucuggaugugcuccaacggcucccuccagugccgcaucugcaucuga

SEQ ID NO: 98756 - RNA, 1701 nt, Artificial Sequence; identical to SEQ ID NO: 98705
  derived and/or modified CDS sequence (opt2) from hemagglutinin__InfluenzaA__ACR08439

SEQ ID NO: 98757 - RNA, 1701 nt, Artificial Sequence; identical to SEQ ID NO: 98705
  derived and/or modified CDS sequence (opt2) from hemagglutinin__InfluenzaA__ACR08449

SEQ ID NO: 98758 - RNA, 1701 nt, Artificial Sequence
  derived and/or modified CDS sequence (opt2) from hemagglutinin__InfluenzaA__ACR08459
augaaggccauccucgucguccuccucuacaccuucgccaccgccaacgccgacacccucugcaucggcuaccacgccaacaacuccaccgacaccgucgacaccguccucgagaagaacgucaccgucacccacuccgucaaccuccucgaggacaagcacaacggcaagcucugcaagcuccgcggcgucgccccccuccaccucggcaagugcaacaucgccggcuggauccucggcaaccccgagugcgagucccucuccaccgccuccuccugguccuacaucgucgagaccuccuccuccgacaacggcaccugcuaccccggcgacuucaucgacuacgaggagcuccgcgagcagcucuccuccgucuccuccuucgagcgcuucgagaucuuccccaagaccuccuccuggcccaaccacgacuccaacaagggcgucaccgccgccugcccccacgccggcgccaaguccuucuacaagaaccucaucuggcucgucaagaagggcaacuccuaccccaagcucuccaaguccuacaucaacgacaagggcaaggagguccucguccucuggggcauccaccaccccuccaccuccgccgaccagcagucccucuaccagaacgccgacgccuacgucuucgucggcuccucccgcuacuccaagaaguucaagcccgagaucgccauccgccccaagguccgcgaccaggagggccgcaugaacuacuacuggacccucgucgagcccggcgacaagaucaccuucgaggccaccggcaaccucgucgucccccgcuacgccuucgccauggagcgcaacgccggcuccggcaucaucaucuccgacacccccguccacgacugcgacaccaccugccagacccccaagggcgccaucaacaccucccuccccuuccagaacauccaccccaucaccaucggcaagugccccaaguacgucaaguccaccaagcuccgccucgccaccggccuccgcaacguccccuccauccagucccgcggccucuucggcgccaucgccggcuucaucgagggcggcuggaccggcauggucgacggcugguacggcuaccaccaccagaacgagcagggcuccggcuacgccgccgaccucaaguccacccagaacgccaucgacgagaucaccaacaaggucaacuccgucaucgagaagaugaacacccaguucaccgccgucggcaaggaguucaaccaccucgagaagcgcaucgagaaccucaacaagaaggucgacgacggcuuccucgacaucuggaccuacaacgccgagcuccucguccuccucgagaacgagcgcacccucgacuaccacgacuccaacgucaagaaccucuacgagaagguccgcucccagcucaagaacaacgccaaggagaucggcaacggcugcuucgaguucuaccacaagugcgacaacaccugcauggaguccgucaagaacggcaccuacgacuaccccaaguacuccgaggaggccaagcucaaccgcgaggagaucgacggcgucaagcucgaguccacccgcaucuaccagauccucgccaucuacuccaccgucgccuccucccucguccucgucgucucccucggcgccaucuccuucuggaugugcuccaacggcucccuccagugccgcaucugcaucuga

SEQ ID NO: 98759 - RNA, 1701 nt, Artificial Sequence; identical to SEQ ID NO: 98692
  derived and/or modified CDS sequence (opt2) from hemagglutinin__InfluenzaA__ACR08528

SEQ ID NO: 98760 - RNA, 1701 nt, Artificial Sequence; identical to SEQ ID NO: 98692
  derived and/or modified CDS sequence (opt2) from hemagglutinin__InfluenzaA__ACR08530

SEQ ID NO: 98761 - RNA, 1701 nt, Artificial Sequence; identical to SEQ ID NO: 98758
  derived and/or modified CDS sequence (opt2) from hemagglutinin__InfluenzaA__ACR08531

SEQ ID NO: 98762 - RNA, 1701 nt, Artificial Sequence; identical to SEQ ID NO: 98705
  derived and/or modified CDS sequence (opt2) from hemagglutinin__InfluenzaA__ACR08533

SEQ ID NO: 98763 - RNA, 1701 nt, Artificial Sequence; identical to SEQ ID NO: 98758
  derived and/or modified CDS sequence (opt2) from hemagglutinin__InfluenzaA__ACR08535

SEQ ID NO: 98764 - RNA, 1701 nt, Artificial Sequence; identical to SEQ ID NO: 98705
  derived and/or modified CDS sequence (opt2) from hemagglutinin__InfluenzaA__ACR08536

SEQ ID NO: 98765 - RNA, 1701 nt, Artificial Sequence; identical to SEQ ID NO: 98758
  derived and/or modified CDS sequence (opt2) from hemagglutinin__InfluenzaA__ACR08537

SEQ ID NO: 98766 - RNA, 1701 nt, Artificial Sequence; identical to SEQ ID NO: 98758
  derived and/or modified CDS sequence (opt2) from hemagglutinin__InfluenzaA__ACR08538

SEQ ID NO: 98767 - RNA, 1701 nt, Artificial Sequence; identical to SEQ ID NO: 98705
  derived and/or modified CDS sequence (opt2) from hemagglutinin__InfluenzaA__ACR08539

SEQ ID NO: 98768 - RNA, 1701 nt, Artificial Sequence; identical to SEQ ID NO: 98705
  derived and/or modified CDS sequence (opt2) from hemagglutinin__InfluenzaA__ACR08540

SEQ ID NO: 98769 - RNA, 1701 nt, Artificial Sequence; identical to SEQ ID NO: 98692
  derived and/or modified CDS sequence (opt2) from hemagglutinin__InfluenzaA__ACR08542

SEQ ID NO: 98770 - RNA, 1701 nt, Artificial Sequence; identical to SEQ ID NO: 98692
  derived and/or modified CDS sequence (opt2) from hemagglutinin__InfluenzaA__ACR08543

SEQ ID NO: 98771 - RNA, 1701 nt, Artificial Sequence; identical to SEQ ID NO: 98731
  derived and/or modified CDS sequence (opt2) from hemagglutinin__InfluenzaA__ACR08544

SEQ ID NO: 98772 - RNA, 1701 nt, Artificial Sequence; identical to SEQ ID NO: 98758
  derived and/or modified CDS sequence (opt2) from hemagglutinin__InfluenzaA__ACR08545

SEQ ID NO: 98773 - RNA, 1701 nt, Artificial Sequence; identical to SEQ ID NO: 98692
  derived and/or modified CDS sequence (opt2) from hemagglutinin__InfluenzaA__ACR08546

SEQ ID NO: 98774 - RNA, 1701 nt, Artificial Sequence; identical to SEQ ID NO: 98705
  derived and/or modified CDS sequence (opt2) from hemagglutinin__InfluenzaA__ACR08547

SEQ ID NO: 98775 - RNA, 1701 nt, Artificial Sequence; identical to SEQ ID NO: 98758
  derived and/or modified CDS sequence (opt2) from hemagglutinin__InfluenzaA__ACR08548

SEQ ID NO: 98776 - RNA, 1701 nt, Artificial Sequence; identical to SEQ ID NO: 98705
  derived and/or modified CDS sequence (opt2) from hemagglutinin__InfluenzaA__ACR08549

SEQ ID NO: 98777 - RNA, 1701 nt, Artificial Sequence; identical to SEQ ID NO: 98705
  derived and/or modified CDS sequence (opt2) from hemagglutinin__InfluenzaA__ACR08550

SEQ ID NO: 98778 - RNA, 1701 nt, Artificial Sequence; identical to SEQ ID NO: 98705
  derived and/or modified CDS sequence (opt2) from hemagglutinin__InfluenzaA__ACR08551

SEQ ID NO: 98779 - RNA, 1701 nt, Artificial Sequence; identical to SEQ ID NO: 98692
  derived and/or modified CDS sequence (opt2) from hemagglutinin__InfluenzaA__ACR08552

SEQ ID NO: 98780 - RNA, 1701 nt, Artificial Sequence; identical to SEQ ID NO: 98731
  derived and/or modified CDS sequence (opt2) from hemagglutinin__InfluenzaA__ACR08553

SEQ ID NO: 98781 - RNA, 1701 nt, Artificial Sequence; identical to SEQ ID NO: 98731
  derived and/or modified CDS sequence (opt2) from hemagglutinin__InfluenzaA__ACR08554

SEQ ID NO: 98782 - RNA, 1701 nt, Artificial Sequence; identical to SEQ ID NO: 98692
  derived and/or modified CDS sequence (opt2) from hemagglutinin__InfluenzaA__ACR09365

SEQ ID NO: 98783 - RNA, 1701 nt, Artificial Sequence; identical to SEQ ID NO: 98692
  derived and/or modified CDS sequence (opt2) from hemagglutinin__InfluenzaA__ACR09366

SEQ ID NO: 98784 - RNA, 1701 nt, Artificial Sequence; identical to SEQ ID NO: 98692
  derived and/or modified CDS sequence (opt2) from hemagglutinin__InfluenzaA__ACR09367

SEQ ID NO: 98785 - RNA, 1701 nt, Artificial Sequence; identical to SEQ ID NO: 98692
  derived and/or modified CDS sequence (opt2) from hemagglutinin__InfluenzaA__ACR09368

SEQ ID NO: 98786 - RNA, 1701 nt, Artificial Sequence; identical to SEQ ID NO: 98692
  derived and/or modified CDS sequence (opt2) from hemagglutinin__InfluenzaA__ACR09369

SEQ ID NO: 98787 - RNA, 1701 nt, Artificial Sequence; identical to SEQ ID NO: 98692
  derived and/or modified CDS sequence (opt2) from hemagglutinin__InfluenzaA__ACR09370

SEQ ID NO: 98788 - RNA, 1701 nt, Artificial Sequence; identical to SEQ ID NO: 98692
  derived and/or modified CDS sequence (opt2) from hemagglutinin__InfluenzaA__ACR09371

SEQ ID NO: 98789 - RNA, 1701 nt, Artificial Sequence; identical to SEQ ID NO: 98692
  derived and/or modified CDS sequence (opt2) from hemagglutinin__InfluenzaA__ACR09373

SEQ ID NO: 98790 - RNA, 1701 nt, Artificial Sequence; identical to SEQ ID NO: 98692
  derived and/or modified CDS sequence (opt2) from hemagglutinin__InfluenzaA__ACR09374

SEQ ID NO: 98791 - RNA, 1701 nt, Artificial Sequence
  derived and/or modified CDS sequence (opt2) from hemagglutinin__InfluenzaA__ACR09375
augaaggccauccucgucguccuccucuacaccuucgccaccgccaacgccgacacccucugcaucggcuaccacgccaacaacuccaccgacaccgucgacaccguccucgagaagaacgucaccgucacccacuccgucaaccuccucgaggacaagcacaacggcaagcucugcaagcuccgcggcgucgccccccuccaccucggcaagugcaacaucgccggcuggauccucggcaaccccgagugcgagucccucuccaccgccuccuccugguccuacaucgucgagaccuccuccuccgacaacggcaccugcuaccccggcgacuucaucgacuacgaggagcuccgcgagcagcucuccuccgucuccuccuucgagcgcuucgagaucuuccccaagaccuccuccuggcccaaccacgacuccaacaagggcgucaccgccgccugcccccacgccggcgccaaguccuucuacaagaaccucaucuggcucgucaagaagggcaacuccuaccccaagcucuccaaguccuacaucaacgacaagggcaaggagguccucguccucuggggcauccaccaccccuccaccuccgccgaccagcagucccucuaccagaacgccgacgccuacgucuucgucggcuccucccgcuacuccaagaaguucaagcccgagaucgccauccgccccaagguccgcgaccaggagggccgcaugaacuacuacuggacccucgucgagcccggcgacaagaucaccuucgaggccaccggcaaccucgucgucccccgcuacgccuucgccauggagaagaacgccggcuccggcaucaucaucuccgacacccccguccacgacugcaacaccaccugccagacccccaagggcgccaucaacaccucccuccccuuccagaacauccaccccaucaccaucggcaagugccccaaguacgucaaguccaccaagcuccgccucgccaccggccuccgcaacguccccuccauccagucccgcggccucuucggcgccaucgccggcuucaucgagggcggcuggaccggcauggucgacggcugguacggcuaccaccaccagaacgagcagggcuccggcuacgccgccgaccucaaguccacccagaacgccaucgacgagaucaccaacaaggucaacuccgucaucgagaagaugaacacccaguucaccgccgucggcaaggaguucaaccaccucgagaagcgcaucgagaaccucaacaagaaggucgacgacggcuuccucgacaucuggaccuacaacgccgagcuccucguccuccucgagaacgagcgcacccucgacuaccacgacuccaacgucaagaaccucuacgagaagguccgcucccagcucaagaacaacgccaaggagaucggcaacggcugcuucgaguucuaccacaagugcgacaacaccugcauggaguccgucaagaacggcaccuacgacuaccccaaguacuccgaggaggccaagcucaaccgcgaggagaucgacggcgucaagcucgaguccacccgcaucuaccagauccucgccaucuacuccaccgucgccuccucccucguccucgucgucucccucggcgccaucuccuucuggaugugcuccaacggcucccuccagugccgcaucugcaucuga

SEQ ID NO: 98792 - RNA, 1701 nt, Artificial Sequence; identical to SEQ ID NO: 98692
  derived and/or modified CDS sequence (opt2) from hemagglutinin__InfluenzaA__ACR09376

SEQ ID NO: 98793 - RNA, 1701 nt, Artificial Sequence; identical to SEQ ID NO: 98692
  derived and/or modified CDS sequence (opt2) from hemagglutinin__InfluenzaA__ACR09377

SEQ ID NO: 98794 - RNA, 1701 nt, Artificial Sequence; identical to SEQ ID NO: 98692
  derived and/or modified CDS sequence (opt2) from hemagglutinin__InfluenzaA__ACR09395

SEQ ID NO: 98795 - RNA, 1701 nt, Artificial Sequence; identical to SEQ ID NO: 98692
  derived and/or modified CDS sequence (opt2) from hemagglutinin__InfluenzaA__ACR09396

SEQ ID NO: 98796 - RNA, 1701 nt, Artificial Sequence
  derived and/or modified CDS sequence (opt2) from hemagglutinin__InfluenzaA__ACR10186
augaaggccauccucgucguccuccucuacaccuucgccaccgccaacgccgacacccucugcaucggcuaccacgccaacaacuccaccgacaccgucgacaccguccucgagaagaacgucaccgucacccacuccgucaaccuccucgaggacaagcacaacggcaagcucugcaagcuccgcggcgucgccccccuccaccucggcaagugcaacaucgccggcuggauccucggcaaccccgagugcgagucccucuccaccgccuccuccugguccuacaucgucgagaccuccuccuccgacaacggcaccugcuaccccggcgacuucaucgacuacgaggagcuccgcgagcagcucuccuccgucuccuccuucgagcgcuucgagaucuuccccaagaccuccuccuggcccaaccacgacuccaacaagggcgucaccgccgccugcccccacgccggcgccaaguccuucuacaagaaccucaucuggcucgucaagaagggcaacuccuaccccaagcucuccaaguccuacaucaacgacaagggcaaggagguccucguccucuggggcauccaccaccccuccaccuccgccgaccagcagucccucuaccagaacgccgacgccuacgucuucgucggcaccucccgcuacuccaagaaguucaagcccgagaucgccauccgccccaagguccgcgaccaggagggccgcaugaacuacuacuggacccucgucgagcccggcgacaagaucaccuucgaggccaccggcaaccucgucgucccccgcuacgccuucgccauggagcgcaacgccggcuccggcaucaucaucuccgacacccccguccacgacugcaacaccaccugccagacccccaagggcgccaucaacaccucccuccccuuccagaacauccaccccaucaccaucggcaagugccccaaguacgucaaguccaccaagcuccgccucgccaccggccuccgcaacguccccuccauccagucccgcggccucuucggcgccaucgccggcuucaucgagggcggcuggaccggcauggucgacggcugguacggcuaccaccaccagaacgagcagggcuccggcuacgccgccgaccucaaguccacccagaacgccaucgacgagaucaccaacaaggucaacuccgucaucgagaagaugaacacccaguucaccgccgucggcaaggaguucaaccaccucgagaagcgcaucgagaaccucaacaagaagaucgacgacggcuuccucgacaucuggaccuacaacgccgagcuccucguccuccucgagaacgagcgcacccucgacuaccacgacuccaacgucaagaaccucuacgagaagguccgcucccagcucaagaacaacgccaaggagaucggcaacggcugcuucgaguucuaccacaagugcgacaacaccugcauggaguccgucaagaacggcaccuacgacuaccccaaguacuccgaggaggccaagcucaaccgcgaggagaucgacggcgucaagcucgaguccacccgcaucuaccagauccucgccaucuacuccaccgucgccuccucccucguccucgucgucucccucggcgccaucuccuucuggaugugcuccaacggcucccuccagugccgcaucugcaucuga

SEQ ID NO: 98797 - RNA, 1701 nt, Artificial Sequence; identical to SEQ ID NO: 98796
  derived and/or modified CDS sequence (opt2) from hemagglutinin__InfluenzaA__ACR10222

SEQ ID NO: 98798 - RNA, 1701 nt, Artificial Sequence
  derived and/or modified CDS sequence (opt2) from hemagglutinin__InfluenzaA__ACR10223
augaaggccauccucgucguccuccucuacaccuucaccaccgccaacgccgacacccucugcaucggcuaccacgccaacaacuccaccgacaccgucgacaccguccucgagaagaacgucaccgucacccacuccgucaaccuccucgaggacaagcacaacggcaagcucugcaagcuccgcggcgucgccccccuccaccucggcaagugcaacaucgccggcuggauccucggcaaccccgagugcgagucccucuccaccgccuccuccugguccuacaucgucgagaccuccuccuccgacaacggcaccugcuaccccggcgacuucaucgacuacgaggagcuccgcgagcagcucuccuccgucuccuccuucgagcgcuucgagaucuuccccaagaccuccuccuggcccaaccacgacuccaacaagggcgucaccgccgccugcccccacgccggcgccaaguccuucuacaagaaccucaucuggcucgucaagaagggcaacuccuaccccaagcucuccaaguccuacaucaacgacaagggcaaggagguccucguccucuggggcauccaccaccccuccaccuccgccgaccagcagucccucuaccagaacgccgacgccuacgucuucgucggcuccucccgcuacuccaagaaguucaagcccgagaucgccauccgccccaagguccgcgaccaggagggccgcaugaacuacuacuggacccucgucgagcccggcgacaagaucaccuucgaggccaccggcaaccucgucgucccccgcuacgccuucgccauggagcgcaacgccggcuccggcaucaucaucuccgacacccccguccacgacugcaacaccaccugccagacccccaagggcgccaucaacaccucccuccccuuccagaacauccaccccaucaccaucggcaagugccccaaguacgucaaguccaccaagcuccgccucgccaccggccuccgcaacguccccuccauccagucccgcggccucuucggcgccaucgccggcuucaucgagggcggcuggaccggcauggucgacggcugguacggcuaccaccaccagaacgagcagggcuccggcuacgccgccgaccucaaguccacccagaacgccaucgacgagaucaccaacaaggucaacuccgucaucgagaagaugaacacccaguucaccgccgucggcaaggaguucaaccaccucgagaagcgcaucgagaaccucaacaagaaggucgacgacggcuuccucgacaucuggaccuacaacgccgagcuccucguccuccucgagaacgagcgcacccucgacuaccacgacuccaacgucaagaaccucuacgagaagguccgcucccagcucaagaacaacgccaaggagaucggcaacggcugcuucgaguucuaccacaagugcgacaacaccugcauggaguccgucaagaacggcaccuacgacuaccccaaguacuccgaggaggccaagcucaaccgcgaggagaucgacggcgucaagcucgaguccacccgcaucuaccagauccucgccaucuacuccaccgucgccuccucccucguccucgucgucucccucggcgccaucuccuucuggaugugcuccaacggcucccuccagugccgcaucugcaucuga

SEQ ID NO: 98799 - RNA, 1701 nt, Artificial Sequence
  derived and/or modified CDS sequence (opt2) from hemagglutinin__InfluenzaA__ACR15183
augaagaccaucaucgcccucuccuacauccucugccucgucuucgcccagaagcuccccggcaacgacaacuccaccgccacccucugccucggccaccacgccguccccaacggcaccaucgucaagaccaucaccaacgaccagaucgaggucaccaacgccaccgagcucguccaguccuccuccaccggcggcaucugcgacuccccccaccagauccucgacggcgagaacugcacccucaucgacgcccuccucggcgacccccagugcgacggcuuccagaacaagaagugggaccucuucgucgagcgcuccaaggccuacuccaacugcuaccccuacgacguccccgacuacgccucccuccgcucccucgucgccuccuccggcacccucgaguucaacaacgaguccuucaacuggaccggcgucacccagaacggcaccuccuccgccugcaagcgcggcuccgacaacuccuucuucucccgccucaacuggcucacccaccucaaguucaaguaccccgcccucaacgucaccaugcccaacaacgagaaguucgacaagcucuacaucuggggcguccaccaccccggcaccgacaacgaccagaucuuccccuacgcccaggccuccggccgcaucaccgucuccaccaagcgcucccagcagaccgucauccccaacaucggcucccgcccccgcguccgcaacauccccucccgcaucuccaucuacuggaccaucgucaagcccggcgacauccuccucaucaacuccaccggcaaccucaucgccccccgcggcuacuucaagauccgcuccggcaaguccuccaucaugcgcuccgacgcccccaucggcaagugcaacuccgagugcaucacccccaacggcuccauccccaacgacaagcccuuccagaacgucaaccgcaucaccuacggcgccugcccccgcuacgucaagcagaacacccucaagcucgccaccggcaugcgcaacguccccgagaagcagacccgcggcaucuucggcgccaucgccggcuucaucgagaacggcugggagggcauggucgacggcugguacggcuuccgccaccagaacuccgagggcaucggccaggccgccgaccucaaguccacccaggccgccaucaaccagaucaacggcaagcucaaccgccucaucggcaagaccaacgagaaguuccaccagaucgagaaggaguucuccgaggucgagggccgcauccaggaccucgagaaguacgucgaggacaccaagaucgaccucugguccuacaacgccgagcuccucgucgcccucgagaaccagcacaccaucgaccucaccgacuccgagaugaacaagcucuucgagcgcaccaagaagcagcuccgcgagaacgccgaggacaugggcaacggcugcuucaagaucuaccacaagugcgacaacgccugcaucggcuccauccgcaacggcaccuacgaccacgacgucuaccgcgacgaggcccucaacaaccgcuuccagaucaagggcgucgagcucaaguccggcuacaaggacuggauccucuggaucuccuucgccaucuccugcuuccuccucugcgucgcccuccucggcuucaucaugugggccugccagaagggcaacauccgcugcaacaucugcaucuga

SEQ ID NO: 98800 - RNA, 1698 nt, Artificial Sequence
  derived and/or modified CDS sequence (opt2) from hemagglutinin__InfluenzaA__ACR15194
augaaggucaagcuccucguccuccucugcaccuucaccgccaccuacgccgacaccaucugcaucggcuaccacgccaacaacuccaccgacaccgucgacaccguccucgagaagaacgucaccgucacccacuccgucaaccuccucgagaacucccacaacggcaagcucugccuccucaagggcaucgccccccuccagcucggcaacugcuccgucgccggcuggauccucggcaaccccgagugcgagcuccucaucuccaaggaguccugguccuacaucgucgagaagcccaaccccgagaacggcaccugcuaccccggccacuucgccgacuacgaggagcuccgcgagcagcucuccuccgucuccuccuucgagcgcuucgagaucuuccccaaggaguccuccuggcccaaccacaccgucaccggcgucuccgccuccugcucccacaacggcgaguccuccuucuaccgcaaccuccucuggcucaccggcaagaacggccucuaccccaaccucuccaaguccuacgccaacaacaaggagaaggagguccucguccucuggggcguccaccacccccccaacaucggcaaccagaaggcccucuaccacaccgagaacgccuacgucuccgucgucuccucccacuacucccgcaaguucacccccgagaucgccaagcgccccaagguccgcgaccaggagggccgcaucaacuacuacuggacccuccucgagcccggcgacaccaucaucuucgaggccaacggcaaccucaucgccccccgcuacgccuucgcccucucccgcggccucggcuccggcaucaucaacuccaacgcccccauggacaagugcgacgccaagugccagaccccccagggcgccaucaacuccucccuccccuuccagaacguccaccccgucaccaucggcgagugccccaaguacguccgcuccgccaagcuccgcauggucaccggccuccgcaacauccccuccauccagucccgcggccucuucggcgccaucgccggcuucaucgagggcggcuggaccggcauggucgacggcugguacggcuaccaccaccagaacgagcagggcuccggcuacgccgccgaccagaaguccacccagaacgccaucaacggcaucaccaacaaggucaacuccgucaucgagaagaugaacacccaguucaccgccgucggcaaggaguucaacaagcucgagcgccgcauggagaaccucaacaagaaggucgacgacggcuucaucgacaucuggaccuacaacgccgagcuccucguccuccucgagaacgagcgcacccucgacuuccacgacuccaacgucaagaaccucuacgagaaggucaagucccagcucaagaacaacgccaaggagaucggcaaccgcugcuucgaguucuaccacaagugcaacgacgagugcauggaguccgucaagaacggcaccuacgacuaccccaaguacuccgaggaguccaagcucaaccgcgagaagaucgacggcgucaagcucgaguccaugggcgucuaccagauccucgccaucuacuccaccgucgccuccucccucguccuccucgucucccucggcgccaucuccuucuggaugugcuccaacggcucccuccagugccgcaucugcaucuga

SEQ ID NO: 98801 - RNA, 1698 nt, Artificial Sequence; identical to SEQ ID NO: 96906
  derived and/or modified CDS sequence (opt2) from hemagglutinin__InfluenzaA__ACR15216

SEQ ID NO: 98802 - RNA, 1701 nt, Artificial Sequence
  derived and/or modified CDS sequence (opt2) from hemagglutinin__InfluenzaA__ACR15227
augaagaccaucaucgcccucuccuacauccucugccucgucuucgcccagaagcuccccggcaacgacaacuccaccgccacccucugccucggccaccacgccguccccaacggcaccaucgucaagaccaucaccaacgaccagaucgaggucaccaacgccaccgagcucguccaguccuccuccaccggcggcaucugcgacuccccccaccagauccucgacggcgagaacugcacccucaucgacgcccuccucggcgacccccagugcgacggcuuccagaacaagaagugggaccucuucgucgagcgcuccaaggccuacuccaacugcuaccccuacgacguccccgacuacgccucccuccgcucccucgucgccuccuccggcacccucgaguucaacaacgaguccuucaacuggaccggcgucacccagaacggcaccuccuccgccugccagcgccgcuccaacaaguccuucuucucccgccucaacuggcucacccaccucaaguucaaguaccccgcccucaacgucaccaugcccaacaacgagaaguucgacaagcucuacaucuggggcguccaccaccccggcaccgacaacgaccagaucucccucuacgcccagaccuccggccgcaucaccgucuccaccaagcgcucccagcagaccgucauccccaacaucggcucccgcccccgcguccgcgacguccccucccgcaucuccaucuacuggaccaucgucaagcccggcgacauccuccucaucaacuccaccggcaaccucaucgccccccgcggcuacuucaagauccgcuccggcaaguccuccaucaugcgcuccgacgcccccaucggcaagugcaacuccgagugcaucacccccaacggcuccauccccaacgacaagcccuuccagaacgucaaccgcaucaccuacggcgccugcccccgcuacgucaagcagaacacccucaagcucgccaccggcaugcgcaacguccccgagcgccagacccgcggcaucuucggcgccaucgccggcuucaucgagaacggcugggagggcaugauggacggcugguacggcuuccgccaccagaacuccgagggcaccggccaggccgccgaccucaaguccacccaggccgccaucaaccagaucaacggcaagcucaaccgccucaucggcaagaccaacgagaaguuccaccagaucgagaaggaguucuccgaggucgagggccgcauccaggaccucgagaaguacgucgaggacaccaagaucgaccucugguccuacaacgccgagcuccucgucgcccucgagaaccagcacaccaucgaccucaccgacuccgagaugaacaagcucuucgagcgcaccaagaagcagcuccgcgagaacgccgaggacaugggcaacggcugcuucaagaucuaccacaagugcgacaacgccugcaucggcuccauccgcaacggcaccuacgaccacgacgucuaccgcgacgaggcccucaacaaccgcuuccagaucaagggcgucgagcucaaguccggcuacaaggacuggauccucuggaucuccuucgccaucuccugcuuccuccucugcgucgcccuccucggcuucaucaugugggccugccagaagggcaacauccgcugcaacaucugcaucuga

SEQ ID NO: 98803 - RNA, 1698 nt, Artificial Sequence
  derived and/or modified CDS sequence (opt2) from hemagglutinin__InfluenzaA__ACR15238
augaaggucaagcuccucguccuccucugcaccuucaccgccaccuacgccgacaccaucugcaucggcuaccacgccaacaacuccaccgacaccgucgacaccguccucgagaagaacgucaccgucacccacuccgucaaccuccucgagaacucccacaacggcaagcucugccuccucaagggcaucgccccccuccagcucggcaacugcuccgucgccggcuggauccucggcaaccccgagugcgagcuccucaucuccaaggaguccugguccuacaucgucgagaagcccaaccccgagaacggcaccugcuaccccggccacuucgccgacuacgaggagcuccgcgagcagcucuccuccgucuccuccuucgagcgcuucgagaucuuccccaaggaguccuccuggcccaaccacaccgucaccggcgucuccgccuccugcucccacaacggcgaguccuccuucuaccgcaaccuccucuggcucaccggcaagaacggccucuaccccaaccucuccaaguccuacgccaacaacaaggagaaggagguccucguccucuggggcguccaccacccccccaacaucggcguccagaaggcccucuaccacaccgagaacgccuacgucuccgucgucuccucccacuacucccgcaaguucacccccgagaucgccaagcgccccaagguccgcgaccaggagggccgcaucaacuacuacuggacccuccucgagcccggcgacaccaucaucuucgaggccaacggcaaccucaucgccccccgcuacgccuucgcccucucccgcggcuucggcuccggcaucaucaacuccaacgcccccauggacaagugcgacgccaagugccagaccccccagggcgccaucaacuccucccuccccuuccagaacguccaccccgucaccaucggcgagugccccaaguacguccgcuccgccaagcuccgcauggucaccggccuccgcaacauccccuccauccagucccgcggccucuucggcgccaucgccggcuucaucgagggcggcuggaccggcauggucgacggcugguacggcuaccagcaccagaacgagcagggcuccggcuacgccgccgaccagaaguccacccagaacgccaucaacggcaucaccaacaaggucaacuccgucaucgagaagaugaacacccaguucaccgccgucggcaaggaguucaacaagcucgagcgccgcauggagaaccucaacaagaaggucgacgacggcuucaucgacaucuggaccuacaacgccgagcuccucguccuccucgagaacgagcgcacccucgacuuccacgacuccaacgucaagaaccucuacgagaaggucaagucccagcucaagaacaacgccaaggagaucggcaacggcugcuucgaguucuaccacaagugcaacgacgagugcauggaguccgucaagaacggcaccuacgacuaccccaaguacuccgaggaguccaagcucaaccgcgagaagaucgacggcgucaagcucgaguccaugggcgucuaccagauccucgccaucuacuccaccgucgccuccucccucguccuccucgucucccucggcgccaucuccuucuggaugugcuccaacggcucccuccagugccgcaucugcaucuga

SEQ ID NO: 98804 - RNA, 1701 nt, Artificial Sequence
  derived and/or modified CDS sequence (opt2) from hemagglutinin__InfluenzaA__ACR15249
augaagaccaucaucgcccucuccuacauccucugccucgucuucgcccagaagcuccccggcaacgacaacuccaccgccacccucugccucggccaccacgccguccccaacggcaccaucgucaagaccaucaccaacgaccagaucgaggucaccaacgccaccgagcucguccaguccuccuccaccggcgagaucugcgacuccccccaccagauccucgacggcgagaacugcacccucaucgacgcccuccucggcgacccccagugcgacggcuuccagaacaagaagugggaccucuucgucgagcgcuccaaggccuacuccaacugcuaccccuacgacguccccgacuacgccucccuccgcucccucgucgccuccuccggcacccucgaguucaacaacgaguccuucaacuggaccggcgucacccagaacggcaccuccuccgccugcauccgccgcuccaacaacuccuucuucucccgccucaacuggcucacccacuccaaguucaaguaccccgcccucaacgucaccaugcccaacaacgagaaguucgacaagcucuacaucuggggcguccaccaccccggcaccgacaacgaccagaucuuccucuacgcccaggccuccggccgcaucaccgucuccaccaagcgcucccagcagaccgucauccccaacaucggcucccgcccccgcguccgcaacauccccucccgcaucuccaucuacuggaccaucgucaagcccggcgacauccuccucaucaacuccaccggcaaccucaucgccccccgcggcuacuucaagauccgcuccggcaaguccuccaucaugcgcuccgacgcccccaucggcaagugcaacuccgagugcaucacccccaacggcuccauccccaacgacaagcccuuccagaacgucaaccgcaucaccuacggcgccugcccccgcuacgucaagcagaacacccucaagcucgccaccggcaugcgcaacguccccgagaagcagacccgcggcaucuucggcgccaucgccggcuucaucgagaacggcugggagggcauggucgacggcugguacggcuuccgccaccagaacuccgagggcaucggccaggccgccgaccucaaguccacccaggccgccaucgaccagaucaacggcaagcucaaccgccucaucggcaagaccaacgagaaguuccaccagaucgagaaggaguucuccgaggucgagggccgcauccaggaccucgagaaguacgucgaggacaccaagaucgaccucugguccuacaacgccgagcuccucgucgcccucgagaaccagcacaccaucgaccucaccgacuccgagaugaacaagcucuucgagaagaccaagaagcagcuccgcgagaacgccgaggacaugggcaacggcugcuucaagaucuaccacaagugcgacaacgccugcaucggcuccauccgcaacggcaccuacgaccacgacgucuaccgcgacgaggcccucaacaaccgcuuccagaucaagggcgucgagcucaaguccggcuacaaggacuggauccucuggaucuccuucgccaucuccugcuuccuccucugcgucgcccuccucggcuucaucaugugggccugccagaagggcaacauccgcugcaacaucugcaucuga

SEQ ID NO: 98805 - RNA, 1701 nt, Artificial Sequence
  derived and/or modified CDS sequence (opt2) from hemagglutinin__InfluenzaA__ACR15282
augaagaccaucaucgcccucuccuacauccucugccucgucuucgcccagaagcuccccggcaacgacaacuccaccgccacccucugccucggccaccacgccguccccaacggcaccaucgucaagaccaucaugaacgaccagaucgaggucaccaacgccaccgagcucguccaguccuccuccaccggcgagaucugcgacuccccccaccagauccucgacggcgagaacugcacccucaucgacgcccuccucggcgacccccagugcgacggcuuccagaacaagaagugggaccucuucgucgagcgcuccaaggccuacuccaacugcuaccccuacgacguccccgacuacgccucccuccgcucccucgucgccuccuccggcacccucgaguucaacaacgaguccuucaacuggaccggcgucacccagaacggcaccuccuccgccugcauccgccgcuccaacaacuccuucuucucccgccucaacuggcucacccacuccaaguucaaguaccccgcccucaacgucaccaugcccaacaacgagaaguucgacaagcucuacaucuggggcguccaccaccccggcaccgacaacgaccagaucuuccucuacgcccaggccuccggccgcaucaccgucuccaccaagcgcucccagcagaccgucauccccaacaucggcucccgcccccgcguccgcaacauccccucccgcaucuccaucuacuggaccaucgucaagcccggcgacauccuccucaucaacuccaccggcaaccucaucgccccccgcggcuacuucaagauccgcuccggcaaguccuccaucaugcgcuccgacgcccccaucggcaagugcaacuccgagugcaucacccccaacggcuccauccccaacgacaagcccuuccagaacgucaaccgcaucaccuacggcgccugcccccgcuacgucaagcagaacacccucaagcucgccaccggcaugcgcaacguccccgagaagcagacccgcggcaucuucggcgccaucgccggcuucaucgagaacggcugggagggcauggucgacggcugguacggcuuccgccaccagaacuccgagggcaucggccaggccgccgaccucaaguccacccaggccgccaucgaccagaucaacggcaagcucaaccgccucaucggcaagaccaacgagaaguuccaccagaucgagaaggaguucuccgaggucgagggccgcauccaggaccucgagaaguacgucgaggacaccaagaucgaccucugguccuacaacgccgagcuccucgucgcccucgagaaccagcacaccaucgaccucaccgacuccgagaugaacaagcucuucgagaagaccaagaagcagcuccgcgagaacgccgaggacaugggcaacggcugcuucaagaucuaccacaagugcgacaacgccugcaucggcuccauccgcaacggcaccuacgaccacgacgucuaccgcgacgaggcccucaacaaccgcuuccagaucaagggcgucgagcucaaguccggcuacaaggacuggauccucuggaucuccuucgccaucuccugcuuccuccucugcgucgcccuccucggcuucaucaugugggccugccagaagggcaacauccgcugcaacaucugcaucuga

SEQ ID NO: 98806 - RNA, 1701 nt, Artificial Sequence
  derived and/or modified CDS sequence (opt2) from hemagglutinin__InfluenzaA__ACR15293
augaagaccaucaucgcccucuccuacauccucugccucgucuucgcccagaagcuccccggcaacgacaacuccaccgccacccucugccucggccaccacgccguccccaacggcaccaucgucaagaccaucaccaacgaccagaucgaggucaccaacgccaccgagcucguccaguccuccuccaccggcggcaucugcgacuccccccaccagauccucgacggcgagaacugcacccucaucgacgcccuccucggcgacccccagugcgacggcuuccagaacaagaagugggaccucuucgucgagcgcuccaaggccuacuccaacugcuaccccuacgacguccccgacuacgccucccuccgcucccucaucgccuccuccggcacccucgaguucaacaacgagaacuucaacuggaccggcgucacccagaacggcaccuccuccgccugcaagcgcggcuccgacaacuccuucuucucccgccucaacuggcucacccaccucaaguucaaguaccccgcccucaaggucaccaugcccaacaacgagaaguucgacaagcucuacaucuggggcguccaccaccccggcaccgacaacgaccagaucuuccucuacgcccaggccuccggccgcaucaccgucuccaccaagcgcucccagcagaccgucauccccaacaucggcucccgcccccgcguccgcaacauccccucccgcaucuccaucuacuggaccaucgucaagcccggcgacauccuccucaucaacuccaccggcaaccucaucgccccccgcggcuacuucaagauccgcuccggcaaguccuccaucaugcgcuccgacgcccccaucggcaagugcaacuccgagugcaucacccccaacggcuccauccccaacgacaagcccuuccagaacgucaaccgcaucaccuacggcgccugcccccgcuacgucaagcagaacacccucaagcucgccaccggcaugcgcaacguccccgagaagcagacccgcggcaucuucggcgccaucgccggcuucaucgagaacggcugggagggcauggucgacggcugguacggcuuccgccaccagaacuccgagggcaucggccaggccgccgaccucaaguccacccaggccgccaucaaccagaucaacggcaagcucaaccgccucaucggcaagaccaacgagaaguuccaccagaucgagaaggaguucuccgaggucgagggccgcauccaggaccucgagaaguacgucgaggacaccaagaucgaccucugguccuacaacgccgagcuccucgucgcccucgagaaccagcacaccaucgaccucaccgacuccgagaugaacaagcucuucgagcgcaccaagaagcagcuccgcgagaacgccgaggacaugggcaacggcugcuucaagaucuaccacaagugcgacaacgccugcaucggcuccauccgcaacggcaccuacgaccacgacgucuaccgcgacgaggcccucaacaaccgcuuccagaucaagggcgucgagcucaaguccggcuacaaggacuggauccucuggaucuccuucgccaucuccugcuuccuccucugcgucgcccuccucggcuucaucaugugggccugccagaagggcaacauccgcugcaacaucugcaucuga

SEQ ID NO: 98807 - RNA, 1698 nt, Artificial Sequence
  derived and/or modified CDS sequence (opt2) from hemagglutinin__InfluenzaA__ACR15304
augaaggccaagcuccucguccuccucugcaccuucaccgccaccuacgccgacaccaucugcaucggcuaccacgccaacaacuccaccgacaccgucgacaccguccucgagaagaacgucaccgucacccacuccgucaaccuccucgaggacucccacaacggcaagcucugccuccucaagggcaucgccccccuccagcucggcaacugcuccgucgccggcuggauccucggcaaccccgagugcgagcuccucaucuccaaggaguccugguccuacaucgucgagacccccaaccccgagaacggcaccugcuaccccggcuacuucgccgacuacgaggagcuccgcgagcagcucuccuccgucuccuccuucgagcgcuucgagaucuuccccaaggaguccuccuggcccaaccacaccgucaccggcgucuccgccuccugcucccacaacggcaaguccuccuucuaccgcaaccuccucuggcucaccggcaagaacggccucuaccccaaccucuccaaguccuacgccaacaacaaggagaaggagguccucguccucuggggcguccaccacccccccaacaccggcaaccagcgcgcccucuaccacaccgagaacgccuacgucuccgucgucuccucccacuacucccgccgcuucacccccgagaucgccaagcgccccaagguccgcgaccaggagggccgcaucaacuacuacuggacccuccucgagcccggcgacaccaucaucuucgaggccaacggcaaccucaucgcccccugguacgccuucgcccucucccgcggcuucggcuccggcaucaucaccuccaacgcccccauggacgagugcgacgccaagugccagaccccccagggcgccaucaacuccucccuccccuuccagaacguccaccccgucaccaucggcgagugccccaaguacguccgcuccgccaagcuccgcauggucaccggccuccgcaacauccccuccauccagucccgcggccucuucggcgccaucgccggcuucaucgagggcggcuggaccggcauggucgacggcugguacggcuaccaccaccagaacgagcagggcuccggcuacgccgccgaccagaaguccacccagaacgccaucaacggcaucaccaacaaggucaacuccgucaucgagaagaugaacacccaguucaccgccgucggcaaggaguucaaccgccucgagcgccgcauggagaaccucaacaagaaggucgacgacggcuuccucgacaucuggaccuacaacgccgagcuccucguccuccucgagaacgagcgcacccucgacuuccacgacuccaacgucaagaaccucuacgagaaggucaagucccagcucaagaacaacgccaaggagaucggcaacggcugcuucgaguucuaccacaagugcaacaacgagugcauggaguccgucaagaacggcaccuacgacuaccccaaguacuccgaggaguccaagcucaaccgcgagaagaucgacggcgucaagcucgaguccaugggcgucuaccagauccucgccaucuacuccaccgucgccuccucccucguccuccucgucucccucggcgccaucuccuucuggaugugcuccaacggcucccuccagugccgcaucugcaucuga

SEQ ID NO: 98808 - RNA, 1698 nt, Artificial Sequence
  derived and/or modified CDS sequence (opt2) from hemagglutinin__InfluenzaA__ACR15315
augaaggccaagcuccucguccuccucugcaccuucaccgccaccuacgccgacaccaucugcaucggcuaccacgccaacaacuccaccgacaccgucgacaccguccucgagaagaacgucaccgucacccacuccgucaaccuccucgaggacucccacaacggcaagcucugccuccucaagggcaucgccccccuccagcucggcaacugcuccgucgccggcuggauccucggcaaccccgagugcgagcuccucaucuccaaggaguccugguccuacaucgucgagacccccaaccccgagaacggcaccugcuaccccggcuacuucgccgacuacgaggagcuccgcgagcagcucuccuccgucuccuccuucgagcgcuucgagaucuuccccaagggcuccuccuggcccaaccacaccgucaccggcgucuccgccuccugcucccacaacggcaaguccuccuucuaccgcaaccuccucuggcucaccggcaagaacggccucuaccccaaccucuccauguccuacgucaacaacaaggagaaggagguccucguccucuggggcguccaccacccccccaacauccgcgaccagcgcgcccucuaccacaccgagaacgccuacgucuccgucgucuccucccacuacucccgccgcuucacccccgagaucgccaagcgccccaagguccgcgaccaggagggccgcaucaacuacuacuggacccuccucgagcccggcgacaccaucaucuucgaggccaacggcaaccucaucgcccccugguacgccuucgcccucucccgcggcuucggcuccggcaucaucaccuccaacgcccccaugggcgagugcgacgccaagugccagaccccccagggcgccaucaacuccucccuccccuuccagaacguccaccccgucaccaucggcgagugccccaaguacguccgcuccgccaagcuccgcauggucaccggccuccgcaacauccccuccauccagucccgcggccucuucggcgccaucgccggcuucaucgagggcggcuggaccggcauggucgacggcugguacggcuaccaccaccagaacgagcagggcuccggcuacgccgccgaccagaaguccacccagaacgccaucaacggcaucaccaacaaggucaacuccgucaucgagaagaugaacacccaguucaccgccgucggcaaggaguucaacaagcucgagcgccgcauggagaaccucaacaagaaggucgacgacggcuuccucgacaucuggaccuacaacgccgagcuccucguccuccucgagaacgagcgcacccucgacuuccacgacuccaacgucaagaaccucuacgagaaggucaagucccagcucaagaacaacgccaaggagaucggcaacggcugcuucgaguucuaccacaagugcaacaacgagugcauggaguccgucaagaacggcaccuacgacuaccccaaguacuccgaggaguccaagcucaaccgcgagaagaucgacggcgucaagcucgaguccaugggcgucuaccagauccucgccaucuacuccaccgucgccuccucccucguccuccucgucucccucggcgccaucuccuucuggaugugcuccaacggcucccuccagugccgcaucugcaucuga

SEQ ID NO: 98809 - RNA, 1698 nt, Artificial Sequence
  derived and/or modified CDS sequence (opt2) from hemagglutinin__InfluenzaA__ACR15326
augaaggccaagcuccucguccuccucugcaccuucaccgccaccuacgccgacaccaucugcaucggcuaccacgccaacaacuccaccgacaccgucgacaccguccucgagaagaacgucaccgucacccacuccgucaaccuccucgaggacucccacaacggcaagcucugccuccucaagggcaucgccccccuccagcucggcaacugcuccgucgccggcuggauccucggcaaccccgagugcgagcuccucaucuccaaggaguccugguccuacaucgucgagacccccaaccccgagaacggcaccugcuaccccggcuacuucgccgacuacgaggagcuccgcgagcagcucuccuccgucuccuccuucgagcgcuucgagaucuuccccaagggcuccuccuggcccaaccacaccgucaccggcgucuccgccuccugcucccacaacggcaaguccuccuucuaccgcaaccuccucuggcucaccggcaagaacggccucuaccccaaccucuccauguccuacgucaacaacaaggagaaggagguccucguccucuggggcguccaccacccccccaacaucggcaaccagcgcgcccucuaccacaccgagaacgccuacgucuccgucgucuccucccacuacucccgccgcuucacccccgagaucgccaagcgccccaagguccgcgaccaggagggccgcaucaacuacuacuggacccuccucgagcccggcgacaccaucaucuucgaggccaacggcaaccucaucgcccccugguacgccuucgcccucucccgcggcuucggcuccggcaucaucaccuccaacgcccccaugggcgagugcgacgagaagugccagaccccccagggcgccaucaacuccucccuccccuuccagaacguccaccccgucaccaucggcgagugccccaaguacguccgcuccgccaagcuccgcauggucaccggccuccgcaacauccccuccauccagucccgcggccucuucggcgccaucgccggcuucaucgagggcggcuggaccggcauggucgacggcugguacggcuaccaccaccagaacgagcagggcuccggcuacgccgccgaccagaaguccacccagaacgccaucaacggcaucaccaacaaggucaacuccgucaucgagaagaugaacacccaguucaccgccgucggcaaggaguucaacaagcucgagcgccgcauggagaaccucaacaagaaggucgacgacggcuuccucgacaucuggaccuacaacgccgagcuccucguccuccucgagaacgagcgcacccucgacuuccacgacuccaacgucaagaaccucuacgagaaggucaagucccagcucaagaacaacgccaaggagaucggcaacggcugcuucgaguucuaccacaagugcaacaacgagugcauggaguccgucaagaacggcaccuacgacuaccccaaguacuccgaggaguccaagcucaaccgcgagaagaucgacggcgucaagcucgaguccaugggcgucuaccagauccucgccaucuacuccaccgucgccuccucccucguccuccucgucucccucggcgccaucuccuucuggaugugcuccaacggcucccuccagugccgcaucugcaucuga

SEQ ID NO: 98810 - RNA, 1698 nt, Artificial Sequence
  derived and/or modified CDS sequence (opt2) from hemagglutinin__InfluenzaA__ACR15359
augaaggucaagcuccucguccuccucugcaccuucaccgccaccuacgccgacaccaucugcaucggcuaccacgccaacaacuccaccgacaccgucgacaccguccucgagaagaacgucaccgucacccacuccgucaaccuccucgagaacucccacaacggcaagcucugccuccucaagggcaucgccccccuccagcucggcaacugcuccgucgccggcuggauccucggcaaccccgagugcggccuccucaucuccaaggaguccugguccuacaucgucgagaagcccaaccccgagaacggcaccugcuaccccggccacuucgccgacuacgaggagcuccgcgagcagcucuccuccgucuccuccuucgagcgcuucgagaucuuccccaaggaguccuccuggcccaaccacaccgucaccggcgucuccgccuccugcucccacaacggcgaguccuccuucuaccgcaaccuccucuggcucaccggcaagaacggccucuaccccaaccucuccaaguccuacgccaacaacaaggagaaggagguccucguccucuggggcguccaccacccccccaacaucggcgaccagaaggcccucuaccacaccgagaacgccuacgucuccgucgucuccucccacuacucccgcaaguucacccccgagaucgccaagcgccccaagguccgcgaccaggagggccgcaucaacuacuacuggacccuccucgagcccggcgacaccaucaucuucgaggccaacggcaaccucaucgccccccgcuacgccuucgcccucucccgcggcuucggcuccggcaucaucaacuccaacgcccccauggacaagugcgacgccaagugccagaccccccagggcgccaucaacuccucccuccccuuccagaacguccaccccgucaccaucggcgagugccccaaguacguccgcuccgccaagcuccgcauggucaccggccuccgcaacauccccuccauccagucccgcggccucuucggcgccaucgccggcuucaucgagggcggcuggaccggcauggucgacggcugguacggcuaccaccaccagaacgagcagggcuccggcuacgccgccgaccagaaguccacccagaacgccaucaacggcaucaccaacaaggucaacuccgucaucgagaagaugaacacccaguucaccgccgucggcaaggaguucaacaagcucgagcgccgcauggagaaccucaacaagaaggucgacgacggcuucaucgacaucuggaccuacaacgccgagcuccucguccuccucgagaacgagcgcacccucgacuuccacgacuccaacgucaagaaccucuacgagaaggucaagucccagcucaagaacaacgccaaggagaucggcaacggcugcuucgaguucuaccacaagugcaacgacgagugcauggaguccgucaagaacggcaccuacgacuaccccaaguacuccgaggaguccaagcucaaccgcgagaagaucgacggcgucaagcucgaguccaugggcgucuaccagauccucgccaucuacuccaccgucgccuccucccucguccuccucgucucccucggcgccaucuccuucuggaugugcuccaacggcucccuccagugccgcaucugcaucuga

SEQ ID NO: 98811 - RNA, 1698 nt, Artificial Sequence
  derived and/or modified CDS sequence (opt2) from hemagglutinin__InfluenzaA__ACR15370
augaaggucaagcuccucguccuccucugcacccucaccgccaccuacgccgacaccaucugcaucggcuaccacgccaacaacuccaccgacaccgucgacaccguccucgagaagaacgucaccgucacccacuccgucaaccuccucgagaacucccacaacggcaagcucugccuccucaagggcaucgccccccuccagcucggcaacugcuccgucgccggcuggauccucggcaaccccgagugcgagcuccucaucuccaaggaguccugguccuacaucgucgagaagcccaaccccgagaacggcaccugcuaccccggccacuucgccgacuacgaggagcuccgcgagcagcucuccuccgucuccuccuucgagcgcuucgagaucuuccccaaggaguccuccuggcccaaccacaccgucaccggcgucuccgccuccugcucccacaacggcgaguccuccuucuaccgcaaccuccucuggcucaccggcaagaacggccucuaccccaaccucuccaaguccuacgccaacaacaaggagaaggagguccucguccucuggggcguccaccacccccccaacaucggcgaccagaaggcccucuaccacaccgagaacgccuacgucuccgucgucuccucccacuacucccgcaaguucacccccgagaucgccaagcgccccaagguccgcgaccaggagggccgcaucaacuacuacuggacccuccucgagcccggcgacaccaucaucuucgaggccaacggcaaccucaucgccccccgcuacgccuucgcccucucccgcggcuucggcuccggcaucaucaacuccaacgcccccauggacaagugcgacgccaagugccagaccccccagggcgccaucaacuccucccuccccuuccagaacguccaccccgucaccaucggcgagugccccaaguacguccgcuccgccaagcuccgcauggucaccggccuccgcaacauccccuccauccagucccgcggccucuucggcgccaucgccggcuucaucgagggcggcuggaccggcauggucgacggcugguacggcuaccaccaccagaacgagcagggcuccggcuacgccgccgaccagaaguccacccagaacgccaucaacggcaucaccaacaaggucaacuccgucaucgagaagaugaacacccaguucaccgccgucggcaaggaguucaacaagcucgagcgccgcauggagaaccucaacaagaaggucgacgacggcuucaucgacaucuggaccuacaacgccgagcuccucguccuccucgagaacgagcgcacccucgacuuccacgacuccaacgucaagaaccucuacgagaaggucaagucccagcucaagaacaacgccaaggagaucggcaacggcugcuucgaguucuaccacaagugcaacgacgagugcauggaguccgucaagaacggcaccuacgacuaccccaaguacuccgaggaguccaagcucaaccgcgagaagaucgacggcgucaagcucgaguccaugggcgucuaccagauccucgccaucuacuccaccgucgccuccucccucauccuccucgucucccucggcgccaucuccuucuggaugugcuccaacggcucccuccagugccgcaucugcaucuga

SEQ ID NO: 98812 - RNA, 1701 nt, Artificial Sequence; identical to SEQ ID NO: 98337
  derived and/or modified CDS sequence (opt2) from hemagglutinin__InfluenzaA__ACR15381

SEQ ID NO: 98813 - RNA, 1701 nt, Artificial Sequence; identical to SEQ ID NO: 98344
  derived and/or modified CDS sequence (opt2) from hemagglutinin__InfluenzaA__ACR15392

SEQ ID NO: 98814 - RNA, 1701 nt, Artificial Sequence; identical to SEQ ID NO: 97964
  derived and/or modified CDS sequence (opt2) from hemagglutinin__InfluenzaA__ACR15403

SEQ ID NO: 98815 - RNA, 1701 nt, Artificial Sequence; identical to SEQ ID NO: 97964
  derived and/or modified CDS sequence (opt2) from hemagglutinin__InfluenzaA__ACR15414

SEQ ID NO: 98816 - RNA, 1698 nt, Artificial Sequence; identical to SEQ ID NO: 98810
  derived and/or modified CDS sequence (opt2) from hemagglutinin__InfluenzaA__ACR15425

SEQ ID NO: 98817 - RNA, 1698 nt, Artificial Sequence
  derived and/or modified CDS sequence (opt2) from hemagglutinin__InfluenzaA__ACR15436
augaaggucaagcuccucguccuccucugcaccuucaccgccaccuacgccgacaccaucugcaucggcuaccacgccaacaacuccaccgacaccgucgacaccguccucgagaagaacgucaccgucacccacuccgucaaccuccucgagaacucccacaacggcaagcucugccuccucaagggcaucgccccccuccagcucggcaacugcuccgucgccggcuggauccucggcaaccccgagugcgagcuccucaucuccaaggaguccugguccuacaucgucgagaagcccaaccccgagaacggcaccugcuaccccggccacuucgccgacuacgaggagcuccgcgagcagcucuccuccgucuccuccuucgagcgcuucgagaucuuccccaaggaguccuccuggcccaaccacaccgucaccggcgucuccgccuccugcucccacaacggcgaguccuccuucuaccgcaaccuccucuggcucaccggcaagaacggccucuaccccaaccucuccaaguccuacgccaacaacaagggcaaggagguccucguccucuggggcguccaccacccccccaacaucggcgaccagaacacccucuaccacaccgagaacgccuacgucuccgucgucuccucccacuacucccgcaaguucacccccgagaucgccaagcgccccaagguccgcgaccaggagggccgcaucaacuacuacuggacccuccucgagcccggcgacaccaucaucuucgaggccaacggcaaccucaucgccccccgcuacgccuucgcccucucccgcggcuucggcuccggcaucaucaacuccaacgcccccauggacaagugcgacgccaagugccagaccccccagggcgccaucaacuccucccuccccuuccagaacguccaccccgucaccaucggcgagugccccaaguacguccgcuccgccaagcuccgcauggucaccggccuccgcaacauccccuccauccagucccgcggccucuucggcgccaucgccggcuucaucgagggcggcuggaccggcauggucgacggcugguacggcuaccaccaccagaacgagcagggcuccggcuacgccgccgaccagaaguccacccagaacgccaucaacggcaucaccaacaaggucaacuccgucaucgagaagaugaacacccaguucaccgccgucggcaaggaguucaacaagcucgagcgccgcauggagaaccucaacaagaaggucgacgacggcuucaucgacaucuggaccuacaacgccgagcuccucguccuccucgagaacgagcgcacccucgacuuccacgacuccaacgucaagaaccucuacgagaaggucaagucccagcucaagaacaacgccaaggagaucggcaacggcugcuucgaguucuaccacaagugcaacgacgagugcauggaguccgucaagaacggcaccuacgacuaccccaaguacuccgaggaguccaagcucaaccgcgagaagaucgacggcgucaagcucgaguccaugggcgucuaccagauccucgccaucuacuccaccgucgccuccucccucguccuccucgucucccucggcgccaucuccuucuggaugugcuccaacggcucccuccagugccgcaucugcaucuga

SEQ ID NO: 98818 - RNA, 1698 nt, Artificial Sequence
  derived and/or modified CDS sequence (opt2) from hemagglutinin__InfluenzaA__ACR15458
augaaggucaagcuccucguccuccucugcaccuucaccgccaccuacgccgacaccaucugcaucggcuaccacgccaacaacuccaccgacaccgucgacaccguccucgagaagaacgucaccgucacccacuccgucaaccuccucgagaacucccacaacggcaagcucugccuccucaagggcaucgccccccuccagcucggcaacugcuccgucgccggcuggauccucggcaaccccgagugcgagcuccucaucuccaaggaguccugguccuacaucgucgagaaccccaaccccgagaacggcaccugcuaccccggccacuucgccgacuacgaggagcuccgcgagcagcucuccuccgucuccuccuucgagcgcuucgagaucuuccccaaggaguccuccuggcccaaccacaccgucaccggcgucuccgccuccugcucccacaacggcgaguccuccuucuaccgcaaccuccucuggcucaccggcaagaacggccucuaccccaaccucuccaaguccuacgccaacaacaaggagaaggagguccucguccucuggggcguccaccacccccccaacaucggcgaccagaaggcccucuaccacaccgagaacgccuacgucuccgucgucuccucccacuacucccgcaaguucacccccgagaucgccaagcgccccaagguccgcgaccaggagggccgcaucaacuacuacuggacccuccucgagcccggcgacaccaucaucuucgaggccaacggcaaccucaucgccccccgcuacgccuucgcccucucccgcggcuucggcuccggcaucaucaacuccaacgcccccauggacaagugcgacgccaagugccagaccccccagggcgccaucaacuccucccuccccuuccagaacguccaccccgucaccaucggcgagugccccaaguacguccgcuccgccaagcuccgcauggucaccggccuccgcaacauccccuccauccagucccgcggccucuucggcgccaucgccggcuucaucgagggcggcuggaccggcauggucgacggcugguacggcuaccaccaccagaacgagcagggcuccggcuacgccgccgaccagaaguccacccagaacgccaucaacggcaucaccaacaaggucaacuccgucaucgagaagaugaacacccaguucaccgccgucggcaaggaguucaacaagcucgagcgccgcauggagaaccucaacaagaaggucgacgacggcuucaucgacaucuggaccuacaacgccgagcuccucguccuccucgagaacgagcgcacccucgacuuccacgacuccaacgucaagaaccucuacgagaaggucaagucccagcucaagaacaacgccaaggagaucggcaacggcugcuucgaguucuaccacaagugcaacgacgagugcauggaguccgucaagaacggcaccuacgacuaccccaaguacuccgaggaguccaagcucaaccgcgagaagaucgacggcgucaagcucgaguccaugggcgucuaccagauccucgccaucuacuccaccgucgccuccucccucguccuccucgucucccucggcgccaucuccuucuggaugugcuccaacggcucccuccagugccgcaucugcaucuga

SEQ ID NO: 98819 - RNA, 1698 nt, Artificial Sequence
  derived and/or modified CDS sequence (opt2) from hemagglutinin__InfluenzaA__ACR15469
augaaggucaagcuccucguccuccucugcaccuucaccgccaccuacgccgacaccaucugcaucggcuaccacgccaacaacuccaccgacaccgucgacaccguccucgagaagaacgucaccgucacccacuccgucaaccuccucgaggacucccacaacggcaagcucugccuccucaagggcaucgccccccuccagcucggcaacugcuccgucgccggcuggauccucggcaaccccgagugcgagcuccucaucuccaaggaguccugguccuacaucgucgagaagcccgaccccgagaacggcaccugcuaccccggccacuucgccgacuacgaggagcuccgcgagcagcucuccuccgucuccuccuucgagcgcuucgagaucuuccccaaggaguccuccuggcccaaccacaccgucaccggcgucuccgccuccugcucccacaacggcgaguccuccuucuaccgcaaccuccucuggcucaccggcaagaacggccucuaccccaaccucuccaaguccuacgccaacaacaaggagaaggagguccucguccucuggggcguccaccacccccccaacaucggcgaccagaacacccucuaccacaccgagaacgccuacgucuccgucgucuccucccacuacucccgcaaguucacccccgagaucgccaagcgccccaagguccgcgaccaggagggccgcaucaacuacuacuggacccuccucgagcccggcgacaccaucaucuucgaggccaacggcaaccucaucgccccccgcuacgccuucgcccucucccgcggcuucggcuccggcaucaucaacuccaacgcccccauggacaagugcgacgccaagugccagaccccccagggcgccaucaacuccucccuccccuuccagaacguccaccccgucaccaucggcgagugccccaaguacguccgcuccgccaagcuccgcauggucaccggccuccgcaacauccccuccauccagucccgcggccucuucggcgccaucgccggcuucaucgagggcggcuggaccggcauggucgacggcugguacggcuaccaccaccagaacgagcagggcuccggcuacgccgccgaccagaaguccacccagaacgccaucaacggcaucaccaacaaggucaacuccgucaucgagaagaugaacacccaguucaccgccgucggcaaggaguucaacaagcucgagcgccgcauggagaaccucaacaagaaggucgacgacggcuucaucgacaucuggaccuacaacgccgagcuccucguccuccucgagaacgagcgcacccucgacuuccacgacuccaacgucaagaaccucuacgagaaggucaagucccagcucaagaacaacgccaaggagaucggcaacggcugcuucgaguucuaccacaagugcaacgacgagugcauggaguccgucaagaacggcaccuacgacuaccccaaguacuccgaggaguccaagcucaaccgcgagaagaucgacggcgucaagcucgaguccaugggcgucuaccagauccucgccaucuacuccaccgucgccuccucccucguccuccucgucucccucggcgccaucuccuucuggaugugcuccaacggcucccuccagugccgcaucugcaucuga

SEQ ID NO: 98820 - RNA, 1698 nt, Artificial Sequence; identical to SEQ ID NO: 98817
  derived and/or modified CDS sequence (opt2) from hemagglutinin__InfluenzaA__ACR15480

SEQ ID NO: 98821 - RNA, 1698 nt, Artificial Sequence
  derived and/or modified CDS sequence (opt2) from hemagglutinin__InfluenzaA__ACR15491
augaaggucaagcuccucguccuccucugcaccuucaccgccaccuacgccgacaccaucugcaucggcuaccacgccaacaacuccaccgacaccgucgacaccguccucgagaagaacgucaccgucacccacuccgucaaccuccucgagaacucccacaacggcaagcucugccuccucaagggcaucgccccccuccagcucggcaacugcuccgucgccggcuggauccucggcaaccccgagugcgagcuccucaucuccaaggaguccugguccuacaucgucgagaagcccaaccccgagaacggcaccugcuaccccggccacuucgccgacuacgaggagcuccgcgagcagcucuccuccgucuccuccuucgagcgcuucgagaucuuccccaaggaguccuccuggcccaaccacaccgucaccggcgucuccgccuccugcucccacaacggcgaguccuccuucuaccgcaaccuccucuggcucaccggccgcaacggccucuaccccaaccucuccaaguccuacgccaacaacaaggagaaggagguccucguccucuggggcguccaccacccccccaacaucgucgaccagaagacccucuaccgcaccgagaacgccuacgucuccgucgucuccucccacuacucccgcaaguucacccccgagaucgccaagcgccccaagguccgcgaccaggagggccgcaucaacuacuacuggacccuccucgagcccggcgacaccaucaucuucgaggccaacggcaaccucaucgccccccgcuacgccuucgcccucucccgcggcuucggcuccggcaucaucaacuccaacgcccccauggacaagugcgacgccaagugccagaccccccagggcgccaucaacuccucccuccccuuccagaacguccaccccgucaccaucggcgagugccccaaguacguccgcuccgccaagcuccgcauggucaccggccuccgcaacauccccuccauccagucccgcggccucuucggcgccaucgccggcuucaucgagggcggcuggaccggcauggucgacggcugguacggcuaccaccaccagaacgagcagggcuccggcuacgccgccgaccagaaguccacccagaacgccaucaacggcaucaccaacaaggucaacuccgucaucgagaagaugaacacccaguucaccgccgucggcaaggaguucaacaagcucgagcgccgcauggagaaccucaacaagaaggucgacgacggcuucaucgacaucuggaccuacaacgccgagcuccucguccuccucgagaacgagcgcacccucgacuuccacgacuccaacgucaagaaccucuacgagaaggucaagucccagcucaagaacaacgccaaggagaucggcaacggcugcuucgaguucuaccacaagugcaacgacgagugcauggaguccgucaagaacggcaccuacgacuaccccaaguacuccgaggaguccaagcucaaccgcgagaagaucgacggcaucaagcucgaguccaugggcgucuaccagauccucgccaucuacuccaccgucgccuccucccucguccuccucgucucccucggcgccaucuccuucuggaugugcuccaacggcucccuccagugccgcaucugcaucuga

SEQ ID NO: 98822 - RNA, 1698 nt, Artificial Sequence
  derived and/or modified CDS sequence (opt2) from hemagglutinin__InfluenzaA__ACR15502
augaaggucaagcuccucguccuccucugcaccuucaccgccaccuacgccgacaccaucugcaucggcuaccacgccaacaacgccaccgacaccgucgacaccguccucgagaagaacgucaccgucacccacuccgucaaccuccucgagaacucccacaacggcaagcucugccuccucaagggcaucgccccccuccagcucggcaacugcuccgucgccggcuggauccucggcaaccccgagugcgagcuccucaucuccaaggaguccugguccuacaucgucgagaagcccaaccccgagaacggcaccugcuaccccggccacuucgccgacuacgaggagcuccgcgagcagcucuccuccgucuccuccuucgagcgcuucgagaucuuccccaaggaguccuccuggcccaaccacaccgucaccggcgucuccgccuccugcucccacaacggcgaguccuccuucuaccgcaaccuccucuggcucaccggcaagaacggccucuaccccaaccucuccaaguccuacgccaacaacaagggcaaggagguccucguccucuggggcguccaccacccccccaacaucggcgaccagaacacccucuaccacaccgagaacgccuacgucuccgucgucuccucccacuacucccgcaaguucacccccgagaucgccaagcgccccaagguccgcgaccaggagggccgcaucaacuacuacuggacccuccucgagcccggcgacaccaucaucuucgaggccaacggcaaccucaucgccccccgcuacgccuucgcccucucccgcggcuucggcuccggcaucaucaacuccaacgcccccauggacaagugcgacgccaagugccagaccccccagggcgccaucaacuccucccuccccuuccagaacguccaccccgucaccaucggcgagugccccaaguacguccgcuccgccaagcuccgcauggucaccggccuccgcaacauccccuccauccagucccgcggccucuucggcgccaucgccggcuucaucgagggcggcuggaccggcauggucgacggcugguacggcuaccaccaccagaacgagcagggcuccggcuacgccgccgaccagaaguccacccagaacgccaucaacggcaucaccaacaaggucaacuccgucaucgagaagaugaacacccaguucaccgccgucggcaaggaguucaacaagcucgagcgccgcauggagaaccucaacaagaaggucgacgacggcuucaucgacaucuggaccuacaacgccgagcuccucguccuccucgagaacgagcgcacccucgacuuccacgacuccaacgucaagaaccucuacgagaaggucaagucccagcucaagaacaacgccaaggagaucggcaacggcugcuucgaguucuaccacaagugcaacgacgagugcauggaguccgucaagaacggcaccuacgacuaccccaaguacuccgaggaguccaagcucaaccgcgagaagaucgacggcgucaagcucgaguccaugggcgucuaccagauccucgccaucuacuccaccgucgccuccucccucguccuccucgucucccucggcgccaucuccuucuggaugugcuccaacggcucccuccagugccgcaucugcaucuga

SEQ ID NO: 98823 - RNA, 1698 nt, Artificial Sequence; identical to SEQ ID NO: 98679
  derived and/or modified CDS sequence (opt2) from hemagglutinin__InfluenzaA__ACR15513

SEQ ID NO: 98824 - RNA, 1701 nt, Artificial Sequence
  derived and/or modified CDS sequence (opt2) from hemagglutinin__InfluenzaA__ACR15524
augaagaccaucaucgcccucuccuacauccucugccucgucuucgcccagaagcuccccggcaacgacaacuccaccgccacccucugccucggccaccacgccguccccaacggcaccaucgucaagaccaucaccaacgaccagaucgaggucaccaacgccaccgagcucguccaguccuccuccaccggcggcaucugcgacuccccccaccagauccucgacggcgagaacugcacccucaucgacgcccuccucggcgacccccagugcgacggcuuccagaacaagaagugggaccucuucgucgagcgcuccaaggccuacuccaacugcuaccccuacgacguccccgacuacgccucccuccgcucccucgucgccuccuccggcacccucgaguucaacaacgaguccuucaacuggaccggcgucacccagaacggcaccuccuccgccugcaagcgccgcuccaacaaguccuucuucucccgccucaacuggcucacccaccucaaguucaaguaccccgcccucaacgucaccaugcccaacaacgagaaguucgacaagcucuacaucuggggcguccaccaccccggcaccgacaacgaccagaucucccucuacgcccaggccuccggccgcaucaccgucuccaccaagcgcucccagcagaccgucauccccaacaucggcucccgcccccgcguccgcgacguccccucccgcaucuccaucuacuggaccaucgucaaguccggcgacauccuccucaucaacuccaccggcaaccucaucgccccccgcggcuacuucaagauccgcuccggcaaguccuccaucaugcgcuccgacgcccccaucggcaagugcaacuccgagugcaucacccccaacggcuccauccccaacgacaagcccuuccagaacgucaaccgcaucaccuacggcgccugcccccgcuacgucaagcagaacacccucaagcucgccaccggcaugcgcaacguccccgagaagcagacccgcggcaucuucggcgccaucgccggcuucaucgagaacggcugggagggcauggucgacggcugguacggcuuccgccaccagaacuccgagggcaccggccaggccgccgaccucaaguccacccaggccgccaucaaccagaucaacggcaagcucaaccgccucaucggcaagaccaacgagaaguuccaccagaucgagaaggaguucuccgaggucgagggccgcauccaggaccucgagaaguacgucgaggacaccaagaucgaccucugguccuacaacgccgagcuccucgucgcccucgagaaccagcacaccaucgaccucaccgacuccgagaugaacaagcucuucgagcgcaccaagaagcagcuccgcgagaacgccgaggacaugggcaacggcugcuucaagaucuaccacaagugcgacaacgccugcaucggcuccauccgcaacggcaccuacgaccacgacgucuaccgcgacgaggcccucaacaaccgcuuccagaucaagggcgucgagcucaaguccggcuacaaggacuggauccucuggaucuccuucgccaucuccugcuuccuccucugcgucguccuccucggcuucaucaugugggccugccagaagggcaacauccgcugcaacaucugcaucuga

SEQ ID NO: 98825 - RNA, 1701 nt, Artificial Sequence; identical to SEQ ID NO: 98633
  derived and/or modified CDS sequence (opt2) from hemagglutinin__InfluenzaA__ACR15535

SEQ ID NO: 98826 - RNA, 1701 nt, Artificial Sequence
  derived and/or modified CDS sequence (opt2) from hemagglutinin__InfluenzaA__ACR15546
augaagaccaucaucgcccucuccuacauccucugccucgucuucgcccagaagcuccccggcaacgacaacuccaccgccacccucugccucggccaccacgccguccccaacggcaccaucgucaagaccaucaccaacgaccagaucgaggucaccaacgccaccgagcucguccaguccuccuccaccggcggcaucugcgacuccccccaccacauccucgacggcgagaacugcacccucaucgacgcccuccucggcgacccccagugcgacggcuuccagaacaagaagugggaccucuucgucgagcgcuccaaggccuacuccaacugcuaccccuacgacguccccgacuacgccucccuccgcucccucgucgccuccuccggcacccucgaguucaacaacgaguccuucaacuggaccggcgucacccagaacggcaccuccuccgccugcaagcgccgcuccaacaacuccuucuucucccgccucaacuggcucacccaccucaaguucaaguaccccgcccucaacgucaccaugcccaacaacgagaaguucgacaagcucuacaucuggggcguccaccaccccggcaccgacaacgaccagaucucccucuacgcccaggccuccggccgcaucaccgucuccaccaagcgcucccagcagaccgucauccccaacaucggcucccgcccccgcguccgcgacaucuccucccgcaucuccaucuacuggaccaucgucaagcccggcgacauccuccucaucaacuccaccggcaaccucaucgccccccgcggcuacuucaagauccgcuccggcaaguccuccaucaugcgcuccgacgcccccaucggcaagugcaacuccgagugcaucacccccaacggcuccauccccaacgacaagcccuuccagaacgucaaccgcaucaccuacggcgccugcccccgcuacgucaagcagaacacccucaagcucgccaccggcaugcgcaacguccccgagacccagacccgcggcaucuucggcgccaucgccggcuucaucgagaacggcugggagggcauggucgacggcugguacggcuuccgccaccagaacuccgagggcaccggccaggccgccgaccucaaguccacccaggccgccaucaaccagaucaacggcaagcucaaccgccucaucggcaagaccaacgagaaguuccaccagaucgagaaggaguucuccgaggucgagggccgcauccaggaccucgagaaguacgucgaggacaccaagaucgaccucugguccuacaacgccgagcuccucgucgcccucgagaaccagcacaccaucgaccucaccgacuccgagaugaacaagcucuucgagcgcaccaagaagcagcuccgcgagaacgccgaggacaugggcaacggcugcuucaagaucuaccacaagugcgacaacgccugcaucggcuccauccgcaacgagaccuacgaccacgacgucuaccgcgacgaggcccucaacaaccgcuuccagaucaagggcgucgagcucaaguccggcuacaaggacuggauccucuggaucuccuucgccaucuccugcuuccuccucugcgucgcccuccucggcuucaucaugugggccugccagaagggcaacauccgcugcaacaucugcaucuga

SEQ ID NO: 98827 - RNA, 1701 nt, Artificial Sequence; identical to SEQ ID NO: 98408
  derived and/or modified CDS sequence (opt2) from hemagglutinin__InfluenzaA__ACR15557

SEQ ID NO: 98828 - RNA, 1701 nt, Artificial Sequence; identical to SEQ ID NO: 96666
  derived and/or modified CDS sequence (opt2) from hemagglutinin__InfluenzaA__ACR15568

SEQ ID NO: 98829 - RNA, 1701 nt, Artificial Sequence
  derived and/or modified CDS sequence (opt2) from hemagglutinin__InfluenzaA__ACR15579
augaagaccaucaucgcccucuccuacauccucugccucgucuucgcccagaagcuccccggcaacgacaacuccaccgccacccucugccucggccaccacgccguccccaacggcaccaucgucaagaccaucaccaacgaccagaucgaggucaccaacgccaccgagcucguccaguccuccuccaccggcggcaucugcgacuccccccaccagauccucgacggcgagaacugcacccucaucgacgcccuccucggcgacccccagugcgacggcuuccagaacaagaagugggaccucuucgucgagcgcuccaaggccuacuccaacugcuaccccuacgacguccccgacuacgccucccuccgcucccucgucgccuccuccggcacccucgaguucaacaacgaguccuucaacuggaccggcgucacccagaacggcaccuccuccgccugcaagcgccgcuccaacaacuccuucuucucccgccucaacuggcucacccaccucaaguucaaguaccccgcccucaacgucaccaugcccaacaacgagaaguucgacaagcucuacaucuggggcguccaccaccccggcaccgacaacgaccagaucuuccucuacgcccaggccuccggccgcaucaccgucuccaccaagcgcucccagcagaccgucauccccaacaucggcucccgcccccgcguccgcaacauccccucccgcaucuccaucuacuggaccaucgucaaccccggcgacauccuccucaucaacuccaccggcaaccucaucgccccccgcggcuacuucaagauccgcuccggcaaguccuccaucaugcgcuccgacgcccccaucggcaagugcaacuccgagugcaucacccccaacggcuccauccccaacgacaagcccuuccagaacgucaaccgcaucaccuacggcgccugcccccgcuacgucaagcagaacacccucaagcucgccaccggcaugcgcaacguccccgagaagcagacccgcggcaucuucggcgccaucgccggcuucaucgagaacggcugggagggcauggucgacggcugguacggcuuccgccaccagaacuccgagggcaucggccaggccgccgaccucaaguccacccaggccgccaucaaccagaucaacggcaagcucaaccgccucaucggcaagaccaacgagaaguuccaccagaucgagaaggaguucuccgaggucgagggccgcauccaggaccucgagaaguacgucgaggacaccaagaucgaccucugguccuacaacgccgagcuccucgucgcccucgagaaccagcacaccaucgaccucaccgacuccgagaugaacaagcucuucgagcgcaccaagaagcagcuccgcgagaacgccgaggacaugggcaacggcugcuucaagaucuaccacaagugcgacaacgccugcaucggcuccauccgcaacggcaccuacgaccacgacgucuaccgcgacgaggcccucaacaaccgcuuccagaucaagggcgucgagcucaaguccggcuacaaggacuggauccucuggaucuccuucgccaucuccugcuuccuccucugcgucgcccuccucggcuucaucaugugggccugccagaagggcaacauccgcugcaacaucugcaucuga

SEQ ID NO: 98830 - RNA, 1701 nt, Artificial Sequence
  derived and/or modified CDS sequence (opt2) from hemagglutinin__InfluenzaA__ACR15590
augaagaccaucaucgcccucuccuacauccucugccucgucuucacccagaagcuccccggcaacgacaacuccaccgccacccucugccucggccaccacgccguccccaacggcaccaucgucaagaccaucaccaacgaccagaucgaggucaccaacgccaccgagcucguccaguccuccuccaccggcggcaucugcgacuccccccaccagauccucgacggcgagaacugcacccucaucgacgcccuccucggcgacccccagugcgacggcuuccagaacaagaagugggaccucuucgucgagcgcuccaaggccuacuccaacugcuaccccuacgacguccccgacuacgccucccuccgcucccucgucgccuccuccggcacccucgaguucaacaacgaguccuucaacuggaccggcgucacccagaacggcaccuccuccgccugcaagcgccgcuccaacaacuccuucuucucccgccucaacuggcucacccaccucaaguucaaguaccccgcccucaacgucaccaugcccaacaacgagaaguucgacaagcucuacaucuggggcguccaccaccccggcaccgacaacgaccagaucuuccucuacgcccaggccuccggccgcaucaccgucuccaccaagcgcucccagcagaccgucauccccaacaucggcucccgcccccgcguccgcaacauccccucccgcaucuccaucuacuggaccaucgucaagcccggcgacauccuccucaucaacuccaccggcaaccucaucgccccccgcggcuacuucaagauccgcuccggcaaguccuccaucaugcgcuccgacgcccccaucggcaagugcaacuccgagugcaucacccccaacggcuccauccccaacgacaagcccuuccagaacgucaaccgcaucaccuacggcgccugcccccgcuacgucaagcagaacacccucaagcucgccaccggcaugcgcaacguccccgagaagcagacccgcggcaucuucggcgccaucgccggcuucaucgagaacggcugggagggcauggucgacggcugguacggcuuccgccaccagaacuccgagggcaucggccaggccgccgaccucaaguccacccaggccgccaucaaccagaucaacggcaagcucaaccgccucaucggcaagaccaacgagaaguuccaccagaucgagaaggaguucuccgaggucgagggccgcauccaggaccucgagaaguacgucgaggacaccaagaucgaccucugguccuacaacgccgagcuccucgucgcccucgagaaccagcacaccaucgaccucaccgacuccgagaugaacaagcucuucgagcgcaccaagaagcagcuccgcgagaacgccgaggacaugggcaacggcugcuucaagaucuaccacaagugcgacaacgccugcaucggcuccauccgcaacggcaccuacgaccacgacgucuaccgcgacgaggcccucaacaaccgcuuccagaucaagggcgucgagcucaaguccggcuacaaggacuggauccucuggaucuccuucgccaucuccugcuuccuccucugcgucgcccuccucggcuucaucaugugggccugccagaagggcaacauccgcugcaacaucugcaucuga

SEQ ID NO: 98831 - RNA, 1701 nt, Artificial Sequence; identical to SEQ ID NO: 96666
  derived and/or modified CDS sequence (opt2) from hemagglutinin__InfluenzaA__ACR15601

SEQ ID NO: 98832 - RNA, 1701 nt, Artificial Sequence
  derived and/or modified CDS sequence (opt2) from hemagglutinin__InfluenzaA__ACR18920
augaaggccauccucgucguccuccucuacaccuucgccaccgccaacgccgacacccucugcaucggcuaccacgccaacaacuccaccgacaccgucgacaccguccucgagaagaacgucaccgucacccacuccgucaaccuccucgaggacaagcacaacggcaagcucugcaagcuccgcggcgucgccccccuccaccucggcaagugcaacaucgccggcuggauccucggcaaccccgagugcgagucccucuccaccgccuccuccugguccuacaucgucgagaccuccuccuccgacaacggcaccugcuaccccggcgacuucaucgacuacgaggagcuccgcgagcagcucuccuccgucuccuccuucgagcgcuucgagaucuuccccaagaccuccuccuggcccaaccacgacuccaacaagggcgucaccgccgccugcccccacgccggcgccaaguccuucuacaagaaccucaucuggcucgucaagaagggcaacuccuaccccaagcucuccaaguccuacaucaacgacaagggcaaggagguccucguccucuggggcauccaccaccccuccaccuccgccgaccagcagucccucuaccagaacgccgacgccuacgucuucgucggcuccucccgcuacuccaagaaguucaagcccgagaucgccauccgccccaagguccgcgaccaggagggccgcaugaacuacuacuggacccucgucgagcccggcgacaagaucaccuucgaggccaccggcaaccucgucgucccccgcuacgccuucgccauggagcgcaacgccggcuccggcaucaucaucuccgacacccccguccacgacugcaacaccaccugccagacccccaagggcgccaucaacaccucccuccccuuccagaacauccaccccaucaccaucggcaagugccccaaguacgucaaguccaccaagcuccgccucgccaccggccuccgcaacguccccuccauccagucccgcggccucuucggcgccaucgccggcuucaucgagggcggcuggaccggcauggucgacggcugguacggcuaccaccaccagaacgagcagggcuccggcuacgccgccgaccucaaguccacccagaacgccaucgacgagaucaccaacaaggucaacuccgucaucgagaagaugaacauccaguucaccgccgucggcaaggaguucaaccaccucgagaagcgcaucgagaaccucaacaagaaggucgacgacggcuuccucgacaucuggaccuacaacgccgagcuccucguccuccucgagaacgagcgcacccucgacuaccacgacuccaacgucaagaaccucuacgagaagguccgcucccagcucaagaacaacgccaaggagaucggcaacggcugcuucgaguucuaccacaagugcgacaacaccugcauggaguccgucaagaacggcaccuacgacuaccccaaguacuccgaggaggccaagcucaaccgcgaggagaucgacggcgucaagcucgaguccacccgcaucuaccagauccucgccaucuacuccaccgucgccuccucccucguccucgucgucucccucggcgccaucuccuucuggaugugcuccaacggcucccuccagugccgcaucugcaucuga

SEQ ID NO: 98833 - RNA, 1701 nt, Artificial Sequence; identical to SEQ ID NO: 98705
  derived and/or modified CDS sequence (opt2) from hemagglutinin__InfluenzaA__ACR18975

SEQ ID NO: 98834 - RNA, 1701 nt, Artificial Sequence; identical to SEQ ID NO: 98692
  derived and/or modified CDS sequence (opt2) from hemagglutinin__InfluenzaA__ACR18976

SEQ ID NO: 98835 - RNA, 1701 nt, Artificial Sequence; identical to SEQ ID NO: 98692
  derived and/or modified CDS sequence (opt2) from hemagglutinin__InfluenzaA__ACR18977

SEQ ID NO: 98836 - RNA, 1701 nt, Artificial Sequence; identical to SEQ ID NO: 98705
  derived and/or modified CDS sequence (opt2) from hemagglutinin__InfluenzaA__ACR18978

SEQ ID NO: 98837 - RNA, 1701 nt, Artificial Sequence; identical to SEQ ID NO: 98692
  derived and/or modified CDS sequence (opt2) from hemagglutinin__InfluenzaA__ACR18979

SEQ ID NO: 98838 - RNA, 1701 nt, Artificial Sequence; identical to SEQ ID NO: 98758
  derived and/or modified CDS sequence (opt2) from hemagglutinin__InfluenzaA__ACR18981

SEQ ID NO: 98839 - RNA, 1701 nt, Artificial Sequence; identical to SEQ ID NO: 98692
  derived and/or modified CDS sequence (opt2) from hemagglutinin__InfluenzaA__ACR18982

SEQ ID NO: 98840 - RNA, 1701 nt, Artificial Sequence; identical to SEQ ID NO: 98705
  derived and/or modified CDS sequence (opt2) from hemagglutinin__InfluenzaA__ACR18988

SEQ ID NO: 98841 - RNA, 1701 nt, Artificial Sequence
  derived and/or modified CDS sequence (opt2) from hemagglutinin__InfluenzaA__ACR18991
augaaggccauccucgucguccuccucuacaccuucgccaccgccaacgccgacacccucugcaucggcuaccacgccaacaacuccaccgacaccgucgacaccguccucgagaagaacgucaccgucacccacuccgucaaccuccucgaggacaagcacaaccgcaagcucugcaagcuccgcggcgucgccccccuccaccucggcaagugcaacaucgccggcuggauccucggcaaccccgagugcgagucccucuccaccgccuccuccugguccuacaucgucgagaccuccuccuccgacaacggcaccugcuaccccggcgacuucaucgacuacgaggagcuccgcgagcagcucuccuccgucuccuccuucgagcgcuucgagaucuuccccaagaccuccuccuggcccaaccacgacuccaacaagggcgucaccgccgccugcccccacgccggcgccaaguccuucuacaagaaccucaucuggcucgucaagaagggcaacuccuaccccaagcucuccaaguccuacaucaacgacaagggcaaggagguccucguccucuggggcauccaccaccccuccaccuccgccgaccagcagucccucuaccagaacgccgacgccuacgucuucgucggcuccucccgcuacuccaagaaguucaagcccgagaucgccauccgccccaagguccgcgaccaggagggccgcaugaacuacuacuggacccucgucgagcccggcgacaagaucaccuucgaggccaccggcaaccucgucgucccccgcuacgccuucgccauggagcgcaacgccggcuccggcaucaucaucuccgacacccccguccacgacugcaacaccaccugccagacccccaagggcgccaucaacaccucccuccccuuccagaacauccaccccaucaccaucggcaagugccccaaguacgucaaguccaccaagcuccgccucgccaccggccuccgcaacguccccuccauccagucccgcggccucuucggcgccaucgccggcuucaucgagggcggcuggaccggcauggucgacggcugguacggcuaccaccaccagaacgagcagggcuccggcuacgccgccgaccucaaguccacccagaacgccaucgacgagaucaccaacaaggucaacuccgucaucgagaagaugaacacccaguucaccgccgucggcaaggaguucaaccaccucgagaagcgcaucgagaaccucaacaagaaggucgacgacggcuuccucgacaucuggaccuacaacgccgagcuccucguccuccucgagaacgagcgcacccucgacuaccacgacuccaacgucaagaaccucuacgagaagguccgcucccagcucaagaacaacgccaaggagaucggcaacggcugcuucgaguucuaccacaagugcgacaacaccugcauggaguccgucaagaacggcaccuacgacuaccccaaguacuccgaggaggccaagcucaaccgcgaggagaucgacggcgucaagcucgaguccacccgcaucuaccagauccucgccaucuacuccaccgucgccuccucccucguccucgucgucucccucggcgccaucuccuucuggaugugcuccaacggcucccuccagugccgcaucugcaucuga

SEQ ID NO: 98842 - RNA, 1701 nt, Artificial Sequence; identical to SEQ ID NO: 98692
  derived and/or modified CDS sequence (opt2) from hemagglutinin__InfluenzaA__ACR18993

SEQ ID NO: 98843 - RNA, 1701 nt, Artificial Sequence; identical to SEQ ID NO: 98731
  derived and/or modified CDS sequence (opt2) from hemagglutinin__InfluenzaA__ACR18995

SEQ ID NO: 98844 - RNA, 1701 nt, Artificial Sequence; identical to SEQ ID NO: 98753
  derived and/or modified CDS sequence (opt2) from hemagglutinin__InfluenzaA__ACR23302

SEQ ID NO: 98845 - RNA, 1701 nt, Artificial Sequence; identical to SEQ ID NO: 98705
  derived and/or modified CDS sequence (opt2) from hemagglutinin__InfluenzaA__ACR33743

SEQ ID NO: 98846 - RNA, 1701 nt, Artificial Sequence; identical to SEQ ID NO: 98692
  derived and/or modified CDS sequence (opt2) from hemagglutinin__InfluenzaA__ACR38821

SEQ ID NO: 98847 - RNA, 1701 nt, Artificial Sequence; identical to SEQ ID NO: 98692
  derived and/or modified CDS sequence (opt2) from hemagglutinin__InfluenzaA__ACR38822

SEQ ID NO: 98848 - RNA, 1701 nt, Artificial Sequence; identical to SEQ ID NO: 98692
  derived and/or modified CDS sequence (opt2) from hemagglutinin__InfluenzaA__ACR38823

SEQ ID NO: 98849 - RNA, 1701 nt, Artificial Sequence; identical to SEQ ID NO: 98758
  derived and/or modified CDS sequence (opt2) from hemagglutinin__InfluenzaA__ACR38824

SEQ ID NO: 98850 - RNA, 1701 nt, Artificial Sequence
  derived and/or modified CDS sequence (opt2) from hemagglutinin__InfluenzaA__ACR38825
augaaggccauccucgucguccuccucuacaccuucgccaccgccaacgccgacacccucugcaucggcuaccacgccaacaacuccaccgacaccgucgacaccguccucgagaagaacgucaccgucacccacuccgucaaccuccucgaggacaagcacaacggcaagcucugcaagcuccgcggcgucgccccccuccaccucggcaagugcaacaucgccggcuggauccucggcaaccccgagugcgagucccucuccaccgccuccuccugguccuacaucgucgagaccuccuccuccgacaacggcaccugcuaccccggcgacuucaucgacuacgaggagcuccgcgagcagcucuccuccgucuccuccuucgagcgcuucgagaucuuccccaagaccuccuccuggcccaaccacgacuccaacaagggcgucaccgccgccugcccccacgccggcgccaaguccuucuacaagaaccucaucuggcucgucaagaagggcaacuccuaccccaagcucuccaaguccuacaucaacgacaagggcaaggagguccucguccucuggggcauccaccaccccuccaccuccgccgaccagcagucccucuaccagaacgccgacgccuacgucuucgucggcaccucccgcuacuccaagaaguucaagcccgagaucgccauccgccccaagguccgcggccaggagggccgcaugaacuacuacuggacccucgucgagcccggcgacaagaucaccuucgaggccaccggcaaccucgucgucccccgcuacgccuucgccauggagcgcaacgccggcuccggcaucaucaucuccgacacccccguccacgacugcaacaccaccugccagacccccaagggcgccaucaacaccucccuccccuuccagaacauccaccccaucaccaucggcaagugccccaaguacgucaaguccaccaagcuccgccucgccaccggccuccgcaacguccccuccauccagucccgcggccucuucggcgccaucgccggcuucaucgagggcggcuggaccggcauggucgacggcugguacggcuaccaccaccagaacgagcagggcuccggcuacgccgccgaccucaaguccacccagaacgccaucgacgagaucaccaacaaggucaacuccgucaucgagaagaugaacacccaguucaccgccgucggcaaggaguucaaccaccucgagaagcgcaucgagaaccucaacaagaagaucgacgacggcuuccucgacaucuggaccuacaacgccgagcuccucguccuccucgagaacgagcgcacccucgacuaccacgacuccaacgucaagaaccucuacgagaagguccgcucccagcucaagaacaacgccaaggagaucggcaacggcugcuucgaguucuaccacaagugcgacaacaccugcauggaguccgucaagaacggcaccuacgacuaccccaaguacuccgaggaggccaagcucaaccgcgaggagaucgacggcgucaagcucgaguccacccgcaucuaccagauccucgccaucuacuccaccgucgccuccucccucguccucgucgucucccucggcgccaucuccuucuggaugugcuccaacggcucccuccagugccgcaucugcaucuga

SEQ ID NO: 98851 - RNA, 1701 nt, Artificial Sequence; identical to SEQ ID NO: 98705
  derived and/or modified CDS sequence (opt2) from hemagglutinin__InfluenzaA__ACR38826

SEQ ID NO: 98852 - RNA, 1701 nt, Artificial Sequence; identical to SEQ ID NO: 98692
  derived and/or modified CDS sequence (opt2) from hemagglutinin__InfluenzaA__ACR38827

SEQ ID NO: 98853 - RNA, 1701 nt, Artificial Sequence; identical to SEQ ID NO: 98758
  derived and/or modified CDS sequence (opt2) from hemagglutinin__InfluenzaA__ACR38828

SEQ ID NO: 98854 - RNA, 1701 nt, Artificial Sequence; identical to SEQ ID NO: 98692
  derived and/or modified CDS sequence (opt2) from hemagglutinin__InfluenzaA__ACR38829

SEQ ID NO: 98855 - RNA, 1701 nt, Artificial Sequence; identical to SEQ ID NO: 98731
  derived and/or modified CDS sequence (opt2) from hemagglutinin__InfluenzaA__ACR38830

SEQ ID NO: 98856 - RNA, 1701 nt, Artificial Sequence; identical to SEQ ID NO: 98705
  derived and/or modified CDS sequence (opt2) from hemagglutinin__InfluenzaA__ACR39354

SEQ ID NO: 98857 - RNA, 1701 nt, Artificial Sequence; identical to SEQ ID NO: 98705
  derived and/or modified CDS sequence (opt2) from hemagglutinin__InfluenzaA__ACR39393

SEQ ID NO: 98858 - RNA, 1701 nt, Artificial Sequence; identical to SEQ ID NO: 98705
  derived and/or modified CDS sequence (opt2) from hemagglutinin__InfluenzaA__ACR39403

SEQ ID NO: 98859 - RNA, 1701 nt, Artificial Sequence; identical to SEQ ID NO: 98705
  derived and/or modified CDS sequence (opt2) from hemagglutinin__InfluenzaA__ACR39413

SEQ ID NO: 98860 - RNA, 1701 nt, Artificial Sequence; identical to SEQ ID NO: 98705
  derived and/or modified CDS sequence (opt2) from hemagglutinin__InfluenzaA__ACR39423

SEQ ID NO: 98861 - RNA, 1701 nt, Artificial Sequence; identical to SEQ ID NO: 98705
  derived and/or modified CDS sequence (opt2) from hemagglutinin__InfluenzaA__ACR39433

SEQ ID NO: 98862 - RNA, 1701 nt, Artificial Sequence; identical to SEQ ID NO: 98705
  derived and/or modified CDS sequence (opt2) from hemagglutinin__InfluenzaA__ACR39443

SEQ ID NO: 98863 - RNA, 1701 nt, Artificial Sequence
  derived and/or modified CDS sequence (opt2) from hemagglutinin__InfluenzaA__ACR39453
auggaggccauccucgucguccuccucuacaccuucgccaccgccaacgccgacacccucugcaucggcuaccacgccaacaacuccaccgacaccgucgacaccguccucgagaagaacgucaccgucacccacuccgucaaccuccucgaggacaagcacaacggcaagcucugcaagcuccgcggcgucgccccccuccaccucggcaagugcaacaucgccggcuggauccucggcaaccccgagugcgagucccucuccaccgccuccuccugguccuacaucgucgagaccuccuccuccgacaacggcaccugcuaccccggcgacuucaucgacuacgaggagcuccgcgagcagcucuccuccgucuccuccuucgagcgcuucgagaucuuccccaagaccuccuccuggcccaaccacgacuccaacaagggcgucaccgccgccugcccccacgccggcgccaaguccuucuacaagaaccucaucuggcucgucaagaagggcaacuccuaccccaagcucuccaaguccuacaucaacgacaagggcaaggagguccucguccucuggggcauccaccaccccuccaccuccgccgaccagcagucccucuaccagaacgccgacgccuacgucuucgucggcaccucccgcuacuccaagaaguucaagcccgagaucgccauccgccccaagguccgcgaccaggagggccgcaugaacuacuacuggacccucgucgagcccggcgacaagaucaccuucgaggccaccggcaaccucgucgucccccgcuacgccuucgccauggagcgcaacgccggcuccggcaucaucaucuccgacacccccguccacgacugcaacaccaccugccagacccccaagggcgccaucaacaccucccuccccuuccagaacauccaccccaucaccaucggcaagugccccaaguacgucaaguccaccaagcuccgccucgccaccggccuccgcaacguccccuccauccagucccgcggccucuucggcgccaucgccggcuucaucgagggcggcuggaccggcauggucgacggcugguacggcuaccaccaccagaacgagcagggcuccggcuacgccgccgaccucaaguccacccagaacgccaucgacgagaucaccaacaaggucaacuccgucaucgagaagaugaacacccaguucaccgccgucggcaaggaguucaaccaccucgagaagcgcaucgagaaccucaacaagaaggucgacgacggcuuccucgacaucuggaccuacaacgccgagcuccucguccuccucgagaacgagcgcacccucgacuaccacgacuccaacgucaagaaccucuacgagaagguccgcucccagcucaagaacaacgccaaggagaucggcaacggcugcuucgaguucuaccacaagugcgacaacaccugcauggaguccgucaagaacggcaccuacgacuaccccaaguacuccgaggaggccaagcucaaccgcgaggagaucgacggcgucaagcucgaguccacccgcaucuaccagauccucgccaucuacuccaccgucgccuccucccucguccucgucgucucccucggcgccaucuccuucuggaugugcuccaacggcucccuccagugccgcaucugcaucuga

SEQ ID NO: 98864 - RNA, 1701 nt, Artificial Sequence; identical to SEQ ID NO: 98705
  derived and/or modified CDS sequence (opt2) from hemagglutinin__InfluenzaA__ACR39463

SEQ ID NO: 98865 - RNA, 1701 nt, Artificial Sequence; identical to SEQ ID NO: 98705
  derived and/or modified CDS sequence (opt2) from hemagglutinin__InfluenzaA__ACR39473

SEQ ID NO: 98866 - RNA, 1701 nt, Artificial Sequence; identical to SEQ ID NO: 98705
  derived and/or modified CDS sequence (opt2) from hemagglutinin__InfluenzaA__ACR39483

SEQ ID NO: 98867 - RNA, 1701 nt, Artificial Sequence; identical to SEQ ID NO: 98705
  derived and/or modified CDS sequence (opt2) from hemagglutinin__InfluenzaA__ACR39493

SEQ ID NO: 98868 - RNA, 1701 nt, Artificial Sequence; identical to SEQ ID NO: 98705
  derived and/or modified CDS sequence (opt2) from hemagglutinin__InfluenzaA__ACR40288

SEQ ID NO: 98869 - RNA, 1701 nt, Artificial Sequence; identical to SEQ ID NO: 98705
  derived and/or modified CDS sequence (opt2) from hemagglutinin__InfluenzaA__ACR40298

SEQ ID NO: 98870 - RNA, 1701 nt, Artificial Sequence
  derived and/or modified CDS sequence (opt2) from hemagglutinin__InfluenzaA__ACR40308
augaaggccauccucgucguccuccucuacaccuucgccaccgccaacgccgacacccucugcaucggcuaccacgccaacaacuccaccgacaccgucgacaccguccucgagaagaacgucaccgucacccacuccgucaaccuccucgaggacaagcacaacggcaagcucugcaagcuccgcggcgucgccccccuccaccucggcaagugcaacaucgccggcuggauccucggcaaccccgagugcgagucccucuccaccgccuccuccugguccuacaucgucgagaccuccuccuccgacaacggcaccugcuaccccggcgacuucaucgacuacgaggagcuccgcgagcagcucuccuccgucuccuccuucgagcgcuucgagaucuuccccaagaccuccuccuggcccaaccacgacuccaacaagggcgucaccgccgccugcccccacgccggcgccaaguccuucuacaagaaccucaucuggcucgucaagaagggcaacuccuaccccaagcucuccaaguccuacaucaacgacaagggcaaggagguccucguccucuggggcauccaccaccccuccaccuccgccgaccagcagucccucuaccagaacgccgacgccuacgucuucgucggcuccucccgcuacuccaagaaguucaagcccgagaucgccauccgccccaagguccgcgaccaggagggccgcaugaacuacuacuggacccucgucgagcccggcgacaagaucaccuucgaggccaccggcaaccucgucgucccccgcuacgccuucgccauggagcgcaacgccggcuccggcaucaucaucuccgacacccccguccacgacugcaacaccaccugccagacccccaagggcgccaucaacaccucccuccccuuccagaacaucuaccccaucaccaucggcaagugccccaaguacgucaaguccaccaagcuccgccucgccaccggccuccgcaacguccccuccauccagucccgcggccucuucggcgccaucgccggcuucaucgagggcggcuggaccggcauggucgacggcugguacggcuaccaccaccagaacgagcagggcuccggcuacgccgccgaccucaaguccacccagaacgccaucgacgagaucaccaacaaggucaacuccgucaucgagaagaugaacacccaguucaccgccgucggcaaggaguucaaccaccucgagaagcgcaucgagaaccucaacaagaaggucgacgacggcuuccucgacaucuggaccuacaacgccgagcuccucguccuccucgagaacgagcgcacccucgacuaccacgacuccaacgucaagaaccucuacgagaagguccgcucccagcucaagaacaacgccaaggagaucggcaacggcugcuucgaguucuaccacaagugcgacaacaccugcauggaguccgucaagaacggcaccuacgacuaccccaaguacuccgaggaggccaagcucaaccgcgaggagaucgacggcgucaagcucgaguccacccgcaucuaccagauccucgccaucuacuccaccgucgccuccucccucguccucgucgucucccucggcgccaucuccuucuggaugugcuccaacggcucccuccagugccgcaucugcaucuga

SEQ ID NO: 98871 - RNA, 1701 nt, Artificial Sequence; identical to SEQ ID NO: 98705
  derived and/or modified CDS sequence (opt2) from hemagglutinin__InfluenzaA__ACR40318

SEQ ID NO: 98872 - RNA, 1701 nt, Artificial Sequence; identical to SEQ ID NO: 98705
  derived and/or modified CDS sequence (opt2) from hemagglutinin__InfluenzaA__ACR40328

SEQ ID NO: 98873 - RNA, 1701 nt, Artificial Sequence; identical to SEQ ID NO: 98705
  derived and/or modified CDS sequence (opt2) from hemagglutinin__InfluenzaA__ACR40338

SEQ ID NO: 98874 - RNA, 1701 nt, Artificial Sequence; identical to SEQ ID NO: 98705
  derived and/or modified CDS sequence (opt2) from hemagglutinin__InfluenzaA__ACR40348

SEQ ID NO: 98875 - RNA, 1701 nt, Artificial Sequence; identical to SEQ ID NO: 98705
  derived and/or modified CDS sequence (opt2) from hemagglutinin__InfluenzaA__ACR40358

SEQ ID NO: 98876 - RNA, 1701 nt, Artificial Sequence; identical to SEQ ID NO: 98705
  derived and/or modified CDS sequence (opt2) from hemagglutinin__InfluenzaA__ACR40378

SEQ ID NO: 98877 - RNA, 1701 nt, Artificial Sequence; identical to SEQ ID NO: 98705
  derived and/or modified CDS sequence (opt2) from hemagglutinin__InfluenzaA__ACR40388

SEQ ID NO: 98878 - RNA, 1701 nt, Artificial Sequence; identical to SEQ ID NO: 98692
  derived and/or modified CDS sequence (opt2) from hemagglutinin__InfluenzaA__ACR46986

SEQ ID NO: 98879 - RNA, 1701 nt, Artificial Sequence; identical to SEQ ID NO: 98692
  derived and/or modified CDS sequence (opt2) from hemagglutinin__InfluenzaA__ACR46988

SEQ ID NO: 98880 - RNA, 1701 nt, Artificial Sequence; identical to SEQ ID NO: 98692
  derived and/or modified CDS sequence (opt2) from hemagglutinin__InfluenzaA__ACR46989

SEQ ID NO: 98881 - RNA, 1701 nt, Artificial Sequence; identical to SEQ ID NO: 98692
  derived and/or modified CDS sequence (opt2) from hemagglutinin__InfluenzaA__ACR46990

SEQ ID NO: 98882 - RNA, 1701 nt, Artificial Sequence; identical to SEQ ID NO: 98692
  derived and/or modified CDS sequence (opt2) from hemagglutinin__InfluenzaA__ACR46992

SEQ ID NO: 98883 - RNA, 1701 nt, Artificial Sequence; identical to SEQ ID NO: 98692
  derived and/or modified CDS sequence (opt2) from hemagglutinin__InfluenzaA__ACR46993

SEQ ID NO: 98884 - RNA, 1701 nt, Artificial Sequence; identical to SEQ ID NO: 98692
  derived and/or modified CDS sequence (opt2) from hemagglutinin__InfluenzaA__ACR46994

SEQ ID NO: 98885 - RNA, 1701 nt, Artificial Sequence
  derived and/or modified CDS sequence (opt2) from hemagglutinin__InfluenzaA__ACR47006
augaaggccauccucgucguccuccucuacaccuucgccaccgccaacgccgacacccucugcaucggcuaccacgccaacaacuccaccgacaccgucgacaccguccucgagaagaacgucaccgucacccacuccgucaacauccucgaggacaagcacaacggcaagcucugcaagcuccgcggcgucgccccccuccaccucggcaagugcaacaucgccggcuggauccucggcaaccccgagugcgagucccucuccaccgccuccuccugguccuacaucgucgagaccuccuccuccgacaacggcaccugcuaccccggcgacuucaucgacuacgaggagcuccgcgagcagcucuccuccgucuccuccuucgagcgcuucgagaucuuccccaagaccuccuccuggcccaaccacgacuccaacaagggcgucaccgccgccugcccccacgccggcgccaaguccuucuacaagaaccucaucuggcucgucaagaagggcaacuccuaccccaagcucuccaaguccuacaucaacgacaagggcaaggagguccucguccucuggggcauccaccaccccuccaccuccgccgaccagcagucccucuaccagaacgccgacgccuacgucuucgucggcuccucccgcuacuccaagaaguucaagcccgagaucgccauccgccccaagguccgcgaccaggagggccgcaugaacuacuacuggacccucgucgagcccggcgacaagaucaccuucgaggccaccggcaaccucgucgucccccgcuacgccuucgccauggagcgcaacgccggcuccggcaucaucaucuccgacacccccguccacgacugcaacaccaccugccagacccccaagggcgccaucaacaccucccuccccuuccagaacauccaccccaucaccaucggcaagugccccaaguacgucaaguccaccaagcuccgccucgccaccggccuccgcaacguccccuccauccagucccgcggccucuucggcgccaucgccggcuucaucgagggcggcuggaccggcauggucgacggcugguacggcuaccaccaccagaacgagcagggcuccggcuacgccgccgaccucaaguccacccagaacgccaucgacgagaucaccaacaaggucaacuccgucaucgagaagaugaacacccaguucaccgccgucggcaaggaguucaaccaccucgagaagcgcaucgagaaccucaacaagaaggucgacgacggcuuccucgacaucuggaccuacaacgccgagcuccucguccuccucgagaacgagcgcacccucgacuaccacgacuccaacgucaagaaccucuacgagaagguccgcucccagcucaagaacaacgccaaggagaucggcaacggcugcuucgaguucuaccacaagugcgacaacaccugcauggaguccgucaagaacggcaccuacgacuaccccaaguacuccgaggaggccaagcucaaccgcgaggagaucgacggcgucaagcucgaguccacccgcaucuaccagauccucgccaucuacuccaccgucgccuccucccucguccucgucgucucccucggcgccaucuccuucuggaugugcuccaacggcucccuccagugccgcaucugcaucuga

SEQ ID NO: 98886 - RNA, 1701 nt, Artificial Sequence; identical to SEQ ID NO: 98705
  derived and/or modified CDS sequence (opt2) from hemagglutinin__InfluenzaA__ACR49281

SEQ ID NO: 98887 - RNA, 1701 nt, Artificial Sequence
  derived and/or modified CDS sequence (opt2) from hemagglutinin__InfluenzaA__ACR49282
augaaggccauccucgucguccuccucuacaccuucgccaccgccaacgccgacacccucugcaucggcuaccacgccaacaacuccaccgacaccgucgacaccguccucgagaagaacgucaccgucacccacuccgucgaccuccucgaggacaagcacaacggcaagcucugcaagcuccgcggcgucgccccccuccaccucggcaagugcaacaucgccggcuggauccucggcaaccccgagugcgagucccucuccaccgccuccuccugguccuacaucgucgagaccuccuccuccgacaacggcaccugcuaccccggcgacuucaucgacuacgaggagcuccgcgagcagcucuccuccgucuccuccuucgagcgcuucgagaucuuccccaagaccuccuccuggcccaaccacgacuccaacaagggcgucaccgccgccugcccccacgccggcgccaaguccuucuacaagaaccucaucuggcucgucaagaagggcaacuccuaccccaagcucuccaaguccuacaucaacgacaagggcaaggagguccucguccucuggggcauccaccaccccuccaccuccgccgaccagcagucccucuaccagaacgccgacgccuacgucuucgucggcuccucccgcuacuccaagaaguucaagcccgagaucgccauccgccccaagguccgcgaccaggagggccgcaugaacuacuacuggacccucgucgagcccggcgacaagaucaccuucgaggccaccggcaaccucgucgucccccgcuacgccuucgccauggagcgcaacgccggcuccggcaucaucaucuccgacacccccguccacgacugcaacaccaccugccagacccccaagggcgccaucaacaccucccuccccuuccagaacauccaccccaucaccaucggcaagugccccaaguacgucaaguccaccaagcuccgccucgccaccggccuccgcaacguccccuccauccagucccgcggccucuucggcgccaucgccggcuucaucgagggcggcuggaccggcauggucgacggcugguacggcuaccaccaccagaacgagcagggcuccggcuacgccgccgaccucaaguccacccagaacgccaucgacgagaucaccaacaaggucaacuccgucaucgagaagaugaacacccaguucaccgccgucggcaaggaguucaaccaccucgagaagcgcaucgagaaccucaacaagaaggucgacgacggcuuccucgacaucuggaccuacaacgccgagcuccucguccuccucgagaacgagcgcacccucgacuaccacgacuccaacgucaagaaccucuacgagaagguccgcucccagcucaagaacaacgccaaggagaucggcaacggcugcuucgaguucuaccacaagugcgacaacaccugcauggaguccgucaagaacggcaccuacgacuaccccaaguacuccgaggaggccaagcucaaccgcgaggagaucgacggcgucaagcucgaguccacccgcaucuaccagauccucgccaucuacuccaccgucgccuccucccucguccucgucgucucccucggcgccaucuccuucuggaugugcuccaacggcucccuccagugccgcaucugcaucuga

SEQ ID NO: 98888 - RNA, 1701 nt, Artificial Sequence; identical to SEQ ID NO: 98692
  derived and/or modified CDS sequence (opt2) from hemagglutinin__InfluenzaA__ACR49283

SEQ ID NO: 98889 - RNA, 1701 nt, Artificial Sequence; identical to SEQ ID NO: 98692
  derived and/or modified CDS sequence (opt2) from hemagglutinin__InfluenzaA__ACR49288

SEQ ID NO: 98890 - RNA, 1701 nt, Artificial Sequence; identical to SEQ ID NO: 98731
  derived and/or modified CDS sequence (opt2) from hemagglutinin__InfluenzaA__ACR49290

SEQ ID NO: 98891 - RNA, 1701 nt, Artificial Sequence; identical to SEQ ID NO: 98705
  derived and/or modified CDS sequence (opt2) from hemagglutinin__InfluenzaA__ACR49291

SEQ ID NO: 98892 - RNA, 1701 nt, Artificial Sequence; identical to SEQ ID NO: 98731
  derived and/or modified CDS sequence (opt2) from hemagglutinin__InfluenzaA__ACR49293

SEQ ID NO: 98893 - RNA, 1701 nt, Artificial Sequence; identical to SEQ ID NO: 98731
  derived and/or modified CDS sequence (opt2) from hemagglutinin__InfluenzaA__ACR49295

SEQ ID NO: 98894 - RNA, 1701 nt, Artificial Sequence; identical to SEQ ID NO: 98745
  derived and/or modified CDS sequence (opt2) from hemagglutinin__InfluenzaA__ACR50993

SEQ ID NO: 98895 - RNA, 1701 nt, Artificial Sequence; identical to SEQ ID NO: 98705
  derived and/or modified CDS sequence (opt2) from hemagglutinin__InfluenzaA__ACR50995

SEQ ID NO: 98896 - RNA, 1701 nt, Artificial Sequence; identical to SEQ ID NO: 98705
  derived and/or modified CDS sequence (opt2) from hemagglutinin__InfluenzaA__ACR51005

SEQ ID NO: 98897 - RNA, 1701 nt, Artificial Sequence; identical to SEQ ID NO: 98705
  derived and/or modified CDS sequence (opt2) from hemagglutinin__InfluenzaA__ACR51015

SEQ ID NO: 98898 - RNA, 1701 nt, Artificial Sequence; identical to SEQ ID NO: 98705
  derived and/or modified CDS sequence (opt2) from hemagglutinin__InfluenzaA__ACR51025

SEQ ID NO: 98899 - RNA, 1701 nt, Artificial Sequence; identical to SEQ ID NO: 98705
  derived and/or modified CDS sequence (opt2) from hemagglutinin__InfluenzaA__ACR51035

SEQ ID NO: 98900 - RNA, 1701 nt, Artificial Sequence; identical to SEQ ID NO: 98705
  derived and/or modified CDS sequence (opt2) from hemagglutinin__InfluenzaA__ACR51045

SEQ ID NO: 98901 - RNA, 1701 nt, Artificial Sequence; identical to SEQ ID NO: 98705
  derived and/or modified CDS sequence (opt2) from hemagglutinin__InfluenzaA__ACR51055

SEQ ID NO: 98902 - RNA, 1701 nt, Artificial Sequence; identical to SEQ ID NO: 98692
  derived and/or modified CDS sequence (opt2) from hemagglutinin__InfluenzaA__ACR51065

SEQ ID NO: 98903 - RNA, 1701 nt, Artificial Sequence; identical to SEQ ID NO: 98705
  derived and/or modified CDS sequence (opt2) from hemagglutinin__InfluenzaA__ACR52368

SEQ ID NO: 98904 - RNA, 1701 nt, Artificial Sequence; identical to SEQ ID NO: 98705
  derived and/or modified CDS sequence (opt2) from hemagglutinin__InfluenzaA__ACR52378

SEQ ID NO: 98905 - RNA, 1701 nt, Artificial Sequence; identical to SEQ ID NO: 98705
  derived and/or modified CDS sequence (opt2) from hemagglutinin__InfluenzaA__ACR52398

SEQ ID NO: 98906 - RNA, 1701 nt, Artificial Sequence; identical to SEQ ID NO: 98705
  derived and/or modified CDS sequence (opt2) from hemagglutinin__InfluenzaA__ACR52408

SEQ ID NO: 98907 - RNA, 1701 nt, Artificial Sequence; identical to SEQ ID NO: 98705
  derived and/or modified CDS sequence (opt2) from hemagglutinin__InfluenzaA__ACR52418

SEQ ID NO: 98908 - RNA, 1701 nt, Artificial Sequence; identical to SEQ ID NO: 98705
  derived and/or modified CDS sequence (opt2) from hemagglutinin__InfluenzaA__ACR52428

SEQ ID NO: 98909 - RNA, 1701 nt, Artificial Sequence; identical to SEQ ID NO: 98705
  derived and/or modified CDS sequence (opt2) from hemagglutinin__InfluenzaA__ACR52438

SEQ ID NO: 98910 - RNA, 1701 nt, Artificial Sequence; identical to SEQ ID NO: 98705
  derived and/or modified CDS sequence (opt2) from hemagglutinin__InfluenzaA__ACR52448

SEQ ID NO: 98911 - RNA, 1701 nt, Artificial Sequence; identical to SEQ ID NO: 98705
  derived and/or modified CDS sequence (opt2) from hemagglutinin__InfluenzaA__ACR52458

SEQ ID NO: 98912 - RNA, 1701 nt, Artificial Sequence; identical to SEQ ID NO: 98705
  derived and/or modified CDS sequence (opt2) from hemagglutinin__InfluenzaA__ACR52468

SEQ ID NO: 98913 - RNA, 1701 nt, Artificial Sequence; identical to SEQ ID NO: 98705
  derived and/or modified CDS sequence (opt2) from hemagglutinin__InfluenzaA__ACR52478

SEQ ID NO: 98914 - RNA, 1701 nt, Artificial Sequence; identical to SEQ ID NO: 98705
  derived and/or modified CDS sequence (opt2) from hemagglutinin__InfluenzaA__ACR52488

SEQ ID NO: 98915 - RNA, 1701 nt, Artificial Sequence; identical to SEQ ID NO: 98705
  derived and/or modified CDS sequence (opt2) from hemagglutinin__InfluenzaA__ACR54045

SEQ ID NO: 98916 - RNA, 1701 nt, Artificial Sequence
  derived and/or modified CDS sequence (opt2) from hemagglutinin__InfluenzaA__ACR54047
augaaggccauccucgucguccuccucuacaccuucgccaccgccaacgccgacacccucugcaucggcuaccacgccaacaacuccaccgacaccgucgacaccguccucgagaagaacgucaccgucacccacuccgucaaccuccucgaggacaagcacaacggcaagcucugcaagcuccgcggcgucgccccccuccaccucggcaagugcaacaucgccggcuggauccucggcaaccccgagugcgagucccucuccaccgccuccuccugguccuacaucgucgagaccuccuccuccgacaacggcaccugcuaccccggcgacuucaucgacuacgaggagcuccgcgagcagcucuccuccgucuccuccuucgagcgcuucgagaucuuccccaagaccuccuccuggcccaaccacgacuccaacaagggcgucaccgccgccugcccccacgccggcgccaaguccuucuacaagaaccucaucuggcucgucaagaagggcaacuccuaccccaagcucuccaaguccuacaucaacgacaagggcaaggagguccucguccucuggggcauccaccaccccuccaccuccgccgaccagcagucccucuaccagaacgccgacgccuacgucuucgucggcuccucccgcuacuccaagaaguucaagcccgagaucgccauccgccccaagguccgcgaccaggagggccgcaugaacuacuacuggacccucgucgagcccggcgacaagaucaccuucgaggccaccggcaaccucgucgucccccgcuacgccuucgccauggagcgcaacgccggcuccggcaucaucaucuccgacacccccguccacgacugcaacaccaccugccagacccccaagggcgccaucaacaccucccuccccuuccagaacauccaccccaucaccaucggcaagugccccaaguacgucaaguccaccaagcuccgccucgccaccggccuccgcaacguccccuccauccagucccgcggccucuucggcgccaucgccggcuucaucgagggcggcuggaccggcauggucgacggcugguacggcuaccaccaccagaacgagcagggcuccggcuacgccgccgaccucaaguccacccagaacgccaucgacgagaucaccaacaaggucaacuccgucaucgagaagaugaacacccaguucaccgccgucggcaaggaguucaaccaccucgagaagcgcaucgagaaccucaacaagaaggucgacgacggcuuccucgacaucuggaccuacaacgccgagcuccucguccuccucgagaacgagcgcacccucgacuaccacgacuccaacgucaagaaccucuacgagaagguccgcucccagcucaagaacaacgccaaggagaucggcaacggcugcuucgaguucuaccacaagugcgacaacaccugcauggaguccgucaagaacggcaccuacgacuaccccaaguacuccgaggaggccaagcucaaccgcgaggagaucgacggcaucaagcucgaguccacccgcaucuaccagauccucgccaucuacuccaccgucgccuccucccucguccucgucgucucccucggcgccaucuccuucuggaugugcuccaacggcucccuccagugccgcaucugcaucuga

SEQ ID NO: 98917 - RNA, 1701 nt, Artificial Sequence
  derived and/or modified CDS sequence (opt2) from hemagglutinin__InfluenzaA__ACR54964
augaaggccauccucgucguccuccucuacaccuucgccaccgccaacgccgacacccucugcaucggcuaccacgccaacaacuccaccgacaccgucgacaccguccucgagaagaacgucaccgucacccacuccgucaaccuccucgaggacaagcacaacggcaagcucugcaagcuccgcggcgucgccccccuccaccucggcaagugcaacaucgccggcuggauccucggcaaccccgagugcgagucccucuccaccgccuccuccugguccuacaucgucgagaccuccuccuccgacaacggcaccugcuaccccggcgacuucaucgacuacgaggagcuccgcgagcagcucuccuccgucuccuccuucgagcgcuucgagaucuuccccaagaccuccuccuggcccaaccacgacuccaacaagggcgucaccgccgccugcccccacgccggcgccaaguccuucuacaagaaccucaucuggcucgucaagaagggcaacuccuaccccaagcucuccaaguccuacaucaacgacaagggcaaggagguccucguccucuggggcauccaccaccccuccaccuccgccgaccagcagucccucuaccagaacgccgacgccuacgucuucgucggcaccucccgcuacuccaagaaguucaagcccgagaucgccauccgccccaagguccgcgaccaggagggccgcaugaacuacuacuggacccucgucgagcccggcgacaagaucaccuucgaggccaccggcaaccucgucgucccccgcuacgccuucgccauggagcgcaacgccggcuccggcaucaucaucuccgacacccccguccacgacugcaacaccaccugccagacccccaagggcgccaucaacaccucccuccccuuccagaacauccaccccaucaccaucggcaagugccccaaguacgucaaguccaccaagcuccgccucgccaccggccuccgcaacguccccuccauccagucccgcggccucuucggcgccaucgccggcuucaucgagggcggcuggaccggcauggucgacggcugguacggcuaccaccaccagaacgagcagggcuccggcuacgccgccgaccucaaguccacccagaacgccaucgacgagaucaccaacaaggucaacuccgucaucgagaagaugaacacccaguucaucgccgucggcaaggaguucaaccaccucgagaagcgcaucgagaaccucaacaagaaggucgacgacggcuuccucgacaucuggaccuacaacgccgagcuccucguccuccucgagaacgagcgcacccucgacuaccacgacuccaacgucaagaaccucuacgagaagguccgcucccagcucaagaacaacgccaaggagaucggcaacggcugcuucgaguucuaccacaagugcgacaacaccugcauggaguccgucaagaacggcaccuacgacuaccccaaguacuccgaggaggccaagcucaaccgcgaggagaucgacggcgucaagcucgaguccacccgcaucuaccagauccucgccaucuacuccaccgucgccuccucccucguccucgucgucucccucggcgccaucuccuucuggaugugcuccaacggcucccuccagugccgcaucugcaucuga

SEQ ID NO: 98918 - RNA, 1701 nt, Artificial Sequence; identical to SEQ ID NO: 98796
  derived and/or modified CDS sequence (opt2) from hemagglutinin__InfluenzaA__ACR54974

SEQ ID NO: 98919 - RNA, 1701 nt, Artificial Sequence; identical to SEQ ID NO: 98705
  derived and/or modified CDS sequence (opt2) from hemagglutinin__InfluenzaA__ACR54984

SEQ ID NO: 98920 - RNA, 1701 nt, Artificial Sequence; identical to SEQ ID NO: 98692
  derived and/or modified CDS sequence (opt2) from hemagglutinin__InfluenzaA__ACR54994

SEQ ID NO: 98921 - RNA, 1701 nt, Artificial Sequence; identical to SEQ ID NO: 98692
  derived and/or modified CDS sequence (opt2) from hemagglutinin__InfluenzaA__ACR55004

SEQ ID NO: 98922 - RNA, 1701 nt, Artificial Sequence; identical to SEQ ID NO: 98885
  derived and/or modified CDS sequence (opt2) from hemagglutinin__InfluenzaA__ACR56380

SEQ ID NO: 98923 - RNA, 1701 nt, Artificial Sequence; identical to SEQ ID NO: 98758
  derived and/or modified CDS sequence (opt2) from hemagglutinin__InfluenzaA__ACR56390

SEQ ID NO: 98924 - RNA, 1701 nt, Artificial Sequence; identical to SEQ ID NO: 98705
  derived and/or modified CDS sequence (opt2) from hemagglutinin__InfluenzaA__ACR56400

SEQ ID NO: 98925 - RNA, 1701 nt, Artificial Sequence; identical to SEQ ID NO: 98705
  derived and/or modified CDS sequence (opt2) from hemagglutinin__InfluenzaA__ACR56410

SEQ ID NO: 98926 - RNA, 1701 nt, Artificial Sequence; identical to SEQ ID NO: 98705
  derived and/or modified CDS sequence (opt2) from hemagglutinin__InfluenzaA__ACR56420

SEQ ID NO: 98927 - RNA, 1701 nt, Artificial Sequence; identical to SEQ ID NO: 98705
  derived and/or modified CDS sequence (opt2) from hemagglutinin__InfluenzaA__ACR56430

SEQ ID NO: 98928 - RNA, 1701 nt, Artificial Sequence; identical to SEQ ID NO: 98705
  derived and/or modified CDS sequence (opt2) from hemagglutinin__InfluenzaA__ACR56440

SEQ ID NO: 98929 - RNA, 1698 nt, Artificial Sequence
  derived and/or modified CDS sequence (opt2) from hemagglutinin__InfluenzaA__ACR58541
augaaggucaagcuccucguccuccucugcaccuucaccgccaccuacgccgacaccaucugcaucggcuaccacgccaacaacuccaccgacaccgucgacaccguccucgagaagaacgucaccgucacccacuccgucaaccuccucgagaacucccacaacggcaagcucugccuccucaagggcaucgccccccuccagcucggcaacugcuccgucgccggcuggauccucggcaaccccgagugcgagcuccucaucuccaaggaguccugguccuacaucgucgagaagcccaaccccgagaacggcaccugcuaccccggccacuucgccgacuacgaggagcuccgcgagcagcucuccuccgucuccuccuucgagcgcuucgagaucuuccccaaggaguccuccuggcccaaccacaccgucaccggcgucuccgccuccugcucccacaacggcgaguccuccuucuaccgcaaccuccucuggcucacccgcaagaacggccucuaccccaaccucuccaaguccuacgccaacaacaaggagaaggagguccucguccucuggggcguccaccacccccccaacaucggcgaccagaaggcccucuaccacaccgagaacgccuacgucuccgucgucuccucccacuacucccgcaaguucacccccgagaucgccaagcgccccaagguccgcgaccaggagggccgcaucaacuacuacuggacccuccucgagcccggcgacaccaucaucuucgaggccaacggcaaccucaucgccccccgcuacgccuucgcccucucccgcggcuucggcuccggcaucaucaacuccaacgcccccauggacaagugcgacgccaagugccagaccccccagggcgccaucaacuccucccuccccuuccagaacguccaccccgucaccaucggcgagugccccaaguacguccgcuccgccaagcuccgcauggucaccggccuccgcaacauccccuccauccagucccgcggccucuucggcgccaucgccggcuucaucgagggcggcuggaccggcauggucgacggcugguacggcuaccaccaccagaacgagcagggcuccggcuacgccgccgaccagaaguccacccagaacgccaucaacggcaucaccaacaaggucaacuccgucaucgacaagaugaacacccaguucaccgccgucggcaaggaguucaacaagcucgagcgccgcauggagaaccucaacaagaaggucgacgacggcuucaucgacaucuggaccuacaacgccgagcuccucguccuccucgagaacgagcgcacccucgacuuccacgacuccaacgucaagaaccucuacgagaaggucaagucccagcucaagaacaacgccaaggagaucggcaacggcugcuucgaguucuaccacaagugcaacgacgagugcauggaguccgucaagaacggcaccuacgacuaccccaaguacuccgaggaguccaagcucaaccgcgagaagaucgacggcgucaagcucgaguccaugggcgucuaccagauccucgccaucuacuccaccgucgccuccucccucguccuccucgucucccucggcgccaucuccuucuggaugugcuccaacggcucccuccagugccgcaucugcaucuga

SEQ ID NO: 98930 - RNA, 1698 nt, Artificial Sequence; identical to SEQ ID NO: 97950
  derived and/or modified CDS sequence (opt2) from hemagglutinin__InfluenzaA__ACR61655

SEQ ID NO: 98931 - RNA, 1698 nt, Artificial Sequence; identical to SEQ ID NO: 97966
  derived and/or modified CDS sequence (opt2) from hemagglutinin__InfluenzaA__ACR61666

SEQ ID NO: 98932 - RNA, 1701 nt, Artificial Sequence; identical to SEQ ID NO: 98470
  derived and/or modified CDS sequence (opt2) from hemagglutinin__InfluenzaA__ACR61677

SEQ ID NO: 98933 - RNA, 1701 nt, Artificial Sequence; identical to SEQ ID NO: 98470
  derived and/or modified CDS sequence (opt2) from hemagglutinin__InfluenzaA__ACR61688

SEQ ID NO: 98934 - RNA, 1701 nt, Artificial Sequence; identical to SEQ ID NO: 98470
  derived and/or modified CDS sequence (opt2) from hemagglutinin__InfluenzaA__ACR61699

SEQ ID NO: 98935 - RNA, 1701 nt, Artificial Sequence; identical to SEQ ID NO: 98692
  derived and/or modified CDS sequence (opt2) from hemagglutinin__InfluenzaA__ACR67170

SEQ ID NO: 98936 - RNA, 1701 nt, Artificial Sequence; identical to SEQ ID NO: 98731
  derived and/or modified CDS sequence (opt2) from hemagglutinin__InfluenzaA__ACR67171

SEQ ID NO: 98937 - RNA, 1701 nt, Artificial Sequence; identical to SEQ ID NO: 98692
  derived and/or modified CDS sequence (opt2) from hemagglutinin__InfluenzaA__ACR67172

SEQ ID NO: 98938 - RNA, 1701 nt, Artificial Sequence; identical to SEQ ID NO: 98692
  derived and/or modified CDS sequence (opt2) from hemagglutinin__InfluenzaA__ACR67177

SEQ ID NO: 98939 - RNA, 1701 nt, Artificial Sequence; identical to SEQ ID NO: 98692
  derived and/or modified CDS sequence (opt2) from hemagglutinin__InfluenzaA__ACR67181

SEQ ID NO: 98940 - RNA, 1701 nt, Artificial Sequence
  derived and/or modified CDS sequence (opt2) from hemagglutinin__InfluenzaA__ACR67183
augaaggccauccucgucguccuccucuacaccuucgccaccgccaacgccgacacccucugcaucggcuaccacgccaacaacuccaccgacaccgucgacaccguccucgagaagaacgucaccgucacccacuccgucaaccuccucgaggacaagcacaacggcaagcucugcaagcuccgcggcgucgccccccuccaccucggcaagugcaacaucgccggcuggauccucggcaaccccgagugcgagucccucuccaccgccuccuccugguccuacaucgucgagaccuccuccuccgacaacggcaccugcuaccccggcgacuucaucgacuacgaggagcuccgcgagcagcucuccuccgucuccuccuucgagcgcuucgagaucuuccccaagaccuccuccuggcccaaccacgacuccaacaagggcgucaccgccgccugcccccacgccggcgccaaguccuucuacaagaaccucaucuggcucgucaagaagggcaacuccuaccccaagcucuccaaguccuacaucaacgacaagggcaaggagguccucguccucuggggcauccaccaccccuccaccuccgccgaccagcagucccucuaccagaacgccgacgccuacgucuucgucggcuccucccgcuacuccaagaaguucaagcccgagaucgccauccgccccaagguccgcgaccgcgagggccgcaugaacuacuacuggacccucgucgagcccggcgacaagaucaccuucgaggccaccggcaaccucgucgucccccgcuacgccuucgccauggagcgcaacgccggcuccggcaucaucaucuccgacacccccguccacgacugcaacaccaccugccagacccccaagggcgccaucaacaccucccuccccuuccagaacauccaccccaucaccaucggcaagugccccaaguacgucaaguccaccaagcuccgccucgccaccggccuccgcaacguccccuccauccagucccgcggccucuucggcgccaucgccggcuucaucgagggcggcuggaccggcauggucgacggcugguacggcuaccaccaccagaacgagcagggcuccggcuacgccgccgaccucaaguccacccagaacgccaucgacgagaucaccaacaaggucaacuccgucaucgagaagaugaacacccaguucaccgccgucggcaaggaguucaaccaccucgagaagcgcaucgagaaccucaacaagaaggucgacgacggcuuccucgacaucuggaccuacaacgccgagcuccucguccuccucgagaacgagcgcacccucgacuaccacgacuccaacgucaagaaccucuacgagaagguccgcucccagcucaagaacaacgccaaggagaucggcaacggcugcuucgaguucuaccacaagugcgacaacaccugcauggaguccgucaagaacggcaccuacgacuaccccaaguacuccgaggaggccaagcucaaccgcgaggagaucgacggcgucaagcucgaguccacccgcaucuaccagauccucgccaucuacuccaccgucgccuccucccucguccucgucgucucccucggcgccaucuccuucuggaugugcuccaacggcucccuccagugccgcaucugcaucuga

SEQ ID NO: 98941 - RNA, 1701 nt, Artificial Sequence; identical to SEQ ID NO: 98705
  derived and/or modified CDS sequence (opt2) from hemagglutinin__InfluenzaA__ACR67184

SEQ ID NO: 98942 - RNA, 1701 nt, Artificial Sequence; identical to SEQ ID NO: 98692
  derived and/or modified CDS sequence (opt2) from hemagglutinin__InfluenzaA__ACR67185

SEQ ID NO: 98943 - RNA, 1701 nt, Artificial Sequence; identical to SEQ ID NO: 98885
  derived and/or modified CDS sequence (opt2) from hemagglutinin__InfluenzaA__ACR67186

SEQ ID NO: 98944 - RNA, 1701 nt, Artificial Sequence; identical to SEQ ID NO: 98692
  derived and/or modified CDS sequence (opt2) from hemagglutinin__InfluenzaA__ACR67187

SEQ ID NO: 98945 - RNA, 1701 nt, Artificial Sequence; identical to SEQ ID NO: 98731
  derived and/or modified CDS sequence (opt2) from hemagglutinin__InfluenzaA__ACR67188

SEQ ID NO: 98946 - RNA, 1701 nt, Artificial Sequence; identical to SEQ ID NO: 98731
  derived and/or modified CDS sequence (opt2) from hemagglutinin__InfluenzaA__ACR67189

SEQ ID NO: 98947 - RNA, 1701 nt, Artificial Sequence
  derived and/or modified CDS sequence (opt2) from hemagglutinin__InfluenzaA__ACR67190
auggaggccauccucgucguccuccucuacaccuucgccaccgccaacgccgacacccucugcaucggcuaccacgccaacaacuccaccgacaccgucgacaccguccucgagaagaacgucaccgucacccacuccgucaaccuccucgaggacaagcacaacggcaagcucugcaagcuccgcggcgucgccccccuccaccucggcaagugcaacaucgccggcuggauccucggcaaccccgagugcgagucccucuccaccgccuccuccugguccuacaucgucgagaccuccuccuccgacaacggcaccugcuaccccggcgacuucaucgacuacgaggagcuccgcgagcagcucuccuccgucuccuccuucgagcgcuucgagaucuuccccaagaccuccuccuggcccaaccacgacuccaacaagggcgucaccgccgccugcccccacgccggcgccaaguccuucuacaagaaccucaucuggcucgucaagaagggcaacuccuaccccaagcucuccaaguccuacaucaacgacaagggcaaggagguccucguccucuggggcauccaccaccccuccaccuccgccgaccagcagucccucuaccagaacgccgacgccuacgucuucgucggcuccucccgcuacuccaagaaguucaagcccgagaucgccauccgccccaagguccgcgaccaggagggccgcaugaacuacuacuggacccucgucgagcccggcgacaagaucaccuucgaggccaccggcaaccucgucgucccccgcuacgccuucgccauggagcgcaacgccggcuccggcaucaucaucuccgacacccccguccacgacugcaacaccaccugccagacccccaagggcgccaucaacaccucccuccccuuccacaacauccaccccaucaccaucggcaagugccccaaguacgucaaguccaccaagcuccgccucgccaccggccuccgcaacguccccuccauccagucccgcggccucuucggcgccaucgccggcuucaucgagggcggcuggaccggcauggucgacggcugguacggcuaccaccaccagaacgagcagggcuccggcuacgccgccgaccucaaguccacccagaacgccaucgacgagaucaccaacaaggucaacuccgucaucgagaagaugaacacccaguucaccgccgucggcaaggaguucaaccaccucgagaagcgcaucgagaaccucaacaagaaggucgacgacggcuuccucgacaucuggaccuacaacgccgagcuccucguccuccucgagaacgagcgcacccucgacuaccacgacuccaacgucaagaaccucuacgagaagguccgcucccagcucaagaacaacgccaaggagaucggcaacggcugcuucgaguucuaccacaagugcgacaacaccugcauggaguccgucaagaacggcaccuacgacuaccccaaguacuccgaggaggccaagcucaaccgcgaggagaucgacggcgucaagcucgaguccacccgcaucuaccagauccucgccaucuacuccaccgucgccuccucccucguccucgucgucucccucggcgccaucuccuucuggaugugcuccaacggcucccuccagugccgcaucugcaucuga

SEQ ID NO: 98948 - RNA, 1701 nt, Artificial Sequence; identical to SEQ ID NO: 98692
  derived and/or modified CDS sequence (opt2) from hemagglutinin__InfluenzaA__ACR67192

SEQ ID NO: 98949 - RNA, 1701 nt, Artificial Sequence
  derived and/or modified CDS sequence (opt2) from hemagglutinin__InfluenzaA__ACR67193
augaaggccauccucgucguccuccucuacaccuucgccaccgccaacgccgacacccucugcaucggcuaccacgccaacaacuccaccgacaccgucgacaccguccucgagaagaacgucaccgucacccacuccgucaacauccucgaggacaagcacaacggcaagcucugcaagcuccgcggcgucgccccccuccaccucggcaagugcaacaucgccggcuggauccucggcaaccccgagugcgagucccucuccaccgccuccuccugguccuacaucgucgagaccuccuccuccgacaacggcaccugcuaccccggcgacuucaucgacuacgaggagcuccgcgagcagcucuccuccgucuccuccuucgagcgcuucgagaucuuccccaagaccuccuccuggcccaaccacgacuccaacaagggcgucaccgccgccugcccccacgccggcgccaaguccuucuacaagaaccucaucuggcucgucaagaagggcaacuccuaccccaagcucuccaaguccuacaucaacgacaagggcaaggagguccucguccucuggggcauccaccaccccuccaccuccgccgaccagcagucccucuaccagaacgccgacgccuacgucuucgucggcuccucccgcuacuccaagaaguucaagcccgagaucgccauccgccccaagguccgcgaccaggagggccgcaugaacuacuacuggacccucgucgagcccggcgacaagaucaccuucgaggccaccggcaaccucgucgucccccgcuacgccuucgccauggagcgcaacgccggcuccggcaucaucaucuccgacacccccguccacgagugcaacaccaccugccagacccccaagggcgccaucaacaccucccuccccuuccagaacauccaccccaucaccaucggcaagugccccaaguacgucaaguccaccaagcuccgccucgccaccggccuccgcaacguccccuccauccagucccgcggccucuucggcgccaucgccggcuucaucgagggcggcuggaccggcauggucgacggcugguacggcuaccaccaccagaacgagcagggcuccggcuacgccgccgaccucaaguccacccagaacgccaucgacgagaucaccaacaaggucaacuccgucaucgagaagaugaacacccaguucaccgccgucggcaaggaguucaaccaccucgagaagcgcaucgagaaccucaacaagaaggucgacgacggcuuccucgacaucuggaccuacaacgccgagcuccucguccuccucgagaacgagcgcacccucgacuaccacgacuccaacgucaagaaccucuacgagaagguccgcucccagcucaagaacaacgccaaggagaucggcaacggcugcuucgaguucuaccacaagugcgacaacaccugcauggaguccgucaagaacggcaccuacgacuaccccaaguacuccgaggaggccaagcucaaccgcgaggagaucgacggcgucaagcucgaguccacccgcaucuaccagauccucgccaucuacuccaccgucgccuccucccucguccucgucgucucccucggcgccaucuccuucuggaugugcuccaacggcucccuccagugccgcaucugcaucuga

SEQ ID NO: 98950 - RNA, 1701 nt, Artificial Sequence; identical to SEQ ID NO: 98692
  derived and/or modified CDS sequence (opt2) from hemagglutinin__InfluenzaA__ACR67195

SEQ ID NO: 98951 - RNA, 1701 nt, Artificial Sequence; identical to SEQ ID NO: 98692
  derived and/or modified CDS sequence (opt2) from hemagglutinin__InfluenzaA__ACR67197

SEQ ID NO: 98952 - RNA, 1701 nt, Artificial Sequence; identical to SEQ ID NO: 98949
  derived and/or modified CDS sequence (opt2) from hemagglutinin__InfluenzaA__ACR67198

SEQ ID NO: 98953 - RNA, 1701 nt, Artificial Sequence; identical to SEQ ID NO: 98692
  derived and/or modified CDS sequence (opt2) from hemagglutinin__InfluenzaA__ACR67199

SEQ ID NO: 98954 - RNA, 1701 nt, Artificial Sequence; identical to SEQ ID NO: 98705
  derived and/or modified CDS sequence (opt2) from hemagglutinin__InfluenzaA__ACR67244

SEQ ID NO: 98955 - RNA, 1701 nt, Artificial Sequence
  derived and/or modified CDS sequence (opt2) from hemagglutinin__InfluenzaA__ACR67254
augaaggccauccucgucguccuccucuacaccuucgccaccgccaacgccgacacccucugcaucggcuaccacgccaacaacuccaccgacaccgucgacaccguccucgagaagaacgucaccgucacccacuccgucaaccuccucgaggacaagcacaacggcaagcucugcaagcuccgcggcgucgccccccuccaccucggcaagugcaacaucgccggcuggauccucggcaaccccgagugcgagucccucuccaccgccuccuccugguccuacaucgucgagaccuccuccuccgacaacggcaccugcuaccccggcgacuucaucgacuacgaggagcuccgcgagcagcucuccuccgucuccuccuucgagcgcuucgagaucuuccccaagaccuccuccuggcccaaccacgacuccaacaagggcgucaccgccgccugcccccacgccggcgccaaguccuucuacaagaaccucaucuggcucgucaagaagggcaacuccuaccccaagcucuccaaguccuacaucaacgacaagggcaaggagguccucguccucuggggcauccaccaccccuccaccuccgccgaccagcagucccucuaccagaacgccgacgccuacgucuucgucggcuccucccgcuacuccaagaaguucaagcccgagaucgccauccgccccaagguccgcgaccaggagggccgcaugaacuacuacuggacccucgucgagcccggcgacaagaucaccuucgaggccaccggcaaccucgucgucccccgcuacgccuucgccauggagcgcaacgucggcuccggcaucaucaucuccgacacccccguccacgacugcaacaccaccugccagacccccaagggcgccaucaacaccucccuccccuuccagaacauccaccccaucaccaucggcaagugccccaaguacgucaaguccaccaagcuccgccucgccaccggccuccgcaacguccccuccauccagucccgcggccucuucggcgccaucgccggcuucaucgagggcggcuggaccggcauggucgacggcugguacggcuaccaccaccagaacgagcagggcuccggcuacgccgccgaccucaaguccacccagaacgccaucgacgagaucaccaacaaggucaacuccgucaucgagaagaugaacacccaguucaccgccgucggcaaggaguucaaccaccucgagaagcgcaucgagaaccucaacaagaaggucgacgacggcuuccucgacaucuggaccuacaacgccgagcuccucguccuccucgagaacgagcgcacccucgacuaccacgacuccaacgucaagaaccucuacgagaagguccgcucccagcucaagaacaacgccaaggagaucggcaacggcugcuucgaguucuaccacaagugcgacaacaccugcauggaguccgucaagaacggcaccuacgacuaccccaaguacuccgaggaggccaagcucaaccgcgaggagaucgacggcgucaagcucgaguccacccgcaucuaccagauccucgccaucuacuccaccgucgccuccucccucguccucgucgucucccucggcgccaucuccuucuggaugugcuccaacggcucccuccagugccgcaucugcaucuga

SEQ ID NO: 98956 - RNA, 1701 nt, Artificial Sequence; identical to SEQ ID NO: 98705
  derived and/or modified CDS sequence (opt2) from hemagglutinin__InfluenzaA__ACR77438

SEQ ID NO: 98957 - RNA, 1701 nt, Artificial Sequence; identical to SEQ ID NO: 98705
  derived and/or modified CDS sequence (opt2) from hemagglutinin__InfluenzaA__ACR77448

SEQ ID NO: 98958 - RNA, 1701 nt, Artificial Sequence
  derived and/or modified CDS sequence (opt2) from hemagglutinin__InfluenzaA__ACR77458
augaaggccauccucgucguccuccucuacaccuucgccaccgccaacgccgacacccucugcaucggcuaccacgccaacaacuccaccgacaccgucgacaccguccucgagaagaacgucaccgucacccacuccgucaaccuccucgaggacaagcacaacggcaagcucugcaagcuccgcggcgucgccccccuccaccucgacaagugcaacaucgccggcuggauccucggcaaccccgagugcgagucccucuccaccgccuccuccugguccuacaucgucgagaccuccuccuccgacaacggcaccugcuaccccggcgacuucaucgacuacgaggagcuccgcgagcagcucuccuccgucuccuccuucgagcgcuucgagaucuuccccaagaccuccuccuggcccaaccacgacuccaacaagggcgucaccgccgccugcccccacgccggcgccaaguccuucuacaagaaccucaucuggcucgucaagaagggcaacuccuaccccaagcucuccaaguccuacaucaacgacaagggcaaggagguccucguccucuggggcauccaccaccccuccaccuccgccgaccagcagucccucuaccagaacgccgacgccuacgucuucgucggcaccucccgcuacuccaagaaguucaagcccgagaucgccauccgccccaagguccgcgaccaggagggccgcaugaacuacuacuggacccucgucgagcccggcgacaagaucaccuucgaggccaccggcaaccucgucgucccccgcuacgccuucgccauggagcgcaacgccggcuccggcaucaucaucuccgacacccccguccacgacugcaacaccaccugccagacccccaagggcgccaucaacaccucccuccccuuccagaacauccaccccaucaccaucggcaagugccccaaguacgucaaguccaccaagcuccgccucgccaccggccuccgcaacguccccuccauccagucccgcggccucuucggcgccaucgccggcuucaucgagggcggcuggaccggcauggucgacggcugguacggcuaccaccaccagaacgagcagggcuccggcuacgccgccgaccucaaguccacccagaacgccaucgacgagaucaccaacaaggucaacuccgucaucgagaagaugaacacccaguucaccgccgucggcaaggaguucaaccaccucgagaagcgcaucgagaaccucaacaagaaggucgacgacggcuuccucgacaucuggaccuacaacgccgagcuccucguccuccucgagaacgagcgcacccucgacuaccacgacuccaacgucaagaaccucuacgagaagguccgcucccagcucaagaacaacgccaaggagaucggcaacggcugcuucgaguucuaccacaagugcgacaacaccugcauggaguccgucaagaacggcaccuacgacuaccccaaguacuccgaggaggccaagcucaaccgcgaggagaucgacggcgucaagcucgaguccacccgcaucuaccagauccucgccaucuacuccaccgucgccuccucccucguccucgucgucucccucggcgccaucuccuucuggaugugcuccaacggcucccuccagugccgcaucugcaucuga

SEQ ID NO: 98959 - RNA, 1701 nt, Artificial Sequence; identical to SEQ ID NO: 98705
  derived and/or modified CDS sequence (opt2) from hemagglutinin__InfluenzaA__ACR77468

SEQ ID NO: 98960 - RNA, 1701 nt, Artificial Sequence; identical to SEQ ID NO: 98705
  derived and/or modified CDS sequence (opt2) from hemagglutinin__InfluenzaA__ACR77478

SEQ ID NO: 98961 - RNA, 1701 nt, Artificial Sequence; identical to SEQ ID NO: 98705
  derived and/or modified CDS sequence (opt2) from hemagglutinin__InfluenzaA__ACR77488

SEQ ID NO: 98962 - RNA, 1701 nt, Artificial Sequence; identical to SEQ ID NO: 98705
  derived and/or modified CDS sequence (opt2) from hemagglutinin__InfluenzaA__ACR77498

SEQ ID NO: 98963 - RNA, 1701 nt, Artificial Sequence; identical to SEQ ID NO: 98692
  derived and/or modified CDS sequence (opt2) from hemagglutinin__InfluenzaA__ACR83525

SEQ ID NO: 98964 - RNA, 1701 nt, Artificial Sequence
  derived and/or modified CDS sequence (opt2) from hemagglutinin__InfluenzaA__ACR83538
augaaggccauccucgucguccuccucuacaccuucgccaccgccaacgccgacacccucugcaucggcuaccacgccaacaacuccaccgacaccgucgacaccguccucgagaagaacgucaccgucacccacuccgucaaccuccucgaggacaagcacaacggcaagcucugcaagcuccgcggcgucgccccccuccaccucggcaagugcaacaucgccggcuggauccucggcaaccccgagugcgagucccucuccaccgccuccuccugguccuacaucgucgagaccuccuccuccgacaacggcaccugcuaccccggcgacuucaucgacuacgaggagcuccgcgagcagcucuccuccgucuccuccuucgagcgcuucgagaucuuccccaagaccuccuccuggcccaaccacgacuccaacaagggcgucaccgccgccugcccccacgccggcgccaaguccuucuacaagaaccucaucuggcucgucaagaagggcaacuccuaccccaagcucuccaaguccuacaucaacgacaagggcaaggagguccucguccucuggggcauccaccaccccuccaccuccgccgaccagcagucccucuaccagaacgccgacgccuacgucuucgucggcaccucccgcuacuccaagaaguucaagcccgagaucgccauccgccccaagguccgcgaccaggagggccgcaugaacuacuacuggacccucgucgagcccggcgacaagaucaccuucgaggccaccggcaaccucgucgucccccgcuacgccuucgccauggagcgcaacgccggcuccggcaucaucaucuccgacacccccguccacgacugcaacaccaccugccagacccccaagggcgccaucaacaccucccuccccuuccagaacauccaccccaucaccaucggcaagugccccaaguacgucaaguccaccaagcuccgccucgccaccggccuccgcaacguccccuccauccucucccgcggccucuucggcgccaucgccggcuucaucgagggcggcuggaccggcauggucgacggcugguacggcuaccaccaccagaacgagcagggcuccggcuacgccgccgaccucaaguccacccagaacgccaucgacgagaucaccaacaaggucaacuccgucaucgagaagaugaacacccaguucaccgccgucggcaaggaguucaaccaccucgagaagcgcaucgagaaccucaacaagaaggucgacgacggcuuccucgacaucuggaccuacaacgccgagcuccucguccuccucgagaacgagcgcacccucgacuaccacgacuccaacgucaagaaccucuacgagaagguccgcucccagcucaagaacaacgccaaggagaucggcaacggcugcuucgaguucuaccacaagugcgacaacaccugcauggaguccgucaagaacggcaccuacgacuaccccaaguacuccgaggaggccaagcucaaccgcgaggagaucgacggcgucaagcucgaguccacccgcaucuaccagauccucgccaucuacuccaccgucgccuccucccucguccucgucgucucccucggcgccaucuccuucuggaugugcuccaacggcucccuccagugccgcaucugcaucuga

SEQ ID NO: 98965 - RNA, 1701 nt, Artificial Sequence; identical to SEQ ID NO: 98705
  derived and/or modified CDS sequence (opt2) from hemagglutinin__InfluenzaA__ACS14666

SEQ ID NO: 98966 - RNA, 1701 nt, Artificial Sequence; identical to SEQ ID NO: 98705
  derived and/or modified CDS sequence (opt2) from hemagglutinin__InfluenzaA__ACS14676

SEQ ID NO: 98967 - RNA, 1701 nt, Artificial Sequence; identical to SEQ ID NO: 98705
  derived and/or modified CDS sequence (opt2) from hemagglutinin__InfluenzaA__ACS14686

SEQ ID NO: 98968 - RNA, 1701 nt, Artificial Sequence; identical to SEQ ID NO: 98705
  derived and/or modified CDS sequence (opt2) from hemagglutinin__InfluenzaA__ACS14696

SEQ ID NO: 98969 - RNA, 1701 nt, Artificial Sequence; identical to SEQ ID NO: 98705
  derived and/or modified CDS sequence (opt2) from hemagglutinin__InfluenzaA__ACS14706

SEQ ID NO: 98970 - RNA, 1701 nt, Artificial Sequence; identical to SEQ ID NO: 98705
  derived and/or modified CDS sequence (opt2) from hemagglutinin__InfluenzaA__ACS14716

SEQ ID NO: 98971 - RNA, 1701 nt, Artificial Sequence; identical to SEQ ID NO: 98705
  derived and/or modified CDS sequence (opt2) from hemagglutinin__InfluenzaA__ACS14726

SEQ ID NO: 98972 - RNA, 1701 nt, Artificial Sequence; identical to SEQ ID NO: 98705
  derived and/or modified CDS sequence (opt2) from hemagglutinin__InfluenzaA__ACS14736

SEQ ID NO: 98973 - RNA, 1701 nt, Artificial Sequence; identical to SEQ ID NO: 98885
  derived and/or modified CDS sequence (opt2) from hemagglutinin__InfluenzaA__ACS27189

SEQ ID NO: 98974 - RNA, 1701 nt, Artificial Sequence; identical to SEQ ID NO: 98705
  derived and/or modified CDS sequence (opt2) from hemagglutinin__InfluenzaA__ACS27199

SEQ ID NO: 98975 - RNA, 1701 nt, Artificial Sequence; identical to SEQ ID NO: 98705
  derived and/or modified CDS sequence (opt2) from hemagglutinin__InfluenzaA__ACS27209

SEQ ID NO: 98976 - RNA, 1701 nt, Artificial Sequence; identical to SEQ ID NO: 98758
  derived and/or modified CDS sequence (opt2) from hemagglutinin__InfluenzaA__ACS27219

SEQ ID NO: 98977 - RNA, 1701 nt, Artificial Sequence; identical to SEQ ID NO: 98705
  derived and/or modified CDS sequence (opt2) from hemagglutinin__InfluenzaA__ACS27229

SEQ ID NO: 98978 - RNA, 1701 nt, Artificial Sequence
  derived and/or modified CDS sequence (opt2) from hemagglutinin__InfluenzaA__ACS27239
augaaggccauccucgucguccuccucuacaccuucgccaccgccaacgccgacacccucugcaucggcuaccacgccaacaacuccaccgacaccgucgacaccguccucgagaagaacgucaccgucacccacuccgucaaccuccucgaggacaagcacaacggcaagcucugcaagcuccgcggcgucgccccccuccaccucggcaagugcaacaucgccggcuggauccucggcaaccccgagugcgagucccucuccaccgccuccuccugguccuacaucgucgagaccuccuccuccgacaacggcaccugcuaccccggcgacuucaucgacuacgaggagcuccgcgagcagcucuccuccauguccuccuucgagcgcuucgagaucuuccccaagaccuccuccuggcccaaccacgacuccaacaagggcgucaccgccgccugcccccacgccggcgccaaguccuucuacaagaaccucaucuggcucgucaagaagggcaacuccuaccccaagcucuccaaguccuacaucaacgacaagggcaaggagguccucguccucuggggcauccaccaccccuccaccuccgccgaccagcagucccucuaccagaacgccgacgccuacgucuucgucggcuccucccgcuacuccaagaaguucaagcccgagaucgccauccgccccaagguccgcgaccaggagggccgcaugaacuacuacuggacccucgucgagcccggcgacaagaucaccuucgaggccaccggcaaccucgucgucccccgcuacgccuucgccauggagcgcaacgccggcuccggcaucaucaucuccgacacccccguccacgacugcaacaccaccugccagacccccaagggcgccaucaacaccucccuccccuuccagaacauccaccccaucaccaucggcaagugccccaaguacgucaaguccaccaagcuccgccucgccaccggccuccgcaacguccccuccauccagucccgcggccucuucggcgccaucgccggcuucaucgagggcggcuggaccggcauggucgacggcugguacggcuaccaccaccagaacgagcagggcuccggcuacgccgccgaccucaaguccacccagaacgccaucgacgagaucaccaacaaggucaacuccgucaucgagaagaugaacacccaguucaccgccgucggcaaggaguucaaccaccucgagaagcgcaucgagaaccucaacaagaaggucgacgacggcuuccucgacaucuggaccuacaacgccgagcuccucguccuccucgagaacgagcgcacccucgacuaccacgacuccaacgucaagaaccucuacgagaagguccgcucccagcucaagaacaacgccaaggagaucggcaacggcugcuucgaguucuaccacaagugcgacaacaccugcauggaguccgucaagaacggcaccuacgacuaccccaaguacuccgaggaggccaagcucaaccgcgaggagaucgacggcgucaagcucgaguccacccgcaucuaccagauccucgccaucuacuccaccgucgccuccucccucguccucgucgucucccucggcgccaucuccuucuggaugugcuccaacggcucccuccagugccgcaucugcaucuga

SEQ ID NO: 98979 - RNA, 1701 nt, Artificial Sequence; identical to SEQ ID NO: 98705
  derived and/or modified CDS sequence (opt2) from hemagglutinin__InfluenzaA__ACS27249

SEQ ID NO: 98980 - RNA, 1701 nt, Artificial Sequence; identical to SEQ ID NO: 98705
  derived and/or modified CDS sequence (opt2) from hemagglutinin__InfluenzaA__ACS27775

SEQ ID NO: 98981 - RNA, 1701 nt, Artificial Sequence; identical to SEQ ID NO: 98692
  derived and/or modified CDS sequence (opt2) from hemagglutinin__InfluenzaA__ACS34705

SEQ ID NO: 98982 - RNA, 1701 nt, Artificial Sequence; identical to SEQ ID NO: 98692
  derived and/or modified CDS sequence (opt2) from hemagglutinin__InfluenzaA__ACS34966

SEQ ID NO: 98983 - RNA, 1701 nt, Artificial Sequence
  derived and/or modified CDS sequence (opt2) from hemagglutinin__InfluenzaA__ACS34967
augaaggccauccucgucguccuccucuacaccuucgccaccgccaacgccgacacccucugcaucggcuaccacgccaacaacuccaccgacaccgucgacaccguccucgagaagaacgucaccgucacccacuccgucaaccuccucgaggacaagcacaacggcaagcucugcaagcuccgcggcgucgccccccuccaccucggcaagugcaacaucgccggcuggauccucggcaaccccgagugcgagucccucuccaccgccuccuccugguccuacaucgucgagaccuccuccuccgacaacggcaccugcuaccccggcgacuucaucgacuacgaggagcuccgcgagcagcucuccuccgucuccuccuucgagcgcuucgagaucuuccccaagaccuccuccuggcccaaccacgacuccaacaagggcgucaccgccgccugcccccacgccggcgccaaguccuucuacaagaaccucaucuggcucgucaagaagggcaacuccuaccccaagcucuccaaguccuacaucaacgacaagggcaaggagguccucguccucuggggcauccaccaccccuccaccuccgccgaccagcagucccucuaccagaacgccgacgccuacgucuucgucggcuccucccgcuacuccaagaaguucaagcccgagaucgccauccgccccaagguccgcgaccaggagggccgcaugaacuacuacuggacccucgucgagcccggcgacaagaucaccuucgaggccaccggcaaccucgucgucccccgcuacgccuucgccauggagcgcaacgccggcuccggcaucaucaucuccgacacccccguccacgacugcaacaccaccugccagacccccaagggcgccaucaacaccucccuccccuuccagaacauccaccccaucaccaucggcaagugccccaaguacgucaaguccaccaagucccgccucgccaccggccuccgcaacguccccuccauccagucccgcggccucuucggcgccaucgccggcuucaucgagggcggcuggaccggcauggucgacggcugguacggcuaccaccaccagaacgagcagggcuccggcuacgccgccgaccucaaguccacccagaaggccaucgacgagaucaccaacaaggucaacuccgucaucgagaagaugaacacccaguucaccgccgucggcaaggaguucaaccaccucgagaagcgcaucgagaaccucaacaagaaggucgacgacggcuuccucgacaucuggaccuacaacgccgagcuccucguccuccucgagaacgagcgcacccucgacuaccacgacuccaacgucaagaaccucuacgagaagguccgcucccagcucaagaacaacgccaaggagaucggcaacggcugcuucgaguucuaccacaagugcgacaacaccugcauggaguccgucaagaacggcaccuacgacuaccccaaguacuccgaggaggccaagcucaaccgcgaggagaucgacggcgucaagcucgaguccacccgcaucuaccagauccucgccaucuacuccaccgucgccuccucccucguccucgucgucucccucggcgccaucuccuucuggaugugcuccaacggcucccuccagugccgcaucugcaucuga

SEQ ID NO: 98984 - RNA, 1701 nt, Artificial Sequence
  derived and/or modified CDS sequence (opt2) from hemagglutinin__InfluenzaA__ACS34968
augaaggccauccucgucguccuccucuacaccuucgccaccgccaacgccgacacccucugcaucggcuaccacgccaacaacuccaccgacaccgucgacaccguccucgagaagaacgucaccgucacccacuccgucaaccuccucgaggacaagcacaacggcaagcucugcaagcuccgcggcgucgccccccuccaccucggcaagugcaacaucgccggcuggauccucggcaaccccgagugcgagucccucuccaccgccuccuccugguccuacaucgucgaguccuccuccuccgacaacggcaccugcuaccccggcgacuucaucgacuacgaggagcuccgcgagcagcucuccuccgucuccuccuucgagcgcuucgagaucuuccccaagaccuccuccuggcccaaccacgacuccaacaagggcgucaccgccgccugcccccacgccggcgccaaguccuucuacaagaaccucaucuggcucgucaagaagggcaacuccuaccccaagcucuccaaguccuacaucaacgacaagggcaaggagguccucguccucuggggcauccaccaccccuccaccuccgccgaccagcagucccucuaccagaacgccgacgccuacgucuucgucggcuccucccgcuacuccaagaaguucaagcccgagaucgccauccgccccaagguccgcgaccaggagggccgcaugaacuacuacuggacccucgucgagcccggcgacaagaucaucuucgaggccaccggcaaccucgucgucccccgcuacgccuucgccauggagcgcaacgccggcuccggcaucaucaucuccgacacccccguccacgacugcaacaccaccugccagacccccaagggcgccaucaacaccucccuccccuuccagaacauccaccccaucaccaucggcaagugccccaaguacgucaaguccaccaagcuccgccucgccaccggccuccgcaacguccccuccauccagucccgcggccucuucggcgccaucgccggcuucaucgagggcggcuggaccggcauggucgacggcugguacggcuaccaccaccagaacgagcagggcuccggcuacgccgccgaccucaaguccacccagaacgccaucgacgagaucaccaacaaggucaacuccgucaucgagaagaugaacacccaguucaccgccgucggcaaggaguucaaccaccucgagaagcgcaucgagaaccucaacaagaaggucgacgacggcuuccucgacaucuggaccuacaacgccgagcuccucguccuccucgagaacgagcgcacccucgacuaccacgacuccaacgucaagaaccucuacgagaagguccgcucccagcucaagaacaacgccaaggagaucggcaacggcugcuucgaguucuaccacaagugcgacaacaccugcauggaguccgucaagaacggcaccuacgacuaccccaaguacuccgaggaggccaagcucaaccgcgaggagaucgacggcgucaagcucgaguccacccgcaucuaccagauccucgccaucuacuccaccgucgccuccucccucguccucgucgucucccucggcgccaucuccuucuggaugugcuccaacggcucccuccagugccgcaucugcaucuga

SEQ ID NO: 98985 - RNA, 1701 nt, Artificial Sequence
  derived and/or modified CDS sequence (opt2) from hemagglutinin__InfluenzaA__ACS36632
augaaggccauccucgucguccuccucuacaccuucgccaccgccaacgccgacacccucugcaucggcuaccacgccaacaacuccaccgacaccgucgacaccguccucgagaagaacgucaccgucacccacuccgucaaccuccucgaggacaagcacaacggcaagcucugcaagcuccgcggcgucgccccccuccaccucggcaagugcaacaucgccggcuggauccucggcaaccccgagugcgagucccucuccaccgccuccuccugguccuacaucgucgagaccuccuccuccgacaacggcaccugcuaccccggcgacuucaucgacuacgaggagcuccgcgagcagcucuccuccgucuccuccuucgagcgcuucgagaucuuccccaagaccuccuccuggcccaaccacgacuccaacaagggcgucaccgccgccugcccccacgccggcgccaaguccuucuacaagaaccucaucuggcucgucaagaagggcaacuccuaccccaagcucuccaaguccuacaucaacgacaagggcaaggagguccucguccucuggggcauccaccaccccuccaccuccgccgaccagcagucccucuaccagaacgccgacgccuacgucuucgucggcuccucccgcuacuccaagaaguucaagcccgagaucgccauccgccccaagguccgcgaccaggagggccgcaugaacuacuacuggacccucgucgagcccggcgacaagaucaccuucgaggccaccggcaaccucgucgucccccgcuacgccuucgccauggagcgcaacgccggcuccggcaucaucaucuccgacacccccguccacgacugcaacaccaccugccagacccccaagggcgccaucaacaccucccuccccuuccagaacauccaccccaucaccaucggcaagugccccaaguacgucaaguccaccaagcuccgccucgccaccggccuccgcaacguccccuccauccagucccgcggccucuucggcgccaucgccggcuucaucgagggcggcuggaccggcauggucgacggcugguacggcuaccaccaccagaacgagcagggcuccggcuacgccgccgaccucaaguccacccagaaggccaucgacgagaucaccaacaaggucaacuccgucaucgagaagaugaacacccaguucaccgccgucggcaaggaguucaaccaccucgagaagcgcaucgagaaccucaacaagaaggucgacgacggcuuccucgacaucuggaccuacaacgccgagcuccucguccuccucgagaacgagcgcacccucgacuaccacgacuccaacgucaagaaccucuacgagaagguccgcucccagcucaagaacaacgccaaggagaucggcaacggcugcuucgaguucuaccacaagugcgacaacaccugcauggaguccgucaagaacggcaccuacgacuaccccaaguacuccgaggaggccaagcucaaccgcgaggagaucgacggcgucaagcucgaguccacccgcaucuaccagauccucgccaucuacuccaccgucgccuccucccucguccucgucgucucccucggcgccaucuccuucuggaugugcuccaacggcucccuccagugccgcaucugcaucuga

SEQ ID NO: 98986 - RNA, 1701 nt, Artificial Sequence
  derived and/or modified CDS sequence (opt2) from hemagglutinin__InfluenzaA__ACS36645
augaaggccauccucgucguccuccucuacaccuucgccaccgccaacgccgacacccucugcaucggcuaccacgccaacaacuccaccgacaccgucgacaccguccucgagaagaacgucaccgucacccacuccgucaaccuccucgaggacaagcacaacggcaagcucugcaagcuccgcggcgucgccccccuccaccucggcaagugcaacaucgccggcuggauccucggcaaccccgagugcgagucccucuccaccgccuccuccugguccuacaucgucgagaccuccuccuccgacaacggcaccugcuaccccggcgacuucaucgacuacgaggagcuccgcgagcagcucuccuccgucuccuccuucgagcgcuucgagaucuuccccaagaccuccuccuggcccaaccacgacuccaacaagggcgucaccgccgccugcccccacgccggcaccaaguccuucuacaagaaccucaucuggcucgucaagaagggcaacuccuaccccaagcucuccaaguccuacaucaacgacaagggcaaggagguccucguccucuggggcauccaccaccccuccaccuccgccgaccagcagucccucuaccagaacgccgacgccuacgucuucgucggcuccucccgcuacuccaagaaguucaagcccgagaucgccauccgccccaagguccgcgaccaggagggccgcaugaacuacuacuggacccucgucgagcccggcgacaagaucaccuucgaggccaccggcaaccucgucgucccccgcuacgccuucgccauggagcgcaacgccggcuccggcaucaucaucuccgacacccccguccacgacugcaacaccaccugccagacccccaagggcgccaucaacaccucccuccccuuccagaacauccaccccaucaccaucggcaagugccccaaguacgucaaguccaccaagcuccgccucgccaccggccuccgcaacguccccuccauccagucccgcggccucuucggcgccaucgccggcuucaucgagggcggcuggaccggcauggucgacggcugguacggcuaccaccaccagaacgagcagggcuccggcuacgccgccgaccucaaguccacccagaacgccaucgacgagaucaccaacaaggucaacuccgucaucgagaagaugaacacccaguucaccgccgucggcaaggaguucaaccaccucgagaagcgcaucgagaaccucaacaagaaggucgacgacggcuuccucgacaucuggaccuacaacgccgagcuccucguccuccucgagaacgagcgcacccucgacuaccacgacuccaacgucaagaaccucuacgagaagguccgcucccagcucaaguccaacgccaaggagaucggcaacggcugcuucgaguucuaccacaagugcgacaacaccugcauggaguccgucaagaacggcaccuacgacuaccccaaguacuccgaggaggccaagcucaaccgcgaggagaucgacggcaucaagcucgaguccacccgcaucuaccagauccucgccaucuacuccaccgucgccuccucccucguccucgucgucucccucggcgccaucuccuucuggaugugcuccaacggcucccuccagugccgcaucugcaucuga

SEQ ID NO: 98987 - RNA, 1701 nt, Artificial Sequence
  derived and/or modified CDS sequence (opt2) from hemagglutinin__InfluenzaA__ACS45035
augaaggccauccucgucguccuccucuacaccuucgccaccgccaacgccgacacccucugcaucggcuaccacgccaacaacuccaccgacaccgucgacaccguccucgagaagaacgucaccgucacccacuccgucaaccuccucgaggacaagcacaacggcaagcucugcaagcuccgcggcgucgccccccuccaccucggcaagugcaacaucgccggcuggauccucggcaaccccgagugcgagucccucuccaccgccuccuccugguccuacaucgucgagacccccuccuccgacaacggcaccugcuaccccggcgacuucaucgacuacgaggagcuccgcgagcagcucuccuccgucuccuccuucgagcgcuucgagaucuuccccaagaccuccuccuggcccaaccacgacuccaacaagggcgucaccgccgccugcccccacgccggcgccaaguccuucuacaagaaccucaucuggcucgucaagaagggcaacuccuaccccaagcucuccaaguccuacaucaacgacaagggcaaggagguccucguccucuggggcauccaccaccccuccaccuccgccgaccagcaguccaucuaccagaacgccgacaccuacgucuucgucggcuccucccgcuacuccaagaaguucaagcccgagaucgccauccgccccaagguccgcgaccaggagggccgcaugaacuacuacuggacccucgucgagcccggcgacaagaucaccuucgaggccaccggcaaccucgucgucccccgcuacgccuucgccauggagcgcaacgccggcuccggcaucaucaucuccgacacccccguccacgacugcaacaccaccugccagacccccaagggcgccaucaacaccucccuccccuuccagaacauccaccccaucaccaucggcaagugccccaaguacgucaaguccaccaagcuccgccucgccaccggccuccgcaacauccccuccauccagucccgcggccucuucggcgccaucgccggcuucaucgagggcggcuggaccggcauggucgacggcugguacggcuaccaccaccagaacgagcagggcuccggcuacgccgccgaccucaaguccacccagaacgccaucgacgagaucaccaacaaggucaacuccgucaucgagaagaugaacacccaguucaccgccgucggcaaggaguucaaccaccucgagaagcgcaucgagaaccucaacaagaaggucgacgacggcuuccucgacaucuggaccuacaacgccgagcuccucguccuccucgagaacgagcgcacccucgacuaccacgacuccaacgucaagaaccucuacgagaagguccgcucccagcucaagaacaacgccaaggagaucggcaacggcugcuucgaguucuaccacaagugcgacaacaccugcauggaguccgucaagaacggcaccuacgacuaccccaaguacuccgaggaggccaagcucaaccgcgaggagaucgacggcgucaagcucgaguccacccgcaucuaccagauccucgccaucuacuccaccgucgccuccucccucguccucgucgucucccucggcgccaucuccuucuggaugugcuccaacggcucccuccagugccgcaucugcaucuga

SEQ ID NO: 98988 - RNA, 1701 nt, Artificial Sequence; identical to SEQ ID NO: 98705
  derived and/or modified CDS sequence (opt2) from hemagglutinin__InfluenzaA__ACS50084

SEQ ID NO: 98989 - RNA, 1701 nt, Artificial Sequence; identical to SEQ ID NO: 98947
  derived and/or modified CDS sequence (opt2) from hemagglutinin__InfluenzaA__ACS50095

SEQ ID NO: 98990 - RNA, 1701 nt, Artificial Sequence
  derived and/or modified CDS sequence (opt2) from hemagglutinin__InfluenzaA__ACS54258
augaaggccauccucgucguccuccucuacaccuucgccaccgccaacgccgacacccucugcaucggcuaccacgccaacaacuccaccgacaccgucgacaccguccucgagaagaacgucaccgucacccacuccgucaaccuccucgaggacaagcacaacggcaagcucugcaagcuccgcggcgucgccccccuccaccucggcaagugcaacaucgccggcuggauccucggcaaccccgagugcgagucccucuccaccgccuccuccugguccuacaucgucgagaccuccuccuccgacaacggcaccugcuaccccggcgacuucaucgacuacgaggagcuccgcgagcagcucuccuccgucuccuccuucgagcgcuucgagaucuuccccaagaccuccuccuggcccaaccacgacuccaacaagggcgucaccgccgccugcccccacgccggcgccaaguccuucuacaagaaccucaucuggcucgucaagaagggcaacuccuaccccaagcucuccaaguccuacaucaacgacaagggcaaggagguccucguccucuggggcauccaccaccccuccaccuccgccgaccagcagucccucuaccagaacgccgacgccuacgucuucgucggcaccucccgcuacuccaagaaguucaagcccgagaucgccauccgccccaagguccgcgaccaggagggccgcaugaacuacuacuggacccucgucgagcccggcgacaagaucaccuucgaggccaccggcaaccucgucgucccccgcuacgccuucgccauggagcgcaacgccggcuccggcaucaucaucuccgacacccccguccacgacugcaacaccaccugccagacccccaagggcgccaucaacaccucccuccccuuccagaacauccaccccaucaccaucggcaagugccccaaguacgucaaguccaccaagcuccgccucgccaccggccuccgcaacguccccuccauccagucccgcggccucuucggcgccaucgccggcuucaucgagggcggcuggaccggcauggucgacggcugguacggcuaccaccaccagaacgagcagggcuccggcuacgccgccgaccucaaguccacccagaacgccaucgacgagaucaccaacaaggucaacuccgucaucgagaagaugaacacccaguucaccgccgucggcaaggaguucaaccaccucgagaagcgcaucgagaaccucaacaagaaggucgacgacggcuuccucgacaucuggaccuacaacgccgagcuccucguccuccucgagaacgagcgcacccucgacuaccacgacuccaacgucaagaaccucuacgagaagguccgcucccagcucaagaacaacgccaaggagaucggcaacggcugcuucgaguucuaccacaagugcgacaacaccugcauggaguccgucaagaacggcaccuacuacuaccccaaguacuccgaggaggccaagcucaaccgcgaggagaucgacggcgucaagcucgaguccacccgcaucuaccagauccucgccaucuacuccaccgucgccuccucccucguccucgucgucucccucggcgccaucuccuucuggaugugcuccaacggcucccuccagugccgcaucugcaucuga

SEQ ID NO: 98991 - RNA, 1701 nt, Artificial Sequence; identical to SEQ ID NO: 98720
  derived and/or modified CDS sequence (opt2) from hemagglutinin__InfluenzaA__ACS54259

SEQ ID NO: 98992 - RNA, 1701 nt, Artificial Sequence; identical to SEQ ID NO: 98692
  derived and/or modified CDS sequence (opt2) from hemagglutinin__InfluenzaA__ACS54260

SEQ ID NO: 98993 - RNA, 1701 nt, Artificial Sequence; identical to SEQ ID NO: 98705
  derived and/or modified CDS sequence (opt2) from hemagglutinin__InfluenzaA__ACS54261

SEQ ID NO: 98994 - RNA, 1701 nt, Artificial Sequence; identical to SEQ ID NO: 98705
  derived and/or modified CDS sequence (opt2) from hemagglutinin__InfluenzaA__ACS54263

SEQ ID NO: 98995 - RNA, 1701 nt, Artificial Sequence; identical to SEQ ID NO: 98705
  derived and/or modified CDS sequence (opt2) from hemagglutinin__InfluenzaA__ACS54301

SEQ ID NO: 98996 - RNA, 1701 nt, Artificial Sequence; identical to SEQ ID NO: 98692
  derived and/or modified CDS sequence (opt2) from hemagglutinin__InfluenzaA__ACS66821

SEQ ID NO: 98997 - RNA, 1701 nt, Artificial Sequence
  derived and/or modified CDS sequence (opt2) from hemagglutinin__InfluenzaA__ACS68822
augaaggccauccucgucguccuccucuacaccuucgccaccgccaacgccgacacccucugcaucggcuaccacgccaacaacuccaccgacaccgucgacaccguccucgagaagaacgucaccgucacccacuccgucaaccuccucgaggacaagcacaacggcaagcucugcaagcuccgcggcgucgccccccuccaccucggcaagugcaacaucgccggcuggauccucggcaaccccgagugcgagucccucuccaccgccuccuccugguccuacaucgucgagaccuccuccuccgacaacggcaccugcuaccccggcgacuucaucgacuacgagggccuccgcgagcagcucuccuccgucuccuccuucgagcgcuucgagaucuuccccaagaccuccuccuggcccaaccacgacuccaacaagggcgucaccgccgccugcccccacgccggcgccaaguccuucuacaagaaccucaucuggcucgucaagaagggcaacuccuaccccaagcucuccaaguccuacaucaacgacaagggcaaggagguccucguccucuggggcauccaccaccccuccaccuccgccgaccagcagucccucuaccagaacgccgacgccuacgucuucgucggcaccucccgcuacuccaagaaguucaagcccgagaucgccauccgccccaagguccgcgaccaggagggccgcaugaacuacuacuggacccucgucgagcccggcgacaagaucaccuucgaggccaccggcaaccucgucgucccccgcuacgccuucgccauggagcgcaacgccggcuccggcaucaucaucuccgacacccccguccacgacugcaacaccaccugccagacccccaagggcgccaucaacaccucccuccccuuccagaacauccaccccaucaccaucggcaagugccccaaguacgucaaguccaccaagcuccgccucgccaccggccuccgcaacguccccuccauccagucccgcggccucuucggcgccaucgccggcuucaucgagggcggcuggaccggcauggucgacggcugguacggcuaccaccaccagaacgagcagggcuccggcuacgccgccgaccucaaguccacccagaacgccaucgacgagaucaccaacaaggucaacuccgucaucgagaagaugaacacccaguucaccgccgucggcaaggaguucaaccaccucgagaagcgcaucgagaaccucaacaagaagaucgacgacggcuuccucgacaucuggaccuacaacgccgagcuccucguccuccucgagaacgagcgcacccucgacuaccacgacuccaacgucaagaaccucuacgagaagguccgcucccagcucaagaacaacgccaaggagaucggcaacggcugcuucgaguucuaccacaagugcgacaacaccugcauggaguccgucaagaacggcaccuacgacuaccccaaguacuccgaggaggccaagcucaaccgcgaggagaucgacggcgucaagcucgaguccacccgcaucuaccagauccucgccaucuacuccaccgucgccuccucccucguccucgucgucucccucggcgccaucuccuucuggaugugcuccaacggcucccuccagugccgcaucugcaucuga

SEQ ID NO: 98998 - RNA, 1701 nt, Artificial Sequence; identical to SEQ ID NO: 98705
  derived and/or modified CDS sequence (opt2) from hemagglutinin__InfluenzaA__ACS75821

SEQ ID NO: 98999 - RNA, 1701 nt, Artificial Sequence; identical to SEQ ID NO: 98705
  derived and/or modified CDS sequence (opt2) from hemagglutinin__InfluenzaA__ACS77926

SEQ ID NO: 99000 - RNA, 1701 nt, Artificial Sequence; identical to SEQ ID NO: 98705
  derived and/or modified CDS sequence (opt2) from hemagglutinin__InfluenzaA__ACS77936

SEQ ID NO: 99001 - RNA, 1701 nt, Artificial Sequence; identical to SEQ ID NO: 98798
  derived and/or modified CDS sequence (opt2) from hemagglutinin__InfluenzaA__ACS77946

SEQ ID NO: 99002 - RNA, 1701 nt, Artificial Sequence; identical to SEQ ID NO: 98705
  derived and/or modified CDS sequence (opt2) from hemagglutinin__InfluenzaA__ACS77956

SEQ ID NO: 99003 - RNA, 1701 nt, Artificial Sequence; identical to SEQ ID NO: 98705
  derived and/or modified CDS sequence (opt2) from hemagglutinin__InfluenzaA__ACS77966

SEQ ID NO: 99004 - RNA, 1701 nt, Artificial Sequence; identical to SEQ ID NO: 98705
  derived and/or modified CDS sequence (opt2) from hemagglutinin__InfluenzaA__ACS77976

SEQ ID NO: 99005 - RNA, 1701 nt, Artificial Sequence; identical to SEQ ID NO: 98947
  derived and/or modified CDS sequence (opt2) from hemagglutinin__InfluenzaA__ACS77986

SEQ ID NO: 99006 - RNA, 1701 nt, Artificial Sequence
  derived and/or modified CDS sequence (opt2) from hemagglutinin__InfluenzaA__ACS77996
augaaggccacccucgucguccuccucuacaccuucgccaccgccaacgccgacacccucugcaucggcuaccacgccaacaacuccaccgacaccgucgacaccguccucgagaagaacgucaccgucacccacuccgucaaccuccucgaggacaagcacaacggcaagcucugcaagcuccgcggcgucgccccccuccaccucggcaagugcaacaucgccggcuggauccucggcaaccccgagugcgagucccucuccaccgccuccuccugguccuacaucgucgagaccuccuccuccgacaacggcaccugcuaccccggcgacuucaucgacuacgaggagcuccgcgagcagcucuccuccgucuccuccuucgagcgcuucgagaucuuccccaagaccuccuccuggcccaaccacgacuccaacaagggcgucaccgccgccugcccccacgccggcgccaaguccuucuacaagaaccucaucuggcucgucaagaagggcaacuccuaccccaagcucuccaaguccuacaucaacgacaagggcaaggagguccucguccucuggggcauccaccaccccuccaccuccgccgaccagcagucccucuaccagaacgccgacgccuacgucuucgucggcaccucccgcuacuccaagaaguucaagcccgagaucgccauccgccccaagguccgcgaccaggagggccgcaugaacuacuacuggacccucgucgagcccggcgacaagaucaccuucgaggccaccggcaaccucgucgucccccgcuacgccuucgccauggagcgcaacgccggcuccggcaucaucaucuccgacacccccguccacgacugcaacaccaccugccagacccccaagggcgccaucaacaccucccuccccuuccagaacauccaccccaucaccaucggcaagugccccaaguacgucaaguccaccaagcuccgccucgccaccggccuccgcaacguccccuccauccagucccgcggccucuucggcgccaucgccggcuucaucgagggcggcuggaccggcauggucgacggcugguacggcuaccaccaccagaacgagcagggcuccggcuacgccgccgaccucaaguccacccagaacgccaucgacgagaucaccaacaaggucaacuccgucaucgagaagaugaacacccaguucaccgccgucggcaaggaguucaaccaccucgagaagcgcaucgagaaccucaacaagaaggucgacgacggcuuccucgacaucuggaccuacaacgccgagcuccucguccuccucgagaacgagcgcacccucgacuaccacgacuccaacgucaagaaccucuacgagaagguccgcucccagcucaagaacaacgccaaggagaucggcaacggcugcuucgaguucuaccacaagugcgacaacaccugcauggaguccgucaagaacggcaccuacgacuaccccaaguacuccgaggaggccaagcucaaccgcgaggagaucgacggcgucaagcucgaguccacccgcaucuaccagauccucgccaucuacuccaccgucgccuccucccucguccucgucgucucccucggcgccaucuccuucuggaugugcuccaacggcucccuccagugccgcaucugcaucuga

SEQ ID NO: 99007 - RNA, 1701 nt, Artificial Sequence; identical to SEQ ID NO: 98705
  derived and/or modified CDS sequence (opt2) from hemagglutinin__InfluenzaA__ACS78006

SEQ ID NO: 99008 - RNA, 1701 nt, Artificial Sequence; identical to SEQ ID NO: 98705
  derived and/or modified CDS sequence (opt2) from hemagglutinin__InfluenzaA__ACS78016

SEQ ID NO: 99009 - RNA, 1701 nt, Artificial Sequence
  derived and/or modified CDS sequence (opt2) from hemagglutinin__InfluenzaA__ACS78026
augaaggccauccucgucguccuccucuacaccuucgccaccgccaacgccgacacccucugcaucggcuaccacgccaacaacuccaccgacaccgucgacaccguccucgagaagaacgucaccgucacccacuccgucaaccuccucgaggacaagcacaacggcaagcucugcaagcuccgcggcgucgccccccuccaccucggcaagugcaacaucgccggcuggauccucggcaaccccgagugcgagucccucuccaccgccuccuccugguccuacaucgucgagaccuccuccuccgacaacggcaccugcuaccccggcgacuucaucgacuacgaggagcuccgcgagcagcucuccuccgucuccuccuucgagcgcuucgagaucuuccccaagaucuccuccuggcccaaccacgacuccaaccgcggcgucaccgccgccugcccccacgccggcgccaaguccuucuacaagaaccucaucuggcucgucaagaagggcaacuccuaccccaagcucaucaaguccuacaucaacgacaagggcaaggagguccucguccucuggggcauccaccaccccuccaccuccgccgaccagcagucccucuaccagaacgccgacgccuacgucuucgucggcuccucccgcuacuccaagaaguucaagcccgagaucgccauccgccccaagguccgcgaccaggagggccgcaugaacuacuacuggacccucgucgagcccggcgacaagaucaccuucgaggccaccggcaaccucgucgucccccgcuacgccuucgccauggagcgcaacgccggcuccggcaucaucaucuccgacacccccguccacgacugcaacaccaccugccagacccccaagggcgccaucaacaccucccuccccuuccagaacauccaccccaucaccaucggcaagugccccaaguacgucaaguccaccaagcuccgccucgccaccggccuccgcaacguccccuccauccagucccgcggccucuucggcgccaucgccggcuucaucgagggcggcuggaccggcauggucgacggcugguacggcuaccaccaccagaacgagcagggcuccggcuacgccgccgaccucaaguccacccagaacgccaucgacgagaucaccaacaaggucaacuccgucaucgagaagaugaacacccaguucaccgccgucggcaaggaguucaaccaccucgagaagcgcaucgagaaccucaacaagaaggucgacgacggcuuccucgacaucuggaccuacaacgccgagcuccucguccuccucgagaacgagcgcacccucgacuaccacgacuccaacgucaagaaccucuacgagaagguccgcucccagcucaagaacaacgccaaggagaucggcaacggcugcuucgaguucuaccacaagugcgacaacaccugcauggaguccgucaagaacggcaccuacgacuaccccaaguacuccgaggaggccaagcucaaccgcgaggagaucgacggcgucaagcucgaguccacccgcaucuaccagauccucgccaucuacuccaccgucgccuccucccucguccucgucgucucccucggcgccaucuccuucuggaugugcuccaacggcucccuccagugccgcaucugcaucuga

SEQ ID NO: 99010 - RNA, 1701 nt, Artificial Sequence; identical to SEQ ID NO: 98947
  derived and/or modified CDS sequence (opt2) from hemagglutinin__InfluenzaA__ACS78036

SEQ ID NO: 99011 - RNA, 1701 nt, Artificial Sequence; identical to SEQ ID NO: 98947
  derived and/or modified CDS sequence (opt2) from hemagglutinin__InfluenzaA__ACS78046

SEQ ID NO: 99012 - RNA, 1701 nt, Artificial Sequence; identical to SEQ ID NO: 98720
  derived and/or modified CDS sequence (opt2) from hemagglutinin__InfluenzaA__ACS92569

SEQ ID NO: 99013 - RNA, 1701 nt, Artificial Sequence; identical to SEQ ID NO: 98720
  derived and/or modified CDS sequence (opt2) from hemagglutinin__InfluenzaA__ACS92579

SEQ ID NO: 99014 - RNA, 1701 nt, Artificial Sequence; identical to SEQ ID NO: 98705
  derived and/or modified CDS sequence (opt2) from hemagglutinin__InfluenzaA__ACS92589

SEQ ID NO: 99015 - RNA, 1701 nt, Artificial Sequence
  derived and/or modified CDS sequence (opt2) from hemagglutinin__InfluenzaA__ACS92612
augaaggccauccucgucguccuccucuacaccuucgccaccgccaacgccgacacccucugcaucggcuaccacgccaacaacuccaccgacaccgucgacaccguccucgagaagaacgucaccgucacccacuccgucaaccuccucgaggacaagcacaacggcaagcucugcaagcuccgcggcgucgccccccuccaccucggcaagugcaacaucgccggcuggauccucggcaaccccgagugcgagucccucuccaccgccuccuccugguccuacaucgucgagaccuccuccuccgacaacggcaccugcuaccccggcgacuucaucgacuacgaggagcuccgcgagcagcucuccuccgucuccuccuucgagcgcuucgagaucuuccccaagaccuccuccuggcccauccacgacuccaacaagggcgucaccgccgccugcccccacgccggcgccaaguccuucuacaagaaccucaucuggcucgucaagaagggcaacuccuaccccaagcucuccaaguccuacaucaacgacaagggcaaggagguccucguccucuggggcauccaccaccccuccaccuccgccgaccagcagucccucuaccagaacgccgacgccuacgucuucgucggcuccucccgcuacuccaagaaguucaagcccgagaucgccauccgccccaagguccgcgaccaggagggccgcaugaacuacuacuggacccucgucgagcccggcgacaagaucaccuucgaggccaccggcaaccucgucgucccccgcuacgccuucgccauggagcgcaacgccggcuccggcaucaucaucuccgacacccccguccacgacugcgacaccaccugccagacccccaagggcgccaucaacaccucccuccccuuccagaacauccaccccaucaccaucggcaagugccccaaguacgucaaguccaccaagcuccgccucgccaccggccuccgcaacauccccuccauccagucccgcggccucuucggcgccaucgccggcuucaucgagggcggcuggaccggcauggucgacggcugguacggcuaccaccaccagaacgagcagggcuccggcuacgccgccgaccucaaguccacccagaacgccaucgacgagaucaccaacaaggucaacuccgucaucgagaagaugaacacccaguucaccgccgucggcaaggaguucaaccaccucgagaagcgcaucgagaaccucaacaagaaggucgacgacggcuuccucgacaucuggaccuacaacgccgagcuccucguccuccucgagaacgagcgcacccucgacuaccacgacuccaacgucaagaaccucuacgagaagguccgcucccagcucaagaacaacgccaaggagaucggcaacggcugcuucgaguucuaccacaagugcgacaacaccugcauggaguccgucaagaacggcaccuacgacuaccccaaguacuccgaggaggccaagcucaaccgcgaggagaucgacggcgucaagcucgaguccacccgcaucuaccagauccucgccaucuacuccaccgucgccuccucccucguccucgucgucucccucggcgccaucuccuucuggaugugcuccaacggcucccuccagugccgcaucugcaucuga

SEQ ID NO: 99016 - RNA, 1701 nt, Artificial Sequence; identical to SEQ ID NO: 98705
  derived and/or modified CDS sequence (opt2) from hemagglutinin__InfluenzaA__ACT10307

SEQ ID NO: 99017 - RNA, 1701 nt, Artificial Sequence; identical to SEQ ID NO: 98705
  derived and/or modified CDS sequence (opt2) from hemagglutinin__InfluenzaA__ACT10314

SEQ ID NO: 99018 - RNA, 1701 nt, Artificial Sequence
  derived and/or modified CDS sequence (opt2) from hemagglutinin__InfluenzaA__ACT11057
augaaggccauccucgucguccuccucuacaccuucgccaccgccaacgccgacacccucugcaucggcuaccacgccaacaacuccaccgacaccgucgacaccguccucgagaagaacgucaccgucacccacuccgucaacauccucgaggacaagcacaacggcaagcucugcaagcuccgcggcgucgccccccuccaccucggcaagugcaacaucgccggcuggauccucggcaaccccgagugcgagucccucuccaccgccuccuccugguccuacaucgucgagaccuccuccuccgacaacggcaccugcuaccccggcgacuucaucgacuacgaggagcuccgcgagcagcucuccuccgucuccuccuucgagcgcuucgagaucuuccccaagaccuccuccuggcccaaccacgacuccaacaagggcgucaccgccgccugcccccacgccggcgccaaguccuucuacaagaaccucaucuggcucgucaagaagggcaacuccuaccccaagcucuccaaguccuacaucaacgacaagggcaaggagguccucguccucuggggcauccaccaccccuccaccuccgccgaccagcagucccucuaccagaacgccgacgccuacgucuucgucggcuccucccgcuacuccaagaaguucaagcccgagaucgccauccgccccaagguccgcgaccaggagggccgcaugaacuacuacuggacccucgucgagcccggcgacaagaucaccuucgaggccaccggcaaccucgucgucccccgcuacgccuucgccauggagcgcaacgccggcuccggcaucaucaucuccgacacccccguccacgacugcaacaccaccugccagacccccaagggcgccaucaacaccucccuccccuuccagaacauccaccccaucaccaucggcaagugccccaaguacgucaaguccaccaagcuccgccucgccaccggccuccgcaacguccccuccauccagucccgcggccucuucggcgccaucgccggcuucaucgagggcggcuggaccggcauggucgacggcugguacggcuaccaccaccagaacgagcagggcuccggcuacgccgccgaccucaaguccacccagaacgccaucgacgagaucaccaacaaggucaacuccgucaucgagaagaugaacacccaguucaccgccgucggcaaggaguucaaccaccucgagaagcgcaucgagaaccucaacaagaaggucgacgacggcuuccucgacaucuggaccuacaacgccgagcuccucguccuccucgagaacgagcgcacccucgacuaccacgacuccaacgucaagaaccucuacgagaagguccgcucccagcucaagaacaacgccaaggaggucggcaacggcugcuucgaguucuaccacaagugcgacaacaccugcauggaguccgucaagaacggcaccuacgacuaccccaaguacuccgaggaggccaagcucaaccgcgaggagaucgacggcgucaagcucgaguccacccgcaucuaccagauccucgccaucuacuccaccgucgccuccucccucguccucgucgucucccucggcgccaucuccuucuggaugugcuccaacggcucccuccagugccgcaucugcaucuga

SEQ ID NO: 99019 - RNA, 1704 nt, Artificial Sequence
  derived and/or modified CDS sequence (opt2) from hemagglutinin__InfluenzaA__ACT15312
auggagaagaucguccuccuccucgccaucgucuccaucgucaaguccgaccagaucugcaucggcuaccacgccaacaacuccaccgagcaggucgacaccaucauggagaagaacgucaccgucacccacgcccaggacauccucgagaagacccacaacggcaagcucugcaaccucgacggcgucaagccccucauccuccgcgacugcuccgucgccggcuggcuccucggcaaccccaugugcgacgaguuccucaacguccccgagugguccuacaucgucgagaagaucaaccccgccaacgaccucugcuaccccggcaacuucaacgacuacgaggagcucaagcaccuccucucccgcaucaaccacuucgagaagauccagaucauccccaagaacuccugguccgaccacgaggccuccggcgucuccuccgccugccccuaccagggccgcuccuccuucuuccgcaacgucgucuggcucaccaagaagaacaacgccuaccccaccaucaagcgcuccuacaacaacaccaaccaggaggaccuccucguccucuggggcauccaccaccccaacgacgccgccgagcagacccgccucuaccagaaccccaccaccuacaucuccgucggcaccuccacccucaaccagcgccucguccccaagaucgccacccgcuccaaggucaacggccaguccggccgcauggaguucuucuggaccauccucaaguccaacgacgccaucaacuucgaguccaacggcaacuucaucgcccccgagaacgccuacaagaucgucaagaagggcgacuccaccaucaugaaguccgagcucgaguacggcaacugcaacaccaagugccagacccccaucggcgccaucaacuccuccaugcccuuccacaacauccacccccucaccaucggcgagugccccaaguacgucaaguccaaccgccucguccucgccaccggccuccgcaacuccccccagggcgagcgccgccgcaagaagcgcggccucuucggcgccaucgccggcuucaucgagggcggcuggcagggcauggucgacggcugguacggcuaccaccacuccaacgagcagggcuccggcuacgccgccgacaaggaguccacccagaaggccaucgacggcgucaccaacaaggucaacuccaucaucgacaagaugaacacccaguucgaggccgucggccgcgaguucaacaaccucgagcgccgcaucgagaaccucaacaagaagauggaggacggcuuccucgacgucuggaccuacaacgccgagcuccucguccucauggagaacgagcgcacccucgacuuccacgacuccaacgucaagaaccucuacgacaagguccgccuccagcuccgcgacaacgccaaggagcucggcaacggcugcuucgaguucuaccaccgcugcgacaacgagugcauggaguccguccgcaacggcaccuacgacuacccccaguacuccgaggaggcccgccucaagcgcgaggagaucuccggcgucaagcucgaguccaucggcaccuaccagauccucuccaucuacuccaccgucgccuccucccucgcccucgccaucauggucgccggccucuuccucuggaugugcuccaacggcucccuccagugccgcaucugcaucuga

SEQ ID NO: 99020 - RNA, 1704 nt, Artificial Sequence
  derived and/or modified CDS sequence (opt2) from hemagglutinin__InfluenzaA__ACT15314
auggagaagaucguccuccuccucgccaucgucucccucgucaaguccgaccagaucugcaucggcuaccacgccaacaacuccaccgagcaggucgacaccaucauggagaagaacgucaccgucacccacgcccaggacauccucgagaagacccacaacggcaagcucugcaaccucgacggcgucaagccccucauccuccgcgacugcuccgucgccggcuggcuccucggcaaccccaugugcgacgaguuccucaacguccccgagugguccuacaucgucgagaagaucaaccccgccaacgaccucugcuaccccggcaacuucaacgacuacgaggagcucaagcaccuccucucccgcaucaaccacuucgagaagauccagaucauccccaagaacuccugguccgaccacgaggccuccggcgucuccuccgccugccccuaccagggccgcuccuccuucuuccgcaacgucgucuggcucaccaagaagaacaacgccuaccccaccaucaagcgcuccuacaacaacaccaaccaggaggaccuccucguccucuggggcauccaccaccccaacgacgccgccgagcagacccgccucuaccagaaccccaccaccuacaucuccgucggcaccuccacccucaaccagcgccucguccccaagaucaccacccgcuccaaggucaacggccaguccggccgcauggaguucuucuggaccauccucaaguccaacgacgccaucaacuucgaguccaacggcaacuucaucgcccccgagaacgccuacaagaucgucaagaagggcgacuccaccaucaugaaguccgagcucgaguacggcaacugcaacaccaagugccagacccccaucggcgccaucaacuccuccaugcccuuccacaacauccacccccucaccaucggcgagugccccaaguacgucaaguccaaccgccucguccucgccaccggccuccgcaacuccccccagggcgagcgccgccgcaagaagcgcggccucuucggcgccaucgccggcuucaucgagggcggcuggcagggcauggucgacggcugguacggcuaccaccacuccaacgagcagggcuccggcuacgccgccgacaaggaguccacccagaaggccaucgacggcgucaccaacaaggucaacuccaucaucgacaagaugaacacccaguucgaggccgucggccgcgaguucaacaaccucgagcgccgcaucgagaaccucaacaagaagauggaggacggcuuccucgacgucuggaccuacaacgccgagcuccucguccucauggagaacgagcgcacccucgacuuccacgacuccaacgucaagaaccucuacgacaagguccgccuccagcuccgcgacaacgccaaggagcucggcaacggcugcuucgaguucuaccaccgcugcgacaacgagugcauggaguccguccgcaacggcaccuacgacuacccccaguacuccgaggaggcccgccucaagcgcgaggagaucuccggcgucaagcucgaguccaucggcaccuaccagauccucuccaucuacuccaccgucgccuccucccucgcccucgccaucauggucgccggccucuuccucuggaugugcuccaacggcucccuccagugccgcaucugcaucuga

SEQ ID NO: 99021 - RNA, 1704 nt, Artificial Sequence
  derived and/or modified CDS sequence (opt2) from hemagglutinin__InfluenzaA__ACT15316
auggagaagaucguccuccuccucgccaucgucucccucgucaaguccgaccagaucugcaucggcuaccacgccaacaacuccaccgagcaggucgacaccaucauggagaagaacgucaccgucacccacgcccaggacauccucgagaagacccacaacggcaagcucugcaaccucgacggcgucaagccccucauccuccgcgacugcuccgucgccggcuggcuccucggcaaccccaugugcgacgaguuccucaacguccccgagugguccuacaucgucgagaagaucaaccccgccaacgaccucugcuaccccggcaacuucaacgacuacgaggagcucaagcaccuccucucccgcaucaaccacuucgagaagauccagaucauccccaagaacuccugguccgaccacgaggccuccggcgucuccuccgccugccccuaccagggccgcuccuccuucuuccgcaacgucgucuggcucaccaagaaggacaacgccuaccccaccaucaagcgcuccuacaacaacaccaaccaggaggaccuccucguccucuggggcauccaccaccccaacgacgccgccgagcagacccgccucuaccagaaccccaccaccuacaucuccgucggcaccuccacccucaaccagcgccucauccccaagaucgccacccgcuccaaggucaacggccaguccggccgcauggaguucuucuggaccauccucaaguccaacgacgccaucaacuucgaguccaacggcaacuucaucgcccccgagaacgccuacaagaucgucaagaagggcgacuccaccaucaugaaguccgagcucgaguacggcaacugcaacaccaagugccagacccccaucggcgccaucaacuccuccaugcccuuccacaacauccacccccucaccaucggcgagugccccaaguacgucaaguccaaccgccucguccucgccaccggccuccgcaacuccccccagggcgagcgccgccgcaagaagcgcggccucuucggcgccaucgccggcuucaucgagggcggcuggcagggcauggucgacggcugguacggcuaccaccacuccaacgagcagggcuccggcuacgccgccgacaaggaguccacccagaaggccaucgacggcgucaccaacaaggucaacuccaucaucgacaagaugaacacccaguucgaggccgucggccgcgaguucaacaaccucgagcgccgcaucgagaaccucaacaagaagauggaggacggcuuccucgacgucuggaccuacaacgccgagcuccucguccucauggagaacgagcgcacccucgacuuccacgacuccaacgucaagaaccucuacgacaagguccgccuccagcuccgcgacaacgccaaggagcucggcaacggcugcuucgaguucuaccaccgcugcgacaacgagugcauggaguccguccgcaacggcaccuacgacuacccccaguacuccgaggaggcccgccucaagcgcgaggagaucuccggcgucaagcucgaguccaucggcaccuaccagauccucuccaucuacuccaccgucgccuccucccucgcccucgccaucauggucgccggccucuuccucuggaugugcuccaacggcucccuccagugccgcaucugcaucuga

SEQ ID NO: 99022 - RNA, 1704 nt, Artificial Sequence
  derived and/or modified CDS sequence (opt2) from hemagglutinin__InfluenzaA__ACT15320
auggagaagaucguccuccuccucgccaucgucucccucgucaaguccgaccagaucugcaucggcuaccacgccaacaacuccaccgagcaggucgacaccaucauggagaagaacgucaccgucacccacgcccaggacauccucgagaagacccacaacggcaagcucugcaaccucgacggcgucaagccccucauccuccgcgacugcuccgucgccggcuggcuccucggcaaccccaugugcgacgaguuccucaacguccccgagugguccuacaucgucgagaagaucaaccccgccaacgaccucugcuaccccggcaacuucaacgacuacgaggagcucaagcaccuccucucccgcaucaaccacuucgagaagauccagaucauccccaagaacuccugguccgaccacgaggccuccggcauguccuccgccugccccuaccagggccgcuccuccuucuuccgcaacgucgucuggcucaccaagaaggacaacgccuaccccaccaucaagcgcuccuacaacaacaccaaccaggaggaccuccucguccucuggggcauccaccaccccaacgacgccgccgagcagacccgccucuaccagaaccccaccaccuacaucuccgucggcaccuccacccucaaccagcgccucguccccaagaucgccacccgcuccaaggucaacggccaguccggccgcauggaguucuucuggaccauccucaaguccaacgacgccaucaacuucgaguccaacggcaacuucaucgcccccgagaacgccuacaagaucgucaagaagggcgacuccaccaucaugaaguccgagcucgaguacggcaacugcaacaccaagugccagacccccaucggcgccaucaacuccuccaugcccuuccacaacauccacccccucaccaucggcgagugccccaaguacgucaaguccaaccgccucguccucgccaccggccuccgcaacuccccccagggcgagcgccgccgcaagaagcgcggccucuucggcgccaucgccggcuucaucgagggcggcuggcagggcauggucgacggcugguacggcuaccaccacuccaacgagcagggcuccggcuacgccgccgacaaggaguccacccagaaggccaucgacggcgucaccaacaaggucaacuccaucaucgacaagaugaacacccaguucgaggccgucggccgcgaguucaacaaccucgagcgccgcaucgagaaccucaacaagaagauggaggacggcuuccucgacgucuggaccuacaacgccgagcuccucguccucauggagaacgagcgcacccucgacuuccacgacuccaacgucaagaaccucuacgacaagguccgccuccagcuccgcgacaacgccaaggagcucggcaacggcugcuucgaguucuaccaccgcugcgacaacgagugcauggaguccguccgcaacggcaccuacgacuacccccaguacuccgaggaggcccgccucaagcgcgaggagaucuccggcgucaagcucgaguccaucggcaccuaccagauccucuccaucuacuccaccgucgccuccucccucgcccucgccaucauggucgccggccucuuccucuggaugugcuccaacggcucccuccagugccgcaucugcaucuga

SEQ ID NO: 99023 - RNA, 1704 nt, Artificial Sequence
  derived and/or modified CDS sequence (opt2) from hemagglutinin__InfluenzaA__ACT15322
auggagaagaucguccuccuccucgccaucgucucccucgucaaguccgaccagaucugcaucggcuaccacgccaacaacuccaccgagcaggucgacaccaucauggagaagaacgucaccgucacccacgcccaggacauccucgagaagacccacaacggcaagcucugcaaccucgacggcgucaagccccucauccuccgcgacugcuccgucgccggcuggcuccucggcaaccccaugugcgacgaguuccucaacguccccgagugguccuacaucgucgagaagaucaaccccgccaacgaccucugcuaccccggcaacuucaacgacuacgaggagcucaagcaccuccucucccgcaucaaccacuucgagaagauccagaucauccccaagaacuccugguccgaccacgaggccuccggcgucuccuccgccugccccuaccagggccgcuccuccuucuuccgcaacgucgucuggcucaccaagaaggacaacgccuaccccaccaucaagcgcuccuacaacaacaccaaccaggaggaccuccucguccucuggggcauccaccaccccaacgacgccgccgagcagacccgccucuaccagaaccccaccaccuacaucuccgucggcaccuccacccucaaccagcgccucguccccaagaucgccacccgcuccaaggucaacggccaguccggccgcauggaguucuucuggaccauccucaaguccaacgacgccaucaacuucgaguccaacggcaacuucaucgcccccgagaacgccuacaagaucgucaagaagggcgacuccaccaucaugaaguccgagcucgaguacggcaacugcaacaccaagugccagacccccaucggcgccaucaacuccuccaugcccuuccacaacauccacccccucaccaucggcgagugccccaaguacgucaaguccaaccgccucguccucgccaccggccuccgcaacuccccccagggcgagcgccgccgcaagaagcgcggccucuucggcgccaucgccggcuucaucgagggcggcuggcagggcauggucgacggcugguacggcuaccaccacuccaacgagcagggcuccggcuacgccgccgacaaggaguccacccagaaggccaucgacggcgucaccaacaaggucaacuccaucaucgacaagaugaacacccaguucgaggccgucggccgcgaguucaacaaccucgagucccgcaucgagaaccucaacaagaagauggaggacggcuuccucgacgucuggaccuacaacgccgagcuccucguccucauggagaacgagcgcacccucgacuuccacgacuccaacgucaagaaccucuacgacaagguccgccuccagcuccgcgacaacgccaaggagcucggcaacggcugcuucgaguucuaccaccgcugcgacaacgagugcauggaguccguccgcaacggcaccuacgacuacccccaguacuccgaggaggcccgccucaagcgcgaggagaucuccggcgucaagcucgaguccaucggcaccuaccagauccucuccaucuacuccaccgucgccuccucccucgcccucgccaucauggucgccggccucuuccucuggaugugcuccaacggcucccuccagugccgcaucugcaucuga

SEQ ID NO: 99024 - RNA, 1704 nt, Artificial Sequence
  derived and/or modified CDS sequence (opt2) from hemagglutinin__InfluenzaA__ACT15326
auggagaagaucguccuccuccucgccaucgucucccucgucaaguccgaccagaucugcaucggcuaccacgccaacaacuccaccgagcaggucgacaccaucauggagaagaacgucaccgucacccacgcccaggacauccucgagaagacccacaacggcaagcucugcaaccucgacggcgucaagccccucauccuccgcgacugcuccgucgccggcuggcuccucggcaaccccaugugcgacgaguuccucaacguccccgagugguccuacaucgucgagaagaucaaccccgccaacgaccucugcuaccccggcaacuucaacgacuacgaggagcucaagcaccuccucucccgcaucaaccacuucgagaagauccagaucauccccaagaacuccugguccgaccacgaggccuccggcgucuccuccgccugccccuaccagggccgcuccuccuucuuccgcaacgucgucuggcucaccaagaaggacaacgccuaccccaccaucaagcgcuccuacaacaacaccaaccaggaggaccuccucguccucuggggcauccaccaccccaacgacgccgccgagcagacccgccucuaccagaaccccaccaccuacaucuccgucggcaccuccacccucaaccagcgccucauccccaagaucgccacccgcuccaaggucaacggccaguccggccgcauggaguucuucuggaccauccucaagcccaacgacgccaucaacuucgaguccaacggcaacuucaucgcccccgagaacgccuacaagaucgucaagaagggcgacuccaccaucaugaaguccgagcucgaguacggcaacugcaacaccaagugccagacccccaucggcgccaucaacuccuccaugcccuuccacaacauccacccccucaccaucggcgagugccccaaguacgucaaguccaaccgccucguccucgccaccggccuccgcaacuccccccagggcgagcgccgccgcaagaagcgcggccucuucggcgccaucgccggcuucaucgagggcggcuggcagggcauggucgacggcugguacggcuaccaccacuccaacgagcagggcuccggcuacgccgccgacaaggaguccacccagaaggccaucgacggcgucaccaacaaggucaacuccaucaucgacaagaugaacacccaguucgaggccgucggccgcgaguucaacaaccucgagcgccgcaucgagaaccucaacaagaagauggaggacggcuuccucgacgucuggaccuacaacgccgagcuccucguccucauggagaacgagcgcacccucgacuuccacgacuccaacgucaagaaccucuacgacaagguccgccuccagcuccgcgacaacgccaaggagcucggcaacggcugcuucgaguucuaccaccgcugcgacaacgagugcauggaguccguccgcaacggcaccuacgacuacccccaguacuccgaggaggcccgccucaagcgcgaggagaucuccggcgucaagcucgaguccaucggcaccuaccagauccucuccaucuacuccaccgucgccuccucccucgcccucgccaucauggucgccggccucuuccucuggaugugcuccaacggcucccuccagugccgcaucugcaucuga

SEQ ID NO: 99025 - RNA, 1704 nt, Artificial Sequence
  derived and/or modified CDS sequence (opt2) from hemagglutinin__InfluenzaA__ACT15328
auggagaagaucguccuccuccucgccaucgucucccucgucaaguccgaccagaucugcaucggcuaccacgccaacaacuccaccgagcaggucgacaccaucauggagaagaacgucaccgucacccacgcccaggacauccucgagaagacccacaacggcaagcucugcaaccucgacggcgucaagccccucauccuccgcgacugcuccgucgccggcuggcuccucggcaaccccaugugcgacgaguuccucaacguccccgagugguccuacaucgucgagaagaucaaccccgccaacgaccucugcuaccccggcaacuucaacgacuacgaggagcucaagcaccuccucucccgcaucaaccacuucgagaagauccagaucauccccaagaacuccugguccgaccacgaggccuccggcgucuccuccgccugccccuaccagggccgcuccuccuucuuccgcaacgucgucuggcucaccaagaaggacaacgccuaccccaccaucaagcgcuccuacaacaacaccaaccaggaggaccuccucguccucuggggcauccaccaccccaacgacgccgccgagcagacccgccucuaccagaaccccaccaccuacaucuccgucggcaccuccacccucaaccagcgccucguccccaagaucgccacccgcuccaaggucaacggccagaacggccgcauggaguucuucuggaccauccucaaguccaacgacgccaucaacuucgaguccaacggcaacuucaucgcccccgagaacgccuacaagaucgucaagaagggcgacuccaccaucaugaaguccgagcucgaguacggcaacugcaacaccaagugccagacccccaucggcgccaucaacuccuccaugcccuuccacaacauccacccccucaccaucggcgagugccccaaguacgucaaguccaaccgccucguccucgccaccggccuccgcaacuccccccagggcgagcgccgccgcaagaagcgcggccucuucggcgccaucgccggcuucaucgagggcggcuggcagggcauggucgacggcugguacggcuaccaccacuccaacgagcagggcuccggcuacgccgccgacaaggaguccacccagaaggccaucgacggcgucaccaacaaggucaacuccaucaucgacaagaugaacacccaguucgaggccgucggccgcgaguucaacaaccucgagcgccgcaucgagaaccucaacaagaagauggaggacggcuuccucgacgucuggaccuacaacgccgagcuccucguccucauggagaacgagcgcacccucgacuuccacgacuccaacgucaagaaccucuacgacaagguccgccuccagcuccgcgacaacgccaaggagcucggcaacggcugcuucgaguucuaccaccgcugcgacaacgagugcauggaguccguccgcaacggcaccuacgacuacccccacuacuccgaggaggcccgccucaagcgcgaggagaucuccggcgucaagcucgaguccaucggcaccuaccagauccucuccaucuacuccaccgucgccuccucccucgcccucgccaucauggucgccggccucuuccucuggaugugcuccaacggcucccuccagugccgcaucugcaucuga

SEQ ID NO: 99026 - RNA, 1704 nt, Artificial Sequence
  derived and/or modified CDS sequence (opt2) from hemagglutinin__InfluenzaA__ACT15330
auggagaagaucguccuccuccucgccaucgucucccucgucaaguccgaccagaucugcaucggcuaccacgccaacaacuccaccgagcaggucgacaccaucauggagaagaacgucaccgucacccacgcccaggacauccucgagaagacccacaacggcaagcucugcaaccucgacggcgucaagccccucauccuccgcgacugcuccgucgccggcuggcuccucggcaaccccaugugcgacgaguuccucaacguccccgagugguccuacaucgucgagaagaucaaccccgccaacgaccucugcuaccccggcaacuucaacgacuacgaggagcucaagcaccuccucucccgcaucaaccacuucgagaagauccagaucauccccaagaacuccugguccgaccacgaggccuccggcgucuccuccgccugccccuaccagggccgcuccuccuucuuccgcaacgucgucuggcucaccaagaaggacaacgccuaccccaccaucaagcgcuccuacaacaacaccaaccaggaggaccuccucguccucuggggcauccaccaccccaacgacgccgccgagcagacccgccucuaccagaaccccaccaccuacaucuccgucggcaccuccacccucaaccagcgccucguccccaagaucgccacccgcuccaaggucaacggccaguccggccgcauggaguucuucuggaccauccucaaguccaacgacgccaucaacuucgaguccaacggcaacuucaucgcccccgagaacgccuacaagaucgucaagaagggcgacuccaccaucaugaaguccgagcucgaguacggcaacugcaacaccaagugccagacccccaucggcgccaucaacuccuccaugcccuuccacaacauccacccccucaccaucggcgagugccccaaguacgucaaguccaaccgccucguccucgccaccggccuccgcaacuccccccagggcgagcgccgccgcaagaagcgcggccucuucggcgccaucgccggcuucaucgagggcggcuggcagggcauggucgacggcugguacggcuaccaccacuccaacgagcagggcuccggcuacgccgccgacaaggaguccacccagaaggccaucgacggcgucaccaacaaggucaacuccaucaucgacaagaugaacacccaguucgaggccgucggccgcgaguucaacaaccucgagcgccgcaucgagaaccucaacaagaagauggaggacggcuuccucgacgucuggaccuacaacgccgagcuccucguccucauggagaacgagcgcacccucgacuuccacgacuccaacgucaagaaccucuacgacaagguccgccuccagcuccgcgacaacgccaaggagcucggcaacggcugcuucgaguucuaccaccgcugcgacaacgagugcauggaguccguccgcaacggcaccuacgacuacccccacuacuccgaggaggcccgccucaagcgcgaggagaucuccggcgucaagcucgaguccaucggcaccuaccagauccucuccaucuacuccaccgucgccuccucccucgcccucgccaucauggucgccggccucuuccucuggaugugcuccaacggcucccuccagugccgcaucugcaucuga

SEQ ID NO: 99027 - RNA, 1707 nt, Artificial Sequence
  derived and/or modified CDS sequence (opt2) from hemagglutinin__InfluenzaA__ACT15332
auggagaagaucguccuccuccucgccaucgucucccucgucaaguccgaccagaucugcaucggcuaccacgccaacaacuccaccgagcaggucgacaccaucauggagaagaacgucaccgucacccacgcccaggacauccucgagaagacccacaacggcaagcucugcgaccucgacggcgucaagccccucauccuccgcgacugcuccgucgccggcuggcuccucggcaaccccaugugcgacgaguuccucaacguccccgagugguccuacaucgucgagaagaucaaccccgccaacgaccucugcuaccccggcgacuucaacgacuacgaggagcucaagcaccuccucucccgcaucaaccacuucgagaagauccagaucauccccaaguccuccugguccgaccacgaggccuccuccggcgucuccuccgccugccccuaccagggccgcuccuccuucuuccgcaacgucgucuggcucaucaagaaggacaacgccuaccccaccaucaagcgcuccuacaacaacaccaaccaggaggaccuccucguccucuggggcauccaccaccccaacgacgccgccgagcagacccgccucuaccacaaccccaccaccuacaucuccgucggcaccuccacccucaaccagcgccucguccccaagaucgccacccgcuccaagaucaacggccaguccggccgcauggaguucuucuggaccauccucaagcccaacgacgccaucaacuucgaguccaacggcaacuucaucgcccccgagaacgccuacaagaucgucaagaagggcgacuccaccaucaugaaguccgagcucgaguacggcaacugcaacaccaagugccagacccccaucggcgccaucaacuccuccaugcccuuccacaacauccacccccucaccaucggcgagugccccaaguacgucaaguccucccgccucguccucgccaccggccuccgcaacuccccccagggcaagucccgccgcaagaagcgcggccucuucggcgccaucgccggcuucaucgagggcggcuggcagggcauggucgacggcugguacggcuaccaccacuccaacgagcagggcuccggcuacgccgccgacaaggaguccacccagcgcgccaucgacggcgucaccaacaaggucaacuccaucaucgacaagaugaacacccaguucgaggccgucggccgcgaguucaacaaccucgagcgccgcaucgagaaccucaacaagaagauggaggacggcuuccucgacgucuggaccuacaacgccgagcuccucguccucauggagaacgagcgcacccucgacuuccacgacuccaacgucaagaaccucuacgacaagguccgccuccagcuccgcgacaacgccaaggagcucggcaacggcugcuucgaguucuaccaccgcugcgacaacgagugcauggaguccguccgcaacggcaccuacgacuacccccaguacuccgaggaggcccgccucaagcgcgaggagaucuccggcgucaagcucgaguccaucggcaucuaccagauccucuccaucuacuccaccgucgccuccucccucgcccucgccaucauggucgccggccucuuccucuggaugugcuccaacggcucccuccagugccgcaucugcaucuga

SEQ ID NO: 99028 - RNA, 1704 nt, Artificial Sequence
  derived and/or modified CDS sequence (opt2) from hemagglutinin__InfluenzaA__ACT15336
auggagaagaucguccuccuccucgccaucgucucccucgucaaguccgaccagaucugcaucggcuaccacgccaacaacuccaccgagcaggucgacaccaucauggagaagaacgucaccgucacccacgcccaggacauccucgagaagacccacaacggcaagcucugcaaccucgacggcgucaagccccucauccuccgcgacugcuccgucgccggcuggcuccucggcaaccccaugugcgacgaguuccucaacguccccgagugguccuacaucgucgagaagaucaaccccgccaacgaccucugcuaccccggcaacuucaacgacuacgaggagcucaagcaccuccucucccgcaucaaccacuucgagaagauccagaucauccccaagaacuccugguccgaccacgaggccuccggcgucuccuccgccugccccuaccagggccgcuccuccuucuuccgcaacgucgucuggcucaccaagaaggacaacgccuaccccaccaucaagcgcuccuacaacaacaccaaccaggaggaccuccucguccucuggggcauccaccaccccaacgacgccgccgagcagacccgccucuaccagaaccccaccaccuacaucuccgucggcaccuccacccucaaccagcgccucguccccaagaucgccacccgcuccaaggucaacggccaguccggccgcauggaguucuucuggaccauccucaaguccaacgacgccaucaacuucgaguccaacggcaacuucaucgcccccgagaacgccuacaagaucgucaagaagggcgacuccaccaucaugaaguccgagcucgaguacggcaacugcaacaccaagugccagacccccaucggcgccaucaacuccuccaugcccuuccacaacauccacccccucaccaucggcgagugccccaaguacgucaaguccaaccgccucguccucgccaccggccuccgcaacuccccccagggcgagcgccgccgcaagaagcgcggccucuucggcgccaucgccggcuucaucgagggcggcuggcagggcauggucgacggcugguacggcuaccaccacuccaacgagcagggcuccggcuacgccgccgacaaggaguccacccagaaggccaucgacggcgucaccaacaaggucaacuccaucaucgacaagaugaacacccaguucgaggccgucggccgcgaguucaacaaccucgagcgccgcaucgagaaccucaacaagaagauggaggacggcuuccucgacgucuggaccuacaacgccgagcuccucguccucauggagaacgagcgcacccucgacuuccacgacuccaacgucaagaaccucuacgacaagguccgccuccagcuccgcgacaacgccaaggagcucggcaacggcugcuucgaguucuaccaccgcugcgacaacgagugcauggaguccguccgcaacggcaccuacgacuacccccaguacuccgaggaggcccgccucaagcgcgaggagaucuccggcgucaagcucgaguccaucggcaccuaccagauccucuccaucuacuccaccgucgccuccucccucgcccucgccaucauggucgccggccucuuccucuggaugugcuccaacggcucccuccagugccgcaucugcaucuga

SEQ ID NO: 99029 - RNA, 1704 nt, Artificial Sequence
  derived and/or modified CDS sequence (opt2) from hemagglutinin__InfluenzaA__ACT15338
auggagaagaucguccuccuccucgccaucgucucccucgucaaguccgaccagaucugcaucggcuaccacgccaacaacuccaccgagcaggucgacaccaucauggagaagaacgucaccgucacccacgcccaggacauccucgagaagacccacaacggcaagcucugcaaccucgacggcgucaagccccucauccuccgcgacugcuccgucgccggcuggcuccucggcaaccccaugugcgacgaguuccucaacguccccgagugguccuacaucgucgagaagaucaaccccgccaacgaccucugcuaccccggcaacuucaacgacuacgaggagcucaagcaccuccucucccgcaucaaccacuucgagaagauccagaucauccccaagaacuccugguccgaccacgaggccuccggcgucuccuccgccugccccuaccagggccgcuccuccuucuuccgcaacgucgucuggcucaccaagaagaacaacgccuaccccaccaucaagcgcuccuacaacaacaccaaccaggaggaccuccucguccucuggggcauccaccaccccaacgacgccaccgagcagacccgccucuaccagaaccccaccaccuacaucuccgucggcaccuccacccucaaccagcgccucauccccaagaucgccacccgcuccaaggucaacggccaguccggccgcauggaguucuucuggaccauccucaaguccaacgacgccaucaacuucgaguccaacggcaacuucaucgcccccgagaacgccuacaagaucgucaagaagggcgacuccaccaucaugaaguccgagcucgaguacggcaacugcaacaccaagugccagacccccaucggcgccaucaacuccuccaugcccuuccacaacauccacccccucaccaucggcgagugccccaaguacgucaaguccaaccgccucguccucgccaccggccuccgcaacuccccccaggagggccgccgccgcaagaagcgcggccucuucggcgccaucgccggcuucaucgagggcggcuggcagggcauggucgacggcugguacggcuaccaccacuccaacgagcagggcuccggcuacgccgccgacaaggaguccacccagaaggccaucgacggcgucaccaacaaggucaacuccaucaucgacaagaugaacacccaguucgaggccgucggccgcgaguucaacaaccucgagcgccgcaucgagaaccucaacaagaagauggaggacggcuuccucgacgucuggaccuacaacgccgagcuccucguccucauggagaacgagcgcacccucgacuuccacgacuccaacgucaagaaccucuacgacaagguccgccuccagcuccgcgacaacgccaaggagcucggcaacggcugcuucgaguucuaccaccgcugcgacaacgagugcauggaguccguccgcaacggcaccuacgacuacccccaguacuccgaggaggcccgccucaagcgcgaggagaucuccggcgucaagcucgaguccaucggcaccuaccagauccucuccaucuacuccaccgucgccuccucccucgcccucgccaucauggucgccggccucuuccucuggaugugcuccaacggcucccuccagugccgcaucugcaucuga

SEQ ID NO: 99030 - RNA, 1704 nt, Artificial Sequence
  derived and/or modified CDS sequence (opt2) from hemagglutinin__InfluenzaA__ACT15340
auggagaagaucguccuccuccucgccaucgucucccucgucaaguccgaccagaucugcaucggcuaccacgccaacaacuccaccgagcaggucgacaccaucauggagaagaacgucaccgucacccacgcccaggacauccucgagaagacccacaacggcaagcucugcaaccucgacggcgucaagccccucauccuccgcgacugcuccgucgccggcuggcuccucggcaaccccaugugcgacgaguuccucaacguccccgagugguccuacaucgucgagaagaucaaccccgccaacgaccucugcuaccccggcaacuucaacgacuacgaggagcucaagcaccuccucucccgcaucaaccacuucgagaagauccagaucauccccaagaacuccugguccgaccacgaggccuccggcgucuccuccgccugccccuaccagggccgcuccuccuucuuccgcaacgucgucuggcucaccaagaagaacaacgccuaccccaccaucaagcgcuccuacaacaacaccaaccaggaggaccuccucguccucuggggcauccaccaccccaacgacgccgaggagcagacccgccucuaccagaaccccaccaccuacaucuccgucggcaccuccacccucaaccagcgccucguccccaagaucgccacccgcuccaaggucaacggccaguccggccgcauggaguucuucuggaccauccucaaguccaacgacgccaucaacuucgaguccaacggcaacuucaucgcccccgagaacgccuacaagaucgucaagaagggcgacuccaccaucaugaaguccgagcucgaguacggcaacugcaacaccaagugccagacccccaucggcgccaucaacuccuccaugcccuuccacaacauccacccccucaccaucggcgagugccccaaguacgucaaguccaaccgccucguccucgccaccggccuccgcaacuccccccagggcgagcgccgccgcaagaagcgcggccucuucggcgccaucgccggcuucaucgagggcggcuggcagggcauggucgacggcugguacggcuaccaccacuccaacgagcagggcuccggcuacgccgccgacaaggaguccacccagaaggccaucgacggcgucaccaacaaggucaacuccaucaucgacaagaugaacacccaguucgaggccgucggccgcgaguucaacgcccucgagcgccgcaucgagaaccucaacaagaagauggaggacggcuuccucgacgucuggaccuacaacgccgagcuccucguccucauggagaacgagcgcacccucgacuuccacgacuccaacgucaagaaccucuacgacaagguccgccuccagcuccgcgacaacgccaaggagcucggcaacggcugcuucgaguucuaccaccgcugcgacaacgagugcauggaguccguccgcaacggcaccuacgacuacccccaguacuccgaggaggcccgccucaagcgcgaggagaucuccggcgucaagcucgaguccaucggcaccuaccagauccucuccaucuacuccaccgucgccuccucccucgcccucgccaucauggucgccggccucuuccucuggaugugcuccaacggcucccuccagugccgcaucugcaucuga

SEQ ID NO: 99031 - RNA, 1704 nt, Artificial Sequence
  derived and/or modified CDS sequence (opt2) from hemagglutinin__InfluenzaA__ACT15342
auggagaagaucguccuccuccucgccaucgucucccucgucaaguccgaccagaucugcaucggcuaccacgccaacaacuccaccgagcaggucgacaccaucauggagaagaacgucaccgucacccacgcccaggacauccucgagaagacccacaacggcaagcucugcaaccucgacggcgucaagccccucauccuccgcgacugcuccgucgccggcuggcuccucggcaaccccaugugcgacgaguuccucaacguccccgagugguccuacaucgucgagaagaucaaccccgccaacgaccucugcuaccccggcuccuucaacgacuacgaggagcucaagcaccuccucucccgcaucaaccacuucgagaagauccagaucauccccaagaacuccugguccgaccacgaggccuccggcgucuccuccgccugccccuaccagggccgcuccuccuucuuccgcaacgucgucuggcucaccaagaaggacaacgccuaccccaccaucaagcgcuccuacaacaacaccaaccaggaggaccuccucguccucuggggcauccaccaccccaacgacgccgccgagcagacccgccucuaccagaaccccaccaccuacaucuccgucggcaccuccacccucaaccagcgccucguccccaagaucgccacccgcuccaaggucaacggccaguccggccgcauggaguucuucuggaccauccucaagcccaacgacgccaucaacuucgaguccaacggcaacuucaucgcccccgagaacgccuacaagaucgucaagaagggcgacuccaccaucaugaaguccgagcucgaguacggcaacugcaacaccaagugccagacccccaucggcgccaucaacuccuccaugcccuuccacaacauccacccccucaccaucggcgagugccccaaguacgucaaguccaaccgccucauccucgccaccggccuccgcaacuccccccagggcgagcgccgccgcaagaagcgcggccucuucggcgccaucgccggcuucaucgagggcggcuggcagggcauggucgacggcugguacggcuaccaccacuccaacgagcagggcuccggcuacgccgccgacaaggaguccacccagaaggccaucgacggcgucaccaacaaggucaacuccaucaucgacaagaugaacacccaguucgaggccgucggccgcgaguucaacaaccucgagcgccgcaucgagaaccucaacaagaagauggaggacggcuuccucgacgucuggaccuacaacgccgagcuccucguccucauggagaacgagcgcacccucgacuuccacgacuccaacgucaagaaccucuacgacaagguccgccuccagcuccgcgacaacgccaaggagcucggcaacggcugcuucgaguucuaccaccgcugcgacaacgagugcauggaguccguccgcaacggcaccuacgacuacccccaguacuccgaggaggcccgccucaagcgcgaggagaucuccggcgucaagcucgaguccaucggcaccuaccagauccucuccaucuacuccaccgucgccuccucccucgcccucgccaucauggucgccggccucuuccucuggaugugcuccaacggcucccuccagugccgcaucugcaucuga

SEQ ID NO: 99032 - RNA, 1704 nt, Artificial Sequence; identical to SEQ ID NO: 99028
  derived and/or modified CDS sequence (opt2) from hemagglutinin__InfluenzaA__ACT15343

SEQ ID NO: 99033 - RNA, 1704 nt, Artificial Sequence
  derived and/or modified CDS sequence (opt2) from hemagglutinin__InfluenzaA__ACT15345
auggagaagaucguccuccuccucgccaucgucucccucgucaaguccgaccagaucugcaucggcuaccacgccaacaacuccaccgagcaggucgacaccaucauggagaagaacgucaccgucacccacgcccaggacauccucgagaagacccacaacggcaagcucugcaaccucgacggcgucaagccccucauccuccgcgacugcuccgucgccggcuggcuccucggcaaccccaugugcgacgaguuccucaacguccccgagugguccuacaucgucgagaagaucaaccccgccaacgaccucugcuaccccggcaacuucaacgacuacgaggagcucaagcaccuccucucccgcaucaaccacuucgagaagauccagaucauccccaagaacuccugguccgaccacgaggccuccggcgucuccuccuccugccccuaccagggccgcuccuccuucuuccgcaacgucgucuggcucaccaagaaggacaacgccuaccccaccaucaagcgcuccuacaacaacaccaaccaggaggaccuccucguccucuggggcauccaccaccccaacgacgccgccgagcagacccgccucuaccagaaccccaccaccuacaucuccgucggcaccuccacccucaaccagcgccucguccccaagaucgccacccgcuccaaggucaacggccaguccggccgcauggaguucuucuggaccauccucaaguccaacgacgccaucaacuucggcuccaacggcaacuucaucgcccccgagaacgccuacaagaucgucaagaagggcgacuccaccaucaugaaguccgagcucgaguacggcaacugcaacaccaagugccagacccccaucggcgccaucaacuccuccaugcccuuccacaacauccacccccucaccaucggcgagugccccaaguacgucaaguccaaccgccucguccucgccaccggccuccgcaacuccccccagggcgagcgccgccgcaagaagcgcggccucuucggcgccaucgccggcuucaucgagggcggcuggcagggcauggucgacggcugguacggcuaccaccacuccaacgagcagggcuccggcuacgccgccgacaaggaguccacccagaaggccaucgacggcgucaccaacaaggucaacuccaucaucgacaagaugaacacccaguucgaggccgucggccgcgaguucaacaaccucgagcgccgcaucgagaaccucaacaagaagauggaggacggcuuccucgacgucuggaccuacaacgccgagcuccucguccucauggagaacgagcgcacccucgacuuccacgacuccaacgucaagaaccucuacgacaagguccgccuccagcuccgcgacaacgccaaggagcucggcaacggcugcuucgaguucuaccaccgcugcgacaacgagugcauggaguccguccgcaacggcaccuacgacuacccccaguacuccgaggaggcccgccucaagcgcgaggagaucuccggcgucaagcucgaguccaucggcaccuaccagauccucuccaucuacuccaccgucgccuccucccucgcccucgccaucauggucgccggccucuuccucuggaugugcuccaacggcucccuccagugccgcaucugcaucuga

SEQ ID NO: 99034 - RNA, 1707 nt, Artificial Sequence
  derived and/or modified CDS sequence (opt2) from hemagglutinin__InfluenzaA__ACT15347
auggagaagaucguccuccuccucgccaucgucucccucgucaaguccgaccagaucugcaucggcuaccacgccaacaacuccaccgagcaggucgacaccaucauggagaagaacgucaccgucacccacgcccaggacauccucgagaagacccacaacggcaagcucugcgaccucgacggcgucaagccccucauccuccgcgacugcuccgucgccggcuggcuccucggcaaccccaugugcgacgaguuccucaacguccccgagugguccuacaucgucgagaagaucaaccccgccaacgaccucugcuaccccggcgacuucaacgacuacgaggagcucaagcaccuccucucccgcaucaaccacuucgagaagauccagaucauccccaaguccuccugguccgaccacgaggccuccuccggcgucuccuccgccugccccuaccagggccgcuccuccuucuuccgcaacgucgucuggcucaucaagaaggacaacgccuaccccaccaucaagcgcuccuacaacaacaccaaccaggaggaccuccucguccucuggggcauccaccaccccaacgacgccgccgagcagacccgccucuaccacaaccccaccaccuacaucuccgucggcaccuccacccucaaccagcgccucguccccaagaucgccacccgcuccaaggucaacggccaguccggccgcauggaguucuucuggaccauccucaagcccaacgacgccaucaacuucgaguccaacggcaacuucaucgcccccgagaacgccuacaagaucgucaagaagggcgacuccaccaucaugaaguccgagcucgaguacggcaacugcaacaccaagugccagacccccaucggcgccaucaacuccuccaugcccuuccacaacauccacccccucaccaucggcgagugccccaaguacgucaaguccucccgccucguccucgccaccggccuccgcaacuccccccagggcaagaaccgccgcaagaagcgcggccucuucggcgccaucgccggcuucaucgagggcggcuggcagggcauggucgacggcugguacggcuaccaccacuccaacgagcagggcuccggcuacgccgccgacaaggaguccacccagcgcgccaucgacggcgucaccaacaaggucaacuccaucaucgacaagaugaacacccaguucgaggccgucggccgcgaguucaacaaccucgagcgccgcaucgagaaccucaacaagaagauggaggacggcuuccucgacgucuggaccuacaacgccgagcuccucguccucauggagaacgagcgcacccucgacuuccacgacuccaacgucaagaaccucuacgacaagguccgccuccagcuccgcgacaacgccaaggagcucggcaacggcugcuucgaguucuaccaccgcugcgacaacgagugcauggaguccguccgcaacggcaccuacgacuacccccaguacuccgaggaggcccgccucaagcgcgaggagaucuccggcgucaagcucgaguccaucggcaucuaccagauccucuccaucuacuccaccgucgccuccucccucgcccucgccaucauggucgccggccucuuccucuggaugugcuccaacggcucccuccagugccgcaucugcaucuga

SEQ ID NO: 99035 - RNA, 1704 nt, Artificial Sequence
  derived and/or modified CDS sequence (opt2) from hemagglutinin__InfluenzaA__ACT15349
auggagaagaucguccuccuccucgccaucgucucccucgucaaguccgaccagaucugcaucggcuaccacgccaacaacuccaccgagcaggucgacaccaucauggagaagaacgucaccgucacccacgcccaggacauccucgagaagacccacaacggcaagcucugcaaccucgacggcgucaagccccucauccuccgcgacugcuccgucgccggcuggcuccucggcaaccccaugugcgacgaguuccucaacguccccgagugguccuacaucgucgagaagaucaaccccgccaacgaccucugcuaccccggcaacuucaacgacuacgaggagcucaagcaccuccucucccgcaucaaccacuucgagaagauccagaucauccccaagaacuccugguccgaccacgaggccuccggcgucuccuccgccugccccuaccagggccgcuccuccuucuuccgcaacgucgucuggcucaccaagaaggacaacgccuaccccaccaucaagcgcuccuacaacaacaccaaccaggaggaccuccucguccucuggggcauccaccaccccaacgacgccaccgagcagacccgccucuaccagaaccccaccaccuacaucuccgucggcaccuccacccucaaccagcgccucauccccaagaucgccacccgcuccaaggucaacggccaguccggccgcauggaguucuucuggaccauccucaaguccaacgacgccaucaacuucgaguccaacggcaacuucaucgcccccgagaacgccuacaagaucgucaagaagggcgacuccaccaucaugaaguccgagcucgaguacggcaacugcaacaccaagugccagacccccaucggcgccaucaacuccuccaugcccuuccacaacauccacccccucaccaucggcgagugccccaaguacgucaaguccaaccgccucguccucgccaccggccuccgcaacuccccccaggaggagcgccgccgcaagaagcgcggccucuucggcgccaucgccggcuucaucgagggcggcuggcagggcauggucgacggcugguacggcuaccaccacuccaacgagcagggcuccggcuacgccgccgacaaggaguccacccagaaggccaucgacggcgucaccaacaaggucaacuccaucaucgacaagaugaacacccaguucgaggccgucggccgcgaguucaacaaccucgagcgccgcaucgagaaccucaacaagaagauggaggacggcuuccucgacgucuggaccuacaacgccgagcuccucguccucauggagaacgagcgcacccucgacuuccacgacuccaacgucaagaaccucuacgacaagguccgccuccagcuccgcgacaacgccaaggagcucggcaacggcugcuucgaguucuaccaccgcugcgacaacgagugcauggaguccguccgcaacggcaccuacgacuacccccaguacuccgaggaggcccgccucaagcgcgaggagaucuccggcgucaagcucgaguccaucggcaccuaccagauccucuccaucuacuccaccgucgccuccucccucgcccucgccaucauggucgccggccucuuccucuggaugugcuccaacggcucccuccagugccgcaucugcaucuga

SEQ ID NO: 99036 - RNA, 1707 nt, Artificial Sequence
  derived and/or modified CDS sequence (opt2) from hemagglutinin__InfluenzaA__ACT15351
auggagaagaucguccuccuccucgccaucgucucccucgucaaguccgaccagaucugcaucggcuaccacgccaacaacuccaccgagcaggucgacaccaucauggagaagaacgucaccgucacccacgcccaggacauccucgagaagacccacaacggcaagcucugcgaccucgacggcgucaagccccucauccuccgcgacugcuccgucgccggcuggcuccucggcaaccccaugugcgacgaguuccucaacguccccgagugguccuacaucgucgagaagaucaaccccgccaacgaccucugcuaccccggcgacuucaacgacuacgaggagcucaagcaccuccucucccgcaucaaccacuucgagaagauccagaucauccccaaguccuccugguccgaccacgaggccuccuccggcgucuccuccgccugccccuaccagggcggcuccuccuucuuccgcaacgucgucuggcucaucaagaaggacaacgccuaccccaccaucaagcgcuccuacaacaacaccaaccaggaggaccuccucguccucuggggcauccaccaccccaacgacgccgccgagcagacccgccucuaccacaaccccaccaccuacaucuccgucggcaccuccacccucaaccagcgccucguccccaagaucgccacccgcuccaaggucaacggccaguccggccgcauggaguucuucuggaccauccucaagcccaacgacgccaucaacuucgaguccaacggcaacuucaucgcccccgagaacgccuacaagaucgucaagaagggcgacuccaccaucaugaaguccgagcucgaguacggcaacugcaacaccaagugccagacccccaucggcgccaucaacuccuccaugcccuuccacaacauccacccccucaccaucggcgagugccccaaguacgucaaguccucccgccucguccucgccaccggccuccgcaacuccccccagggcaagucccgccgcaagaagcgcggccucuucggcgccaucgccggcuucaucgagggcggcuggcagggcauggucgacggcugguacggcuaccaccacuccaacgagcagggcuccggcuacgccgccgacaaggaguccacccagcgcgccaucgacggcgucaccaacaaggucaacuccaucaucgacaagaugaacacccaguucgaggccgucggccgcgaguucaacaagcucgagcgccgcaucgagaaccucaacaagaagauggaggacggcuuccucgacgucuggaccuacaacgccgagcuccucguccucauggagaacgagcgcacccucgacuuccacgacuccaacgucaagaaccucuacgacaagguccgccuccagcuccgcgacaacgccaaggagcucggcaacggcugcuucgaguucuaccaccgcugcgacaacgagugcauggaguccguccgcaacggcaccuacgacuacccccaguacuccgaggaggcccgccucaagcgcgaggagaucuccggcgucaagcucgaguccaucggcaucuaccagauccucuccaucuacuccaccgucgccuccucccucgcccucgccaucauggucgccggccucuuccucuggaugugcuccaacggcucccuccagugccgcaucugcaucuga

SEQ ID NO: 99037 - RNA, 1704 nt, Artificial Sequence
  derived and/or modified CDS sequence (opt2) from hemagglutinin__InfluenzaA__ACT15353
auggagaagaucguccuccuccucgccaucgucucccucgucaaguccgaccagaucugcaucggcuaccacgccaacaacuccaccgagcaggucgacaccaucauggagaagaacgucaccgucacccacgcccaggacauccucgagaagacccacaacggcaagcucugcaaccucgacggcgucaagccccucauccuccgcgacugcuccgucgccggcuggcuccucggcaaccccaugugcgacgaguuccucaacguccccgagugguccuacaucgucgagaagaucaaccccgccaacgaccucugcuaccccggcaacuucaacgacuacgaggagcucaagcaccuccucucccgcaucaaccacuucgagaagauccagaucauccccaagaacuccugguccgaccacgaggccuccggcgucuccuccgccugccccuaccagggccgcuccuccuucuuccgcaacgucgucuggcucaccaagaagaacuccgccuaccccaccaucaagcgcuccuacaacaacaccaaccaggaggaccuccucguccucuggggcauccaccaccccaacgacgccgccgagcagacccgccucuaccagaaccccaccaccuacaucuccgucggcaccuccacccucaaccagcgccucguccccaagaucgccacccgcuccaaggucaacggccaguccggccgcauggaguucuucuggaccauccucaaguccaacgacgccaucaacuucgaguccaacggcaacuucaucgcccccgagaacgccuacaagaucgucaagaagggcgacuccaccaucaugaaguccgagcucgaguacuccaacugcaacaccaagugccagacccccaucggcgccaucaacuccuccaugcccuuccacaacauccacccccucaccaucggcgagugccccaaguacgucaaguccaaccgccucguccucgccaccggccuccgcaacuccccccagggcgagcgccgccgcaagaagcgcggccucuucggcgccaucgccggcuucaucgagggcggcuggcagggcauggucgacggcugguacggcuaccaccacuccaacgagcagggcuccggcuacgccgccgacaaggaguccacccagaaggccaucgacggcgucaccaacaaggucaacuccaucaucgacaagaugaacacccaguucgaggccgucggccgcgaguucaacaaccucgagcgccgcaucgagaaccucaacaagaagauggaggacggcuuccucgacgucuggaccuacaacgccgagcuccucguccucauggagaacgagcgcacccucgacuuccacgacuccaacgucaagaaccucuacgacaagguccgccuccagcuccgcgacaacgccaaggagcucggcaacggcugcuucgaguucuaccaccgcugcgacaacgagugcauggaguccguccgcaacggcaccuacgacuacccccaguacuccgaggaggcccgccucaagcgcgaggagaucuccggcgucaagcucgaguccaucggcaccuaccagauccucuccaucuacuccaccgucgccuccucccucgcccucgccaucauggucgccggccucuuccucuggaugugcuccaacggcucccuccagugccgcaucugcaucuga

SEQ ID NO: 99038 - RNA, 1707 nt, Artificial Sequence
  derived and/or modified CDS sequence (opt2) from hemagglutinin__InfluenzaA__ACT15355
auggagaagaucguccuccuccucgccaucgucucccucgucaaguccgaccagaucugcaucggcuaccacgccaacaacuccaccgagcaggucgacaccaucauggagaagaacgucaccgucacccacgcccaggacauccucgagaagacccacaacggcaagcucugcgaccucgacggcgucaagccccucauccuccgcgacugcuccgucgccggcuggcuccucggcaaccccaugugcgacgaguuccucaacguccccgagugguccuacaucgucgagaagaucaaccccgccaacgaccucugcuaccccggcgacuucaacgacuacgaggagcucaagcaccuccucucccgcaucaaccacuucgagaagauccagaucauccccaaguccuccugguccgaccacgaggccuccuccggcgucuccuccgccugccccuaccagggccgcuccuccuucuuccgcaacgucgucuggcucaucaagaaggacaacgccuaccccaccaucaagcgcuccuacaacaacaccaaccaggaggaccuccucguccucuggggcauccaccaccccaacgacgccgccgagcagacccgccucuaccacaaccccaccaccuacaucuccgucggcaccuccacccucaaccagcgccucguccccaagaucgccacccgcuccaaggucaacggccaguccggccgcauggaguucuucuggaccauccucaagcccaacgacgccaucaacuucgaguccaacggcaacuucaucgcccccgagaacgccuacaagaucgucaagaagggcgacuccaccaucaugaaguccgagcucgaguacggcaacugcaacaccaagugccagacccccaucggcgccaucaacuccuccaugcccuuccacaacauccacccccucaccaucggcgagugccccaaguacgucaaguccucccgccucguccucgccaccggccuccgcaacuccccccagggcaagucccgccgcaagaagcgcggccucuucggcgccaucgccggcuucaucgagggcggcuggcagggcauggucgacggcugguacggcuaccaccacuccaacgagcagggcuccggcuacgccgccgacaaggaguccacccagcgcgccaucgacggcgucaccaacaaggucaacuccaucaucgacaagaugaacacccaguucgaggccgucggccgcgaguucaacaaccucgagcgccgcaucgagaaccucaacaagaagauggaggacggcuuccucgacgucuggaccuacaacgccgagcuccucguccucauggagaacgagcgcacccucgacuuccacgacuccaacgucaagaaccucuacgacaagguccgccuccagcuccgcgacaacgccaaggagcucggcaacggcugcuucgaguucuaccaccgcugcgacaacgagugcauggaguccguccgcaacggcaccuacgacuacccccaguacuccgaggaggcccgccucaagcgcgaggagaucuccggcgucaagcucgaguccaucggcaucuaccagauccucuccaucuacuccaccgucgccuccucccucgcccucgccaucauggucgccggccucuuccucuggaugugcuccaacggcucccuccagugccgcaucugcaucuga

SEQ ID NO: 99039 - RNA, 1704 nt, Artificial Sequence
  derived and/or modified CDS sequence (opt2) from hemagglutinin__InfluenzaA__ACT15357
auggagaagaucguccuccuccucgccaucgucucccucgucaaguccgaccagaucugcaucggcuaccacgccaacaacuccaccgagcaggucgacaccaucauggagcgcaacgucaccgucacccacgcccaggacauccucgagaagacccacaacggcaagcucugcaaccucgacggcgucaagccccucauccuccgcgacugcuccgucgccggcuggcuccucggcaaccccaugugcgacgaguuccucaacguccccgagugguccuacaucgucgagaagaucaaccccgccaacgaccucugcuaccccggcaacuucaacgacuacgaggagcucaagcaccuccucucccgcaucaaccacuucgagaagauccagaucauccccaagaacuccugguccgaccacgaggccuccggcgucuccuccgccugccccuaccagggccgcuccuccuucuuccgcaacgucgucuggcucacccagaaggacaacgccuaccccaccaucaagcgcuccuacaacaacaccaaccaggaggaccuccucguccucuggggcauccaccaccccaacgacgccgccgagcagacccgccucuaccagaaccccaccaccuacaucuccgucggcaccuccacccucaaccagcgccucauccccaagaucgccacccgcuccaaggucaacggccaguccggccgcauggaguucuucuggaccauccucaaguccaacgacgccaucaacuucgaguccaacggcaacuucaucgcccccgagaacgccuacaagaucgucaagaagggcgacuccaccaucaugaaguccgagcucgaguacggcaacugcaacaccaagugccagacccccaucggcgccaucaacuccuccaugcccuuccacaacauccacccccucaccaucggcgagugccccaaguacgucaaguccaaccgccucguccucgccaccggccuccgcaacuccccccagggcgagcgccgccgcaagaagcgcggccucuucggcgccaucgccggcuucaucgagggcggcuggcagggcauggucgacggcugguacggcuaccaccacuccaacgagcagggcuccggcuacgccgccgacaaggaguccacccagaaggccaucgacggcgucaccaacaaggucaacuccaucaucgacaagaugaacacccaguucgaggccgucggccgcgaguucaacaaccucgagcgccgcaucgagaaccucaacaagaagauggaggacggcuuccucgacgucuggaccuacaacgccgagcuccucguccucauggagaacgagcgcacccucgacuuccacgacuccaacgucaagaaccucuacgacaagguccgccuccagcuccgcgacaacgccaaggagcucggcaacggcugcuucgaguucuaccaccgcugcgacaacgagugcauggaguccguccgcaacggcaccuacgacuacccccaguacuccgaggaggcccgccucaagcgcgaggagaucuccggcgucaagcucgaguccaucggcaccuaccagauccucuccaucuacuccaccgucgccuccucccucgcccucgccaucauggucgccggccucuuccucuggaugugcuccaacggcucccuccagugccgcaucugcaucuga

SEQ ID NO: 99040 - RNA, 1701 nt, Artificial Sequence
  derived and/or modified CDS sequence (opt2) from hemagglutinin__InfluenzaA__ACT20200
augaaggccauccucgucguccuccucuacaccuucgccaccgccaacgccgacacccucugcaucggcuaccacgccaacaacuccaccgacaccgucgacaccguccucgagaagaacgucaccgucacccacuccgucaaccuccucgaggacaagcacaacggcaagcucugcaagcuccgcggcgucgccccccuccaccucggcaagugcaacaucgccggcuggauccucggcaaccccgagugcgagucccucuccaccgccuccuccugguccuacaucgucgagaccuccuccuccgacaacggcaccugcuaccccggcgacuucaucgacuacgaggagcuccgcgagcagcucuccuccgucuccuccuucgagcgcuucgagaucuuccccaagaccuccuccuggcccaaccacgacuccaacaagggcgucaccgccgccugcccccacgccggcgccaaguccuucuacaagaaccucaucuggcucgucaagaagggcaacuccuaccccaagcucuccaaguccuacaucaacgacaagggcaaggagguccucguccucuggggcauccaccaccccuccaccuccgccgaccagcagucccucuaccagaacgccgacgccuacgucuucgucggcuccucccgcuacuccaagaaguucaagcccgagaucgccauccgccccaagguccgcgaccaggagggccgcaugaacuacuacuggacccucgucgagcccggcgacaagaucaccuucgaggccaccggcaaccucgucgucccccgcuacgccuucgccauggagcgcaacgccggcuccggcaucaucaucuccgacacccccguccacgacugcaacaccaccugccagacccccaagggcgccaucaacaccucccuccccuuccagaacauccaccccaucaccaucggcaagugccccaaguacgucaaguccaccaagcuccgccucgccaccggccuccgcaacguccccuccauccagucccgcggccucuucggcgccaucgccggcuucaucgagggcggcuggaccggcauggucgacggcugguacggcuaccaccaccagaacgagcagggcuccggcuacgccgccgaccucaaguccacccagaacgccaucgacgagaucaccaacaaggucaacuccgucaucgagaagaugaacacccaguucaccgccgucggcaaggaguucaaccaccucgagaagcgcaucgagaaccucaacaagaaggucgacgacggcuuccucgacaucuggaccuacaacgccgagcuccucguccuccucgagaacgagcgcacccucgacuaccacgacuccaacgucaagaaccucuacgagaagguccgcaaccagcucaagaacaacgccaaggagaucggcaacggcugcuucgaguucuaccacaagugcgacaacaccugcauggaguccgucaagaacggcaccuacgacuaccccaaguacuccgaggaggccaagcucaaccgcgaggagaucgacggcgucaagcucgaguccacccgcaucuaccagauccucgccaucuacuccaccgucgccuccucccucguccucgucgucucccucggcgccaucuccuucuggaugugcuccaacggcucccuccagugccgcaucugcaucuga

SEQ ID NO: 99041 - RNA, 1701 nt, Artificial Sequence
  derived and/or modified CDS sequence (opt2) from hemagglutinin__InfluenzaA__ACT21466
augaagaccaucaucgcccucuccuacauccucugccucgucuucgcccagaagcuccccggcaacgacaacuccaccgccacccccugccucggccaccacgccguccccaacggcacccucgucaagaccaucaccaacgaccagaucgaggucaccaacgccaccgagcucguccaguccuccuccaccggcaagaucugcgacuccccccaccgcauccucgacggcaagaacugcacccucaucgacgcccuccucggcgacccccacugcgacggcuucaagaacaaggagugggaccucuucgucgagcgcuccaccgccuacuccaacugcuaccccuacgacguccccgacuacgccucccuccgcucccucgucgccuccuccggcacccucgaguucaccaacgagggcuucaacuggaccggcgucgcccaggacggcaccuccuacgccugcaagcgcggcuccgucaaguccuucuucucccgccucaacuggcuccacaagcucgaguacaaguaccccgcccucaacgucaccaugcccaacaacgacaaguucgacaagcucuacaucuggggcguccaccaccccuccaccgacuccgaccagaccucccucuacguccaggccuccggccgcgucaccgucuccaccaagcgcucccagcagaccgucauccccaacaucggcucccgccccuggguccgcggcaucuccucccgcaucuccaucuacuggaccaucgucaagcccggcgacauccuccucaucaacuccaccggcaaccucaucgccccccgcggcuacuucaagauccgcuccggcaaguccuccaucaugcgcuccgacgcccccaucgacaacugcaacuccgagugcaucacccccaacggcuccauccccaacgacaagcccuuccagaacgucaaccgcaucaccuacggcgccugcccccgcuacgucaagcagaacacccucaagcucgccaccggcaugcgcaacguccccgagaagcagacccgcggcaucuucggcgccaucgccggcuucaucgagaacggcugggagggcauggucgacggcugguacggcuuccgccaccagaacuccgagggcaccggccaggccgccgaccucaaguccacccaggccgccaucaaccagaucaacggcaagcucaaccgccucaucgagaagaccaacgagaaguuccaccagaucgagaaggaguucuccgaggucgagggccgcauccaggaccucgagaaguacgucgaggacaccaagaucgaccucugguccuacaacgccgagcuccucgucgcccucgagaaccagcacaccaucgaccucaccgacuccgagaugaacaagcucuucgagaagacccgcaagcagcuccgcgagaacgccgaggacaugggcaacggcugcuucaagaucuaccacaagugcgacaacgccugcaucggcuccauccgcaacggcaccuacgaccacgacgucuaccgcgacgaggcccucaacaaccgcuuccagaucaagggcgucgagcucaaguccggcuacaaggacuggauccucuggaucuccuucgccaucuccugcuuccuccucugcgucguccuccucggcuucaucaugugggccugccagaagggcaacauccgcugcaacaucugcaucuga

SEQ ID NO: 99042 - RNA, 1701 nt, Artificial Sequence
  derived and/or modified CDS sequence (opt2) from hemagglutinin__InfluenzaA__ACT21467
augaagaccaucaucgcccucuccuacauccucugccucgucuucgcccagaagcuccccggcuccgacaacuccaccgccacccucugccucggccaccacgccguccccaacggcacccucgucaagaccaucaccaacgaccagaucgaggucaccaacgccaccgagcucguccaguccuccuccaccggcaagaucugcgacuccccccaccgcauccucgacggcaagaacugcacccucaucgacgcccuccucggcgacccccacugcgacggcuucaagaacaaggagugggaccucuucgucgagcgcuccaccgccuacuccaacugcuaccccuacgacguccccgacuacgccucccuccgcucccucgucgccuccuccggcacccucgaguucaccaacgagggcuucaacuggaccggcgucgcccaggacggcaccuccuacgccugcaagcgcggcuccgucaaguccuucuucucccgccucaacuggcuccacaagcucgaguacaaguaccccgcccucaacgucaccaugcccaacaacgacaaguucgacaagcucuacaucuggggcguccaccaccccuccaccgacuccgaccagaccucccucuacguccaggccuccggccgcgucaccgucuccaccaagcgcucccagcagaccgucauccccaacaucggcucccgccccuggguccgcggcaucuccucccgcaucuccgucuacuggaccaucgucaagccccgcgacauccuccucaucaacuccaccggcaaccucaucgccccccgcggcuacuucaagauccgcuccggcaaguccuccaucaugcgcuccgacgcccccaucgacaacugcaacuccgagugcaucacccccaacggcuccauccccaacgacaagcccuuccagaacgucaaccgcaucaccuacggcgccugcccccgcuacgucaagcagaacacccucaagcucgccaccggcaugcgcaacguccccgagaagcagacccgcggcaucuucggcgccaucgccggcuucaucgagaacggcugggagggcauggucgacggcugguacggcuuccgccaccagaacuccgagggcaccggccaggccgccgaccucaaguccacccaggccgccaucaaccgcaucaacggcaagcucaaccgccucaucgagaagaccaacgagaaguuccaccagaucgagaaggaguucuccgaggucgagggccgcauccaggaccucgagaaguacgucgaggacaccaagaucgaccucugguccuacaacgccgagcuccucgucgcccucgagaaccagcacaccaucgaccucaccgacuccgagaugaacaagcucuucgagaagacccgcaagcagcuccgcgagaacgccgaggacaugggcaacggcugcuucaagaucuaccacaagugcgacaacgccugcaucggcuccauccgcaacggcaccuacgaccacgacgucuaccgcgacgaggcccucaacaaccgcuuccagaucaagggcgucgagcucaaguccggcuacaaggacuggauccucuggaucuccuucgccaucuccugcuuccuccucugcgucguccuccucggcuucaucaugugggccugccagaagggcaacauccgcugcaacaucugcaucuga

SEQ ID NO: 99043 - RNA, 1701 nt, Artificial Sequence
  derived and/or modified CDS sequence (opt2) from hemagglutinin__InfluenzaA__ACT21468
augaagaccaucaucgcccucuccuacauccucugccucgucuucgcccagaagcuccccggcaacgacaacuccaccgccacccucugccucggccaccacgccguccccaacggcacccucgucaagaccaucaccaacgaccagaucgaggucaccaacgccaccgagcucguccaguccuccuccaccggcaagaucugcgacuccccccaccgcauccucgacggcaagaacugcacccucaucgacgcccuccucggcgacccccacugcgacggcuucaagaacaaggagugggaccucuucgucgagcgcuccaccgccuacuccaacugcuaccccuacgacguccccgacuacgccucccuccgcucccucgucgccuccuccggcacccucgaguucaccaacgagggcuucaacuggaccggcgucgcccaggacggcaccuccuacgccugcaagcgcggcuccgucaaguccuucuucucccgccucaacuggcuccacaagcucgaguacaaguaccccgcccucaacgucaccaugcccaacaacgacaaguucgacaagcucuacaucuggggcguccaccaccccuccaccgacuccgaccagaccucccucuacguccaggccuccggccgcgucaccgucuccaccaagcgcucccagcagaccgucauccccaacaucggcucccgccccuggguccgcggcaucuccucccgcaucuccaucuacuggaccaucgucaagcccggcgacauccuccucaucaacuccaccggcaaccucaucgccccccgcggcuacuucaagauccgcuccggcaaguccuccaucaugcgcuccgacgcccccaucgacaacugcaacuccgagugcaucacccccaacggcuccauccccaacgacaagcccuuccagaacgucaaccgcaucaccuacggcgccugcccccgcuacgucaagcagaacacccucaagcucgccaccggcaugcgcaacguccccgagaagcagacccgcggcaucuucggcgccaucgccggcuucaucgagaacggcugggagggcauggucgacggcugguacggcuuccgccaccagaacuccgagggcaccggccaggccgccgaccucaaguccacccaggccgccaucaaccagaucaacggcaagcucaaccgccucaucgagaagaccaacgagaaguuccaccagaucgagaaggaguucuccgaggucgagggccgcauccaggaccucgagaaguacgucgaggacaccaagaucgaccucugguccuacaacgccgagcuccucgucgcccucgagaaccagcacaccaucgaccucaccgacuccgagaugaacaagcucuucgagaagacccgcaagcagcuccgcgagaacgucgaggacaugggcaacggcugcuucaagaucuaccacaagugcgacaacgccugcaucggcuccauccgcaacggcaccuacgaccacgacgucuaccgcgacgaggcccucaacaaccgcuuccagaucaagggcgucgagcucaaguccggcuacaaggacuggauccucuggaucuccuucgccaucuccugcuuccuccucugcgucguccuccucggcuucaucaugugggccugccagaagggcaacauccgcugcaacaucugcaucuga

SEQ ID NO: 99044 - RNA, 1701 nt, Artificial Sequence
  derived and/or modified CDS sequence (opt2) from hemagglutinin__InfluenzaA__ACT21469
augaagaccaucaucgcccucuccuacaucucccgccucgucuucgcccagaagcuccccggcaacgacaacuccaccgccacccucugccucggccaccacgccguccccaacggcacccucgucaagaccaucaccaacgaccagaucgaggucaccaacgccaccgagcucguccaguccuccuccaccggccgcaucugcgacuccccccaccgcauccucgacggcgagaacugcacccucaucgacgcccuccucggcgacccccacugcgacggcuuccagaacaaggagugggaccucuucgucgagcgcuccaaggccuacuccaacugcuaccccuacgacguccccgacuacgccucccuccgcucccucgucgccuccuccggcacccucgaguucaacaacgaguccuucaacuggaccggcgucgcccaggacggcaccuccuacgccugcaagcgccgcuccaucaaguccuucuucucccgccucaacuggcuccaccagcucaaguacaaguaccccgcccucaacgucaccaugcccaacaacgacaaguucgacaagcucuacaucuggggcguccaccaccccuccaccgacuccgaccagaccucccucuacgcccaggccuccggccgcgucaccgucuccaccaagcgcucccagcagaccgucauccccaacaucggcucccgccccuggguccgcggcgucuccucccgcaucuccaucuacuggaccaucgucaagcccggcgacauccuccucaucaacuccaccggcaaccucaucgccccccgcggcuacuucaagauccgcuccggcaaguccuccaucaugcgcuccgacgcccccaucggcaagugcaacuccgagugcaucacccccaacggcuccauccccaacgacaagcccuuccagaacgucaaccgcaucaccuacggcgccugcccccgcuacgucaagcagaacacccucaagcucgccaccggcaugcgcaacguccccgagaagcagacccgcggcaucuucggcgccaucgccggcuucaucgagaacggcugggagggcauggucgacggcugguacggcuuccgccaccagaacuccgagggcaccggccaggccgccgaccucaaguccacccaggccgccaucaaccagaucaacggcaagcucaaccgccucaucgagaagaccaacgagaaguuccaccagaucgagaaggaguucuccgaggucgagggccgcauccaggaccucgagaaguacgucgaggacaccaagaucgaccucugguccuacaacgccgagcuccucgucgcccucgagaaccagcacaccaucgaccucaccgacuccgagaugaacaagcucuucgagcgcacccgcaagcagcuccgcgagaacgccgaggacaugggcaacggcugcuucaagaucuaccacaagugcgacaacgccugcaucggcuccauccgcaacggcaccuacgaccacgacgucuaccgcgacgaggcccucaacaaccgcuuccagaucaagggcgucgagcucaaguccggcuacaaggacuggauccucuggaucuccuucgccaucuccugcuuccuccucugcgucguccuccucggcuucaucaugugggccugccagaagggcaacauccgcugcaacaucugcaucuga

SEQ ID NO: 99045 - RNA, 1701 nt, Artificial Sequence
  derived and/or modified CDS sequence (opt2) from hemagglutinin__InfluenzaA__ACT21471
augaagaccaucaucgcccucuccuacaucuccugccucgucuucgcccagaagcuccccggcaacgacaacuccaccgccacccucugccucggccaccacgccguccccaacggcacccucgucaagaccaucaccaacgaccagaucgaggucaccaacgccaccgagcucguccaguccuccuccaccggccgcaucugcgacuccccccaccgcauccucgacggcgagaacugcacccucaucgacgcccuccucggcgacccccacugcgacggcuuccagaacaaggagugggaccucuucgucgagcgcuccaaggccuacuccaacugcuaccccuacgacguccccgacuacgccucccuccgcucccucgucgccuccuccggcacccucgaguucaacaacgaguccuucaacuggaccggcgucgcccaggacggcaccuccuacgccugcaagcgccgcuccaucaaguccuucuucucccgccucaacuggcuccaccagcucaaguacaaguaccccgcccucaacgucaccaugcccaacaacgacaaguucgacaagcucuacaucuggggcguccaccaccccuccaccgacuccgaccagaccucccucuacgcccaggccuccggccgcgucaccgucuccaccaagcgcucccagcagaccgucauccccaacaucggcucccgccccuggguccgcggcgucuccucccgcaucuccaucuacuggaccaucgucaagcccggcgacauccuccucaucaacuccaccggcaaccucaucgccccccgcggcuacuucaagauccgcuccggcaaguccuccaucaugcgcuccgacgcccccaucggcaagugcaacuccgagugcaucacccccaacggcuccauccccaacgacaagcccuuccagaacgucaaccgcaucaccuacggcgccugcccccgcuacgucaagcagaacacccucaagcucgccaccggcaugcgcaacguccccgagaagcagacccgcggcaucuucggcgccaucgccggcuucaucgagaacggcugggagggcauggucgacggcugguacggcuuccgccaccagaacuccgagggcaccggccaggccgccgaccucaaguccacccaggccgccaucaaccagaucaacggcaagcucaaccgccucaucgagaagaccaacgagaaguuccaccagaucgagaaggaguucuccgaggucgagggccgcauccaggaccucgagaaguacgucgaggacaccaagaucgaccucugguccuacaacgccgagcuccucgucgcccucgagaaccagcacaccaucgaccucaccgacuccgagaugaacaagcucuucgagcgcacccgcaagcagcuccgcgagaacgccgaggacaugggcaacggcugcuucaagaucuaccacaagugcgacaacgccugcaucggcuccauccgcaacggcaccuacgaccacgacgucuaccgcgacgaggcccucaacaaccgcuuccagaucaagggcgucgagcucaaguccggcuacaaggacuggauccucuggaucuccuucgccaucuccugcuuccuccucugcgucguccuccucggcuucaucaugugggccugccagaagggcaacauccgcugcaacaucugcaucuga

SEQ ID NO: 99046 - RNA, 1701 nt, Artificial Sequence
  derived and/or modified CDS sequence (opt2) from hemagglutinin__InfluenzaA__ACT21472
augaagaccaucaucgcccucuccuacaucuccugccucgucuucgcccagaagcuccccggcaacgacaacuccaccgccacccucugccucggccaccacgccguccccaacggcacccucgucaagaccaucaccaacgaccagaucgaggucaccaacgccaccgagcucguccaguccuccuccaccggccgcaucugcgacuccccccaccgcauccucgacggcgagaacugcacccucaucgacgcccuccucggcgacccccacugcgacggcuuccagaacaaggagugggaccucuucgucgagcgcuccaaggccuacuccaacugcuaccccuacgacguccccgacuacgccucccuccgcucccucgucgccuccuccggcacccucgaguucaacaacgaguccuucaacuggaccggcgucgcccaggacggcaccuccuacgccugcaagcgccgcuccaucaaguccuucuucuccacccucaacuggcuccaccagcucaaguacaaguaccccgcccucaacgucaccaugcccaacaacgacaaguucgacaagcucuacaucuggggcguccaccaccccuccaccgacuccgaccagaccucccucuacgcccaggccuccggccgcgucaccgucuccaccaagcgcucccagcagaccgucauccccaacaucggcucccgccccuggguccgcggcgucuccucccgcaucuccaucuacuggaccaucgucaagcccggcgacauccuccucaucaacuccaccggcaaccucaucgccccccgcggcuacuucaagauccgcuccggcaaguccuccaucaugcgcuccgacgcccccaucggcaagugcaacuccgagugcaucacccccaacggcuccauccccaacgacaagcccuuccagaacgucaaccgcaucaccuacggcgccugcccccgcuacgucaagcagaacacccucaagcucgccaccggcaugcgcaacguccccgagaagcagacccgcggcaucuucggcgccaucgccggcuucaucgagaacggcugggagggcauggucgacggcugguacggcuuccgccaccagaacuccgagggcaccggccaggccgccgaccucaaguccacccaggccgccaucaaccagaucaacggcaagcucaaccgccucaucgagaagaccaacgagaaguuccaccagaucgagaaggaguucuccgaggucgagggccgcauccaggaccucgagaaguacgucgaggacaccaagaucgaccucugguccuacaacgccgagcuccucgucgcccucgagaaccagcacaccaucgaccucaccgacuccgagaugaacaagcucuucgagcgcacccgcaagcagcuccgcgagaacgccgaggacaugggcaacggcugcuucaagaucuaccacaagugcgacaacgccugcaucggcuccauccgcaacggcaccuacgaccacgacgucuaccgcgacgaggcccucaacaaccgcuuccagaucaagggcgucgagcucaaguccggcuacaaggacuggauccucuggaucuccuucgccaucuccugcuuccuccucugcgucguccuccucggcuucaucaugugggccugccagaagggcaacauccgcugcaacaucugcaucuga

SEQ ID NO: 99047 - RNA, 1701 nt, Artificial Sequence
  derived and/or modified CDS sequence (opt2) from hemagglutinin__InfluenzaA__ACT21507
augaagaccaucaucgcccucuccuacauccucugccucgucuucgcccagaagcuccccggcaacgacaacuccaccgccacccucugccucggccaccacgccguccccaacggcaccaucgucaagaccaucaccaacgaccagaucgaggucaccaacgccaccgagcucguccaguccuccuccaccggcggcaucugcgacuccccccaccagauccucgacggcgagaaccgcacccucaucgacgcccuccucggcgacccccagugcgacggcuuccagaacaagaagugggaccucuucgucgagcgcuccaaggccuacuccaacugcuaccccuacgacguccccgacuacgccucccuccgcucccucgucgccuccuccggcacccucgaguucaacaacgaguccuucaacuggaccggcgucacccagaacggcaccuccuccgccugcaagggccgcuccaacaacuccuucuucucccgccucaacuggcucacccaccucaaguucaaguaccccgcccucaacgucaccaugcccaacaacgagaaguucgacaagcucuacaucuggggcguccaccaccccggcaccgacaacgaccagaucucccucuacgcccaggccuccggccgcaucaccgucuccaccaagcgcucccagcagaccgucauccccaacaucggcucccgcccccgcguccgcgacauccccucccgcaucuccaucuacuggaccaucgucaagcccggcgacauccuccucaucaacuccaccggcaaccucaucgccccccgcggcuacuucaagauccgcuccggcaaguccuccaucaugcgcuccgacgcccccaucggcaagugcaacuccgagugcaucacccccaacggcuccauccccaacgacaagcccuuccagaacgucaaccgcaucaccuacggcgccugcccccgcuacgucaagcagaacacccucaagcucgccaccggcaugcgcaacguccccgagaagcagacccgcggcaucuucggcgccaucgccggcuucaucgagaacggcugggagggcauggucgacggcugguacggcuuccgccaccagaacuccgagggcaucggccaggccgccgaccucaaguccacccaggccgccaucaaccagaucaacggcaagcucaaccgccucaucggcaagaccaacgagaaguuccaccagaucgagaaggaguucuccgaggucgagggccgcauccaggaccucgagaaguacgucgaggacacccgcaucgaccucugguccuacaacgccgagcuccucgucgcccucgagucccagcacaccaucgaccucaccgacuccgagaugaacaagcucuucgagcgcaccaagaagcagcuccgcgagaacgccgaggacaugggcaacggcugcuucaagaucuaccacaagugcgacaacgccugcaucggcuccauccgcaacggcaccuacgaccacgacgucuaccgcgacgaggcccucaacaagcgcuuccagaucaagggcgucgagcucaaguccggcuacaaggacuggauccucuggaucuccuucgccaucuccugcuuccuccucugcgucgcccuccucggcuucaucaugugggccugccagaagggcaacauccgcugcaacaucugcaucuga

SEQ ID NO: 99048 - RNA, 1701 nt, Artificial Sequence
  derived and/or modified CDS sequence (opt2) from hemagglutinin__InfluenzaA__ACT21508
augaagaccaucaucgcccucuccuacauccucugccucgucuucgcccagaagcuccccggcaacgacaacuccaccgccacccucugccucggccaccacgccguccccaacggcaccaucgucaagaccaucaccaacgaccagaucgaggucaccaacgccaccgagcucguccaguccuccuccaccggcggcaucugcgacuccccccaccagauccucgacggcgagaacugcacccucaucgacgcccuccucggcgacccccagugcgacggcuuccagaacaagaagugggaccucuucgucgagcgcuccaaggccuacuccaacugcuaccccuacgacguccccgacuacgccucccuccgcucccucgucgccuccuccggcacccucgaguucaacaacgaguccuucaacuggaccggcgucacccagaacggcaccuccuccgccugcaagcgccgcuccaacaacuccuucuucucccgccucaacuggcucacccaccucaaguucaaguaccccgcccucaacgucaccaugcccaacaacgagaaguucgacaagcucuacaucuggggcguccaccaccccggcaccgacaacgaccagaucucccucuacgcccaggccuccggccgcaucaccgucuccaccaagcgcucccagcagaccgucauccccaacaucggcucccgcccccgcguccgcgacauccccucccgcaucuccaucuacuggaccaucgucaagcccggcgacauccuccucaucaacuccaccggcaaccucaucgccccccgcggcuacuucaagauccgcuccggcaaguccuccaucaugcgcuccgacgcccccaucggcaagugcaacuccgagugcaucacccccaacggcuccauccccaacgacaagcccuuccagaacgucaaccgcaucaccuacggcgccugcccccgcuacgucaagcaggacacccucaagcucgccaccggcaugcgcaacguccccgagaagcagacccgcggcaucuucggcgccaucgccggcuucaucgagaacggcugggagggcauggucgacggcugguacggcuuccgccaccagaacuccgagggcaucggccaggccgccgaccucaaguccacccaggccgccaucaaccagaucaacggcaagcucaaccgccucaucggcaagaccaacgagaaguuccaccagaucgagaaggaguucuccgaggucgagggccgcauccaggaccucgagaaguacgucgaggacaccaagaucgaccucugguccuacaacgccgagcuccucgucgcccucgagaaccagcacaccaucgaccucaccgacuccgagaugaacaagcucuucgagcgcaccaagaagcagcuccgcgagaacgccgaggacaugggcaacggcugcuucaagaucuaccacaagugcgacaacgccugcaucggcuccauccgcaacggcaccuacgaccacgacgucuaccgcgacgaggcccucaacaaccgcuuccagaucaagggcgucgagcucaaguccggcuacaaggacuggauccucuggaucuccuucgccaucuccugcuuccuccucugcgucgcccuccucggcuucaucaugugggccugccagaagggcaacauccgcugcaacaucugcaucuga

SEQ ID NO: 99049 - RNA, 1701 nt, Artificial Sequence
  derived and/or modified CDS sequence (opt2) from hemagglutinin__InfluenzaA__ACT21509
augaagaccaucaucgcccucuccuacauccucugccucgucuucgcccagaagcuccccggcaacgacaacuccaccgccacccucugccucggccaccacgccguccccaacggcaccaucgucaagaccaucaccaacgaccagaucgaggucaccaacgccaccgagcucguccaguccuccuccaccggcggcaucugcgacuccccccaccagauccucgacggcgagaacugcacccucaucgacgcccuccucggcgacccccagugcgacggcuuccagaacaagaagugggaccucuucgucgagcgcuccaaggccuacuccaacugcuaccccuacgacguccccgacuacgccucccuccgcucccucgucgccuccuccggcacccucgaguucaacaacgaguccuucaacuggaccggcgucacccagaacggcaccuccuccgccugcaagcgccgcuccaacaacuccuucuucucccgccucaacuggcucacccaccucaaguucaaguaccccgcccucaacgucaccaugcccaacaacgagaaguucgacaagcucuacaucuggggcguccaccaccccggcaccgacaacgaccagaucucccucuacgcccaggccuccggccgcaucaccgucuccaccaagcgcucccagcagaccgucauccccaacaucggcucccgcccccgcguccgcgacauccccucccgcaucuccaucuacuggaccaucgucaagcccggcgacauccuccucaucaacuccaccggcaaccucaucgccccccgcggcuacuucaagauccgcuccggcaaguccuccaucaugcgcuccgacgcccccaucggcaagugcaacuccgagugcaucacccccaacggcuccauccccaacgacaagcccuuccagaacgucaaccgcaucaccuacggcgccugcccccgcuacgucaagcagaacacccucaagcucgccaccggcaugcgcaacguccccgagacccagacccgcggcaucuucggcgccaucgccggcuucaucgagaacggcugggagggcauggucgacggcugguacggcuuccgccaccagaacuccgagggcaccggccaggccgccgaccucaaguccacccaggccgccaucaaccagaucaacggcaagcccaaccgccucaucggcaagaccaacgagaaguuccaccagaucgagaaggaguucuccgaggucgagggccgcauccaggaccucgagaaguacgucgaggacaccaagaucgaccucugguccuacaacgccgagcuccucgucgcccucgagaaccagcacaccaucgaccucaccgacuccgagaugaacaagcucuucgagaagaccaagaagcagcuccgcgagaacgccgaggacaugggcaacggcugcuucaagaucuaccacaagugcgacaacgccugcaucggcuccauccgcaacgagaccuacgaccacgacgucuaccgcgacgaggcccucaacaaccgcuuccagaucaagggcgucgagcucaaguccggcuacaaggacuggauccucuggaucuccuucgccaucuccugcuuccuccucugcgucgcccuccucggcuucaucaugugggccugccagaagggcaacauccgcugcaacaucugcaucuga

SEQ ID NO: 99050 - RNA, 1701 nt, Artificial Sequence
  derived and/or modified CDS sequence (opt2) from hemagglutinin__InfluenzaA__ACT21510
augaagaccaucaucgcccucuccuacauccucugccccgucuucgcccagaagcuccccggcaacgacaacuccaccgccacccucugccucggccaccacgccguccccaacggcaccaucgucaagaccaucaccaacgaccagaucgaggucaccaacgccaccgagcucguccaguccuccuccaccggcggcaucugcgacuccccccaccagauccucgacggcgagaacugcacccucaucgacgcccuccucggcgacccccagugcgacggcuuccagaacaagaagugggaccucuucgucgagcgcuccaaggccuacuccaacugcuaccccuacgacguccccgacuacgccucccuccgcucccucgucgccuccuccggcacccucgaguucaacaacgaguccuucaacuggaccggcgucacccagaacggcaccuccuccgccugcaagcgccgcuccaacaacuccuucuucucccgccucaacuggcucacccaccucaaguucaaguaccccgcccucaacgucaccaugcccaacaacgagaaguucgacaagcucuacaucuggggcguccaccaccccggcaccgacaacgaccagaucucccucuacgcccaggccuccggccgcaucaccgucuccaccaagcgcucccagcagaccgucauccccaacaucggcucccgcccccgcguccgcgacauccccucccgcaucuccaucuacuggaccaucgucaagcccggcgacauccuccucaucaacuccaccggcaaccucaucgccccccgcggcuacuucaagauccgcuccggcaaguccuccaucaugcgcuccgacgcccccaucggcaagugcaacuccgagugcaucacccccaacggcuccauccccaacgacaagcccuuccaggacgucaaccgcaucaccuacggcgccugcccccgcuacgucaagcagaacacccucaagcucgccaccggcaugcgcaacguccccgagaagcagacccgcggcaucuucggcgccaucgccggcuucaucgagaacggcugggagggcauggucgacggcugguacggcuuccgccaccagaacuccgagggcaucggccaggccgccgaccucaaguccacccaggccgccaucaaccagaucaacggcaagcucaaccgccucaucggcaagaccaacgagaaguuccaccagaucgagaaggaguucuccgaggucgagggccgcauccaggaccucgagaaguacgucgaggacaccaagaucgaccucugguccuacaacgccgagcuccucgucgcccucgagaaccagcacaccaucgaccucaccgacuccgagaugaacaagcucuucgagcgcaccgagaagcagcuccgcgagaacgccgaggacaugggcaacggcugcuucaagaucuaccacaagugcgacaacgccggcaucggcuccauccgcaacggcaccuacgaccacgacgucuaccgcgacgaggcccucaacaaccgcuuccagaucaagggcgucgagcucaaguccggcuacaaggacuggauccucuggaucuccuucgccaucuccugcuuccuccucugcgucgcccuccucggcuucaucaugugggccugccagaagggcaacauccgcugcaacaucugcaucuga

SEQ ID NO: 99051 - RNA, 1701 nt, Artificial Sequence; identical to SEQ ID NO: 98949
  derived and/or modified CDS sequence (opt2) from hemagglutinin__InfluenzaA__ACT21572

SEQ ID NO: 99052 - RNA, 1701 nt, Artificial Sequence; identical to SEQ ID NO: 98705
  derived and/or modified CDS sequence (opt2) from hemagglutinin__InfluenzaA__ACT22031

SEQ ID NO: 99053 - RNA, 1701 nt, Artificial Sequence; identical to SEQ ID NO: 98705
  derived and/or modified CDS sequence (opt2) from hemagglutinin__InfluenzaA__ACT22032

SEQ ID NO: 99054 - RNA, 1701 nt, Artificial Sequence; identical to SEQ ID NO: 98705
  derived and/or modified CDS sequence (opt2) from hemagglutinin__InfluenzaA__ACT22033

SEQ ID NO: 99055 - RNA, 1701 nt, Artificial Sequence; identical to SEQ ID NO: 98705
  derived and/or modified CDS sequence (opt2) from hemagglutinin__InfluenzaA__ACT22034

SEQ ID NO: 99056 - RNA, 1701 nt, Artificial Sequence; identical to SEQ ID NO: 98720
  derived and/or modified CDS sequence (opt2) from hemagglutinin__InfluenzaA__ACT22035

SEQ ID NO: 99057 - RNA, 1701 nt, Artificial Sequence
  derived and/or modified CDS sequence (opt2) from hemagglutinin__InfluenzaA__ACT22036
augaaggccauccucgucguccuccucuacaccuucgccaccgccaacgccgacacccucugcaucggcuaccacgccaacaacuccaccgacaccgucgacaccguccucgagaagaacgucaccgucacccacuccgucaaccuccucgaggacaagcacaacggcaagcucugcaagcuccgcggcgucgccccccuccaccucggcaagugcaacaucgccggcuggauccucggcaaccccgagugcgagucccucuccaccgccuccuccugguccuacaucgucgagaccuccuccuccgacaacggcaccugcuaccccggcgacuucaucgacuacgaggagcuccgcgagcagcucuccuccgucuccuccuucgagcgcuucgagaucuuccccaagaccuccuccuggcccaaccacgacuccaacaagggcgucaccgccgccugcccccacgccggcgccaaguccuucuacaagaaccucaucuggcucaucaagaagggcaacuccuaccccaagcucuccaaguccuacaucaacgacaagggcaaggagguccucguccucuggggcauccaccaccccuccaccuccgccgaccagcagucccucuaccagaacgccgacgccuacgucuucgucggcuccucccgcuacuccaagaaguucaagcccgagaucgccauccgccccaagguccgcgaccaggagggccgcaugaacuacuacuggacccucgucgagcccggcgacaagaucaccuucgaggccaccggcaaccucgucgucccccgcuacgccuucgccauggagcgcaacgccggcuccggcaucaucaucuccgacacccccguccacgacugcaacaccaccugccagacccccaagggcgccaucaacaccucccuccccuuccagaacauccaccccaucaccaucggcaagugccccaaguacgucaaguccaccaagcuccgccucgccaccggccuccgcaacguccccuccauccagucccgcggccucuucggcgccaucgccggcuucaucgagggcggcuggaccggcauggucgacggcugguacggcuaccaccaccagaacgagcagggcuccggcuacgccgccgaccucaaguccacccagaacgccaucgacgagaucaccaacaaggucaacuccgucaucgagaagaugaacacccaguucaccgccgucggcaaggaguucaaccaccucgagaagcgcaucgagaaccucaacaagaaggucgacgacggcuuccucgacaucuggaccuacaacgccgagcuccucguccuccucgagaacgagcgcacccucgacuaccacgacuccaacgucaagaaccucuacgagaagguccgcucccagcucaagaacaacgccaaggagaucggcaacggcugcuucgaguucuaccacaagugcgacaacaccugcauggaguccgucaagaacggcaccuacgacuaccccaaguacuccgaggaggccaagcucaaccgcgaggagaucgacggcgucaagcucgaguccacccgcaucuaccagauccucgccaucuacuccaccgucgccuccucccucguccucgucgucucccucggcgccaucuccuucuggaugugcuccaacggcucccuccagugccgcaucugcaucuga

SEQ ID NO: 99058 - RNA, 1701 nt, Artificial Sequence
  derived and/or modified CDS sequence (opt2) from hemagglutinin__InfluenzaA__ACT22037
augaaggccauccucgucguccuccucuacaccuucgccaccgccaacgccgacacccucugcaucggcuaccacgccaacaacuccaccgacaccgucgacaccguccucgagaagaacgucaccgucacccacuccgucaaccuccucgaggacaagcacaacggcaagcucugcaagcuccgcggcgucgccccccuccaccucggcaagugcaacaucgccggcuggauccucggcaaccccgagugcgagucccucuccaccgccuccuccugguccuacaucgucgagaccuccuccuccgacaacggcaccugcuaccccggcgacuucaucgacuacgaggagcuccgcgagcagcucuccuccgucuccuccuucgagcgcuucgagaucuuccccaagaccuccuccuggcccaaccacgacuccaacaagggcgucaccgccgccugcccccacgccggcgccaaguccuucuacaagaaccucaucuggcucgucaagaagggcaacuccuaccccaagcucuccaaguccuacaucaacgacaagggcaaggagguccucguccucuggggcauccaccaccccuccaccuccgccgaccagcagucccucuaccagaacgccgacgccuacgucuucgucggcaccucccgcuacuccaagaaguucaagcccgagaucgccauccgccccaagguccgcgagcaggagggccgcaugaacuacuacuggacccucgucgagcccggcgacaagaucaccuucgaggccaccggcaaccucgucgucccccgcuacgccuucgccauggagcgcaacgccggcuccggcaucaucaucuccgacacccccguccacgacugcaacaccaccugccagacccccaagggcgccaucaacaccucccuccccuuccagaacauccaccccaucaccaucggcaagugccccaaguacgucaaguccaccaagcuccgccucgccaccggccuccgcaacguccccuccauccagucccgcggccucuucggcgccaucgccggcuucaucgagggcggcuggaccggcauggucgacggcugguacggcuaccaccaccagaacgagcagggcuccggcuacgccgccgaccucaaguccacccagaacgccaucgacgagaucaccaacaaggucaacuccgucaucgagaagaugaacacccaguucaccgccgucggcaaggaguucaaccaccucgagaagcgcaucgagaaccucaacaagaaggucgacgacggcuuccucgacaucuggaccuacaacgccgagcuccucguccuccucgagaacgagcgcacccucgacuaccacgacuccaacgucaagaaccucuacgagaagguccgcucccagcucaagaacaacgccaaggagaucggcaacggcugcuucgaguucuaccacaagugcgacaacaccugcauggaguccgucaagaacggcaccuacgacuaccccaaguacuccgaggaggccaagcucaaccgcgaggagaucgacggcgucaagcucgaguccacccgcaucuaccagauccucgccaucuacuccaccgucgccuccucccucguccucgucgucucccucggcgccaucuccuucuggaugugcuccaacggcucccuccagugccgcaucugcaucuga

SEQ ID NO: 99059 - RNA, 1701 nt, Artificial Sequence
  derived and/or modified CDS sequence (opt2) from hemagglutinin__InfluenzaA__ACT22038
augaaggccauccucgucguccuccucuacaccuucgccaccgccaacgccgacacccucugcaucggcuaccacgccaacaacuccaccgacaccgucgacaccguccucgagaagaacgucaccgucacccacuccgucaaccuccucgaggacaagcacaacggcaagcucugcaagcuccgcggcgucgccccccuccaccucggcaagugcaacaucgccggcuggauccucggcaaccccgagugcgagucccucuccaccgccuccuccugguccuacaucgucgagaccuccuccuccgacaacggcaccugcuaccccggcgacuucaucgacuacgaggagcuccgcgagcagcucuccuccgucuccuccuucgagcgcuucgagaucuuccccaagaccuccuccuggcccaaccacgacuccaacaagggcgucaccgccgccugcccccacgccggcgccaaguccuucuacaagaaccucaucuggcucgucaagaagggcaacuccuaccccaagcucuccaaguccuacaucaacgacaagggcaaggagguccucguccucuggggcauccaccaccccuccaccaacgccgaccagcagucccucuaccagaacgccgacgccuacgucuucgucggcuccucccgcuacuccaagaaguucaagcccgagaucgccauccgccccaagguccgcgaccaggagggccgcaugaacuacuacuggacccucgucgagcccggcgacaagaucaccuucgaggccaccggcaaccucgucgucccccgcuacgccuucgccauggagcgcaacgccggcuccggcaucaucaucuccgacacccccguccacgacugcaacaccaccugccagacccccaagggcgccaucaacaccucccuccccuuccagaacauccaccccaucaccaucggcaagugccccaaguacgucaaguccaccaagcuccgccucgccaccggccuccgcaacguccccuccauccagucccgcggccucuucggcgccaucgccggcuucaucgagggcggcuggaccggcauggucgacggcugguacggcuaccaccaccagaacgagcagggcuccggcuacgccgccgaccucaaguccacccagaacgccaucgacgagaucaccaacaaggucaacuccgucaucgagaagaugaacacccaguucaccgccgucggcaaggaguucaaccaccucgagaagcgcaucgagaaccucaacaagaaggucgacgacggcuuccucgacaucuggaccuacaacgccgagcuccucguccuccucgagaacgagcgcacccucgacuaccacgacuccaacgucaagaaccucuacgagaagguccgcucccagcucaagaacaacgccaaggagaucggcaacggcugcuucgaguucuaccacaagugcgacaacaccugcauggaguccgucaagaacggcaccuacgacuaccccaaguacuccgaggaggccaagcucaaccgcgaggagaucgacggcgucaagcucgaguccacccgcaucuaccagauccucgccaucuacuccaccgucgccuccucccucguccucgucgucucccucggcgccaucuccuucuggaugugcuccaacggcucccuccagugccgcaucugcaucuga

SEQ ID NO: 99060 - RNA, 1701 nt, Artificial Sequence
  derived and/or modified CDS sequence (opt2) from hemagglutinin__InfluenzaA__ACT22055
augaaggccauccucgucguccuccucuacaccuucgccaccgccaacgccgacacccucugcaucggcuaccacgccaacaacuccaccgacaccgucgacaccguccucgagaagaacgucaccgucacccacuccgucaaccuccucgaggacaagcacaacggcaagcucugcaagcuccgcggcgucgccccccuccaccucggcaagugcaacaucgccggcuggauccucggcaaccccgagugcgagucccucuccaccgccuccuccugguccuacaucgucgagaccuccuccuccgacaacggcaccugcuaccccggcgacuucaucgacuacgaggagcuccgcgagcagcucuccuccgucuccuccuucgagcgcuucgagaucuuccccaagaccuccuccuggcccaaccacgacuccaacaagggcgucaccgccgccugcccccacgccggcgccaaguccuucuacaagaaccucaucuggcucgucaagaagggcaacuccuaccccaagcuccgcaaguccuacaucaacgacaagggcaaggagguccucguccucuggggcauccaccaccccuccaccuccgccgaccagcagucccucuaccagaacgccgacgccuacgucuucgucggcaccucccgcuacuccaagaaguucaagcccgagaucgccauccgccccaagguccgcgaccaggagggccgcaugaacuacuacuggacccucgucgagcccggcgacaagaucaccuucgaggccaccggcaaccucgucgucccccgcuacgccuucgccauggagcgcaacgccggcuccggcaucaucaucuccgacacccccguccacgacugcaacaccaccugccagacccccaagggcgccaucaacaccucccuccccuuccagaacauccaccccaucaccaucggcaagugccccaaguacgucaaguccaccaagcuccgccucgccaccggccuccgcaacguccccuccauccagucccgcggccucuucggcgccaucgccggcuucaucgagggcggcuggaccggcauggucgacggcugguacggcuaccaccaccagaacgagcagggcuccggcuacgccgccgaccucaaguccacccagaacgccaucgacgagaucaccaacaaggucaacuccgucaucgagaagaugaacacccaguucaccgccgucggcaaggaguucaaccaccucgagaagcgcaucgagaaccucaacaagaaggucgacgacggcuuccucgacaucuggaccuacaacgccgagcuccucguccuccucgagaacgagcgcacccucgacuaccacgacuccaacgucaagaaccucuacgagaagguccgcucccagcucaagaacaacgccaaggagaucggcaacggcugcuucgaguucuaccacaagugcgacaacaccugcauggaguccgucaagaacggcaccuacgacuaccccaaguacuccgaggaggccaagcucaaccgcgaggagaucgacggcgucaagcucgaguccacccgcaucuaccagauccucgccaucuacuccaccgucgccuccucccucguccucgucgucucccucggcgccaucuccuucuggaugugcuccaacggcucccuccagugccgcaucugcaucuga

SEQ ID NO: 99061 - RNA, 1701 nt, Artificial Sequence; identical to SEQ ID NO: 99018
  derived and/or modified CDS sequence (opt2) from hemagglutinin__InfluenzaA__ACT22504

SEQ ID NO: 99062 - RNA, 1701 nt, Artificial Sequence; identical to SEQ ID NO: 98947
  derived and/or modified CDS sequence (opt2) from hemagglutinin__InfluenzaA__ACT33122

SEQ ID NO: 99063 - RNA, 1701 nt, Artificial Sequence
  derived and/or modified CDS sequence (opt2) from hemagglutinin__InfluenzaA__ACT33123
augaaggccauccucgucguccuccucuacaccuucgccaccgccaacgccgacacccucugcaucggcuaccacgccaacaacuccaccgacaccgucgacaccguccucgagaagaacgucaccgucacccacuccgucaaccuccucgaggacaagcacaacggcaagcucugcaagcuccgcggcgucgccccccuccaccucggcaagugcaacaucgccggcuggauccucggcaaccccgagugcgagucccucuccaccgccuccuccugguccuacaucgucgagaccuccuccuccgacaacggcaccugcuaccccggcgacuucaucgacuacgaggagcuccgcgagcagcucuccuccgucuccuccuucgagcgcuucgagaucuuccccaagaccuccuccuggcccaaccacgacuccaacaagggcgucaccgccgccugcccccacgccggcgccaaguccuucuacaagaaccucaucuggcucgucaagaagggcaacuccuaccccaagcucuccaaguccuacaucaacgacaagggcaaggagguccucguccucuggggcauccaccaccccuccaccuccgccgaccagcagucccucuaccagaacgccgacgccuacgucuucgucggcaccucccgcuacuccaagaaguucaagcccgagaucgccauccgccccaagguccgcgaccaggagggccgcaugaacuacuacuggacccucgucgagcccggcgacaagaucaccuucgaggccaccggcaaccucgucgucccccgcuacgccuucgccauggagcgcaacgccggcuccggcaucaucaucuccgacacccccguccacgacugcaacaccaccugccagacccccaagggcgccaucaacaccucccuccccuuccagaacauccaccccaucaccaucggcaagugccccaaguacgucaaguccaccaagcuccgccucgccaccggccuccgcaacguccccuccauccagucccgcggccucuucggcgccaucgccggcuucaucgagggcggcuggaccggcauggucgacggcugguacggcuaccaccaccagaacgagcagggcuccggcuacgccgccgaccucaaguccacccagaacgccaucgacgagaucaccaacaaggucaacuccgucaucgagaagaugaacacccaguucaccgccgucggcaaggaguucaaccaccucgagaagcgcaucgagaaccucaacaagaaggucgacgacggcuuccucgacaucuggaccuacaacgccgagcuccucguccuccucgagaacgagcgcacccucgacuaccacgacuccaacgucaagaaccucuacgagaagguccgcucccagcucaagaacaacgccaaggagaucggcaacggcugcuucgaguucuaccacaagugcgacaacaccugcauggaguccgucaagaacggcaccuacgacuaccccaaguacuccgaggaggccaagcucaaccgcgaggagaucgacggcgucaagcucgaguccacccgcaucuaccagauccucgccaucuacuccaccgucgccuccucccucguccucgucgucucccucggcgccaucuccuucuggaugugcuccaacggcucccuccaguuccgcaucugcaucuga

SEQ ID NO: 99064 - RNA, 1701 nt, Artificial Sequence; identical to SEQ ID NO: 98705
  derived and/or modified CDS sequence (opt2) from hemagglutinin__InfluenzaA__ACT33125

SEQ ID NO: 99065 - RNA, 1701 nt, Artificial Sequence
  derived and/or modified CDS sequence (opt2) from hemagglutinin__InfluenzaA__ACT36505
augaaggccauccucgucguccuccucuacaccuucgccaccgccaacgccgacacccucugcaucggcuaccacgccaacaacuccaccgacaccgucgacaccguccucgagaagaacgucaccgucacccacuccgucaaccuccucgaggacaagcacaacggcaagcucugcaagcuccgcggcgucgccccccuccaccucggcaagugcaacaucgccggcuggauccucggcaaccccgagugcgagucccucuccaccgccuccuccugguccuacaucgucgagaccuccuccuccgacaacggcaccugcuaccccggcgacuucaucgacuacgaggagcuccgcgagcagcucuccuccgucuccuccuucgagcgcuucgagaucuuccccaagaccuccuccuggcccaaccacgacuccaacaagggcgucaccgccgccugcccccacgccggcgccaaguccuucuacaagaaccucaucuggcucgucaagaagggcaacuccuaccccaagcucuccaaguccuacaucaacgacaagggcaaggagguccucguccucuggggcauccaccaccccuccaccuccgccgaccagcagucccucuaccagaacgccgacgccuacgucuucgucggcaccucccgcuacuccaagaaguucaagcccgagaucgccauccgccccaagguccgcgaccaggagggccgcaugaacuacuacuggacccucaucgagcccggcgacaagaucaccuucgaggccaccggcaaccucgucgucccccgcuacgccuucgccauggagcgcaacgccggcuccggcaucaucaucuccgacacccccguccacgacugcaacaccaccugccagacccccaagggcgccaucaacaccucccuccccuuccagaacauccaccccaucaccaucggcaagugccccaaguacgucaaguccaccaagcuccgccucgccaccggccuccgcaacguccccuccauccagucccgcggccucuucggcgccaucgccggcuucaucgagggcggcuggaccggcauggucgacggcugguacggcuaccaccaccagaacgagcagggcuccggcuacgccgccgaccucaaguccacccagaacgccaucgacgagaucaccaacaaggucaacuccgucaucgagaagaugaacacccaguucaccgccgucggcaaggaguucaaccaccucgagaagcgcaucgagaaccucaacaagaaggucgacgacggcuuccucgacaucuggaccuacaacgccgagcuccucguccuccucgagaacgagcgcacccucgacuaccacgacuccaacgucaagaaccucuacgagaagguccgcucccagcucaagaacaacgccaaggagaucggcaacggcugcuucgaguucuaccacaagugcgacaacaccugcauggaguccgucaagaacggcaccuacgacuaccccaaguacuccgaggaggccaagcucaaccgcgaggagaucgacggcgucaagcucgaguccacccgcaucuaccagauccucgccaucuacuccaccgucgccuccucccucguccucgucgucucccucggcgccaucuccuucuggaugugcuccaacggcucccuccagugccgcaucugcaucuga

SEQ ID NO: 99066 - RNA, 1701 nt, Artificial Sequence
  derived and/or modified CDS sequence (opt2) from hemagglutinin__InfluenzaA__ACT36649
augaaggccauccucgucguccuccucuacaccuucgccaccgccaacgccgacacccucugcaucggcuaccacgccaacaacuccaccgacaccgucgacaccguccucgagaagaacgucaccgucacccacuccgucaaccuccucgaggacaagcacaacggcaagcucugcaagcuccgcggcgucgccccccuccaccucggcaagugcaacaucgccggcuggauccucggcaaccccgagugcgagucccucuccaccgcccgcuccugguccuacaucgucgagaccuccuccuccgacaacggcaccugcuaccccggcgacuucaucgacuacgaggagcuccgcgagcagcucaacuccgucuccuccuucgagcgcuucgagaucuuccccaagaccuccuccuggcccaaccacgacuccaacaagggcgucaccgccgccugcccccacgccggcgccaaguccuucuacaagaaccucaucuggcucgucaagaagggcaacuccuaccccaagcucuccaaguccuacaucaacgacaagggcaaggagguccucguccucuggggcauccaccaccccuccaccuccgccgaccagcagucccucuaccagaacgccgacgccuacgucuucgucggcuccucccgcuacuccaagaaguucaagcccgagaucgccauccgccccaagguccgcgaccaggagggccgcaugaacuacuacuggacccucgucgagcccggcgacaagaucaccuucgaggccaccggcaaccucgucgucccccgcuacgccuucgccauggagcgcaacgccggcuccggcaucaucaucuccgacacccccguccacgacugcaacaccaccugccagacccccaagggcgccaucaacaccucccuccccuuccagaacauccaccccaucaccaucggcaagugccccaaguacgucaaguccaccaagcuccgccucgccaccggccuccgcaacguccccuccauccagucccgcggccucuucggcgccaucgccggcuucaucgagggcggcuggaccggcauggucgacggcugguacggcuaccaccaccagaacgagcagggcuccggcuacgccgccgaccucaaguccacccagaacgccaucgacgagaucaccaacaaggucaacuccgucaucgagaagaugaacacccaguucaccgccgucggcaaggaguucaaccaccucgagaagcgcaucgagaaccucaacaagaaggucgacgacggcuuccucgacaucuggaccuacaacgccgagcuccucguccuccucgagaacgagcgcacccucgacuaccacgacuccaacgucaagucccucuacgagaagguccgcucccagcucaagaacaacgccaaggagaucggcaacggcugcuucgaguucuaccacaagugcgacaacaccugcauggaguccgucaagaacggcaccuacgacuaccccaaguacuccgaggaggccaagcucaaccgcgaggagaucgacggcgucaagcucgaguccacccgcaucuaccagauccucgccaucuacuccaccgucgccuccucccucguccucgucgucucccucggcgccaucuccuucuggaugugcuccaacggcucccuccagugccgcaucugcaucuga

SEQ ID NO: 99067 - RNA, 1701 nt, Artificial Sequence; identical to SEQ ID NO: 98705
  derived and/or modified CDS sequence (opt2) from hemagglutinin__InfluenzaA__ACT36650

SEQ ID NO: 99068 - RNA, 1701 nt, Artificial Sequence; identical to SEQ ID NO: 98705
  derived and/or modified CDS sequence (opt2) from hemagglutinin__InfluenzaA__ACT36652

SEQ ID NO: 99069 - RNA, 1701 nt, Artificial Sequence; identical to SEQ ID NO: 98703
  derived and/or modified CDS sequence (opt2) from hemagglutinin__InfluenzaA__ACT36653

SEQ ID NO: 99070 - RNA, 1701 nt, Artificial Sequence
  derived and/or modified CDS sequence (opt2) from hemagglutinin__InfluenzaA__ACT36655
augaaggccauccucgucguccuccucuacaccuucgccaccgccaacgccgacacccucugcaucggcuaccacgccaacaacuccaccgacaccgucgacaccguccucgagaagaacgucaccgucacccacuccgucaaccuccucgaggacaagcacaacggcaagcucugcaagcuccgcggcgucgccccccuccaccucggcaagugcaacaucgccggcuggauccucggcaaccccgagugcgagucccucuccaccgccuccuccugguccuacaucgucgagaccuccuccuccggcaacggcaccugcuaccccggcgacuucaucgacuacgaggagcuccgcgagcagcucuccuccgucuccuccuucgagcgcuucgagaucuuccccaagaccuccuccuggcccaaccacgacuccaacaagggcgucaccgccgccugcccccacgccggcgccaaguccuucuacaagaaccucaucuggcucgucaagaagggcaacuccuaccccaagcucuccaaguccuacaucaacgacaagggcaaggagguccucguccucuggggcauccaccaccccuccaccuccgccgaccagcagucccucuaccagaacgccgacgccuacgucuucgucggcuccucccgcuacuccaagaaguucaagcccgagaucgccauccgccccaagguccgcgaccaggagggccgcaugaacuacuacuggacccucgucgagcccggcgacaagaucaccuucgaggccaccggcaaccucgucgucccccgcuacgccuucgccauggagcgcaacgccggcuccggcaucaucaucuccgacacccccguccacgacugcaacaccaccugccagacccccaagggcgccaucaacaccucccuccccuuccagaacauccaccccaucaccaucggcaagugccccaaguacgucaaguccaccaagcuccgccucgccaccggccuccgcaacguccccuccauccagucccgcggccucuucggcgccaucgccggcuucaucgagggcggcuggaccggcauggucgacggcugguacggcuaccaccaccagaacgagcagggcuccggcuacgccgccgaccucaaguccacccagaacgccaucgacgagaucaccaacaaggucaacuccgucaucgagaagaugaacacccaguucaccgccgucggcaaggaguucaaccaccucgagaagcgcaucgagaaccucaacaagaaggucgacgacggcuuccucgacaucuggaccuacaacgccgagcuccucguccuccucgagaacgagcgcacccucgacuaccacgacuccaacgucaagaaccucuacgagaagguccgcucccagcucaagaacaacgccaaggagaucggcaacggcugcuucgaguucuaccacaagugcgacaacaccugcauggaguccgucaagaacggcaccuacgacuaccccaaguacuccgaggaggccaagcucaaccgcgaggagaucgacggcgucaagcucgaguccacccgcaucuaccagauccucgccaucuacuccaccgucgccuccucccucguccucgucgucucccucggcgccaucuccuucuggaugugcuccaacggcucccuccagugccgcaucugcaucuga

SEQ ID NO: 99071 - RNA, 1701 nt, Artificial Sequence; identical to SEQ ID NO: 98692
  derived and/or modified CDS sequence (opt2) from hemagglutinin__InfluenzaA__ACT36658

SEQ ID NO: 99072 - RNA, 1701 nt, Artificial Sequence; identical to SEQ ID NO: 98731
  derived and/or modified CDS sequence (opt2) from hemagglutinin__InfluenzaA__ACT36659

SEQ ID NO: 99073 - RNA, 1701 nt, Artificial Sequence; identical to SEQ ID NO: 98692
  derived and/or modified CDS sequence (opt2) from hemagglutinin__InfluenzaA__ACT36661

SEQ ID NO: 99074 - RNA, 1701 nt, Artificial Sequence; identical to SEQ ID NO: 98705
  derived and/or modified CDS sequence (opt2) from hemagglutinin__InfluenzaA__ACT36663

SEQ ID NO: 99075 - RNA, 1701 nt, Artificial Sequence; identical to SEQ ID NO: 98705
  derived and/or modified CDS sequence (opt2) from hemagglutinin__InfluenzaA__ACT36666

SEQ ID NO: 99076 - RNA, 1701 nt, Artificial Sequence
  derived and/or modified CDS sequence (opt2) from hemagglutinin__InfluenzaA__ACT52687
augaaggccauccucgucguccuccucuacaccuucgccaccgccaacgccgacacccucugcaucggcuaccacgccaacaacuccaccgacaccgucgacaccguccucgagaagaacgucaccgucacccacuccgucaaccuccucgaggacaagcacaacggcaagcucugcaagcuccgcggcgucgccccccuccaccucggcaagugcaacaucgccggcuggauccucggcaaccccgagugcgagucccucuccaccgccuccuccugguccuacaucgucgagaccuccuccuccgacaacggcaccugcuaccccggcgacuucaucgacuacgaggagcuccgcgagcagcucuccuccgucuccuccuucgagcgcuucgagaucuuccccaagaccuccuccuggcccaaccacgacuccaacaagggcgucaccgccgccugcccccacgccggcgccaaguccuucuacaagaaccucaucuggcucgucaagaagggcaacuccuaccccaagcucuccaaguccuacaucaacgacaagggcaaggagguccucguccucuggggcauccaccaccccuccaccuccgccgaccagcagucccucuaccagaacgccgacgccuacgucuucgucggcuccucccgcuacuccaagaaguucaagcccgagaucgccauccgccccaagguccgcggccaggagggccgcaugaacuacuacuggacccucgucgagcccggcgacaagaucaccuucgaggccaccggcaaccucgucgucccccgcuacgccuucgccauggagcgcaacgccggcuccggcaucaucaucuccgacacccccguccacgacugcaacaccaccugccagacccccaagggcgccaucaacaccucccuccccuuccagaacauccaccccaucaccaucggcaagugccccaaguacgucaaguccaccaagcuccgccucgccaccggccuccgcaacguccccuccauccagucccgcggccucuucggcgccaucgccggcuucaucgagggcggcuggaccggcauggucgacggcugguacggcuaccaccaccagaacgagcagggcuccggcuacgccgccgaccucaaguccacccagaacgccaucgacgagaucaccaacaaggucaacuccgucaucgagaagaugaacacccaguucaccgccgucggcaaggaguucaaccaccucgagaagcgcaucgagaaccucaacaagaaggucgacgacggcuuccucgacaucuggaccuacaacgccgagcuccucguccuccucgagaacgagcgcacccucgacuaccacgacuccaacgucaagaaccucuacgagaagguccgcucccagcucaagaacaacgccaaggagaucggcaacggcugcuucgaguucuaccacaagugcgacaacaccugcauggaguccgucaagaacggcaccuacgacuaccccaaguacuccgaggaggccaagcucaaccgcgaggagaucgacggcgucaagcucgaguccacccgcuucuaccagauccucgccaucuacuccaccgucgccuccucccucguccucgucgucucccucggcgccaucuccuucuggaugugcuccaacggcucccuccagugccgcaucugcaucuga

SEQ ID NO: 99077 - RNA, 1701 nt, Artificial Sequence; identical to SEQ ID NO: 98692
  derived and/or modified CDS sequence (opt2) from hemagglutinin__InfluenzaA__ACT54606

SEQ ID NO: 99078 - RNA, 1701 nt, Artificial Sequence; identical to SEQ ID NO: 98705
  derived and/or modified CDS sequence (opt2) from hemagglutinin__InfluenzaA__ACT66146

SEQ ID NO: 99079 - RNA, 1701 nt, Artificial Sequence; identical to SEQ ID NO: 98947
  derived and/or modified CDS sequence (opt2) from hemagglutinin__InfluenzaA__ACT66155

SEQ ID NO: 99080 - RNA, 1701 nt, Artificial Sequence
  derived and/or modified CDS sequence (opt2) from hemagglutinin__InfluenzaA__ACT66162
auggaggccauccucgucguccuccucuacaccuucgccaccgccaacgccgacacccucugcaucggcuaccacgccaacaacuccaccgacaccgucgacaccguccucgagaagaacgucaccgucacccacuccgucaaccuccucgaggacaagcacaacggcaagcucugcaagcuccgcggcgucgccccccuccaccucggcaagugcaacaucgccggcuggauccucggcaaccccgagugcgagucccucuccaccgccuccuccugguccuacaucgucgagaccuccuccuccgacaacggcaccugcuaccccggcgacuucaucgacuacgaggagcuccgcgagcaccucuccuccgucuccuccuucgagcgcuucgagaucuuccccaagaccuccuccuggcccaaccacgacuccaacaagggcgucaccgccgccugcccccacgccggcgccaaguccuucuacaagaaccucaucuggcucgucaagaagggcaacuccuaccccaagcucuccaaguccuacaucaacgacaagggcaaggagguccucguccucuggggcauccaccaccccuccaccuccgccgaccagcagucccucuaccagaacgccgacgccuacgucuucgucggcuccucccgcuacuccaagaaguucaagcccgagaucgccauccgccccaagguccgcgaccaggagggccgcaugaacuacuacuggacccucgucgagcccggcgacaagaucaccuucgaggccaccggcaaccucgucgucccccgcuacgccuucgccauggagcgcaacgccggcuccggcaucaucaucuccgacacccccguccacgacugcaacaccaccugccagacccccaagggcgccaucaacaccucccuccccuuccagaacauccaccccaucaccaucggcaagugccccaaguacgucaaguccaccaagcuccgccucgccaccggccuccgcaacguccccuccauccagucccgcggccucuucggcgccaucgccggcuucaucgagggcggcuggaccggcauggucgacggcugguacggcuaccaccaccagaacgagcagggcuccggcuacgccgccgaccucaaguccacccagaacgccaucgacgagaucaccaacaaggucaacuccgucaucgagaagaugaacacccaguucaccgccgucggcaaggaguucaaccaccucgagaagcgcaucgagaaccucaacaagaaggucgacgacggcuuccucgacaucuggaccuacaacgccgagcuccucguccuccucgagaacgagcgcacccucgacuaccacgacuccaacgucaagaaccucuacgagaagguccgcucccagcucaagaacaacgccaaggagaucggcaacggcugcuucgaguucuaccacaagugcgacaacaccugcauggaguccgucaagaacggcaccuacgacuaccccaaguacuccgaggaggccaagcucaaccgcgaggagaucgacggcgucaagcucgaguccacccgcaucuaccagauccucgccaucuacuccaccgucgccuccucccucguccucgucgucucccucggcgccaucuccuucuggaugugcuccaacggcucccuccagugccgcaucugcaucuga

SEQ ID NO: 99081 - RNA, 1701 nt, Artificial Sequence; identical to SEQ ID NO: 98705
  derived and/or modified CDS sequence (opt2) from hemagglutinin__InfluenzaA__ACT67239

SEQ ID NO: 99082 - RNA, 1701 nt, Artificial Sequence; identical to SEQ ID NO: 98705
  derived and/or modified CDS sequence (opt2) from hemagglutinin__InfluenzaA__ACT67255

SEQ ID NO: 99083 - RNA, 1701 nt, Artificial Sequence; identical to SEQ ID NO: 98692
  derived and/or modified CDS sequence (opt2) from hemagglutinin__InfluenzaA__ACT68102

SEQ ID NO: 99084 - RNA, 1701 nt, Artificial Sequence
  derived and/or modified CDS sequence (opt2) from hemagglutinin__InfluenzaA__ACT68103
augaaggccauccucgucguccuccucuacaccuucgccaccgccaacgccgacacccucugcaucggcuaccacgccaacaacuccaccgacaccgucgacaccguccucgagaagaacgucaccgucacccacuccgucaaccuccucgaggacaagcacaacggcaagcucugcaagcuccgcggcgucgccccccuccaccucggcaagugcaacaucgccggcuggauccucggcaaccccgagugcgagucccucuccaccgccuccuccugguccuacaucgucgagaccuccuccuccgacaacggcaccugcuaccccggcgacuucaucgacuacgaggagcuccgcgagcagcucuccuccgucuccuccuucgagcgcuucgagaucuuccccaagaccuccuccuggcccaaccacgacuccaacaagggcgucaccgccgccugcccccacgccggcgccaaguccuucuacaagaaccucaucuggcucgucaagaagggcaacuccuaccccaagcucuccaaguccuacaucaacgacaagggcaaggagguccucguccucuggggcauccaccaccccuccaccuccgccgaccagcagucccucuaccagaacgccgacgccuacgucuucgucggcuccucccgcuacuccaagaaguucaagcccgagaucgccauccgccccaagguccgcgaccaggagggccgcaugaacuacuacuggacccucgucgagcccggcgacaagaucaccuucgaggccaccggcaaccucgucgucccccgcuacgccuucgccauggagcgcaacgccggcuccggcaucaucaucuccgacacccccguccacgacugcaacaccaccugccagacccucaagggcgccaucaacaccucccuccccuuccagaacauccaccccaucaccaucggcaagugccccaaguacgucaaguccaccaagcuccgccucgccaccggccuccgcaacguccccuccauccagucccgcggccucuucggcgccaucgccggcuucaucgagggcggcuggaccggcauggucgacggcugguacggcuaccaccaccagaacgagcagggcuccggcuacgccgccgaccucaaguccacccagaacgccaucgacgagaucaccaacaaggucaacuccgucaucgagaagaugaacacccaguucaccgccgucggcaaggaguucaaccaccucgagaagcgcaucgagaaccucaacaagaaggucgacgacggcuuccucgacaucuggaccuacaacgccgagcuccucguccuccucgagaacgagcgcacccucgacuaccacgacuccaacgucaagaaccucuacgagaagguccgcucccagcucaagaacaacgccaaggagaucggcaacggcugcuucgaguucuaccacaagugcgacaacaccugcauggaguccgucaagaacggcaccuacgacuaccccaaguacuccgaggaggccaagcucaaccgcgaggagaucgacggcgucaagcucgaguccacccgcaucuaccagauccucgccaucuacuccaccgucgccuccucccucguccucgucgucucccucggcgccaucuccuucuggaugugcuccaacggcucccuccagugccgcaucugcaucuga

SEQ ID NO: 99085 - RNA, 1701 nt, Artificial Sequence; identical to SEQ ID NO: 98692
  derived and/or modified CDS sequence (opt2) from hemagglutinin__InfluenzaA__ACT68104

SEQ ID NO: 99086 - RNA, 1701 nt, Artificial Sequence
  derived and/or modified CDS sequence (opt2) from hemagglutinin__InfluenzaA__ACT68105
augaaggccauccucgucguccuccucuacaccuucgccaccgccaacgccgacacccucugcaucggcuaccacgccaacaacuccaccgacaccgucgacaccguccucgagaagaacgucaccgucacccacuccgucaaccuccucgaggacaagcacaacggcaagcucugcaagcuccgcggcgucgccccccuccaccucggcaagugcaacaucgccggcuggauccucggcaaccccgagugcgagucccucuccaccgccuccuccugguccuacaucgucgagaccuccuccuccgacaacggcaccugcuaccccggcgacuucaucgacuacgaggagcuccgcgagcagcucuccuccgucuccuccuucgagcgcuucgagaucuuccccaagaccuccuccuggcccaaccacgacuccaacaagggcgucaccgccgccugcccccacgccggcgccaaguccuucuacaagaaccucaucuggcucgucaagaagggcaacuccuaccccaagcucuccaaguccuacaucaacgacaagggcaaggagguccucguccucuggggcauccaccaccccuccaccuccgccgaccagcagucccucuaccagaacgccgacgccuacgucuucgucggcuccuccaaguacuccaagaaguucaagcccgagaucgccauccgccccaagguccgcgaccaggagggccgcaugaacuacuacuggacccucgucgagcccggcgacaagaucaccuucgaggccaccggcaaccucgucgucccccgcuacgccuucgccauggagcgcaacgccggcuccggcaucaucaucuccgacacccccguccacgacugcaacaccaccugccagacccccaagggcgccaucaacaccucccuccccuuccagaacauccaccccaucaccaucggcaagugccccaaguacgucaaguccaccaagcuccgccucgccaccggccuccgcaacguccccuccauccagucccgcggccucuucggcgccaucgccggcuucaucgagggcggcuggaccggcauggucgacggcugguacggcuaccaccaccagaacgagcagggcuccggcuacgccgccgaccucaaguccacccagaacgccaucgacgagaucaccaacaaggucaacuccgucaucgagaagaugaacacccaguucaccgccgucggcaaggaguucaaccaccucgagaagcgcaucgagaaccucaacaagaaggucgacgacggcuuccucgacaucuggaccuacaacgccgagcuccucguccuccucgagaacgagcgcacccucgacuaccacgacuccaacgucaagaaccucuacgagaagguccgcucccagcucaagaacaacgccaaggagaucggcaacggcugcuucgaguucuaccacaagugcgacaacaccugcauggaguccgucaagaacggcaccuacgacuaccccaaguacuccggcgaggccaagcucaaccgcgaggagaucgacggcgucaagcucgaguccacccgcaucuaccagauccucgccaucuacuccaccgucgccuccucccucguccucgucgucucccucggcgccaucuccuucuggaugugcuccaacggcucccuccagugccgcaucugcaucuga

SEQ ID NO: 99087 - RNA, 1701 nt, Artificial Sequence; identical to SEQ ID NO: 98692
  derived and/or modified CDS sequence (opt2) from hemagglutinin__InfluenzaA__ACT68106

SEQ ID NO: 99088 - RNA, 1701 nt, Artificial Sequence; identical to SEQ ID NO: 98692
  derived and/or modified CDS sequence (opt2) from hemagglutinin__InfluenzaA__ACT68107

SEQ ID NO: 99089 - RNA, 1701 nt, Artificial Sequence; identical to SEQ ID NO: 98885
  derived and/or modified CDS sequence (opt2) from hemagglutinin__InfluenzaA__ACT68108

SEQ ID NO: 99090 - RNA, 1701 nt, Artificial Sequence
  derived and/or modified CDS sequence (opt2) from hemagglutinin__InfluenzaA__ACT68109
augaaggccauccucgucguccuccucuacaccuucgccaccgccaacaccgacacccucugcaucggcuaccacgccaacaacuccaccgacaccgucgacaccguccucgagaagaacgucaccgucacccacuccgucaaccuccucgaggacaagcacaacggcaagcucugcaagcuccgcggcgucgccccccuccaccucggcaagugcaacaucgccggcuggauccucggcaaccccgagugcgagucccucuccaccgccuccuccugguccuacaucgucgagaccuccuccuccgacaacggcaccugcuaccccggcgacuucaucgacuacgaggagcuccgcgagcagcucuccuccgucuccuccuucgagcgcuucgagaucuuccccaagaccuccuccuggcccaaccacgacuccaacaagggcgucaccgccgccugcccccacgccggcgccaaguccuucuacaagaaccucaucuggcucgucaagaagggcaacuccuaccccaagcucuccaaguccuacaucaacgacaagggcaaggagguccucguccucuggggcauccaccaccccuccaccuccgccgaccagcagucccucuaccagaacgccgacgccuacgucuucgucggcaccucccgcuacuccaagaaguucaagcccgagaucgccauccgccccaagguccgcgaccaggagggccgcaugaacuacuacuggacccucgucgagcccggcgacaagaucaccuucgaggccaccggcaaccucgucgucccccgcuacgccuucgccauggagcgcaacgccggcuccggcaucaucaucuccgacacccccguccacgacugcaacaccaccugccagacccccaagggcgccaucaacaccucccuccccuuccagaacauccaccccaucaccaucggcaagugccccaaguacgucaaguccaccaagcuccgccucgccaccggccuccgcaacguccccuccauccagucccgcggccucuucggcgccaucgccggcuucaucgagggcggcuggaccggcauggucgacggcugguacggcuaccaccaccagaacgagcagggcuccggcuacgccgccgaccucaaguccacccagaacgccaucgacgagaucaccaacaaggucaacuccgucaucgagaagaugaacacccaguucaccgccgucggcaaggaguucaaccaccucgagaagcgcaucgagaaccucaacaagaaggucgacgacggcuuccucgacaucuggaccuacaacgccgagcuccucguccuccucgagaacgagcgcacccucgacuaccacgacuccaacgucaagaaccucuacgagaagguccgcucccagcucaagaacaacgccaaggagaucggcaacggcugcuucgaguucuaccacaagugcgacaacaccugcauggaguccgucaagaacggcaccuacgacuaccccaaguacuccgaggaggccaagcucaaccgcgaggagaucgacggcgucaagcucgaguccacccgcaucuaccagauccucgccaucuacuccaccgucgccuccucccucguccucgucgucucccucggcgccaucuccuucuggaugugcuccaacggcucccuccagugccgcaucugcaucuga

SEQ ID NO: 99091 - RNA, 1701 nt, Artificial Sequence; identical to SEQ ID NO: 98692
  derived and/or modified CDS sequence (opt2) from hemagglutinin__InfluenzaA__ACT68110

SEQ ID NO: 99092 - RNA, 1701 nt, Artificial Sequence; identical to SEQ ID NO: 98692
  derived and/or modified CDS sequence (opt2) from hemagglutinin__InfluenzaA__ACT68112

SEQ ID NO: 99093 - RNA, 1701 nt, Artificial Sequence; identical to SEQ ID NO: 98692
  derived and/or modified CDS sequence (opt2) from hemagglutinin__InfluenzaA__ACT68113

SEQ ID NO: 99094 - RNA, 1701 nt, Artificial Sequence; identical to SEQ ID NO: 98692
  derived and/or modified CDS sequence (opt2) from hemagglutinin__InfluenzaA__ACT68115

SEQ ID NO: 99095 - RNA, 1701 nt, Artificial Sequence; identical to SEQ ID NO: 98692
  derived and/or modified CDS sequence (opt2) from hemagglutinin__InfluenzaA__ACT68119

SEQ ID NO: 99096 - RNA, 1701 nt, Artificial Sequence
  derived and/or modified CDS sequence (opt2) from hemagglutinin__InfluenzaA__ACT79133
augaaggccauccucgucguccuccucuacaccuucgccaccgccaacgccgacacccucugcaucggcuaccacgccaacaacuccaccgacaccgucgacaccguccucgagaagaacgucaccgucacccacuccgucaaccuccucgaggacaagcacaacggcaagcucugcaagcuccgcggcgucgccccccuccaccucggcaagugcaacaucgccggcuggauccucggcaaccccgagugcgagucccucuccaccgccuccuccugguccuacaucgucgagaccuccuccuccgacaacggcaccugcuaccccggcgacuucaucgacuacgaggagcuccgcgagcagcucuccuccgucuccuccuucgagcgcuucgagaucuuccccaagaccuccuccuggcccaaccacgacuccaacaagggcgucaccgccgccugcccccacgccggcgccaaguccuucuacaagaaccucaucuggcucgucaagaagggcaacuccuaccccaagcucuccaaguccuacaucaacgacaagggcaaggagguccucguccucuggggcauccaccaccccuccaccuccgccgaccagcagucccucuaccagaacgccgacgccuacgucuucgucggcaccucccgcuacuccaagaaguucaagcccgagaucgccauccgccccaagguccgcgaccaggagggccgcaugaacuacuacuggaagcucgucgagcccggcgacaagaucaccuucgaggccaccggcaaccucgucgucccccgcuacgccuucgccauggagcgcaacgccggcuccggcaucaucaucuccgacacccccguccacgacugcaacaccaccugccagacccccaagggcgccaucaacaccucccuccccuuccagaacauccaccccaucaccaucggcaagugccccaaguacgucaaguccaccaagcuccgccucgccaccggccuccgcaacguccccuccauccagucccgcggccucuucggcgccaucgccggcuucaucgagggcggcuggaccggcauggucgacggcugguacggcuaccaccaccagaacgagcagggcuccggcuacgccgccgaccucaaguccacccagaacgccaucgacgagaucaccaacaaggucaacuccgucaucgagaagaugaacacccaguucaccgccgucggcaaggaguucaaccaccucgagaagcgcaucgagaaccucaacaagaaggucgacgacggcuuccucgacaucuggaccuacaacgccgagcuccucguccuccucgagaacgagcgcacccucgacuaccacgacuccaacgucaagaaccucuacgagaagguccgcucccagcucaagaacaacgccaaggagaucggcaacggcugcuucgaguucuaccacaagugcgacaacaccugcauggaguccgucaagaacggcaccuacgacuaccccaaguacuccgaggaggccaagcucaaccgcgaggagaucgacggcgucaagcucgaguccacccgcaucuaccagauccucgccaucuacuccaccgucgccuccucccucguccucgucgucucccucggcgccaucuccuucuggaugugcuccaacggcucccuccagugccgcaucugcaucuga

SEQ ID NO: 99097 - RNA, 1701 nt, Artificial Sequence; identical to SEQ ID NO: 98692
  derived and/or modified CDS sequence (opt2) from hemagglutinin__InfluenzaA__ACT79143

SEQ ID NO: 99098 - RNA, 1701 nt, Artificial Sequence; identical to SEQ ID NO: 98731
  derived and/or modified CDS sequence (opt2) from hemagglutinin__InfluenzaA__ACT79153

SEQ ID NO: 99099 - RNA, 1701 nt, Artificial Sequence; identical to SEQ ID NO: 99018
  derived and/or modified CDS sequence (opt2) from hemagglutinin__InfluenzaA__ACT79163

SEQ ID NO: 99100 - RNA, 1701 nt, Artificial Sequence; identical to SEQ ID NO: 99018
  derived and/or modified CDS sequence (opt2) from hemagglutinin__InfluenzaA__ACT79173

SEQ ID NO: 99101 - RNA, 1701 nt, Artificial Sequence
  derived and/or modified CDS sequence (opt2) from hemagglutinin__InfluenzaA__ACT79625
augaaggccauccucgucguccuccucuacaccuucgccaccgccaacgccgacacccucugcaucggcuaccacgccaacaacuccaccgacaccgucgacaccguccucgagaagaacgucaccgucacccacuccgucaaccuccucgaggacaagcacaacggcaagcucugcaagcuccgcggcgucgccccccuccaccucggcaagugcaacaucgccggcuggauccucggcaaccccgagugcgagucccucuccaccgccuccuccugguccuacaucgucgagaccuccuccuccgacaacggcaccugcuaccccggcgacuucaucgacuacgaggagcuccgcgagcagcucuccuccgucuccuccuucgagcgcuucgagaucuuccccaagaccuccuccuggcccaaccacgacuccaacaagggcgucaccaccgccugcccccacgccggcgccaaguccuucuacaagaaccucaucuggcucgucaagaagggcaacuccuaccccaagcucuccaaguccuacaucaacgacaagggcaaggagguccucguccucuggggcauccaccaccccuccaccuccgccgaccagcagucccucuaccagaacgccgacgccuacgucuucgucggcaccucccgcuacuccaagaaguucaagcccgagaucgccauccgccccaagguccgcgaccaggagggccgcaugaacuacuacuggacccucgucgagcccggcgacaagaucaccuucgaggccaccggcaaccucgucgucccccgcuacgccuucgccauggagcgcaacgccggcuccggcaucaucaucuccgacacccccguccacgacugcaacaccaccugccagacccccaagggcgccaucaacaccucccuccccuuccagaacauccaccccaucaccaucggcaagugccccaaguacgucaaguccaccaagcuccgccucgccaccggccuccgcaacguccccuccauccagucccgcggccucuucggcgccaucgccggcuucaucgagggcggcuggaccggcauggucgacggcugguacggcuaccaccaccagaacgagcagggcuccggcuacgccgccgaccucaaguccacccagaacgccaucgacgagaucaccaacaaggucaacuccgucaucgagaagaugaacacccaguucaccgccgucggcaaggaguucaaccaccucgagaagcgcaucgagaaccucaacaagaagaucgacgacggcuuccucgacaucuggaccuacaacgccgagcuccucguccuccucaagaacgagcgcacccucgacuaccacgacuccaacgucaagaaccucuacgagaagguccgcucccagcucaagaacaacgccaaggagaucggcaacggcugcuucgaguucuaccacaagugcgacaacaccugcauggaguccgucaagaacggcaccuacgacuaccccaaguacuccgaggaggccaagcucaaccgcgaggagaucgacggcgucaagcucgaguccacccgcaucuaccagauccucgccaucuacuccaccgucgccuccucccucguccucgucgucucccucggcgccaucuccuucuggaugugcuccaacggcucccuccagugccgcaucugcaucuga

SEQ ID NO: 99102 - RNA, 1701 nt, Artificial Sequence; identical to SEQ ID NO: 98692
  derived and/or modified CDS sequence (opt2) from hemagglutinin__InfluenzaA__ACT79627

SEQ ID NO: 99103 - RNA, 1701 nt, Artificial Sequence
  derived and/or modified CDS sequence (opt2) from hemagglutinin__InfluenzaA__ACT82512
augaaggccauccucgucguccuccucuacaccuucgccaccgccaacgccgacacccucugcaucggcuaccacgccaacaacuccaccgacaccgucgacaccguccucgagaagaacgucaccgucacccacuccgucaaccuccucgaggacaagcacaacggcaagcucugcaagcuccgcggcgucgccccccuccaccucggcaagugcaacaucgccggcuggauccucggcaaccccgagugcgagucccucuccaccgccuccuccugguccuacaucgucgagaccuccuccuccgacaacggcaccugcuaccccggcgacuucaucgacuacgaggagcuccgcgagcagcucuccuccgucuccuccuucgagcgcuucgagaucuuccccaagaccuccuccuggcccaaccacgacuccaacaagggcgucaccgccgccugcccccacgccggcgccaaguccuucuacaagaaccucaucuggcucgucaagaagggcaacuccuaccccaagcucuccaaguccuacaucaacgacaagggcaaggagguccucguccucuggggcauccaccaccccuccaccuccgccgaccagcagucccucuaccagaacgccgacgccuacgucuucgucggcaccucccgcuacuccaagaaguucaagcccgagaucgccauccgccccaagguccgcgaccaggagggccgcaugaacuacuacuggacccucgucgagcccggcgacaagaucaccuucgaggccaccggcaaccucgucgucccccgcuacgccuucgccauggagcgcaacgccggcuccggcaucaucaucuccgacacccccguccacgacugcaacaccaccugccagacccccaagggcgccaucaacaccucccuccccuuccagaacauccaccccaucaccaucggcaagugccccaaguacgucaaguccaccaagcuccgccucgccaccggccuccgcaacguccccuccauccagucccgcggccucuucggcgccaucgccggcuucaucgagggcggcuggaccggcauggucgacggcugguacggcuaccaccaccagaacgagcagggcuccggcuacgccgccgaccucaaguccacccagaacgccaucgacgagaucaccaacaaggucaacuccgucaucgagaagaugaacacccaguucaccgccgucggcaaggaguucaaccaccucgagaagcgcaucgagaaccucaacaagaaggucgacgacggcuuccucgacaucuggaccuacaacgccgagcuccucguccuccucgagaacgagcgcacccucgacuaccacgacuccaacgucaagaaccucuacgagaagguccgcucccaguucaagaacaacgccaaggagaucggcaacggcugcuucgaguucuaccacaagugcgacaacaccugcauggaguccgucaagaacggcaccuacgacuaccccaaguacuccgaggaggccaagcucaaccgcgaggagaucgacggcgucaagcucgaguccacccgcaucuaccagauccucgccaucuacuccaccgucgccuccucccucguccucgucgucucccucggcgccaucuccuucuggaugugcuccaacggcucccuccagugccgcaucugcaucuga

SEQ ID NO: 99104 - RNA, 1701 nt, Artificial Sequence; identical to SEQ ID NO: 98705
  derived and/or modified CDS sequence (opt2) from hemagglutinin__InfluenzaA__ACT82513

SEQ ID NO: 99105 - RNA, 1701 nt, Artificial Sequence
  derived and/or modified CDS sequence (opt2) from hemagglutinin__InfluenzaA__ACT82514
augaaggccauccucgucguccuccucuacaccuucgccaccgccaacgccgacacccucugcaucggcuaccacgccaacaacuccaccgacaccgucgacaccguccucgagaagaacgucaccgucacccacuccgucaaccuccucgaggacaagcacaacggcaagcucugcaagcuccgcggcgucgccccccuccaccucggcaagugcaacaucgccggcuggauccucggcaaccccgagugcgagucccucuccaccgccuccuccugguccuacaucgucgagaccuccuccuccgacaacggcaccugcuaccccggcgacuucaucgacuacgaggagcuccgcgagcagcucuccuccgucuccuccuucgagcgcuucgagaucuuccccaagaccuccuccuggcccaaccacgacuccaacaagggcgucaccgccgccugcccccacgccggcgccaaguccuucuacaagaaccucaucuggcucgucaagaagggcaacuccuaccccaagcucuccaaguccuacaucaacgacaagggcaaggagguccucguccucuggggcauccaccaccccuccaccuccgccgaccagcagucccucuaccagaacgccgacgccuacgucuucgucggcaccucccgcuacuccaagaaguucaagcccgagaucgccauccgccccaagguccgcgaccaggagggccgcaugaacuacuacuggacccucgucgagcccggcgacaagaucaccuucgaggccaccggcaaccucgucgucccccgcuacgccuucgccauggagcgcaacgccggcuccggcaucaucaucuccaacacccccguccacgacugcaacaccaccugccagacccccaagggcuccaucaacaccucccuccccuuccagaacauccaccccaucaccaucggcaagugccccaaguacgucaaguccaccaagcuccgccucgccaccggccuccgcaacguccccuccauccagucccgcggccucuucggcgccaucgccggcuucaucgagggcggcuggaccggcauggucgacggcugguacggcuaccaccaccagaacgagcagggcuccggcuacgccgccgaccucaaguccacccagaacgccaucgacgagaucaccaacaaggucaacuccgucaucgagaagaugaacacccaguucaccgccgucggcaaggaguucaaccaccucgagaagcgcaucgagaaccucaacaagaaggucgacgacggcuuccucgacaucuggaccuacaacgccgagcuccucguccuccucgagaacgagcgcacccucgacuaccacgacuccaacgucaagaaccucuacgagaagguccgcucccagcucaagaacaacgccaaggagaucggcaacggcugcuucgaguucuaccacaagugcgacaacaccugcauggaguccgucaagaacggcaccuacgacuaccccaaguacuccgaggaggccaagcucaaccgcgaggagaucgacggcgucaagcucgaguccacccgcaucuaccagauccucgccaucuacuccaccgucgccuccucccucguccucgucgucucccucggcgccaucuccuucuggaugugcuccaacggcucccuccagugccgcaucugcaucuga

SEQ ID NO: 99106 - RNA, 1701 nt, Artificial Sequence; identical to SEQ ID NO: 98705
  derived and/or modified CDS sequence (opt2) from hemagglutinin__InfluenzaA__ACT82515

SEQ ID NO: 99107 - RNA, 1701 nt, Artificial Sequence
  derived and/or modified CDS sequence (opt2) from hemagglutinin__InfluenzaA__ACT82516
augaaggccauccucgucguccuccucuacaccuucgccaccgccaacgccgacacccucugcaucggcuaccacgccaacaacuccaccgacaccgucgacaccguccucgagaagaacgucaccgucacccacuccgucaaccuccucgaggacaagcacaacggcaagcucugcaagcuccgcggcgucgccccccuccaccucggcaagugcaacaucgccggcuggauccucggcaaccccgagugcgagucccucuccaccgccuccuccugguccuacaucgucgagaccuccuccuccgacaacggcaccugcuaccccggcgacuucaucgacuacgaggagcuccgcgagcagcucuccuccgucuccuccuucgagcgcuucgagaucuuccccaagaccuccuccuggcccaaccacgacuccaacaagggcgucaccgccgccugcccccacgccggcgccaaguccuucuacaagaaccucaucuggcucgucaagaagggcaacuccuaccccaagcucuccaaguccuacaucaacgacaagggcaaggagguccucguccucuggggcauccaccaccccuccaccuccgccgaccagcagucccucuaccagaacgccgacgccuacgucuucgucggcuccucccgcuacuccaagaaguucaagcccgagaucgccauccgccccaagguccgcgaccaggagggccgcaugaacuacuacuggacccucgucgagcccggcgacaagaucaccuucgaggccaccggcaaccucauggucccccgcuacgccuucgccauggagcgcaacgccggcuccggcaucaucaucuccgacacccccguccacgacugcaacaccaccugccagacccccaagggcgccaucaacaccucccuccccuuccacaacauccaccccaucaccaucggcaagugccccaaguacgucaaguccaccaagcuccgccucgccaccggccuccgcaacguccccuccauccagucccgcggccucuucggcgccaucgccggcuucaucgagggcggcuggaccggcauggucgacggcugguacggcuaccaccaccagaacgagcagggcuccggcuacgccgccgaccucaaguccacccagaacgccaucgacgagaucaccaacaaggucaacuccgucaucgagaagaugaacacccaguucaccgccgucggcaaggaguucaaccaccucgagaagcgcaucgagaaccucaacaagaaggucgacgacggcuuccucgacaucuggaccuacaacgccgagcuccucguccuccucgagaacgagcgcacccucgacuaccacgacuccaacgucaagaaccucuacgagaagguccgcucccagcucaagaacaacgccaaggagaucggcaacggcugcuucgaguucuaccacaagugcgacaacaccugcauggaguccgucaagaacggcaccuacgacuaccccaaguacuccgaggaggccaagcucaaccgcgaggagaucgacggcgucaagcucgaguccacccgcaucuaccagauccucgccaucuacuccaccgucgccuccucccucguccucgucgucucccucggcgccaucuccuucuggaugugcuccaacggcucccuccagugccgcaucugcaucuga

SEQ ID NO: 99108 - RNA, 1701 nt, Artificial Sequence; identical to SEQ ID NO: 98947
  derived and/or modified CDS sequence (opt2) from hemagglutinin__InfluenzaA__ACT83795

SEQ ID NO: 99109 - RNA, 1701 nt, Artificial Sequence; identical to SEQ ID NO: 98947
  derived and/or modified CDS sequence (opt2) from hemagglutinin__InfluenzaA__ACT83805

SEQ ID NO: 99110 - RNA, 1701 nt, Artificial Sequence; identical to SEQ ID NO: 98705
  derived and/or modified CDS sequence (opt2) from hemagglutinin__InfluenzaA__ACT83815

SEQ ID NO: 99111 - RNA, 1701 nt, Artificial Sequence; identical to SEQ ID NO: 98705
  derived and/or modified CDS sequence (opt2) from hemagglutinin__InfluenzaA__ACT83825

SEQ ID NO: 99112 - RNA, 1701 nt, Artificial Sequence; identical to SEQ ID NO: 98705
  derived and/or modified CDS sequence (opt2) from hemagglutinin__InfluenzaA__ACT83835

SEQ ID NO: 99113 - RNA, 1701 nt, Artificial Sequence; identical to SEQ ID NO: 98798
  derived and/or modified CDS sequence (opt2) from hemagglutinin__InfluenzaA__ACT83845

SEQ ID NO: 99114 - RNA, 1701 nt, Artificial Sequence; identical to SEQ ID NO: 98692
  derived and/or modified CDS sequence (opt2) from hemagglutinin__InfluenzaA__ACT83855

SEQ ID NO: 99115 - RNA, 1701 nt, Artificial Sequence; identical to SEQ ID NO: 98705
  derived and/or modified CDS sequence (opt2) from hemagglutinin__InfluenzaA__ACT83865

SEQ ID NO: 99116 - RNA, 1701 nt, Artificial Sequence; identical to SEQ ID NO: 98947
  derived and/or modified CDS sequence (opt2) from hemagglutinin__InfluenzaA__ACT83875

SEQ ID NO: 99117 - RNA, 1701 nt, Artificial Sequence; identical to SEQ ID NO: 98947
  derived and/or modified CDS sequence (opt2) from hemagglutinin__InfluenzaA__ACT85999

SEQ ID NO: 99118 - RNA, 1701 nt, Artificial Sequence; identical to SEQ ID NO: 98947
  derived and/or modified CDS sequence (opt2) from hemagglutinin__InfluenzaA__ACT86009

SEQ ID NO: 99119 - RNA, 1701 nt, Artificial Sequence; identical to SEQ ID NO: 98705
  derived and/or modified CDS sequence (opt2) from hemagglutinin__InfluenzaA__ACT86019

SEQ ID NO: 99120 - RNA, 1701 nt, Artificial Sequence; identical to SEQ ID NO: 98798
  derived and/or modified CDS sequence (opt2) from hemagglutinin__InfluenzaA__ACT86029

SEQ ID NO: 99121 - RNA, 1701 nt, Artificial Sequence; identical to SEQ ID NO: 98705
  derived and/or modified CDS sequence (opt2) from hemagglutinin__InfluenzaA__ACT86039

SEQ ID NO: 99122 - RNA, 1701 nt, Artificial Sequence; identical to SEQ ID NO: 98705
  derived and/or modified CDS sequence (opt2) from hemagglutinin__InfluenzaA__ACT86059

SEQ ID NO: 99123 - RNA, 1701 nt, Artificial Sequence; identical to SEQ ID NO: 98705
  derived and/or modified CDS sequence (opt2) from hemagglutinin__InfluenzaA__ACT86069

SEQ ID NO: 99124 - RNA, 1701 nt, Artificial Sequence; identical to SEQ ID NO: 98705
  derived and/or modified CDS sequence (opt2) from hemagglutinin__InfluenzaA__ACT86079

SEQ ID NO: 99125 - RNA, 1701 nt, Artificial Sequence; identical to SEQ ID NO: 98705
  derived and/or modified CDS sequence (opt2) from hemagglutinin__InfluenzaA__ACT86089

SEQ ID NO: 99126 - RNA, 1701 nt, Artificial Sequence; identical to SEQ ID NO: 98705
  derived and/or modified CDS sequence (opt2) from hemagglutinin__InfluenzaA__ACT86099

SEQ ID NO: 99127 - RNA, 1701 nt, Artificial Sequence; identical to SEQ ID NO: 98947
  derived and/or modified CDS sequence (opt2) from hemagglutinin__InfluenzaA__ACT86109

SEQ ID NO: 99128 - RNA, 1701 nt, Artificial Sequence; identical to SEQ ID NO: 98705
  derived and/or modified CDS sequence (opt2) from hemagglutinin__InfluenzaA__ACT86119

SEQ ID NO: 99129 - RNA, 1701 nt, Artificial Sequence; identical to SEQ ID NO: 98947
  derived and/or modified CDS sequence (opt2) from hemagglutinin__InfluenzaA__ACT86129

SEQ ID NO: 99130 - RNA, 1701 nt, Artificial Sequence; identical to SEQ ID NO: 98705
  derived and/or modified CDS sequence (opt2) from hemagglutinin__InfluenzaA__ACT86139

SEQ ID NO: 99131 - RNA, 1701 nt, Artificial Sequence
  derived and/or modified CDS sequence (opt2) from hemagglutinin__InfluenzaA__ACU00932
augaaggccauccucgucguccuccucuacaccuucgccaccgccaacgccgacacccucugcaucggcuaccacgccaacaacuccaccgacaccgucgacaccguccucgagaagaacgucaccgucacccacuccgucaaccuccucgaggacaagcacaacggcaagcucugcaagcuccgcggcgucgccccccuccaccucggcaagugcaacaucgccggcuggauccucggcaaccccgagugcgagucccucuccaccgccuccuccugguccuacaucgucgagaccuccuccuccgacaacggcaccugcuaccccggcgacuucaucgacuacgaggagcuccgcgagcagcucuccuccgucuccuccuucgagcgcuucgagaucuuccccaagaccuccuccuggcccaaccacgacuccaacaagggcgucaccgccgccugcccccacgccggcgccaaguccuucuacaagaaccucaucuggcucgucaagaagggcaacuccuaccccaagcucuccaaguccuacaucaacgacaagggcaaggagguccucguccucuggggcauccaccaccccuccaccuccgccgaccagcagucccucuaccagaacgccgacgccuacgucuucgucggcaccucccgcuacuccaagaacuucaagcccgagaucgccauccgccccaagguccgcgaccaggagggccgcaugaacuacuacuggacccucgucgagcccggcgacaagaucaccuucgaggccaccggcaaccucgucgucccccgcuacgccuucgccauggagcgcaacgccggcuccggcaucaucaucuccgacacccccguccacgacugcaacaccaccugccagacccccaagggcgccaucaacaccucccuccccuuccagaacauccaccccaucaccaucggcaagugccccaaguacgucaaguccaccaagcuccgccucgccaccggccuccgcaacguccccuccauccagucccgcggccucuucggcgccaucgccggcuucaucgagggcggcuggaccggcauggucgacggcugguacggcuaccaccaccagaacgagcagggcuccggcuacgccgccgaccucaaguccacccagaacgccaucgacgagaucaccaacaaggucaacuccgucaucgagaagaugaacacccaguucaccgccgucggcaaggaguucaaccaccucgagaagcgcaucgagaaccucaacaagaaggucgacgacggcuuccucgacaucuggaccuacaacgccgagcuccucguccuccucgagaacgagcgcacccucgacuaccacgacuccaacgucaagaaccucuacgagaagguccgcucccagcucaagaacaacgccaaggagaucggcaacggcugcuucgaguucuaccacaagugcgacaacaccugcauggaguccgucaagaacggcaccuacgacuaccccaaguacuccgaggaggccaagcucaaccgcgaggagaucgacggcgucaagcucgaguccacccgcaucuaccagauccucgccaucuacuccaccgucgccuccucccucguccucgucgucucccucggcgccaucuccuucuggaugugcuccaacggcucccuccagugccgcaucugcaucuga

SEQ ID NO: 99132 - RNA, 1701 nt, Artificial Sequence; identical to SEQ ID NO: 98705
  derived and/or modified CDS sequence (opt2) from hemagglutinin__InfluenzaA__ACU00942

SEQ ID NO: 99133 - RNA, 1701 nt, Artificial Sequence; identical to SEQ ID NO: 98705
  derived and/or modified CDS sequence (opt2) from hemagglutinin__InfluenzaA__ACU00952

SEQ ID NO: 99134 - RNA, 1701 nt, Artificial Sequence
  derived and/or modified CDS sequence (opt2) from hemagglutinin__InfluenzaA__ACU12494
augaagaccaucaucgcccucuccuacauccucugccucgucuucgcccagaagcuccccggcaacgacaacuccaccgccacccucugccucggccaccacgccguccccaacggcacccucgucaagaccaucaccaacgaccagaucgaggucaccaacgccaccgagcucguccaguccuccuccaccggccgcaucugcgacuccccccaccgcauccucgacggcaagaacugcacccucaucgacgcccuccucggcgacccccacugcgacggcuuccagaacaaggagugggaccucuucgucgagcgcuccaaggccuacuccaacugcuaccccuacgacguccccgacuacgccucccuccgcucccucgucgccuccuccggcacccucgaguucaucaacgaggacuucaacuggaccggcgucgcccaguccggcgaguccuacgccugcaagcgcggcuccgucaaguccuucuucucccgccucaacuggcuccacgaguccgacuacaaguaccccgcccucaacgucaccaugcccaacaacggcaaguucgacaagcucuacaucuggggcguccaccaccccaucaccgaccgcgagcagaccucccucuacguccgcgccuccggccgcgucaccgucuccaccaagcgcucccagcagaccgucauccccaacaucggcucccgccccuggguccgcggccucuccucccgcaucuccaucuacuggaccaucgucaagcccggcgacauccuccucaucaacuccaccggcaaccucaucgccccccgcggcuacuucaagauccgcaccggcaaguccuccaucaugcgcuccgacgcccccaucggcaccugcuccuccgagugcaucacccccaacggcuccauccccaacgacaagcccuuccagaacgucaaccgcaucaccuacggcgccugcccccgcuacgucaagcagaacacccucaagcucgccaccggcaugcgcaacguccccgagaagcagacccgcggcaucuucggcgccaucgccggcuucaucgagaacggcugggagggcauggucgacggcugguacggcuuccgccaccagaacuccgagggcaccggccaggccgccgaccucaaguccacccaggccgccaucgaccagaucaacggcaagcucaaccgccucaucgagaagaccaacgagaaguuccaccagaucgagaaggaguucuccgaggucgagggccgcauccaggaccucgagaaguacgucgaggacaccaagaucgaccucugguccuacaacgccgagcuccucgucgcccucgagaaccagcacaccaucgaccucaccgacuccgagaugaacaagcucuucgagaagacccgcaagcagcuccgcgagaacgccgaggacaugggcaacggcugcuucaagaucuaccacaagugcgacaacgccugcaucggcuccauccgcaacggcaccuacgaccacgacgucuaccgcgacgaggcccucaacaaccgcuuccagaucaagggcgucgagcucaaguccggcuacaaggacuggauccucuggaucuccuucgccaucuccugcuuccuccucugcgucguccuccucggcuucaucaugugggccugccagaagggcaacauccgcugcaacaucugcaucuga

SEQ ID NO: 99135 - RNA, 1698 nt, Artificial Sequence; identical to SEQ ID NO: 98817
  derived and/or modified CDS sequence (opt2) from hemagglutinin__InfluenzaA__ACU12505

SEQ ID NO: 99136 - RNA, 1701 nt, Artificial Sequence
  derived and/or modified CDS sequence (opt2) from hemagglutinin__InfluenzaA__ACU12516
augaagaccaucaucgcccucuccuacauccucugccucgucuucgcccagaagcuccccggcaacgacaacuccaccgccacccucugccucggccaccacgccguccccaacggcaccaucgucaagaccaucaccaacgaccagaucgaggucaccaacgccaccgagcucguccaguccuccuccaccggcggcaucugcgacuccccccaccagauccucgacggcgagaacugcacccucgucgacgcccuccucggcgacccccagugcgacggcuuccagaacaagaagugggaccucuucgucgagcgcuccaaggccuacuccaacugcuaccccuacgacguccccgacuacgccucccuccgcucccucgucgccuccuccggcacccucgaguucaacaacgaguccuucaacuggaccggcgucacccagaacggcaccuccuccgccugcaagcgccgcuccaacaacuccuucuucucccgccucaacuggcucacccaccucaaguucaaguaccccgcccucaacgucaccaugcccaacaacgagaaguucgacaagcucuacaucuggggcguccaccaccccggcaccgacaacgaccagaucucccucuacgcccaggccuccggccgcaucaccgucuccaccaagcgcucccagcagaccgucauccccaacaucggcucccgcccccgcguccgcgacaucuccucccgcaucuccaucuacuggaccaucgucaagcccggcgacauccuccucaucaacuccaccggcaaccucaucgccccccgcggcuacuucaagauccgcuccggcaaguccuccaucaugcgcuccgacgcccccaucggcaagugcaacuccgagugcaucacccccaacggcuccauccccaacgacaagcccuuccagaacgucaaccgcaucaccuacggcgccugcccccgcuacgucaagcagaacacccucaagcucgccaccggcaugcgcaacguccccgagacccagacccgcggcaucuucggcgccaucgccggcuucaucgagaacggcugggagggcauggucgacggcugguacggcuuccgccaccagaacuccgagggcaccggccaggccgccgaccucaaguccacccaggccgccaucaaccagaucaacggcaagcucaaccgccucaucggcaagaccaacgagaaguuccaccagaucgagaaggaguucuccgaggucgagggccgcauccaggaccucgagaaguacgucgaggacaccaagaucgaccucugguccuacaacgccgagcuccucgucgcccucgagaaccagcacaccaucgaccucaccgacuccgagaugaacaagcucuucgagcgcaccaagaagcagcuccgcgagaacgccgaggacaugggcaacggcugcuucaagaucuaccacaagugcgacaacgccugcaucggcuccauccgcaacggcaccuacgaccacgacgucuaccgcgacgaggcccucaacaaccgcuuccagaucaagggcgucgagcucaaguccggcuacaaggacuggauccucuggaucuccuucgccaucuccugcuuccuccucugcgucgcccuccucggcuucaucaugugggccugccagaagggcaacauccgcugcaacaucugcaucuga

SEQ ID NO: 99137 - RNA, 1701 nt, Artificial Sequence; identical to SEQ ID NO: 96666
  derived and/or modified CDS sequence (opt2) from hemagglutinin__InfluenzaA__ACU12527

SEQ ID NO: 99138 - RNA, 1701 nt, Artificial Sequence; identical to SEQ ID NO: 98408
  derived and/or modified CDS sequence (opt2) from hemagglutinin__InfluenzaA__ACU12538

SEQ ID NO: 99139 - RNA, 1701 nt, Artificial Sequence; identical to SEQ ID NO: 97604
  derived and/or modified CDS sequence (opt2) from hemagglutinin__InfluenzaA__ACU12549

SEQ ID NO: 99140 - RNA, 1698 nt, Artificial Sequence
  derived and/or modified CDS sequence (opt2) from hemagglutinin__InfluenzaA__ACU12560
augaaggucaagcuccucguccuccucugcaccuucaccgccaccuacgccgacaccaucugcaucggcuaccacgccaacaacuccaccgacaccgucgacaccguccucgagaagaacgucaccgucacccacuccgucaaccuccucgagaacucccacaacggcaagcucugccuccucaagggcaucgccccccuccagcucggcaacugcuccgucgccggcuggauccucggcaaccccgagugcgagcuccucaucuccaaggaguccugguccuacaucgucgagaagcccaaccccgagaacggcaccugcuaccccggccacuucgccgacuacgaggagcuccgcgagcagcucuccuccgucuccuccuucgagcgcuucgagaucuuccccaaggaguccuccuggcccaaccacaccgucaccggcgucuccgccuccugcucccacaacggcgaguccuccuucuaccgcaaccuccucuggcucaccggcaagaacggccucuaccccaaccucuccaaguccuacgccaacaacaagggcaaggagguccucguccucuggggcguccaccacccccccaacaucggcgaccagaacacccucuaccacaccgagaacgccuacgucuccgucgucuccucccacuacucccgcaaguucacccccgagaucgccaagcgccccaagguccgcgaccaggagggccgcaucaacuacuacuggacccuccucgagcccggcgacaccaucaucuucgaggccaacggcaaccucaucgccccccgcuacgccuucgcccucucccgcggcuucggcuccggcaucaucaacuccaacguccccauggacaagugcgacgccaagugccagaccccccagggcgccaucaacuccucccuccccuuccagaacguccaccccgucaccaucggcgagugccccaaguacguccgcuccgccaagcuccgcauggucaccggccuccgcaacauccccuccauccagucccgcggccucuucggcgccaucgccggcuucaucgagggcggcuggaccggcauggucgacggcugguacggcuaccaccaccagaacgagcagggcuccggcuacgccgccgaccagaaguccacccagaacgccaucaacggcaucaccaacaaggucaacuccgucaucgagaagaugaacacccaguucaccgccgucggcaaggaguucaacaagcucgagcgccgcauggagaaccucaacaagaaggucgacgacggcuucaucgacaucuggaccuacaacgccgagcuccucguccuccucgagaacgagcgcacccucgacuuccacgacuccaacgucaagaaccucuacgagaaggucaagucccagcucaagaacaacgccaaggagaucggcaacggcugcuucgaguucuaccacaagugcaacgacgagugcauggaguccgucaagaacggcaccuacgacuaccccaaguacuccgaggaguccaagcucaaccgcgagaagaucgacggcgucaagcucgaguccaugggcgucuaccagauccucgccaucuacuccaccgucgccuccucccucguccuccucgucucccucggcgccaucuccuucuggaugugcuccaacggcucccuccagugccgcaucugcaucuga

SEQ ID NO: 99141 - RNA, 1698 nt, Artificial Sequence; identical to SEQ ID NO: 98524
  derived and/or modified CDS sequence (opt2) from hemagglutinin__InfluenzaA__ACU12571

SEQ ID NO: 99142 - RNA, 1698 nt, Artificial Sequence
  derived and/or modified CDS sequence (opt2) from hemagglutinin__InfluenzaA__ACU12582
augaaggucaagcuccucguccuccucugcaccuucaccgccaccuacgccgacaccaucugcaucggcuaccacgccaacaacuccaccgacaccgucgacaccguccucgagaagaacgucaccgucacccacuccgucaaccuccucgagaacucccacaacggcaagcucugccuccucaagggcaucgccccccuccagcucggcaacugcuccgucgccggcuggauccucggcaaccccgagugcgagcuccucaucuccaaggaguccugguccuacaucgucgagaagcccaaccccgagaacggcaccugcuaccccggccgcuucgccgacuacgaggagcuccgcgagcagcucuccuccgucuccuccuucgagcgcuucgagaucuuccccaaggaguccuccuggcccaaccacaccgucaccggcgucuccgccuccugcucccacaacggcgaguccuccuucuaccgcaaccuccucuggcucaccggcaagaacggccucuaccccaaccucuccaaguccuacgccaacaacaagggcaaggagguccucguccucuggggcguccaccacccccccaacaucggcgaccagaacacccucuaccacaccgagaacgccuacgucuccgucgucuccucccacuacucccgcaaguucacccccgagaucgccaagcgccccaagguccgcgaccaggagggccgcaucaacuacuacuggacccuccucgagcccggcgacaccaucaucuucgaggccaacggcaaccucaucgccccccgcuacgccuucgcccucucccgcggcuucggcuccggcaucaucaacuccaacgcccccauggacaagugcgacgccaagugccagaccccccagggcgccaucaacuccucccuccccuuccagaacguccaccccgucaccaucggcgagugccccaaguacguccgcuccgccaagcuccgcauggucaccggccuccgcaacauccccuccauccagucccgcggccucuucggcgccaucgccggcuucaucgagggcggcuggaccggcauggucgacggcugguacggcuaccaccaccagaacgagcagggcuccggcuacgccgccgaccagaaguccacccagaacgccaucaacggcaucaccaacaaggucaacuccgucaucgagaagaugaacacccaguucaccgccgucggcaaggaguucaacaagcucgagcgccgcauggagaaccucaacaagaaggucgacgacggcuucaucgacaucuggaccuacaacgccgagcuccucguccuccucgagaacgagcgcacccucgacuuccacgacuccaacgucaagaaccucuacgagaaggucaagucccagcucaagaacaacgccaaggagaucggcaacggcugcuucgaguucuaccacaagugcaacgacgagugcauggaguccgucaagaacggcaccuacgacuaccccaaguacuccgaggaguccaagcucaaccgcgagaagaucgacggcgucaagcucgaguccaugggcgucuaccagauccucgccaucuacuccaccgucgccuccucccucguccuccucgucucccucggcgccaucuccuucuggaugugcuccaacggcucccuccagugccgcaucugcaucuga

SEQ ID NO: 99143 - RNA, 1698 nt, Artificial Sequence
  derived and/or modified CDS sequence (opt2) from hemagglutinin__InfluenzaA__ACU12593
augaaggucaagcuccucguccuccucugcaccuucaccgccaccuacgccgacaccaucugcaucggcuaccacgccaacaacuccaccgacaccgucgacaccguccucgagaagaacgucaccgucacccacuccgucaaccuccucgagaacucccacaacggcaagcucugccuccucaagggcaucgccccccuccagcucggcaacugcuccgucgccggcuggauccucggcaaccccgagugcgagcuccucaucuccaaggaguccugguccuacaucgucgagaagcccaaccccgagaacggcaccugcuaccccggccacuucgccgacuacgaggagcuccgcgagcagcucuccuccgucuccuccuucgagcgcuucgagaucuuccccaaggaguccuccuggcccaaccacaccgucaccggcgucuccgccuccugcucccacaacggcgaguccuccuucuaccgcaaccuccucuggcucaccggcaagaacggccucuaccccaaccucuccaaguccuacgccaacaacaaggagaaggagguccucguccucuggggcguccaccacccccccaacaucgucgaccagaagacccucuaccgcaccgagaacgccuacgucuccgucgucuccucccacuacucccgcaaguucacccccgagaucgccaagcgccccaagguccgcgaccaggagggccgcaucaacuacuacuggacccuccucgagcccggcgacaccaucaucuucgaggccaacggcaaccucaucgccccccgcuacgccuucgcccucucccgcggcuucggcuccggcaucaucaacuccaacgcccccauggacaagugcgacgccaagugccagaccccccagggcgccaucaacuccucccuccccuuccagaacguccaccccgucaccaucggcgagugccccaaguacguccgcuccgccaagcuccgcauggucaccggccuccgcaacauccccuccauccagucccgcggccucuucggcgccaucgccggcuucaucgagggcggcuggaccggcauggucgacggcugguacggcuaccaccaccagaacgagcagggcuccggcuacgccgccgaccagaaguccacccagaacgccaucgacggcaucaccaacaaggucaacuccgucaucgagaagaugaacacccaguucaccgccgucggcaaggaguucaacaagcucgagcgccgcauggagaaccucaacaagaaggucgacgacggcuucaucgacaucuggaccuacaacgccgagcuccucguccuccucgagaacgagcgcacccucgacuuccacgacuccaacgucaagaaccucuacgagaaggucaagucccagcucaagaacaacgccaaggagaucggcaacggcugcuucgaguucuaccacaagugcaacgacgagugcauggaguccgucaagaacggcaccuacgacuaccccaaguacuccgaggaguccaagcucaaccgcgagaagaucgacggcaucaagcucgaguccaugggcgucuaccagauccucgccaucuacuccaccgucgccuccucccucguccuccucgucucccucggcgccaucuccuucuggaugugcuccaacggcucccuccagugccgcaucugcaucuga

SEQ ID NO: 99144 - RNA, 1701 nt, Artificial Sequence; identical to SEQ ID NO: 98705
  derived and/or modified CDS sequence (opt2) from hemagglutinin__InfluenzaA__ACU13090

SEQ ID NO: 99145 - RNA, 1701 nt, Artificial Sequence; identical to SEQ ID NO: 98705
  derived and/or modified CDS sequence (opt2) from hemagglutinin__InfluenzaA__ACU13091

SEQ ID NO: 99146 - RNA, 1701 nt, Artificial Sequence; identical to SEQ ID NO: 98705
  derived and/or modified CDS sequence (opt2) from hemagglutinin__InfluenzaA__ACU13092

SEQ ID NO: 99147 - RNA, 1701 nt, Artificial Sequence; identical to SEQ ID NO: 98705
  derived and/or modified CDS sequence (opt2) from hemagglutinin__InfluenzaA__ACU13093

SEQ ID NO: 99148 - RNA, 1701 nt, Artificial Sequence
  derived and/or modified CDS sequence (opt2) from hemagglutinin__InfluenzaA__ACU13094
augaaggccauccucgucguccuccucuacaccuucgccaccgccaacgccgacacccucugcaucggcuaccacgccaacaacuccaccgacaccgucgacaccguccucgagaagaacgucaccgucacccacuccgucaaccuccucgaggacaagcacaacggcaagcucugcaagcuccgcggcgucgccccccuccaccucggcaagugcaacaucgccggcuggauccucggcaaccccgagugcgagucccucuccaccgccuccuccugguccuacaucgucgagaccuccuccuccgacaacggcaccugcuaccccggcgacuucaucgacuacgaggagcuccgcgagcagcucuccuccgucuccuccuucgagcgcuucgagaucuuccccaagaccuccuccuggcccaaccacgacuccaacaagggcgucaccgccgccugcccccacgccggcgccaaguccuucuacaagaaccucaucuggcucgucaagaagggcaacuccuaccccaagcucuccaaguccuacaucaacgacaagggcaaggagguccucguccucuggggcauccaccaccccuccaccuccgccgaccagcagucccucuaccagaacgccgacgccuacgucuucgucggcuccucccgcuacuccaagaaguucaagcccgagaucgccauccgccccaagguccgcggccaggagggccgcaugaacuacuacuggacccucgucgagcccggcgacaagaucaccuucgaggccaccggcaaccucgucgucccccgcuacgccuucgccauggagcgcaacgccggcuccggcaucaucaucuccgacacccccguccacgacugcaacaccaccugccagacccccaagggcgccaucaacaccucccuccccuuccagaacauccaccccaucaccaucggcaagugccccaaguacgucaaguccaccaagcuccgccucgccaccggccuccgcaacguccccuccauccagucccgcggccucuucggcgccaucgccggcuucaucgagggcggcuggaccggcauggucgacggcugguacggcuaccaccaccagaacgagcagggcuccggcuacgccgccgaccucaaguccacccagaacgccaucgacgagaucaccaacaaggucaacuccgucaucgagaagaugaacacccaguucaccgccgucggcaaggaguucaaccaccucgagaagcgcaucgagaaccucaacaagaaggucgacgacggcuuccucgacaucuggaccuacaacgccgagcuccucguccuccucgagaacgagcgcacccucgacuaccacgacuccaacgucaagaaccucuacgagaagguccgcucccagcucaagaacaacgccaaggagaucggcaacggcugcuucgaguucuaccacaagugcgacaacaccugcauggaguccgucaagaacggcaccuacgacuaccccaaguacuccgaggaggccaagcucaaccgcgaggagaucgacggcgucaagcucgaguccacccgcaucuaccagauccucgccaucuacuccaccgucgccuccucccucguccucgucgucucccucggcgccaucuccuucuggaugugcuccaacggcucccuccagugccgcaucugcaucuga

SEQ ID NO: 99149 - RNA, 1701 nt, Artificial Sequence; identical to SEQ ID NO: 98705
  derived and/or modified CDS sequence (opt2) from hemagglutinin__InfluenzaA__ACU13095

SEQ ID NO: 99150 - RNA, 1701 nt, Artificial Sequence
  derived and/or modified CDS sequence (opt2) from hemagglutinin__InfluenzaA__ACU13096
augaaggccauccucgucguccuccuccacaccuucgccaccgccaacgccgacacccucugcaucggcuaccacgccaacaacuccaccgacaccgucgacaccguccucgagaagaacgucaccgucacccacuccgucaaccuccucgaggacaagcacaacggcaagcucugcaagcuccgcggcgucgccccccuccaccucggcaagugcaacaucgccggcuggauccucggcaaccccgagugcgagucccucuccaccgccuccuccugguccuacaucgucgagaccuccuccuccgacaacggcaccugcuaccccggcgacuucaucgacuacgaggagcuccgcgagcagcucuccuccgucuccuccuucgagcgcuucgagaucuuccccaagaccuccuccuggcccaaccacgacuccaacaagggcgucaccgccgccugcccccacgccggcgccaaguccuucuacaagaaccucaucuggcucgucaagaagggcaacuccuaccccaagcucuccaaguccuacaucaacgacaagggcaaggagguccucguccucuggggcauccaccaccccuccaccuccgccgaccagcagucccucuaccagaacgccgacgccuacgucuucgucggcuccucccgcuacuccaagaaguucaagcccgagaucgccauccgccccaagguccgcgaccaggagggccgcaugaacuacuacuggacccucgucgagcccggcgacaagaucaccuucgaggccaccggcaaccucgucgucccccgcuacgccuucgccauggagcgcaacgccggcuccggcaucaucaucuccgacacccccguccacgacugcaacaccaccugccagacccccaagggcgccaucaacaccucccuccccuuccagaacauccaccccaucaccaucggcaagugccccaaguacgucaaguccaccaagcuccgccucgccaccggccuccgcaacguccccuccauccagucccgcggccucuucggcgccaucgccggcuucaucgagggcggcuggaccggcauggucgacggcugguacggcuaccaccaccagaacgagcagggcuccggcuacgccgccgaccucaaguccacccagaacgccaucgacgagaucaccaacaaggucaacuccgucaucgagaagaugaacacccaguucaccgccgucggcaaggaguucaaccaccucgagaagcgcaucgagaaccucaacaagaaggucgacgacggcuuccucgacaucuggaccuacaacgccgagcuccucguccuccucgagaacgagcgcacccucgacuaccacgacuccaacgucaagaaccucuacgagaagguccgcucccagcucaagaacaacgccaaggagaucggcaacggcugcuucgaguucuaccacaagugcgacaacaccugcauggaguccgucaagaacggcaccuacgacuaccccaaguacuccgaggaggccaagcucaaccgcgaggagaucgacggcgucacccucgaguccacccgcaucuaccagauccucgccaucuacuccaccgucgccuccucccucguccucgucgucucccucggcgccaucuccuucuggaugugcuccaacggcucccuccagugccgcaucugcaucuga

SEQ ID NO: 99151 - RNA, 1701 nt, Artificial Sequence; identical to SEQ ID NO: 98705
  derived and/or modified CDS sequence (opt2) from hemagglutinin__InfluenzaA__ACU13098

SEQ ID NO: 99152 - RNA, 1701 nt, Artificial Sequence
  derived and/or modified CDS sequence (opt2) from hemagglutinin__InfluenzaA__ACU13099
augaaggccauccucgucguccuccucuacaccuucgccaccgccaacgccgacacccucugcaucggcuaccacgccaacaacuccaccgacaccgucgacaccguccucgagaagaacgucaccgucacccacuccgucaaccuccucgaggacaagcacaacggcaagcucugcaagcuccgcggcgucgccccccuccaccucggcaagugcaacaucgccggcuggauccucggcaaccccgagugcgagucccucuccaccgccuccuccugguccuacaucgucgagaccuccuccuccgacaacggcaccugcuaccccggcgacuucaucgacuacgaggagcuccgcgagcagcucuccuccgucuccuccuucgagcgcuucgagaucuuccccaagaccuccuccuggcccaaccacgacuccaacaagggcgucaccgccgccugcccccacgccggcgccaaguccuucuacaagaaccucaucuggcucgucaagaagggcaacuccuaccccaagcucuccaaguccuacaucaacgacaagggcaaggagguccucguccucuggggcauccaccaccccuccaccuccgccgaccagcagucccucuaccagaacgccgacgccuacgucuucgucggcaccucccgcuacuccaagaaguucaagcccgagaucgccauccgccccaagguccgcgagcaggagggccgcaugaacuacuacuggacccucgucgagcccggcgacaagaucaccuucgaggccaccggcaaccucgucgucccccgcuacgccuucgccauggagcgcaacgccggcuccggcaucaucaucuccgacacccccguccacgacugcaacaccaccugccagacccccaagggcgccaucaacaccucccuccccuuccagaacauccacuccaucaccaucggcaagugccccaaguacgucaaguccaccaagcuccgccucgccaccggccuccgcaacguccccuccauccagucccgcggccucuucggcgccaucgccggcuucaucgagggcggcuggaccggcauggucgacggcugguacggcuaccaccaccagaacgagcagggcuccggcuacgccgccgaccucaaguccacccagaacgccaucgacgagaucaccaacaaggucaacuccgucaucgagaagaugaacacccaguucaccgccgucggcaaggaguucaaccaccucgagaagcgcaucgagaaccucaacaagaaggucgacgacggcuuccucgacaucuggaccuacaacgccgagcuccucguccuccucgagaacgagcgcacccucgacuaccacgacuccaacgucaagaaccucuacgagaagguccgcucccagcucaagaacaacgccaaggagaucggcaacggcugcuucgaguucuaccacaagugcgacaacaccugcauggaguccgucaagaacggcaccuacgacuaccccaaguacuccgaggaggccaagcucaaccgcgaggagaucgacggcgucaagcucgaguccacccgcaucuaccagauccucgccaucuacuccaccgucgccuccucccucguccucgucgucucccucggcgccaucuccuucuggaugugcuccaacggcucccuccagugccgcaucugcaucuga

SEQ ID NO: 99153 - RNA, 1701 nt, Artificial Sequence
  derived and/or modified CDS sequence (opt2) from hemagglutinin__InfluenzaA__ACU13129
augaaggccauccucgucguccuccucuacaccuucgccaccgccaacgccgacacccucugcaucggcuaccacgccaacaacuccaccgacaccgucgacaccguccucgagaagaacgucaccgucacccacuccgucaaccuccucgaggacaagcacaacggcaagcucugcaagcuccgcggcgucgccccccuccaccucggcaagugcaacaucgccggcuggauccucggcaaccccgagugcgagucccucuccaccgccuccuccugguccuacaucgucgagaccuccuccuccgacaacggcaccugcuaccccggcgacuucaucgacuacgaggagcuccgcgagcagcucuccuccgucuccuccuucgagcgcuucgagaucuuccccaagaccuccuccuggcccaaccacgacuccaacaagggcgucaccgccgccugcccccacgccggcgccaaguccuucuacaagaaccucaucuggcucgucaagaagggcaacuccuaccccaagcucuccaaguccuacaucaacgacaagggcaaggagguccucguccucuggggcauccaccaccccuccaccuccgccgaccagcagucccucuaccagaacgccgacgccuacgucuucgucggcaccucccgcuacuccaagaaguucaagcccgagaucgccauccgccccaagguccgcgagcaggagggccgcaugaacuacuacuggacccucgucgagcccggcgacaagaucaccuucgaggccaccggcaaccucgucgucccccgcuacgccuucgccauggagcgcaacgccggcuccggcaucaucaucuccgacacccccguccacgacugcaacaccaccugccagacccccaagggcgccaucaacaccucccuccccuuccagaacauccaccccaucaccaucggcaagugccccaaguacgucaaguccaccaagcuccgccucgccaccggccuccgcaacguccccuccauccagucccgcggccucuucggcgccaucgccggcuucaucgagggcggcuggaccggcauggucgacggcugguacggcuaccaccaccagaacgagcagggcuccggcuacgccgccgaccucaaguccacccagaacgccaucgacgagaucaccaacaaggucaacuccgucaucgagaagaugaacacccaguucaccgccgucggcgaggaguucaaccaccucgagaagcgcaucgagaaccucaacaagaaggucgacgacggcuuccucgacaucuggaccuacaacgccgagcuccucguccuccucgagaacgagcgcacccucgacuaccacgacuccaacgucaagaaccucuacgagaagguccgcucccagcucaagaacaacgccaaggagaucggcaacggcugcuucgaguucuaccacaagugcgacaacaccugcauggaguccgucaagaacggcaccuacgacuaccccaaguacuccgaggaggccaagcucaaccgcgaggagaucgacggcgucaagcucgaguccacccgcaucuaccagauccucgccaucuacuccaccgucgccuccucccucguccucgucgucucccucggcgccaucuccuucuggaugugcuccaacggcucccuccagugccgcaucugcaucuga

SEQ ID NO: 99154 - RNA, 1701 nt, Artificial Sequence; identical to SEQ ID NO: 98705
  derived and/or modified CDS sequence (opt2) from hemagglutinin__InfluenzaA__ACU16795

SEQ ID NO: 99155 - RNA, 1701 nt, Artificial Sequence; identical to SEQ ID NO: 98705
  derived and/or modified CDS sequence (opt2) from hemagglutinin__InfluenzaA__ACU16858

SEQ ID NO: 99156 - RNA, 1701 nt, Artificial Sequence; identical to SEQ ID NO: 98705
  derived and/or modified CDS sequence (opt2) from hemagglutinin__InfluenzaA__ACU16930

SEQ ID NO: 99157 - RNA, 1701 nt, Artificial Sequence; identical to SEQ ID NO: 98705
  derived and/or modified CDS sequence (opt2) from hemagglutinin__InfluenzaA__ACU16993

SEQ ID NO: 99158 - RNA, 1701 nt, Artificial Sequence; identical to SEQ ID NO: 98705
  derived and/or modified CDS sequence (opt2) from hemagglutinin__InfluenzaA__ACU17059

SEQ ID NO: 99159 - RNA, 1701 nt, Artificial Sequence; identical to SEQ ID NO: 98705
  derived and/or modified CDS sequence (opt2) from hemagglutinin__InfluenzaA__ACU17126

SEQ ID NO: 99160 - RNA, 1701 nt, Artificial Sequence; identical to SEQ ID NO: 98796
  derived and/or modified CDS sequence (opt2) from hemagglutinin__InfluenzaA__ACU17187

SEQ ID NO: 99161 - RNA, 1701 nt, Artificial Sequence; identical to SEQ ID NO: 98705
  derived and/or modified CDS sequence (opt2) from hemagglutinin__InfluenzaA__ACU17258

SEQ ID NO: 99162 - RNA, 1701 nt, Artificial Sequence
  derived and/or modified CDS sequence (opt2) from hemagglutinin__InfluenzaA__ACU17389
auggaggccauccucgucguccuccucuacaccuucgccaccgccaacgccgacacccucugcaucggcuaccacgccaacaacuccaccgacaccgucgacaccguccucgagaagaacgucaccgucacccacuccgucaaccuccucgaggacaagcacaacggcaagcucugcaagcuccgcggcgucgccccccuccaccucggcaagugcaacaucgccggcuggauccucggcaaccccgagugcgagucccucuccaccgccuccuccugguccuacaucgucgagaccuccuccuccgacaacggcaccugcuaccccggcgacuucaucgacuacgaggagcuccgcgagcagcucuccuccgucuccuccuucgagcgcuucgagaucuuccccaagaccuccuccuggcccaaccacgacuccaacaagggcgucaccgccgccugcccccacgccggcgccaaguccuucuacaagaaccucaucuggcucgucaagaagggcaacuccuaccccaagcucuccaaguccuacaucaacgacaagggcaaggagguccucguccucuggggcauccaccaccccuccaccuccgccgaccagcagucccucuaccagaacgccgacgccuacgucuucgucggcuccucccgcuacuccaagaaguucaagcccgagaucgccauccgccccaagguccgcgaccaggagggccgcaugaacuacuacuggacccucgucgagcccggcgacaagaucaccuucgaggccaccggcaaccucgucgucccccgcuacgccuucgccauggagcgcaacgccggcuccggcaucaucaucuccgacacccccguccacgacugcaacaccgccugccagacccccaagggcgccaucaacaccucccuccccuuccacaacauccaccccaucaccaucggcaagugccccaaguacgucaaguccaccaagcuccgccucgccaccggccuccgcaacguccccuccauccagucccgcggccucuucggcgccaucgccggcuucaucgagggcggcuggaccggcauggucgacggcugguacggcuaccaccaccagaacgagcagggcuccggcuacgccgccgaccucaaguccacccagaacgccaucgacgagaucaccaacaaggucaacuccgucaucgagaagaugaacacccaguucaccgccgucggcaaggaguucaaccaccucgagaagcgcaucgagaaccucaacaagaaggucgacgacggcuuccucgacaucuggaccuacaacgccgagcuccucguccuccucgagaacgagcgcacccucgacuaccacgacuccaacgucaagaaccucuacgagaagguccgcucccagcucaagaacaacgccaaggagaucggcaacggcugcuucgaguucuaccacaagugcgacaacaccugcauggaguccgucaagaacggcaccuacgacuaccccaaguacuccgaggaggccaagcucaaccgcgaggagaucgacggcgucaagcucgaguccacccgcaucuaccagauccucgccaucuacuccaccgucgccuccucccucguccucgucgucucccucggcgccaucuccuucuggaugugcuccaacggcucccuccagugccgcaucugcaucuga

SEQ ID NO: 99163 - RNA, 1701 nt, Artificial Sequence; identical to SEQ ID NO: 98705
  derived and/or modified CDS sequence (opt2) from hemagglutinin__InfluenzaA__ACU17450

SEQ ID NO: 99164 - RNA, 1701 nt, Artificial Sequence; identical to SEQ ID NO: 98705
  derived and/or modified CDS sequence (opt2) from hemagglutinin__InfluenzaA__ACU17521

SEQ ID NO: 99165 - RNA, 1701 nt, Artificial Sequence; identical to SEQ ID NO: 98692
  derived and/or modified CDS sequence (opt2) from hemagglutinin__InfluenzaA__ACU27041

SEQ ID NO: 99166 - RNA, 1698 nt, Artificial Sequence
  derived and/or modified CDS sequence (opt2) from hemagglutinin__InfluenzaA__ACU27406
augaaggucaagcuccucguccuccucugcaccuucaccgccaccuacgccgacaccaucugcaucggcuaccacgccaacaacuccaccgacaccgucgacaccguccucgagaagaacgucaccgucacccacuccgucaaccuccucgagaacucccacaacggcaagcucugccuccucaagggcaucgccccccuccagcucggcaacugcuccgucgccggcuggauccucggcaaccccgagugcgagcuccucaucuccaaggaguccugguccuacaucgucgagaagcccaaccccgagaacggcaccugcuaccccggccacuucgccgacuacgaggagcuccgcgagcagcucuccuccgucuccuccuucgagcgcuucgagaucuuccccaaggaguccuccuggcccaaccacaccgucaccggcgucuccgccuccugcucccacaacggcgaguccuccuucuaccgcaaccuccucuggcucaccggcaagaacggccucuaccccaaccucuccaaguccuacgccaacaacaaggagaaggagguccucguccucuggggcguccaccacccccccaacaucgucgaccagaagacccucuaccgcaccgagaacgccuacgucuccgucgucuccucccacuacucccgcaaguucacccccgagaucgccaagcgccccaagauccgcgaccaggagggccgcaucaacuacuacuggacccuccucgagcccggcgacaccaucaucuucgaggccaacggcaaccucaucgccccccgcuacgccuucgcccucucccgcggcuucggcuccggcaucaucaacuccaacgcccccauggacaagugcgacgccaagugccagaccccccagggcgccaucaacuccucccuccccuuccagaacguccaccccgucaccaucggcgagugccccaaguacguccgcuccgccaagcuccgcauggucaccggccuccgcaacauccccuccauccagucccgcggccucuucggcgccaucgccggcuucaucgagggcggcuggaccggcauggucgacggcugguacggcuaccaccaccagaacgagcagggcuccggcuacgccgccgaccagaaguccacccagaacgccaucaacggcaucaccaacaaggucaacuccgucaucgagcgcaugaacacccaguucaccgccgucggcaaggaguucaacaagcucgagcgccgcauggagaaccucaacaagaaggucgacgacggcuucaucgacaucuggaccuacaacgccgagcuccucguccuccucgagaacgagcgcacccucgacuuccacgacuccaacgucaagaaccucuacgagaaggucaagucccagcucaagaacaacgccaaggagaucggcaacggcugcuucgaguucuaccacaagugcaacgacgagugcauggaguccgucaagaacggcaccuacgacuaccccaaguacuccgaggaguccaagcucaaccgcgagaagaucgacggcgucaagcucgaguccaugggcgucuaccagauccucgccaucuacuccaccgucgccuccucccucguccuccucgucucccucggcgccaucuccuucuggaugugcuccaacggcucccuccagugccgcaucugcaucuga

SEQ ID NO: 99167 - RNA, 1698 nt, Artificial Sequence
  derived and/or modified CDS sequence (opt2) from hemagglutinin__InfluenzaA__ACU27407
augaaggucaagcuccucguccuccucugcaccuucaccgccaccuacgccgacaccaucugcaucggcuaccacgccaacaacuccaccgacaccgucgacaccguccucgagaagaacgucaccgucacccacuccgucaaccuccucgagaacucccacaacggcaagcucugccuccucaagggcaucgccccccuccagcucggcaacugcuccgucgccggcuggauccucggcaaccccgagugcgagcuccucaucuccaaggaguccugguccuacaucgucgagaagcccaaccccgagaacggcaccugcuaccccggccacuucgccgacuacgaggagcuccgcgagcagcucuccuccgucuccuccuucgagcgcuucgagaucuuccccaaggaguccuccuggcccaaccacaccgucaccggcgucuccgccuccugcucccacaacggcgaguccuccuucuaccgcaaccuccucuggcucaccggcaagaacggccucuaccccaaccucuccaaguccuacgccaacaacaaggagaaggagguccucguccucuggggcguccaccacccccccaacaucgucgaccagaagacccucuaccgcaccgagaacgccuacgucuccgucgucuccucccacuacucccgcaaguucacccccgagaucgccaagcgccccaagguccgcgaccaggagggccgcaucaacuacuacuggacccuccucgagcccggcgacaccaucaucuucgaggccaacggcaaccucaucgccccccgcuacgccuucgcccucucccgcggcuucggcuccggcaucaucaacuccaacgcccccauggacaagugcgacgccaagugccagaccccccagggcgccaucaacuccucccuccccuuccagaacguccaccccgucaccaucggcgagugccccaaguacguccgcuccgccaagcuccgcauggucaccggccuccgcaacauccccuccauccagucccgcggccucuucggcgccaucgccggcuucaucgagggcggcuggaccggcauggucgacggcugguacggcuaccaccaccagaacgagcagggcuccggcuacgccgccgaccagaaguccacccagaacgccaucaacggcaucaccaacaaggucaacuccgucaucgagaagaugaacacccaguucaccgccgucggcaaggaguucaacaagcucgagcgccgcauggagaaccucaacaagaaggucgacgacggcuucaucgacaucuggaccuacaacgccgagcuccucguccuccucgagaacgagcgcacccucgacuuccacgacuccaacgucaagaaccucuacgagaaggucaagucccagcucaagaacaacgccaaggagaucggcaacggcugcuucgaguucuaccacaagugcaacgacgagugcauggaguccgucaagaacggcaccuacgacuaccccaaguacuccgaggaguccaagcucaaccgcgagaagaucgacggcgucaagcucgaguccaugggcgucuaccagauccucgccaucuacuccaccgucgccuccucccucguccuccucgucucccucggcgccaucuccuucuggaugugcuccaacggcucccuccagugccgcaucugcaucuga

SEQ ID NO: 99168 - RNA, 1701 nt, Artificial Sequence; identical to SEQ ID NO: 98692
  derived and/or modified CDS sequence (opt2) from hemagglutinin__InfluenzaA__ACU29949

SEQ ID NO: 99169 - RNA, 1701 nt, Artificial Sequence
  derived and/or modified CDS sequence (opt2) from hemagglutinin__InfluenzaA__ACU29979
augaaggccauccucgucguccuccucuacaccuucgccgccgccaacgccgacacccucugcaucggcuaccacgccaacaacuccaccgacaccgucgacaccguccucgagaagaacgucaccgucacccacuccgucaaccuccucgaggacaagcacaacggcaagcucugcaagcuccgcggcgucgccccccuccaccucggcaagugcaacaucgccggcuggauccucggcaaccccgagugcgagucccucuccaccgccuccuccugguccuacaucgucgagaccuccuccuccgacaacggcaccugcuaccccggcgacuucaucgacuacgaggagcuccgcgagcagcucuccuccgucuccuccuucgagcgcuucgagaucuuccccaagaccuccuccuggcccaaccacgacuccaacaagggcgucaccgccgccugcccccacgccggcgccaaguccuucuacaagaaccucaucuggcucgucaagaagggcaacuccuaccccaagcucuccaaguccuacaucaacgacaagggcaaggagguccucguccucuggggcauccaccaccccuccaccuccgccgaccagcagucccucuaccagaacgccgacgccuacgucuucgucggcaccucccgcuacuccaagaaguucaagcccgagaucgccauccgccccaagguccgcgaccaggagggccgcaugaacuacuacuggacccucgucgagcccggcgacaagaucaccuucgaggccaccggcaaccucgucgucccccgcuacgccuucgccauggagcgcaacgccggcuccggcaucaucaucuccgacacccccguccacgacugcaacaccaccugccagacccccaagggcgccaucaacaccucccuccccuuccagaacauccaccccaucaccaucggcaagugccccaaguacgucaaguccaccaagcuccgccucgccaccggccuccgcaacguccccuccauccagucccgcggccucuucggcgccaucgccggcuucaucgagggcggcuggaccggcauggucgacggcugguacggcuaccaccaccagaacgagcagggcuccggcuacgccgccgaccucaaguccacccagaacgccaucgacgagaucaccaacaaggucaacuccgucaucgagaagaugaacacccaguucaccgccgucggcaaggaguucaaccaccucgagaagcgcaucgagaaccucaacaagaaggucgacgacggcuuccucgacaucuggaccuacaacgccgagcuccucguccuccucgagaacgagcgcacccucgacuaccacgacuccaacgucaagaaccucuacgagaagguccgcucccagcucaagaacaacgccaaggagaucggcaacggcugcuucgaguucuaccacaagugcgacaacaccugcauggaguccgucaagaacggcaccuacgacuaccccaaguacuccgaggaggccaagcucaaccgcgaggagaucgacggcgucaagcucgaguccacccgcaucuaccagauccucgccaucuacuccaccgucgccuccucccucguccucgucgucucccucggcgccaucuccuucuggaugugcuccaacggcucccuccagugccgcaucugcaucuga

SEQ ID NO: 99170 - RNA, 1701 nt, Artificial Sequence; identical to SEQ ID NO: 98705
  derived and/or modified CDS sequence (opt2) from hemagglutinin__InfluenzaA__ACU29989

SEQ ID NO: 99171 - RNA, 1704 nt, Artificial Sequence
  derived and/or modified CDS sequence (opt2) from hemagglutinin__InfluenzaA__ACU29999
augaaggccauccucgucguccuccucuacaccuucgccaccgccaacgccgacacccucugcaucggcuaccacgccaacaacuccaccgacaccgucgacaccguccucgagaagaacgucaccgucacccacuccgucaaccuccucgaggacaagcacaacggcaagcucugcaagcuccgcggcgucgccccccuccaccucggcaagugcaacaucgccggcuggauccucggcaaccccgagugcgagucccucuccaccgccuccuccugguccuacaucgucgagaccuccuccuccgacaacggcaccugcuaccccggcgacuucaucgacuacgaggagcuccgcgagcagcucuccuccgucuccuccuucgagcgcuucgagaucuuccccaagaccuccuccuggcccaaccacgacuccaacaagggcgucaccgccgccugcccccacgccggcgccaaguccuucuacaagaaccucaucuggcucgucaagaagggcaacuccuaccccaagcucuccaaguccuacaucaacgacaagggcaaggagguccucguccucuggggcauccaccaccccuccaccuccgccgaccagcagucccucuaccagaacgccgacgccuacgucuucgucggcaccucccgcuacuccaagaaguucaagcccgagaucgccauccgccccaagguccgcgaccaggagggccgcaugaacuacuacuggacccucgucgagcccggcgacaagaucaccuucgaggccaccggcaaccucgucgucccccgcuacgccuucgccauggagcgcaacgccggcuccggcaucaucaucuccgacacccccguccacgacugcaacaccaccugccagacccccaagggcgccaucaacaccucccuccccuuccagaacauccaccccaucaccaucggcaagugccccaaguacgucaaguccaccaagcuccgccucgccaccggccuccgcaacguccccuccauccagucccgcggccucuucggcgccaucgccggcuucaucgagggcggcuggaccggcauggucgacggcugguacggcuaccaccaccagaacgagcagggcuccggcuacgccgccgaccucaaguccacccagaacgccaucgacgagaucaccaacaaggucaacuccgucaucgagaagaugaacacccaguucaccgccgucggcaaggaguucaaccaccucgagaagcgcaucgagaaccucaacaagaaggucgacgacggcuuccucgacaucuggaccuacaacgccgagcuccucguccuccucgagaacgagcgcacccucgacuaccacgacuccaacgucaagaaccucuacgagaagguccgcucccagcucaagaacaacgccaaggagaucggcaacggcugcuucgaguucuaccacaagugcgacaacaccugcauggaguccgucaagaacggcaccuacgacuaccccaaguacuccgaggaggccaagcucaaccgcgaggagaucgacggcgucaagcucgaguccacccgcaucuaccagauccucgccaucuacuccaccgucgccuccucccucguccucgucgucucccucggcgccaucuccuucuggaugugcuccaacggcucccuccuccagugccgcaucugcaucuga

SEQ ID NO: 99172 - RNA, 1704 nt, Artificial Sequence
  derived and/or modified CDS sequence (opt2) from hemagglutinin__InfluenzaA__ACU30009
auggaggccauccucgucguccuccucuacaccuucgccaccgccaacgccgacacccucugcaucggcuaccacgccaacaacuccaccgacaccgucgacaccguccucgagaagaacgucaccgucacccacuccgucaaccuccucgaggacaagcacaacggcaagcucugcaagcuccgcggcgucgccccccuccaccucggcaagugcaacaucgccggcuggauccucggcaaccccgagugcgagucccucuccaccgccuccuccugguccuacaucgucgagaccuccuccuccgacaacggcaccugcuaccccggcgacuucaucgacuacgaggagcuccgcgagcagcucuccuccgucuccuccuucgagcgcuucgagaucuuccccaagaccuccuccuggcccaaccacgacuccaacaagggcgucaccgccgccugcccccacgccggcgccaaguccuucuacaagaaccucaucuggcucgucaagaagggcaacuccuaccccaagcucuccaaguccuacaucaacgacaagggcaaggagguccucguccucuggggcauccaccaccccuccaccuccgccgaccagcagucccucuaccagaacgccgacgccuacgucuucgucggcuccucccgcuacuccaagaaguucaagcccgagaucgccauccgccccaagguccgcgaccaggagggccgcaugaacuacuacuggacccucgucgagcccggcgacaagaucaccuucgaggccaccggcaaccucgucgucccccgcuacgccuucgccauggagcgcaacgccggcuccggcaucaucaucuccgacacccccguccacgacugcaacaccaccugccagacccccaagggcgccaucaacaccucccuccccuuccacaacauccaccccaucaccaucggcaagugccccaaguacgucaaguccaccaagcuccgccucgccaccggccuccgcaacguccccuccauccagucccgcggccucuucggcgccaucgccggcuucaucgagggcggcuggaccggcauggucgacggcugguacggcuaccaccaccagaacgagcagggcuccggcuacgccgccgaccucaaguccacccagaacgccaucgacgagaucaccaacaaggucaacuccgucaucgagaagaugaacacccaguucaccgccgucggcaaggaguucaaccaccucgagaagcgcaucgagaaccucaacaagaaggucgacgacggcuuccucgacaucuggaccuacaacgccgagcuccucguccuccucgagaacgagcgcacccucgacuaccacgacuccaacgucaagaaccucuacgagaagguccgcucccagcucaagaacaacgccaaggagaucggcaacggcugcuucgaguucuaccacaagugcgacaacaccugcauggaguccgucaagaacggcaccuacgacuaccccaaguacuccgaggaggccaagcucaaccgcgaggagaucgacggcgucaagcucgaguccacccgcaucuaccagauccucgccaucuacuccaccgucgccuccucccucguccucgucgucucccucggcgccaucuccuucuggaugugcuccggcuacggcucccuccagugccgcaucugcaucuga

SEQ ID NO: 99173 - RNA, 1701 nt, Artificial Sequence; identical to SEQ ID NO: 99065
  derived and/or modified CDS sequence (opt2) from hemagglutinin__InfluenzaA__ACU30019

SEQ ID NO: 99174 - RNA, 1701 nt, Artificial Sequence; identical to SEQ ID NO: 98885
  derived and/or modified CDS sequence (opt2) from hemagglutinin__InfluenzaA__ACU30093

SEQ ID NO: 99175 - RNA, 1701 nt, Artificial Sequence
  derived and/or modified CDS sequence (opt2) from hemagglutinin__InfluenzaA__ACU30103
augaaggccauccucgucguccuccucuacaccuucgccaccgccaacgccgacacccucugcaucggcuaccacgccaacaacuccaccgacaccgucgacaccguccucgagaagaacgucaccgucacccacuccgucaaccuccucgaggacaagcacaacggcaagcucugcaagcuccgcggcgucgccccccuccaccucggcaagugcaacaucgccggcuggauccucggcaaccccgagugcgagucccucuccaccgccuccuccugguccuacaucgucgagaccuccuccuccgacaacggcaccugcuaccccggcgacuucaucgacuacgaggagcuccgcgagcagcucuccuccgucuccuccuucgagcgcuucgagaucuuccccaagaccuccuccuggcccaaccacgacuccaacaagggcgucaccgccgccugcccccacgccggcgccaaguccuucuacaagaaccucaucuggcucgucaagaagggcaacuccuaccccaagcucuccaaguccuacaucaacgacaagggcaaggagguccucguccucuggggcauccaccaccccuccaccuccgccgaccagcagucccucuaccagaacgccgacgccuacgucuucgucggcaccucccgcuacuccaagaaguucaagcccgagaucgccauccgccccaagguccgcgaccaggagggccgcaugaacuaccacuggacccucgucgagcccggcgacaagaucaccuucgaggccaccggcaaccucgucgucccccgcuacgccuucgccauggagcgcaacgccggcuccggcaucaucaucuccgacacccccguccacgacugcaacaccaccugccagacccccaagggcgccaucaacaccucccuccccuuccagaacauccaccccaucaccaucggcaagugccccaaguacgucaaguccaccaagcuccgccucgccaccggccuccgcaacguccccuccauccagucccgcggccucuucggcgccaucgccggcuucaucgagggcggcuggaccggcauggucgacggcugguacggcuaccaccaccagaacgagcagggcuccggcuacgccgccgaccucaaguccacccagaacgccaucgacgagaucaccaacaaggucaacuccgucaucgagaagaugaacacccaguucaccgccgucggcaaggaguucaaccaccucgagaagcgcaucgagaaccucaacaagaaggucgacgacggcuuccucgacaucuggaccuacaacgccgagcuccucguccuccucgagaacgagcgcacccucgacuaccacgacuccaacgucaagaaccucuacgagaagguccgcucccagcucaagaacaacgccaaggagaucggcaacggcugcuucgaguucuaccacaagugcgacaacaccugcauggaguccgucaagaacggcaccuacgacuaccccaaguacuccgaggaggccaagcucaaccgcgaggagaucgacggcgucaagcucgaguccacccgcaucuaccagauccucgccaucuacuccaccgucgccuccucccucguccucgucgucucccucggcgccaucuccuucuggaugugcuccaacggcucccuccagugccgcaucugcaucuga

SEQ ID NO: 99176 - RNA, 1704 nt, Artificial Sequence
  derived and/or modified CDS sequence (opt2) from hemagglutinin__InfluenzaA__ACU30112
auggaggccauccucgucguccuccucuacaccuucgccaccgccaacgccgacacccucugcaucggcuaccacgccaacaacuccaccgacaccgucgacaccguccucgagaagaacgucaccgucacccacuccgucaaccuccucgaggacaagcacaacggcaagcucugcaagcuccgcggcgucgccccccuccaccucggcaagugcaacaucgccggcuggauccucggcaaccccgagugcgagucccucuccaccgccuccuccugguccuacaucgucgagaccuccuccuccgacaacggcaccugcuaccccggcgacuucaucgacuacgaggagcuccgcgagcagcucuccuccgucuccuccuucgagcgcuucgagaucuuccccaagaccuccuccuggcccaaccacgacuccaacaagggcgucaccgccgccugcccccacgccggcgccaaguccuucuacaagaaccucaucuggcucgucaagaagggcaacuccuaccccaagcucuccaaguccuacaucaacgacaagggcaaggagguccucguccucuggggcauccaccaccccuccaccuccgccgaccagcagucccucuaccagaacgccgacgccuacgucuucgucggcuccucccgcuacuccaagaaguucaagcccgagaucgccauccgccccaagguccgcgaccaggagggccgcaugaacuacuacuggacccucgucgagcccggcgacaagaucaccuucgaggccaccggcaaccucgucgucccccgcuacgccuucgccauggagcgcaacgccggcuccggcaucaucaucuccgacacccccguccacgacugcaacaccaccugccagacccccaagggcgccaucaacaccucccuccccuuccacaacauccaccccaucaccaucggcaagugccccaaguacgucaaguccaccaagcuccgccucgccaccggccuccgcaacguccccuccauccagucccgcggccucuucggcgccaucgccggcuucaucgagggcggcuggaccggcauggucgacggcugguacggcuaccaccaccagaacgagcagggcuccggcuacgccgccgaccucaaguccacccagaacgccaucgacgagaucaccaacaaggucaacuccgucaucgagaagaugaacacccaguucaccgccgucggcaaggaguucaaccaccucgagaagcgcaucgagaaccucaacaagaaggucgacgacggcuuccucgacaucuggaccuacaacgccgagcuccucguccuccucgagaacgagcgcacccucgacuaccacgacuccaacgucaagaaccucuacgagaagguccgcucccagcucaagaacaacgccaaggagaucggcaacggcugcuucgaguucuaccacaagugcgacaacaccugcauggaguccgucaagaacggcaccuacgacuaccccaaguacuccgaggaggccaagcucaaccgcgaggagaucgacggcgucaagcucgaguccacccgcaucuaccagauccucgccaucuacuccaccgucgccuccucccucguccucgucgucucccucggcgccaucuccuucuggaugugcucccacaugguccuccuccagugccgcaucugcaucuga

SEQ ID NO: 99177 - RNA, 1701 nt, Artificial Sequence
  derived and/or modified CDS sequence (opt2) from hemagglutinin__InfluenzaA__ACU30121
auggaggccauccucgucguccuccucuacaccuucgccaccgccaacgccgacacccucugcaucggcuaccacgccaacaacuccaccgacaccgucgacaccguccucgagaagaacgucaccgucacccacuccgucaaccuccucgaggacaagcacaacggcaagcucugcaagcuccgcggcgucgccccccuccaccucggcaagugcaacaucgccggcuggauccucggcaaccccgagugcgagucccucuccaccgccuccuccugguccuacaucgucgagaccuccuccuccgacaacggcaccugcuaccccggcgacuucaucgacuacgaggagcuccgcgagcagcucuccuccgucuccuccuucgagcgcuucgagaucuuccccaagaccuccuccuggcccaaccacgacuccaacaagggcgucaccgccgccugcccccacgccggcgccaaguccuucuacaagaaccucaucuggcucgucaagaagggcaacuccuaccccaagcucuccaaguccuacaucaacgacaagggcaaggagguccucguccucuggggcauccaccaccccuccaccuccgccgaccagcagucccucuaccagaacgccgacgccuacgucuucgucggcuccucccgcuacuccaagaaguucaagcccgagaucgccauccgccccaagguccgcgaccaggagggccgcaugaacuacuacuggacccucgucgagcccggcgacaagaucaccuucgaggccaccggcaaccucgucgucccccgcuacgccuucgccauggagcgcaacgccggcuccggcaucaucaucuccgacacccccguccacgacugcaacaccaccugccagacccccaagggcgccaucaacaccucccuccccuuccacaacauccaccccaucaccaucggcaagugccccaaguacgucaaguccaccaagcuccgccucgccaccggccuccgcaacguccccuccauccagucccgcggccucuucggcgccaucgccggcuucaucgagggcggcuggaccggcauggucgacggcugguacggcuaccaccaccagaacgagcagggcuccggcuacgccgccgaccucaaguccacccagaacgccaucgacgagaucaccaacaaggucaacuccgucaucgagaagaugaacacccaguucaccgccgucggcaaggaguucaaccaccucgagaagcgcaucgagaaccucaacaagaaggucgacgacggcuuccucgacaucuggaccuacaacgccgagcuccucguccuccucgagaacgagcgcacccucgacuaccacgacuccaacgucaagaaccucuacgagaagguccgcaaccagcucaagaacaacgccaaggagaucggcaacggcugcuucgaguucuaccacaagugcgacaacaccugcauggaguccgucaagaacggcaccuacgacuaccccaaguacuccgaggaggccaagcucaaccgcgaggagaucgacggcgucaagcucgaguccacccgcaucuaccagauccucgccaucuacuccaccgucgccuccucccucguccucgucgucucccucggcgccaucuccuucuggaugugcuccaacggcucccuccagugccgcaucugcaucuga

SEQ ID NO: 99178 - RNA, 1701 nt, Artificial Sequence; identical to SEQ ID NO: 98798
  derived and/or modified CDS sequence (opt2) from hemagglutinin__InfluenzaA__ACU31124

SEQ ID NO: 99179 - RNA, 1701 nt, Artificial Sequence; identical to SEQ ID NO: 98737
  derived and/or modified CDS sequence (opt2) from hemagglutinin__InfluenzaA__ACU31143

SEQ ID NO: 99180 - RNA, 1701 nt, Artificial Sequence; identical to SEQ ID NO: 98737
  derived and/or modified CDS sequence (opt2) from hemagglutinin__InfluenzaA__ACU31144

SEQ ID NO: 99181 - RNA, 1701 nt, Artificial Sequence; identical to SEQ ID NO: 98737
  derived and/or modified CDS sequence (opt2) from hemagglutinin__InfluenzaA__ACU31145

SEQ ID NO: 99182 - RNA, 1701 nt, Artificial Sequence; identical to SEQ ID NO: 98885
  derived and/or modified CDS sequence (opt2) from hemagglutinin__InfluenzaA__ACU31146

SEQ ID NO: 99183 - RNA, 1701 nt, Artificial Sequence; identical to SEQ ID NO: 98705
  derived and/or modified CDS sequence (opt2) from hemagglutinin__InfluenzaA__ACU31147

SEQ ID NO: 99184 - RNA, 1701 nt, Artificial Sequence
  derived and/or modified CDS sequence (opt2) from hemagglutinin__InfluenzaA__ACU31148
augaaggccauccucgucaucaugcucuacaccuucgccaccgccaacgccgacacccucugcaucggcuaccacgccaacaacuccaccgacaccgucgacaccguccucgagaagaacgucaccgucacccacuccgucaaccuccucgaggacaagcacaacggcaagcucugcaagcuccgcggcgucgccccccuccaccucggcaagugcaacaucgccggcuggauccucggcaaccccgagugcgagucccucuccaccgccuccuccugguccuacaucgucgagaccuccuccuccgacaacggcaccugcuaccccggcgacuucaucgacuacgaggagcuccgcgagcagcucuccuccgucuccuccuucgagcgcuucgagaucuuccccaagaccuccuccuggcccaaccacgacuccaacaagggcgucaccgccgccugcccccacgccggcgccaaguccuucuacaagaaccucaucuggcucgucaagaagggcaacuccuaccccaagcucuccaaguccuacaucaacgacaagggcaaggagguccucguccucuggggcauccaccaccccuccaccuccgccgaccagcagucccucuaccagaacgccgacgccuacgucuucgucggcuccucccgcuacuccaagaaguucaagcccgagaucgccauccgccccaagguccgcgaccaggagggccgcaugaacuacuacuggacccucgucgagcccggcgacaagaucaccuucgaggccaccggcaaccucgucgucccccgcuacgccuucgccauggagcgcaacgccggcuccggcaucaucaucuccgacacccccguccacgacugcaacaccaccugccagacccccaagggcgccaucaacaccucccuccccuuccagaacauccaccccaucaccaucggcaagugccccaaguacgucaaguccaccaagcuccgccucgccaccggccuccgcaacguccccuccauccagucccgcggccucuucggcgccaucgccggcuucaucgagggcggcuggaccggcauggucgacggcugguacggcuaccaccaccagaacgagcagggcuccggcuacgccgccgaccucaaguccacccagaacgccaucgacgagaucaccaacaaggucaacuccgucaucgagaagaugaacacccaguucaccgccgucggcaaggaguucaaccaccucgagaagcgcaucgagaaccucaacaagaaggucgacgacggcuuccucgacaucuggaccuacaacgccgagcuccucguccuccucgagaacgagcgcacccucgacuaccacgacuccaacgucaagaaccucuacgagaagguccgcucccagcucaagaacaacgccaaggagaucggcaacggcugcuucgaguucuaccacaagugcgacaacaccugcauggaguccgucaagaacggcaccuacgacuaccccaaguacuccgaggaggccaagcucaaccgcgaggagaucgacggcgucaagcucgaguccacccgcaucuaccagauccucgccaucuacuccaccgucgccuccucccucguccucgucgucucccucggcgccaucuccuucuggaugugcuccaacggcucccuccagugccgcaucugcaucuga

SEQ ID NO: 99185 - RNA, 1701 nt, Artificial Sequence; identical to SEQ ID NO: 98692
  derived and/or modified CDS sequence (opt2) from hemagglutinin__InfluenzaA__ACU31149

SEQ ID NO: 99186 - RNA, 1701 nt, Artificial Sequence; identical to SEQ ID NO: 98692
  derived and/or modified CDS sequence (opt2) from hemagglutinin__InfluenzaA__ACU31150

SEQ ID NO: 99187 - RNA, 1701 nt, Artificial Sequence; identical to SEQ ID NO: 98692
  derived and/or modified CDS sequence (opt2) from hemagglutinin__InfluenzaA__ACU31151

SEQ ID NO: 99188 - RNA, 1701 nt, Artificial Sequence; identical to SEQ ID NO: 98692
  derived and/or modified CDS sequence (opt2) from hemagglutinin__InfluenzaA__ACU31152

SEQ ID NO: 99189 - RNA, 1707 nt, Artificial Sequence
  derived and/or modified CDS sequence (opt2) from hemagglutinin__InfluenzaA__ACU46644
auggagaagaucguccuccucuucgccaucgucucccucgucaaguccgaccagaucugcaucggcuaccacgccaacaacuccaccgagcaggucgacaccaucauggagaagaacgucaccgucacccacgcccaggacauccucgagaagacccacaacggcaagcucugcgaccucgacggcggcaagccccucauccuccgcgacugccgcgucgccggcuggcuccucggcaaccccaugugcgacgaguucaucaacguccccgagugguccuacaucgucgagaaggccaaccccgucaacgaccucugcuaccccggcgacuucaacgacuacgaggagcucaagcaccuccucucccgcaucaaccacuucgagaagauccagaucauccccaaguccuccugguccucccacgaggccucccucggcgucuccuccgccugccccuaccagggcaaguccuccuucuuccgcaacgucgucuggcucaucaagaagaacuccaccuaccccaccaucaagcgcuccuacaacaacaccaaccaggaggaccuccucguccucugguggauccaccaccccaacgacgccgccgagcagaccaagcucuaccagaaccccaccaccuacaucuccgucggcaccuccacccucaaccagcgccucgucccccgcaucgccacccgcuccaaggucaacggccaguccggccgcauggaguucuucuggaccauccucaagcccaacgacgccaucaacuucgaguccaacggcaacuucaucgcccccgaguacgccuacaagaucgucaagaagggcgacuccaccaucaugaaguccgagcucgaguacggcaacugcaacaccaagugccagacccccaugggcgccaucaacuccuccaugcccuuccaccacauccacccccucaccaucggcgagugccccaaguacgucaaguccaaccgccucguccucgccaccggccuccgcaacuccccccagcgcgagcgccgccgcaagaagcgcggccucuucggcgccaucgccggcuucaucgagggcggcuggcagggcauggucgacggcugguacggcuaccaccacuccaacgagcagggcuccggcuacgccgccgacaaggaguccacccagaaggccaucgacggcgucaccaacaaggucaacuccaucaucgacaagaugaacacccaguucgaggccgucggccgcgaguucaaccaccucgagcgccgcaucgagaaccucaacaagaagauggaggacggcuuccucgacgucuggaccuacaacgccgagcuccucguccucauggagaacgagcgcacccucgacuuccacgacuccaacgucaagaaccucuacgacaagguccgccuccagcuccgcgacaacgccaaggagcucggcaacggcugcuucgaguucuaccacaagugcgacgacgagugcauggaguccguccgcaacggcaccuacgacuacccccaguacuccgaggaggcccgccucaagcgcgaggagaucuccggcgucaagcucgaguccaucggcaucuaccagauccucuccaucuacuccaccgucgccuccucccucgcccucgccaucauggucgccggccucucccucuggaugugcuccaacggcucccuccagugccgcaucugcaucuga

SEQ ID NO: 99190 - RNA, 1701 nt, Artificial Sequence
  derived and/or modified CDS sequence (opt2) from hemagglutinin__InfluenzaA__ACU56924
augaaggccauccucgucguccuccucuacaccuucgccaccgccaacgccgacacccucugcaucggcuaccacgccaacaacuccaccgacaccgucgacaccguccucgagaagaacgucaccgucacccacuccgucaaccuccucgaggacaagcacaacggcaagcucugcaagcuccgcggcgucgccccccuccaccucggcaagugcaacaucgccggcuggauccucggcaaccccgagugcgagucccucuccaccgccuccuccugguccuacaucgucgagaccuccuccuccgacaacggcaccugcuaccccggcgacuucaucgacuacgaggagcuccgcgagcagcucuccuccgucuccuccuucgagcgcuucgagaucuuccccaagaccuccuccuggcccaaccacgacuccaacaagggcgucaccgccgccugcccccacgccggcgccaaguccuucuacaagaaccucaucuggcucgucaagaagggcaacuccuaccccaagcucuccaaguccuacaucaacgacaagggcaaggagguccucguccucuggggcauccaccaccccuccaccuccgccgaccagcagucccucuaccagaacgccgacgccuacgucuucgucggcaccucccgcuacuccaagaaguucaagcccgagaucgccauccgccccaagguccgcgaccgcgagggccgcaugaacuacuacuggacccucgucgagcccggcgacaagaucaccuucgaggccaccggcaaccucgucgucccccgcuacgccuucgccauggagcgcaacgccggcuccggcaucaucaucuccgacacccccguccacgacugcaacaccaccugccagacccccaagggcgccaucaacaccucccuccccuuccagaacauccaccccaucaccaucggcaagugccccaaguacgucaaguccaccaagcuccgccucgccaccggccuccgcaacguccccuccauccagucccgcggccucuucggcgccaucgccggcuucaucgagggcggcuggaccggcauggucgacggcugguacggcuaccaccaccagaacgagcagggcuccggcuacgccgccgaccucaaguccacccagaacgccaucgacgagaucaccaacaaggucaacuccgucaucgagaagaugaacacccaguucaccgccgucggcaaggaguucaaccaccucgagaagcgcaucgagaaccucaacaagaaggucgacgacggcuuccucgacaucuggaccuacaacgccgagcuccucguccuccucgagaacgagcgcacccucgacuaccacgacuccaacgucaagaaccucuacgagaagguccgcucccagcucaagaacaacgccaaggagaucggcaacggcugcuucgaguucuaccacaagugcgacaacaccugcauggaguccgucaagaacggcaccuacgacuaccccaaguacuccgaggaggccaagcucaaccgcgaggagaucgacggcgucaagcucgaguccacccgcaucuaccagauccucgccaucuacuccaccgucgccuccucccucguccucgucgucucccucggcgccaucuccuucuggaugugcuccaacggcucccuccagugccgcaucugcaucuga

SEQ ID NO: 99191 - RNA, 1701 nt, Artificial Sequence; identical to SEQ ID NO: 99058
  derived and/or modified CDS sequence (opt2) from hemagglutinin__InfluenzaA__ACU56931

SEQ ID NO: 99192 - RNA, 1701 nt, Artificial Sequence; identical to SEQ ID NO: 98705
  derived and/or modified CDS sequence (opt2) from hemagglutinin__InfluenzaA__ACU64792

SEQ ID NO: 99193 - RNA, 1701 nt, Artificial Sequence; identical to SEQ ID NO: 98885
  derived and/or modified CDS sequence (opt2) from hemagglutinin__InfluenzaA__ACU64801

SEQ ID NO: 99194 - RNA, 1701 nt, Artificial Sequence; identical to SEQ ID NO: 98885
  derived and/or modified CDS sequence (opt2) from hemagglutinin__InfluenzaA__ACU64812

SEQ ID NO: 99195 - RNA, 1701 nt, Artificial Sequence; identical to SEQ ID NO: 98354
  derived and/or modified CDS sequence (opt2) from hemagglutinin__InfluenzaA__ACU79871

SEQ ID NO: 99196 - RNA, 1701 nt, Artificial Sequence; identical to SEQ ID NO: 98352
  derived and/or modified CDS sequence (opt2) from hemagglutinin__InfluenzaA__ACU79882

SEQ ID NO: 99197 - RNA, 1701 nt, Artificial Sequence; identical to SEQ ID NO: 98365
  derived and/or modified CDS sequence (opt2) from hemagglutinin__InfluenzaA__ACU79893

SEQ ID NO: 99198 - RNA, 1701 nt, Artificial Sequence; identical to SEQ ID NO: 98365
  derived and/or modified CDS sequence (opt2) from hemagglutinin__InfluenzaA__ACU79904

SEQ ID NO: 99199 - RNA, 1698 nt, Artificial Sequence
  derived and/or modified CDS sequence (opt2) from hemagglutinin__InfluenzaA__ACU79937
augaaggccaagcuccucguccuccucugcaccuucaccgccaccuacgccgacaccaucugcaucggcuaccacgccaacaacuccaccgacaccgucgacaccguccucgagaagaacgucaccgucacccacuccgucaaccuccucgaggacucccacaacggcaagcucugccuccucaagggcaucgccccccuccagcucggcaacugcuccgucgccggcuggauccucggcaaccccgagugcgagucccucaucuccaaggaguccugguccuacaucgucgagacccccaaccccgagaacggcaccugcuaccccggcuacuucgccgacuacgaggagcuccgcgagcagcucuccuccgucuccuccuucgagcgcuucgagaucuuccccaaggaguccuccuggcccaaccacaccgucaccggcgucaccgccuccugcucccacaacggcaaguccuccuucuaccgcaaccuccucuggcucaccgagaagaacggccucuaccccaaccucuccaacuccuacgucaacaacaaggagaaggagguccucguccucuggggcguccaccaccccuccaacaucggcguccagcgcgccaucuaccacaccgagaacgccuacgucuccgucgucuccucccacuacucccgccgcuucacccccgagaucgccaagcgccccaagguccgcggccaggagggccgcaucaacuacuacuggacccuccucgagcccggcgacaccaucaucuucgaggccaacggcaaccucaucgcccccugguacgccuucgcccucucccgcggcuucggcuccggcaucaucaccuccaacgcccccaugaacgagugcgacgccaagugccagaccccccagggcgccaucaacuccucccuccccuuccagaacguccaccccgucaccaucggcgagugccccaaguacguccgcuccaccaagcuccgcauggucaccggccuccgcaacauccccuccauccagucccgcggccucuucggcgccaucgccggcuucaucgagggcggcuggaccggcaugauggacggcugguacggcuaccaccaccagaacgagcagggcuccggcuacgccgccgaccagaaguccacccagaacgccaucaacggcaucaccaacaaggucaacuccgucaucgagaagaugaacacccaguucaccgccgucggcaaggaguucaacaagcucgagcgccgcauggagaaccucaacaagaaggucgacgacggcuuccucgacaucuggaccuacaacgccgagcuccucguccuccucgagaacgagcgcacccucgacuuccacgacuccaacgucaagaaccucuacgagaaggucaagucccagcucaagaacaacgccaaggagaucggcaacggcugcuucgaguucuaccacaagugcaacaacgagugcauggaguccgucaagaacggcaccuacgacuaccccaaguacuccgaggaguccaagcucaaccgcgagaagaucgacggcgucaagcucgaguccaugggcgucuaccagauccucgccaucuacuccaccgucgccuccucccucguccuccucgucucccucggcgccaucuccuucuggaugugcuccaacggcucccuccagugccgcaucugcaucuga

SEQ ID NO: 99200 - RNA, 1689 nt, Artificial Sequence
  derived and/or modified CDS sequence (opt2) from hemagglutinin__InfluenzaA__ACU79948
auggccaucaucuaccucauccuccucuucaccgccguccgcggcgaccagaucugcaucggcuaccacgccaacaacuccaccgagaaggucgacaccauccucgagcgcaacgucaccgucacccacgccaaggacauccucgagaagacccacaacggcaagcucugcaagcucaacggcauccccccccucgagcucggcgacugcuccaucgccggcuggcuccucggcaaccccgagugcgaccgccuccucuccguccccgagugguccuacaucauggagaaggagaacccccgcgacggccucugcuaccccggcuccuucaacgacuacgaggagcucaagcaccuccucuccuccgucaagcacuucgagaaggucaagauccuccccaaggaccgcuggacccagcacaccaccaccggcggcucccgcgccugcgccgucuccggcaaccccuccuucuuccgcaacauggucuggcucaccaagaagggcuccgacuaccccgucgccaagggcuccuacaacaacaccuccggcgagcagaugcucaucaucuggggcguccaccaccccaacgacgagaccgagcagcgcacccucuaccagaacgucggcaccuacgucuccgucggcaccuccacccucaacaagcgcuccacccccgagaucgccacccgccccaaggucaacggccagggcggccgcauggaguucuccuggacccuccucgacaugugggacaccaucaacuucgaguccaccggcaaccucaucgcccccgaguacggcuucaagaucuccaagcgcggcuccuccggcaucaugaagaccgagggcacccucgagaacugcgagaccaagugccagaccccccucggcgccaucaacaccacccuccccuuccacaacguccacccccucaccaucggcgagugccccaaguacgucaaguccgagaagcucguccucgccaccggccuccgcaacgucccccagaucgagucccgcggccucuucggcgccaucgccggcuucaucgagggcggcuggcagggcauggucgacggcugguacggcuaccaccacuccaacgaccagggcuccggcuacgccgccgacaaggaguccacccagaaggccuucgacggcaucaccaacaacgucaacuccgucaucgagaagaugaacacccaguucgaggccgucggcaaggaguucuccaaccucgagcgccgccucgagaaccucaacaagaagauggaggacggcuuccucgacgucuggaccuacaacgccgagcuccucguccucauggagaacgagcgcacccucgacuuccacgacuccaacgucaagaaccucuacgacaagguccgcaugcagcuccgcgacaacgucaaggagcucggcaacggcugcuucgaguucuaccacaagugcgacgacgagugcaugaacuccgucaagaacggcaccuacgacuaccccaaguacgaggaggaguccaagcucaaccgcaacgagaucaagggcgucaagcucuccuccaugggcgucuaccagauccucgccaucuacgccaccgucgccggcucccucucccucgccaucaugauggccggcaucuccuucuggaugugcuccaacggcucccuccagugccgcaucugcaucuga

SEQ ID NO: 99201 - RNA, 1689 nt, Artificial Sequence
  derived and/or modified CDS sequence (opt2) from hemagglutinin__InfluenzaA__ACU79959
auggccaucaucuaccucauccuccucuucaccgccguccgcggcgaccagaucugcaucggcuaccacgccaacaacuccaccgagaaggucgacaccauccucgagcgcaacgucaccgucacccacgccaaggacauccucgagaagacccacaacggcaagcucugcaagcucaacggcauccccccccucgagcucggcgacugcuccaucgccggcuggcuccucggcaaccccgagugcgaccgccuccucuccguccccgagugguccuacaucauggagaaggagaacccccgcgacggccucugcuaccccggcuccuucaacgacuacgaggagcucaagcaccuccucuccuccgucaagcacuucgagaaggucaagauccuccccaaggaccgcuggacccagcacaccaccaccggcggcucccgcgccugcgccgucuccggcaaccccuccuucuuccgcaacauggucuggcucaccaagaagggcuccgacuaccccgucgccaagggcuccuacaacaacaccuccggcgagcagaugcucaucaucuggggcguccaccaccccaacgacgagaccgagcagcgcacccucuaccagaacgucggcaccuacgucuccgucggcaccuccacccucaacaagcgcuccacccccgagaucgccacccgccccaaggucaacggccagggcggccgcauggaguucuccuggacccuccucgacaugugggacaccaucaacuucgaguccaccggcaaccucaucgcccccgaguacggcuucaagaucuccaagcgcggcuccuccggcaucaugaagaccgagggcacccucgagaacugcgagaccaagugccagaccccccucggcgccaucaacaccacccuccccuuccacaacguccacccccucaccaucggcgagugccccaaguacgucaaguccgagaagcucguccucgccaccggccuccgcaacgucccccagaucgagucccgcggccucuucggcgccaucgccggcuucaucgagggcggcuggcagggcauggucgacggcugguacggcuaccaccacuccaacgaccagggcuccggcuacgccgccgacaaggaguccacccagaaggccuucgacggcaucaccaacaaggucaacuccgucaucgagaagaugaacacccaguucgaggccgucggcaaggaguucuccaaccucgagcgccgccucgagaaccucaacaagaagauggaggacggcuuccucgacgucuggaccuacaacgccgagcuccucguccucauggagaacgagcgcacccucgacuuccacgacuccaacgucaagaaccucuacgacaagguccgcaugcagcuccgcgacaacgucaaggagcucggcaacggcugcuucgaguucuaccacaagugcgacgacgagugcaugaacuccgucaagaacggcaccuacgacuaccccaaguacgaggaggaguccaagcucaaccgcaacgagaucaagggcgucaagcucuccuccaugggcgucuaccagauccucgccaucuacgccaccgucgccggcucccucucccucgccaucaugauggccggcaucuccuucuggaugugcuccaacggcucccuccagugccgcaucugcaucuga

SEQ ID NO: 99202 - RNA, 1701 nt, Artificial Sequence
  derived and/or modified CDS sequence (opt2) from hemagglutinin__InfluenzaA__ACU79970
augaagaccaucaucgcccucuccuacauccagugccucgucuucgcccagaaguuccccggcaacgacaacuccaccgccacccucugccucggccaccacgccguccccaacggcaccaucgucaagaccaucaccaacgaccagaucgaggucaccaacgccaccgagcucguccaguccuccuccaccggcgagaucugcgacuccccccaccagauccucgacggcgagaacugcacccucaucgacgcccuccucggcgacccccagugcgacggcuuccagaacaagaacugggaccucuucgucgagcgcuccaaggccuacuccaacugcuaccccuacgacguccccgacuacgccucccuccgcucccucgucgccuccuccggcacccucgaguucaacaacgaguccuucaacuggaccggcgucacccagaacggcaccuccuccgccugcauccgccgcuccaacaacuccuucuucuccaagcucaacuggcucacccacuccaaguucaaguaccccgcccucaacgucaccaugcccaacaacgagaacuucgacaagcucuacaucuggggcguccaccaccccggcaccgacaacgaccagaucuuccucuacgcccaggccuccggccgcaucaccgucuccaccaagcgcucccagcagaccgucauccccaacaucggcucccgcccccgcguccgcaacauccccucccgcaucuccaucuacuggaccaucgucaagcccggcgacauccuccucaucaacuccaccggcaaccucaucgccccccgcggcuacuucaagauccgcuccggcaaguccuccaucaugcgcuccgacgcccccaucggcaagugcaacuccgagugcaucacccccaacggcuccauccccaacgacaagcccuuccagaacgucaaccgcaucaccuacggcgccugcccccgcuacgucaagcagaacacccucaagcucgccaccggcaugcgcaacguccccgagaagcagacccgcggcaucuucggcgccaucgccggcuucaucgagaacggcugggagggcauggucgacggcugguacggcuuccgccaccagaacuccgagggcaucggccaggccgccgaccucaaguccacccaggccgccaucgaccagaucaacggcaagcucaaccgccucaucggcaagaccaacgagaaguuccaccagaucgagaaggaguucuccgaggucgagggccgcauccaggaccucgagaaguacgucgaggacaccaagaucgaccucugguccuacaacgccgagcuccucgucgcccucgagaaccagcacaccaucgaccucaccgacuccgagaugaacaagcucuucgagaagaccaagaagcagcuccgcgagaacgccgaggacaugggcaacggcugcuucaagaucuaccacaagugcgacaacgccugcaucggcuccauccgcaacggcaccuacgaccacgacgucuaccgcgacgaggcccucaacaaccgcuuccagaucaagggcgucgagcucaaguccggcuacaaggacuggauccucuggaucuccuucgccaucuccugcuuccuccucugcaucgcccuccucggcuucaucaugugggccugccagaagggcaacauccgcugcaacaucugcaucuga

SEQ ID NO: 99203 - RNA, 1698 nt, Artificial Sequence
  derived and/or modified CDS sequence (opt2) from hemagglutinin__InfluenzaA__ACU79981
augaaggucaagcuccucguccuccucugcaccuucaccgccaccuacgccgacaccaucugcaucggcuaccacgccaacaacuccaccgacaccgucgacaccguccucgagcgcaacgucaccgucacccacuccgucaaccuccucgagaacucccacaacggcaagcucugccuccucaagggcaucgccccccuccagcucggcaacugcuccgucgccggcuggauccucggcaaccccgagugcgagcuccucaucuccaaggaguccugguccuacaucgucgagaagcccaaccccgagaacggcaccugcuaccccggccacuucgccgacuacgaggagcuccgcgagcagcucuccuccgucuccuccuucgagcgcuucgagaucuuccccaaggaguccuccuggcccaaccacaccgucaccggcgucuccgccuccugcucccacaacggcgaguccuccuucuaccgcaaccuccucuggcucaccggcaagaacggccucuaccccaaccucuccaaguccuacgccaacaacaaggagaaggagguccucguccucuggggcguccaccacccccccaacaucggcgaccagaaggcccucuaccacaccgagaacgccuacgucuccgucgucuccucccacuacucccgcaaguucacccccgagaucgccaagcgccccaagguccgcgaccaggagggccgcaucaacuacuacuggacccuccucaagcccggcgacaccaucaucuucgaggccaacggcaaccucaucgccccccgcuacgccuucgcccucucccgcggcuucggcuccggcaucaucaacuccaacgcccccauggacaagugcgacgccaagugccagaccccccagggcgccaucaacuccucccuccccuuccagaacguccaccccgucaccaucggcgagugccccaaguacguccgcuccgccaagcuccgcauggucaccggccuccgcaacauccccuccauccagucccgcggccucuucggcgccaucgccggcuucaucgagggcggcuggaccggcauggucgacggcugguacggcuaccaccaccagaacgagcagggcuccggcuacgccgccgaccagaaguccacccagaacgccaucaacggcaucaccaacaaggucaacuccgucaucgagaagaugaacacccaguucaccgccgucggcaaggaguucaacaagcucgagcgccgcauggagaaccucaacaagaaggucgacgacggcuucaucgacaucuggaccuacaacgccgagcuccucguccuccucgagaacgagcgcacccucgacuuccacgacuccaacgucaagaaccucuacgagaaggucaagucccagcucaagaacaacgccaaggagaucggcaacggcugcuucgaguucuaccacaagugcaacgacgagugcauggaguccgucaagaacggcaccuacgacuaccccaaguacuccgaggaguccaagcucaaccgcgagaagaucgacggcgucaagcucgaguccaugggcgucuaccagauccucgccaucuacuccaccgucgccuccucccucguccuccucgucucccucggcgccaucuccuucuggaugugcuccaacggcucccuccagugccgcaucugcaucuga

SEQ ID NO: 99204 - RNA, 1698 nt, Artificial Sequence
  derived and/or modified CDS sequence (opt2) from hemagglutinin__InfluenzaA__ACU79992
augaaggucaagcuccucguccuccucugcaccuucaccgccaccuacgccgacaccaucugcaucggcuaccacgccaacaacuccaccgacaccgucgacaccguccucgagaagaacgucaccgucacccacuccgucaaccuccucgaggacaaccacaacggcaagcucugccuccucaagggcaaggccccccuccagcucggcaacugcuccgucgccggcuggauccucggcaaccccgagugcggccuccucaucuccaaggaguccugguccuacaucgucgagcgccccaaccccgagaacggcaccugcuaccccggccacuucgccgacuacgaggagcuccgcgagcagcucuccuccgucuccuccuucgagcgcuucgagaucuuccccaaggaguccuccuggcccaaccacaccgucaccggcgucuccgccuccugcucccacaacggcgaguccuccuucuacaagaaccuccucuggcucaccggcaagaacggccucuaccccaaccucuccaaguccuacgccaacaacaaggagaaggagguccucguccucuggggcguccaccacccccccaacaucggcgaccagaugacccucuaccacaaggagaacgccuacgucuccgucgucuccucccacuacucccgcaaguucacccccgagaucgccaagcgccccaagguccgcgaccaggagggccgcaucaacuacuacuggacccuccucgagcccggcgacaccaucaucuucgaggccaacggcaaccucaucgccccccgcuacgccuucgcccucucccgcggcuucggcuccggcaucaucaacuccaacgcccccauggacgagugcgacgccaagugccagaccccccagggcgccaucaacuccucccuccccuuccagaacguccaccccgucaccaucggcgagugccccaaguacguccgcuccgccaagcuccgcauggucaccggccuccgcaacauccccuccauccagucccgcggccucuucggcgccaucgccggcuucaucgagggcggcuggaccggcauggucgacggcugguacggcuaccaccaccagaacgagcagggcuccggcuacgccgccgaccagaaguccacccagaacgccaucaacggcaucaccaacaaggucaacuccgucaucgagaagaugaacacccaguucaccgccgucggcaaggaguucaacaagcucgagcgccgcauggagaaccucaacaagaaggucgacgacggcuucaucgacgucuggaccuacaacgccgagcuccucguccuccucgagaacgagcgcacccucgacuuccacgacuccaacgucaagaaccucuacgagaaggucaagaaccagcucaagaacaacgccaaggagaucggcaacggcugcuucgaguucuaccacaagugcaacgacgagugcauggaguccgucaagaacggcaccuacgacuaccccaaguacuccgaggaguccaagcucucccgcgagaagaucgacggcgucaagcucgaguccaugggcgucuaccagauccucgccaucuacuccaccgucgccuccucccucguccuccucgucucccucggcgccaucuccuucuggaugugcuccaacggcucccuccagugccgcaucugcaucuga

SEQ ID NO: 99205 - RNA, 1701 nt, Artificial Sequence; identical to SEQ ID NO: 98470
  derived and/or modified CDS sequence (opt2) from hemagglutinin__InfluenzaA__ACU80003

SEQ ID NO: 99206 - RNA, 1698 nt, Artificial Sequence
  derived and/or modified CDS sequence (opt2) from hemagglutinin__InfluenzaA__ACU80025
augaaggucaagcuccucguccuccucugcaccuucgccgccaccuacgccgacaccaucugcaucggcuaccacgccaacaacuccaccgacaccgucgacaccguccucgagaagaacgucaccgucacccacuccgucaaccuccucgagaacucccacaacggcaagcucugccuccucaagggcaucgccccccuccagcucggcaacugcuccgucgccggcuggauccucggcaaccccgagugcgagcuccucaucuccaaggaguccugguccuacaucgucgagaagcccaaccccgagaacggcaccugcuaccccggccacuucgccgacuacgaggagcuccgcgagcagcucuccuccgucuccuccuucgagcgcuucgagaucuuccccaaggaguccuccuggcccaaccacaccgucaccggcgucuccgccuccugcucccacaacggcgaguccuccuucuaccgcaaccuccucuggcucaccggcaagaacggccucuaccccaaccucuccaaguccuacgccaacaacaaggagaaggagguccucguccucuggggcguccaccacccccccaacaucggcgaccagaaggcccucuaccacaccgagaacgccuacgucuccgucgucuccucccacuacucccgcaaguucacccccgagaucgccaagcgccccaagguccgcgaccaggagggccgcaucaacuacuacuggacccuccucgagcccggcgacaccaucaucuucgaggccaacggcaaccucaucgccccccgcuacgccuucgcccucucccgcggcuucggcuccggcaucaucaacuccaacgcccccauggacaagugcgacgccaagugccagaccccccagggcgccaucaacuccucccuccccuuccagaacguccaccccgucaccaucggcgagugccccaaguacguccgcuccgccaagcuccgcauggucaccggccuccgcaacauccccuccauccagucccgcggccucuucggcgccaucgccggcuucaucgagggcggcuggaccggcauggucgacggcugguacggcuaccaccaccagaacgagcagggcuccggcuacgccgccgaccagaaguccacccagaacgccaucaacggcaucaccaacaaggucaacuccgucaucgagaagaugaacacccaguucaccgccgucggcaaggaguucaacaagcucgagcgccgcauggagaaccucaacaagaaggucgacgacggcuucaucgacaucuggaccuacaacgccgagcuccucguccuccucgagaacgagcgcacccucgacuuccacgacuccaacgucaagaaccucuacgagaaggucaagucccagcucaagaacaacgccaaggagaucggcaacggcugcuucgaguucuaccacaagugcaacgacgagugcauggaguccgucaagaacggcaccuacgacuaccccaaguacuccgaggaguccaagcucaaccgcgagaagaucgacggcgucaagcucgaguccaugggcgucuaccagauccucgccaucuacuccaccgucgccuccucccucguccuccucgucucccucggcgccaucuccuucuggaugugcuccaacggcucccuccagugccgcaucugcaucuga

SEQ ID NO: 99207 - RNA, 1701 nt, Artificial Sequence
  derived and/or modified CDS sequence (opt2) from hemagglutinin__InfluenzaA__ACU80036
augaagaccaucaucgcccucuccuacauccucugccucgucuucgcccagaagcuccccggcaacgacaacuccaccgccacccucugccucggccaccacgccguccccaacggcaccaucgucaagaccaucaccaacgaccagaucgaggucaccaacgccaccgagcucguccaguccuccuccaccggcgagaucugcgacuccccccaccagauccucgacggcgagaacugcacccucaucgacgcccuccucggcgacccccagugcgacggcuuccagaacaagaagugggaccucuucgucgagcgcuccaaggccuacuccaacugcuaccccuacgacguccccgacuacgccucccuccgcucccucgucgccuccuccggcacccucgaguucaacaacgaguccuucaacuggaccggcgucacccagaacggcaccuccuccgccugcauccgccgcuccaacaacuccuucuucucccgccucaacuggcucacccaccucaaguucaaguaccccgcccucaacgucaccaugcccaacaacgagcaguucgacaagcucuacaucuggggcguccaccaccccggcaccgacaacgaccagaucuuccucuacgcccaggccuccggccgcaucaccgucuccaccaagcgcucccagcagaccgucauccccaacaucggcucccgcccccgcguccgcaacauccccucccgcaucuccaucuacuggaccaucgucaagcccggcgacauccuccucaucaacuccaccggcaaccucaucgccccccgcggcuacuucaagauccgcuccggcaaguccuccaucaugcgcuccgacgcccccaucggcaagugcuccuccgagugcaucacccccaacggcuccauccccaacgacaagcccuuccagaacgucaaccgcaucaccuacggcgccugcccccgcuacgucaagcagaacacccucaagcucgccaccggcaugcgcaacguccccgagaagcagacccgcggcaucuucggcgccaucgccggcuucaucgagaacggcugggagggcauggucgacggcugguacggcuuccgccaccagaacuccgagggccgcggccaggccgccgaccucaaguccacccaggccgccaucgaccagaucaacggcaagcucaaccgccucaucggcaagaccaacgagaaguuccaccagaucgagaaggaguucuccgaggucgagggccgcauccaggaccucgagaaguacgucgaggacaccaagaucgaccucugguccuacaacgccgagcuccucgucgcccucgagaaccagcacaccaucgaccucaccgacuccgagaugaacaagcucuucgagaagaccaagaagcagcuccgcgagaacgccgaggacaucggcaacggcugcuucaagaucuaccacaagugcgacaacgccugcaucggcuccauccgcaacggcaccuacgaccacgacgucuaccgcgacgaggcccucaacaaccgcuuccagaucaagggcgucgagcucaaguccggcuacaaggacuggauccucuggaucuccuucgccaucuccugcuuccuccucugcgucgcccuccucggcuucaucaugugggccugccagaagggcaacauccgcugcaacaucugcaucuga

SEQ ID NO: 99208 - RNA, 1698 nt, Artificial Sequence; identical to SEQ ID NO: 98679
  derived and/or modified CDS sequence (opt2) from hemagglutinin__InfluenzaA__ACU80047

SEQ ID NO: 99209 - RNA, 1701 nt, Artificial Sequence
  derived and/or modified CDS sequence (opt2) from hemagglutinin__InfluenzaA__ACU80058
augaagaccaucaucgcccucuccuacauccucugccucgucuucgcccagaagcuccccggcaacgacaacuccaccgccacccucugccucggccaccacgccguccccaacggcaccaucgucaagaccaucaccaacgaccagaucgaggucaccaacgccaccgagcucguccaguccuccuccaccggcggcaucugcgacuccccccaccagauccucgacggcgagaacugcacccucaucgacgcccuccucggcgacccccagugcgacggcuuccagaacaagaagugggaccucuucgucgagcgcuccaaggccugcuccaacugcuaccccuacgacguccccgacuacgccucccuccgcucccucgucgccuccuccggcacccucgaguucaacaacgaguccuucaacuggaccggcgucacccagaacggcaccuccuccgccugcaagcgccgcuccaacaacuccuucuucucccgccucaacuggcucacccaccucaaguucaaguaccccgcccucaacgucaccaugcccaacaacgagaaguucgacaagcucuacaucuggggcguccaccaccccggcaccgacaacgaccagaucuuccucuacgcccaggccuccggccgcaucaccgucuccaccaagcgcucccagcagaccgucauccccaacaucggcucccgcccccgcguccgcaacauccccucccgcaucuccaucuacuggaccaucgucaagcccggcgacauccuccucaucaacuccaccggcaaccucaucgccccccgcggcuacuucaagauccgcuccggcaaguccuccaucaugcgcuccgacgcccccaucggcaagugcaacuccgagugcaucacccccaacggcuccauccccaacgacaagcccuuccagaacgucaaccgcaucaccuacggcgccugcccccgcuacgucaagcagaacacccucaagcucgccaccggcaugcgcaacguccccgagaagcagacccgcggcaucuucggcgccaucgccggcuucaucgagaacggcugggagggcauggucgacggcugguacggcuuccgccaccagaacuccgagggcaucggccaggccgccgaccucaaguccacccaggccgccaucaaccagaucaacggcaagcucaaccgccucaucggcaagaccaacgagaaguuccaccagaucgagaaggaguucuccgaggucgagggccgcauccaggaccucgagaaguacgucgaggacaccaagaucgaccucugguccuacaacgccgagcuccucgucgcccucgagaaccagcacaccaucgaccucaccgacuccgagaugaacaagcucuucgagcgcaccaagaagcagcuccgcgagaacgccgaggacaugggcaacggcugcuucaagaucuaccacaagugcgacaacgccugcaucggcuccauccgcaacggcaccuacgaccacgacgucuaccgcgacgaggcccucaacaaccgcuuccagaucaagggcgucgagcucaaguccggcuacaaggacuggauccucuggaucuccuucgccaucuccugcuuccuccucugcgucgcccuccucggcuucaucaugugggccugccagaagggcaacauccgcugcaacaucugcaucuga

SEQ ID NO: 99210 - RNA, 1698 nt, Artificial Sequence; identical to SEQ ID NO: 98524
  derived and/or modified CDS sequence (opt2) from hemagglutinin__InfluenzaA__ACU80069

SEQ ID NO: 99211 - RNA, 1698 nt, Artificial Sequence
  derived and/or modified CDS sequence (opt2) from hemagglutinin__InfluenzaA__ACU80080
augaaggucaagcuccucguccuccucugcaccuucaccgccaccuacgccgacaccaucugcaucggcuaccacgccaacaacuccaccgacaccgucgacaccguccucgagaagaacgucaccgucacccacuccgucaaccuccucgagaacucccacaacggcaagcucugccuccucaagggcaucgccccccuccagcucggcaacugcuccgucgccggcuggauccucggcaaccccgagugcgagcuccucaucuccaaggaguccugguccuacaucgucgagaagcccaaccccgagaacggcaccugcuaccccggccacuucgccgacuacgaggagcuccgcgagcagcucuccuccgucuccuccuucgagcgcuucgagaucuuccccaaggaguccuccuggcccaaccacaccgucaccggcgucuccgccuccugcucccacaacggcgaguccuccuucuaccgcaaccuccucuggcucaccggcaagaacggccucuaccccaaccucuccaaguccuacgccaacaacaaggagaaggagguccucguccucuggggcguccaccacccccccaacaucgucgaccagaagacccucuaccgcaccgagaacgccuacgucuccgucgucuccucccacuacucccgcaaguucacccccgagaucgccaagcgccccaagguccgcgaccaggagggccgcaucaacuacuacuggacccuccucgagcccggcgacaccaucaucuucgaggccaacggcaaccucaucgccccccgcuacgccuucgcccucucccgcggcuucggcuccggcaucaucaacuccaacgcccccauggacaagugcgacgccaagugccagaccccccagggcgccaucaacuccucccuccccuuccagaacguccaccccgucaccaucggcgagugccccaaguacguccgcuccgccaagcuccgcauggucaccggccuccgcaacauccccuccauccagucccgcggccucuucggcgccaucgccggcuucaucgagggcggcuggaccggcauggucgacggcugguacggcuaccaccaccagaacgagcagggcuccggcuacgccgccgaccagaaguccacccagaacgccaucaacggcaucaccaacaaggucaacuccgucaucgagaagaugaacacccaguucaccgccgucggcaaggaguucaacaagcucgagcgccgcauggagaaccucaacaagaaggucgacgacggcuucaucgacaucuggaccuacaacgccgagcuccucguccuccucgagaacgagcgcacccucgacuuccacgacuccaacgucaagaaccucuacgagaaggucaagucccagcucaagaacaacgccaaggagaucggcaacggcugcuucgaguucuaccacaagugcaacgacgagugcauggaguccgucaagaacggcaccuacgacuaccccaaguacuccgaggaguccaagcucaaccgcgagaagaucgacggcaucaagcucgaguccaugggcgucuaccagauccucgccaucuacuccaccgucgccuccucccucguccuccucgucucccucggcgccaucuccuucuggaugugcuccaacggcucccuccagugccgcaucugcaucuga

SEQ ID NO: 99212 - RNA, 1698 nt, Artificial Sequence; identical to SEQ ID NO: 98810
  derived and/or modified CDS sequence (opt2) from hemagglutinin__InfluenzaA__ACU80091

SEQ ID NO: 99213 - RNA, 1701 nt, Artificial Sequence; identical to SEQ ID NO: 98573
  derived and/or modified CDS sequence (opt2) from hemagglutinin__InfluenzaA__ACU80102

SEQ ID NO: 99214 - RNA, 1701 nt, Artificial Sequence
  derived and/or modified CDS sequence (opt2) from hemagglutinin__InfluenzaA__ACU80113
augaagaccaucaucgcccucuccuacauccucugccucgucuucgcccagaaguuccccggcaacgacaacuccaccgccacccucugccucggccaccacgccguccccaacggcaccaucgucaagaccaucaccaacgaccagaucgaggucaccaacgccaccgagcucguccaguccuccuccaccggcgagaucugcgacuccccccaccagauccucgacggcgagaacugcacccucaucgacgcccuccucggcgacccccagugcgacggcuuccagaacaagaacugggaccucuucgucgagcgcuccaaggccuacuccaacugcuaccccuacgacguccccgacuacgccucccuccgcucccucgucgccuccuccggcacccucgaguucaacaacgaguccuucaacuggaccggcgucacccagaacggcaccuccuccgccugcauccgccgcuccaacaacuccuucuucucccgccucaacuggcucacccacuccaaguucaaguaccccgcccucaacgucaccaugcccaacaacgagaacuucgacaagcucuacaucuggggcguccaccaccccggcaccgacaacgaccagaucuuccucuacgcccaggccuccggccgcaucaccgucuccaccaagcgcucccagcagaccgucauccccaacaucggcucccgcccccgcguccgcaacauccccucccgcaucuccaucuacuggaccaucgucaagcccggcgacauccuccucaucaacuccaccggcaaccucaucgccccccgcggcuacuucaagauccgcuccggcaaguccuccaucaugcgcuccgacgcccccaucggcaagugcaacuccgagugcaucacccccaacggcuccauccccaacgacaagcccuuccagaacgucaaccgcaucaccuacggcgccugcccccgcuacgucaagcagaacacccucaagcucgccaccggcaugcgcaacguccccgagaagcagacccgcggcaucuucggcgccaucgccggcuucaucgagaacggcugggagggcauggucgacggcugguacggcuuccgccaccagaacuccgagggcaucggccaggccgccgaccucaaguccacccaggccgccaucgaccagaucaacggcaagcucaaccgccucaucggcaagaccaacgagaaguuccaccagaucgagaaggaguucuccgagaucgagggccgcauccaggaccucgagaaguacgucgaggacaccaagaucgaccucugguccuacaacgccgagcuccucgucgcccucgagaaccagcacaccaucgaccucaccgacuccgagaugaacaagcucuucgagaagaccaagaagcagcuccgcgagaacgccgaggacaugggcaacggcugcuucaagaucuaccacaagugcgacaacgccugcaucggcuccauccgcaacggcaccuacgaccacgacgucuaccgcgacgaggcccucaacaaccgcuuccagaucaagggcgucgagcucaaguccggcuacaagaacuggauccucuggaucuccuucgccaucuccugcuuccuccucugcaucgcccuccucggcuucaucaugugggccugccagaagggcaacauccgcugcaacaucugcaucuga

SEQ ID NO: 99215 - RNA, 1701 nt, Artificial Sequence
  derived and/or modified CDS sequence (opt2) from hemagglutinin__InfluenzaA__ACU80135
augaagaccaucaucgcccucuccuacauccucugccucgucuucgcccagaaguuccccggcaacgacaacuccaccgccacccucugccucggccaccacgccguccccaacggcaccauggucaagaccaucaccaacgaccagaucgaggucaccaacgccaccgagcucguccaguccuccuccaccggcgagaucugcgacuccccccaccagauccucgacggcgagaacugcacccucaucgacgcccuccucggcgacccccagugcgacggcuuccagaacaagaacugggaccucuucgucgagcgcuccaaggccuacuccaacugcuaccccuacgacguccccgacuacgccucccuccgcucccucgucgccuccuccggcacccucgaguucaacaacgaguccuucaacuggaccggcgucacccagaacggcaccuccuccgccugcauccgccgcuccaacaacuccuucuucucccgccucaacuggcucacccacuccaaguucaaguaccccgcccucaacgucaccaugcccaacaacgagaacuucgacaagcucuacaucuggggcguccaccaccccggcaccgacaacgaccagaucuuccucuacgcccaggccuccggccgcaucaccgucuccaccaagcgcucccagcagaccgucauccccaacaucggcucccgcccccgcguccgcaacauccccucccgcaucuccaucuacuggaccaucgucaagcccggcgacauccuccucaucaacuccaccggcaaccucaucgccccccgcggcuacuucaagauccgcuccggcaaguccuccaucaugcgcuccgacgcccccaucggcaagugcaacuccgagugcaucacccccaacggcuccauccccaacgacaagcccuuccagaacgucaaccgcaucaccuacggcgccugcccccgcuacgucaagcagaacacccucaagcucgccaccggcaugcgcaacguccccgagaagcagacccgcggcaucuucggcgccaucgccggcuucaucgagaacggcugggagggcauggucgacggcugguacggcuuccgccaccagaacuccgagggcaucggccaggccgccgaccucaaguccacccaggccgccaucgaccagaucaacggcaagcucaaccgccucaucggcaagaccaacgagaaguuccaccagaucgagaaggaguucuccgaggucgagggccgcauccaggaccucgagaaguacgucgaggacaccaagaucgaccucugguccuacaacgccgagcuccucgucgcccucgagaaccagcacaccaucgaccucaccgacuccgagaugaacaagcucuucgagaagaccaagaagcagcuccgcgagaacgccgaggacaugggcaacggcugcuucaagaucuaccacaagugcgacaacgccugcaucggcuccauccgcaacggcaccuacgaccacgacgucuaccgcgacgaggcccucaacaaccgcuuccagaucaagggcgucgagcucaaguccggcuacaaggacuggauccucuggaucuccuucgccaucuccugcuuccuccucugcaucgcccuccucggcuucaucaugugggccugccagaagggcaacauccgcugcaacaucugcaucuga

SEQ ID NO: 99216 - RNA, 1701 nt, Artificial Sequence
  derived and/or modified CDS sequence (opt2) from hemagglutinin__InfluenzaA__ACU80146
augaagaccaucaucgcccucuccuacauccucugccucgucuucgcccagaagcuccccggcaacgacaacuccaccgccacccucugccucggccaccacgccguccccaacggcaccaucgucaagaccaucaccaacgaccagaucgaggucaccaacgccaccgagcucguccaguccuccuccaccggcgagaucugcgacuccccccaccagauccucgacggcgagaacugcacccucaucgacgcccuccucggcgacccccagugcgacggcuuccagaacaagaagugggaccucuucgucgagcgcuccaaggccuacuccaacugcuaccccuacgacguccccgacuacgccucccuccgcucccucgucgccuccuccggcacccucgaguucaacaacgaguccuucaacuggaccggcgucacccagaacggcaccuccuccgccugcauccgccgcuccaacaacuccuucuucucccgccucaacuggcucacccacuccaaguucaaguaccccgcccucaacgucaccaugcccaacaacgaggaguucgacaagcucuacaucuggggcguccaccaccccggcaccgacaacgaccagaucuuccucuacgcccaggccuccggccgcaucaccgucuccaccaagcgcucccagcagaccgucauccccaacaucggcucccgcccccgcguccgcaacauccccucccgcaucuccaucuacuggaccaucgucaagcccggcgacauccuccucaucaacuccaccggcaaccucaucgccccccgcggcuacuucaagauccgcuccggcaaguccuccaucaugcgcuccgacgcccccaucggcaagugcaacuccgagugcaucacccccaacggcuccauccccaacgacaagcccuuccagaacgucaaccgcaucaccuacggcgccugcccccgcuacgucaagcagaacacccucaagcucgccaccggcaugcgcaacguccccgagaagcagacccgcggcaucuucggcgccaucgccggcuucaucgagaacggcugggagggcauggucgacggcugguacggcuuccgccaccagaacuccgagggcaucggccaggccgccgaccucaaguccacccaggccgccaucgaccagaucaacggcaagcucaaccgccucaucggcaagaccaacgagaaguuccaccagaucgagaaggaguucuccgaggucgagggccgcauccaggaccucgagaaguacgucgaggacaccaagaucgaccucugguccuacaacgccgagcuccucgucgcccucgagaaccagcacaccaucgaccucaccgacuccgagaugaacaagcucuucgagaagaccaagaagcagcuccgcgagaacgccgaggacaugggcaacggcugcuucaagaucuaccacaagugcgacaacgccugcaucggcuccauccgcaacggcaccuacgaccacgacgucuaccgcgacgaggcccucaacaaccgcuuccagaucaagggcgucgagcucaaguccggcuacaaggacuggauccucuggaucuccuucgccaucuccugcuuccuccucugcgucgcccuccucggccucaucaugugggccugccagaagggcaacauccgcugcaacaucugcaucuga

SEQ ID NO: 99217 - RNA, 1701 nt, Artificial Sequence; identical to SEQ ID NO: 98470
  derived and/or modified CDS sequence (opt2) from hemagglutinin__InfluenzaA__ACU80157

SEQ ID NO: 99218 - RNA, 1698 nt, Artificial Sequence; identical to SEQ ID NO: 99206
  derived and/or modified CDS sequence (opt2) from hemagglutinin__InfluenzaA__ACU80168

SEQ ID NO: 99219 - RNA, 1701 nt, Artificial Sequence; identical to SEQ ID NO: 98470
  derived and/or modified CDS sequence (opt2) from hemagglutinin__InfluenzaA__ACU80179

SEQ ID NO: 99220 - RNA, 1701 nt, Artificial Sequence
  derived and/or modified CDS sequence (opt2) from hemagglutinin__InfluenzaA__ACU80190
augaagaccaucaucgcccucuccuacauccucugccucgucuucgcccagaagcuccccggcaacgacaacuccaccgccacccucugccucggccaccacgccguccccaacggcaccaucgucaagaccaucaccaacgaccagaucgaggucaccaacgccaccgagcucguccaguccuccuccaccggcgagaucugcgacuccccccaccagauccucgacggcgagaacugcacccucaucgacgcccuccucggcgacccccagugcgacggcuuccagaacaagaagugggaccucuucgucgagcgcuccaaggccuacuccaacugcuaccccuacgacguccccgacuacgccucccuccgcucccucgucgccuccuccggcacccucgaguucaacaacgaguccuucaacuggaccggcgucacccagaacggcaccuccuccgccugcauccgccgcuccaacaacuccuucuucucccgccucaacuggcucacccacuccaaguucaaguaccccgcccucaacgucaccaugcccaacaacgaggaguucgacaagcucuacaucuggggcguccaccaccccggcaccgacaacgaccagaucuuccucuacgcccaggccuccggccgcaucaccgucuccaccaagcgcucccagcagaccgucauccccaacaucggcucccgcccccgcguccgcaacauccccucccgcaucuccaucuacuggaccaucgucaagcccggcgacauccuccucaucaacuccaccggcaaccucaucgccccccgcggcuacuucaagauccgcuccggcaaguccuccaucaugcgcuccgacgcccccaucggcaagugcaacuccgagugcaucacccccaacggcuccauccccaacgacaagcccuuccagaacgucaaccgcaucaccuacggcgccugcccccgcuacgucaagcagaacacccucaagcucgccaccggcaugcgcaacguccccgagaagcagacccgcggcaucuucggcgccaucgccggcuucaucgagaacggcugggagggcauggucgacggcugguacggcuuccgccaccagaacuccgagggcaucggccaggccgccgaccucaaguccacccaggccgccaucgaccagaucaacggcaagcucaaccgccucaucggcaagaccaacgagaaguuccaccagaucgagaaggaguucuccgaggucgagggccgcauccaggaccucgagaaguacgucgaggacaccaagaucgaccucugguccuacaacgccgagcuccucgucgcccucgagaaccagcacaccaucgaccucaccgacuccgagaugaacaagcucuucgagaagaccaagaagcagcuccgcgagaacgccgaggacaugggcaacggcugcuucaagaucuaccacaagugcgacaacgccugcaucggcuccauccgcaacggcaccuacgaccacgacgucuaccgcgacgaggcccucaacaaccgcuuccagaucaagggcaucgagcucaaguccggcuacaaggacuggauccucuggaucuccuucgccaucuccugcuuccuccucugcgucgcccuccucggcuucaucaugugggccugccagaagggcaacauccgcugcaacaucugcaucuga

SEQ ID NO: 99221 - RNA, 1701 nt, Artificial Sequence
  derived and/or modified CDS sequence (opt2) from hemagglutinin__InfluenzaA__ACU80201
augaagaccaucaucgcccucuccuacauccucugccucgucuucgcccagaagcuccccggcaacgacaacuccaccgccacccucugccucggccaccacgccguccccaacggcaccaucgucaagaccaucaccaacgaccagaucgaggucaccaacgccaccgagcucguccaguccuccuccaccggcgagaucugcgacuccccccaccagauccucgacggcgagaacugcacccucaucgacgcccuccucggcgacccccagugcgacggcuuccagaacaagaagugggaccucuucgucgagcgcuccaaggccuacuccaacugcuaccccuacgacguccccgacuacgccucccuccgcucccucgucgccuccuccggcacccucgaguucaacaacgaguccuucaacuggaccggcgucacccagaacggcaccuccuccgccugcauccgccgcuccaacaacuccuucuucucccgccucaacuggcucacccaccucaaguucaaguaccccgcccucaacgucaccaugcccaacaacgagcaguucgacaagcucuacaucuggggcguccaccaccccggcaccgacaacgaccagaucuuccucuacgcccaggccuccggccgcaucaccgucuccaccaagcgcucccagcagaccgucauccccaacaucggcucccgcccccgcguccgcaacauccccucccgcaucuccaucuacuggaccaucgucaagcccggcgacauccuccucaucaacuccaccggcaaccucaucgccccccgcggcuacuucaagauccgcuccggcaaguccuccaucaugcgcuccgacgcccccaucggcaagugcaacuccgagugcaucacccccaacggcuccauccccaacgacaagcccuuccagaacgucaaccgcaucaccuacggcgccugcccccgcuacgucaagcagaacacccucaagcucgccaccggcaugcgcaacguccccgagaagcagacccgcggcaucuucggcgccaucgccggcuucaucgagaacggcugggagggcauggucgacggcugguacggcuuccgccaccagaacuccgagggccgcggccaggccgccgaccucaaguccacccaggccgccaucgaccagaucaacggcaagcucaaccgccucaucggcaagaccaacgagaaguuccaccagaucgagaaggaguucuccgaggucgagggccgcauccaggaccucgagaaguacgucgaggacaccaagaucgaccucugguccuacaacgccgagcuccucgucgcccucgagaaccagcacaccaucgaccucaccgacuccgagaugaacaagcucuucgagaagaccaagaagcagcuccgcgagaacgccgaggacaugggcaacggcugcuucaagaucuaccacaagugcgacaacgccugcaucggcuccauccgcaacggcaccuacgaccacgacgucuaccgcgacgaggcccucaacaaccgcuuccagaucaagggcgucgagcucaaguccggcuacaaggacuggauccucuggaucuccuucgccaucuccugcuuccuccucugcgucgcccuccucggcuucaucaugugggccugccagaagggcaacaucaagugcaacaucugcaucuga

SEQ ID NO: 99222 - RNA, 1701 nt, Artificial Sequence; identical to SEQ ID NO: 98470
  derived and/or modified CDS sequence (opt2) from hemagglutinin__InfluenzaA__ACU80212

SEQ ID NO: 99223 - RNA, 1698 nt, Artificial Sequence
  derived and/or modified CDS sequence (opt2) from hemagglutinin__InfluenzaA__ACU80234
augaaggucaagcuccucguccuccucugcaccuucgccgccaccuacgccgacaccaucugcaucggcuaccacgccaacaacuccaccgacaccgucgacaccguccucgagaagaacgucaccgucacccacuccgucaaccuccucgagaacucccacaacggcaagcucugccuccucaagggcaucgccccccuccagcucggcaacugcuccgucgccggcuggauccucggcaaccccgagugcgagcuccucaucuccaaggaguccugguccuacaucgucgagaagcccaaccccgagaacggcaccugcuaccccggccacuucgccgacuacgaggagcuccgcgagcagcucuccuccgucuccuccuucgagcgcuucgagaucuuccccaaggaguccuccuggcccaaccacaccgucaccggcgucuccgccuccugcucccacaacggcgaguccuccuucuacaagaaccuccucuggcucaccggcaagaacggccucuaccccaaccucuccaaguccuacgccaacaacaaggagaaggagguccucguccucuggggcguccaccacccccccaacaucggcgaccagaaggcccucuaccacaccgagaacgccuacgucuccgucgucuccucccacuacucccgcaaguucacccccgagaucgccaagcgccccaagguccgcgaccaggagggccgcaucaacuacuacuggacccuccucgagcccggcgacaccaucaucuucgaggccaacggcaaccucaucgccccccgcuacgccuucgcccucucccgcggcuucggcuccggcaucaucaacuccaacgcccccauggacaagugcgacgccaagugccagaccccccagggcgccaucaacuccucccuccccuuccagaacguccaccccgucaccaucggcgagugccccaaguacguccgcuccgccaagcuccgcauggucaccggccuccgcaacauccccuccauccagucccgcggccucuucggcgccaucgccggcuucaucgagggcggcuggaccggcauggucgacggcugguacggcuaccaccaccagaacgagcagggcuccggcuacgccgccgaccagaaguccacccagaacgccaucaacggcaucaccaacaaggucaacuccgucaucgagaagaugaacacccaguucaccgccgucggcaaggaguucaacaagcucgagcgccgcauggagaaccucaacaagaaggucgacgacggcuucaucgacaucuggaccuacaacgccgagcuccucguccuccucgagaacgagcgcacccucgacuuccacgacuccaacgucaagaaccucuacgagaaggucaagucccagcucaagaacaacgccaaggagaucggcaacggcugcuucgaguucuaccacaagugcaacgacgagugcauggaguccgucaagaacggcaccuacgacuaccccaaguacuccgaggaguccaagcucaaccgcgagaagaucgacggcgucaagcucgaguccaugggcgucuaccagauccucgccaucuacuccaccgucgccuccucccucguccuccucgucucccucggcgccaucuccuucuggaugugcuccaacggcucccuccagugccgcaucugcaucuga

SEQ ID NO: 99224 - RNA, 1701 nt, Artificial Sequence
  derived and/or modified CDS sequence (opt2) from hemagglutinin__InfluenzaA__ACU80245
augaagaccaucaucgcccucuccuacauccucugccucgucuucgcccagaaguuccccggcaacgacaacuccaccgccacccucugccucggccaccacgccguccccaacggcaccaucgucaagaccaucaccaacgaccagaucgaggucaccaacgccaccgagcucguccaguccuccuccaccggcgagaucugcgacuccccccaccagauccucgacggcgagaacugcacccucaucgacgcccuccucggcgacccccagugcgacggcuuccagaacaagaacugggaccucuucgucgagcgcuccaaggccuacuccaacugcuaccccuacgacguccccgacuacgccucccuccgcucccucgucgccuccuccggcacccucgaguucaacaacgaguccuucaacuggaccggcgucacccagaacggcaccuccuccgccugcauccgccgcuccaacaacuccuucuucucccgccucaacuggcucacccacuccaaguucaaguaccccgcccucaacgucaccaugcccaacaacgagaacuucgacaagcucuacaucuggggcguccaccaccccggcaccgacaacgaccagaucuuccucuacgcccaggccuccggccgcaucaccgucuccaccaagcgcucccagcagaccgucauccccaacaucggcucccgcccccgcguccgcaacauccccucccgcaucuccaucuacuggaccaucgucaagcccggcgacauccuccucaucaacuccaccggcaaccucaucgccccccgcggcuacuucaagauccgcuccggcaaguccuccaucaugcgcuccgacgcccccaucggccgcugcaacuccgagugcaucacccccaacggcuccauccccaacgacaagcccuuccagaacgucaaccgcaucaccuacggcgccugcccccgcuacgucaagcagaacacccucaagcucgccaccggcaugcgcaacguccccgagaagcagacccgcggcaucuucggcgccaucgccggcuucaucgagaacggcugggagggcauggucgacggcugguacggcuuccgccaccagaacuccgagggcaucggccaggccgccgaccucaaguccacccaggccgccaucgaccagaucaacggcaagcucaaccgccucaucggcaagaccaacgagaaguuccaccagaucgagaaggaguucuccgaggucgagggccgcauccaggaccucgagaaguacgucgaggacaccaagaucgaccucugguccuacaacgccgagcuccucgucgcccucgagaaccagcacaccaucgaccucaccgacuccgagaugaacaagcucuucgagaagaccaagaagcagcuccgcgagaacgccgaggacaugggcaacggcugcuucaagaucuaccacaagugcgacaacgccugcaucggcuccauccgcaacggcaccuacgaccacgacgucuaccgcgacgaggcccucaacaaccgcuuccagaucaagggcgucgagcucaaguccggcuacaaggacuggauccucuggaucuccuucgccaucuccugcuuccuccucugcaucgcccuccucggcuucaucaugugggccugccagaagggcaacauccgcugcaacaucugcaucuga

SEQ ID NO: 99225 - RNA, 1701 nt, Artificial Sequence; identical to SEQ ID NO: 98573
  derived and/or modified CDS sequence (opt2) from hemagglutinin__InfluenzaA__ACU80256

SEQ ID NO: 99226 - RNA, 1698 nt, Artificial Sequence; identical to SEQ ID NO: 98524
  derived and/or modified CDS sequence (opt2) from hemagglutinin__InfluenzaA__ACU80267

SEQ ID NO: 99227 - RNA, 1698 nt, Artificial Sequence; identical to SEQ ID NO: 99206
  derived and/or modified CDS sequence (opt2) from hemagglutinin__InfluenzaA__ACU80278

SEQ ID NO: 99228 - RNA, 1701 nt, Artificial Sequence; identical to SEQ ID NO: 98470
  derived and/or modified CDS sequence (opt2) from hemagglutinin__InfluenzaA__ACU80289

SEQ ID NO: 99229 - RNA, 1701 nt, Artificial Sequence; identical to SEQ ID NO: 98573
  derived and/or modified CDS sequence (opt2) from hemagglutinin__InfluenzaA__ACU80300

SEQ ID NO: 99230 - RNA, 1701 nt, Artificial Sequence
  derived and/or modified CDS sequence (opt2) from hemagglutinin__InfluenzaA__ACU80311
augcgcaccaucaucgcccucuccuacauccucugccucgucuucgcccagaaguuccccggcaacgacaacuccaccgccacccucugccucggccaccacgccguccccaacggcaccaucgucaagaccaucaccaacgaccagaucgaggucaccaacgccaccgagcucguccaguccuccuccaccggcgagaucugcgacuccccccaccagauccucgacggcgagaacugcacccucaucgacgcccuccucggcgacccccagugcgacggcuuccagaacaagaacugggaccucuucgucgagcgcuccaaggccuacuccaacugcuaccccuacgacguccccgacuacgccucccuccgcucccucgucgccuccuccggcacccucgaguucaacaacgaguccuucaacuggaccggcgucacccagaacggcaccuccuccgccugcauccgccgcuccaacaacuccuucuucucccgccucaacuggcucacccacuccaaguucaaguaccccgcccucaacgucaccaugcccaacaacgagaacuucgacaagcucuacaucuggggcguccaccaccccggcaccgacaacgaccagaucuuccucuacgcccaggccuccggccgcaucaccgucuccaccaagcgcucccagcagaccgucauccccaacaucggcucccgcccccgcguccgcaacauccccucccgcaucuccaucuacuggaccaucgucaagcccggcgacauccuccucaucaacuccaccggcaaccucaucgccccccgcggcuacuucaagauccgcuccggcaaguccuccaucaugcgcuccgacgcccccaucggcaagugcaacuccgagugcaucacccccaacggcuccauccccaacgacaagcccuuccagaacgucaaccgcaucaccuacggcgccugcccccgcuacgucaagcagaacacccucaagcucgccaccggcaugcgcaacguccccgagaagcagacccgcggcaucuucggcgccaucgccggcuucaucgagaacggcugggagggcauggucgacggcugguacggcuuccgccaccagaacuccgagggcaucggccaggccgccgaccucaaguccacccaggccgccaucgaccagaucaacggcaagcucaaccgccucaucggcaagaccaacgagaaguuccaccagaucgagaaggaguucuccgaggucgagggccgcauccaggaccucgagaaguacgucgaggacaccaagaucgaccucugguccuacaacgccgagcuccucgucgcccucgagaaccagcacaccaucgaccucaccgacuccgagaugaacaagcucuucgagaagaccaagaagcagcuccgcgagaacgccgaggacaugggcaacggcugcuucaagaucuaccacaagugcgacaacgccugcaucggcuccauccgcaacggcaccuacgaccacgacgucuaccgcgacgaggcccucaacaaccgcuuccagaucaagggcgucgagcucaaguccggcuacaaggacuggauccucuggaucuccuucgccaucuccugcuuccuccucugcaucgcccuccucggcuucaucaugugggccugccagaagggcaacauccgcugcaacaucugcaucuga

SEQ ID NO: 99231 - RNA, 1701 nt, Artificial Sequence; identical to SEQ ID NO: 98573
  derived and/or modified CDS sequence (opt2) from hemagglutinin__InfluenzaA__ACU80322

SEQ ID NO: 99232 - RNA, 1701 nt, Artificial Sequence; identical to SEQ ID NO: 98470
  derived and/or modified CDS sequence (opt2) from hemagglutinin__InfluenzaA__ACU80333

SEQ ID NO: 99233 - RNA, 1701 nt, Artificial Sequence; identical to SEQ ID NO: 98573
  derived and/or modified CDS sequence (opt2) from hemagglutinin__InfluenzaA__ACU80344

SEQ ID NO: 99234 - RNA, 1701 nt, Artificial Sequence; identical to SEQ ID NO: 98573
  derived and/or modified CDS sequence (opt2) from hemagglutinin__InfluenzaA__ACU80355

SEQ ID NO: 99235 - RNA, 1701 nt, Artificial Sequence; identical to SEQ ID NO: 98573
  derived and/or modified CDS sequence (opt2) from hemagglutinin__InfluenzaA__ACU80366

SEQ ID NO: 99236 - RNA, 1701 nt, Artificial Sequence
  derived and/or modified CDS sequence (opt2) from hemagglutinin__InfluenzaA__ACU80377
augaagaccaucaucgcccucuccuacauccucugccucgucuucgcccagaaguuccccggcaacgacaacuccaccgccacccucugccucggccaccacgccguccccaacggcaccaucgucaagaccaucaccaacgaccagaucgaggucaccaacgccaccgagcucguccaguccuccuccaccggcgagaucugcgacuccccccaccagauccucgacggcgagaacugcacccucaucgacgcccuccucggcgacccccagugcgacggcuuccagaacaagaacugggaccucuucgucgagcgcuccaaggccuacuccaacugcuaccccuacgacguccccgacuacgccucccuccgcucccucgucgccuccuccggcacccucgaguucaacaacgaguccuucaacuggaccggcgucacccagaacggcaccuccuccgccugcauccgccgcuccaacaacuccuucuucucccgccucaacuggcucacccacuccaaguucaaguaccccgcccucaacgucaccaugcccaacaacgagaacuucgacaagcucuacaucuggggcguccaccaccccggcaccgacaacgaccagaucuuccucuacgcccaggccuccggccgcaucaccgucuccaccaagcgcucccagcagaccgucauccccaacaucggcucccgcccccgcguccgcaacauccccucccgcaucuccaucuacuggaccaucgucaagcccggcgacauccuccucaucaacuccaccggcaaccucaucgccccccgcggcuacuucaagauccgcuccggcaaguccuccaucaugcgcuccgacgcccccaucggcaagugcaacuucgagugcaucacccccaacggcuccauccccaacgacaagcccuuccagaacgucaaccgcaucaccuacggcgccugcccccgcuacgucaagcagaacacccucaagcucgccaccggcaugcgcaacguccccgagaagcagacccgcggcaucuucggcgccaucgccggcuucaucgagaacggcugggagggcauggucgacggcugguacggcuuccgccaccagaacuccgagggcaucggccaggccgccgaccucaaguccacccaggccgccaucgaccagaucaacggcaagcucaaccgccucaucggcaagaccaacgagaaguuccaccagaucgagaaggaguucuccgaggucgagggccgcauccaggaccucgagaaguacgucgaggacaccaagaucgaccucugguccuacaacgccgagcuccucgucgcccucgagaaccagcacaccaucgaccucaccgacuccgagaugaacaagcucuucgagaagacccgcaagcagcuccgcgagaacgccgaggacaugggcaacggcugcuucaagaucuaccacaagugcgacaacgccugcaucggcuccauccgcaacggcaccuacgaccacgacgucuaccgcgacgaggcccucaacaaccgcuuccagaucaagggcgucgagcucaaguccggcuacaaggacuggauccucuggaucuccuucgccauguccugcuuccuccucugcaucgcccuccucggcuucaucaugugggccugccagaagggcaacauccgcugcaacaucugcaucuga

SEQ ID NO: 99237 - RNA, 1701 nt, Artificial Sequence; identical to SEQ ID NO: 98573
  derived and/or modified CDS sequence (opt2) from hemagglutinin__InfluenzaA__ACU80388

SEQ ID NO: 99238 - RNA, 1701 nt, Artificial Sequence; identical to SEQ ID NO: 98470
  derived and/or modified CDS sequence (opt2) from hemagglutinin__InfluenzaA__ACU80399

SEQ ID NO: 99239 - RNA, 1698 nt, Artificial Sequence
  derived and/or modified CDS sequence (opt2) from hemagglutinin__InfluenzaA__ACU80410
augaaggucaagcuccucguccuccucugcaccuucaccgccaccuacgccgacaccaucugcaucggcuaccacgccaacaacuccaccgacaccgucgacaccguccucgagaagaacgucaccgucacccacuccgucaaccuccucgagaacucccacaacggcaagcucugccuccucaagggcaucgccccccuccagcucggcaacugcuccgucgccggcuggauccucggcaaccccgagugcgagcuccucaucuccaaggaguccugguccuacaucgucgagaagcccaaccccgagaacggcaccugcuaccccggccacuucgccgacuacgaggagcuccgcgagcagcucuccuccgucuccuccuucgagcgcuucgagaucuuccccaaggaguccuccuggcccaaccacaccgucaccggcgucuccgccuccugcucccacaacggcgaguccuccuucuaccgcaaccuccucuggcucaccggcaagaacggccucuaccccaaccucuccaaguccuacgccaacaacaaggagaaggagguccucguccucuggggcguccaccacccccccaacaucggcgaccagaaggcccucuaccacaccgagaacgccuacgucuccgucgucuccucccacuacucccgcaaguucacccccgagaucgccaagcgccccaagguccgcgaccaggagggccgcaucaacuacuacuggacccuccucgagcccggcgacaccaucaucuucgaggccaacggcaaccucaucgccccccgcuacgccuucgcccucucccgcggcuucggcuccggcaucaucaacuccaacgcccccauggacaagugcgacgccaagugccagaccccccagggcgccaucaacuccucccuccccuuccagaacguccaccccgucaccaucggcgagugccccaaguacguccgcuccgccaagcuccgcauggucaccggccuccgcaacauccccuccauccagucccgcggccucuucggcgccaucgccggcuucaucgagggcggcuggaccggcauggucgacggcugguacggcuaccaccaccagaacgagcagggcuccggcuacgccgccgaccagaaguccacccagaacgccaucaacggcaucaccaacaaggucaacuccgucaucgagaagaugaacacccaguucaccgccgucggcaaggaguucaacaagcucgagcgccgcauggagaaccucaacaagaaggucgacgacggcuucaucgacaucuggaccuacaacgccgagcuccucguccuccucgagaacgagcgcacccucgacuuccacgacuccaacgucaagaaccucuacgagaaggucaagaaccagcucaagaacaacgccaaggagaucggcaacggcugcuucgaguucuaccacaagugcaacgacgagugcauggaguccgucaagaacggcaccuacgacuaccccaaguacuccgaggaguccaagcucaaccgcgagaagaucgacggcgucaagcucgaguccaugggcgucuaccagauccucgccaucuacuccaccgucgccuccucccucguccuccucgucucccucggcgccaucuccuucuggaugugcuccaacggcucccuccagugccgcaucugcaucuga

SEQ ID NO: 99240 - RNA, 1701 nt, Artificial Sequence
  derived and/or modified CDS sequence (opt2) from hemagglutinin__InfluenzaA__ACU80424
augaagaccaucaucgcccucuccuacauccucugccucgucuucgcccagaaguuccccggcaacgacaacuccaccgccacccucugccucggccaccacgccguccccaacggcaccaucgucaagaccaucaccaacgaccagaucgaggucaccaacgccaccgagcucguccaguccuccuccaccggcgagaucugcgacuccccccaccagauccucgacggcgagaacugcacccucaucgacgcccuccucggcgacccccagugcgacggcuuccagaacaagaacugggaccucuucgucgagcgcuccaaggccuacuccaacugcuaccccuacgacguccccgacuacgccucccuccgcucccucgucgccuccuccggcacccucgaguucaacaacgaguccuucaacuggaccggcgucacccagaacggcaccuccuccgccugcauccgccgcuccaacaacuccuucuucucccgccucaacuggcucacccacuccaaguucaaguaccccgcccucaacgucaccaugcccaacaacgagaacuucgacaagcucuacaucuggggcguccaccaccccggcaccgacaacgaccagaucuuccucuacgcccaggccuccggccgcaucaccgucuccaccaagcgcucccagcagaccgucauccccaacaucggcucccgcccccgcguccgcaacauccccucccgcaucuccaucuacuggaccaucgucaagcccggcgacauccuccucaucaacuccaccggcaaccucaucgccccccgcggcuacuucaagauccgcuccggcaaguccuccaucaugcgcuccgacgcccccaucggcaagugcaacuucgagugcaucacccccaacggcuccauccccaacgacaagcccuuccagaacgucaaccgcaucaccuacggcgccugcccccgcuacgucaagcagaacacccucaagcucgccaccggcaugcgcaacguccccgagaagcagacccgcggcaucuucggcgccaucgccggcuucaucgagaacggcugggagggcauggucgacggcugguacggcuuccgccaccagaacuccgagggcaucggccaggccgccgaccucaaguccacccaggccgccaucgaccagaucaacggcaagcucaaccgccucaucggcaagaccaacgagaaguuccaccagaucgagaaggaguucuccgaggucgagggccgcauccaggaccucgagaaguacgucgaggacaccaagaucgaccucugguccuacaacgccgagcuccucgucgcccucgagaaccagcacaccaucgaccucaccgacuccgagaugaacaagcucuucgagaagacccgcaagcagcuccgcgagaacgccgaggacaugggcaacggcugcuucaagaucuaccacaagugcgacaacgccugcaucggcuccauccgcaacggcaccuacgaccacgacgucuaccgcgacgaggcccucaacaaccgcuuccagaucaagggcgucgagcucaaguccggcuacaaggacuggauccucuggaucuccuucgccaucuccugcuuccuccucugcaucgcccuccucggcuucaucaugugggccugccagaagggcaacauccgcugcaacaucugcaucuga

SEQ ID NO: 99241 - RNA, 1701 nt, Artificial Sequence; identical to SEQ ID NO: 99240
  derived and/or modified CDS sequence (opt2) from hemagglutinin__InfluenzaA__ACU80435

SEQ ID NO: 99242 - RNA, 1698 nt, Artificial Sequence
  derived and/or modified CDS sequence (opt2) from hemagglutinin__InfluenzaA__ACU80446
augaaggucaagcuccucguccuccucugcaccuucaccgccaccuacgccgacaccaucugcaucggcuaccacgccaacaacuccaccgacaccgucgacaccguccucgagaagaacgucaccgucacccacuccgucaaccuccucgagaacucccacaacggcaagcucugccuccucaagggcaucgccccccuccagcucggcaacugcuccgucgccggcuggauccucggcaaccccgagugcgagcuccucaucuccaaggaguccugguccuacaucgucgagaagcccaaccccgagaacggcaccugcuaccccggccacuucgccgacuacgaggagcuccgcgagcagcucuccuccgucuccuccuucgagcgcuucgagaucuuccccaaggaguccuccuggcccaaccacaccgucaccggcgucuccgccuccugcucccacaacggcgaguccuccuucuaccgcaaccuccucuggcucaccggcaagaacggccucuaccccaaccucuccaaguccuacgccaacaacaaggagaaggagguccucguccucuggggcguccaccacccccccaacaucggcgaccagaagacccucuaccacaccgagaacgccuacgucuccgucgucuccucccacuacucccgcaaguucacccccgagaucgccaagcgccccaagguccgcgaccaggagggccgcaucaacuacuacuggacccuccucgagcccggcgacaccaucaucuucgaggccaacggcaaccucaucgccccccgcuacgccuucgcccucucccgcggcuucggcuccggcaucaucaacuccaacgcccccauggacaagugcgacgccaagugccagaccccccagggcgccaucaacuccucccuccccuuccagaacguccaccccgucaccaucggcgagugccccaaguacguccgcuccgccaagcuccgcauggucaccggccuccgcaacauccccuccauccagucccgcggccucuucggcgccaucgccggcuucaucgagggcggcuggaccggcauggucgacggcugguacggcuaccaccaccagaacgagcagggcuccggcuacgccgccgaccagaaguccacccagaacgccaucaacggcaucaccaacaaggucaacuccgucaucgagaagaugaacacccaguucaccgccgucggcaaggaguucaacaagcucgagcgccgcauggagaaccucaacaagaaggucgacgacggcuucaucgacaucuggaccuacaacgccgagcuccucguccuccucgagaacgagcgcacccucgacuuccacgacuccaacgucaagaaccucuacgagaaggucaagucccagcucaagaacaacgccaaggagaucggcaacggcugcuucgaguucuaccacaagugcaacgacgagugcauggaguccgucaagaacggcaccuacgacuaccccaaguacuccgaggaguccaagcucaaccgcgagaagaucgacggcgucaagcucgaguccauggaggucuaccagauccucgccaucuacuccaccgucgccuccucccucguccuccucgucucccucggcgccaucuccuucuggaugugcuccaacggcucccuccagugccgcaucugcaucuga

SEQ ID NO: 99243 - RNA, 1701 nt, Artificial Sequence; identical to SEQ ID NO: 98470
  derived and/or modified CDS sequence (opt2) from hemagglutinin__InfluenzaA__ACU80458

SEQ ID NO: 99244 - RNA, 1701 nt, Artificial Sequence; identical to SEQ ID NO: 98470
  derived and/or modified CDS sequence (opt2) from hemagglutinin__InfluenzaA__ACU80470

SEQ ID NO: 99245 - RNA, 1701 nt, Artificial Sequence; identical to SEQ ID NO: 98573
  derived and/or modified CDS sequence (opt2) from hemagglutinin__InfluenzaA__ACU80600

SEQ ID NO: 99246 - RNA, 1701 nt, Artificial Sequence; identical to SEQ ID NO: 99240
  derived and/or modified CDS sequence (opt2) from hemagglutinin__InfluenzaA__ACU80611

SEQ ID NO: 99247 - RNA, 1701 nt, Artificial Sequence; identical to SEQ ID NO: 98573
  derived and/or modified CDS sequence (opt2) from hemagglutinin__InfluenzaA__ACU80622

SEQ ID NO: 99248 - RNA, 1701 nt, Artificial Sequence; identical to SEQ ID NO: 98470
  derived and/or modified CDS sequence (opt2) from hemagglutinin__InfluenzaA__ACU80633

SEQ ID NO: 99249 - RNA, 1701 nt, Artificial Sequence
  derived and/or modified CDS sequence (opt2) from hemagglutinin__InfluenzaA__ACU80644
augaagaccaucaucgcccucuccuacauccucugccucgucuucgcccagaagcuccccggcaacgacaacuccaccgccacccucugccucggccaccacgccguccccaacggcaccaucgucaagaccaucaccaacgaccagaucgaggucaccaacgccaccgagcucguccaguccuccuccaccggcgagaucugcgacuccccccaccagauccucgacggcgagaacugcacccucaucgacgcccuccucggcgacccccagugcgacggcuuccagaacaagaagugggaccucuucgucgagcgcuccaaggccuacuccaacugcuaccccuacgacguccccgacuacgccucccuccgcucccucgucgccuccuccggcacccucgaguucaacaacgaguccuucaacuggaccggcgucacccagaacggcaccuccuccgccugcauccgccgcuccaacaacuccuucuucucccgccucaacuggcucacccacuccaaguucaaguaccccgcccucaacgucaccaugcccaacaacgaggaguucgacaagcucuacaucuggggcguccaccaccccggcaccgacaacgaccagaucuuccucuacgcccaggccuccggccgcaucaccgucuccaccaagcgcucccagcagaccgucauccccaacaucggcucccgcccccgcguccgcaacauccccucccgcaucuccaucuacuggaccaucgucaagcccggcgacauccuccucaucaacuccaccggcaaccucaucgccccccgcggcuacuucaagauccgcuccggcaaguccuccaucaugcgcuccgacgcccccaucggcaagugcaacuccgagugcaucacccccaacggcuccauccccaacgacaagcccuuccagaacgucaaccgcaucaccuacggcgccugcccccgcuacgucaagcagaacacccucaagcucgccaccggcaugcgcaacguccccgagaagcagacccgcggcaucuucggcgccaucgccggcuucaucgagaacggcugggagggcauggucgacggcugguacggcuuccgccaccagaacuccgagggcaucggccaggccgccgaccucaaguccacccaggccgccaucgaccagaucaacggcaagcucaaccgccucaucggcaagaccaacgagaaguuccaccagaucgagaaggaguucuccgaggucgagggccgcauccaggaccucgagaaguacgucgaggacaccaagaucgaccucugguccuacaacgccgagcuccucgucgcccucgagaaccagcacaccaucgaccucaccgacuccgagaugaacaagcucuucgagaagaccaagaagcagcuccgcgagaacgccgaggacaugggcaacggcugcuucaagaucuaccacaagugcgacaacgccugcaucggcuccauccgcaacggcaccuacgaccacgacgucuaccgcgacgaggcccucaacaaccgcuuccagaucaagggcgucgagcucaaguccggcuacaaggacuggauccucuggaucuccuucgccaucuccugcuuccuccucugcgucgcccuccucggcuucaucaugugggccugccagaagggcaacauccgcugcaacaucugcaucuga

SEQ ID NO: 99250 - RNA, 1701 nt, Artificial Sequence; identical to SEQ ID NO: 98470
  derived and/or modified CDS sequence (opt2) from hemagglutinin__InfluenzaA__ACU80655

SEQ ID NO: 99251 - RNA, 1701 nt, Artificial Sequence; identical to SEQ ID NO: 98470
  derived and/or modified CDS sequence (opt2) from hemagglutinin__InfluenzaA__ACU80666

SEQ ID NO: 99252 - RNA, 1701 nt, Artificial Sequence; identical to SEQ ID NO: 97964
  derived and/or modified CDS sequence (opt2) from hemagglutinin__InfluenzaA__ACU80677

SEQ ID NO: 99253 - RNA, 1701 nt, Artificial Sequence; identical to SEQ ID NO: 98470
  derived and/or modified CDS sequence (opt2) from hemagglutinin__InfluenzaA__ACU80688

SEQ ID NO: 99254 - RNA, 1701 nt, Artificial Sequence; identical to SEQ ID NO: 98573
  derived and/or modified CDS sequence (opt2) from hemagglutinin__InfluenzaA__ACU80699

SEQ ID NO: 99255 - RNA, 1701 nt, Artificial Sequence; identical to SEQ ID NO: 98573
  derived and/or modified CDS sequence (opt2) from hemagglutinin__InfluenzaA__ACU80710

SEQ ID NO: 99256 - RNA, 1701 nt, Artificial Sequence
  derived and/or modified CDS sequence (opt2) from hemagglutinin__InfluenzaA__ACU80721
augaagaccaucaucgcccucuccuacauccucugccucgucuucgcccagaagcuccccggcaacgacaacuccaccgccacccucugccucggccaccacgccguccccaacggcaccaucgucaagaccaucaccaacgaccagaccgaggucaccaacgccaccgagcucguccaguccuccuccaccggcgagaucugcgacuccccccaccagauccucgacggcgagaacugcacccucaucgacgcccuccucggcgacccccagugcgacggcuuccagaacaagaagugggaccucuucgucgagcgcuccaaggccuacuccaacugcuaccccuacgacguccccgacuacgccucccuccgcucccucgucgccuccuccggcacccucgaguucaacaacgaguccuucaacuggaccggcgucacccagaacggcaccuccuccgccugcauccgccgcuccaacaacuccuucuucucccgccucaacuggcucacccaccucaaguucaaguaccccgcccucaacgucaccaugcccaacaacgagcaguucgacaagcucuacaucuggggcguccaccaccccggcaccgacaacgaccagaucuuccucuacgcccaggccuccggccgcaucaccgucuccaccaagcgcucccagcagaccgucauccccaacaucggcucccgcccccgcguccgcaacauccccucccgcaucuccaucuacuggaccaucgucaagcccggcgacauccuccucaucaacuccaccggcaaccucaucgccccccgcggcuacuucaagauccgcuccggcaaguccuccaucaugcgcuccgacgcccccaucggcaagugcaacuccgagugcaucacccccaacggcuccauccccaacgacaagcccuuccagaacgucaaccgcaucaccuacggcgccugcccccgcuacgucaagcagaacacccucaagcucgccaccggcaugcgcaacguccccgagaagcagacccgcggcaucuucggcgccaucgccggcuucaucgagaacggcugggagggcauggucgacggcugguacggcuuccgccaccagaacuccgagggccgcggccaggccgccgaccucaaguccacccaggccgccaucgaccagaucaacggcaagcucaaccgccucaucggcaagaccaacgagaaguuccaccagaucgagaaggaguucuccgaggucgagggccgcauccaggaccucgagaaguacgucgaggacaccaagaucgaccucugguccuacaacgccgagcuccucgucgcccucgagaaccagcacaccaucgaccucaccgacuccgagaugaacaagcucuucgagaagaccaagaagcagcuccgcgagaacgccgaggacaugggcaacggcugcuucaagaucuaccacaagugcgacaacgccugcaucggcuccauccgcaacggcaccuacgaccacgacgucuaccgcgacgaggcccucaacaaccgcuuccagaucaagggcgucgagcucaaguccggcuacaaggacuggauccucuggaucuccuucgccaucuccugcuuccuccucugcgucgcccuccucggcuucaucaugugggccugccagaagggcaacauccgcugcaacaucugcaucuga

SEQ ID NO: 99257 - RNA, 1701 nt, Artificial Sequence; identical to SEQ ID NO: 98470
  derived and/or modified CDS sequence (opt2) from hemagglutinin__InfluenzaA__ACU80732

SEQ ID NO: 99258 - RNA, 1701 nt, Artificial Sequence; identical to SEQ ID NO: 98470
  derived and/or modified CDS sequence (opt2) from hemagglutinin__InfluenzaA__ACU80743

SEQ ID NO: 99259 - RNA, 1701 nt, Artificial Sequence
  derived and/or modified CDS sequence (opt2) from hemagglutinin__InfluenzaA__ACU80754
augaagaccaucaucgcccucuccuacauccucugccucgucuucgcccagaagcuccccggcaacgacaacuccaccgccacccucugccucggccaccacgccguccccaacggcaccaucgucaagaccaucaccaacgaccagaucgaggucaccaacgccaccgagcucguccaguccuccuccaccggcgagaucugcgacuccccccaccagauccucgacggcgagaacugcacccucaucgacgcccuccucggcgacccccagugcgacggcuuccagaacaagaagugggaccucuucgucgagcgcuccaaggccuacuccaacugcuaccccuacgacguccccgacuacgccucccuccgcucccucgucgccuccuccggcacccucgaguucaacaacgaguccuucaacuggaccggcgucacccagaacggcaccuccuccgccugcauccgccgcuccaacaacuccuucuucucccgccucaacuggcucacccaccucaaguucaaguaccccgcccucaacgucaccaugcccaacaacgagcaguucgacaagcucuacaucuggggcguccaccaccccggcaccgacaacgaccagaucuuccucuacgcccaggccuccggccgcaucaccgucuccaccaagcgcucccagcagaccgucauccccaacaucggcucccgcccccgcguccgcaacauccccucccgcaucuccaucuacuggaccaucgucaagcccggcgacauccuccucaucaacuccaccggcaaccucaucgccccccgcggcuacuucaagauccgcuccggcaaguccuccaucaugcgcuccgacgcccccaucggcaagugcaacuccgagugcaucacccccaacggcuccauccccaacgacaagcccuuccagaacgucaaccgcaucaccuacggcgccugcccccgcuacgucaagcagaacacccucaagcucgccaccggcaugcgcaacguccccgagaagcagacccgcggcaucuucggcgccaucgccggcuucaucgagaacggcugggagggcauggucgacggcugguacggcuuccgccaccagaacuccgagggccgcggccaggccgccgaccucaaguccacccaggccgccaucgaccagaucaacggcaagcucaaccgccucaucggcaagaccaacgagaaguuccaccagaucgagaaggaguucuccgaggucgagggccgcauccaggaccucgagaaguacgucgaggacaccaagaucgaccucugguccuacaacgccgagcuccucgucgcccucgagaaccagcacaccaucgaccucaccgacuccgagaugaacaagcucuucgagaagaccaagaagcagcuccgcgagaacgccgaggacaugggcaacggcugcuucaagaucuaccacaagugcgacaacgccugcaucggcuccauccgcaacggcaccuacgaccacgacgucuaccgcgacgaggcccucaacaaccgcuuccagaucaagggcgucgagcucaaguccggcuacaaggacuggauccucuggaucuccuucgccaucuccugcuuccuccucugcgucguccuccucggcuucaucaugugggccugccagaagggcaacauccgcugcaacaucugcaucuga

SEQ ID NO: 99260 - RNA, 1701 nt, Artificial Sequence
  derived and/or modified CDS sequence (opt2) from hemagglutinin__InfluenzaA__ACU80765
augaagaccaucaucgcccucuccuacauccucugccucgucuucgcccagaagcuccccggcaacgacaacuccaccgccacccucugccucggccaccacgccguccccaacggcaccaucgucaagaccaucaccaacgaccagaucgaggucaccaacgccaccgagcucguccaguccuccuccaccggcgagaucugcgacuccccccaccagauccucgacggcgagaacugcacccucaucgacgcccuccucggcgacccccagugcgacggcuuccagaacaagaagugggaccucuucgucgagcgcuccaaggccuacuccaacugcuaccccuacgacguccccgacuacgccucccuccgcucccucgucgccuccuccggcacccucgaguucaacaacgaguccuucaacuggaccggcgucacccagaacggcaccuccuccgccugcauccgccgcuccaacaacuccuucuucucccgccucaacuggcucacccacuccaaguucaaguaccccgcccucaacgucaccaugcccaacaacgaggaguucgacaagcucuacaucuggggcguccaccaccccggcaccgacaacgaccagaucuuccucuacgcccaggccuccggccgcaucaccgucuccaccaagcgcucccagcagaccgucauccccaacaucggcucccgcccccgcguccgcaacauccccucccgcaucuccaucuacuggaccaucgucaagcccggcgacauccuccucaucaacuccaccggcaaccucaucgccccccgcggcuacuucaagauccgcuccggcaaguccuccaucaugcgcuccgacgcccccaucggcaagugcaacuccgagugcaucacccccaacggcuccauccccaacgacaagcccuuccagaacgucaaccgcaucaccuacggcgccugcccccgcuacgucaagcagaacacccucaagcucgccaccggcaugcgcaacguccccgagaagcagacccgcggcaucuucggcgccaucgccggcuucaucgagaacggcugggagggcauggucgacggcugguacggcuuccgccaccagaacuccgagggcaucggccaggccgccgaccucaaguccacccaggccgccaucgaccagaucaacggcaagcucaaccgccucaucggcaagaccaacgagaaguuccaccagaucgagaaggaguucuccgaggucgagggccgcauccaggaccucgagaaguacgucgaggacaccaagaucgaccucugguccuacaacgccgagcuccucgucgcccucgagaaccagcacaccaucgaccucaccgacuccgagaugaacaagcucuucgagaagaccaagaagcagcuccgcgagaacgccgaggacaugggcaacggcugcuucaagaucuaccacaagugcgacaacgccugcaucggcuccauccgcaacggcaccuacgaccacgacgucuaccgcgacgaggcccucaacaaccgcuuccagaucaagggcgucgagcucaaguccggcuacaaggacuggauccucuggaucuccuucgccaucuccugcuuccuccucugcaucgcccuccucggcuucaucaugugggccugccagaagggcaacauccgcugcaacaucugcaucuga

SEQ ID NO: 99261 - RNA, 1701 nt, Artificial Sequence
  derived and/or modified CDS sequence (opt2) from hemagglutinin__InfluenzaA__ACU80787
augaagaccaucaucgcccucuccuacauccucugccucgucuucgcccagaagcuccccggcaacgacaacuccaccgccacccucugccucggccaccacgccguccccaacggcaccaucgucaagaccaucaccaacgaccagaucgaggucaccaacgccaccgagcucguccaguccuccuccaccggcgagaucugcgacuccccccaccagauccucgacggcgagaacugcacccucaucgacgcccuccucggcgacccccagugcgacggcuuccagaacaagaagugggaccucuucgucgagcgcuccaaggccuacuccaacugcuaccccuacgacguccccgacuacgccucccuccgcucccucgucgccuccuccggcacccucgaguucaacaacgaguccuucaacuggaccggcgucacccagaacggcaccuccuccgccugcauccgccgcuccaacaacuccuucuucucccgccucaacuggcucacccaccucaaguucaaguaccccgcccucaacgucaccaugcccaacaacgagcaguucgacaagcucuacaucuggggcguccaccaccccggcaccgacaacgaccagaucuuccucuacgcccaggccuccggccgcaucaccgucuccaccaagcgcucccagcagaccgucauccccaacaucggcucccgcccccgcguccgcaacauccccucccgcaucuccaucuacuggaccaucgucaagcccggcgacauccuccucaucaacuccaccggcaaccucaucgccccccgcggcuacuucaagauccgcuccggcaaguccuccaucaugcgcuccgacgcccccaucggcaagugcaacuccgagugcaucacccccaacggcuccauccccaacgacaagcccuuccagaacgucaaccgcaucaccuacggcgccugcccccgcuacgucaagcagaacacccucaagcucgccaccggcaugcgcaacguccccgagaagcagacccgcggcaucuucggcgccaucgccggcuucaucgagaacggcugggagggcaugauggacggcugguacggcuuccgccaccagaacuccgagggccgcggccaggccgccgaccucaaguccacccaggccgccaucgaccagaucaacggcaagcucaaccgccucaucggcaagaccaacgagaaguuccaccagaucgagaaggaguucuccgaggucgagggccgcauccaggaccucgagaaguacgucgaggacaccaagaucgaccucugguccuacaacgccgagcuccucgucgcccucgagaaccagcacaccaucgaccucaccgacuccgagaugaacaagcucuucgagaagaccaagaagcagcuccgcgagaacgccgaggacaugggcaacggcugcuucaagaucuaccacaagugcgacaacgccugcaucggcuccauccgcaacggcaccuacgaccacgacgucuaccgcgacgaggcccucaacaaccgcuuccagaucaagggcgucgagcucaaguccggcuacaaggacuggauccucuggaucuccuucgccaucuccugcuuccuccucugcgucgcccuccucggcuucaucaugugggccugccagaagggcaacauccgcugcaacaucugcaucuga

SEQ ID NO: 99262 - RNA, 1701 nt, Artificial Sequence; identical to SEQ ID NO: 98470
  derived and/or modified CDS sequence (opt2) from hemagglutinin__InfluenzaA__ACU80798

SEQ ID NO: 99263 - RNA, 1701 nt, Artificial Sequence; identical to SEQ ID NO: 98470
  derived and/or modified CDS sequence (opt2) from hemagglutinin__InfluenzaA__ACU81103

SEQ ID NO: 99264 - RNA, 1701 nt, Artificial Sequence
  derived and/or modified CDS sequence (opt2) from hemagglutinin__InfluenzaA__ACU87270
augaaggccauccucgucguccuccucuacaccuucgccaccgccaacgccgacacccucugcaucggcuaccacgccaacaacuccaccgacaccgucgacaccguccucgagaagaacgucaccgucacccacuccgucaaccuccucgaggacaagcacaacggcaagcucugcaagcuccgcggcgucgccccccuccaccucggcaagugcaacaucgccggcuggauccucggcaaccccgagugcgagucccucuccaccgccuccuccugguccuacaucgucgagaccuccuccuccgacaacggcaccugcuaccccggcgacuucaucgacuacgaggagcuccgcgagcagcucuccuccgucuccuccuucgagcgcuucgagaucuuccccaagaccuccuccuggcccaaccacgacuccaacaagggcgucaccgccgccugcccccacgccggcgccaaguccuucuacaagaaccucaucuggcucgucaagaagggcaacuccuaccccaagcucuccaaguccuacaucaacgacaagggcaaggagguccucguccucuggggcauccaccaccccuccaccuccgccgaccagcagucccucuaccagaacgccgacgccuacgucuucgucggcaccucccgcuacuccaagaaguucaagcccgagaucgccauccgccccaagguccgcgaccgcgagggccgcaugaacuacuacuggacccucaucgagcccggcgacaagaucaccuucgaggccaccggcaaccucgucgucccccgcuacgccuucgccauggagcgcaacgccggcuccggcaucaucaucuccgacacccccguccacgacugcaacaccaccugccagacccccaagggcgccaucaacaccucccuccccuuccagaacauccaccccaucaccaucggcaagugccccaaguacgucaaguccaccaagcuccgccucgccaccggccuccgcaacguccccuccauccagucccgcggccucuucggcgccaucgccggcuucaucgagggcggcuggaccggcauggucgacggcugguacggcuaccaccaccagaacgagcagggcuccggcuacgccgccgaccucaaguccacccagaacgccaucgacgagaucaccaacaaggucaacuccgucaucgagaagaugaacacccaguucaccgccgucggcaaggaguucaaccaccucgagaagcgcaucgagaaccucaacaagaaggucgacgacggcuuccucgacaucuggaccuacaacgccgagcuccucguccuccucgagaacgagcgcacccucgacuaccacgacuccaacgucaagaaccucuacgagaagguccgcucccagcucaagaacaacgccaaggagaucggcaacggcugcuucgaguucuaccacaagugcgacaacaccugcauggaguccgucaagaacggcaccuacgacuaccccaaguacuccgaggaggccaagcucaaccgcgaggagaucgacggcgucaagcucgaguccacccgcaucuaccagauccucgccaucuacuccaccgucgccuccucccucguccucgucgucucccucggcgccaucuccuucuggaugugcuccaacggcucccuccagugccgcaucugcaucuga

SEQ ID NO: 99265 - RNA, 1701 nt, Artificial Sequence; identical to SEQ ID NO: 98705
  derived and/or modified CDS sequence (opt2) from hemagglutinin__InfluenzaA__ACV04228

SEQ ID NO: 99266 - RNA, 1701 nt, Artificial Sequence; identical to SEQ ID NO: 98705
  derived and/or modified CDS sequence (opt2) from hemagglutinin__InfluenzaA__ACV04238

SEQ ID NO: 99267 - RNA, 1701 nt, Artificial Sequence
  derived and/or modified CDS sequence (opt2) from hemagglutinin__InfluenzaA__ACV04248
auggaggccauccucgucguccuccucuacaccuucgccaccgccaacgccgacacccucugcaucggcuaccacgccaacaacuccaccgacaccgucgacaccguccucgagaagaacgucaccgucacccacuccgucaaccuccucgaggacaagcacaacggcaagcucugcaagcuccgcggcgucgccccccuccaccucggcaagugcaacaucgccggcuggauccucggcaaccccgagugcgagucccucuccaccgccuccuccugguccuacaucgucgagaccuccuccuccgacaacggcaccugcuaccccggcgacuucaucgacuacgaggagcuccgcgagcagcucuccuccgucuccuccuucgagcgcuucgagaucuuccccaagaccuccuccuggcccaaccacgacuccaacaagggcaucaccgccgccugcccccacgccggcgccaaguccuucuacaagaaccucaucuggcucgucaagaagggcaacuccuaccccaagcucuccaaguccuacaucaacgacaagggcaaggagguccucguccucuggggcauccaccaccccuccaccuccgccgaccagcagucccucuaccagaacgccgacgccuacgucuucgucggcuccucccgcuacuccaagaaguucaagcccgagaucgccauccgccccaagguccgcgaccaggagggccgcaugaacuacuacuggacccucgucgagcccggcgacaagaucaccuucgaggccaccggcaaccucgucgucccccgcuacgccuucgccauggagcgcaacgccggcuccggcaucaucaucuccgacacccccguccacgacugcaacaccaccugccagacccccaagggcgccaucaacaccucccuccccuuccacaacauccaccccaucaccaucggcaagugccccaaguacgucaaguccaccaagcuccgccucgccaccggccuccgcaacguccccuccauccagucccgcggccucuucggcgccaucgccggcuucaucgagggcggcuggaccggcauggucgacggcugguacggcuaccaccaccagaacgagcagggcuccggcuacgccgccgaccucaaguccacccagaacgccaucgacgagaucaccaacaaggucaacuccgucaucgagaagaugaacacccaguucaccgccgucggcaaggaguucaaccaccucgagaagcgcaucgagaaccucaacaagaaggucgacgacggcuuccucgacaucuggaccuacaacgccgagcuccucguccuccucgagaacgagcgcacccucgacuaccacgacuccaacgucaagaaccucuacgagaagguccgcucccagcucaagaacaacgccaaggagaucggcaacggcugcuucgaguucuaccacaagugcgacaacaccugcauggaguccgucaagaacggcaccuacgacuaccccaaguacuccgaggaggccaagcucaaccgcgaggagaucgacggcgucaagcucgaguccacccgcaucuaccagauccucgccaucuacuccaccgucgccuccucccucguccucgucgucucccucggcgccaucuccuucuggaugugcuccaacggcucccuccagugccgcaucugcaucuga

SEQ ID NO: 99268 - RNA, 1701 nt, Artificial Sequence; identical to SEQ ID NO: 98705
  derived and/or modified CDS sequence (opt2) from hemagglutinin__InfluenzaA__ACV04258

SEQ ID NO: 99269 - RNA, 1701 nt, Artificial Sequence; identical to SEQ ID NO: 98705
  derived and/or modified CDS sequence (opt2) from hemagglutinin__InfluenzaA__ACV04268

SEQ ID NO: 99270 - RNA, 1701 nt, Artificial Sequence; identical to SEQ ID NO: 98705
  derived and/or modified CDS sequence (opt2) from hemagglutinin__InfluenzaA__ACV04278

SEQ ID NO: 99271 - RNA, 1701 nt, Artificial Sequence; identical to SEQ ID NO: 98705
  derived and/or modified CDS sequence (opt2) from hemagglutinin__InfluenzaA__ACV04288

SEQ ID NO: 99272 - RNA, 1701 nt, Artificial Sequence
  derived and/or modified CDS sequence (opt2) from hemagglutinin__InfluenzaA__ACV04298
augaaggccauccucgucguccuccucuacaccuucgccaccgccaacgccgacacccucugcaucggcuaccacgccaacaacuccaccgacaccgucgacaccguccucgagaagaacgucaccgucacccacuccgucaaccuccucgaggacaagcacaacggcaagcucugcaagcuccgcggcgucgccccccuccaccucggcaagugcaacaucgccggcuggauccucggcaaccccgagugcgagucccucuccaccgccuccuccugguccuacaucgucgagaccuccuccuccgacaacggcaccugcuaccccggcgacuucaucgacuacgaggagcuccgcgagcagcucuccuccgucuccuccuucgagcgcuucgagaucuuccccaagaccuccuccuggcccaaccacgacuccaacaagggcgucaccgccgccugcccccacgccggcgccaaguccuucuacaagaaccucaucuggcucgucaagaagggcaacuccuaccccaagcucuccaaguccuacaucaacgacaagggcaaggagguccucguccucuggggcauccaccaccccuccaccuccgccgaccagcagucccucuaccagaacgccgacgccuacgucuucgucggcaccucccgcuacuccaagaaguucaagcccgagaucgccauccgccccaagguccgcgaccaggagggccgcaugaacuacuacuggacccucgucgagcccggcgacaagaucaccuucgaggccaccggcaaccucgucgucccccgcuacgccuucgccauggagcgcaacgccggcuccggcaucaucaucuccgacacccccguccacgacugcaacaccaccugccagacccccaagggcgccaucaacaccucccuccccuuccagaacauccaccccgucaccaucggcaagugccccaaguacgucaaguccaccaagcuccgccucgccaccggccuccgcaacguccccuccauccagucccgcggccucuucggcgccaucgccggcuucaucgagggcggcuggaccggcauggucgacggcugguacggcuaccaccaccagaacgagcagggcuccggcuacgccgccgaccucaaguccacccagaacgccaucgacgagaucaccaacaaggucaacuccgucaucgagaagaugaacacccaguucaccgccgucggcaaggaguucaaccaccucgagaagcgcaucgagaaccucaacaagaaggucgacgacggcuuccucgacaucuggaccuacaacgccgagcuccucguccuccucgagaacgagcgcacccucgacuaccacgacuccaacgucaagaaccucuacgagaagguccgcucccagcucaagaacaacgccaaggagaucggcaacggcugcuucgaguucuaccacaagugcgacaacaccugcauggaguccgucaagaacggcaccuacgacuaccccaaguacuccgaggaggccaagcucaaccgcgaggagaucgacggcgucaagcucgaguccacccgcaucuaccagauccucgccaucuacuccaccgucgccuccucccucguccucgucgucucccucggcgccaucuccuucuggaugugcuccaacggcucccuccagugccgcaucugcaucuga

SEQ ID NO: 99273 - RNA, 1701 nt, Artificial Sequence; identical to SEQ ID NO: 98705
  derived and/or modified CDS sequence (opt2) from hemagglutinin__InfluenzaA__ACV04308

SEQ ID NO: 99274 - RNA, 1701 nt, Artificial Sequence
  derived and/or modified CDS sequence (opt2) from hemagglutinin__InfluenzaA__ACV04318
augaaggccauccucgucguccuccucuacaccuucgccaccgccaacgccgacacccucugcaucggcuaccacgccaacaacuccaccgacaccgucgacaccguccucgagaagaacgucaccgucacccacuccgucaaccuccucgaggacaagcacaacggcaagcucugcaagcuccgcggcgucgccccccuccaccucggcaagugcaacaucgccggcuggauccucggcaaccccgagugcgagucccucuccaccgccuccuccugguccuacaucgucgagaccuccuccuccgacaacggcaccugcuaccccggcgacuucaucgacuacgaggagcuccgcgagcagcucuccuccgucuccuccuucgagcgcuucgagaucuuccccaagaccuccuccuggcccaaccacgacuccaacaagggcgucaccgccgccugcccccacgccggcgccaaguccuucuacaagaaccucaucuggcucgucaagaagggcaacuccuaccccaagcucuccaaguccuacaucaacgacaagggcaaggagguccucguccucuggggcauccaccaccccuccaccuccgccgaccagcagucccucuaccagaacgccgacgccuacgucuucgucggcaccucccgcuacuccaagaaguucaagcccgagaucgccauccgccccaagguccgcgaccaggagggccgcaugaacuacuacuggacccucgucgagcccggcgacaagaucaccuucgaggccaccggcaaccucgucgucccccgcuacgccuucgccauggagcgcaacgccggcuccggcaucaucaucuccgacacccccguccacaacugcaacaccaccugccagacccccaagggcgccaucaacaccucccuccccuuccagaacauccaccccaucaccaucggcaagugccccaaguacgucaaguccaccaagcuccgccucgccaccggccuccgcaacguccccuccauccagucccgcggccucuucggcgccaucgccggcuucaucgagggcggcuggaccggcauggucgacggcugguacggcuaccaccaccagaacgagcagggcuccggcuacgccgccgaccucaaguccacccagaacgccaucgacgagaucaccaacaaggucaacuccgucaucgagaagaugaacacccaguucaccgccgucggcaaggaguucaaccaccucgagaagcgcaucgagaaccucaacaagaaggucgacgacggcuuccucgacaucuggaccuacaacgccgagcuccucguccuccucgagaacgagcgcacccucgacuaccacgacuccaacgucaagaaccucuacgagaagguccgcucccagcucaagaacaacgccaaggagaucggcaacggcugcuucgaguucuaccacaagugcgacaacaccugcauggaguccgucaagaacggcaccuacgacuaccccaaguacuccgaggaggccaagcucaaccgcgaggagaucgacggcgucaagcucgaguccacccgcaucuaccagauccucgccaucuacuccaccgucgccuccucccucguccucgucgucucccucggcgccaucuccuucuggaugugcuccaacggcucccuccagugccgcaucugcaucuga

SEQ ID NO: 99275 - RNA, 1701 nt, Artificial Sequence; identical to SEQ ID NO: 98705
  derived and/or modified CDS sequence (opt2) from hemagglutinin__InfluenzaA__ACV04328

SEQ ID NO: 99276 - RNA, 1701 nt, Artificial Sequence; identical to SEQ ID NO: 98705
  derived and/or modified CDS sequence (opt2) from hemagglutinin__InfluenzaA__ACV04338

SEQ ID NO: 99277 - RNA, 1701 nt, Artificial Sequence; identical to SEQ ID NO: 98947
  derived and/or modified CDS sequence (opt2) from hemagglutinin__InfluenzaA__ACV04358

SEQ ID NO: 99278 - RNA, 1701 nt, Artificial Sequence
  derived and/or modified CDS sequence (opt2) from hemagglutinin__InfluenzaA__ACV04368
augaaggccauccucgucguccuccucuacaccuucgccaccgccaacgccgacacccucugcaucggcuaccacgccaacaacuccaccgacaccgucgacaccguccucgagaagaacgucaccgucacccacuccgucaaccuccucgaggacaagcacaacggcaagcucugccagcuccgcggcgucgccccccuccaccucggcaagugcaacaucgccggcuggauccucggcaaccccgagugcgagucccucuccaccgccuccuccugguccuacaucgucgagaccuccuccuccgacaacggcaccugcuaccccggcgacuucaucgacuacgaggagcuccgcgagcagcucuccuccgucuccuccuucgagcgcuucgagaucuuccccaagaccuccuccuggcccaaccacgacuccaacaagggcgucaccgccgccugcccccacgccggcgccaaguccuucuacaagaaccucaucuggcucgucaagaagggcaacuccuaccccaagcucuccaaguccuacaucaacgacaagggcaaggagguccucguccucuggggcauccaccaccccuccaccuccgccgaccagcagucccucuaccagaacgccgacgccuacgucuucgucggcaccucccgcuacuccaagaaguucaagcccgagaucgccauccgccccaagguccgcgaccaggagggccgcaugaacuacuacuggacccucgucgagcccggcgacaagaucaccuucgaggccaccggcaaccucgucgucccccgcuacgccuucgccauggagcgcaacgccggcuccggcaucaucaucuccgacacccccguccacgacugcaacaccaccugccagacccccaagggcgccaucaacaccucccuccccuuccagaacauccaccccaucaccaucggcaagugccccaaguacgucaaguccaccaagcuccgccucgccaccggccuccgcaacguccccuccauccagucccgcggccucuucggcgccaucgccggcuucaucgagggcggcuggaccggcauggucgacggcugguacggcuaccaccaccagaacgagcagggcuccggcuacgccgccgaccucaaguccacccagaacgccaucgacgagaucaccaacaaggucaacuccgucaucgagaagaugaacacccaguucaccgccgucggcaaggaguucaaccaccucgagaagcgcaucgagaaccucaacaagaaggucgacgacggcuuccucgacaucuggaccuacaacgccgagcuccucguccuccucgagaacgagcgcacccucgacuaccacgacuccaacgucaagaaccucuacgagaagguccgcucccagcucaagaacaacgccaaggagaucggcaacggcugcuucgaguucuaccacaagugcgacaacaccugcauggaguccgucaagaacggcaccuacgacuaccccaaguacuccgaggaggccaagcucaaccgcgaggagaucgacggcgucaagcucgaguccacccgcaucuaccagauccucgccaucuacuccaccgucgccuccucccucguccucgucgucucccucggcgccaucuccuucuggaugugcuccaacggcucccuccagugccgcaucugcaucuga

SEQ ID NO: 99279 - RNA, 1701 nt, Artificial Sequence
  derived and/or modified CDS sequence (opt2) from hemagglutinin__InfluenzaA__ACV04378
augaaggccauccucgucguccuccucuacaccuucgccaccgccaacgccgacacccucugcaucggcuaccacgccaacaacuccaccgacaccgucgacaccguccucgagaagaacgucaccgucacccacuccgucaaccuccucgaggacaagcacaacggcaagcucugcaagcuccgcggcgucgccccccuccaccucggcaagugcaacaucgccggcuggauccucggcaaccccgagugcgagucccucuccaccgccuccuccugguccuacaucgucgagaccuccuccuccgacaacggcaccugcuaccccggcgacuucaucgacuacgaggagcuccgcgagcagcucuccuccgucuccuccuucgagcgcuucgagaucuuccccaagaccuccuccuggcccaaccacgacuccaacaagggcgucaccgccgccugcccccacgccggcgccaaguccuucuacaagaaccucaucuggcucgucaagaagggcaacuccuaccccaagcucuccaaguccuacaucaacgacaagggcaaggagguccucguccucuggggcauccaccaccccuccaccuccgccgaccagcagucccucuaccagaacgccgacgccuacgucuucgucggcaccucccgcuacuccaagaaguucaagcccgagaucgccauccgccccaagguccgcgaccaggagggccgcaugaacuacuacuggacccucgucgagcccggcgacaagaucaccuucgaggccaccggcaaccucgucgucccccgcuacgccuucgccauggagcgcaacgccggcuccggcaucaucaucuccgacacccccguccacgacugcaacaccaccugccagacccccaagggcgccaucaacaccucccuccccuuccagaacauccaccccaucaccaucggcaagugccccaaguacgucaaguccaccaagcuccgccucgccaccggccuccgcaacauccccuccauccagucccgcggccucuucggcgccaucgccggcuucaucgagggcggcuggaccggcauggucgacggcugguacggcuaccaccaccagaacgagcagggcuccggcuacgccgccgaccucaaguccacccagaacgccaucgacgagaucaccaacaaggucaacuccgucaucgagaagaugaacacccaguucaccgccgucggcaaggaguucaaccaccucgagaagcgcaucgagaaccucaacaagaaggucgacgacggcuuccucgacaucuggaccuacaacgccgagcuccucguccuccucgagaacgagcgcacccucgacuaccacgacuccaacgucaagaaccucuacgagaagguccgcucccagcucaagaacaacgccaaggagaucggcaacggcugcuucgaguucuaccacaagugcgacaacaccugcauggaguccgucaagaacggcaccuacgacuaccccaaguacuccgaggaggccaagcucaaccgcgaggagaucgacggcgucaagcucgaguccacccgcaucuaccagauccucgccaucuacuccaccgucgccuccucccucguccucaucgucucccucggcgccaucuccuucuggaugugcuccaacggcucccuccagugccgcaucugcaucuga

SEQ ID NO: 99280 - RNA, 1701 nt, Artificial Sequence; identical to SEQ ID NO: 98947
  derived and/or modified CDS sequence (opt2) from hemagglutinin__InfluenzaA__ACV04388

SEQ ID NO: 99281 - RNA, 1701 nt, Artificial Sequence; identical to SEQ ID NO: 98705
  derived and/or modified CDS sequence (opt2) from hemagglutinin__InfluenzaA__ACV04398

SEQ ID NO: 99282 - RNA, 1701 nt, Artificial Sequence; identical to SEQ ID NO: 98949
  derived and/or modified CDS sequence (opt2) from hemagglutinin__InfluenzaA__ACV04408

SEQ ID NO: 99283 - RNA, 1701 nt, Artificial Sequence; identical to SEQ ID NO: 98705
  derived and/or modified CDS sequence (opt2) from hemagglutinin__InfluenzaA__ACV04489

SEQ ID NO: 99284 - RNA, 1701 nt, Artificial Sequence; identical to SEQ ID NO: 98705
  derived and/or modified CDS sequence (opt2) from hemagglutinin__InfluenzaA__ACV04499

SEQ ID NO: 99285 - RNA, 1701 nt, Artificial Sequence; identical to SEQ ID NO: 98885
  derived and/or modified CDS sequence (opt2) from hemagglutinin__InfluenzaA__ACV04509

SEQ ID NO: 99286 - RNA, 1701 nt, Artificial Sequence; identical to SEQ ID NO: 98705
  derived and/or modified CDS sequence (opt2) from hemagglutinin__InfluenzaA__ACV04519

SEQ ID NO: 99287 - RNA, 1701 nt, Artificial Sequence; identical to SEQ ID NO: 98705
  derived and/or modified CDS sequence (opt2) from hemagglutinin__InfluenzaA__ACV04529

SEQ ID NO: 99288 - RNA, 1701 nt, Artificial Sequence; identical to SEQ ID NO: 98705
  derived and/or modified CDS sequence (opt2) from hemagglutinin__InfluenzaA__ACV04549

SEQ ID NO: 99289 - RNA, 1701 nt, Artificial Sequence; identical to SEQ ID NO: 98705
  derived and/or modified CDS sequence (opt2) from hemagglutinin__InfluenzaA__ACV04559

SEQ ID NO: 99290 - RNA, 1701 nt, Artificial Sequence; identical to SEQ ID NO: 98705
  derived and/or modified CDS sequence (opt2) from hemagglutinin__InfluenzaA__ACV04579

SEQ ID NO: 99291 - RNA, 1701 nt, Artificial Sequence
  derived and/or modified CDS sequence (opt2) from hemagglutinin__InfluenzaA__ACV04751
auggaggccauccucgucgucaugcucuacaccuucgccaccgccaacgccgacacccucugcaucggcuaccacgccaacaacuccaccgacaccgucgacaccguccucgagaagaacgucaccgucacccacuccgucaaccuccucgaggacaagcacaacggcaagcucugcaagcuccgcggcgucgccccccuccgccucggcaagugcaacaucgccggcuggauccucggcaaccccgagugcgagucccucuccaccgccuccuccugguccuacaucgucgagaccuccuccuccgacaacggcaccugcuaccccggcgacuucaucgacuacgaggagcuccgcgagcagcucuccuccgucuccuccuucgagcgcuucgagaucuuccccaagaccuccuccuggcccaaccacgacuccaacaagggcgucaccgccgccugcccccacgccggcgccaaguccuucuacaagaaccucaucuggcucgucaagaagggcaacuccuaccccaagcucuccaaguccuacaucaacgacaagggcaaggagguccucguccucuggggcauccaccaccccuccaccuccgccgaccagcagucccucuaccagaacgccgacgccuacgucuucgucggcaccucccgcuacuccaagaaguucaagcccgagaucgccauccgccccaagguccgcgaccaggagggccgcaugaacuacuacuggacccucgucgagcccggcgacaagaucaccuucgaggccaccggcaaccucgucgucccccgcuacgccuucgccauggagcgcaacgccggcuccggcaucaucaucuccgacacccccguccacaacugcaacaccaccugccagacccccaagggcgccaucaacaccucccuccccuuccagaacauccaccccaucaccaucggcaagugccccaaguacgucaaguccaccaagcuccgccucgccaccggccuccgcaacguccccuccauccagucccgcggccucuucggcgccaucgccggcuucaucgagggcggcuggaccggcauggucgacggcugguacggcuaccaccaccagaacgagcagggcuccggcuacgccgccgaccucaaguccacccagaacgccaucgacgagaucaccaacaaggucaacuccgucaucgagaagaugaacacccaguucaccgccgucggcaaggaguucaaccaccucgagaagcgcaucgagaaccucaacaagaaggucgacgacggcuuccucgacaucuggaccuacaacgccgagcuccucguccuccucgagaacgagcgcacccucgacuaccacgacuccaacgucaagaaccucuacgagaagguccgcucccagcucaagaacaacaccaaggagaucggcaacggcugcuucgaguucuaccacaagugcgacaacaccugcauggaguccgucaagaacggcaccuacgacuaccccaaguacuccgaggaggccaagcucaaccgcgaggagaucgacggcgucaagcucgaguccacccgcaucuaccagauccucgccaucuacuccaccgucgccuccucccucguccucgucgucucccucggcgccaucuccuucuggaugugcuccaacggcucccuccagugccgcaucugcaucuga

SEQ ID NO: 99292 - RNA, 1701 nt, Artificial Sequence
  derived and/or modified CDS sequence (opt2) from hemagglutinin__InfluenzaA__ACV04752
auggaggccauccucgucguccuccucuacaccuucgccaccgccaacgccgacacccucugcaucggcuaccacgccaacaacuccaccgacaccgucgacaccguccucgagaagaacgucaccgucacccacuccgucaacauccucgaggacaagcacaacggcaagcucugcaagcuccgcggcgucgccccccuccaccucggcaagugcaacaucgccggcuggauccucgagaaccccgagugcgagucccucuccaccgccuccuccugguccuacaucgucgagaccuccuccuccgacaacggcaccugcuaccccggcgacuucaucgacuacgaggagcuccgcgagcagcucuccuccgucuccuccuucgagcgcuucgagaucuuccccaagaccuccuccuggcccaaccacgacuccaacaagggcgucaccgccgccugcccccacgccggcgccaaguccuucuacaagaaccucaucuggcucgucaagaagggcaacuccuaccccaagcucuccaaguccuacaucaacgacaagggcaaggagguccucguccucuggggcauccaccaccccuccaccuccgccgaccagcagucccucuaccagaacgccgacgccuacgucuucgucggcuccucccgcuacuccaagaaguucaagcccgagaucgccauccgccccaagguccgcgaccaggagggccgcaugaacuacuacuggacccucgucgagcccggcgacaagaucaccuucgaggccaccggcaaccucgucgucccccgcuacgccuucgccauggagcgcaacgccggcuccggcaucaucaucuccgacacccccguccacgacugcaacaccaccugccagacccccaagggcgccaucaacaccucccuccccuuccacaacauccaccccaucaccaucggcaagugccccaaguacgucaaguccaccaagcuccgccucgccaccggccuccgcaacguccccuccauccagucccgcggccucuucggcgccaucgccggcuucaucgagggcggcuggaccggcauggucgacggcugguacggcuaccaccaccagaacgagcagggcuccggcuacgccgccgaccucaaguccacccagaacgccaucgacgagaucaccaacaaggucaacuccgucaucgagaagaugaacacccaguucaccgccgucggcaaggaguucaaccaccucgagaagcgcaucgagaaccucaacaagaaggucgacgacggcuuccucgacaucuggaccuacaacgccgagcuccucguccuccucgagaacgagcgcacccucgacuaccacgacuccaacgucaagaaccucuacgagaagguccgcucccagcucaagaacaacgccaaggagaucggcaacggcugcuucgaguucuaccacaagugcgacaacaccugcauggaguccgucaagaacggcaccuacgacuaccccaaguacuccgaggaggccaagcucaaccgcgaggagaucgacggcgucaagcucgaguccacccgcaucuaccagauccucgccaucuacuccaccgucgccuccucccucguccucgucgucucccucggcgccaucuccuucuggaugugcuccaacggcucccuccagugccgcaucugcaucuga

SEQ ID NO: 99293 - RNA, 1701 nt, Artificial Sequence
  derived and/or modified CDS sequence (opt2) from hemagglutinin__InfluenzaA__ACV04753
auggaggccauccucgucguccuccucuacaccuucgccaccgccaacgccgacacccucugcaucggcuaccacgccaacaacuccaccgacaccgucgacaccguccucgagaagaacgucaccgucacccacuccgucaaccuccucgaggacaagcacaacggcaagcucugcaagcuccgcggcgucgccccccuccaccucggcaagugcaacaucgccggcuggauccucggcaaccccgagugcgagucccucuccaccgccuccuccugguccuacaucgucgagaccuccuccuccgacaacggcaccugcuaccccggcgacuucaucgacuacgaggagcuccgcgagcagcucuccuccgucuccuccuucgagcgcuucgagaucuuccccaagaccuccuccuggcccaaccacgacuccaacaagggcgucaccgccgccugcccccacgccggcgccaaguccuucuacaagaaccucaucuggcucgucaagaagggcaacuccuaccccaagcucuccaaguccuacaucaacgacaagggcaaggagguccucguccucuggggcauccaccaccccuccaccuccgccgaccagcagucccucuaccagaacgccgacgccuacgucuucgucggcaccucccgcuacuccaagaaguucaagcccgagaucgccauccgccccaagguccgcgaccgcgagggccgcaugaacuacuacuggacccucgucgagcccggcgacaagaucaccuucgaggccaccggcaaccucgucgucccccgcuacgccuucgccauggagcgcaacgccggcuccggcaucaucaucuccgacacccccguccacgacugcaacaccaccugccagacccccaagggcgccaucaacaccucccuccccuuccagaacauccaccccaucaccaucggcaagugccccaaguacgucaaguccaccaagcuccgccucgccaccggccuccgcaacguccccuccauccagucccgcggccucuucggcgccaucgccggcuucaucgagggcggcuggaccggcauggucgacggcugguacggcuaccaccaccagaacgagcagggcuccggcuacgccgccgaccucaaguccacccagaacgccaucgacgagaucaccaacaaggucaacuccgucaucgagaagaugaacacccaguucaccgccgucggcaaggaguucaaccaccucgagaagcgcaucgagaaccucaacaagaaggucgacgacggcuuccucgacaucuggaccuacaacgccgagcuccucguccuccucgagaacgagcgcacccucgacuaccacgacuccaacgucaagaaccucuacgagaagguccgcucccagcucaagaacaacgccaaggagaucggcaacggcugcuucgaguucuaccacaagugcgacaacaccugcauggaguccgucaagaacggcaccuacgacuaccccaaguacuccgaggaggccaagcucaaccgcgaggagaucgacggcgucaagcucgaguccacccgcaucuaccagauccucgccaucuacuccaccgucgccuccucccucguccucgucgucucccucggcgccaucuccuucuggaugugcuccaacggcucccuccagugccgcaucugcaucuga

SEQ ID NO: 99294 - RNA, 1701 nt, Artificial Sequence
  derived and/or modified CDS sequence (opt2) from hemagglutinin__InfluenzaA__ACV04754
auggaggccauccucgucguccuccucuacaccuucgccaccgccaacgccgacacccucugcaucggcuaccacgccaacaacuccaccgacaccgucgacaccguccucgagaagaacguccccgucacccacuccgucaaccuccucaaggacaagcacaacggcaagcucugcaagcuccgcggcgucgccccccuccaccucggcaagugcaacaucgccggcuggauccucggcaaccccgagugcgagucccucuccaccgccuccuccugguccuacaucgucgagaccuccuccuccgacaacggcaccugcuaccccggcgacuucaucgacuacgaggagcuccgcgagcagcucuccuccgucuccuccuucgagcgcuucgagaucuuccccaagaccuccuccuggcccaaccacgaguccaacaagggcgucaccgccgccugcccccacgccggcgccaaguccuucuacaagaaccucaucuggcucgucaagaagggcaacuccuaccccaagcucuccaaguccuacaucaacgacaagggcaaggagguccucguccucuggggcauccaccaccccuccaccuccgccgaccagcagucccucuaccagaacgccgacgccuacgucuucgucggcaccucccgcuacuccaagaaguucaagcccgagaucgccauccgccccaagguccgcgaccaggagggccgcaugaacuacuacuggacccucgucgagcccggcgacaagaucaccuucgaggccaccggcaaccucgucgucccccgcuacgccuucgccauggagcgcaacgccggcuccggcaucaucaucuccgacacccccguccacgacugcaacaccaccugccagacccccaagggcgccaucaacaccucccuccccuuccagaacauccaccccaucaccaucggcaagugccccaaguacgucaaguccaccaagcuccgccucgccaccggccuccgcaacguccccuccauccagucccgcggcgucuucggcgccaucgccggcuucaucgagggcggcuggaccggcauggucgacggcugguacggcuaccaccaccagaacgagcagggcuccggcuacgccgccgaccucaaguccacccagaacgccaucgacgagaucaccaacaaggucaacuccgucaucgagaagaugaacacccaguucaccgccgucggcaaggaguucaaccaccucgagaagcgcaucgagaaccucaacaagaaggucgacgacggcuuccucgacaucuggaccuacaacgccgagcuccucguccuccucgagaacgagcgcacccucgacuaccacgacuccaacgucaagaaccucuacgagaagguccgcucccagcucaagaacaacgccaaggagaucggcaacggcugcuucgaguucuaccacaagugcgacaacaccugcauggaguccgucaagaacggcaccuacgacuaccccaaguacuccgaggaggccaagcucaaccgcgaggagaucgacggcgucaagcucgaguccacccgcaucuaccagauccucgccaucuacuccaccgucgccuccucccucguccucgucgucucccucggcgccaucuccuucuggaugugcuccaacggcucccuccagugccgcaucugcaucuga

SEQ ID NO: 99295 - RNA, 1701 nt, Artificial Sequence; identical to SEQ ID NO: 99190
  derived and/or modified CDS sequence (opt2) from hemagglutinin__InfluenzaA__ACV04755

SEQ ID NO: 99296 - RNA, 1701 nt, Artificial Sequence; identical to SEQ ID NO: 98885
  derived and/or modified CDS sequence (opt2) from hemagglutinin__InfluenzaA__ACV33084

SEQ ID NO: 99297 - RNA, 1701 nt, Artificial Sequence; identical to SEQ ID NO: 98705
  derived and/or modified CDS sequence (opt2) from hemagglutinin__InfluenzaA__ACV33094

SEQ ID NO: 99298 - RNA, 1701 nt, Artificial Sequence; identical to SEQ ID NO: 98705
  derived and/or modified CDS sequence (opt2) from hemagglutinin__InfluenzaA__ACV33104

SEQ ID NO: 99299 - RNA, 1701 nt, Artificial Sequence; identical to SEQ ID NO: 98705
  derived and/or modified CDS sequence (opt2) from hemagglutinin__InfluenzaA__ACV33114

SEQ ID NO: 99300 - RNA, 1701 nt, Artificial Sequence; identical to SEQ ID NO: 98705
  derived and/or modified CDS sequence (opt2) from hemagglutinin__InfluenzaA__ACV33124

SEQ ID NO: 99301 - RNA, 1701 nt, Artificial Sequence; identical to SEQ ID NO: 98705
  derived and/or modified CDS sequence (opt2) from hemagglutinin__InfluenzaA__ACV33134

SEQ ID NO: 99302 - RNA, 1701 nt, Artificial Sequence; identical to SEQ ID NO: 99267
  derived and/or modified CDS sequence (opt2) from hemagglutinin__InfluenzaA__ACV33144

SEQ ID NO: 99303 - RNA, 1701 nt, Artificial Sequence; identical to SEQ ID NO: 98705
  derived and/or modified CDS sequence (opt2) from hemagglutinin__InfluenzaA__ACV33154

SEQ ID NO: 99304 - RNA, 1701 nt, Artificial Sequence; identical to SEQ ID NO: 98705
  derived and/or modified CDS sequence (opt2) from hemagglutinin__InfluenzaA__ACV33164

SEQ ID NO: 99305 - RNA, 1701 nt, Artificial Sequence; identical to SEQ ID NO: 98705
  derived and/or modified CDS sequence (opt2) from hemagglutinin__InfluenzaA__ACV33174

SEQ ID NO: 99306 - RNA, 1701 nt, Artificial Sequence; identical to SEQ ID NO: 98692
  derived and/or modified CDS sequence (opt2) from hemagglutinin__InfluenzaA__ACV41981

SEQ ID NO: 99307 - RNA, 1701 nt, Artificial Sequence; identical to SEQ ID NO: 98731
  derived and/or modified CDS sequence (opt2) from hemagglutinin__InfluenzaA__ACV41991

SEQ ID NO: 99308 - RNA, 1701 nt, Artificial Sequence; identical to SEQ ID NO: 98731
  derived and/or modified CDS sequence (opt2) from hemagglutinin__InfluenzaA__ACV42001

SEQ ID NO: 99309 - RNA, 1701 nt, Artificial Sequence; identical to SEQ ID NO: 98705
  derived and/or modified CDS sequence (opt2) from hemagglutinin__InfluenzaA__ACV42008

SEQ ID NO: 99310 - RNA, 1701 nt, Artificial Sequence; identical to SEQ ID NO: 98705
  derived and/or modified CDS sequence (opt2) from hemagglutinin__InfluenzaA__ACV42018

SEQ ID NO: 99311 - RNA, 1701 nt, Artificial Sequence; identical to SEQ ID NO: 98352
  derived and/or modified CDS sequence (opt2) from hemagglutinin__InfluenzaA__ACV49501

SEQ ID NO: 99312 - RNA, 1701 nt, Artificial Sequence
  derived and/or modified CDS sequence (opt2) from hemagglutinin__InfluenzaA__ACV49512
augaagaccaucaucgcccucuccuacaucuucugccucgcccucggccaggaccuccccggcaacgacaacuccaccgccacccucugccucggccaccacgccguccccaacggcacccucgucaagaccaucaccgacgaccagaucgaggucaccaacgccaccgagcucguccaguccuccuccaccggcaagaucugcaacaacccccaccgcauccucgacggcaucgacugcacccucaucgacgcccuccucggcgacccccacugcgacgucuuccagaacgagaccugggaccucuucgucgagcgcuccaaggccuucuccaacugcuaccccuacgacguccccgacuacgccucccuccgcucccucgucgccuccuccggcacccucgaguucaucaccgagggcuucaccuggaccggcgucacccagaacggcggcuccaacgccugcaagcgcggccccggcuccggcuucuucucccgccucaacuggcucaccaaguccggcuccaccuaccccguccucaacgucaccaugcccaacaacgacaacuucgacaagcucuacaucuggggcguccaccaccccuccaccaaccaggagcagaccucccucuacguccaggccuccggccgcgucaccgucuccacccgccgcucccagcagaccaucauccccaacaucgagucccgccccuggguccgcggccucuccucccgcaucuccaucuacuggaccaucgucaagcccggcgacguccucgucaucaacuccaacggcaaccucaucgccccccgcggcuacuucaagaugcgcaccggcaaguccuccaucaugcgcuccgacgcccccaucgacaccugcaucuccgagugcaucacccccaacggcuccauccccaacgacaagcccuuccagaacgucaacaagaucaccuacggcgccugccccaaguacgucaagcagaacacccucaagcucgccaccggcaugcgcaacguccccgagaagcagacccgcggccucuucggcgccaucgccggcuucaucgagaacggcugggagggcaugaucgacggcugguacggcuuccgccaccagaacuccgagggcaccggccaggccgccgaccucaaguccacccaggccgccaucgaccagaucaacggcaagcucaaccgcgucaucgagaagaccaacgagaaguuccaccagaucgagaaggaguucuccgaggucgagggccgcauccaggaccucgagaaguacgucgaggacaccaagaucgaccucugguccuacaacgccgagcuccucgucgcccucgagaaccagcacaccaucgaccucaccgacuccgagaugaacaagcucuucgagaagacccgccgccagcuccgcgagaacgccgaggacaugggcaacggcugcuucaagaucuaccacaagugcgacaacgccugcaucgaguccauccgcaacggcaccuacgaccacgacgucuaccgcgacgaggcccucaacaaccgcuuccagaucaaggacgucgagcucaaguccggcuacaaggacuggauccucuggaucuccuucgccaucuccugcuuccuccucugcgucguccuccucggcuucaucaugugggccugccagcgcggcaacauccgcugcaacaucugcaucuga

SEQ ID NO: 99313 - RNA, 1701 nt, Artificial Sequence; identical to SEQ ID NO: 98365
  derived and/or modified CDS sequence (opt2) from hemagglutinin__InfluenzaA__ACV49523

SEQ ID NO: 99314 - RNA, 1698 nt, Artificial Sequence
  derived and/or modified CDS sequence (opt2) from hemagglutinin__InfluenzaA__ACV49545
augaaggccaaccuccucguccuccucugcgcccucgccgccgccgacgccgacaccaucugcaucggcuaccacgccaacaacuccaccgacaccgucgacaccguccucgagaagaacgucaccgucacccacuccgucaaccuccucgaggacucccacaacggcaagcucugccgccucaagggcaucgccccccuccagcucggcaagugcaacaucgccggcuggcuccucggcaaccccgagugcgacccccuccuccccguccgcuccugguccuacaucgucgagacccccaacuccgagaacggcaucugcuaccccggcgacuucaucgacuacgaggagcuccgcgagcagcucuccuccgucuccuccuucgagcgcuucgagaucuuccccaaggaguccuccuggcccaaccacaacaccaacggcgucaccgccgccugcucccacgagggcaaguccuccuucuaccgcaaccuccucuggcucaccgagaaggagggcuccuaccccaagcucaagaacuccuacgucaacaagaagggcaaggagguccucguccucuggggcauccaccacccccccaacuccaaggagcagcagaaccucuaccagaacgagaacgccuacgucuccgucgucaccuccaacuacaaccgccgcuucacccccgagaucgccgagcgccccaagguccgcgaccaggccggccgcaugaacuacuacuggacccuccucaagcccggcgacaccaucaucuucgaggccaacggcaaccucaucgcccccauguacgccuucgcccucucccgcggcuucggcuccggcaucaucaccuccaacgccuccaugcacgagugcaacaccaagugccagaccccccucggcgccaucaacuccucccuccccuaccagaacauccaccccgucaccaucggcgagugccccaaguacguccgcuccgccaagcuccgcauggucaccggccuccgcaacauccccuccauccagucccgcggccucuucggcgccaucgccggcuucaucgagggcggcuggaccggcaugaucgacggcugguacggcuaccaccaccagaacgagcagggcuccggcuacgccgccgaccagaaguccacccagaacgccaucaacggcaucaccaacaaggucaacaccgucaucgagaagaugaacauccaguucaccgccgucggcaaggaguucaacaagcucgagaagcgcauggagaaccucaacaagaaggucgacgacggcuuccucgacaucuggaccuacaacgccgagcuccucguccuccucgagaacgagcgcacccucgacuuccacgacuccaacgucaagaaccucuacgagaaggucaagucccagcucaagaacaacgccaaggagaucggcaacggcugcuucgaguucuaccacaagugcgacaacgagugcauggaguccguccgcaacggcaccuacgacuaccccaaguacuccgaggaguccaagcucaaccgcgagaaggucgacggcgucaagcucgaguccaugggcaucuaccagauccucgccaucuacuccaccgucgccuccucccucguccuccucgucucccucggcgccaucuccuucuggaugugcuccaacggcucccuccagugccgcaucugcaucuga

SEQ ID NO: 99315 - RNA, 1701 nt, Artificial Sequence
  derived and/or modified CDS sequence (opt2) from hemagglutinin__InfluenzaA__ACV49556
augaaggcccgccuccucauccuccucugcgcccucgccgccaccgacgccgacaccaucugcaucggcuaccacgccaacaacuccaccgacaccgucgacaccguccucgagaagaacgucaccgucacccacuccgucaaccuccucgaggacucccacaacggcaagcucugccgccucaagggcaucgccccccuccagcucggcaagugcaacaucgccggcuggauccucggcaaccccgagugcgacucccuccuccccgccuccuccugguccuacaucgucgagacccccaacuccaagaacggcaucugcuaccccggcgacuucaucgacuacgaggagcuccgcgagcagcucuccuccgucuccuccuucgagcgcuucgagaucuuccccaaggaguccuccuggcccaagcacuccaccaccaagggcgucaccgccgccugcucccacgccggcaaguccuccuucuaccgcaaccuccucuggcucaccaagaaggaggacuccuaccccaagcucuccaacuccuacgucaacaagaagggcaaggagguccucguccucuggggcguccaccaccccuccuccuccaaggagcagcagacccucuaccagaacgagaacgccuacgucuccgucgucuccuccaacuacaaccgccgcuucauccccgagaucgccgagcgccccgaggucaaggaccaggccggccgcaucaacuacuacuggacccuccucgagcccggcgacaccaucaucuucgaggccaacggcaaccucgucgcccccugguacgccuucgcccucucccgcggcuucggcuccggcaucaucaccuccaacgccuccaugcacgagugcaacaccaagugccagaccccccagggcgccaucaacuccucccuccccuuccagaacauccaccccgucaccaucggcgagugccccaaguacgucaaguccgccaagcuccgcauggucaccggccuccgcaacauccccuccauccagucccgcggccucuucggcgccaucgccggcuucaucgagggcggcuggaccggcaugaucgacggcugguacggcuaccaccaccagaacgagcagggcuccggcuacgccgccgaccagaaguccacccagaacgccaucaacggcaucaccaacaaggucaacuccgucaucgagaagaugaacacccaguucaccgccgucggcaaggaguucaacaaccucgagaagcgcauggagaaccucaacaagaaggucgacgacggcuuccucgacaucuggaccuacaacgccgagcuccucguccuccucgagaacgagcgcacccucgacuuccacgacuccaacgucaagaaccucuacgagaaggucaagauccagcucaagaacaacgccaaggagaucggcaacggcugcuucgaguucuaccacaagugcgacaacgagugcauggaguccguccgcaacggcaccuacgacuaccccaaguacuccaaggaguccaagcucaaccgcgagaagaucgacggcgucaagcucgaguccaugggcgucuaccagauccucgccaucuacuccaccgucgccuccucccucguccuccucgucucccucggcgccaucuccuucuggaugugcuccaacggcucccuccagugccgcaucugcaucuga

SEQ ID NO: 99316 - RNA, 1701 nt, Artificial Sequence
  derived and/or modified CDS sequence (opt2) from hemagglutinin__InfluenzaA__ACV49567
augaaggccaagcuccucauccuccucugcgcccucaccgccaccgacgccgacaccaucugcaucggcuaccacgccaacaacuccaccgacaccgucgacaccguccucgagaagaacgucaccgucacccacuccgucaaccuccucgaggacucccacaacggcaagcucugccgccucaagggcaucgccccccuccagcucggcaagugcaacaucgccggcuggauccucggcaaccccgagugcgagucccuccucuccaagcgcuccugguccuacaucgccgagacccccaacuccgagaacggcgccugcuaccccggcgacuucgccgacuacgaggagcuccgcgagcagcucuccuccgucuccuccuucgagcgcuucgagaucuuccccaaggagcgcuccuggcccaagcacaacaucacccgcggcgucaccgccgccugcucccacgccggcaaguccuccuucuacaagaaccuccucuggcucaccgagaccgacggcuccuaccccaagcucuccaaguccuacgucaacaacaaggagaaggagguccucguccucuggggcguccaccaccccuccaacaucgaggaccagaagacccucuaccgcaaggagaacgccuacgucuccgucgucuccuccaacuacaaccgccgcuucacccccgagaucgccgagcgccccaagguccgcggccaggccggccgcaucaacuacuacuggacccuccucgagcccggcgacaccaucaucuucgaggccaacggcaaccucaucgcccccugguacgccuucgcccucucccgcgacuucggcuccggcaucaucaccuccaacgccuccauggacgagugcgacaccaagugccagaccccccagggcgccaucaacuccucccuccccuuccagaacauccaccccgucaccaucggcgagugccccaaguacgucaaguccaccaagcuccgcauggucaccggccuccgcaacauccccuccauccagucccgcggccucuucggcgccaucgccggcuucaucgagggcggcuggaccggcaugaucgacggcugguacggcuaccaccaccagaacgagcagggcuccggcuacgccgccgaccagaaguccacccagaacgccaucaacuggaucaccaacaaggucaacuccgucaucgagaagaugaacacccaguucaccgccgucggcaaggaguucaacaagcucgagaagcgcauggagaaccucaacaagaaggucgacgacggcuuccucgacaucuggaccuacaacgccgagcuccucguccuccucgagaacgagcgcacccucgacuuccacgacuccaacgucaagaaccucuacgagaaggucaagaaccagcuccgcaacaacgccaaggagaucggcaacggcugcuucgaguucuaccacaagugcaacaacgagugcauggaguccgucaagaacggcaccuacgacuaccccaaguacuccgaggaguccaagcucaaccgcgagaagaucgacggcgucaagcucgaguccaugggcgucuaccagauccucgccaucuacuccaccgucgccuccucccucguccuccucgucucccucggcgccaucuccuucuggaugugcuccaacggcucccuccagugccgcaucugcaucuga

SEQ ID NO: 99317 - RNA, 1689 nt, Artificial Sequence
  derived and/or modified CDS sequence (opt2) from hemagglutinin__InfluenzaA__ACV49578
auggccaucaucuaccucauccuccucuucaccgccguccgcggcgaccagaucugcaucggcuaccacgccaacaacuccaccgagaaggucgacaccauccucgagcgcaacgucaccgucacccacgccaaggacauccucgagaagacccacaacggcaagcucugcaagcucaacggcauccccccccucgagcucggcgacugcuccaucgccggcuggcuccucggcaaccccgagugcgaccgccuccuccgcguccccgagugguccuacaucauggagaaggagaaccccaaguacucccucugcuaccccggcuccuucaacgacuacgaggagcucaagcaccuccucuccuccgucaagcacuucgagaaggucaagauccuccccaaggaccgcuggacccagcacaccaccaccggcggcucccgcgccugcgccgucuccggcaaccccuccuucuuccgcaacauggucuggcucaccaagaagggccccaacuaccccgucgccaagggcuccuacaacaacaccuccggcgagcagaugcucaucaucuggggcguccaccaccccaucgacgaggccgagcagaucgcccucuaccagaaggucggcaccuacgucuccgccuccaccuccacccucaacaagcgcuccacccccgagaucgccgcccgccccgaggucaacggccucggcucccgcauggaguucuccuggacccuccucgacaugugggacaccaucaacuucgaguccaccggcaaccucgucgcccccgaguacggcuucaagaucuccaagcgcggcuccuccggcaucaugaagaccgagggcacccucgagaacugcgagaccaagugccagaccccccucggcgccaucaacaccacccuccccuuccacaacguccacccccucaccaucggcgagugccccaaguacgucaaguccgagaagcucguccucgccaccggccuccgcaacgucccccagaucgagucccgcggccucuucggcgccaucgccggcuucaucgagggcggcuggcagggcauggucgacggcugguacggcuaccaccacuccaacgaccagggcuccggcuacgccgccgacaaggaguccacccagaaggccuucgacggcaucaccaacaaggucaacuccgucaucgagaagaugaacacccaguucgaggccgucggcaaggaguucuccaaccucgagaagcgccucgagaaccucaacaagaagauggaggacggcuuccucgacgucuggaccuacaacgccgagcuccucguccucauggagaacgagcgcacccucgacuuccacgacuccaacgucaagaaccucuacgacaagguccgcaugcagcuccgcgacaacgucaaggagcucggcaacggcugcuucgaguucuaccacaagugcgacgacgagugcauggacuccgucaagaacggcaccuacgacuaccccaaguacgaggaggaguccaagcucaaccgcaacgagaucaagggcgucaagcucuccuccaugggcgucuaccagauccucgccaucuacgccaccgucgccggcucccucucccucgccaucaugauggccggcaucuccuucuggaugugcuccaacggcucccuccagugccgcaucugcaucuga

SEQ ID NO: 99318 - RNA, 1689 nt, Artificial Sequence; identical to SEQ ID NO: 99317
  derived and/or modified CDS sequence (opt2) from hemagglutinin__InfluenzaA__ACV49589

SEQ ID NO: 99319 - RNA, 1689 nt, Artificial Sequence
  derived and/or modified CDS sequence (opt2) from hemagglutinin__InfluenzaA__ACV49600
auggccaucaucuaccucauccuccucuucaccgccguccgcggcgaccagaucugcaucggcuaccacgccaacaacuccaccgagaaggucgacaccauccucgagcgcaacgucaccgucacccacgccaaggacauccucgagaagacccacaacggcaagcucugcaagcucaacggcauccccccccucgagcucggcgacugcuccaucgccggcuggcuccucggcaaccccgagugcgaccgccuccucuccguccccgagugguccuacaucauggagaaggagaacccccgcgacggccucugcuaccccggcuccuucaacgacuacgaggagcucaagcaccuccucuccuccgucaagcacuucgagaaggucaagauccuccccaaggaccgcuggacccagcacaccaccaccggcggcucccgcgccugcgccgucuccggcaaccccuccuucuuccgcaacauggucuggcucaccgagaagggcuccaacuaccccgucgccaagggcuccuacaacaacaccuccggcgagcagaugcucaucaucuggggcguccaccaccccaacgacgagaccgagcagcgcacccucuaccagaacgucggcaccuacgucuccgucggcaccuccacccucaacaagcgcuccacccccgagaucgccacccgccccaaggucaacggccagggcggccgcauggaguucuccuggacccuccucgacaugugggacaccaucaacuucgaguccaccggcaaccucaucgcccccgaguacggcuucaagaucuccaagcgcggcuccuccggcaucaugaagaccgagggcacccucgagaacugcgagaccaagugccagaccccccucggcgccaucaacaccacccuccccuuccacaacguccacccccucaccaucggcgagugccccaaguacgucaaguccgagaagcucguccucgccaccggccuccgcaacgucccccagaucgagucccgcggccucuucggcgccaucgccggcuucaucgagggcggcuggcagggcauggucgacggcugguacggcuaccaccacuccaacgaccagggcuccggcuacgccgccgacaaggaguccacccagaaggccuucgacggcaucaccaacaaggucaacuccgucaucgagaagaugaacacccaguucgaggccgucggcaaggaguucuccaaccucgagcgccgccucgagaaccucaacaagaagauggaggacggcuuccucgacgucuggaccuacaacgccgagcuccucguccucauggagaacgagcgcacccucgacuuccacgacuccaacgucaagaaccucuacgacaagguccgcaugcagcuccgcgacaacgucaaggagcucggcaacggcugcuucgaguucuaccacaagugcgacgacgagugcaugaacuccgucaagaacggcaccuacgacuaccccaaguacgaggaggaguccaagcucaaccgcaacgagaucaagggcgucaagcucuccuccaugggcgucuaccagauccucgccaucuacgccaccgucgccggcucccucucccucgccaucaugauggccggcaucuccuucuggaugugcuccaacggcucccuccagugccgcaucugcaucuga

SEQ ID NO: 99320 - RNA, 1689 nt, Artificial Sequence
  derived and/or modified CDS sequence (opt2) from hemagglutinin__InfluenzaA__ACV49611
auggccaucaucuaccucauccuccucuucaccgccguccgcggcgaccagaucugcaucggcuaccacgccaacaacuccaccgagaaggucgacaccauccucgagcgcaacgucaccgucacccacgccaaggacauccucgagaagacccacaacggcaagcucugcaagcucaacggcauccccccccucgagcucggcgacugcuccaucgccggcuggcuccucggcaaccccgagugcgaccgccuccucuccguccccgagugguccuacaucauggagaaggagaacccccgcgacggccucugcuaccccggcuccuucaacgacuacgaggagcucaagcaccuccucuccuccgucaagcacuucgagaaggucaagauccuccccaaggaccgcuggacccagcacaccaccaccggcggcucccgcgccugcgccgucuccggcaaccccuccuucuuccgcaacauggucuggcucaccgagaagggcuccaacuaccccgucgccaagggcuccuacaacaacaccuccggcgagcagaugcucaucaucuggggcguccaccaccccaacgacgagaccgagcagcgcacccucuaccagaacgucggcaccuacgucuccgucggcaccuccacccucaacaagcgcuccacccccaagaucgccacccgccccaaggucaacggccagggcggccgcauggaguucuccuggacccuccucgacaugugggacaccaucaacuucgaguccaccggcaaccucaucgcccccgaguacggcuucaagaucuccaagcgcggcuccuccggcaucaugaagaccgagggcacccucgagaacugcgagaccaagugccagaccccccucggcgccaucaacaccacccuccccuuccacaacguccacccccucaccaucggcgagugccccaaguacgucaaguccgagaagcucguccucgccaccggccuccgcaacgucccccagaucgagucccgcggccucuucggcgccaucgccggcuucaucgagggcggcuggcagggcauggucgacggcugguacggcuaccaccacuccaacgaccagggcuccggcuacgccgccgacaaggaguccacccagaaggccuucgacggcaucaccaacaaggucaacuccgucaucgagaagaugaacacccaguucgaggccgucggcaaggaguucuccaaccucgagcgccgccucgagaaccucaacaagaaggucgaggacggcuuccucgacgucuggaccuacaacgccgagcuccucguccucauggagaacgagcgcacccucgacuuccacgacuccaacgucaagaaccucuacgacaagguccgcaugcagcuccgcgacaacgucaaggagcucggcaacggcugcuucgaguucuaccacaagugcgacgacgagugcaugaacuccgucaagaacggcaccuacgacuaccccaaguacgaggaggaguccaagcucaaccgcaacgagaucaagggcgucaagcucuccuccaugggcgucuaccagauccucgccaucuacgccaccgucgccggcucccucucccucgccaucaugauggccggcaucuccuucuggaugugcuccaacggcucccuccagugccgcaucugcaucuga

SEQ ID NO: 99321 - RNA, 1701 nt, Artificial Sequence
  derived and/or modified CDS sequence (opt2) from hemagglutinin__InfluenzaA__ACV49633
augaagaccaucaucgcccucuccuacauccucugccucgucuucgcccagaagcuccccggcaacgacaacuccaccgccacccucugccucggccaccacgccguccccaacggcacccucgucaagaccaucaccaacgaccagaucgaggucaccaacgccaccgagcucguccaguccuccuccaccggccgcaucugcgacuccccccaccgcauccucgacggcaagaacugcacccucaucgacgcccuccucggcgacccccacugcgacggcuuccagaacaaggagugggaccucuucgucgagcgcuccaaggccuacuccaacugcuaccccuacgacguccccgacuacgccucccuccgcucccucgucgccuccuccggcacccucgaguucaccaacgagggcuucaacuggaccggcgucgcccaggacggcaccuccuacgccugcaagcgcggcuccgucaaguccuucuucucccgccucaacuggcuccacaagcucgaguacaaguaccccgcccucaacgucaccaugcccaacaacgacaaguucgacaagcucuacaucuggggcguccaccaccccuccaccgacuccguccagaccucccucuacguccaggccuccggccgcgucaccgucuccaccaagcgcucccagcagaccgucauccccaacaucggcucccgccccuggguccgcggcaucuccucccgcaucuccaucuacuggaccaucgucaagcccggcgacauccuccucaucaacuccaccggcaaccucaucgccccccgcggcuacuucaagauccgcuccggcaaguccuccaucaugcgcuccgacgcccccaucggcaacugcaacuccgagugcaucacccccaacggcuccauccccaacgacaagcccuuccagaacgucaaccgcaucaccuacggcgccugcccccgcuacgucaagcagaacacccucaagcucgccaccggcaugcgcaacguccccgagaagcagacccgcggcaucuucggcgccaucgccggcuucaucgagaacggcugggagggcauggucgacggcugguacggcuuccgccaccagaacuccgagggcaccggccaggccgccgaccucaaguccacccaggccgccaucaaccagaucaacggcaagcucaaccgccucaucgagaagaccaacgagaaguucccccagaucgagaaggaguucuccgaggucgagggccgcauccaggaccucgagaaguacgucgaggacaccaagaucgaccucugguccuacaacgccgagcuccucgucgcccucgagaaccagcacaccaucgaccucaccgacuccgagaugaacaagcucuucgagcgcacccgcaagcagcuccgcgagaacgccgaggacaugggcaacggcugcuucaagaucuaccacaagugcgacaacgccugcaucggcuccauccgcaacggcaccuacgaccacgacgucuaccgcgacgaggcccucaacaaccgcuuccagaucaagggcgucgagcucaaguccggcuacaaggacuggauccucuggaucuccuucgccaucuccugcuuccuccucugcgucguccuccucggcuucaucaugugggccugccagaagggcaacauccgcugcaacaucugcaucuga

SEQ ID NO: 99322 - RNA, 1701 nt, Artificial Sequence; identical to SEQ ID NO: 98392
  derived and/or modified CDS sequence (opt2) from hemagglutinin__InfluenzaA__ACV49644

SEQ ID NO: 99323 - RNA, 1698 nt, Artificial Sequence; identical to SEQ ID NO: 99211
  derived and/or modified CDS sequence (opt2) from hemagglutinin__InfluenzaA__ACV49676

SEQ ID NO: 99324 - RNA, 1701 nt, Artificial Sequence; identical to SEQ ID NO: 98692
  derived and/or modified CDS sequence (opt2) from hemagglutinin__InfluenzaA__ACV53450

SEQ ID NO: 99325 - RNA, 1701 nt, Artificial Sequence; identical to SEQ ID NO: 98692
  derived and/or modified CDS sequence (opt2) from hemagglutinin__InfluenzaA__ACV53460

SEQ ID NO: 99326 - RNA, 1701 nt, Artificial Sequence; identical to SEQ ID NO: 98692
  derived and/or modified CDS sequence (opt2) from hemagglutinin__InfluenzaA__ACV53480

SEQ ID NO: 99327 - RNA, 1701 nt, Artificial Sequence
  derived and/or modified CDS sequence (opt2) from hemagglutinin__InfluenzaA__ACV53490
auggaggccauccucgucguccuccucuacaccuucgccaccgccaacgccgacacccucugcaucggcuaccacgccaacaacuccaccgacaccgucgacaccguccucgagaagaacgucaccgucacccacuccgucaaccuccucgaggacaagcacaacggcaagcucugcaagcuccgcggcgucgccccccuccaccucggcaagugcgacaucgccggcuggauccucggcaaccccgagugcgagucccucuccaccgccuccuccugguccuacaucgucgagaccuccuccuccgacaacggcaccugcuaccccggcgacuucaucgacuacgaggagcuccgcgagcagcucuccuccgucuccuccuucgagcgcuucgagaucuuccccaagaccuccuccuggcccaaccacgacuccaacaagggcgucaccgccgccugcccccacgccggcgccaaguccuucuacaagaaccucaucuggcucgucaagaagggcaacuccuaccccaagcucuccaaguccuacaucaacgacaagggcaaggagguccucguccucuggggcauccaccaccccuccaccuccgccgaccagcagucccucuaccagaacgccgacgccuacgucuucgucggcuccucccgcuacuccaagaaguucaagcccgagaucgccauccgccccaagguccgcgaccaggagggccgcaugaacuacuacuggacccucgucgagcccggcgacaagaucaccuucgaggccaccggcaaccucgucgucccccgcuacgccuucgccauggagcgcaacgccggcuccggcaucaucaucuccgacacccccguccacgacugcaacaccaccugccagacccccaagggcgccaucaacaccucccuccccuuccacaacauccaccccaucaccaucggcaagugccccaaguacgucaaguccaccaagcuccgccucgccaccggccuccgcaacguccccuccauccagucccgcggccucuucggcgccaucgccggcuucaucgagggcggcuggaccggcauggucgacggcugguacggcuaccaccaccagaacgagcagggcuccggcuacgccgccgaccucaaguccacccagaacgccaucgacgagaucaccaacaaggucaacuccgucaucgagaagaugaacacccaguucaccgccgucggcaaggaguucaaccaccucgagacccgcaucgagaaccucaacaagaaggucgacgacggcuuccucgacaucuggaccuacaacgccgagcuccucguccuccucgagaacgagcgcacccucgacuaccacgacuccaacgucaagaaccucuacgagaagguccgcucccagcucaagaacaacgccaaggagaucggcaacggcugcuucgaguucuaccacaagugcgacaacaccugcauggaguccgucaagaacggcaccuacgacuaccccaaguacuccgaggaggccaagcucaaccgcgaggagaucgacggcgucaagcucgaguccacccgcaucuaccagauccucgccaucuacuccaccgucgccuccucccucguccucgucgucucccucggcgccaucuccuucuggaugugcuccaacggcucccuccagugccgcaucugcaucuga

SEQ ID NO: 99328 - RNA, 1701 nt, Artificial Sequence
  derived and/or modified CDS sequence (opt2) from hemagglutinin__InfluenzaA__ACV53500
auggaggccauccucgucguccuccucuacaccuucgccaccgccaacgccgacacccucugcaucggcuaccacgccaacaacuccaccgacaccgucgacaccguccucgagaagaacgucaccgucacccacuccgucaaccuccucgaggacaagcacaacggcaagcucugcaagcuccgcggcgucgccccccuccaccucggcaagugcaacaucgccggcuggauccucggcaaccccgagugcgagucccucuccaccgccuccuccugguccuacaucgucgagaccuccuccuccgacaacggcaccugcuaccccggcgacuucaucgacuacgaggagcuccgcgagcagcucuccuccgucuccuccuucgagcgcuucgagaucuuccccaagaccuccuccuggcccaaccacgacuccaacaagggcgucaccgccgccugcccccacgccggcgccaaguccuucuacaagaaccucaucuggcucgucaagaagggcaacuccuaccccaagcucuccaaguccuacaucaacgacaagggcaaggagguccucguccucuggggcauccaccaccccuccaccuccgccgaccagcagucccucuaccagaacgccgacgccuacgucuucgucggcuccucccgcuacuccaagaaguucaagcccgagaucgccauccgccccaagguccgcgaccaggagggccgcaugaacuacuacuggacccucgucgagcccggcgacaagaucaccuucgaggccaccggcaaccucgucgucccccgcuacgccuucgccauggagcgcaacgccggcuccggcaucaucaucuccgacacccccguccacgacugcaacaccaccugccagacccccaagggcgccaucaacaccucccuccccuuccacaacauccaccccaucaccaucggcaagugccccaaguacgucaaguccaccaagcuccgccucgccaccggccuccgcaacguccccuccauccagucccgcggccucuucggcgccaucgccggcuucaucgagggcggcuggaccggcauggucgacggcugguacggcuaccaccaccagaacgagcagggcuccggcuacgccgccgaccucaaguccacccagaacgccaucgacgagaucaccaacaaggucaacuccgucaucgagaagaugaacacccaguucaccgccgucggcaaggaguucaaccaccucgagacccgcaucgagaaccucaacaagaaggucgacgacggcuuccucgacaucuggaccuacaacgccgagcuccucguccuccucgagaacgagcgcacccucgacuaccacgacuccaacgucaagaaccucuacgagaagguccgcucccagcucaagaacaacgccaaggagaucggcaacggcugcuucgaguucuaccacaagugcgacaacaccugcauggaguccgucaagaacggcaccuacgacuaccccaaguacuccgaggaggccaagcucaaccgcgaggagaucgacggcgucaagcucgaguccacccgcaucuaccagauccucgccaucuacuccaccgucgccuccucccucguccucgucgucucccucggcgccaucuccuucuggaugugcuccaacggcucccuccagugccgcaucugcaucuga

SEQ ID NO: 99329 - RNA, 1701 nt, Artificial Sequence
  derived and/or modified CDS sequence (opt2) from hemagglutinin__InfluenzaA__ACV53880
augaaggccauccucgucguccuccucuacaccuucgccaccgccaacgccgacacccucugcaucggcuaccacgccaacaacuccaccgacaccgucgacaccguccucgagaagaacgucaccgucacccacuccgucaaccuccucgaggacaagcacaacggcaagcucugcaagcuccgcggcgucgccccccuccaccucggcaagugcaacaucgccggcuggauccucggcaaccccgagugcgagucccucuccaccgccuccuccugguccuacaucgucgagaccuccuccuccgacaacggcaccugcuaccccggcgacuucaucgacuacgaggagcuccgcgagcagcucuccuccgucuccuccuucgagcgcuucgagaucuuccccaagaccuccuccuggcccaaccacgacuccaacaagggcgucaccaccgccugcccccacgccggcgccaaguccuucuacaagaaccucaucuggcucgucaagaagggcaacuccuaccccaagcucuccaaguccuacaucaacgacaagggcaaggagguccucguccucuggggcauccaccaccccuccaccuccgccgaccagcagucccucuaccagaacgccgacgccuacgucuucgucggcaccucccgcuacuccaagaaguucaagcccgagaucgccauccgccccaagguccgcgaccaggagggccgcaugaacuacuacuggacccucgucgagcccggcgacaagaucaccuucgaggccaccggcaaccucgucgucccccgcuacgccuucgccauggagcgcaacgccggcuccggcaucaucaucuccgacacccccguccacgacugcaacaccaccugccagacccccaagggcgccaucaacaccucccuccccuuccagaacauccaccccaucaccaucggcaagugccccaaguacgucaaguccaccaagcuccgccucgccaccggccuccgcaacguccccuccauccagucccgcggccucuucggcgccaucgccggcuucaucgagggcggcuggaccggcauggucgacggcugguacggcuaccaccaccagaacgagcagggcuccggcuacgccgccgaccucaaguccacccagaacgccaucgacgagaucaccaacaaggucaacuccgucaucgagaagaugaacacccaguucaccgccgucggcaaggaguucaaccaccucgagaagcgcaucgagaaccucaacaagaaggucgacgacggcuuccucgacaucuggaccuacaacgccgagcuccucguccuccucgagaacgagcgcacccucgacuaccacgacuccaacgucaagaaccucuacgagaagguccgcucccagcucaagaacaacgccaaggagaucggcaacggcugcuucgaguucuaccacaagugcgacaacaccugcauggaguccgucaagaacggcaccuacgacuaccccaaguacuccgaggaggccaagcucaaccgcgaggagaucgacggcgucaagcucgaguccacccgcaucuaccagauccucgccaucuacuccaccgucgccuccucccucguccucgucgucucccucggcgccaucuccuucuggaugugcuccaacggcucccuccagugccgcaucugcaucuga

SEQ ID NO: 99330 - RNA, 1701 nt, Artificial Sequence; identical to SEQ ID NO: 98705
  derived and/or modified CDS sequence (opt2) from hemagglutinin__InfluenzaA__ACV53881

SEQ ID NO: 99331 - RNA, 1701 nt, Artificial Sequence; identical to SEQ ID NO: 98692
  derived and/or modified CDS sequence (opt2) from hemagglutinin__InfluenzaA__ACV53882

SEQ ID NO: 99332 - RNA, 1701 nt, Artificial Sequence; identical to SEQ ID NO: 98705
  derived and/or modified CDS sequence (opt2) from hemagglutinin__InfluenzaA__ACV53883

SEQ ID NO: 99333 - RNA, 1701 nt, Artificial Sequence; identical to SEQ ID NO: 98705
  derived and/or modified CDS sequence (opt2) from hemagglutinin__InfluenzaA__ACV53885

SEQ ID NO: 99334 - RNA, 1701 nt, Artificial Sequence
  derived and/or modified CDS sequence (opt2) from hemagglutinin__InfluenzaA__ACV53899
augaaggccauccucgucguccuccucuacaccuucgccaccgccaacgccgacacccucugcaucggcuaccacgccaacaacuccaccgacaccgucgacaccguccucgagaagaacgucaccgucacccacuccgucaaccuccucgaggacaagcacaacggcaagcucugcaagcuccgcggcgucgccccccuccaccucggcaagugcaacaucgccggcuggauccucggcaaccccgagugcgagucccucuccaccgccuccuccugguccuacaucgucgagaccuccuccuccgacaacggcaccugcuaccccggcgacuucaucgacuacgaggagcuccgcgagcagcucuccuccgucuccuccuucgagcgcuucgagaucuuccccaagaccuccuccuggcccaaccacgacuccaacaagggcgucaccgccgccugcccccacgccggcgccaaguccuucuacaagaaccucaucuggcucgucaagaagggcaacuccuaccccaagcucuccaaguccuacaucaacgacaagggcaaggagguccucguccucuggggcauccaccaccccuccaccuccgccgaccagcagucccucuaccagaacgccgacgccuacgucuucgucggcaccucccgcuacuccaagaaguucaagcccgagaucgccauccgccccaagguccgcgaccaggagggccgcaugaacuacuacuggacccucgucgagcccggcgacaagaucaccuucgaggccaccggcaaccucgucgucccccgcuacgccuucgccauggagcgcaacgccggcuccggcaucaucaucuccgacacccccguccacgacugcaacaccaccugccagacccccgagggcgccaucaacaccucccuccccuuccagaacauccaccccaucaccaucggcaagugccccaaguacgucaaguccaccaagcuccgccucgccaccggccuccgcaacguccccuccauccagucccgcggccucuucggcgccaucgccggcuucaucgagggcggcuggaccggcauggucgacggcugguacggcuaccaccaccagaacgagcagggcuccggcuacgccgccgaccucaaguccacccagaacgccaucgacgagaucaccaacaaggucaacuccgucaucgagaagaugaacacccaguucaccgccgucggcaaggaguucaaccaccucgagaagcgcaucgagaaccucaacaagaaggucgacgacggcuuccucgacaucuggaccuacaacgccgagcuccucguccuccucgagaacgagcgcacccucgacuaccacgacuccaacgucaagaaccucuacgagaagguccgcucccagcucaagaacaacgccaaggagaucggcaacggcugcuucgaguucuaccacaagugcgacaacaccugcauggaguccgucaagaacggcaccuacgacuaccccaaguacuccgaggaggccaagcucaaccgcgaggagaucgacggcgucaagcucgaguccacccgcaucuaccagauccucgccaucuacuccaccgucgccuccucccucguccucgucgucucccucggcgccaucuccuucuggaugugcuccaacggcucccuccagugccgcaucugcaucuga

SEQ ID NO: 99335 - RNA, 1701 nt, Artificial Sequence; identical to SEQ ID NO: 98705
  derived and/or modified CDS sequence (opt2) from hemagglutinin__InfluenzaA__ACV53909

SEQ ID NO: 99336 - RNA, 1701 nt, Artificial Sequence; identical to SEQ ID NO: 98705
  derived and/or modified CDS sequence (opt2) from hemagglutinin__InfluenzaA__ACV67220

SEQ ID NO: 99337 - RNA, 1701 nt, Artificial Sequence
  derived and/or modified CDS sequence (opt2) from hemagglutinin__InfluenzaA__ACV67221
augaaggccauccucgucguccuccucuacaccuucgccaccgccaacgccgacacccucugcaucggcuaccacgccaacaacuccaccgacaccgucgacaccguccucgagaagaacgucaccgucacccacuccgucaaccuccucgaggacaagcacaacggcaagcucugcaagcuccgcggcgucgccccccuccaccucggcaagugcaacaucgccggcuggauccucggcaaccccgagugcggcucccucuccaccgccuccuccugguccuacaucgucgagaccuccuccuccgacaacggcaccugcuaccccggcgacuucaucgacuacgaggagcuccgcgagcagcucuccuccgucuccuccuucgagcgcuucgagaucuuccccaagaccuccuccuggcccaaccacgacuccaacaagggcgucaccgccgccugcccccacgccggcgccaaguccuucuacaagaaccucaucuggcucgucaagaagggcaacuccuaccccaagcucuccaaguccuacaucaacgacaagggcaaggagguccucguccucuggggcauccaccaccccuccaccuccgccgaccagcagucccucuaccaguccgccgacgccuacgucuucgucggcaccucccgcuacuccaagaaguucaagcccgagaucgccauccgccccaagguccgcgaccaggagggccgcaugaacuacuacuggacccucgucgagcccggcgacaagaucaccuucgaggccaccggcaaccucgucgucccccgcuacgccuucgccauggagcgcaacgccggcuccggcaucaucaucuccgacacccccguccacgacugcaacaccaccugccagacccccaagggcgccaucaacaccucccuccccuuccagaacauccaccccaucaccaucggcaagugccccaaguacgucaaguccaccaagcuccgccucgccaccggccuccgcaacguccccuccauccagucccgcggccucuucggcgccaucgccggcuucaucgagggcggcuggaccggcauggucgacggcugguacggcuaccaccaccagaacgagcagggcuccggcuacgccgccgaccucaaguccacccagaacgccaucgacgagaucaccaacaaggucaacuccgucaucgagaagaugaacacccaguucaccgccgucggcaaggaguucaaccaccucgagaagcgcaucgagaaccucaacaagaaggucgacgacggcuuccucgacaucuggaccuacaacgccgagcuccucguccuccucgagaacgagcgcacccucgacuaccacgacuccaacgucaagaaccucuacgagaagguccgcucccagcucaagaacaacgccaaggagaucggcaacggcugcuucgaguucuaccacaagugcgacaacaccugcauggaguccgucaagaacggcaccuacgacuaccccaaguacuccgaggaggccaagcucaaccgcgaggagaucgacggcgucaagcucgaguccacccgcaucuaccagauccucgccaucuacuccaccgucgccuccucccucguccucgucgucucccucggcgccaucuccuucuggaugugcuccaacggcucccuccagugccgcaucugcaucuga

SEQ ID NO: 99338 - RNA, 1701 nt, Artificial Sequence; identical to SEQ ID NO: 98692
  derived and/or modified CDS sequence (opt2) from hemagglutinin__InfluenzaA__ACV67222

SEQ ID NO: 99339 - RNA, 1701 nt, Artificial Sequence; identical to SEQ ID NO: 98731
  derived and/or modified CDS sequence (opt2) from hemagglutinin__InfluenzaA__ACV67223

SEQ ID NO: 99340 - RNA, 1701 nt, Artificial Sequence; identical to SEQ ID NO: 98947
  derived and/or modified CDS sequence (opt2) from hemagglutinin__InfluenzaA__ACV67224

SEQ ID NO: 99341 - RNA, 1701 nt, Artificial Sequence; identical to SEQ ID NO: 98885
  derived and/or modified CDS sequence (opt2) from hemagglutinin__InfluenzaA__ACV67225

SEQ ID NO: 99342 - RNA, 1701 nt, Artificial Sequence; identical to SEQ ID NO: 98705
  derived and/or modified CDS sequence (opt2) from hemagglutinin__InfluenzaA__ACV67226

SEQ ID NO: 99343 - RNA, 1701 nt, Artificial Sequence
  derived and/or modified CDS sequence (opt2) from hemagglutinin__InfluenzaA__ACV67227
augaaggccauccucgucguccuccucuacaccuucgccaccgccaacgccgacacccucugcaucggcuaccacgccaacaacuccaccgacaccgucgacaccguccucgagaagaacgucaccgucacccacuccgucaaccuccucgaggacaagcacaacggcaagcucugcaagcuccgcggcgucgccccccuccaccucggcaagugcaacaucgccggcuggauccucggcaaccccgagugcgagucccucuccaccgccuccuccugguccuacaucgucgagaccuccuccuccgacaacggcaccugcuaccccggcgacuucaucgacuacgaggagcuccgcgagcagcucuccuccgucuccuccuucgagcgcuucgagaucuuccccaagaccuccuccuggcccaaccacgacuccaacaagggcgucaccgccgccugcccccacgccggcgccaaguccuucuacaagaaccucaucuggcucgucaagaagggcaacuccuaccccaagcucuccaaguccuacaucaacgacaagggcaaggagguccucguccucuggggcauccaccaccccuccaccuccgccgaccagcagucccucuaccagaacgccgacgccuacgucuucgucggcaccucccgcuacuccaagaaguucaagcccgagaucgccauccgccccaagguccgcgaccaggagggccgcaugaacuacuacuggacccucgucgagcccggcgacaagaucaccuucgaggccaccggcaaccucgucgucccccgcuacgccuucgccauggagcgcaacgccggcuccggcaucaucaucuccaacacccccguccacgacugcaacaccaccugccagacccccaagggcgccaucaacaccucccuccccuuccagaacauccaccccaucaccaucggcaagugccccaaguacgucaaguccaccaagcuccgccucgccaccggccuccgcaacguccccuccauccagucccgcggccucuucggcgccaucgccggcuucaucgagggcggcuggaccggcauggucgacggcugguacggcuaccaccaccagaacgagcagggcuccggcuacgccgccgaccucaaguccacccagaacgccaucgacgagaucaccaacaaggucaacuccgucaucgagaagaugaacacccaguucaccgccgucggcaaggaguucaaccaccucgagaagcgcaucgagaaccucaacaagaaggucgacgacggcuuccucgacaucuggaccuacaacgccgagcuccucguccuccucgagaacgagcgcacccucgacuaccacgacuccaacgucaagaaccucuacgagaagguccgcucccagcucaagaacaacgccaaggagaucggcaacggcugcuucgaguucuaccacaagugcgacaacaccugcauggaguccgucaagaacggcaccuacgacuaccccaaguacuccgaggaggccaagcucaaccgcgaggagaucgacggcgucaagcucgaguccacccgcaucuaccagauccucgccaucuacuccaccgucgccuccucccucguccucgucgucucccucggcgccaucuccuucuggaugugcuccaacggcucccuccagugccgcaucugcaucuga

SEQ ID NO: 99344 - RNA, 1701 nt, Artificial Sequence; identical to SEQ ID NO: 98947
  derived and/or modified CDS sequence (opt2) from hemagglutinin__InfluenzaA__ACV67228

SEQ ID NO: 99345 - RNA, 1701 nt, Artificial Sequence
  derived and/or modified CDS sequence (opt2) from hemagglutinin__InfluenzaA__ACV67229
augaaggccauccucgucguccuccucuacaccuucgccaccgccaacgccgacacccucugcaucggcuaccacgccaacaacuccaccgacaccgucgacaccguccucgagaagaacgucaccgucacccacuccgucaaccuccucgaggacaagcacaacggcaagcucugcaagcuccgcggcgucgccccccuccaccucggcaagugcaacaucgccggcuggauccucggcaaccccgagugcgagucccucuccaccgccuccuccugguccuacaucgucgagaccuccuccuccgacaacggcaccugcuaccccggcgacuucaucgacuacgaggagcuccgcgagcagcucuccuccgucuccuccuucgagcgcuucgagaucuuccccaagaccuccuccuggcccaaccacgacuccaacaagggcgucaccgccgccugcccccacgccggcgccaaguccuucuacaagaaccucaucuggcucgucaagaagggcaacuccuaccccaagcucuccaaguccuacaucaacgacaagggcaaggagguccucguccucuggggcauccaccaccccuccaccuccgccgaccagcagucccucuaccagaacgccgacgccuacgucuucgucggcaccucccgcuacuccaagaaguucaagcccgagaucgccauccgccccaagguccgcgaccaggagggccgcaugaacuacuacuggacccucgucgagcccggcgacaagaucaccuucgaggccaccggcaaccucgucgucccccgcuacgccuucgccauggagcgcaacgccggcuccggcaucaucaucuccgacacccccguccacgacugcaacaccaccugccagacccccaagggcgccaucaacaccucccuccccuuccagaacauccaccccaucaccaucggcaagugccccaaguacgucaaguccaccaagcuccgccucgccaccggccuccgcaacguccccuccauccagucccgcggccucuucggcgccaucgccggcuucaucgagggcggcuggaccggcauggucgacggcugguacggcuaccaccaccagaacgagcagggcuccggcuacgccgccgaccucaaguccacccagaaccccaucgacgagaucaccaacaaggucaacuccgucaucgagaagaugaacacccaguucaccgccgucggcaaggaguucaaccaccucgagaagcgcaucgagaaccucaacaagaaggucgacgacggcuuccucgacaucuggaccuacaacgccgagcuccucguccuccucgagaacgagcgcacccucgacuaccacgacuccaacgucaagaaccucuacgagaagguccgcucccagcucaagaacaacgccaaggagaucggcaacggcugcuucgaguucuaccacaagugcgacaacaccugcauggaguccgucaagaacggcaccuacgacuaccccaaguacuccgaggaggccaagcucaaccgcgaggagaucgacggcgucaagcucgaguccacccgcaucuaccagauccucgccaucuacuccaccgucgccuccucccucguccucgucgucucccucggcgccaucuccuucuggaugugcuccaacggcucccuccagugccgcaucugcaucuga

SEQ ID NO: 99346 - RNA, 1701 nt, Artificial Sequence; identical to SEQ ID NO: 98692
  derived and/or modified CDS sequence (opt2) from hemagglutinin__InfluenzaA__ACV67230

SEQ ID NO: 99347 - RNA, 1701 nt, Artificial Sequence; identical to SEQ ID NO: 98705
  derived and/or modified CDS sequence (opt2) from hemagglutinin__InfluenzaA__ACV67231

SEQ ID NO: 99348 - RNA, 1701 nt, Artificial Sequence; identical to SEQ ID NO: 98705
  derived and/or modified CDS sequence (opt2) from hemagglutinin__InfluenzaA__ACV67232

SEQ ID NO: 99349 - RNA, 1701 nt, Artificial Sequence; identical to SEQ ID NO: 98692
  derived and/or modified CDS sequence (opt2) from hemagglutinin__InfluenzaA__ACV67233

SEQ ID NO: 99350 - RNA, 1701 nt, Artificial Sequence; identical to SEQ ID NO: 98947
  derived and/or modified CDS sequence (opt2) from hemagglutinin__InfluenzaA__ACV67234

SEQ ID NO: 99351 - RNA, 1701 nt, Artificial Sequence
  derived and/or modified CDS sequence (opt2) from hemagglutinin__InfluenzaA__ACV67235
augaaggccauccucgucguccuccucuacaccuucgccaccgccaacgccgacacccucugcaucggcuaccacgccaacaacuccaccgacaccgucgacaccguccucgagaagaacgucaccgucacccacuccgucaaccuccucgaggacaagcacaacggcaagcucugcaagcuccgcggcgucgccccccuccaccucggcaagugcaacaucgccggcuggauccucggcaaccccgagugcgagucccucuccaccgccuccuccugguccuacaucgucgagaccuccuccuccgacaacggcaccugcuaccccggcgacuucaucgacuacgaggagcuccgcgagcagcucuccuccgucuccuccuucgagcgcuucgagaucuuccccaagaccuccuccuggcccaaccacgacuccaacaagggcgucaccgccgccugcccccacgccggcgccaaguccuucuacaagaaccucaucuggcucgucaagaagggcaacuccuaccccaagcucuccaaguccuacaucaacgacaagggcaaggagguccucguccucuggggcauccaccaccccuccaccuccgccgaccagcagucccucuaccagaacgccgacgccuacgucuucgucggcuccucccgcuacuccaagaaguucaagcccgagaucgccauccgccccaagguccgcgaccaggagggccgcaugaacuacuacuggacccucgucgagcccggcgacaagaucaccuucgaggccaccggcaaccucgucgucccccgcuacgccuucgccauggagcgcaacgccggcuccggcaucaucaucuccgacacccccguccacgacugcaacaccaccugccagacccccaagggcgccaucaacaccucccuccccuuccagaacauccaccccaucaccaucggcaagugccccaaguacgucaaguccaccaagcuccgccucgccaccggccuccgcaacguccccuccauccagucccgcggccucuucggcgccaucgccggcuucaucgagggcggcuggaccggcauggucgacggcugguacggcuaccaccaccagaacgagcagggcuccggcuacgccgccgaccucaaguccacccagaacgccaucgacgagaucaccaacaaggucaacuccgucaucgagaagaugaacacccaguucaccgccgucggcaaggaguucaaccaccucgagaagcgcaucgagaaccucaacaagaaggucgacgacggcuuccucgacaucuggaccuacaacgccgagcuccucguccuccucgagaacgagcgcacccucgacuaccacgacuccaacgucaagaaccucuacgagaagguccgcucccagcucaagaacaacgccaacgagaucggcaacggcugcuucgaguucuaccacaagugcgacaacaccugcauggaguccgucaagaacggcaccuacgacuaccccaaguacuccgaggaggccaagcucaaccgcgaggagaucgacggcgucaagcucgaguccacccgcaucuaccagauccucgccaucuacuccaccgucgccuccucccucguccucgucgucucccucggcgccaucuccuucuggaugugcuccaacggcucccuccagugccgcaucugcaucuga

SEQ ID NO: 99352 - RNA, 1701 nt, Artificial Sequence; identical to SEQ ID NO: 98949
  derived and/or modified CDS sequence (opt2) from hemagglutinin__InfluenzaA__ACV67236

SEQ ID NO: 99353 - RNA, 1701 nt, Artificial Sequence; identical to SEQ ID NO: 98692
  derived and/or modified CDS sequence (opt2) from hemagglutinin__InfluenzaA__ACV67238

SEQ ID NO: 99354 - RNA, 1701 nt, Artificial Sequence
  derived and/or modified CDS sequence (opt2) from hemagglutinin__InfluenzaA__ACV67239
augaaggccauccucgucguccuccucuacaccuucaccaccgccaacgccgacacccucugcaucggcuaccacgccaacaacuccaccgacaccgucgacaccguccucgagaagaacgucaccgucacccacuccgucaaccuccucgaggacaagcacaacggcaagcucugcaagcuccgcggcgucgccccccuccaccucggcaagugcaacaucgccggcuggauccucggcaaccccgagugcgagucccucuccaccgccuccuccugguccuacaucgucgagaccuccuccuccgacaacggcaccugcuaccccggcgacuucaucgacuacgaggagcuccgcgagcagcucuccuccgucuccuccuucgagcgcuucgagaucuuccccaagaccuccuccuggcccaaccacgacuccaacaagggcgucaccgccgccugcccccacgccggcgccaaguccuucuacaagaaccucaucuggcucgucaagaagggcaacuccuaccccaagcucuccaaguccuacaucaacgacaagggcaaggagguccucguccucuggggcauccaccaccccuccaccuccgccgaccagcagucccucuaccagaacgccgacgccuacgucuucgucggcuccucccgcuacuccaagaaguucaagcccgagaucgccauccgccccaagguccgcgaccaggagggccgcaugaacuacuacuggacccucgucgagcccggcgacaagaucaccuucgaggccaccggcaaccucgucgucccccgcuacgccuucgccauggagcgcaacgccggcuccggcaucaucaucuccgacacccccguccacgacugcaacaccaccugccagacccccaagggcgccaucaacaccucccuccccuuccagaacauccaccccaucaccaucggcaagugccccaaguacgucaaguccaccaagcuccgccucgccaccggccuccgcaacguccccuccauccagucccgcggccucuucggcgccaucgccggcuucaucgagggcggcuggaccggcauggucgacggcugguacggcuaccaccaccagaacgagcagggcuccggcuacgccgccgaccucaaguccacccagaacgccaucgacgagaucaccaacaaggucaacuccgucaucgagaagaugaacacccaguucaccgccgucggcaaggaguucaaccaccucgagaagcgcaucgagaaccucaacaagaaggucgacgacggcuuccucgacaucuggaccuacaacgccgagcuccucguccuccucgagaacgagcgcacccucgacuaccacgacuccaacgucaagaaccucuacgagaagguccgcucccagcucaagaacaacgccaaggagaucggcaacggcugcuucgaguucuaccacaagugcaacaacaccugcauggaguccgucaagaacggcaccuacgacuaccccaaguacuccgaggaggccaagcucaaccgcgaggagaucgacggcgucaagcucgaguccacccgcaucuaccagauccucgccaucuacuccaccgucgccuccucccucguccucgucgucucccucggcgccaucuccuucuggaugugcuccaacggcucccuccagugccgcaucugcaucuga

SEQ ID NO: 99355 - RNA, 1701 nt, Artificial Sequence; identical to SEQ ID NO: 98949
  derived and/or modified CDS sequence (opt2) from hemagglutinin__InfluenzaA__ACV67240

SEQ ID NO: 99356 - RNA, 1701 nt, Artificial Sequence
  derived and/or modified CDS sequence (opt2) from hemagglutinin__InfluenzaA__ACV67241
augaaggccauccucgucguccuccucuacaccuucgccaccgccaacgccgacacccucugcaucggcuaccacgccaacaacuccaccgacaccgucgacaccguccucgagaagaacgucaccgucacccacuccgucaaccuccucgaggacaagcacaacggcaagcucugcaagcuccgcggcgucgccccccuccaccucggcaagugcaacaucgccggcuggauccucggcaaccccgagugcgagucccucuccaccgccuccuccugguccuacaucgucgagaccuccuccuccgacaacggcaccugcuaccccggcgacuucaucgacuacgaggagcuccgcgagcagcucuccuccgucuccuccuucgagcgcuucgagaucuuccccaagaccuccuccuggcccaaccacgacuccaacaagggcgucaccgccgccugcccccacgccggcgccaaguccuucuacaagaaccucaucuggcucgucaagaacggcaacuccuaccccaagcucuccaaguccuacaucaacgacaagggcaaggagguccucguccucuggggcauccaccaccccuccaccuccgccgaccagcagucccucuaccagaacgccgacgccuacgucuucgucggcaccucccgcuacuccaagaaguucaagcccgagaucgccauccgccccaagguccgcgaccaggagggccgcaugaacuacuacuggacccucgucgagcccggcgacaagaucaccuucgaggccaccggcaaccucgucgucccccgcuacgccuucgccauggagcgcaacgccggcuccggcaucaucaucuccgacacccccguccacgacugcaacaccaccugccagacccccaagggcgccaucaacaccucccuccccuuccagaacauccaccccaucaccaucggcaagugccccaaguacgucaaguccaccaagcuccgccucgccaccggccuccgcaacguccccuccauccagucccgcggccucuucggcgccaucgccggcuucaucgagggcggcuggaccggcauggucgacggcugguacggcuaccaccaccagaacgagcagggcuccggcuacgccgccgaccucaaguccacccagaacgccaucgacgagaucaccaacaaggucaacuccgucaucgagaagaugaacacccaguucaccgccgucggcaaggaguucaaccaccucgagaagcgcaucgagaaccucaacaagaaggucgacgacggcuuccucgacaucuggaccuacaacgccgagcuccucguccuccucgagaacgagcgcacccucgacuaccacgacuccaacgucaagaaccucuacgagaagguccgcucccagcucaagaacaacgccaaggagaucggcaacggcugcuucgaguucuaccacaagugcgacaacaccugcauggaguccgucaagaacggcaccuacgacuaccccaaguacuccgaggaggccaagcucaaccgcgaggagaucgacggcgucaagcucgaguccacccgcaucuaccagauccucgccaucuacuccaccgucgccuccucccucguccucgucgucucccucggcgccaucuccuucuggaugugcuccaacggcucccuccagugccgcaucugcaucuga

SEQ ID NO: 99357 - RNA, 1701 nt, Artificial Sequence; identical to SEQ ID NO: 98947
  derived and/or modified CDS sequence (opt2) from hemagglutinin__InfluenzaA__ACV67242

SEQ ID NO: 99358 - RNA, 1701 nt, Artificial Sequence; identical to SEQ ID NO: 98885
  derived and/or modified CDS sequence (opt2) from hemagglutinin__InfluenzaA__ACV67244

SEQ ID NO: 99359 - RNA, 1701 nt, Artificial Sequence; identical to SEQ ID NO: 98798
  derived and/or modified CDS sequence (opt2) from hemagglutinin__InfluenzaA__ACV67246

SEQ ID NO: 99360 - RNA, 1701 nt, Artificial Sequence; identical to SEQ ID NO: 99329
  derived and/or modified CDS sequence (opt2) from hemagglutinin__InfluenzaA__ACV67247

SEQ ID NO: 99361 - RNA, 1701 nt, Artificial Sequence; identical to SEQ ID NO: 98692
  derived and/or modified CDS sequence (opt2) from hemagglutinin__InfluenzaA__ACV70073

SEQ ID NO: 99362 - RNA, 1701 nt, Artificial Sequence; identical to SEQ ID NO: 98692
  derived and/or modified CDS sequence (opt2) from hemagglutinin__InfluenzaA__ACV70093

SEQ ID NO: 99363 - RNA, 1701 nt, Artificial Sequence; identical to SEQ ID NO: 98692
  derived and/or modified CDS sequence (opt2) from hemagglutinin__InfluenzaA__ACV70103

SEQ ID NO: 99364 - RNA, 1701 nt, Artificial Sequence; identical to SEQ ID NO: 98692
  derived and/or modified CDS sequence (opt2) from hemagglutinin__InfluenzaA__ACV70113

SEQ ID NO: 99365 - RNA, 1701 nt, Artificial Sequence; identical to SEQ ID NO: 98692
  derived and/or modified CDS sequence (opt2) from hemagglutinin__InfluenzaA__ACV70123

SEQ ID NO: 99366 - RNA, 1701 nt, Artificial Sequence; identical to SEQ ID NO: 98692
  derived and/or modified CDS sequence (opt2) from hemagglutinin__InfluenzaA__ACV70154

SEQ ID NO: 99367 - RNA, 1701 nt, Artificial Sequence
  derived and/or modified CDS sequence (opt2) from hemagglutinin__InfluenzaA__ACV70164
augaaggccauccucgucguccuccucuacaccuucaccaccgccaacgccgacacccucugcaucggcuaccacgccaacaacuccaccgacaccgucgacaccguccucgagaagaacgucaccgucacccacuccgucaaccuccucgaggacaagcacaacggcaagcucugcaagcuccgcggcgucgccccccuccaccucggcaagugcaacaucgccggcuggauccucggcaaccccgagugcgagucccucuccaccgccuccuccugguccuacaucgucgagaccuccuccuccgacaacggcaccugcuaccccggcgacuucaucgacuacgaggagcuccgcgagcagcucuccuccgucuccuccuucgagcgcuucgagaucuuccccaagaccuccuccuggcccaaccacgacuccaacaagggcgucaccgccgccugcccccacgccggcgccaaguccuucuacaagaaccucaucuggcucgucaagaagggcaacuccuaccccaagcucuccaaguccuacaucaacgacaagggcaaggagguccucguccucuggggcauccaccaccccuccaccuccgccgaccagcagucccucuaccagaacgccgacgccuacgucuucgucggcuccucccgcuacuccaagaaguucaagcccgagaucgccauccgccccaagguccgcgaccaggagggccgcaugaacuacuacuggacccucgucgagcccggcgacaagaucaccuucgaggccaccggcaaccucgucgucccccgcuacgccuucgccauggagcgcaacgccggcuccggcaucaucaucuccgacacccccguccacgacugcaacaccaccugccagacccucaagggcgccaucaacaccucccuccccuuccagaacauccaccccaucaccaucggcaagugccccaaguacgucaaguccaccaagcuccgccucgccaccggccuccgcaacguccccuccauccagucccgcggccucuucggcgccaucgccggcuucaucgagggcggcuggaccggcauggucgacggcugguacggcuaccaccaccagaacgagcagggcuccggcuacgccgccgaccucaaguccacccagaacgccaucgacgagaucaccaacaaggucaacuccgucaucgagaagaugaacacccaguucaccgccgucggcaaggaguucaaccaccucgagaagcgcaucgagaaccucaacaagaaggucgacgacggcuuccucgacaucuggaccuacaacgccgagcuccucguccuccucgagaacgagcgcacccucgacuaccacgacuccaacgucaagaaccucuacgagaagguccgcucccagcucaagaacaacgccaaggagaucggcaacggcugcuucgaguucuaccacaagugcgacaacaccugcauggaguccgucaagaacggcaccuacgacuaccccaaguacuccgaggaggccaagcucaaccgcgaggagaucgacggcgucaagcucgaguccacccgcaucuaccagauccucgccaucuacuccaccgucgccuccucccucguccucgucgucucccucggcgccaucuccuucuggaugugcuccaacggcucccuccagugccgcaucugcaucuga

SEQ ID NO: 99368 - RNA, 1701 nt, Artificial Sequence; identical to SEQ ID NO: 98692
  derived and/or modified CDS sequence (opt2) from hemagglutinin__InfluenzaA__ACV70174

SEQ ID NO: 99369 - RNA, 1701 nt, Artificial Sequence; identical to SEQ ID NO: 98692
  derived and/or modified CDS sequence (opt2) from hemagglutinin__InfluenzaA__ACV70184

SEQ ID NO: 99370 - RNA, 1701 nt, Artificial Sequence; identical to SEQ ID NO: 98692
  derived and/or modified CDS sequence (opt2) from hemagglutinin__InfluenzaA__ACV70194

SEQ ID NO: 99371 - RNA, 1701 nt, Artificial Sequence; identical to SEQ ID NO: 98692
  derived and/or modified CDS sequence (opt2) from hemagglutinin__InfluenzaA__ACV70204

SEQ ID NO: 99372 - RNA, 1701 nt, Artificial Sequence; identical to SEQ ID NO: 98692
  derived and/or modified CDS sequence (opt2) from hemagglutinin__InfluenzaA__ACV70214

SEQ ID NO: 99373 - RNA, 1701 nt, Artificial Sequence; identical to SEQ ID NO: 98692
  derived and/or modified CDS sequence (opt2) from hemagglutinin__InfluenzaA__ACV70224

SEQ ID NO: 99374 - RNA, 1701 nt, Artificial Sequence; identical to SEQ ID NO: 98692
  derived and/or modified CDS sequence (opt2) from hemagglutinin__InfluenzaA__ACV70234

SEQ ID NO: 99375 - RNA, 1701 nt, Artificial Sequence; identical to SEQ ID NO: 98692
  derived and/or modified CDS sequence (opt2) from hemagglutinin__InfluenzaA__ACV70254

SEQ ID NO: 99376 - RNA, 1701 nt, Artificial Sequence; identical to SEQ ID NO: 98692
  derived and/or modified CDS sequence (opt2) from hemagglutinin__InfluenzaA__ACV70264

SEQ ID NO: 99377 - RNA, 1701 nt, Artificial Sequence; identical to SEQ ID NO: 98692
  derived and/or modified CDS sequence (opt2) from hemagglutinin__InfluenzaA__ACV70274

SEQ ID NO: 99378 - RNA, 1701 nt, Artificial Sequence; identical to SEQ ID NO: 98692
  derived and/or modified CDS sequence (opt2) from hemagglutinin__InfluenzaA__ACV70284

SEQ ID NO: 99379 - RNA, 1701 nt, Artificial Sequence; identical to SEQ ID NO: 98692
  derived and/or modified CDS sequence (opt2) from hemagglutinin__InfluenzaA__ACV70294

SEQ ID NO: 99380 - RNA, 1701 nt, Artificial Sequence; identical to SEQ ID NO: 98692
  derived and/or modified CDS sequence (opt2) from hemagglutinin__InfluenzaA__ACV70304

SEQ ID NO: 99381 - RNA, 1701 nt, Artificial Sequence; identical to SEQ ID NO: 99367
  derived and/or modified CDS sequence (opt2) from hemagglutinin__InfluenzaA__ACV70314

SEQ ID NO: 99382 - RNA, 1701 nt, Artificial Sequence
  derived and/or modified CDS sequence (opt2) from hemagglutinin__InfluenzaA__ACV70324
augaaggccauccucgucguccuccucuacaccuucgccaccgccaacgccgacacccucugcaucggcuaccacgccaacaacuccaccgacaccgucgacaccguccucgagaagaacgucaccgucacccacuccgucaaccuccucgaggacaagcacaacggcaagcucugcaagcuccgcggcgucgccccccuccaccucggcaagugcaacaucgccggcuggauccucggcaaccccgagugcgagucccucuucaccgccuccuccugguccuacaucgucgagaccuccuccuccgacaacggcaccugcuaccccggcgacuucaucgacuacgaggagcuccgcgagcagcucuccuccgucuccuccuucgagcgcuucgagaucuuccccaagaccuccuccuggcccaaccacgacuccaacaagggcgucaccgccgccugcccccacgccggcgccaaguccuucuacaagaaccucaucuggcucgucaagaagggcaacuccuaccccaagcucuccaaguccuacaucaacgacaagggcaaggagguccucguccucuggggcauccaccaccccuccaccuccgccgaccagcagucccucuaccagaacgccgacgccuacgucuucgucggcuccucccgcuacuccaagaaguucaagcccgagaucgccauccgccccaagguccgcgaccaggagggccgcaugaacuacuacuggacccucgucgagcccggcgacaagaucaccuucgaggccaccggcaaccucgucgucccccgcuacgccuucgccauggagcgcaacgccggcuccggcaucaucaucuccgacacccccguccacgacugcaacaccaccugccagacccccaagggcgccaucaacaccucccuccccuuccagaacauccaccccaucaccaucggcaagugccccaaguacgucaaguccaccaagcuccgccucgccaccggccuccgcaacguccccuccauccagucccgcggccucuucggcgccaucgccggcuucaucgagggcggcuggaccggcauggucgacggcugguacggcuaccaccaccagaacgagcagggcuccggcuacgccgccgaccucaaguccacccagaacgccaucgacgagaucaccaacaaggucaacuccgucaucgagaagaugaacacccaguucaccgccgucggcaaggaguucaaccaccucgagaagcgcaucgagaaccucaacaagaaggucgacgacggcuuccucgacaucuggaccuacaacgccgagcuccucguccuccucgagaacgagcgcacccucgacuaccacgacuccaacgucaagaaccucuacgagaagguccgcucccagcucaagaacaacgccaaggagaucggcaacggcugcuucgaguucuaccacaagugcgacaacaccugcauggaguccgucaagaacggcaccuacgacuaccccaaguacuccgaggaggccaagcucaaccgcgaggagaucgacggcgucaagcucgaguccacccgcaucuaccagauccucgccaucuacuccaccgucgccuccucccucguccucgucgucucccucggcgccaucuccuucuggaugugcuccaacggcucccuccagugccgcaucugcaucuga

SEQ ID NO: 99383 - RNA, 1701 nt, Artificial Sequence; identical to SEQ ID NO: 98692
  derived and/or modified CDS sequence (opt2) from hemagglutinin__InfluenzaA__ACV70334

SEQ ID NO: 99384 - RNA, 1701 nt, Artificial Sequence; identical to SEQ ID NO: 98692
  derived and/or modified CDS sequence (opt2) from hemagglutinin__InfluenzaA__ACV70344

SEQ ID NO: 99385 - RNA, 1701 nt, Artificial Sequence; identical to SEQ ID NO: 98692
  derived and/or modified CDS sequence (opt2) from hemagglutinin__InfluenzaA__ACV70354

SEQ ID NO: 99386 - RNA, 1701 nt, Artificial Sequence; identical to SEQ ID NO: 98692
  derived and/or modified CDS sequence (opt2) from hemagglutinin__InfluenzaA__ACV70364

SEQ ID NO: 99387 - RNA, 1701 nt, Artificial Sequence; identical to SEQ ID NO: 98692
  derived and/or modified CDS sequence (opt2) from hemagglutinin__InfluenzaA__ACV70374

SEQ ID NO: 99388 - RNA, 1701 nt, Artificial Sequence; identical to SEQ ID NO: 98692
  derived and/or modified CDS sequence (opt2) from hemagglutinin__InfluenzaA__ACV70384

SEQ ID NO: 99389 - RNA, 1701 nt, Artificial Sequence; identical to SEQ ID NO: 98692
  derived and/or modified CDS sequence (opt2) from hemagglutinin__InfluenzaA__ACV70394

SEQ ID NO: 99390 - RNA, 1701 nt, Artificial Sequence; identical to SEQ ID NO: 98692
  derived and/or modified CDS sequence (opt2) from hemagglutinin__InfluenzaA__ACV70404

SEQ ID NO: 99391 - RNA, 1701 nt, Artificial Sequence; identical to SEQ ID NO: 99367
  derived and/or modified CDS sequence (opt2) from hemagglutinin__InfluenzaA__ACV70414

SEQ ID NO: 99392 - RNA, 1701 nt, Artificial Sequence; identical to SEQ ID NO: 98692
  derived and/or modified CDS sequence (opt2) from hemagglutinin__InfluenzaA__ACV70424

SEQ ID NO: 99393 - RNA, 1701 nt, Artificial Sequence; identical to SEQ ID NO: 98692
  derived and/or modified CDS sequence (opt2) from hemagglutinin__InfluenzaA__ACV70434

SEQ ID NO: 99394 - RNA, 1701 nt, Artificial Sequence; identical to SEQ ID NO: 98692
  derived and/or modified CDS sequence (opt2) from hemagglutinin__InfluenzaA__ACV70444

SEQ ID NO: 99395 - RNA, 1701 nt, Artificial Sequence; identical to SEQ ID NO: 98692
  derived and/or modified CDS sequence (opt2) from hemagglutinin__InfluenzaA__ACV70454

SEQ ID NO: 99396 - RNA, 1701 nt, Artificial Sequence; identical to SEQ ID NO: 98692
  derived and/or modified CDS sequence (opt2) from hemagglutinin__InfluenzaA__ACV70464

SEQ ID NO: 99397 - RNA, 1701 nt, Artificial Sequence; identical to SEQ ID NO: 98692
  derived and/or modified CDS sequence (opt2) from hemagglutinin__InfluenzaA__ACV70474

SEQ ID NO: 99398 - RNA, 1701 nt, Artificial Sequence; identical to SEQ ID NO: 98692
  derived and/or modified CDS sequence (opt2) from hemagglutinin__InfluenzaA__ACV70484

SEQ ID NO: 99399 - RNA, 1701 nt, Artificial Sequence; identical to SEQ ID NO: 98692
  derived and/or modified CDS sequence (opt2) from hemagglutinin__InfluenzaA__ACV70494

SEQ ID NO: 99400 - RNA, 1701 nt, Artificial Sequence; identical to SEQ ID NO: 98692
  derived and/or modified CDS sequence (opt2) from hemagglutinin__InfluenzaA__ACV70504

SEQ ID NO: 99401 - RNA, 1701 nt, Artificial Sequence; identical to SEQ ID NO: 98692
  derived and/or modified CDS sequence (opt2) from hemagglutinin__InfluenzaA__ACV70514

SEQ ID NO: 99402 - RNA, 1701 nt, Artificial Sequence; identical to SEQ ID NO: 98692
  derived and/or modified CDS sequence (opt2) from hemagglutinin__InfluenzaA__ACV70524

SEQ ID NO: 99403 - RNA, 1701 nt, Artificial Sequence; identical to SEQ ID NO: 98885
  derived and/or modified CDS sequence (opt2) from hemagglutinin__InfluenzaA__ACV70534

SEQ ID NO: 99404 - RNA, 1701 nt, Artificial Sequence; identical to SEQ ID NO: 98692
  derived and/or modified CDS sequence (opt2) from hemagglutinin__InfluenzaA__ACV70544

SEQ ID NO: 99405 - RNA, 1701 nt, Artificial Sequence; identical to SEQ ID NO: 98692
  derived and/or modified CDS sequence (opt2) from hemagglutinin__InfluenzaA__ACV70564

SEQ ID NO: 99406 - RNA, 1701 nt, Artificial Sequence; identical to SEQ ID NO: 98692
  derived and/or modified CDS sequence (opt2) from hemagglutinin__InfluenzaA__ACV70584

SEQ ID NO: 99407 - RNA, 1701 nt, Artificial Sequence; identical to SEQ ID NO: 99367
  derived and/or modified CDS sequence (opt2) from hemagglutinin__InfluenzaA__ACV70594

SEQ ID NO: 99408 - RNA, 1701 nt, Artificial Sequence; identical to SEQ ID NO: 98692
  derived and/or modified CDS sequence (opt2) from hemagglutinin__InfluenzaA__ACV70604

SEQ ID NO: 99409 - RNA, 1701 nt, Artificial Sequence; identical to SEQ ID NO: 98692
  derived and/or modified CDS sequence (opt2) from hemagglutinin__InfluenzaA__ACV70614

SEQ ID NO: 99410 - RNA, 1701 nt, Artificial Sequence; identical to SEQ ID NO: 98692
  derived and/or modified CDS sequence (opt2) from hemagglutinin__InfluenzaA__ACV70624

SEQ ID NO: 99411 - RNA, 1701 nt, Artificial Sequence; identical to SEQ ID NO: 98692
  derived and/or modified CDS sequence (opt2) from hemagglutinin__InfluenzaA__ACV70634

SEQ ID NO: 99412 - RNA, 1701 nt, Artificial Sequence; identical to SEQ ID NO: 98692
  derived and/or modified CDS sequence (opt2) from hemagglutinin__InfluenzaA__ACV70644

SEQ ID NO: 99413 - RNA, 1701 nt, Artificial Sequence; identical to SEQ ID NO: 98692
  derived and/or modified CDS sequence (opt2) from hemagglutinin__InfluenzaA__ACV70654

SEQ ID NO: 99414 - RNA, 1701 nt, Artificial Sequence; identical to SEQ ID NO: 98692
  derived and/or modified CDS sequence (opt2) from hemagglutinin__InfluenzaA__ACV70664

SEQ ID NO: 99415 - RNA, 1701 nt, Artificial Sequence; identical to SEQ ID NO: 98692
  derived and/or modified CDS sequence (opt2) from hemagglutinin__InfluenzaA__ACV70674

SEQ ID NO: 99416 - RNA, 1701 nt, Artificial Sequence; identical to SEQ ID NO: 98692
  derived and/or modified CDS sequence (opt2) from hemagglutinin__InfluenzaA__ACV70684

SEQ ID NO: 99417 - RNA, 1701 nt, Artificial Sequence; identical to SEQ ID NO: 98692
  derived and/or modified CDS sequence (opt2) from hemagglutinin__InfluenzaA__ACV70694

SEQ ID NO: 99418 - RNA, 1701 nt, Artificial Sequence; identical to SEQ ID NO: 98692
  derived and/or modified CDS sequence (opt2) from hemagglutinin__InfluenzaA__ACV70704

SEQ ID NO: 99419 - RNA, 1701 nt, Artificial Sequence; identical to SEQ ID NO: 98692
  derived and/or modified CDS sequence (opt2) from hemagglutinin__InfluenzaA__ACV70714

SEQ ID NO: 99420 - RNA, 1701 nt, Artificial Sequence; identical to SEQ ID NO: 98692
  derived and/or modified CDS sequence (opt2) from hemagglutinin__InfluenzaA__ACV70724

SEQ ID NO: 99421 - RNA, 1701 nt, Artificial Sequence; identical to SEQ ID NO: 99329
  derived and/or modified CDS sequence (opt2) from hemagglutinin__InfluenzaA__ACV70734

SEQ ID NO: 99422 - RNA, 1701 nt, Artificial Sequence; identical to SEQ ID NO: 98692
  derived and/or modified CDS sequence (opt2) from hemagglutinin__InfluenzaA__ACV70744

SEQ ID NO: 99423 - RNA, 1701 nt, Artificial Sequence; identical to SEQ ID NO: 98692
  derived and/or modified CDS sequence (opt2) from hemagglutinin__InfluenzaA__ACV70754

SEQ ID NO: 99424 - RNA, 1701 nt, Artificial Sequence; identical to SEQ ID NO: 98692
  derived and/or modified CDS sequence (opt2) from hemagglutinin__InfluenzaA__ACV70764

SEQ ID NO: 99425 - RNA, 1701 nt, Artificial Sequence; identical to SEQ ID NO: 98692
  derived and/or modified CDS sequence (opt2) from hemagglutinin__InfluenzaA__ACV70784

SEQ ID NO: 99426 - RNA, 1701 nt, Artificial Sequence
  derived and/or modified CDS sequence (opt2) from hemagglutinin__InfluenzaA__ACV70794
augaaggccauccucgucguccuccucuacaccuucgccaccgccaacgccgacacccucugcaucggcuaccacgccaacaacuccaccgacaccgucgacaccguccucgagaagaacgucaccgucacccacuccgucaaccuccucgaggacaagcacaacggcaagcucugcaagcuccgcggcgucgccccccuccaccucggcaagugcaacaucgccggcuggauccucggcaaccccgagugcgagucccucuccaccgccuccuccugguccuacaucgucgagaccuccuccuccgacaacggcaccugcuaccccggcgacuucaucgacuacgaggagcuccgcgagcagcucuccuccgucuccuccuucgagcgcuucgagaucuuccccaagaccuccuccuggcccaaccacgacuccaacaagggcgccaccgccgccugcccccacgccggcgccaagggcuucuacaagaaccucaucuggcucgucaagaagggcaacuccuaccccaagcucuccaaguccuacaucaacgacaagggcaaggagguccucguccucuggggcauccaccaccccuccaccuccgccgaccagcagucccucuaccagaacgccgacgccuacgucuucgucggcuccucccgcuacuccaagaaguucaagcccgagaucgccauccgccccaagguccgcgaccaggagggccgcaugaacuacuacuggacccucgucgagcccggcgacaagaucaccuucgaggccaccggcaaccucgucgucccccgcuacgccuucgccauggagcgcaacgccggcuccggcaucaucaucuccgacacccccguccacgacugcaacaccaccugccagacccccaagggcgccaucaacaccucccuccccuuccagaacauccaccccaucaccaucggcaagugccccaaguacgucaaguccaccaagcuccgccucgccaccggccuccgcaacguccccuccauccagucccgcggccucuucggcgccaucgccggcuucaucgagggcggcuggaccggcauggucgacggcugguacggcuaccaccaccagaacgagcagggcuccggcuacgccgccgaccucaaguccacccagaacgccaucgacgagaucaccaacaaggucaacuccgucaucgagaagaugaacacccaguucaccgccgucggcaaggaguucaaccaccucgagaagcgcaucgagaaccucaacaagaaggucgacgacggcuuccucgacaucuggaccuacaacgccgagcuccucguccuccucgagaacgagcgcacccucgacuaccacgacuccaacgucaagaaccucuacgagaagguccgcucccagcucaagaacaacgccaaggagaucggcaacggcugcuucgaguucuaccacaagugcgacaacaccugcauggaguccgucaagaacggcaccuacgacuaccccaaguacuccgaggaggccaagcucaaccgcgaggagaucgacggcgucaagcucgaguccacccgcaucuaccagauccucgccaucuacuccaccgucgccuccucccucguccucgucgucucccucggcgccaucuccuucuggaugugcuccaacggcucccuccagugccgcaucugcaucuga

SEQ ID NO: 99427 - RNA, 1701 nt, Artificial Sequence; identical to SEQ ID NO: 98692
  derived and/or modified CDS sequence (opt2) from hemagglutinin__InfluenzaA__ACV70804

SEQ ID NO: 99428 - RNA, 1701 nt, Artificial Sequence; identical to SEQ ID NO: 99367
  derived and/or modified CDS sequence (opt2) from hemagglutinin__InfluenzaA__ACV70824

SEQ ID NO: 99429 - RNA, 1701 nt, Artificial Sequence; identical to SEQ ID NO: 98692
  derived and/or modified CDS sequence (opt2) from hemagglutinin__InfluenzaA__ACV70834

SEQ ID NO: 99430 - RNA, 1701 nt, Artificial Sequence
  derived and/or modified CDS sequence (opt2) from hemagglutinin__InfluenzaA__ACV70844
augaaggccauccucgucguccuccucuacaccuucgccaccgccaacgccgacacccucugcaucggcuaccacgccaacaacuccaccgacaccgucgacaccguccucgagaagaacgucaccgucacccacuccgucaaccuccucgaggacaagcacaacggcaagcucugcaagcuccgcggcgucgccccccuccaccucggcaagugcaacaucgccggcuggauccucggcaaccccgagugcgagucccucuccaccgccuccuccugguccuacaucgucgagaccuccuccuccgacaacggcaccugcuaccccggcgacuucaucgacuacgaggagcuccgcgagcagcucuccuccgucuccuccuucgagcgcuucgagaucuuccccaagaccuccuccuggcccaaccacgacuccaacaagggcgucaccgccgccugcccccacgccggcgccaagggcuucuacaagaaccucaucuggcucgucaagaagggcaacuccuaccccaagcucuccaaguccuacaucaacgacaagggcaaggagguccucguccucuggggcauccaccaccccuccaccuccgccgaccagcagucccucuaccagaacgccgacgccuacgucuucgucggcuccucccgcuacuccaagaaguucaagcccgagaucgccauccgccccaagguccgcgaccaggagggccgcaugaacuacuacuggacccucgucgagcccggcgacaagaucaccuucgaggccaccggcaaccuccucgucccccgcuacgccuucgccauggagcgcaacgccggcuccggcaucaucaucuccgacacccccguccacgacugcaacaccaccugccagacccccaagggcgccaucaacaccucccuccccuuccagaacauccaccccaucaccaucggcaagugccccaaguacgucaaguccaccaagcuccgccucgccaccggccuccgcaacguccccuccauccagucccgcggccucuucggcgccaucgccggcuucaucgagggcggcuggaccggcauggucgacggcugguacggcuaccaccaccagaacgagcagggcuccggcuacgccgccgaccucaaguccacccagaacgccaucgacgagaucaccaacaaggucaacuccgucaucgagaagaugaacacccaguucaccgccgucggcaaggaguucaaccaccucgagaagcgcaucgagaaccucaacaagaaggucgacgacggcuuccucgacaucuggaccuacaacgccgagcuccucguccuccucgagaacgagcgcacccucgacuaccacgacuccaacgucaagaaccucuacgagaagguccgcucccagcucaagaacaacgccaaggagaucggcaacggcugcuucgaguucuaccacaagugcgacaacaccugcauggaguccgucaagaacggcaccuacgacuaccccaaguacuccgaggaggccaagcucaaccgcgaggagaucgacggcgucaagcucgaguccacccgcaucuaccagauccucgccaucuacuccaccgucgccuccucccucguccucgucgucucccucggcgccaucuccuucuggaugugcuccaacggcucccuccagugccgcaucugcaucuga

SEQ ID NO: 99431 - RNA, 1701 nt, Artificial Sequence; identical to SEQ ID NO: 98692
  derived and/or modified CDS sequence (opt2) from hemagglutinin__InfluenzaA__ACV70854

SEQ ID NO: 99432 - RNA, 1701 nt, Artificial Sequence
  derived and/or modified CDS sequence (opt2) from hemagglutinin__InfluenzaA__ACV70864
augaaggccauccucgucguccuccucuacaccuucgccaccgccaacgccgacacccucugcaucggcuaccacgccaacaacuccaccgacaccgucgacaccguccucgagaagaacgucaccgucacccacuccgucaaccuccucgaggacaagcacaacggcaagcucugcaagcuccgcggcgucgccccccuccaccucggcaagugcaacaucgccggcuggauccucggcaaccccgagugcgagucccucuccaccgccuccuccugguccuacaucgucgagaccuccuccuccgacaacggcaccugcuaccccggcgacuucaucgacuacgaggagcuccgcgagcagcucuccuccgucuccuccuucgagcgcuucgagaucuuccccaagaccuccuccuggcccaaccacgacuccaacaagggcgucaccgccgccugcccccacgccggcgccaaguccuucuacaagaaccucaucuggcucgucaagaagggcaccuccuaccccaagcucuccaaguccuacaucaacgacaagggcaaggagguccucguccucuggggcauccaccaccccuccaccuccgccgaccagcagucccucuaccagaacgccgacgccuacgucuucgucggcuccucccgcuacuccaagaaguucaagcccgagaucgccauccgccccaagguccgcgaccaggagggccgcaugaacuacuacuggacccucgucgagcccggcgacaagaucaccuucgaggccaccggcaaccucgucgucccccgcuacgccuucgccauggagcgcaacgccggcuccggcaucaucaucuccgacacccccguccacgacugcaacaccaccugccagacccccaagggcgccaucaacaccucccuccccuuccagaacauccaccccaucaccaucggcaagugccccaaguacgucaaguccaccaagcuccgccucgccaccggccuccgcaacguccccuccauccagucccgcggccucuucggcgccaucgccggcuucaucgagggcggcuggaccggcauggucgacggcugguacggcuaccaccaccagaacgagcagggcuccggcuacgccgccgaccucaaguccacccagaacgccaucgacgagaucaccaacaaggucaacuccgucaucgagaagaugaacacccaguucaccgccgucggcaaggaguucaaccaccucgagaagcgcaucgagaaccucaacaagaaggucgacgacggcuuccucgacaucuggaccuacaacgccgagcuccucguccuccucgagaacgagcgcacccucgacuaccacgacuccaacgucaagaaccucuacgagaagguccgcucccagcucaagaacaacgccaaggagaucggcaacggcugcuucgaguucuaccacaagugcgacaacaccugcauggaguccgucaagaacggcaccuacgacuaccccaaguacuccgaggaggccaagcucaaccgcgaggagaucgacggcgucaagcucgaguccacccgcaucuaccagauccucgccaucuacuccaccgucgccuccucccucguccucgucgucucccucggcgccaucuccuucuggaugugcuccaacggcucccuccagugccgcaucugcaucuga

SEQ ID NO: 99433 - RNA, 1701 nt, Artificial Sequence; identical to SEQ ID NO: 98692
  derived and/or modified CDS sequence (opt2) from hemagglutinin__InfluenzaA__ACV70874

SEQ ID NO: 99434 - RNA, 1701 nt, Artificial Sequence; identical to SEQ ID NO: 98885
  derived and/or modified CDS sequence (opt2) from hemagglutinin__InfluenzaA__ACV70884

SEQ ID NO: 99435 - RNA, 1701 nt, Artificial Sequence
  derived and/or modified CDS sequence (opt2) from hemagglutinin__InfluenzaA__ACV70904
augaaggccauccucgucguccuccucuacaccuucgccaccgccaacgccgacacccucugcaucggcuaccacgccaacaacuccaccgacaccgucgacaccguccucgagaagaacgucaccgucacccacuccgucaaccuccucgaggacaagcacaacggcaagcucugcaagcuccgcggcgucgccccccuccaccucggcaagugcaacaucgccggcuggauccucggcaaccccgagugcgagucccucuccaccgccuccuccugguccuacaucgucgagaccuccuccuccgacaacggcaccugcuaccccggcgacuucaucgacuacgaggagcuccgcgagcagcucuccuccgucuccuccuucgagcgcuucgagaucuuccccaagaccuccuccuggcccaaccacgacuccaacaagggcgucaccgccgccugcccccacgccggcgccaaguccuucuacaagaaccucaucuggcucgucaagaagggcaacuccuaccccaagcucuccaaguccuacaucaacgacaagggcaaggagguccucguccucuggggcauccaccaccccuccaccuccgccgaccagcagucccucuaccagaacgccgacgccuacgucuucgucggcuccucccgcuacuccaagaaguucaagcccgagaucgccauccgccccaagguccgcgaccaggagggccgcaugaacuacuacuggacccucgucgagcccggcgacaagaucaccuucgaggccaccggcaaccucgucgucccccgcuacgccuucgccauggagcgcaacgccggcuccggcaucaucaucuccgacacccccguccacgacugcaacaccaccugccagacccccaagggcgccaucaacaccucccuccccuuccagaacauccaccccaucaccaucggcaagugccccaaguacgucaaguccaccaagcuccgccucgccaccggccuccgcaacauccccuccauccagucccgcggccucuucggcgccaucgccggcuucaucgagggcggcuggaccggcauggucgacggcugguacggcuaccaccaccagaacgagcagggcuccggcuacgccgccgaccucaaguccacccagaacgccaucgacgagaucaccaacaaggucaacuccgucaucgagaagaugaacacccaguucaccgccgucggcaaggaguucaaccaccucgagaagcgcaucgagaaccucaacaagaaggucgacgacggcuuccucgacaucuggaccuacaacgccgagcuccucguccuccucgagaacgagcgcacccucgacuaccacgacuccaacgucaagaaccucuacgagaagguccgcucccagcucaagaacaacgccaaggagaucggcaacggcugcuucgaguucuaccacaagugcgacaacaccugcauggaguccgucaagaacggcaccuacgacuaccccaaguacuccgaggaggccaagcucaaccgcgaggagaucgacggcgucaagcucgaguccacccgcaucuaccagauccucgccaucuacuccaccgucgccuccucccucguccucgucgucucccucggcgccaucuccuucuggaugugcuccaacggcucccuccagugccgcaucugcaucuga

SEQ ID NO: 99436 - RNA, 1701 nt, Artificial Sequence; identical to SEQ ID NO: 98692
  derived and/or modified CDS sequence (opt2) from hemagglutinin__InfluenzaA__ACV70914

SEQ ID NO: 99437 - RNA, 1701 nt, Artificial Sequence; identical to SEQ ID NO: 98692
  derived and/or modified CDS sequence (opt2) from hemagglutinin__InfluenzaA__ACV70924

SEQ ID NO: 99438 - RNA, 1701 nt, Artificial Sequence; identical to SEQ ID NO: 98692
  derived and/or modified CDS sequence (opt2) from hemagglutinin__InfluenzaA__ACV70934

SEQ ID NO: 99439 - RNA, 1701 nt, Artificial Sequence; identical to SEQ ID NO: 98692
  derived and/or modified CDS sequence (opt2) from hemagglutinin__InfluenzaA__ACV70944

SEQ ID NO: 99440 - RNA, 1701 nt, Artificial Sequence
  derived and/or modified CDS sequence (opt2) from hemagglutinin__InfluenzaA__ACV70954
augaaggccauccucgucguccuccucuacaccuucgccaccgccaacgccgacacccucugcaucggcuaccacgccaacaacuccaccgacaccgucgacaccguccucgagaagaacgucaccgucacccacuccgucaaccuccucgaggacaagcacaacggcaagcucugcaagcuccgcggcgucgccccccuccaccucggcaagugcaacaucgccggcuggauccucggcaaccccgagugcgagucccucuccaccgccuccuccugguccuacaucgucgagaccuccuccuccgacaacggcaccugcuaccccggcgacuucaucgacuacgaggagcuccgcgagcagcucuccuccgucuccuccuucgagcgcuucgagaucuuccccaagaccuccuccuggcccaaccacgacuccaacaagggcgucaccgccgccugcccccacgccggcgccaaguccuucuacaagaaccucaucuggcucgucaagaagggcaacuccuaccccaagcucuccaaguccuacaucaacgacaagggcaaggagguccucguccucuggggcauccaccaccccuccaccuccgccgaccagcagucccucuaccagaacgccgacgccuacgucuucgucggcuccucccgcuacuccaagaaguucaagcccgagaucgccauccgccccaagguccgcgaccaggagggccgcaugaacuacuacuggacccucgucgagcccggcgacaagaucaccuucgaggccaccggcaaccuccucgucccccgcuacgccuucgccauggagcgcaacgccggcuccggcaucaucaucuccgacacccccguccacgacugcaacaccaccugccagacccccaagggcgccaucaacaccucccuccccuuccagaacauccaccccaucaccaucggcaagugccccaaguacgucaaguccaccaagcuccgccucgccaccggccuccgcaacguccccuccauccagucccgcggccucuucggcgccaucgccggcuucaucgagggcggcuggaccggcauggucgacggcugguacggcuaccaccaccagaacgagcagggcuccggcuacgccgccgaccucaaguccacccagaacgccaucgacgagaucaccaacaaggucaacuccgucaucgagaagaugaacacccaguucaccgccgucggcaaggaguucaaccaccucgagaagcgcaucgagaaccucaacaagaaggucgacgacggcuuccucgacaucuggaccuacaacgccgagcuccucguccuccucgagaacgagcgcacccucgacuaccacgacuccaacgucaagaaccucuacgagaagguccgcucccagcucaagaacaacgccaaggagaucggcaacggcugcuucgaguucuaccacaagugcgacaacaccugcauggaguccgucaagaacggcaccuacgacuaccccaaguacuccgaggaggccaagcucaaccgcgaggagaucgacggcgucaagcucgaguccacccgcaucuaccagauccucgccaucuacuccaccgucgccuccucccucguccucgucgucucccucggcgccaucuccuucuggaugugcuccaacggcucccuccagugccgcaucugcaucuga

SEQ ID NO: 99441 - RNA, 1701 nt, Artificial Sequence; identical to SEQ ID NO: 98692
  derived and/or modified CDS sequence (opt2) from hemagglutinin__InfluenzaA__ACV70964

SEQ ID NO: 99442 - RNA, 1701 nt, Artificial Sequence; identical to SEQ ID NO: 98692
  derived and/or modified CDS sequence (opt2) from hemagglutinin__InfluenzaA__ACV70974

SEQ ID NO: 99443 - RNA, 1701 nt, Artificial Sequence; identical to SEQ ID NO: 99435
  derived and/or modified CDS sequence (opt2) from hemagglutinin__InfluenzaA__ACV70984

SEQ ID NO: 99444 - RNA, 1701 nt, Artificial Sequence; identical to SEQ ID NO: 99440
  derived and/or modified CDS sequence (opt2) from hemagglutinin__InfluenzaA__ACV70994

SEQ ID NO: 99445 - RNA, 1701 nt, Artificial Sequence; identical to SEQ ID NO: 98692
  derived and/or modified CDS sequence (opt2) from hemagglutinin__InfluenzaA__ACV71004

SEQ ID NO: 99446 - RNA, 1701 nt, Artificial Sequence
  derived and/or modified CDS sequence (opt2) from hemagglutinin__InfluenzaA__ACV82230
augaagaccaucaucgcccucuccuacauccucugccucgucuucgcccagaagcuccccggcaacgacaacuccaccgccacccucugccucggccaccacgccguccccaacggcaccaucgucaagaccaucaccaacgaccagaucgaggucaccaacgccaccgagcucguccaguccuccuccaccggcgagaucugcgacuccccccaccagauccucgacggcaagaacugcacccucaucgacgcccuccucggcgacccccagugcgacggcuuccagaacaagaagugggaccucuucgucgagcgcucccaggccuacuccaacugcuaccccuacgacguccccgacuacgccucccuccgcucccucgucgccuccuccggcacccucgaguucaacaacgaguccuucaacuggaccggcgucacccagaacggcaccuccuccgccugcauccgccgcuccaagaacuccuucuucucccgccucaacuggcucacccaccucaacuucaaguaccaggcccucaacgucaccaugcccaacaacgagcaguucgacaagcucuacaucuggggcguccaccaccccggcaccgacaaggaccagaucuuccucuacgcccaggccuccggccgcaucaccgucuccaccaagcgcucccagcagaccgucauccccaacaucggcucccgcccccgcguccgcaacauccccucccgcaucuccaucuacuggaccaucgucaagcccggcgacauccuccucaucaacuccaccggcaaccucaucgccccccgcggcuacuucaagauccaguccggcaaguccuccaucaugcgcuccgacgcccccaucggcaagugcaacuccgagugcaucacccccaacggcuccauccccaacgacaagcccuuccagaacgucaaccgcaucaccuacggcgccugcccccgcuacgucaagcagaacacccucaagcucgccaccggcaugcgcaacguccccgagaagcagacccgcggcaucuucggcgccaucgccggcuucaucgagaacggcugggagggcauggucgacggcugguacggcuuccgccaccagaacuccgagggccgcggccaggccgccgaccucaaguccacccaggccgccaucgaccagaucaacggcaagcucaaccgccucaucggcaagaccaacgagaaguuccaccagaucgagaaggaguucuccgaggucgagggccgcauccaggaccucgagaaguacgucgaggacaccaagaucgaccucugguccuacaacgccgagcuccucgucgcccucgagaaccagcacaccaucgaccucaccgacuccgagaugaacaagcucuucgagaagaccaagaagcagcuccgcgagaacgccgaggacaugggcaacggcugcuucaagaucuaccacaagugcgacaacgccugcaucggcuccauccgcaacggcaccuacgaccacgacgucuaccgcgacgaggcccucaacaaccgcuuccagaucaagggcgucgagcucaaguccggcuacaaggacuggauccucuggaucuccuucgccaucuccugcuuccuccucugcgucgcccuccucggcuucaucaugugggccugccagaagggcaacauccgcugcaacaucugcaucuga

SEQ ID NO: 99447 - RNA, 1701 nt, Artificial Sequence
  derived and/or modified CDS sequence (opt2) from hemagglutinin__InfluenzaA__ACV82232
augaagaccaucaucgcccucuccuacauccucugccucgucuucgcccagaagcuccccggcaacgacaacuccaccgccacccucugccucggccaccacgccguccccaacggcaccaucgucaagaccaucaccaacgaccagaucgaggucaccaacgccaccgagcucguccaguccuccuccaccggcgagaucugcgacuccccccaccagauccucgacggcgagaacugcacccucaucgacgcccuccucggcgacccccagugcgacggcuuccagaacaagaagugggaccucuucgucgagcgcuccaaggccuacuccaacugcuaccccuacgacguccccgacuacgccucccuccgcucccucgucgccuccuccggcacccucgaguucaacaacgaguccuucaacuggaccggcgucacccagaacggcaccuccuccgccugcauccgccgcuccaacaacuccuucuucucccgccucaacuggcucacccaccucaacuucaaguaccccgcccucaacgucaccaugcccaacaacgagcaguucgacaagcucuacaucuggggcguccaccaccccggcaccgacaaggaccagaucuuccucuacgcccaggccuccggccgcaucaccgucuccaccaagcgcucccagcaggccgucauccccaacaucggcucccgcccccgcguccgcaacauccccucccgcaucuccaucuacuggaccaucgucaagcccggcgacauccuccucaucaacuccaccggcaaccucaucgccccccgcggcuacuucaagauccgcuccggcaaguccuccaucaugcgcuccgacgcccccaucggcaagugcaacuccgagugcaucacccccaacggcuccauccccaacgacaagcccuuccagaacgucaaccgcaucaccuacggcgccugcccccgcuacgucaagcagaacacccucaagcucgccaccggcaugcgcaacguccccgagaagcagacccgcggcaucuucggcgccaucgccggcuucaucgagaacggcugggagggcauggucgacggcugguacggcuuccgccaccagaacuccgagggccgcggccaggccgccgaccucaaguccacccaggccgccaucgaccagaucaacggcaagcucaaccgccucaucggcaagaccaacgagaaguuccaccagaucgagaaggaguucuccgaggucgagggccgcauccaggaccucgagaaguacgucgaggacaccaagaucgaccucugguccuacaacgccgagcuccucgucgcccucgagaaccagcacaccaucgaccucaccgacuccgagaugaacaagcucuucgagaagaccaagaagcagcuccgcgagaacgccgaggacaugggcaacggcugcuucaagaucuaccacaagugcgacaacgccugcaucggcuccauccgcaacggcaccuacgaccacgacgucuaccgcgacgaggcccucaacaaccgcuuccagaucaagggcgucgagcucaaguccggcuacaaggacuggauccucuggaucuccuucgccaucuccugcuuccuccucugcgucgcccuccucggcuucaucaugugggccugccagaagggcaacauccgcugcaacaucugcaucuga

SEQ ID NO: 99448 - RNA, 1698 nt, Artificial Sequence
  derived and/or modified CDS sequence (opt2) from hemagglutinin__InfluenzaA__ACV82233
augaaggucaagcuccucguccuccucugcaccuucaccgccaccuacgccgacaccaucugcaucggcuaccacgccaacaacuccaccgacaccgucgacaccguccucgagaagaacgucaccgucacccacuccgucaaccuccucgagaacaaccacaacggcaagcucugccuccucaagggcaucgccccccuccagcucggcaacugcuccgucgccggcuggauccucggcaaccccgagugcgagcuccucaucuccaaggaguccugguccuacaucgucgagaagcccaaccccgagaacggcaccugcuaccccggccacuucgccgacuacgaggagcuccgcgagcagcucuccuccgucuccuccuucgagcgcuucgagaucuuccccaaggaguccuccuggcccaaccacaccgucaccggcgucuccgccuccugcucccacaacggcgagaacuccuucuaccgcaaccuccucuggcucaccggcaagaacggccucuaccccaaccucuccaaguccuacgccaacaacaaggagaaggagguccucguccucuggggcguccaccacccccccaacaucgccgaccagaagacccucuaccacaccgagaacgccuacgucuccgucgucuccucccacuacucccgcaaguucacccccgagaucgccaagcgccccaagauccgcgaccaggagggccgcaucaacuacuacuggacccuccucgagcccggcgacaccaucaucuucgaggccaacggcaaccucaucgccccccgcuacgccuucgcccucucccgcggcuucggcuccggcaucaucaacuccaacgcccccauggacaagugcgacgccaagugccagaccccccagggcgccaucaacuccucccuccccuuccagaacguccaccccgucaccaucggcgagugccccaaguacguccgcuccgccaagcuccgcauggucaccggccuccgcaacauccccuccauccagucccgcggccucuucggcgccaucgccggcuucaucgagggcggcuggaccggcauggucgacggcugguacggcuaccaccaccagaacgagcagggcuccggcuacgccgccgaccagaaguccacccagaacgccaucaacggcaucaccaacaaggucaacuccgucaucgagaagaugaacacccaguucaccgccgucggcaaggaguucaacaagcucgagcgccgcauggagaaccucaacaagaaggucgacgacggcuucaucgacaucuggaccuacaacgccgagcuccucguccuccucgagaacgagcgcacccucgacuuccacgacuccaacgucaagaaccucuacgagaaggucaagucccagcucaagaacaacgccaaggagaucggcaacggcugcuucgaguucuaccacaagugcaacgacgagugcauggaguccgucaagaacggcaccuacgacuaccccaaguacuccgaggaguccaagcucaaccgcgagaagaucgacggcgucaagcucgaguccaugggcgucuaccagauccucgccaucuacuccaccgucgccuccucccucguccuccucgucucccucggcgccaucuccuucuggaugugcuccaacggcucccuccagugccgcaucugcaucuga

SEQ ID NO: 99449 - RNA, 1701 nt, Artificial Sequence
  derived and/or modified CDS sequence (opt2) from hemagglutinin__InfluenzaA__ACV83662
augaaggccauccucgucguccuccucuacaccuucgccaccgccaacgccgacacccucugcaucggcuaccacgccaacaacuccaccgacaccgucgacaccguccucgagaagaacgucaccgucacccacuccgucaaccuccucgaggacaagcacaacggcaagcucugcaagcuccgcggcgucgccccccuccaccucggcaagugcaacaucgccggcuggauccucggcaaccccgagugcgagucccucuccaccgccuccuccugguccuacaucgucgagaccuccuccuccgacaacggcaccugcuaccccggcgacuucaucgacuacgaggagcuccgcgagcagcucuccuccgucuccuccuucgagcgcuucgagaucuuccccaagaccuccuccuggcccaaccacgacuccaacaagggcgucaccgccgccugcccccacgccggcgccaaguccuucuacaagaaccucaucuggcucgucaagaagggcaacuccuaccccaagcucuccaaguccuacaucaacgacaagggcaaggagguccucguccucuggggcauccaccaccccuccaccuccgccgaccagcagucccucuaccagaacgccgacgccuacgucuucgucggcaccucccgcuacuccaagaaguucaagcccgagaucgccauccgccccaagguccgcgaccgcgagggccgcaugaacuacuacuggacccucgucgagcccggcgacaagaucaccuucgaggccaccggcaaccucgucgucccccgcuacgccuucgccaugguccgcaacgccggcuccggcaucaucaucuccgacacccccguccacgacugcaacaccaccugccagacccccaagggcgccaucaacaccucccuccccuuccagaacauccaccccaucaccaucggcaagugccccaaguacgucaaguccaccaagcuccgccucgccaccggccuccgcaacguccccuccauccagucccgcggccucuucggcgccaucgccggcuucaucgagggcggcuggaccggcauggucgacggcugguacggcuaccaccaccagaacgagcagggcuccggcuacgccgccgaccucaaguccacccagaacgccaucgacgagaucaccaacaaggucaacuccgucaucgagaagaugaacacccaguucaccgccgucggcaaggaguucaaccaccucgagaagcgcaucgagaaccucaacaagaaggucgacgacggcuuccucgacaucuggaccuacaacgccgagcuccucguccuccucgagaacgagcgcacccucgacuaccacgacuccaacgucaagaaccucuacgagaagguccgcucccagcucaagaacaacgccaaggagaucggcaacggcugcuucgaguucuaccacaagugcgacaacaccugcauggaguccgucaagaacggcaccuacgacuaccccaaguacuccgaggaggccaagcucaaccgcgaggagaucgacggcgucaagcucgaguccacccgcaucuaccagauccucgccaucuacuccaccgucgccuccucccucguccucgucgucucccucggcgccaucuccuucuggaugugcuccaacggcucccuccagugccgcaucugcaucuga

SEQ ID NO: 99450 - RNA, 1701 nt, Artificial Sequence
  derived and/or modified CDS sequence (opt2) from hemagglutinin__InfluenzaA__ACV83663
augaaggccauccucgucguccuccucuacaccuucgccaccgccaacgccgacacccucugcaucggcuaccacgccaacaacuccaccgacaccgucgacaccguccucgagaagaacgucaccgucacccacuccgucaaccuccucgaggacaagcacaacggcaagcucugcaagcuccgcggcgucgccccccuccaccucggcaagugcaacaucgccggcuggauccucggcaaccccgagugcgagucccucuccaccgccuccuccugguccuacaucgucgagaccuccuccuccgacaacggcaccugcuaccccggcgacuucaucgacuacgaggagcuccgcgagcagcucuccuccgucuccuccuucgagcgcuucgagaucuuccccaagaccuccuccuggcccaaccacgacuccaacaagggcgucaccgccgccugcccccacgccggcgccaaguccuucuacaagaaccucaucuggcucgucaagaagggcaacuccuaccccaagcucuccaaguccuacaucaacgacaagggcaaggagguccucguccucuggggcauccaccaccccuccaccuccgccgaccagcagucccucuaccagaacgccgacgccuacgucuucgucggcaccucccgcuacuccaagaaguucaagcccgagaucgccauccgccccaagguccgcggccaggagggccgcaugaacuacuacuggacccucgucgagcccggcgacaagaucaccuucgaggccaccggcaaccucgucgucccccgcuacgccuucgccauggagcgcaacgccggcuccggcaucaucaucuccgacacccccguccacgacugcaacaccaccugccagacccccaagggcgccaucaacaccucccuccccuuccagaacauccaccccaucaccaucggcaagugccccaaguacgucaaguccaccaagcuccgccucgccaccggccuccgcaacguccccuccauccagucccgcggccucuucggcgccaucgccggcuucaucgagggcggcuggaccggcauggucgacggcugguacggcuaccaccaccagaacgagcagggcuccggcuacgccgccgaccucaaguccacccagaacgccaucgacgagaucaccaacaaggucaacuccgucaucgagaagaugaacacccaguucaccgccgucggcaaggaguucaaccaccucgagaagcgcaucgagaaccucaacaagaaggucgacgacggcuuccucgacaucuggaccuacaacgccgagcuccucguccuccucgagaacgagcgcacccucgacuaccacgacuccaacgucaagaaccucuacgagaagguccgcucccagcucaagaacaacgccaaggagaucggcaacggcugcuucgaguucuaccacaagugcgacaacaccugcauggaguccgucaagaacggcaccuacgacuaccccaaguacuccgaggaggccaagcucaaccgcgaggagaucgacggcgucaagcucgaguccacccgcaucuaccagauccucgccaucuacuccaccgucgccuccucccucguccucgucgucucccucggcgccaucuccuucuggaugugcuccaacggcucccuccagugccgcaucugcaucuga

SEQ ID NO: 99451 - RNA, 1701 nt, Artificial Sequence; identical to SEQ ID NO: 99450
  derived and/or modified CDS sequence (opt2) from hemagglutinin__InfluenzaA__ACV83664

SEQ ID NO: 99452 - RNA, 1701 nt, Artificial Sequence
  derived and/or modified CDS sequence (opt2) from hemagglutinin__InfluenzaA__ACV83665
auggaggccauccucgucguccuccucuacaccuucgccaccgccaacgccgacacccucugcaucggcuaccacgccaacaacuccaccgacaccgucgacaccguccucgagaagaacgucaccgucacccacuccgucaaccuccucgaggacaagcacaacggcaagcucugcaagcuccgcggcgucgccccccuccaccucggcaagugcaacaucgccggcuggauccucggcaaccccgagugcgagucccucuccaccgccuccuccugguccuacaucgucgagaccuccuccuccgacaacggcaccugcuaccccggcgacuucaucgacuacgaggagcuccgcgagcagcucuccuccgucuccuccuucgagcgcuucgagaucuuccccaagaccuccuccuggcccaaccacgacuccaacaagggcgucaccgccgccugcccccacgccggcgccaaguccuucuacaagaaccucaucuggcucgucaagaagggcaacuccuaccccaagcucuccaaguccuacaucaacgacaagggcaaggagguccucguccucuggggcauccaccaccccuccaccaucgccgaccagcagucccucuaccagaacgccgacgccuacgucuucgucggcuccucccgcuacuccaagaaguucaagcccgagaucgccauccgccccaagguccgcgaccaggagggccgcaugaacuacuacuggacccucgucgagcccggcgacaagaucaccuucgaggccaccggcaaccucgucgucccccgcuacgccuucgccauggagcgcaacgccggcuccggcaucaucaucuccgacacccccguccacgacugcaacaccaccugccagacccccaagggcgccaucaacaccucccuccccuuccacaacauccaccccaucaccaucggcaagugccccaaguacgucaaguccaccaagcuccgccucgccaccggccuccgcaacguccccuccauccagucccgcggccucuucggcgccaucgccggcuucaucgagggcggcuggaccggcauggucgacggcugguacggcuaccaccaccagaacgagcagggcuccggcuacgccgccgaccucaaguccacccagaacgccaucgacgagaucaccaacaaggucaacuccgucaucgagaagaugaacacccaguucaccgccgucggcaaggaguucaaccaccucgagaagcgcaucgagaaccucaacaagaaggucgacgacggcuuccucgacaucuggaccuacaacgccgagcuccucguccuccucgagaacgagcgcacccucgacuaccacgacuccaacgucaagaaccucuacgagaagguccgcucccagcucaagaacaacgccaaggagaucggcaacggcugcuucgaguucuaccacaagugcgacaacaccugcauggaguccgucaagaacggcaccuacgacuaccccaaguacuccgaggaggccaagcucaaccgcgaggagaucgacggcgucaagcucgaguccacccgcaucuaccagauccucgccaucuacuccaccgucgccuccucccucguccucgucgucucccucggcgccaucuccuucuggaugugcuccaacggcucccuccagugccgcaucugcaucuga

SEQ ID NO: 99453 - RNA, 1701 nt, Artificial Sequence
  derived and/or modified CDS sequence (opt2) from hemagglutinin__InfluenzaA__ACV83667
augaaggccauccucgucguccuccucuacaccuucgccaccgccaacgccgacacccucugcaucggcuaccacgccaacaacuccaccgacaccgucgacaccguccucgagaagaacgucaccgucacccacuccgucaaccuccucgaggacaagcacaacggcaagcucugcaagcuccgcggcgucgccccccuccaccucggcaagugcaacaucgccggcuggauccucggcaaccccgagugcgagucccucuccaccgccuccuccugguccuacaucgucgagaccuccuccuccgacaacggcaccugcuaccccggcgacuucaucgacuacgaggagcuccgcgagcagcucuccuccgucuccuccuucgagcgcuucgagaucuuccccaagaccuccuccuggcccaaccacgacuccaacaagggcgucaccgccgccugcccccacgccggcgccaaguccuucuacaagaaccucaucuggcucgucaagaagggcaacuccuaccccaagcucuccaaguccuacaucaacgacaagggcaaggagguccucguccucuggggcauccaccaccccuccaccuccgccgaccagcagucccucuaccagaacgccgacgccuacgucuucgucggcaccucccgcuacuccaagaaguucaagcccgagaucgccauccgccccaagguccgcaaccaggagggccgcaugaacuacuacuggacccucgucgagcccggcgacaagaucaccuucgaggccaccggcaaccucgucgucccccgcuacgccuucgccauggagcgcaacgccggcuccggcaucaucaucuccgacacccccguccacgacugcaacaccaccugccagacccccaagggcgccaucaacaccucccuccccuuccagaacauccaccccaucaccaucggcaagugccccaaguacgucaaguccaccaagcuccgccucgccaccggccuccgcaacguccccuccauccagucccgcggccucuucggcgccaucgccggcuucaucgagggcggcuggaccggcauggucgacggcugguacggcuaccaccaccagaacgagcagggcuccggcuacgccgccgaccucaaguccacccagaacgccaucgacgagaucaccaacaaggucaacuccgucaucgagaagaugaacacccaguucaccgccgucggcaaggaguucaaccaccucgagaagcgcaucgagaaccucaacaagaaggucgacgacggcuuccucgacaucuggaccuacaacgccgagcuccucguccuccucgagaacgagcgcacccucgacuaccacgacuccaacgucaagaaccucuacgagaagguccgcucccagcucaagaacaacgccaaggagaucggcaacggcugcuucgaguucuaccacaagugcgacaacaccugcauggaguccgucaagaacggcaccuacgacuaccccaaguacuccgaggaggccaagcucaaccgcgaggagaucgacggcgucaagcucgaguccacccgcaucuaccagauccucgccaucuacuccaccgucgccuccucccucguccucgucgucucccucggcgccaucuccuucuggaugugcuccaacggcucccuccagugccgcaucugcaucuga

SEQ ID NO: 99454 - RNA, 1701 nt, Artificial Sequence; identical to SEQ ID NO: 98705
  derived and/or modified CDS sequence (opt2) from hemagglutinin__InfluenzaA__ACV83668

SEQ ID NO: 99455 - RNA, 1701 nt, Artificial Sequence; identical to SEQ ID NO: 98705
  derived and/or modified CDS sequence (opt2) from hemagglutinin__InfluenzaA__ACV83670

SEQ ID NO: 99456 - RNA, 1701 nt, Artificial Sequence; identical to SEQ ID NO: 98947
  derived and/or modified CDS sequence (opt2) from hemagglutinin__InfluenzaA__ACV83671

SEQ ID NO: 99457 - RNA, 1701 nt, Artificial Sequence; identical to SEQ ID NO: 99267
  derived and/or modified CDS sequence (opt2) from hemagglutinin__InfluenzaA__ACV88399

SEQ ID NO: 99458 - RNA, 1701 nt, Artificial Sequence; identical to SEQ ID NO: 99267
  derived and/or modified CDS sequence (opt2) from hemagglutinin__InfluenzaA__ACV88409

SEQ ID NO: 99459 - RNA, 1701 nt, Artificial Sequence; identical to SEQ ID NO: 98692
  derived and/or modified CDS sequence (opt2) from hemagglutinin__InfluenzaA__ACV88419

SEQ ID NO: 99460 - RNA, 1698 nt, Artificial Sequence; identical to SEQ ID NO: 99314
  derived and/or modified CDS sequence (opt2) from hemagglutinin__InfluenzaA__ACV89502

SEQ ID NO: 99461 - RNA, 1701 nt, Artificial Sequence
  derived and/or modified CDS sequence (opt2) from hemagglutinin__InfluenzaA__ACV89516
augaaggcccgccuccucauccuccucugcgcccucgccgccaccgacgccgacaccaucugcaucggcuaccacgccaacaacuccaccgacaccgucgacaccguccucgagaagaacgucaccgucacccacuccgucaaccuccucgaggacucccacaacggcaagcucugccgccucaagggcaucgccccccuccagcucggcaagugcaacaucgccggcuggauccucggcaaccccgagugcgacucccuccuccccgccuccuccugguccuacaucgucgagacccccaacuccaagaacggcaucugcuaccccggcgacuucaucgacuacgaggagcuccgcgagcagcucuccuccgucuccuccuucgagcgcuucgagaucuuccccaaggaguccuccuggcccaagcacuccaccaccaagggcgucaccgccgccugcucccacgccggcaaguccuccuucuaccgcaaccuccucuggcucaccaagaagggcgacuccuaccccaagcucuccaacuccuacgucaacaagaagggcaaggagguccucguccucuggggcguccaccaccccuccuccuccaaggagcagcagacccucuaccagaacgagaacgccuacgucuccgucgucuccuccaacuacaaccgccgcuucauccccgagaucgccgagcgccccgaggucaaggaccaggccggccgcaucaacuacuacuggacccuccucgagcccggcgacaccaucaucuucgaggccaacggcaaccucgucgcccccugguacgccuucgcccucucccgcggcuucggcuccggcaucaucaccuccaacgccuccaugcacgagugcaacaccaagugccagaccccccagggcgccaucaacuccucccuccccuuccagaacauccaccccgucaccaucggcgagugccccaaguacgucaaguccgccaagcuccgcauggucaccggccuccgcaacauccccuccauccagucccgcggccucuucggcgccaucgccggcuucaucgagggcggcuggaccggcaugaucgacggcugguacggcuaccaccaccagaacgagcagggcuccggcuacgccgccgaccagaaguccacccagaacgccaucaacggcaucaccaacaaggucaacuccgucaucgagaagaugaacacccaguucaccgccgucggcaaggaguucaacaaccucgagaagcgcauggagaaccucaacaagaaggucgacgacggcuuccucgacaucuggaccuacaacgccgagcuccucguccuccucgagaacgagcgcacccucgacuuccacgacuccaacgucaagaaccucuacgagaaggucaagauccagcucaagaacaacgccaaggagaucggcaacggcugcuucgaguucuaccacaagugcgacaacgagugcauggaguccguccgcaacggcaccuacgacuaccccaaguacuccaaggaguccaagcucaaccgcgagaagaucgacggcgucaagcucgaguccaugggcgucuaccagauccucgccaucuacuccaccgucgccuccucccucguccuccucgucucccucggcgccaucuccuucuggaugugcuccaacggcucccuccagugccgcaucugcaucuga

SEQ ID NO: 99462 - RNA, 1698 nt, Artificial Sequence
  derived and/or modified CDS sequence (opt2) from hemagglutinin__InfluenzaA__ACV90512
augaacgucaagcuccucguccuccucugcaccuucaccgccaccuacgccgacaccaucugcaucggcuaccacgccaacaacuccaccgacaccgucgacaccguccucgagaagaacgucaccgucacccacuccgucaaccuccucgagaacucccacaacggcaagcucugccuccucaagggcaucgccccccuccagcucggcaacugcuccgucgccggcuggauccucggcaaccccgagugcgagcuccucaucuccaaggaguccugguccuacaucgucgagaagcccaaccccgagaacggcaccugcuaccccggccacuucgccgacuacgaggagcuccgcgagcagcucuccuccgucuccuccuucgagcgcuucgagaucuuccccaaggaguccuccuggcccaaccacaccgucaccggcgucuccgccuccugcucccacaacggcgagaacuccuucuaccgcaaccuccucuggcucaccggcaagaacggccucuaccccaaccucuccaaguccuacgccaacaacaaggagaaggagguccucguccucuggggcguccaccacccccccaacaucgccgaccagaagacccucuaccacaccgagaacgccuacgucuccgucgucuccucccacuacucccgcaaguucacccccgagaucgccaagcgccccaagguccgcgaccaggagggccgcaucaacuacuacuggacccuccucgagcccggcgacaccaucaucuucgaggccaacggcaaccucaucgccccccgcuacgccuucgcccucucccgcggcuucggcuccggcaucaucaacuccaacgcccccaucgacaagugggacgccaagugccagaccccccagggcgccaucaacuccucccuccccuuccagaacguccaccccgucaccaucggcgaguggcccaaguacguccgcuccgccaagcuccgcauggucaccggccuccgcaacauccccuccauccagucccgcggccucuucggcgccaucgccggcuucaucgagggcggcuggaccggcauggucgacggcugguacggcuaccaccaccagaacgagcagggcuccggcuacgccgccgaccagaaguccacccagaacgccaucaacggcaucaccaacaagaugaacuccgucaucgagaagaugaacacccaguucaccgccgucggcaaggaguucaacaagcucgagcgccgcauggagaaccucaacaagaaggucgacgacggcuucaucgacaucuggaccuacaacgccgagcuccucguccuccucgagaacgagcgcacccucgacuuccacgacuccaacgucaagaaccucuacgagaaggucaagucccagcucaagaacaacgccaaggagaucggcaacggcugcuucgaguucuaccacaagugcaacgacgagugcauggaguccgucaagaacggcaccuacgacuaccccaaguacuccgaggaguccaagcucaaccgcgagaagaucgacggcgucacccucgaguccaugggcgucuaccagauccucgccaucuacuccaccgucgccuccucccucguccuccucgucucccucggcgccaucuccuucuggaugugcuccaacggcucccuccagugccgcaucugcaucuga

SEQ ID NO: 99463 - RNA, 1701 nt, Artificial Sequence; identical to SEQ ID NO: 98705
  derived and/or modified CDS sequence (opt2) from hemagglutinin__InfluenzaA__ACV91672

SEQ ID NO: 99464 - RNA, 1701 nt, Artificial Sequence; identical to SEQ ID NO: 98705
  derived and/or modified CDS sequence (opt2) from hemagglutinin__InfluenzaA__ACV91676

SEQ ID NO: 99465 - RNA, 1701 nt, Artificial Sequence; identical to SEQ ID NO: 98705
  derived and/or modified CDS sequence (opt2) from hemagglutinin__InfluenzaA__ACV91680

SEQ ID NO: 99466 - RNA, 1701 nt, Artificial Sequence
  derived and/or modified CDS sequence (opt2) from hemagglutinin__InfluenzaA__ACX31591
augaagaccaucaucgcccucuccuacauccucugccucgucuucgcccagaagcuccccggcaacgacaacuccaccgccacccucugccucggccaccacgccguccccaacggcaccaucgucaagaccaucaccaacgaccagaucgaggucaccaacgccaccgagcucguccaguccuccuccaccggcgagaucugcgacuccccccaccagauccucgacggcaagaacugcacccucaucgacgcccuccucggcgacccccagugcgacggcuuccagaacaagaagugggaccucuucgucgagcgcuccaaggccuacuccaacugcuaccccuacgacguccccgacuacgccucccuccgcucccucgucgccuccuccggcacccucgaguucaacaacgaguccuucaacuggaccggcgucacccagaacggcaccuccuccgccugcauccgccgcuccaagaacuccuucuucucccgccucaacuggcucacccaccucaacuucaaguaccaggcccucaacgucaccaugcccaacaacgagcaguucgacaagcucuacaucuggggcguccaccaccccggcaccgacaaggaccagaucuuccucuacgcccaggccuccggccgcaucaccgucuccaccaagcgcucccagcagaccgucauccccaacaucggcucccgcccccgcguccgcaacauccccucccgcaucuccaucuacuggaccaucgucaagcccggcgacauccuccucaucaacuccaccggcaaccucaucgccccccgcggcuacuucaagauccaguccggcaaguccuccaucaugcgcuccgacgcccccaucggcaagugcaacuccgagugcaucacccccaacggcuccauccccaacgacaagcccuuccagaacgucaaccgcaucaccuacggcgccugcccccgcuacgucaagcagaacacccucaagcucgccaccggcaugcgcaacguccccgagaagcagacccgcggcaucuucggcgccaucgccggcuucaucgagaacggcugggagggcauggucgacggcugguacggcuuccgccaccagaacuccgagggccgcggccaggccgccgaccucaaguccacccaggccgccaucgaccagaucaacggcaagcucaaccgccucaucggcaagaccaacgagaaguuccaccagaucgagaaggaguucuccgaggucgagggccgcauccaggaccucgagaaguacgucgaggacaccaagaucgaccucugguccuacaacgccgagcuccucgucgcccucgagaaccagcacaccaucgaccucaccgacuccgagaugaacaagcucuucgagaagaccaagaagcagcuccgcgagaacgccgaggacaugggcaacggcugcuucaagaucuaccacaagugcgacaacgccugcaucggcuccauccgcaacggcaccuacgaccacgacgucuaccgcgacgaggcccucaacaaccgcuuccagaucaagggcgucgagcucaaguccggcuacaaggacuggauccucuggaucuccuucgccaucuccugcuuccuccucugcgucgcccuccucggcuucaucaugugggccugccagaagggcaacauccgcugcaacaucugcaucuga

SEQ ID NO: 99467 - RNA, 1701 nt, Artificial Sequence
  derived and/or modified CDS sequence (opt2) from hemagglutinin__InfluenzaA__ACX31933
augaaggccauccucgucguccuccucuacaccuucgccaccgccaacgccgacacccucugcaucggcuaccacgccaacaacuccaccgacaccgucgacaccguccucgagaagaacgucaccgucacccacuccgucaaccuccucgaggacaagcacaacggcaagcucugcaagcuccgcggcgucgccccccuccaccucggcaagugcaacaucgccggcuggauccucggcaaccccgagugcgagucccucuccaccgccuccuccugguccuacaucgucgagaccuccuccuccggcaacggcaccugcuaccccggcgacuucaucgacuacgaggagcuccgcgagcagcucuccuccgucuccuccuucgagcgcuucgagaucuuccccaagaccuccuccuggcccaaccacgacuccaacaagggcgucaccgccgccugcccccacgccggcgccaaguccuucuacaagaaccucaucuggcucgucaagaagggcaacuccuaccccaagcucuccaaguccuacaucaacgacaagggcaaggagguccucguccucuggggcauccaccaccccuccaccuccgccgaccagcagucccucuaccagaacgccgacgccuacgucuucgucggcaccucccgcuacuccaagaaguucaagcccgagaucgccauccgccccaagguccgcgaccaggagggccgcaugaacuacuacuggacccucgucgagcccggcgacaagaucaccuucgaggccaccggcaaccucgucgucccccgcuacgccuucgccauggagcgcaacgccggcuccggcaucaucaucuccgacacccccguccacgacugcaacaccaccugccagacccccaagggcgccaucaacaccucccuccccuuccagaacauccaccccaucaccaucggcaagugccccaaguacgucaaguccaccaagcuccgccucgccaccggccuccgcaacguccccuccauccagucccgcggccucuucggcgccaucgccggcuucaucgagggcggcuggaccggcauggucgacggcugguacggcuaccaccaccagaacgagcagggcuccggcuacgccgccgaccucaaguccacccagaacgccaucgacgagaucaccaacaaggucaacuccgucaucgagaagaugaacacccaguucaccgccgucggcaaggaguucaaccaccucgagaagcgcaucgagaaccucaacaagaaggucgacgacggcuuccucgacaucuggaccuacaacgccgagcuccucguccuccucgagaacgagcgcacccucgacuaccacgacuccaacgucaagaaccucuacgagaagguccgcucccagcucaagaacaacgccaaggagaucggcaacggcugcuucgaguucuaccacaagugcgacaacaccugcauggaguccgucaagaacggcaccuacgacuaccccaaguacuccgaggaggccaagcucaaccgcgaggagaucaacggcgucaagcucgaguccacccgcaucuaccagauccucgccaucuacuccaccgucgccuccucccucguccucgucgucucccucggcgccaucuccuucuggaugugcuccaacggcucccuccagugccgcaucugcaucuga

SEQ ID NO: 99468 - RNA, 1701 nt, Artificial Sequence
  derived and/or modified CDS sequence (opt2) from hemagglutinin__InfluenzaA__ACX31934
augaaggccauccucgucguccuccucuacaccuucgccaccgccaacgccgacacccucugcaucggcuaccacgccaacaacuccaccgacaccgucgacaccguccucgagaagaacgucaccgucacccacuccgucaaccuccucgaggacaagcacaacggcaagcucugcaagcuccgcggcgucgccccccuccaccucggcaagugcaacaucgccggcuggauccucggcaaccccgagugcgagucccucuccaccgccuccuccugguccuacaucgucgagaccuccuccuccgacaacggcaccugcuaccccggcgacuucaucgacuacgaggagcuccgcgagcagcucuccuccgucuccuccuucgagcgcuucgagaucuuccccaagaccuccuccuggcccaaccacgacuccaacaagggcgucaccgccgccugcccccacgccggcgccaaguccuucuacaagaaccucaucuggcucgucaagaagggcaacuccuaccccaagcucuccaaguccuacaucaacgacaagggcaaggagguccucguccucuggggcauccaccaccccuccaccuccgccgaccagcagucccucuaccagaacgccgacgccuacgucuucgucggcaccucccgcuacuccaagaaguucaagcccgagaucaccauccgccccaagguccgcggccaggagggccgcaugaacuacuacuggacccucgucgagcccggcgacaagaucaccuucgaggccaccggcaaccucgucgucccccgcuacgccuucgccauggagcgcaacgccggcuccggcaucaucaucuccgacacccccguccacgacugcaacaccaccugccagacccccaagggcgccaucaacaccucccuccccuuccagaacauccaccccaucaccaucggcaagugccccaaguacgucaaguccaccaagcuccgccucgccaccggccuccgcaacguccccuccauccagucccgcggccucuucggcgccaucgccggcuucaucgagggcggcuggaccggcauggucgacggcugguacggcuaccaccaccagaacgagcagggcuccggcuacgccgccgaccucaaguccacccagaacgccaucgacgagaucaccaacaaggucaacuccgucaucgagaagaugaacacccaguucaccgccgucggcaaggaguucaaccaccucgagaagcgcaucgagaaccucaacaagaaggucgacgacggcuuccucgacaucuggaccuacaacgccgagcuccucguccuccucgagaacgagcgcacccucgacuaccacgacuccaacgucaagaaccucuacgagaagguccgcucccagcucaagaacaacgccaaggagaucggcaacggcugcuucgaguucuaccacaagugcgacaacaccugcauggaguccgucaagaacggcaccuacgacuaccccaaguacuccgaggaggccaagcucaaccgcgaggagaucgacggcgucaagcucgaguccacccgcaucuaccagauccucgccaucuacuccaccgucgccuccucccucguccucgucgucucccucggcgccaucuccuucuggaugugcuccaacggcucccuccagugccgcaucugcaucuga

SEQ ID NO: 99469 - RNA, 1701 nt, Artificial Sequence; identical to SEQ ID NO: 98705
  derived and/or modified CDS sequence (opt2) from hemagglutinin__InfluenzaA__ACX31935

SEQ ID NO: 99470 - RNA, 1701 nt, Artificial Sequence; identical to SEQ ID NO: 98705
  derived and/or modified CDS sequence (opt2) from hemagglutinin__InfluenzaA__ACX31936

SEQ ID NO: 99471 - RNA, 1701 nt, Artificial Sequence; identical to SEQ ID NO: 98796
  derived and/or modified CDS sequence (opt2) from hemagglutinin__InfluenzaA__ACX31939

SEQ ID NO: 99472 - RNA, 1701 nt, Artificial Sequence; identical to SEQ ID NO: 98796
  derived and/or modified CDS sequence (opt2) from hemagglutinin__InfluenzaA__ACX31940

SEQ ID NO: 99473 - RNA, 1701 nt, Artificial Sequence; identical to SEQ ID NO: 98705
  derived and/or modified CDS sequence (opt2) from hemagglutinin__InfluenzaA__ACX31943

SEQ ID NO: 99474 - RNA, 1701 nt, Artificial Sequence; identical to SEQ ID NO: 98705
  derived and/or modified CDS sequence (opt2) from hemagglutinin__InfluenzaA__ACX31946

SEQ ID NO: 99475 - RNA, 1701 nt, Artificial Sequence; identical to SEQ ID NO: 98705
  derived and/or modified CDS sequence (opt2) from hemagglutinin__InfluenzaA__ACX31947

SEQ ID NO: 99476 - RNA, 1701 nt, Artificial Sequence; identical to SEQ ID NO: 98705
  derived and/or modified CDS sequence (opt2) from hemagglutinin__InfluenzaA__ACX31948

SEQ ID NO: 99477 - RNA, 1701 nt, Artificial Sequence
  derived and/or modified CDS sequence (opt2) from hemagglutinin__InfluenzaA__ACX31949
augaaggccauccucgucguccuccucuacaccuucgccaccgccaacgccgacacccucugcaucggcuaccacgccaacaacuccaccgacaccgucgacaccguccucgagaagaacgucaccgucacccacuccgucaaccuccucgaggacaagcacaacggcaagcucugcaagcuccgcggcgucgccccccuccaccucggcaagugcaacaucgccggcuggauccucggcaaccccgagugcgagucccucuccaccgccuccuccugguccuacaucgucgagaccuccuccuccgacaacggcaccugcuaccccggcgacuucaucgacuacgaggagcuccgcgagcagcucuccuccgucuccuccuucgagcgcuucgagaucuuccccaagaccuccuccuggcccaaccacgacuccaacaagggcgucaccgccgccugcccccacgccggcgccaaguccuucuacaagaaccucaucuggcucgucaagaagggcaacuccuaccccaagcucuccaaguccuacaucaacgacaagggcaaggagguccucguccucuggggcauccaccaccccuccaccuccgccgaccagcagucccucuaccagaacgccgacgccuacgucuucgucggcaccucccgcuacuccaagaaguucaagcccgagaucgccauccgccccaagguccgcgaccaggagggccgcaugaacuacuacuggacccucgucgagcccggcgacaagaucaccuucgaggccaccggcaaccucgucgucccccgcuacgccuucgccauggagcgcaacgccggcuccggcaucaucaucuccgacacccccguccacuacugcaacaccaccugccagacccccaagggcgccaucaacaccucccuccccuuccagaacauccaccccaucaccaucggcaagugccccaaguacgucaaguccaccaagcuccgccucgccaccggccuccgcaacguccccuccauccagucccgcggccucuucggcgccaucgccggcuucaucgagggcggcuggaccggcauggucgacggcugguacggcuaccaccaccagaacgagcagggcuccggcuacgccgccgaccucaaguccacccagaacgccaucgacgagaucaccaacaaggucaacuccgucaucgagaagaugaacacccaguucaccgccgucggcaaggaguucaaccaccucgagaagcgcaucgagaaccucaacaagaaggucgacgacggcuuccucgacaucuggaccuacaacgccgagcuccucguccuccucgagaacgagcgcacccucgacuaccacgacuccaacgucaagaaccucuacgaggagguccgcucccagcucaagaacaacgccaaggagaucggcaacggcugcuucgaguucuaccacaagugcgacaacaccugcauggaguccgucaagaacggcaccuacgacuaccccaaguacuccgaggaggccaagcucaaccgcgaggagaucgacggcgucaagcucgaguccacccgcaucuaccagauccucgccaucuacuccaccgucgccuccucccucguccucgucgucucccucggcgccaucuccuucuggaugugcuccaacggcucccuccagugccgcaucugcaucuga

SEQ ID NO: 99478 - RNA, 1701 nt, Artificial Sequence; identical to SEQ ID NO: 98705
  derived and/or modified CDS sequence (opt2) from hemagglutinin__InfluenzaA__ACX31950

SEQ ID NO: 99479 - RNA, 1701 nt, Artificial Sequence; identical to SEQ ID NO: 98705
  derived and/or modified CDS sequence (opt2) from hemagglutinin__InfluenzaA__ACX31951

SEQ ID NO: 99480 - RNA, 1701 nt, Artificial Sequence; identical to SEQ ID NO: 98705
  derived and/or modified CDS sequence (opt2) from hemagglutinin__InfluenzaA__ACX31954

SEQ ID NO: 99481 - RNA, 1701 nt, Artificial Sequence; identical to SEQ ID NO: 98705
  derived and/or modified CDS sequence (opt2) from hemagglutinin__InfluenzaA__ACX31955

SEQ ID NO: 99482 - RNA, 1701 nt, Artificial Sequence; identical to SEQ ID NO: 98692
  derived and/or modified CDS sequence (opt2) from hemagglutinin__InfluenzaA__ACX31956

SEQ ID NO: 99483 - RNA, 1701 nt, Artificial Sequence; identical to SEQ ID NO: 98705
  derived and/or modified CDS sequence (opt2) from hemagglutinin__InfluenzaA__ACX31957

SEQ ID NO: 99484 - RNA, 1701 nt, Artificial Sequence; identical to SEQ ID NO: 98692
  derived and/or modified CDS sequence (opt2) from hemagglutinin__InfluenzaA__ACX31958

SEQ ID NO: 99485 - RNA, 1701 nt, Artificial Sequence; identical to SEQ ID NO: 98947
  derived and/or modified CDS sequence (opt2) from hemagglutinin__InfluenzaA__ACX31960

SEQ ID NO: 99486 - RNA, 1701 nt, Artificial Sequence
  derived and/or modified CDS sequence (opt2) from hemagglutinin__InfluenzaA__ACX31961
augaaggccauccucgucgucaugcucuacaccuucgccaccgccaacgccgacacccucugcaucggcuaccacgccaacaacuccaccgacaccgucgacaccguccucgagaagaacgucaccgucacccacuccgucaaccuccucgaggacaagcacaacggcaagcucugcaagcuccgcggcgucgccccccuccaccucggcaagugcaacaucgccggcuggauccucggcaaccccgagugcgagucccucuccaccgccuccuccugguccuacaucgucgagaccuccuccuccgacaacggcaccugcuaccccggcgacuucaucgacuacgaggagcuccgcgagcagcucuccuccgucuccuccuucgagcgcuucgagaucuuccccaagaccuccuccuggcccaaccacgacuccaacaagggcgucaccgccgccugcccccacgccggcgccaaguccuucuacaagaaccucaucuggcucgucaagaagggcaacuccuaccccaagcucuccaaguccuacaucaacgacaagggcaaggagguccucguccucuggggcauccaccaccccuccaccuccgccgaccagcagucccucuaccagaacgccgacgccuacgucuucgucggcuccucccgcuacuccaagaaguucaagcccgagaucgccauccgccccaagguccgcgaccaggagggccgcaugaacuacuacuggacccucgucgagcccggcgacaagaucaccuucgaggccaccggcaaccucgucgucccccgcuacgccuucgccauggagcgcaacgccggcuccggcaucaucaucuccgacacccccguccacgacugcaacaccaccugccagacccccaagggcgccaucaacaccucccuccccuuccagaacauccaccccaucaccaucggcaagugccccaaguacgucaaguccaccaagcuccgccucgccaccggccuccgcaacguccccuccauccagucccgcggccucuucggcgccaucgccggcuucaucgagggcggcuggaccggcauggucgacggcugguacggcuaccaccaccagaacgagcagggcuccggcuacgccgccgaccucaaguccacccagaacgccaucgacgagaucaccaacaaggucaacuccgucaucgagaagaugaacacccaguucaccgccgucggcaaggaguucaaccaccucgagaagcgcaucgagaaccucaacaagaaggucgacgacggcuucauggacaucuggaccuacaacgccgagcuccucguccuccucgagaacgagcgcacccucgacuaccacgacuccaacgucaagaaccucuacgagaagguccgcucccagcucaagaacaacgccaaggagaucggcaacggcugcuucgaguucuaccacaagugcgacaacaccugcauggaguccgucaagaacggcaccuacgacuaccccaaguacuccgaggaggccaagcucaaccgcgaggagaucgacggcgucaagcucgaguccacccgcaucuaccagauccucgccaucuacuccaccgucgccuccucccucguccucgucgucucccucggcgccaucuccuucuggaugugcuccaacggcucccuccagugccgcaucugcaucuga

SEQ ID NO: 99487 - RNA, 1701 nt, Artificial Sequence; identical to SEQ ID NO: 98705
  derived and/or modified CDS sequence (opt2) from hemagglutinin__InfluenzaA__ACX31962

SEQ ID NO: 99488 - RNA, 1701 nt, Artificial Sequence; identical to SEQ ID NO: 98705
  derived and/or modified CDS sequence (opt2) from hemagglutinin__InfluenzaA__ACX31964

SEQ ID NO: 99489 - RNA, 1701 nt, Artificial Sequence; identical to SEQ ID NO: 98692
  derived and/or modified CDS sequence (opt2) from hemagglutinin__InfluenzaA__ACX35237

SEQ ID NO: 99490 - RNA, 1701 nt, Artificial Sequence; identical to SEQ ID NO: 98705
  derived and/or modified CDS sequence (opt2) from hemagglutinin__InfluenzaA__ACX35247

SEQ ID NO: 99491 - RNA, 1701 nt, Artificial Sequence; identical to SEQ ID NO: 98705
  derived and/or modified CDS sequence (opt2) from hemagglutinin__InfluenzaA__ACX35257

SEQ ID NO: 99492 - RNA, 1701 nt, Artificial Sequence; identical to SEQ ID NO: 98705
  derived and/or modified CDS sequence (opt2) from hemagglutinin__InfluenzaA__ACX35267

SEQ ID NO: 99493 - RNA, 1701 nt, Artificial Sequence; identical to SEQ ID NO: 98705
  derived and/or modified CDS sequence (opt2) from hemagglutinin__InfluenzaA__ACX35277

SEQ ID NO: 99494 - RNA, 1701 nt, Artificial Sequence; identical to SEQ ID NO: 98705
  derived and/or modified CDS sequence (opt2) from hemagglutinin__InfluenzaA__ACX35287

SEQ ID NO: 99495 - RNA, 1701 nt, Artificial Sequence; identical to SEQ ID NO: 98705
  derived and/or modified CDS sequence (opt2) from hemagglutinin__InfluenzaA__ACX35297

SEQ ID NO: 99496 - RNA, 1701 nt, Artificial Sequence
  derived and/or modified CDS sequence (opt2) from hemagglutinin__InfluenzaA__ACX35307
augaaggccauccucgucguccuccucuacaccuucgccaccgccaacgccgacacccucugcaucggcuaccacgccaacaacuccaccgacaccgucgacaccguccucgagaagaacgucaccgucacccacuccgucaaccuccucgaggacaagcacaacggcaagcucugcaagcuccgcggcgucgccccccuccaccucggcaagugcaacaucgccggcuggauccucggcaaccccgagugcgagucccucuccaccgccuccuccugguccuacaucgucgagaccuccuccuccgacaacggcaccugcuaccccggcgacuucaucgacuacgaggagcuccgcgagcagcucuccuccgucuccuccuucgagcgcuucgagaucuuccccaagaccuccuccuggcccaaccacgacuccaacaagggcgucaccgccgccugcccccacgccggcgccaaguccuucuacaagaaccucaucuggcucgucaagaagggcaacuccuaccccaagcucuccaaguccuacaucaacgacaagggcaaggagguccucguccucuggggcauccaccaccccuccaccuccgccgaccagcagucccucuaccagaacgccgacgccuacgucuucgucggcaccucccgcuacuccaagaaguucaagcccgagaucgccauccgccccaagguccgcgaccaggagggccgcaugaacuacuacuggacccucgucggccccggcgacaagaucaccuucgaggccaccggcaaccucgucgucccccgcuacgccuucgccauggagcgcaacgccggcuccggcaucaucaucuccgacacccccguccacgacugcaacaccaccugccagacccccaagggcgccaucaacaccucccuccccuuccagaacauccaccccaucaccaucggcaagugccccaaguacgucaaguccaccaagcuccgccucgccaccggccuccgcaacguccccuccauccagucccgcggccucuucggcgccaucgccggcuucaucgagggcggcuggaccggcauggucgacggcugguacggcuaccaccaccagaacgagcagggcuccggcuacgccgccgaccucaaguccacccagaacgccaucgacgagaucaccaacaaggucaacuccgucaucgagaagaugaacacccaguucaccgccgucggcaaggaguucaaccaccucgagaagcgcaucgagaaccucaacaagaaggucgacgacggcuuccucgacaucuggaccuacaacgccgagcuccucguccuccucgagaacgagcgcacccucgacuaccacgacuccaacgucaagaaccucuacgagaagguccgcucccagcucaagaacaacgccaaggagaucggcaacggcugcuucgaguucuaccacaagugcgacaacaccugcauggaguccgucaagaacggcaccuacgacuaccccaaguacuccgaggaggccaagcucaaccgcgaggagaucgacggcgucaagcucgaguccacccgcaucuaccagauccucgccaucuacuccaccgucgccuccucccucguccucgucgucucccucggcgccaucuccuucuggaugugcuccaacggcucccuccagugccgcaucugcaucuga

SEQ ID NO: 99497 - RNA, 1701 nt, Artificial Sequence; identical to SEQ ID NO: 98947
  derived and/or modified CDS sequence (opt2) from hemagglutinin__InfluenzaA__ACX35317

SEQ ID NO: 99498 - RNA, 1701 nt, Artificial Sequence
  derived and/or modified CDS sequence (opt2) from hemagglutinin__InfluenzaA__ACX35327
augaaggccauccucgucguccuccucuacaccuucgccaccgccaacgccgacacccucugcaucggcuaccacgccaacaacuccaccgacaccgucgacaccguccucgagaagaacgucaccgucacccacuccgucaaccuccucgaggacaagcacaacggcaagcucugcaagcuccgcggcgucgccccccuccaccucggcaagugcaacaucgccggcuggauccucggcaaccccgagugcgagucccucuccaccgccuccuccugguccuacaucgucgagaccuccuccuccgacaacggcaccugcuaccccggcgacuucaucgacuacgaggagcuccgcgagcagcucuccuccgucuccuccuucgagcgcuucgagaucuuccccaagaccuccuccuggcccaaccacgacuccaacaagggcgucaccgccgccugcccccacgccggcgccaaguccuucuacaagaaccucaucuggcucgucaagaagggcaacuccuaccccaagcucuccaaguccuacaucaacgacaagggcaaggagguccucguccucuggggcauccaccaccccuccaccuccgccgaccagcagucccucuaccagaacgccgacuccuacgucuucgucggcaccucccgcuacuccaagaaguucaagcccgagaucgccauccgccccaagguccgcgaccaggagggccgcaugaacuacuacuggacccucgucgagcccggcgacaagaucaccuucgaggccaccggcaaccucgucgucccccgcuacgccuucgccauggagcgcaacgccggcuccggcaucaucaucuccgacacccccguccacgacugcaacaccaccugccagacccccaagggcgccaucaacaccucccuccccuuccagaacauccaccccaucaccaucggcaagugccccaaguacgucaaguccaccaagcuccgccucgccaccggccuccgcaacguccccuccauccagucccgcggccucuucggcgccaucgccggcuucaucgagggcggcuggaccggcauggucgacggcugguacggcuaccaccaccagaacgagcagggcuccggcuacgccgccgaccucaaguccacccagaacgccaucgacgagaucaccaacaaggucaacuccgucaucgagaagaugaacacccaguucaccgccgucggcaaggaguucaaccaccucgagaagcgcaucgagaaccucaacaagaaggucgacgacggcuuccucgacaucuggaccuacaacgccgagcuccucguccuccucgagaacgagcgcacccucgacuaccacgacuccaacgucaagaaccucuacgagaagguccgcucccagcucaagaacaacgccaaggagaucggcaacggcugcuucgaguucuaccacaagugcgacaacaccugcauggaguccgucaagaacggcaccuacgacuaccccaaguacuccgaggaggccaagcucaaccgcgaggagaucgacggcgucaagcucgaguccacccgcaucuaccagauccucgccaucuacuccaccgucgccuccucccucguccucgucgucucccucggcgccaucuccuucuggaugugcuccaacggcucccuccagugccgcaucugcaucuga

SEQ ID NO: 99499 - RNA, 1701 nt, Artificial Sequence
  derived and/or modified CDS sequence (opt2) from hemagglutinin__InfluenzaA__ACX36501
augaaggccauccucgucguccuccucuacaccuucgccaccgccaacgccgacacccucugcaucggcuaccacgccaacaacuccaccgacaccgucgacaccguccucgagaagaacgucaccgucacccacuccgucaaccuccucgaggacaagcacaacggcaagcucugcaagcuccgcggcgucgccccccuccaccucggcaagugcaacaucgccggcuggauccucggcaaccccgagugcgagucccucuccaccgccuccuccugguccuacaucgucgagaccuccuccuccgacaacggcaccugcuaccccggcgacuucaucgacuacgaggagcuccgcgagcagcucuccuccgucuccuccuucgagcgcuucgagaucuuccccaagaccuccuccuggcccaaccacgacuccaacaagggcgucaccgccgccugcccccacgccggcgccaaguccuucuacaagaaccucaucuggcucgucaagaagggcaacuccuaccccaagcucuccaaguccuacaucaacgacaagggcaaggagguccucguccucuggggcauccaccaccccuccaccuccgccgaccagcaguccaucuaccagaacgccgacgccuacgucuucgucggcaccucccgcuacuccaagaaguucaagcccgagaucgccauccgccccaagguccgcgaccaggagggccgcaugaacuacuacuggacccucgucgagcccggcgacaagaucaccuucgaggccaccggcaaccucgucgucccccgcuacgccuucgccauggagcgcaacgccggcuccggcaucaucaucuccgacacccccguccacgacugcaacaccaccugccagacccccaagggcgccaucaacaccucccuccccuuccagaacauccaccccaucaccaucggcaagugccccaaguacgucaaguccaccaagcuccgccucgccaccggccuccgcaacguccccuccauccagucccgcggccucuucggcgccaucgccggcuucaucgagggcggcuggaccggcauggucgacggcugguacggcuaccaccaccagaacgagcagggcuccggcuacgccgccgaccucaaguccacccagaacgccaucgacgagaucaccaacaaggucaacuccgucaucgagaagaugaacacccaguucaccgccgucggcaaggaguucaaccaccucgagaagcgcaucgagaaccucaacaagaaggucgacgacggcuuccucgacaucuggaccuacaacgccgagcuccucguccuccucgagaacgagcgcacccucgacuaccacgacuccaacgucaagaaccucuacgagaagguccgcucccagcucaagaacaacgccaaggagaucggcaacggcugcuucgaguucuaccacaagugcgacaacaccugcauggaguccgucaagaacggcaccuacgacuaccccaaguacuccgaggaggccaagcucaaccgcgaggagaucgacggcgucaagcucgaguccacccgcaucuaccagauccucgccaucuacuccaccgucgccuccucccucguccucgucgucucccucggcgccaucuccuucuggaugugcuccaacggcucccuccagugccgcaucugcaucuga

SEQ ID NO: 99500 - RNA, 1701 nt, Artificial Sequence
  derived and/or modified CDS sequence (opt2) from hemagglutinin__InfluenzaA__ACX36502
augaaggccauccucgucguccuccucuacaccuucgccaccgccaacgccgacacccucugcaucggcuaccacgccaacaacuccaccgacaccgucgacaccauccucgagaagaacgucaccgucacccacuccgucaaccuccucgaggacaagcacaacggcaagcucugcaagcuccgcggcgucgccccccuccaccucggcaagugcaacaucgccggcuggauccucggcaaccccgagugcgagucccucuccaccgccuccuccugguccuacaucgucgagaccuccuccuccgacaacggcaccugcuaccccggcgacuucaucgacuacgaggagcuccgcgagcagcucuccuccgucuccuccuucgagcgcuucgagaucuuccccaagaccuccuccuggcccaaccacgacuccaacaagggcgucaccgccgccugcccccacgccggcgccaaguccuucuacaagaaccucaucuggcucgucaagaagggcaacuccuaccccaagcucuccaaguccuacaucaacgacaagggcaaggagguccucguccucuggggcauccaccaccccuccaccuccgccgaccagcaguccaucuaccagaacgccgacgccuacgucuucgucggcaccucccgcuacuccaagaaguucaagcccgagaucgccauccgccccaagguccgcgaccaggagggccgcaugaacuacuacuggacccucgucgagcccggcgacaagaucaccuucgaggccaccggcaaccucgucgucccccgcuacgccuucgccauggagcgcaacgccggcuccggcaucaucaucuccgacacccccguccacgacugcaacaccaccugccagacccccaagggcgccaucaacaccucccuccccuuccagaacauccaccccaucaccaucggcaagugccccaaguacgucaaguccaccaagcuccgccucgccaccggccuccgcaacguccccuccauccagucccgcggccucuucggcgccaucgccggcuucaucgagggcggcuggaccggcauggucgacggcugguacggcuaccaccaccagaacgagcagggcuccggcuacgccgccgaccucaaguccacccagaacgccaucgacgagaucaccaacaaggucaacuccgucaucgagaagaugaacacccaguucaccgccgucggcaaggaguucaaccaccucgagaagcgcaucgagaaccucaacaagaaggucgacgacggcuuccucgacaucuggaccuacaacgccgagcuccucguccuccucgagaacgagcgcacccucgacuaccacgacuccaacgucaagaaccucuacgagaagguccgcucccagcucaagaacaacgccaaggagaucggcaacggcugcuucgaguucuaccacaagugcgacaacaccugcauggaguccgucaagaacggcaccuacgacuaccccaaguacuccgaggaggccaagcucaaccgcgaggagaucgacggcgucaagcucgaguccacccgcaucuaccagauccucgccaucuacuccaccgucgccuccucccucguccucgucgucucccucggcgccaucuccuucuggaugugcuccaacggcucccuccagugccgcaucugcaucuga

SEQ ID NO: 99501 - RNA, 1701 nt, Artificial Sequence
  derived and/or modified CDS sequence (opt2) from hemagglutinin__InfluenzaA__ACX36503
augaaggccauccucgucguccuccucuacaccuucgccaccgccaacgccgacacccucugcaucggcuaccacgccaacaacuccaccgacaccgucgacaccauccucgagaagaacgucaccgucacccacuccgucaaccuccucgaggacaagcacaacggcaagcucugcaagcuccgcggcgucgccccccuccaccucggcaagugcaacaucgccggcuggauccucggcaaccccgagugcgagucccucuccaccgccuccuccugguccuacaucgucgagaccuccuccuccgacaacggcaccugcuaccccggcgacuucaucgacuacgaggagcuccgcgagcagcucuccuccgucuccuccuucgagcgcuucgagaucuuccccaagaccuccuccuggcccaaccacgacuccaacaagggcgucaccgccgccugcccccacgccggcgccaaguccuucuacaagaaccucaucuggcucgucaagaagggcaacuccuaccccaagcucuccaaguccuacaucaacgacaagggcaaggagguccucguccucuggggcauccaccaccccuccaccuccgccgaccagcaguccaucuaccagaacgccgacgccuacgucuucgucggcaccucccgcuacuccaagaaguucaagcccgagaucgccauccgccccaagguccgcgaccaggagggccgcaugaacuacuacuggacccucgucgagcccggcgacaagaucaccuucgaggccaccggcaaccucgucgucccccgcuacgccuucgccauggagcgcaacgccggcuccggcaucaucaucuccgacacccccguccacgacugcaacaccaccugccagacccccaagggcgccaucaacaccucccuccccuuccagaacauccaccccaucaccaucggcaagugccccaaguacgucaaguccaccaagcuccgccucgccaccggccuccgcaacguccccuccauccagucccgcggccucuucggcgccaucgccggcuucaucgagggcggcuggaccggcauggucgacggcugguacggcuaccaccaccagaacgagcagggcuccggcuacgccgccgaccucaaguccacccagaacgccaucgacgagaucaccaacaaggucaacuccgucaucgagaagaugaacacccaguucaccgccgucggcaaggaguucaaccaccucgagaagcgcaucgagaaccucaacaagaaggucgacgacggcuuccucgacaucuggaccuacaacgccgagcuccucguccuccucgagaacgagcgcacccucgacuaccacgacuccaacgucaagaaccucuacgagaagguccgcucccagcucaagaacaacaccaaggagaucggcaacggcugcuucgaguucuaccacaagugcgacaacaccugcauggaguccgucaagaacggcaccuacgacuaccccaaguacuccgaggaggccaagcucaaccgcgaggagaucgacggcgucaagcucgaguccacccgcaucuaccagauccucgccaucuacuccaccgucgccuccucccucguccucgucgucucccucggcgccaucuccuucuggaugugcuccaacggcucccuccagugccgcaucugcaucuga

SEQ ID NO: 99502 - RNA, 1701 nt, Artificial Sequence
  derived and/or modified CDS sequence (opt2) from hemagglutinin__InfluenzaA__ACX47367
augaaggccauccucgucguccuccucuacaccuucgccaccgccaacgccgacacccucugcaucggcuaccacgccaacaacuccaccgacaccgucgacaccguccucgagaagaacgucaccgucacccacuccgucaaccuccucgaggacaagcacaacggcaagcucugcaagcuccgcggcgucgccccccuccaccucggcaagugcaacaucgccggcuggauccucggcaaccccgagugcgagucccucuccaccgccuccuccugguccuacaucgucgagaccuccuccuccgacaacggcaccugcuaccccggcgacuucaucgacuacgaggagcuccgcgagcagcucuccuccgucuccuccuucgagcgcuucgagaucuuccccaagaccuccuccuggcccaaccacgaccccaacaagggcgucaccgccgccugcccccacgccggcgccaaguccuucuacaagaaccucaucuggcucgucaagaagggcaacuccuaccccaagcucuccaaguccuacaucaacgacaagggcaaggagguccucguccucuggggcauccaccaccccuccaccuccgccgaccagcagucccucuaccagaacgccgacgccuacgucuucgucggcaccucccgcuacuccaagaaguucaagcccgagaucgccauccgccccaagguccgcgaccaggagggccgcaugaacuacuacuggacccucgucaagcccggcgacaagaucaccuucgaggccaccggcaaccucgucgucccccgcuacgccuucgccauggagcgcaacgccggcuccggcaucaucaucuccgacacccccguccacgacugcaacaccaccugccagacccccaagggcgccaucaacaccucccuccccuuccagaacauccaccccaucaccaucggcaagugccccaaguacgucaaguccaccaagcuccgccucgccaccggccuccgcaacguccccuccauccagucccgcggccucuucggcgccaucgccggcuucaucgagggcggcuggaccggcauggucgacggcugguacggcuaccaccaccagaacgagcagggcuccggcuacgccgccgaccucaaguccacccagaacgccaucgacgagaucaccaacaaggucaacuccgucaucgagaagaugaacacccaguucaccgccgucggcaaggaguucaaccaccucgagaagcgcaucgagaaccucaacaagaaggucgacgacggcuuccucgacaucuggaccuacaacgccgagcuccucguccuccucgagaacgagcgcacccucgacuaccacgacuccaacgucaagaaccucuacgagaagguccgcucccagcucaagaacaacgccaaggagaucggcaacggcugcuucgaguucuaccacaagugcgacaacaccugcauggaguccgucaagaacggcaccuacgacuaccccaaguacuccgaggaggccaagcucaaccgcgaggagaucgacggcgucaagcucgaguccacccgcaucuaccagauccucgccaucuacuccaccgucgccuccucccucguccucgucgucucccucggcgccaucuccuucuggaugugcuccaacggcucccuccagugccgcaucugcaucuga

SEQ ID NO: 99503 - RNA, 1701 nt, Artificial Sequence
  derived and/or modified CDS sequence (opt2) from hemagglutinin__InfluenzaA__ACX47368
augaaggccauccucgucguccuccucuacaccuucgccaccgccaacgccgacacccucugcaucggcuaccacgccaacaacuccaccgacaccgucgacaccguccucgagaagaacgucaccgucacccacuccgucaaccuccucgaggacaagcacaacggcaagcucugcaagcuccgcggcgucgccccccuccaccucggcaagugcaacaucgccggcuggauccucggcaaccccgagugcgagucccucuccaccgccuccuccugguccuacaucgucgagaccuccuccuccgacaacggcaccugcuaccccggcgacuucaucgacuacgaggagcuccgcgagcagcucuccuccgucuccuccuucgagcgcuucgagaucuuccccaagaccuccuccuggcccaaccacgaccccaacaagggcgucaccgccgccugcccccacgccggcgccaaguccuucuacaagaaccucaucuggcucgucaagaagggcaacuccuaccccaagcucuccaaguccuacaucaacgacaagggcaaggagguccucguccucuggggcauccaccaccccuccaccuccgccgaccagcagucccucuaccagaacgccgacgccuacgucuucgucggcaccucccgcuacuccaagaaguucaagcccgagaucgccauccgccccaagguccgcgaccaggagggccgcaugaacuacuacuggacccucgucgagcccggcgacaagaucaccuucgaggccaccggcaaccucgucgucccccgcuacgccuucgccauggagcgcaacgccggcuccggcaucaucaucuccgacacccccguccacgacugcaacaccaccugccagacccccaagggcgccaucaacaccucccuccccuuccagaacauccaccccaucaccaucggcaagugccccaaguacgucaaguccaccaagcuccgccucgccaccggccuccgcaacguccccuccauccagucccgcggccucuucggcgccaucgccggcuucaucgagggcggcuggaccggcauggucgacggcugguacggcuaccaccaccagaacgagcagggcuccggcuacgccgccgaccucaaguccacccagaacgccaucgacgagaucaccaacaaggucaacuccgucaucgagaagaugaacacccaguucaccgccgucggcaaggaguucaaccaccucgagaagcgcaucgagaaccucaacaagaaggucgacgacggcuuccucgacaucuggaccuacaacgccgagcuccucguccuccucgagaacgagcgcacccucgacuaccacgacuccaacgucaagaaccucuacgagaagguccgcucccagcucaagaacaacgccaaggagaucggcaacggcugcuucgaguucuaccacaagugcgacaacaccugcauggaguccgucaagaacggcaccuacgacuaccccaaguacuccgaggaggccaagcucaaccgcgaggagaucgacggcgucaagcucgaguccacccgcaucuaccagauccucgccaucuacuccaccgucgccuccucccucguccucgucgucucccucggcgccaucuccuucuggaugugcuccaacggcucccuccagugccgcaucugcaucuga

SEQ ID NO: 99504 - RNA, 1701 nt, Artificial Sequence; identical to SEQ ID NO: 99503
  derived and/or modified CDS sequence (opt2) from hemagglutinin__InfluenzaA__ACX47369

SEQ ID NO: 99505 - RNA, 1701 nt, Artificial Sequence
  derived and/or modified CDS sequence (opt2) from hemagglutinin__InfluenzaA__ACX47370
augaaggccauccucgucguccuccucuacaccuucgccaccgccaacgccgacacccucugcaucggcuaccacgccaacaacuccaccgacaccgucgacaccguccucgagaagaacgucaccgucacccacuccgucaaccuccucgaggacaagcacaacggcaagcucugcaagcuccgcggcgucgccccccuccaccucggcaagugcaacaucgccggcuggauccucggcaaccccgagugcgagucccucuccaccgccuccuccugguccuacaucgucgagaccuccuccuccgacaacggcaccugcuaccccggcgacuucaucgacuacgaggagcuccgcgagcagcucuccuccgucuccuccuucgagcgcuucgagaucuuccccaagaccuccuccuggcccaaccacgaccccaacaagggcgucaccgccgccugcccccacgccggcgccaaguccuucuacaagaaccucaucuggcucgucaagaagggcaacuccuaccccaagcucuccaaguccuacaucaacgacaagggcaaggagguccucguccucuggggcauccaccaccccuccaccuccgccgaccgccagucccucuaccagaacgccgacgccuacgucuucgucggcaccucccgcuacuccaagaaguucaagcccgagaucgccauccgccccaagguccgcgaccaggagggccgcaugaacuacuacuggacccucgucgagcccggcgacaagaucaccuucgaggccaccggcaaccucgucgucccccgcuacgccuucgccauggagcgcaacgccggcuccggcaucaucaucuccgacacccccguccacgacugcaacaccaccugccagacccccaagggcgccaucaacaccucccuccccuuccagaacauccaccccaucaccaucggcaagugccccaaguacgucaaguccaccaagcuccgccucgccaccggccuccgcaacguccccuccauccagucccgcggccucuucggcgccaucgccggcuucaucgagggcggcuggaccggcauggucgacggcugguacggcuaccaccaccagaacgagcagggcuccggcuacgccgccgaccucaaguccacccagaacgccaucgacgagaucaccaacaaggucaacuccgucaucgagaagaugaacacccaguucaccgccgucggcaaggaguucaaccaccucgagaagcgcaucgagaaccucaacaagaaggucgacgacggcuuccucgacaucuggaccuacaacgccgagcuccucguccuccucgagaacgagcgcacccucgacuaccacgacuccaacgucaagaaccucuacgagaagguccgcucccagcucaagaacaacgccaaggagaucggcaacggcugcuucgaguucuaccacaagugcgacaacaccugcauggaguccgucaagaacggcaccuacgacuaccccaaguacuccgaggaggccaagcucaaccgcgaggagaucgacggcgucaagcucgaguccacccgcaucuaccagauccucgccaucuacuccaccgucgccuccucccucguccucgucgucucccucggcgccaucuccuucuggaugugcuccaacggcucccuccagugccgcaucugcaucuga

SEQ ID NO: 99506 - RNA, 1701 nt, Artificial Sequence; identical to SEQ ID NO: 99503
  derived and/or modified CDS sequence (opt2) from hemagglutinin__InfluenzaA__ACX47371

SEQ ID NO: 99507 - RNA, 1701 nt, Artificial Sequence; identical to SEQ ID NO: 99503
  derived and/or modified CDS sequence (opt2) from hemagglutinin__InfluenzaA__ACX47372

SEQ ID NO: 99508 - RNA, 1701 nt, Artificial Sequence; identical to SEQ ID NO: 99503
  derived and/or modified CDS sequence (opt2) from hemagglutinin__InfluenzaA__ACX47373

SEQ ID NO: 99509 - RNA, 1701 nt, Artificial Sequence; identical to SEQ ID NO: 99503
  derived and/or modified CDS sequence (opt2) from hemagglutinin__InfluenzaA__ACX47374

SEQ ID NO: 99510 - RNA, 1701 nt, Artificial Sequence
  derived and/or modified CDS sequence (opt2) from hemagglutinin__InfluenzaA__ACX47375
augaaggccauccucgucguccuccucuacaccuucgccaccgccaacgccgacacccucugcaucggcuaccacgccaacaacuccaccgacaccgucgacaccguccucgagaagaacgucaccgucacccacuccgucaaccuccucgaggacaagcacaacggcaagcucugcaagcuccgcggcgucgccccccuccaccucggcaagugcaacaucgccggcuggauccucggcaaccccgagugcgagucccucuccaccgccuccuccugguccuacaucgucgagaccuccuccuccgacaacggcaccugcuaccccggcgacuucaucgacuacgaggagcuccgcgagcagcucuccuccgucuccuccuucgagcgcuucgagaucuuccccaagaccuccuccuggcccaaccacgaccccaacaagggcgucaccgccgccugcccccacgccggcgccaaguccuucuacaagaaccucaucuggcucgucaagaagggcaacuccuaccccaagcucuccaaguccuacaucaacgacaagggcaaggagguccucguccucuggggcauccaccaccccuccaccuccgccgaccagcagucccucuaccagaacgccgacgccuacgucuucgucggcaccucccgcuacuccaagaaguucaagcccgagaucgccauccgccccaagguccgcgaccaggagggccgcaugaacuacuacuggacccucgucgagcccggcgacaagaucaccuucgaggccaccggcaaccucgucgucccccgcuacgccuucgccauggagcgcaacgccggcuccggcaucaucaucuccgacacccccguccacgacugcaacaccaccugccagacccccaacggcgccaucaacaccucccuccccuuccagaacauccaccccaucaccaucggcaagugccccaaguacgucaaguccaccaagcuccgccucgccaccggccuccgcaacguccccuccauccagucccgcggccucuucggcgccaucgccggcuucaucgagggcggcuggaccggcauggucgacggcugguacggcuaccaccaccagaacgagcagggcuccggcuacgccgccgaccucaaguccacccagaacgccaucgacgagaucaccaacaaggucaacuccgucaucgagaagaugaacacccaguucaccgccgucggcaaggaguucaaccaccucgagaagcgcaucgagaaccucaacaagaaggucgacgacggcuuccucgacaucuggaccuacaacgccgagcuccucguccuccucgagaacgagcgcacccucgacuaccacgacuccaacgucaagaaccucuacgagaagguccgcucccagcucaagaacaacgccaaggagaucggcaacggcugcuucgaguucuaccacaagugcgacaacaccugcauggaguccgucaagaacggcaccuacgacuaccccaaguacuccgaggaggccaagcucaaccgcgaggagaucgacggcgucaagcucgaguccacccgcaucuaccagauccucgccaucuacuccaccgucgccuccucccucguccucgucgucucccucggcgccaucuccuucuggaugugcuccaacggcucccuccagugccgcaucugcaucuga

SEQ ID NO: 99511 - RNA, 1701 nt, Artificial Sequence; identical to SEQ ID NO: 99503
  derived and/or modified CDS sequence (opt2) from hemagglutinin__InfluenzaA__ACX47376

SEQ ID NO: 99512 - RNA, 1701 nt, Artificial Sequence; identical to SEQ ID NO: 99503
  derived and/or modified CDS sequence (opt2) from hemagglutinin__InfluenzaA__ACX47377

SEQ ID NO: 99513 - RNA, 1701 nt, Artificial Sequence
  derived and/or modified CDS sequence (opt2) from hemagglutinin__InfluenzaA__ACX47380
augaaggccauccucgucguccuccucuacaccuucgccaccgccaacgccgacacccucugcaucggcuaccacgccaacaacuccaccgacaccgucgacaccguccucgagaagaacgucaccgucacccacuccgucaaccuccucgaggacaagcacaacggcaagcucugcaagcuccgcggcgucgccccccuccaccucggcaagugcaacaucgccggcuggauccucggcaaccccgagugcgagucccucuccaccaccuccuccugguccuacaucgucgagaccuccuccuccgacaacggcaccugcuaccccggcgacuucaucgacuacgaggagcuccgcgagcagcucuccuccgucuccuccuucgagcgcuucgagaucuuccccaagaccuccuccuggcccaaccacgacuccaacaagggcgucaccgccgccugcccccacgccggcgccaaguccuucuacaagaaccucaucuggcucgucaagaagggcaacuccuaccccaagcucuccaaguccuacaucaacgacaagggcaaggagguccucguccucuggggcauccaccaccccuccaccuccgccgaccagcagucccucuaccagaacgccgacgccuacgucuucgucggcaccucccgcuacuccaagaaguucaagcccgagaucgccauccgccccaagguccgcgaccaggagggccgcaugaacuacuacuggacccucgucgagcccggcgacaagaucaccuucgaggccaccggcaaccucgucgucccccgcuacgccuucgucauggagcgcaacgccggcuccggcaucaucaucuccgacacccccguccacgacugcaacaccaccugccagacccccaagggcgccaucaacaccucccuccccuuccagaacauccaccccaucaccaucggcaagugccccaaguacgucaaguccaccaagcuccgccucgccaccggccuccgcaacguccccuccauccagucccgcggccucuucggcgccaucgccggcuucaucgagggcggcuggaccggcauggucgacggcugguacggcuaccaccaccagaacgagcagggcuccggcuacgccgccgaccucaaguccacccagaacgccaucgacgagaucaccaacaaggucaacuccgucaucgagaagaugaacacccaguucaccgccgucggcaaggaguucaaccaccucgagaagcgcaucgagaaccucaacaagaaggucgacgacggcuuccucgacaucuggaccuacaacgccgagcuccucguccuccucgagaacgagcgcacccucgacuaccacgacuccaacgucaagaaccucuacgagaagguccgcucccagcucaagaacaacgccaaggagaucggcaacggcugcuucgaguucuaccacaagugcgacaacaccugcauggaguccgucaagaacggcaccuacgacuaccccaaguacuccgaggaggccaagcucaaccgcgaggagaucgacggcgucaagcucgaguccacccgcaucuaccagauccucgccaucuacuccaccgucgccuccucccucguccucgucgucucccucggcgccaucuccuucuggaugugcuccaacggcucccuccagugccgcaucugcaucuga

SEQ ID NO: 99514 - RNA, 1701 nt, Artificial Sequence; identical to SEQ ID NO: 99513
  derived and/or modified CDS sequence (opt2) from hemagglutinin__InfluenzaA__ACX47381

SEQ ID NO: 99515 - RNA, 1701 nt, Artificial Sequence; identical to SEQ ID NO: 99513
  derived and/or modified CDS sequence (opt2) from hemagglutinin__InfluenzaA__ACX47382

SEQ ID NO: 99516 - RNA, 1701 nt, Artificial Sequence
  derived and/or modified CDS sequence (opt2) from hemagglutinin__InfluenzaA__ACX47383
augaaggccauccucgucguccuccucuacaccuucgccaccgccaacgccgacacccucugcaucggcuaccacgccaacaacuccaccgacaccgucgacaccguccucgagaagaacgucaccgucacccacuccgucaaccuccucgaggacaagcacaacggcaagcucugcaagcuccgcggcgucgccccccuccaccucggcaagugcaacaucgccggcuggauccucggcaaccccgagugcgagucccucuccaccaccuccuccugguccuacaucgucgagaccuccuccuccgacaacggcaccugcuaccccggcgacuucaucgacuacgaggagcuccgcgagcagcucuccuccgucuccuccuucgagcgcuucgagaucuuccccaagaccuccuccuggcccaaccacgacuccaacaagggcgucaccgccgccugcccccacgccggcgccaaguccuucuacaagaaccucaucuggcucgucaagaagggcaacuccuaccccaagcucuccaaguccuacaucaacgacaagggcaaggagguccucguccucuggggcauccaccaccccuccaccuccgccgaccagcagucccucuaccagaacgccgacgccuacgucuucgucggcaccucccgcuacuccaagaaguucaagcccgagaucgccauccgccccaagguccgcgaccaggagggccgcaugaacuacuacuggacccucgucgagcccggcgacaagaucaccuucgaggccaccggcaaccucgucgucccccgcuacgccuucgccauggagcgcaacgccggcuccggcaucaucaucuccgacacccccguccacgacugcaacaccaccugccagacccccaagggcgccaucaacaccucccuccccuuccagaacauccaccccaucaccaucggcaagugccccaaguacgucaaguccaccaagcuccgccucgccaccggccuccgcaacguccccuccauccagucccgcggccucuucggcgccaucgccggcuucaucgagggcggcuggaccggcauggucgacggcugguacggcuaccaccaccagaacgagcagggcuccggcuacgccgccgaccucaaguccacccagaacgccaucgacgagaucaccaacaaggucaacuccgucaucgagaagaugaacacccaguucaccgccgucggcaaggaguucaaccaccucgagaagcgcaucgagaaccucaacaagaaggucgacgacggcuuccucgacaucuggaccuacaacgccgagcuccucguccuccucgagaacgagcgcacccucgacuaccacgacuccaacgucaagaaccucuacgagaagguccgcucccagcucaagaacaacgccaaggagaucggcaacggcugcuucgaguucuaccacaagugcgacaacaccugcauggaguccgucaagaacggcaccuacgacuaccccaaguacuccgaggaggccaagcucaaccgcgagaagaucgacggcgucaagcucgaguccacccgcaucuaccagauccucgccaucuacuccaccgucgccuccucccucguccucgucgucucccucggcgccaucuccuucuggaugugcuccaacggcucccuccagugccgcaucugcaucuga

SEQ ID NO: 99517 - RNA, 1701 nt, Artificial Sequence
  derived and/or modified CDS sequence (opt2) from hemagglutinin__InfluenzaA__ACX47384
augaaggccauccucgucguccuccucuacaccuucgccaccgccaacgccgacacccucugcaucggcuaccacgccaacaacuccaccgacaccgucgacaccguccucgagaagaacgucaccgucacccacuccgucaaccuccucgaggacaagcacaacggcaagcucugcaagcuccgcggcgucgccccccuccaccucggcaagugcaacaucgccggcuggauccucggcaaccccgagugcgagucccucuccaccaccuccuccugguccuacaucgucgagaccuccuccuccgacaacggcaccugcuaccccggcgacuucaucgacuacgaggagcuccgcgagcagcucuccuccgucuccuccuucgagcgcuucgagaucuuccccaagaccuccuccuggcccaaccacgacuccaacaagggcgucaccgccgccugcccccacgccggcgccaaguccuucuacaagaaccucaucuggcucgucaagaagggcaacuccuaccccaagcucuccaaguccuacaucaacgacaagggcaaggagguccucguccucuggggcauccaccaccccuccaccuccgccgaccagcagucccucuaccagaacgccgacgccuacgucuucgucggcaccucccgcuacuccaagaaguucaagcccgagaucgccauccgccccaagguccgcgaccaggagggccgcaugaacuacuacuggacccucgucgagcccggcgacaagaucaccuucgaggccaccggcaaccucgucgucccccgcuacgccuucgccauggagcgcaacgccggcuccggcaucaucaucuccgacacccccguccacgacugcaacaccaccugccagacccccaagggcgccaucaacaccucccuccccuuccagaacauccaccccaucaccaucggcaagugccccaaguacgucaaguccaccaagcuccgccucgccaccggccuccgcaacguccccuccauccagucccgcggccucuucggcgccaucgccggcuucaucgagggcggcuggaccggcauggucgacggcugguacggcuaccaccaccagaacgagcagggcuccggcuacgccgccgaccucaaguccacccagaacgccaucgacgagaucaccaacaaggucaacuccgucaucgagaagaugaacacccaguucaccgccgucggcaaggaguucaaccaccucgagaagcgcaucgagaaccucaacaagaaggucgacgacggcuuccucgacaucuggaccuacaacgccgagcuccucguccuccucgagaacgagcgcacccucgacuaccacgacuccaacgucaagaaccucuacgagaagguccgcucccagcucaagaacaacgccaaggagaucggcaacggcugcuucgaguucuaccacaagugcgacaacaccugcauggaguccgucaagaacggcaccuacgacuaccccaaguacuccgaggaggccaagcucaaccgcgaggagaucgacggcgucaagcucgaguccacccgcaucuaccagauccucgccaucuacuccaccgucgccuccucccucguccucgucgucucccucggcgccaucuccuucuggaugugcuccaacggcucccuccagugccgcaucugcaucuga

SEQ ID NO: 99518 - RNA, 1701 nt, Artificial Sequence; identical to SEQ ID NO: 99517
  derived and/or modified CDS sequence (opt2) from hemagglutinin__InfluenzaA__ACX47385

SEQ ID NO: 99519 - RNA, 1701 nt, Artificial Sequence; identical to SEQ ID NO: 99517
  derived and/or modified CDS sequence (opt2) from hemagglutinin__InfluenzaA__ACX47387

SEQ ID NO: 99520 - RNA, 1701 nt, Artificial Sequence; identical to SEQ ID NO: 98705
  derived and/or modified CDS sequence (opt2) from hemagglutinin__InfluenzaA__ACX55834

SEQ ID NO: 99521 - RNA, 1701 nt, Artificial Sequence; identical to SEQ ID NO: 99503
  derived and/or modified CDS sequence (opt2) from hemagglutinin__InfluenzaA__ACX61574

SEQ ID NO: 99522 - RNA, 1701 nt, Artificial Sequence; identical to SEQ ID NO: 98705
  derived and/or modified CDS sequence (opt2) from hemagglutinin__InfluenzaA__ACX61575

SEQ ID NO: 99523 - RNA, 1701 nt, Artificial Sequence
  derived and/or modified CDS sequence (opt2) from hemagglutinin__InfluenzaA__ACX83577
augaaggccauccucgucguccuccucuacaccuucgccaccgccaacgccgacacccucugcaucggcuaccacgccaacaacuccaccgacaccgucgacaccguccucgagaagaacgucaccgucacccacuccgucaaccuccucgaggacaagcacaacggcaagcucugcaagcuccgcggcgucgccccccuccaccucggcaagugcaacaucgccggcuggauccucggcaaccccgagugcgaguccuucuccaccuccuccuccugguccuacaucgucgagaccuccuccuccgacaacggcaccugcuaccccggcgacuucaucgacuacgaggagcuccgcgagcagcucuccuccgucuccuccuucgagcgcuucgagaucuuccccaagaccuccuccuggcccaaccacgacuccaacaagggcgucaccgccgccugcccccacgccggcgccaaguccuucuacaagaaccucaucuggcucgucaagaagggcaacuccuaccccaagcucuccaaguccuacaucaacgacaagggcaaggagguccucguccucuggggcauccaccaccccuccaccuccgccgaccagcagucccucuaccagaacgccgacgccuacgucuucgucggcaccucccgcuacuccaagaaguucaagcccgagaucgccauccgccccaagguccgcggccaggagggccgcaugaacuacuacuggacccucgucgagcccggcgacaagaucaccuucgaggccaccggcaaccucgucgucccccgcuacgccuucgccauggagcgcaacgccggcuccggcaucaucaucuccgacacccccguccacgacugcaacaccaccugccagacccccaagggcgccaucaacaccucccuccccuuccagaacauccaccccaucaccaucggcaagugccccaaguacgucaaguccaccaagcuccgccucgccaccggccuccgcaacguccccuccauccagucccgcggccucuucggcgccaucgccggcuucaucgagggcggcuggaccggcauggucgacggcugguacggcuaccaccaccagaacgagcagggcuccggcuacgccgccgaccucaaguccacccagaacgccaucgacgagaucaccaacaaggucaacuccgucaucgagaagaugaacacccaguucaccgccgucggcaaggaguucaaccaccucgagaagcgcaucgagaaccucaacaagaaggucgacgacggcuuccucgacaucuggaccuacaacgccgagcuccucguccuccucgagaacgagcgcacccucgacuaccacgacuccaacgucaagaaccucuacgagaagguccgcucccagcucaagaacaacgccaaggagaucggcaacggcugcuucgaguucuaccacaagugcgacaacaccugcauggaguccgucaagaacggcaccuacgacuaccccaaguacuccgaggaggccaagcucaaccgcgaggagaucgacggcgucaagcucgaguccacccgcaucuaccagauccucgccaucuacuccaccgucgccuccucccucguccucgucgucucccucggcgccaucuccuucuggaugugcuccaacggcucccuccagugccgcaucugcaucuga

SEQ ID NO: 99524 - RNA, 1701 nt, Artificial Sequence
  derived and/or modified CDS sequence (opt2) from hemagglutinin__InfluenzaA__ACX94091
augaaggccauccucgucguccuccucuacaccuucgccaccgccaacgccgacacccucugcaucggcuaccacgccaacaacuccaccgacaccgucgacaccguccucgagaagaacgucaccgucacccacuccgucaaccuccucgaggacaagcacaacggcaagcucugcaagcuccgcggcgucgccccccuccaccucggcaagugcaacaucgccggcuggauccucggcaaccccgagugcgagucccucuccaccgccuccuccugguccuacaucgucgagaccuccuccuccgacaacggcaccugcuaccccggcgacuucaucgacuacgaggagcuccgcgagcagcucuccuccgucuccuccuucgagcgcuucgagaucuuccccaagaccaucuccuggcccaaccacgacuccaacaagggcgucaccgccgccugcccccacgccggcgccaaguccuucuacaagaaccucaucuggcucgucaagaagggcaacuccuaccccaagcucuccaaguccuacaucaacgacaagggcaaggagguccucguccucuggggcauccaccaccccuccaccuccgccgaccagcagucccucuaccagaacgccgacgccuacgucuucgucggcaccucccgcuacuccaagaaguucaagcccgagaucgccauccgccccaagguccgcgaccaggagggccgcaugaacuacuacuggacccucgucgagcccggcgacaagaucaccuucgaggccaccggcaaccucgucgucccccgcuacgccuucgccauggagcgcaacgccggcuccggcaucaucaucuccgacacccccguccacgacugcaacaccaccugccagacccccaagggcgccaucaacaccucccuccccuuccagaacauccaccccaucaccaucggcaagugcuccaaguacgucaaguccaccaagcuccgccucgccaccggccuccgcaacguccccuccauccagucccgcggccucuucggcgccaucgccggcuucaucgagggcggcuggaccggcauggucgacggcugguacggcuaccaccaccagaacgagcagggcuccggcuacgccgccgaccucaaguccacccagaacgccaucgacgagaucaccaacaaggucaacuccgucaucgagaagaugaacacccaguucaccgccgucggcaaggaguucaaccaccucgagaagcgcaucgagaaccucaacaagaaggucgacgacggcuuccucgacaucuggaccuacaacgccgagcuccucguccuccucgagaacgagcgcacccucgacuaccacgacuccaacgucaagaaccucuacgagaagguccgcucccagcucaagaacaacgccaaggagaucggcaacggcugcuucgaguucuaccacaagugcgacaacaccugcauggaguccgucaagaacggcaccuacgacuaccccaaguacuccgaggaggccaagcucaaccgcgaggagaucgacggcgucaagcucgaguccacccgcaucuaccagauccucgccaucuacuccaccgucgccuccucccucguccucgucgucucccucggcgccaucuccuucuggaugugcuccaacggcucccuccagugccgcaucugcaucuga

SEQ ID NO: 99525 - RNA, 1701 nt, Artificial Sequence
  derived and/or modified CDS sequence (opt2) from hemagglutinin__InfluenzaA__ACY26192
augaaggccauccucgucguccuccucuacaccuucgccaccgccaacgccgacacccucugcaucggcuaccacgccaacaacuccaccgacaccgucgacaccguccucgagaagaacgucaccgucacccacuccgucaaccuccucgaggacaagcacaacggcaagcucugcaagcuccgcggcgucgccccccuccaccucggcaagugcaacaucgccggcuggauccucggcaaccccgagugcgagucccucuccaccgccuccuccugguccuacaucgucgagaccuccuccuccgacaacggcaccugcuaccccggcgacuucaucgacuacgaggagcuccgcgagcagcucuccuccgucuccuccuucgagcgcuucgagaucuuccccaagaccuccuccuggcccaaccacgacuccaacaagggcgucaccgccgccugcccccacgccggcgccaaguccuucuacaagaaccucaucuggcucgucaagaagggcaacuccuaccccaagcucuccaaguccuacaucaacgacaagggcaaggagguccucguccucuggggcauccaccaccccuccaccuccgccgaccagcagucccucuaccagaacgccgacgccuacgucuucgucggcaccucccgcuacuccaagaaguucaagcccgagaucgccauccgccccaagguccgcgaccaggagggccgcaugaacuacuacuggacccucgucgagcccggcgacaagaucaccuucgaggccaccggcaaccucgucgucccccgcuacgccuucgccauggagcgcaacgccggcuccggcaucaucaucuccgacacccccguccacaacugcaacaccaccugccagacccccaagggcgccaucaacaccucccuccccuuccagaacauccaccccaucaccaucggcaagugccccaaguacgucaaguccaccaagcuccgccucgccaccggccuccgcaacguccccuccauccagucccgcggccucuucggcgccaucgccggcuucaucgagggcggcuggaccggcauggucgacggcugguacggcuaccaccaccagaacgagcagggcuccggcuacgccgccgaccucaaguccacccaggacgccaucgacgagaucaccaacaaggucaacuccgucaucgagaagaugaacacccaguucaccgccgucggcaaggaguucaaccaccucgagaagcgcaucgagaaccucaacaagaaggucgacgacggcuuccucgacaucuggaccuacaacgccgagcuccucguccuccucgagaacgagcgcacccucgacuaccacgacuccaacgucaagaaccucuacgagaagguccgcucccagcucaagaacaacgccaaggagaucggcaacggcugcuucgaguucuaccacaagugcgacaacaccugcauggaguccgucaagaacggcaccuacgacuaccccaaguacuccgaggaggccaagcucaaccgcgaggagaucgacggcgucaagcucgaguccacccgcaucuaccagauccucgccaucuacuccaccgucgccuccucccucguccucgucgucucccucggcgccaucuccuucuggaugugcuccaacggcucccuccagugccgcaucugcaucuga

SEQ ID NO: 99526 - RNA, 1701 nt, Artificial Sequence; identical to SEQ ID NO: 99274
  derived and/or modified CDS sequence (opt2) from hemagglutinin__InfluenzaA__ACY26202

SEQ ID NO: 99527 - RNA, 1701 nt, Artificial Sequence; identical to SEQ ID NO: 98705
  derived and/or modified CDS sequence (opt2) from hemagglutinin__InfluenzaA__ACY46103

SEQ ID NO: 99528 - RNA, 1701 nt, Artificial Sequence; identical to SEQ ID NO: 98705
  derived and/or modified CDS sequence (opt2) from hemagglutinin__InfluenzaA__ACY46113

SEQ ID NO: 99529 - RNA, 1701 nt, Artificial Sequence
  derived and/or modified CDS sequence (opt2) from hemagglutinin__InfluenzaA__ACY46123
augaaggccauccucgucguccuccucuacaccuucgccaccgccaacgccgacacccucugcaucggcuaccacgccaacaacuccaccgacaccgucgacaccguccucgagaagaacgucaccgucacccacuccgucaaccuccucgaggacaagcacaacggcaagcucugcaagcuccgcggcgucgccccccuccaccucggcaagugcaacaucgccggcuggauccucggcaaccccgagugcgagucccucuccaccgccuccuccugguccuacaucgucgagaccuccuccuccgacaacggcaccugcuaccccggcgacuucaucgacuacgaggagcuccgcgagcagcucuccuccgucuccuccuucgagcgcuucgagaucuuccccaagaccuccuccuggcccaaccacgacuccaacaagggcgucaccgccgccugcccccacgccggcgccaaguccuucuacaagaaccucaucuggcucgucaagaagggcaacuccuaccccaagcucuccaaguccuacaucaacgacaagggcaaggagguccucguccucuggggcauccaccaccccuccaccuccgccgaccagcagucccucuaccagaacgccgacgccuacgucuucgucggcaccucccgcuacuccaagaaguucaagcccgagaucgccauccgccccaaggucggcgaccaggagggccgcaugaacuacuacuggacccucgucgagcccggcgacaagaucaccuucgaggccaccggcaaccucgucgucccccgcuacgccuucgccauggagcgcaacgccggcuccggcaucaucaucuccgacacccccguccacgacugcaacaccaccugccagacccccaagggcgccaucaacaccucccuccccuuccagaacauccaccccaucaccaucggcaagugccccaaguacgucaaguccaccaagcuccgccucgccaccggccuccgcaacguccccuccauccagucccgcggccucuucggcgccaucgccggcuucaucgagggcggcuggaccggcauggucgacggcugguacggcuaccaccaccagaacgagcagggcuccggcuacgccgccgaccucaaguccacccagaacgccaucgacgagaucaccaacaaggucaacuccgucaucgagaagaugaacacccaguucaccgccgucggcaaggaguucaaccaccucgagaagcgcaucgagaaccucaacaagaaggucgacgacggcuuccucgacaucuggaccuacaacgccgagcuccucguccuccucgagaacgagcgcacccucgacuaccacgacuccaacgucaagaaccucuacgagaagguccgcucccagcucaagaacaacgccaaggagaucggcaacggcugcuucgaguucuaccacaagugcgacaacaccugcauggaguccgucaagaacggcaccuacgacuaccccaaguacuccgaggaggccaagcucaaccgcgaggagaucgacggcgucaagcucgaguccacccgcaucuaccagauccucgccaucuacuccaccgucgccuccucccucguccucgucgucucccucggcgccaucuccuucuggaugugcuccaacggcucccuccagugccgcaucugcaucuga

SEQ ID NO: 99530 - RNA, 1701 nt, Artificial Sequence; identical to SEQ ID NO: 98705
  derived and/or modified CDS sequence (opt2) from hemagglutinin__InfluenzaA__ACY46133

SEQ ID NO: 99531 - RNA, 1701 nt, Artificial Sequence; identical to SEQ ID NO: 98705
  derived and/or modified CDS sequence (opt2) from hemagglutinin__InfluenzaA__ACY46163

SEQ ID NO: 99532 - RNA, 1701 nt, Artificial Sequence
  derived and/or modified CDS sequence (opt2) from hemagglutinin__InfluenzaA__ACY46173
augaaggccauccucgucguccuccucuacaccuucgccaccgccaacgccgacacccucugcaucggcuaccacgccaacaacuccaccgacaccgucgacaccguccucgagaagaacgucaccgucacccacuccgucaaccuccucgaggacaagcacaacggcaagcucugcaagcuccgcggcgucgccccccuccaccucggcaagugcaacaucgccggcuggauccucggcaaccccgagugcgagucccucuccaccgccuccuccugguccuacaucgucgagaccuccuccuccgacaacggcaccugcuaccccggcgacuucaucgacuacgaggagcuccgcgagcagcucuccuccgucuccuccuucgagcgcuucgagaucuuccccaagaccuccuccuggcccaaccacgacuccaacaagggcgucaccgccgccugcccccacgccggcgccaaguccuucuacaagaaccucaucuggcucgucaagaagggcaacuccuaccccaagcucuccaaguccuacaucaacgacaagggcaaggagguccucguccucuggggcauccaccaccccuccaccuccgccgaccagcagucccucuaccagaacgccgacgccuacgucuucgucggcuccuccaaguacuccaagaaguucaagcccgagaucgccauccgccccaagguccgcgaccaggagggccgcaugaacuacuacuggacccucgucgagcccggcgacaagaucaccuucgaggccaccggcaaccucgucgucccccgcuacgccuucgccauggagcgcaacgccggcuccggcaucaucaucuccgacacccccguccacgacugcaacaccaccugccagacccccaagggcgccaucaacaccucccuccccuuccagaacauccaccccaucaccaucggcaagugccccaaguacgucaaguccaccaagcuccgccucgccaccggccuccgcaacguccccuccauccagucccgcggccucuucggcgccaucgccggcuucaucgagggcggcuggaccggcauggucgacggcugguacggcuaccaccaccagaacgagcagggcuccggcuacgccgccgaccucaaguccacccagaacgccaucgacgagaucaccaacaaggucaacuccgucaucgagaagaugaacacccaguucaccgccgucggcaaggaguucaaccaccucgagaagcgcaucgagaaccucaacaagaaggucgacgacggcuuccucgacaucuggaccuacaacgccgagcuccucguccuccucgagaacgagcgcacccucgacuaccacgacuccaacgucaagaaccucuacgagaagguccgcucccagcucaagaacaacgccaaggagaucggcaacggcugcuucgaguucuaccacaagugcgacaacaccugcauggaguccgucaagaacggcaccuacgacuaccccaaguacuccgaggaggccaagcucaaccgcgaggagaucgacggcgucaagcucgaguccacccgcaucuaccagauccucgccaucuacuccaccgucgccuccucccucguccucgucgucucccucggcgccaucuccuucuggaugugcuccaacggcucccuccagugccgcaucugcaucuga

SEQ ID NO: 99533 - RNA, 1701 nt, Artificial Sequence; identical to SEQ ID NO: 98705
  derived and/or modified CDS sequence (opt2) from hemagglutinin__InfluenzaA__ACY46213

SEQ ID NO: 99534 - RNA, 1701 nt, Artificial Sequence; identical to SEQ ID NO: 98705
  derived and/or modified CDS sequence (opt2) from hemagglutinin__InfluenzaA__ACY46223

SEQ ID NO: 99535 - RNA, 1701 nt, Artificial Sequence; identical to SEQ ID NO: 98705
  derived and/or modified CDS sequence (opt2) from hemagglutinin__InfluenzaA__ACY46233

SEQ ID NO: 99536 - RNA, 1701 nt, Artificial Sequence; identical to SEQ ID NO: 98705
  derived and/or modified CDS sequence (opt2) from hemagglutinin__InfluenzaA__ACY46243

SEQ ID NO: 99537 - RNA, 1701 nt, Artificial Sequence; identical to SEQ ID NO: 98705
  derived and/or modified CDS sequence (opt2) from hemagglutinin__InfluenzaA__ACY46253

SEQ ID NO: 99538 - RNA, 1701 nt, Artificial Sequence; identical to SEQ ID NO: 98705
  derived and/or modified CDS sequence (opt2) from hemagglutinin__InfluenzaA__ACY46263

SEQ ID NO: 99539 - RNA, 1701 nt, Artificial Sequence; identical to SEQ ID NO: 98705
  derived and/or modified CDS sequence (opt2) from hemagglutinin__InfluenzaA__ACY46273

SEQ ID NO: 99540 - RNA, 1701 nt, Artificial Sequence; identical to SEQ ID NO: 98705
  derived and/or modified CDS sequence (opt2) from hemagglutinin__InfluenzaA__ACY46283

SEQ ID NO: 99541 - RNA, 1701 nt, Artificial Sequence
  derived and/or modified CDS sequence (opt2) from hemagglutinin__InfluenzaA__ACY46293
augaaggccauccucgucguccuccucuacaccuucgccaccgccaacgccgacacccucugcaucggcuaccacgccaacaacuccaccgacaccgucgacaccguccucgagaagaacgucaccgucacccacuccgucaaccuccucgaggacaagcacaacggcaagcucugcaagcuccgcggcgucgccccccuccaccucggcaagugcaacaucgccggcuggauccucggcaaccccgagugcgagucccucuccaccgccuccuccugguccuacaucgucgagaccuccuccuccgacaacggcaccugcuaccccggcgacuucaucgacuacgaggagcuccgcgagcagcucuccuccgucuccuccuucgagcgcuucgagaucuuccccaagaccuccuccuggcccaaccacgacuccaacaagggcgucaccgccgccugcccccacgccggcgccaaguccuucuacaagaaccucaucuggcucgucaagaagggcaacuccuaccccaagcucuccaaguccuacaucaacgacaagggcaaggagguccucguccucuggggcauccaccaccccuccaccuccgccgaccagcagucccucuaccagaacgccgacgccuacgucuucgucggcaccucccgcuacuccaagaaguucaagcccgagaucgccauccgccccaagguccgcgaccaggagggccgcaugaacuacuacuggacccucgucgagcccggcgacaagaucaccuucgaggccaccggcaaccucgucgucccccgcuacgccuucgccauggagcgcaacgccggcuccggcaucaucaucuccgacacccccguccacgacugcaacaccaccugccagacccccaagggcgccaucaacaccucccuccccuuccagaacauccaccccaucaccaucggcaagugccccaaguacgucaaguccaccaagcuccgccucgccgccggccuccgcaacguccccuccauccagucccgcggccucuucggcgccaucgccggcuucaucgagggcggcuggaccggcauggucgacggcugguacggcuaccaccaccagaacgagcagggcuccggcuacgccgccgaccucaaguccacccagaacgccaucgacgagaucaccaacaaggucaacuccgucaucgagaagaugaacacccaguucaccgccgucggcaaggaguucaaccaccucgagaagcgcaucgagaaccucaacaagaaggucgacgacggcuuccucgacaucuggaccuacaacgccgagcuccucguccuccucgagaacgagcgcacccucgacuaccacgacuccaacgucaagaaccucuacgagaagguccgcucccagcucaagaacaacgccaaggagaucggcaacggcugcuucgaguucuaccacaagugcgacaacaccugcauggaguccgucaagaacggcaccuacgacuaccccaaguacuccgaggaggccaagcucaaccgcgaggagaucgacggcgucaagcucgaguccacccgcaucuaccagauccucgccaucuacuccaccgucgccuccucccucguccucgucgucucccucggcgccaucuccuucuggaugugcuccaacggcucccuccagugccgcaucugcaucuga

SEQ ID NO: 99542 - RNA, 1701 nt, Artificial Sequence; identical to SEQ ID NO: 98705
  derived and/or modified CDS sequence (opt2) from hemagglutinin__InfluenzaA__ACY46303

SEQ ID NO: 99543 - RNA, 1701 nt, Artificial Sequence; identical to SEQ ID NO: 98705
  derived and/or modified CDS sequence (opt2) from hemagglutinin__InfluenzaA__ACY46313

SEQ ID NO: 99544 - RNA, 1701 nt, Artificial Sequence; identical to SEQ ID NO: 98705
  derived and/or modified CDS sequence (opt2) from hemagglutinin__InfluenzaA__ACY46323

SEQ ID NO: 99545 - RNA, 1701 nt, Artificial Sequence; identical to SEQ ID NO: 98705
  derived and/or modified CDS sequence (opt2) from hemagglutinin__InfluenzaA__ACY46343

SEQ ID NO: 99546 - RNA, 1701 nt, Artificial Sequence; identical to SEQ ID NO: 98705
  derived and/or modified CDS sequence (opt2) from hemagglutinin__InfluenzaA__ACY46353

SEQ ID NO: 99547 - RNA, 1701 nt, Artificial Sequence
  derived and/or modified CDS sequence (opt2) from hemagglutinin__InfluenzaA__ACY46373
augaaggccauccucaucguccuccucuacaccuucgccaccgccaacgccgacacccucugcaucggcuaccacgccaacaacuccaccgacaccgucgacaccguccucgagaagaacgucaccgucacccacuccgucaaccuccucgaggacaagcacaacggcaagcucugcaagcuccgcggcgucgccccccuccaccucggcaagugcaacaucgccggcuggauccucggcaaccccgagugcgagucccucuccaccgccuccuccugguccuacaucgucgagaccuccuccuccgacaacggcaccugcuaccccggcgacuucaucgacuacgaggagcuccgcgagcagcucuccuccgucuccuccuucgagcgcuucgagaucuuccccaagaccuccuccuggcccaaccacgacuccaacaagggcgucaccgccgccugcccccacgccggcgccaaguccuucuacaagaaccucaucuggcucgucaagaagggcaacuccuaccccaagcucuccaaguccuacaucaacgacaagggcaaggagguccucguccucuggggcauccaccaccccuccaccuccgccgaccagcagucccucuaccagaacgccgacgccuacgucuucgucggcaccucccgcuacuccaagaaguucaagcccgagaucgccauccgccccaagguccgcgaccaggagggccgcaugaacuacuacuggacccucgucgagcccggcgacaagaucaccuucgaggccaccggcaaccucgucgucccccgcuacgccuucgccauggagcgcaacgccggcuccggcaucaucaucuccgacacccccguccacgacugcaacaccaccugccagacccccaagggcgccaucaacaccucccuccccuuccagaacauccaccccaucaccaucggcaagugccccaaguacgucaaguccaccaagcuccgccucgccaccggccuccgcaacguccccuccauccagucccgcggccucuucggcgccaucgccggcuucaucgagggcggcuggaccggcauggucgacggcugguacggcuaccaccaccagaacgagcagggcuccggcuacgccgccgaccucaaguccacccagaacgccaucgacgagaucaccaacaaggucaacuccgucaucgagaagaugaacacccaguucaccgccgucggcaaggaguucaaccaccucgagaagcgcaucgagaaccucaacaagaaggucgacgacggcuuccucgacaucuggaccuacaacgccgagcuccucguccuccucgagaacgagcgcacccucgacuaccacgacuccaacgucaagaaccucuacgagaagguccgcucccagcucaagaacaacgccaaggagaucggcaacggcugcuucgaguucuaccacaagugcgacaacaccugcauggaguccgucaagaacggcaccuacgacuaccccaaguacuccgaggaggccaagcucaaccgcgaggagaucgacggcgucaagcucgaguccacccgcaucuaccagauccucgccaucuacuccaccgucgccuccucccucguccucgucgucucccucggcgccaucuccuucuggaugugcuccaacggcucccuccagugccgcaucugcaucuga

SEQ ID NO: 99548 - RNA, 1701 nt, Artificial Sequence
  derived and/or modified CDS sequence (opt2) from hemagglutinin__InfluenzaA__ACY46383
augaaggccauccucgucguccuccucuacaccuucgccaccgccaacgccgacacccucugcaucggcuaccacgccaacaacuccaccgacaccgucgacaccguccucgagaagaacgucaccgucacccacuccgucaaccuccucgaggacaagcacaacggcaagcucugcaagcuccgcggcgucgccccccuccaccucggcaagugcaacaucgccggcuggauccucggcaaccccgagugcgagucccucuccaccgccuccuccugguccuacaucgucgagaccuccuccuccgacaacggcaccugcuaccccggcgacuucaucgacuacgaggagcuccgcgagcagcucuccuccgucuccuccuucgagcgcuucgagaucuuccccaagaccuccuccuggcccaaccacgacuccaacaagggcgucaccgccgccugcccccacgccggcgccaaguccuucuacaagaaccucaucuggcucgucaagaagggcaacuccuaccccaagcucuccaaguccuacaucaacgacaagggcaaggagguccucguccucuggggcauccaccaccccuccaccuccgccgaccagcagucccucuaccagaacgccgacgccuacgucuucgucggcuccucccgcuacuccaagaaguucaagcccgagaucgccauccgccccaagguccgcgaccaggagggccgcaugaacuacuacuggacccucgucgagcccggcgacaagaucaccuucgaggccaccggcaaccucgucgucccccgcuacgccuucgccauggagcgcaacgccggcuccggcaucaucaucuccgacacccccguccacgacugcaacaccaccugccagacccccaagggcgccaucaacaccucccuccccuuccacaacauccaccccaucaccaucggcaagugccccaaguacgucaaguccaccaagcuccgccucgccaccggccuccgcaacguccccuccauccagucccgcggccucuucggcgccaucgccggcuucaucgagggcggcuggaccggcauggucgacggcugguacggcuaccaccaccagaacgagcagggcuccggcuacgccgccgaccucaaguccacccagaacgccaucgacgagaucaccaacaaggucaacuccgucaucgagaagaugaacacccaguucaccgccgucggcaaggaguucaaccaccucgagaagcgcaucgagaaccucaacaagaaggucgacgacggcuuccucgacaucuggaccuacaacgccgagcuccucguccuccucgagaacgagcgcacccucgacuaccacgacuccaacgucaagaaccucuacgagaagguccgcucccagcucaagaacaacgccaaggagaucggcaacggcugcuucgaguucuaccacaagugcgacaacaccugcauggaguccgucaagaacggcaccuacgacuaccccaaguacuccgaggaggccaagcucaaccgcgaggagaucgacggcgucaagcucgaguccacccgcaucuaccagauccucgccaucuacuccaccgucgccuccucccucguccucgucgucucccucggcgccaucuccuucuggaugugcuccaacggcucccuccagugccgcaucugcaucuga

SEQ ID NO: 99549 - RNA, 1701 nt, Artificial Sequence; identical to SEQ ID NO: 98705
  derived and/or modified CDS sequence (opt2) from hemagglutinin__InfluenzaA__ACY46393

SEQ ID NO: 99550 - RNA, 1701 nt, Artificial Sequence; identical to SEQ ID NO: 98705
  derived and/or modified CDS sequence (opt2) from hemagglutinin__InfluenzaA__ACY46403

SEQ ID NO: 99551 - RNA, 1701 nt, Artificial Sequence; identical to SEQ ID NO: 98705
  derived and/or modified CDS sequence (opt2) from hemagglutinin__InfluenzaA__ACY46413

SEQ ID NO: 99552 - RNA, 1701 nt, Artificial Sequence; identical to SEQ ID NO: 98705
  derived and/or modified CDS sequence (opt2) from hemagglutinin__InfluenzaA__ACY46433

SEQ ID NO: 99553 - RNA, 1701 nt, Artificial Sequence; identical to SEQ ID NO: 98705
  derived and/or modified CDS sequence (opt2) from hemagglutinin__InfluenzaA__ACY46443

SEQ ID NO: 99554 - RNA, 1701 nt, Artificial Sequence; identical to SEQ ID NO: 98705
  derived and/or modified CDS sequence (opt2) from hemagglutinin__InfluenzaA__ACY46453

SEQ ID NO: 99555 - RNA, 1701 nt, Artificial Sequence
  derived and/or modified CDS sequence (opt2) from hemagglutinin__InfluenzaA__ACY46463
augaaggccauccucgucgucaugcucuacaccuucgccaccgccaacgccgacacccucugcaucggcuaccacgccaacaacuccaccgacaccgucgacaccguccucgagaagaacgucaccgucacccacuccgucaaccuccucgaggacaagcacaacggcaagcucugcaagcuccgcggcgucgccccccuccaccucggcaagugcaacaucgccggcuggauccucggcaaccccgagugcgagucccucuccaccgccuccuccugguccuacaucgucgagaccuccuccuccgacaacggcaccugcuaccccggcgacuucaucgacuacgaggagcuccgcgagcagcucuccuccgucuccuccuucgagcgcuucgagaucuuccccaagaccuccuccuggcccaaccacgacuccaacaagggcgucaccgccgccugcccccacgccggcgccaaguccuucuacaagaaccucaucuggcucgucaagaagggcaacuccuaccccaagcucuccaaguccuacaucaacgacaagggcaaggagguccucguccucuggggcauccaccaccccuccaccuccgccgaccagcagucccucuaccagaacgccgacgccuacgucuucgucggcaccucccgcuacuccaagaaguucaagcccgagaucgccauccgccccaagguccgcgaccaggagggccgcaugaacuacuacuggacccucgucgagcccggcgacaagaucaccuucgaggccaccggcaaccucgucgucccccgcuacgccuucgccaugguccgcaacgccggcuccggcaucaucaucuccgacacccccguccacgacugcaacaccaccugccagacccccaagggcgccaucaacaccucccuccccuuccagaacauccaccccaucaccaucggcaagugccccaaguacgucaaguccaccaagcuccgccucgccaccggccuccgcaacguccccuccauccagucccgcggccucuucggcgccaucgccggcuucaucgagggcggcuggaccggcauggucgacggcugguacggcuaccaccaccagaacgagcagggcuccggcuacgccgccgaccucaaguccacccagaacgccaucgacgagaucaccaacaaggucaacuccgucaucgagaagaugaacacccaguucaccgccgucggcaaggaguucaaccaccucgagaagcgcaucgagaaccucaacaagaaggucgacgacggcuuccucgacaucuggaccuacaacgccgagcuccucguccuccucgagaacgagcgcacccucgacuaccacgacuccaacgucaagaaccucuacgagaagguccgcucccagcucaagaacaacgccaaggagaucggcaacggcugcuucgaguucuaccacaagugcgacaacaccugcauggaguccgucaagaacggcaccuacgacuaccccaaguacuccgaggaggccaagcucaaccgcgaggagaucgacggcgucaagcucgaguccacccgcaucuaccagauccucgccaucuacuccaccgucgccuccucccucguccucgucgucucccucggcgccaucuccuucuggaugugcuccaacggcucccuccagugccgcaucugcaucuga

SEQ ID NO: 99556 - RNA, 1701 nt, Artificial Sequence; identical to SEQ ID NO: 98705
  derived and/or modified CDS sequence (opt2) from hemagglutinin__InfluenzaA__ACY46473

SEQ ID NO: 99557 - RNA, 1701 nt, Artificial Sequence; identical to SEQ ID NO: 98692
  derived and/or modified CDS sequence (opt2) from hemagglutinin__InfluenzaA__ACY46493

SEQ ID NO: 99558 - RNA, 1701 nt, Artificial Sequence
  derived and/or modified CDS sequence (opt2) from hemagglutinin__InfluenzaA__ACY46513
augaaggccauccucgucguccuccucuacaccuucgccaccgccaacgccgacacccucugcaucggcuaccacgccaacaacuccaccgacaccgucgacaccguccucgagaagaacgucaccgucacccacuccgucaaccuccucgaggacaagcacaacggcaagcucugcaagcuccgcggcgucgccccccuccaccucggcaagugcaacaucgccggcuggauccucggcaaccccgagugcgagucccucuccaccgccuccuccugguccuacaucgucgagaccuccuccuccgacaacggcaccugcuaccccggcgacuucaucgacuacgaggagcuccgcgagcagcucuccuccgucuccuccuucgagcgcuucgagaucuuccccaagaccuccuccuggcccaaccacgacuccaacaagggcgucaccgccgccugcccccacgccggcgccaaguccuucuacaagaaccucaucuggcucgucaagaagggcaacuccuaccccaagcucuccaaguccuacaucaacgacaagggcaaggagguccucguccucuggggcauccaccaccccuccaccuccgccgaccagcagucccucuaccagaacgccgacgccuacgucuucgucggcuccuccaaguacuccaagaaguucaagcccgagaucgccauccgccccaagguccgcgaccaggagggccgcaugaacuacuacuggacccucgucgagcccggcgacaagaucaccuucgaggccaccggcaaccucgucgucccccgcuacgccuucgccauggagcgcaacgccggcuccggcaucaucaucuccgacacccccguccacgacugcaacaccaccugccagacccccaagggcgccaucaacaccucccuccccuuccagaacauccaccccaucaccaucggcaagugccccaaguacgucaaguccaccaagcuccgccucgccaccggccuccgcaacguccccuccauccagucccgcggccucuucggcgccaucgccggcuucaucgagggcggcuggaccggcauggucgacggcugguacggcuaccaccaccagaacgagcagggcuccggcuacgccgccgaccucaaguccacccagaacgccaucgacgagaucaccaacaaggucaacuccgucaucgagaagaugaacacccaguucaccgccgucggcaaggaguucaaccaccucgagaagcgcaucgagaaccucaacaagaaggucgacgacggcuuccucgacaucuggaccuacaacgccgagcuccucguccuccucgacaacgagcgcacccucgacuaccacgacuccaacgucaagaaccucuacgagaagguccgcucccagcucaagaacaacgccaaggagaucggcaacggcugcuucgaguucuaccacaagugcgacaacaccugcauggaguccgucaagaacggcaccuacgacuaccccaaguacuccgaggaggccaagcucaaccgcgaggagaucgacggcgucaagcucgaguccacccgcaucuaccagauccucgccaucuacuccaccgucgccuccucccucguccucgucgucucccucggcgccaucuccuucuggaugugcuccaacggcucccuccagugccgcaucugcaucuga

SEQ ID NO: 99559 - RNA, 1701 nt, Artificial Sequence; identical to SEQ ID NO: 98705
  derived and/or modified CDS sequence (opt2) from hemagglutinin__InfluenzaA__ACY46523

SEQ ID NO: 99560 - RNA, 1701 nt, Artificial Sequence; identical to SEQ ID NO: 98705
  derived and/or modified CDS sequence (opt2) from hemagglutinin__InfluenzaA__ACY46533

SEQ ID NO: 99561 - RNA, 1701 nt, Artificial Sequence; identical to SEQ ID NO: 98705
  derived and/or modified CDS sequence (opt2) from hemagglutinin__InfluenzaA__ACY46562

SEQ ID NO: 99562 - RNA, 1701 nt, Artificial Sequence; identical to SEQ ID NO: 98705
  derived and/or modified CDS sequence (opt2) from hemagglutinin__InfluenzaA__ACY46572

SEQ ID NO: 99563 - RNA, 1701 nt, Artificial Sequence; identical to SEQ ID NO: 98705
  derived and/or modified CDS sequence (opt2) from hemagglutinin__InfluenzaA__ACY46582

SEQ ID NO: 99564 - RNA, 1701 nt, Artificial Sequence; identical to SEQ ID NO: 98705
  derived and/or modified CDS sequence (opt2) from hemagglutinin__InfluenzaA__ACY46592

SEQ ID NO: 99565 - RNA, 1701 nt, Artificial Sequence; identical to SEQ ID NO: 98705
  derived and/or modified CDS sequence (opt2) from hemagglutinin__InfluenzaA__ACY46622

SEQ ID NO: 99566 - RNA, 1701 nt, Artificial Sequence
  derived and/or modified CDS sequence (opt2) from hemagglutinin__InfluenzaA__ACY46672
augaaggccauccucgucguccuccucuacaccuucgccaccgccaacgccgacacccucugcaucggcuaccacgccaacaacuccaccgacaccgucgacaccguccucgagaagaacgucaccgucacccacuccgucaaccuccucgaggacaagcacaacggcaagcucugcaagcuccgcggcgucgccccccuccaccucggcaagugcaacaucgccggcuggauccucggcaaccccgagugcgagucccucuccaccgccuccuccugguccuacaucgucgagaccuccuccuccgacaacggcaccugcuaccccggcgacuucaucgacuacgaggagcuccgcgagcagcucuccuccgucuccuccuucgagcgcuucgagaucuuccccaagaccuccuccuggcccaaccacgacuccaacaagggcgucaccgccgccugcccccacgccggcgccaaguccuucuacaagaaccucaucuggcucgucaagaagggcaacuccuaccccaagcucuccaaguccuacaucaacgacaagggcaaggagguccucguccucuggggcauccaccaccccuccaccuccgccgaccagcagucccucuaccagaacgccgacgccuacgucuucgucggcaccucccgcuacuccaagaaguucaagcccgagaucgccauccgccccaagguccgcgaccaggagggccgcaugaacuacuacuggacccucgucgagcccggcgacaagaucaccuucgaggccaccggcaaccucgucgucccccgcuacgccuucgccaugguccgcaacgccggcuccggcaucaucaucuccgacacccccguccacgacugcaacaccaccugccagacccccaagggcgccaucaacaccucccuccccuuccagaacauccaccccaucaccaucggcaagugccccaaguacgucaaguccaccaagcuccgccucgccaccggccuccgcaacguccccuccauccagucccgcggccucuucggcgccaucgccggcuucaucgagggcggcuggaccggcauggucgacggcugguacggcuaccaccaccagaacgagcagggcuccggcuacgccgccgaccucaaguccacccagaacgccaucgacgagaucaccaacaaggucaacuccgucaucgagaagaugaacacccaguucaccgccgucggcaaggaguucaaccaccucgagaagcgcaucgagaaccucaacaagaaggucgacgacggcuuccucgacaucuggaccuacaacgccgagcuccucguccuccucgagaacgagcgcacccucgacuaccacgacuccaacgucaagaaccucuacgagaagguccgcucccagcucaagaacaacgccaaggagaucggcaacggcugcuucgaguucuaccacaagugcgacaacaccugcauggaguccgucaagaacggcaccuacgacuaccccaaguacuccgaggaggccaagcucaaccgcgaggagaucgacggcgucaagcucgaguccacccgcaucuaccagauccucgccaucuacuccaccgucgccuccucccucguccucgucgucucccucggcgccaucuccuucuggaugugcuccaacggcucccuccagugccgcaucugcaucuga

SEQ ID NO: 99567 - RNA, 1701 nt, Artificial Sequence; identical to SEQ ID NO: 98705
  derived and/or modified CDS sequence (opt2) from hemagglutinin__InfluenzaA__ACY46682

SEQ ID NO: 99568 - RNA, 1701 nt, Artificial Sequence; identical to SEQ ID NO: 98705
  derived and/or modified CDS sequence (opt2) from hemagglutinin__InfluenzaA__ACY46692

SEQ ID NO: 99569 - RNA, 1701 nt, Artificial Sequence; identical to SEQ ID NO: 98705
  derived and/or modified CDS sequence (opt2) from hemagglutinin__InfluenzaA__ACY46712

SEQ ID NO: 99570 - RNA, 1701 nt, Artificial Sequence
  derived and/or modified CDS sequence (opt2) from hemagglutinin__InfluenzaA__ACY46722
augaaggccauccucgucguccuccucuacaccuucgccaccgccaacgccgacacccucugcaucggcuaccacgccaacaacuccaccgacaccgucgacaccguccucgagaagaacgucaccgucacccacuccgucaaccuccucgaggacaagcacaacggcaagcucugcaagcuccgcggcgucgccccccuccaccucggcaagugcaacaucgccggcuggauccucggcaaccccgagugcgagucccucuccaccgccuccuccugguccuacaucgucgagaccuccuccuccgacaacggcaccugcuaccccggcgacuucaucgacuacgaggagcuccgcgagcagcucuccuccgucuccuccuucgagcgcuucgagaucuuccccaagaccuccuccuggcccaaccacgacuccaacaagggcgucaccgccgccugcccccacgccggcgccaaguccuucuacaagaaccucaucuggcucgucaagaagggcaacuccuaccccaagcucuccaaguccuacaucaacgacaagggcaaggagguccucguccucuggggcauccaccaccccuccaccuccgccggccagcagucccucuaccagaacgccgacgccuacgucuucgucggcaccucccgcuacuccaagaaguucaagcccgagaucgccauccgccccaagguccgcgaccaggagggccgcaugaacuacuacuggacccucgucgagcccggcgacaagaucaccuucgaggccaccggcaaccucgucgucccccgcuacgccuucgccauggagcgcaacgccggcuccggcaucaucaucuccgacacccccguccacgacugcaacaccaccugccagacccccaagggcgccaucaacaccucccuccccuuccagaacauccaccccaucaccaucggcaagugccccaaguacgucaaguccaccaagcuccgccucgccaccggccuccgcaacguccccuccauccagucccgcggccucuucggcgccaucgccggcuucaucgagggcggcuggaccggcauggucgacggcugguacggcuaccaccaccagaacgagcagggcuccggcuacgccgccgaccucaaguccacccagaacgccaucgacgagaucaccaacaaggucaacuccgucaucgagaagaugaacacccaguucaccgccgucggcaaggaguucaaccaccucgagaagcgcaucgagaaccucaacaagaaggucgacgacggcuuccucgacaucuggaccuacaacgccgagcuccucguccuccucgagaacgagcgcacccucgacuaccacgacuccaacgucaagaaccucuacgagaagguccgcucccagcucaagaacaacgccaaggagaucggcaacggcugcuucgaguucuaccacaagugcgacaacaccugcauggaguccgucaagaacggcaccuacgacuaccccaaguacuccgaggaggccaagcucaaccgcgaggagaucgacggcgucaagcucgaguccacccgcaucuaccagauccucgccaucuacuccaccgucgccuccucccucguccucgucgucucccucggcgccaucuccuucuggaugugcuccaacggcucccuccagugccgcaucugcaucuga

SEQ ID NO: 99571 - RNA, 1701 nt, Artificial Sequence
  derived and/or modified CDS sequence (opt2) from hemagglutinin__InfluenzaA__ACY46742
augaaggccauccucgucguccuccucuacaccuucgccaccgccaacgccgacacccucugcaucggcuaccacgccaacaacuccaccgacaccgucgacaccguccucgagaagaacgucaccgucacccacuccgucaaccuccucgaggacaagcacaacggcaagcucugcaagcuccgcggcgucgccccccuccaccucggcaagugcaacaucgccggcuggauccucggcaaccccgagugcgagucccucuccaccgccuccuccugguccuacaucgucgagaccuccuccuccgacaacggcaccugcuaccccggcaacuucaucgacuacgaggagcuccgcgagcagcucuccuccgucuccuccuucgagcgcuucgagaucuuccccaagaccuccuccuggcccaaccacgacuccaacaagggcgucaccgccgccugcccccacgccggcgccaaguccuucuacaagaaccucaucuggcucgucaagaagggcaacuccuaccccaagcucuccaaguccuacaucaacgacaagggcaaggagguccucguccucuggggcauccaccaccccuccaccuccgccgaccagcagucccucuaccagaacgccgacgccuacgucuucgucggcaccucccgcuacuccaagaaguucaagcccgagaucgccauccgccccaagguccgcgaccaggagggccgcaugaacuacuacuggacccucgucgagcccggcgacaagaucaccuucgaggccaccggcaaccucgucgucccccgcuacgccuucgccauggagcgcaacgccggcuccggcaucaucaucuccgacacccccguccacgacugcaacaccaccugccagacccccaagggcgccaucaacaccucccuccccuuccagaacauccaccccaucaccaucggcaagugccccaaguacgucaaguccaccaagcuccgccucgccaccggccuccgcaacguccccuccauccagucccgcggccucuucggcgccaucgccggcuucaucgagggcggcuggaccggcauggucgacggcugguacggcuaccaccaccagaacgagcagggcuccggcuacgccgccgaccucaaguccacccagaacgccaucgacgagaucaccaacaaggucaacuccgucaucgagaagaugaacacccaguucaccgccgucggcaaggaguucaaccaccucgagaagcgcaucgagaaccucaacaagaaggucgacgacggcuuccucgacaucuggaccuacaacgccgagcuccucguccuccucgagaacgagcgcacccucgacuaccacgacuccaacgucaagaaccucuacgagaagguccgcucccagcucaagaacaacgccaaggagaucggcaacggcugcuucgaguucuaccacaagugcgacaacaccugcauggaguccgucaagaacggcaccuacgacuaccccaaguacuccgaggaggccaagcucaaccgcgaggagaucgacggcgucaagcucgaguccacccgcaucuaccagauccucgccaucuacuccaccgucgccuccucccucguccucgucgucucccucggcgccaucuccuucuggaugugcuccaacggcucccuccagugccgcaucugcaucuga

SEQ ID NO: 99572 - RNA, 1701 nt, Artificial Sequence; identical to SEQ ID NO: 98705
  derived and/or modified CDS sequence (opt2) from hemagglutinin__InfluenzaA__ACY46762

SEQ ID NO: 99573 - RNA, 1701 nt, Artificial Sequence; identical to SEQ ID NO: 98705
  derived and/or modified CDS sequence (opt2) from hemagglutinin__InfluenzaA__ACY46772

SEQ ID NO: 99574 - RNA, 1701 nt, Artificial Sequence; identical to SEQ ID NO: 98705
  derived and/or modified CDS sequence (opt2) from hemagglutinin__InfluenzaA__ACY46903

SEQ ID NO: 99575 - RNA, 1701 nt, Artificial Sequence; identical to SEQ ID NO: 98731
  derived and/or modified CDS sequence (opt2) from hemagglutinin__InfluenzaA__ACY77534

SEQ ID NO: 99576 - RNA, 1698 nt, Artificial Sequence
  derived and/or modified CDS sequence (opt2) from hemagglutinin__InfluenzaA__ACY77544
augaaggccauccucgucgucaugcucuacaccuucgccaccgccaacgccgacacccucugcaucggcuaccacgccaacaacuccaccgacaccgucgacaccguccucgagaagaacgucaccgucacccacuccgucaaccuccucgaggacaagcacaacggcaagcucugcaagcuccgcggcgucgccccccuccaccucggcaagugcaacaucgccggcuggauccucggcaaccccgagugcgagucccucuccaccgccuccuccugguccuacaucgucgagaccuccuccuccgacaacggcaccugcuaccccggcgacuucaucgacuacgaggagcuccgcgagcagcucuccuccgucuccuccuucgagcgcuucgagaucuuccccaagaccuccuccuggcccaaccacgacuccaacaagggcgucaccgccgccugcccccacgccggcgccaaguccuucuacaagaaccucaucuggcucgucaagaagggcaacuccuaccccaagcucuccaaguccuacaucaacgacaagggcaaggagguccucguccucuggggcauccaccaccccuccaccuccgccgaccagcagucccucuaccagaacgccgacgccuacgucuucgucggcuccucccgcuacuccaagaaguucaagcccgagaucgccauccgccccaagguccgcgaccaggagggccgcaugaacuacuacuggacccucgucgagcccggcgacaagaucaccuucgaggccaccggcaaccucgucgucccccgcuacgccuucgccauggagcgcaacgccggcuccggcaucaucaucuccgacaccaccguccacgacugcaacaccaccugccagacccccaagggcgccaucaacaccucccuccccuuccagaacauccaccccaucaccaucggcaagugccccaaguacgucaaguccaccaagcuccgccucgccaccggccuccgcaacguccccuccauccagucccgcggccucuucggcgccaucgccggcuucaucgagggcggcuggaccggcauggucgacggcugguacggcuaccaccaccagaacgagcagggcuccggcuacgccgccgaccucaaguccacccagaacgccaucgacgagaucaccaacaaggucaacuccgucaucgagaagaugaacacccaguucaccgccgucggcaaggaguucaaccaccucgagaagcgcaucgagaaccucaacaagaaggucgacgacggcuuccucgacaucuggaccuacaacgccgagcuccucguccuccucgagaacgagcgcacccucgacuaccacgacuccaacgucaagaaccucuacgagaagguccgcucccagcucaagaacaacgccaaggagaucggcaacggcugcuucgaguucuaccacaagugcgacaacaccugcauggaguccgucaagaacggcaccuacgacuaccccaaguacuccgaggaggccaagcucaaccgcgaggagaucgacggcgucaagcucgaguccacccgcaucuaccagauccucgccaucuacuccaccgucgccuccucccucguccucgucgucucccucggcgccaucuccuucuggaugugcuccuggucccuccagugccgcaucugcaucuga

SEQ ID NO: 99577 - RNA, 1698 nt, Artificial Sequence
  derived and/or modified CDS sequence (opt2) from hemagglutinin__InfluenzaA__ACY77554
augaaggccauccucgucguccuccucuacaccuucgccaccgccaacgccgacacccucugcaucggcuaccacgccaacaacuccaccgacaccgucgacaccguccucgagaagaacgucaccgucacccacuccgucaaccuccucgaggacaagcacaacggcaagcucugcaagcuccgcggcgucgccccccuccaccucggcaagugcaacaucgccggcuggauccucggcaaccccgagugcgagucccucuccaccgccuccuccugguccuacaucgucgagaccuccuccuccgacaacggcaccugcuaccccggcgacuucaucgacuacgaggagcuccgcgagcagcucuccuccgucuccuccuucgagcgcuucgagaucuuccccaagaccuccuccuggcccaaccacgacuccaacaagggcgucaccgccgccugcccccacgccggcgccaaguccuucuacaagaaccucaucuggcucgucaagaagggcaacuccuaccccaagcucuccaaguccuacaucaacgacaagggcaaggagguccucguccucuggggcauccaccaccccuccaccuccgccgaccagcagucccucuaccagaacgccgacgccuacgucuucgucggcaccucccgcuacuccaagaaguucaagcccgagaucgccauccgccccaagguccgcgaccaggagggccgcaugaacuacuacuggacccucgucgagcccggcgacaagaucaccuucgaggccaccggcaaccucgucgucccccgcuacgccuucgccauggagcgcaacgccggcuccggcaucaucaucuccgacacccccguccacaacugcaacaccaccugccagacccccaagggcgccaucaacaccucccuccccuuccagaacauccaccccaucaccaucggcaagugccccaaguacgucaaguccaccaagcuccgccucgccaccggccuccgcaacguccccuccauccagucccgcggccucuucggcgccaucgccggcuucaucgagggcggcuggaccggcauggucgacggcugguacggcuaccaccaccagaacgagcagggcuccggcuacgccgccgaccucaaguccacccagaacgccaucgacgagaucaccaacaaggucaacuccgucaucgagaagaugaacacccaguucaccgccgucggcaaggaguucaaccaccucgagaagcgcaucgagaaccucaacaagaaggucgacgacggcuuccucgacaucuggaccuacaacgccgagcuccucguccuccucgagaacgagcgcacccucgacuaccacgacuccaacgucaagaaccucuacgagaagguccgcucccagcucaagaacaacgccaaggagaucggcaacggcugcuucgaguucuaccacaagugcgacaacaccugcauggaguccgucaagaacggcaccuacgacuaccccaaguacuccgaggaggccaagcucaaccgcgaggagaucgacggcgucaagcucgaguccacccgcaucuaccagauccucgccaucuacuccaccgucgccuccucccucguccucgucgucucccucggcgccaucuccuucuggaugugcuccggccaccuccagugccgcaucugcaucuga

SEQ ID NO: 99578 - RNA, 1695 nt, Artificial Sequence
  derived and/or modified CDS sequence (opt2) from hemagglutinin__InfluenzaA__ACY77573
augaaggccauccucgucguccuccucuacaccuucgccaccgccaacgccgacacccucugcaucggcuaccacgccaacaacuccaccgacaccgucgacaccguccucgagaagaacgucaccgucacccacuccgucaaccuccucgaggacaagcacaacggcaagcucugcaagcuccgcggcgucgccccccuccaccucggcaagugcaacaucgccggcuggauccucggcaaccccgagugcgagucccucuccaccgccuccuccugguccuacaucgucgagaccuccuccuccgacaacggcaccugcuaccccggcgacuucaucgacuacgaggagcuccgcgagcagcucuccuccgucuccuccuucgagcgcuucgagaucuuccccaagaccuccuccuggcccaaccacgacuccaacaagggcgucaccgccgccugcccccacgccggcgccaaguccuucuacaagaaccucaucuggcucgucaagaagggcaacuccuaccccaagcucuccaaguccuacaucaacgacaagggcaaggagguccucguccucuggggcauccaccaccccuccaccuccgccgaccagcagucccucuaccagaacgccgacgccuacgucuucgucggcuccucccgcuacuccaagaaguucaagcccgagaucgccauccgccccaagguccgcgaccaggagggccgcaugaacuacuacuggacccucgucgagcccggcgacaagaucaccuucgaggccaccggcaaccucgucgucccccgcuacgccuucgccauggagcgcaacgccggcuccggcaucaucaucuccgacacccccguccacgacugcaacaccaccugccagacccccaagggcgccaucaacaccucccuccccuuccagaacauccaccccaucaccaucggcaagugccccaaguacgucaaguccaccaagcuccgccucgccaccggccuccgcaacguccccuccauccagucccgcggccucuucggcgccaucgccggcuucaucgagggcggcuggaccggcauggucgacggcugguacggcuaccaccaccagaacgagcagggcuccggcuacgccgccgaccucaaguccacccaguccgccaucgacgagaucaccaacaaggucaacuccgucaucgagaagaugaacacccagcucaccggccagugcaaggaguucaaccaccucgagaagcgcaucgagaaccucaacaagaaggucgacgacggcuuccucgacaucuggaccuacaacgccgagcuccucguccuccucgagaacgagcgcacccucgacuaccacgacuccaacgucaagaaccucuacgagaagguccgcucccagcucaagaacaacgccaacgagaucggcaacggcugcuucgaguucuaccacaagugcgacaacaccugcauggaguccgucaagaacggcaccuacgacuaccccaaguacuccgaggaggccaagcucaaccgcgaggagaucgacggcgucaagcucgaguccacccgcaucuaccagauccucgccaucuacuccaccgucgccuccucccucguccucgucgucucccucggcgccaucuccuucuggaugugcuccggccacuccugccgcaucugcaucuga

SEQ ID NO: 99579 - RNA, 1701 nt, Artificial Sequence
  derived and/or modified CDS sequence (opt2) from hemagglutinin__InfluenzaA__ACY77593
augaaggccauccucgucgucaugcucuacaccuucgccaccgccaacgccgacacccucugcaucggcuaccacgccaacaacuccaccgacaccgucgacaccguccucgagaagaacgucaccgucacccacuccgucaaccuccucgaggacaagcacaacggcaagcucugcaagcuccgcggcgucgccccccuccaccucggcaagugcaacaucgccggcuggauccucggcaaccccgagugcgagucccucuccaccgccuccuccugguccuacaucgucgagaccuccuccuccgacaacggcaccugcuaccccggcgacuucaucgacuacgaggagcuccgcgagcagcucuccuccgucuccuccuucgagcgcuucgagaucuuccccaagaccuccuccuggcccaaccacgacuccaacaagggcgucaccgccgccugcccccacgccggcgccaaguccuucuacaagaaccucaucuggcucgucaagaagggcaacuccuaccccaagcucuccaaguccuacaucaacgacaagggcaaggagguccucguccucuggggcauccaccaccccuccaccuccgccgaccagcagucccucuaccagaacgccgacgccuacgucuucgucggcuccucccgcuacuccaagaaguucaagcccgagaucgccauccgccccaagguccgcgaccaggagggccgcaugaacuacuacuggacccucgucgagcccggcgacaagaucaccuucgaggccaccggcaaccucgucgucccccgcuacgccuucgccauggagcgcaacgccggcuccggcaucaucaucuccgacaccaccguccacgacugcaacaccaccugccagacccccaagggcgccaucaacaccucccuccccuuccagaacauccaccccaucaccaucggcaagugccccaaguacgucaaguccaccaagcuccgccucgccaccggccuccgcaacguccccuccauccagucccgcggccucuucggcgccaucgccggcuucaucgagggcggcuggaccggcauggucgacggcugguacggcuaccaccaccagaacgagcagggcuccggcuacgccgccgaccucaaguccacccagaacgccaucgacgagaucaccaacaaggucaacuccgucaucgagaagaugaacacccaguucaccgccgucggcaaggaguucaaccaccucgagaagcgcaucgagaaccucaacaagaaggucgacgacggcuuccucgacaucuggaccuacaacgccgagcuccucguccuccucgagaacgagcgcacccucgacuaccacgacuccaacgucaagaaccucuacgagaagguccgcucccagcucaagaacaacgccaaggagaucggcaacggcugcuucgaguucuaccacaagugcgacaacaccugcauggaguccgucaagaacggcaccuacgacuaccccaaguacuccgaggaggccaagcucaaccgcgaggagaucgacggcgucaagcucgaguccacccgcaucuaccagauccucgccaucuacuccaccgucgccuccucccucguccucgucgucucccucggcgccaucuccuucuggaugugcuccaacggcucccuccagugccgcaucugcaucuga

SEQ ID NO: 99580 - RNA, 1698 nt, Artificial Sequence
  derived and/or modified CDS sequence (opt2) from hemagglutinin__InfluenzaA__ACY77603
augaaggccauccucgucgucaugcucuacaccuucgccaccgccaacgccgacacccucugcaucggcuaccacgccaacaacuccaccgacaccgucgacaccguccucgagaagaacgucaccgucacccacuccgucaaccuccucgaggacaagcacaacggcaagcucugcaagcuccgcggcgucgccccccuccaccucggcaagugcaacaucgccggcuggauccucggcaaccccgagugcgagucccucuccaccgccuccuccugguccuacaucgucgagaccuccuccuccgacaacggcaccugcuaccccggcgacuucaucgacuacgaggagcuccgcgagcagcucuccuccgucuccuccuucgagcgcuucgagaucuuccccaagaccuccuccuggcccaaccacgacuccaacaagggcgucaccgccgccugcccccacgccggcgccaaguccuucuacaagaaccucaucuggcucgucaagaagggcaacuccuaccccaagcucuccaaguccuacaucaacgacaagggcaaggagguccucguccucuggggcauccaccaccccuccaccuccgccgaccagcagucccucuaccagaacgccgacgccuacgucuucgucggcuccucccgcuacuccaagaaguucaagcccgagaucgccauccgccccaagguccgcgaccaggagggccgcaugaacuacuacuggacccucgucgagcccggcgacaagaucaccuucgaggccaccggcaaccucgucgucccccgcuacgccuucgccauggagcgcaacgccggcuccggcaucaucaucuccgacacccccguccacgacugcaacaccaccugccagacccccaagggcgccaucaacaccucccuccccuuccagaacauccaccccaucaccaucggcaagugccccaaguacgucaaguccaccaagcuccgccucgccaccggccuccgcaacguccccuccauccagucccgcggccucuucggcgccaucgccggcuucaucgagggcggcuggaccggcauggucgacggcugguacggcuaccaccaccagaacgagcagggcuccggcuacgccgccgaccucaaguccacccagaacgccaucgacgagaucaccaacaaggucaacuccgucaucgagaagaugaacacccaguucaccgccgucggcaaggaguucaaccaccucgagaagcgcaucgagaaccucaacaagaaggucgacgacggcuuccucgacaucuggaccuacaacgccgagcuccucguccuccucgagaacgagcgcacccucgacuaccacgacuccaacgucaagaaccucuacgagaagguccgcucccagcucaagaacaacgccaaggagaucggcaacggcugcuucgaguucuaccacaagugcgacaacaccugcauggaguccgucaagaacggcaccuacgacuaccccaaguacuccgaggaggccaagcucaaccgcgaggagaucgacggcgucaagcucgaguccacccgcaucuaccagauccucgccaucuacuccaccgucgccuccucccucguccucgucgucucccucggcgccaucuccuucuggaugugcuccuggucccuccagugccgcaucugcaucuga

SEQ ID NO: 99581 - RNA, 1695 nt, Artificial Sequence
  derived and/or modified CDS sequence (opt2) from hemagglutinin__InfluenzaA__ACY77613
augaaggccauccucgucguccuccucuacaccuucgccaccgccaacgccgacacccucugcaucggcuaccacgccaacaacuccaccgacaccgucgacaccguccucgagaagaacgucaccgucacccacuccgucaaccuccucgaggacaagcacaacggcaagcucugcaagcuccgcggcgucgccccccuccaccucggcaagugcaacaucgccggcuggauccucggcaaccccgagugcgagucccucuccaccgccuccuccugguccuacaucgucgagaccuccuccuccgacaacggcaccugcuaccccggcgacuucaucgacuacgaggagcuccgcgagcagcucuccuccgucuccuccuucgagcgcuucgagaucuuccccaagaccuccuccuggcccaaccacgacuccaacaagggcgucaccgccgccugcccccacgccggcgccaaguccuucuacaagaaccucaucuggcucgucaagaagggcaacuccuaccccaagcucuccaaguccuacaucaacgacaagggcaaggagguccucguccucuggggcauccaccaccccuccaccuccgccgaccagcagucccucuaccagaacgccgacgccuacgucuucgucggcaccucccgcuacuccaagaaguucaagcccgagaucgccauccgccccaagguccgcgaccaggagggccgcaugaacuacuacuggacccucgucgagcccggcgacaagaucaccuucgaggccaccggcaaccucgucgucccccgcuacgccuucgccauggagcgcaacgccggcuccggcaucaucaucuccgacacccccguccacgacugcaacaccaccugccagacccccaagggcgccaucaacaccucccuccccuuccagaacauccaccccaucaccaucggcaagugccccaaguacgucaaguccaccaagcuccgccucgccaccggccuccgcaacguccccuccauccagucccgcggccucuucggcgccaucgccggcuucaucgagggcggcuggaccggcauggucgacggcugguacggcuaccaccaccagaacgagcagggcuccggcuacgccgccgaccucaaguccacccagaacgccaucgacgagaucaccaacaaggucaacuccgucaucgagaagaugaacacccaguucaccggccagugcaaggaguucaaccaccucgagaagcgcaucgagaaccucaacaagaaggucgacgacggcuuccucgacaucuggaccuacaacgccgagcuccucguccuccucgagaacgagcgcacccucgacuaccacgacuccaacgucaagaaccucuacgagaagguccgcucccagcucaagaacaacgccaaggagaucggcaacggcugcuucgaguucuaccacaagugcgacaacaccugcauggaguccgucaagaacggcaccuacgacuaccccaaguacuccgaggaggccaagcucaaccgcgaggagaucgacggcgucaagcucgaguccacccgcaucuaccagauccucgccaucuacuccaccgucgccuccucccucguccucgucgucucccucggcgccaucuccuucuggaugugcuccggccacuccugccgcaucugcaucuga

SEQ ID NO: 99582 - RNA, 1701 nt, Artificial Sequence; identical to SEQ ID NO: 98705
  derived and/or modified CDS sequence (opt2) from hemagglutinin__InfluenzaA__ACY77623

SEQ ID NO: 99583 - RNA, 1707 nt, Artificial Sequence
  derived and/or modified CDS sequence (opt2) from hemagglutinin__InfluenzaA__ACY77653
augaaggccauccucgucguccuccucuacaccuucgccaccgccaacgccgacacccucugcaucggcuaccacgccaacaacuccaccgacaccgucgacaccguccucgagaagaacgucaccgucacccacuccgucaacauccucgaggacaagcacaacggcaagcucugcaagcuccgcggcgucgccccccuccaccucggcaagugcaacaucgccggcuggauccucggcaaccccgagugcgagucccucuccaccgccuccuccugguccuacaucgucgagaccuccuccuccgacaacggcaccugcuaccccggcgacuucaucgacuacgaggagcuccgcgagcagcucuccuccgucuccuccuucgagcgcuucgagaucuuccccaagaccuccuccuggcccaaccacgacuccaacaagggcgucaccgccgccugcccccacgccggcgccaaguccuucuacaagaaccucaucuggcucgucaagaagggcaacuccuaccccaagcucuccaaguccuacaucaacgacaagggcaaggagguccucguccucuggggcauccaccaccccuccaccuccgccgaccagcagucccucuaccagaacgccgacgccuacgucuucgucggcuccucccgcuacuccaagaaguucaagcccgagaucgccauccgccccaagguccgcgaccaggagggccgcaugaacuacuacuggacccucgucgagcccggcgacaagaucaccuucgaggccaccggcaaccucgucgucccccgcuacgccuucgccauggagcgcaacgccggcuccggcaucaucaucuccgacacccccguccacgacugcaacaccaccugccagacccccaagggcgccaucaacaccucccuccccuuccagaacauccaccccaucaccaucggcaagugccccaaguacgucaaguccaccaagcuccgccucgccaccggccuccgcaacguccccuccauccagucccgcggccucuucggcgccaucgccggcuucaucgagggcggcuggaccggcauggucgacggcugguacggcuaccaccaccagaacgagcagggcuccggcuacgccgccgaccucaaguccacccagaacgccaucgacgagaucaccaacaaggucaacuccgucaucgagaagaugaacacccaguucaccgccgucggcaaggaguucaaccaccucgagaagcgcaucgagaaccucaacaagaaggucgacgacggcuuccucgacaucuggaccuacaacgccgagcuccucguccuccucgagaacgagcgcacccucgacuaccacgacuccaacgucaagaaccucuacgagaagguccgcucccagcucaagaacaacgccaaggaggucggcaacggcugcuucgaguucuaccacaagugcgacaacaccugcauggaguccgucaagaacggcaccuacgacuaccccaaguacuccgaggaggccaagcucaaccgcgaggagaucgacggcgucaagcucgaguccacccgcaucuaccagauccucgccaucuacuccaccgucgccuccucccucguccucgucgucucccucggcgccaucuccuucuggaugugcuccggccacuccggcucccuccagugccgcaucugcaucuga

SEQ ID NO: 99584 - RNA, 1698 nt, Artificial Sequence
  derived and/or modified CDS sequence (opt2) from hemagglutinin__InfluenzaA__ACY77663
augaaggccauccucgucguccuccucuacaccuucgccaccgccaacgccgacacccucugcaucggcuaccacgccaacaacuccaccgacaccgucgacaccguccucgagaagaacgucaccgucacccacuccgucaaccuccucgaggacaagcacaacggcaagcucugcaagcuccgcggcgucgccccccuccaccucggcaagugcaacaucgccggcuggauccucggcaaccccgagugcgagucccucuccaccgccuccuccugguccuacaucgucgagaccuccuccuccgacaacggcaccugcuaccccggcgacuucaucgacuacgaggagcuccgcgagcagcucuccuccgucuccuccuucgagcgcuucgagaucuuccccaagaccuccuccuggcccaaccacgacuccaacaagggcgucaccgccgccugcccccacgccggcgccaaguccuucuacaagaaccucaucuggcucgucaagaagggcaacuccuaccccaagcucuccaaguccuacaucaacgacaagggcaaggagguccucguccucuggggcauccaccaccccuccaccuccgccgaccagcagucccucuaccagaacgccgacgccuacgucuucgucggcaccucccgcuacuccaagaaguucaagcccgagaucgccauccgccccaagguccgcgaccaggagggccgcaugaacuacuacuggacccucgucgagcccggcgacaagaucaccuucgaggccaccggcaaccucgucgucccccgcuacgccuucgccauggagcgcaacgccggcuccggcaucaucaucuccgacacccccguccacgacugcaacaccaccugccagacccccaagggcgccaucaacaccucccuccccuuccagaacauccaccccaucaccaucggcaagugccccaaguacgucaaguccaccaagcuccgccucgccaccggccuccgcaacguccccuccauccagucccgcggccucuucggcgccaucgccggcuucaucgagggcggcuggaccggcauggucgacggcugguacggcuaccaccaccagaacgagcagggcuccggcuacgccgccgaccucaaguccacccagaacgccaucgacgagaucaccaacaaggucaacuccgucaucgagaagaugaacacccaguucaccgccgucggcaaggaguucaaccaccucgagaagcgcaucgagaaccucaacaagaaggucgacgacggcuuccucgacaucuggaccuacaacgccgagcuccucguccuccucgagaacgagcgcacccucgacuaccacgacuccaacgucaagaaccucuacgagaagguccgcucccagcucaagaacaacgccaaggagaucggcaacggcugcuucgaguucuaccacaagugcgacaacaccugcauggaguccgucaagaacggcaccuacgacuaccccaaguacuccgaggaggccaagcucaaccgcgaggagaucgacggcgucaagcucgaguccacccgcaucuaccagauccucgccaucuacuccaccgucgccuccucccucguccucgucgucucccucggcgccaucuccuucuggaugugcuccuggucccuccucugccgcaucugcaucuga

SEQ ID NO: 99585 - RNA, 1698 nt, Artificial Sequence
  derived and/or modified CDS sequence (opt2) from hemagglutinin__InfluenzaA__ACY77683
augaaggccauccucgucguccuccucuacaccuucgccaccgccaacgccgacacccucugcaucggcuaccacgccaacaacuccaccgacaccgucgacaccguccucgagaagaacgucaccgucacccacuccgucaacauccucgaggacaagcacaacggcaagcucugcaagcuccgcggcgucgccccccuccaccucggcaagugcaacaucgccggcuggauccucggcaaccccgagugcgagucccucuccaccgccuccuccugguccuacaucgucgagaccuccuccuccgacaacggcaccugcuaccccggcgacuucaucgacuacgaggagcuccgcgagcagcucuccuccgucuccuccuucgagcgcuucgagaucuuccccaagaccuccuccuggcccaaccacgacuccaacaagggcgucaccgccgccugcccccacgccggcgccaaguccuucuacaagaaccucaucuggcucgucaagaagggcaacuccuaccccaagcucuccaaguccuacaucaacgacaagggcaaggagguccucguccucuggggcauccaccaccccuccaccuccgccgaccagcagucccucuaccagaacgccgacgccuacgucuucgucggcuccucccgcuacuccaagaaguucaagcccgagaucgccauccgccccaagguccgcgaccaggagggccgcaugaacuacuacuggacccucgucgagcccggcgacaagaucaccuucgaggccaccggcaaccucgucgucccccgcuacgccuucgccauggagcgcaacgccggcuccggcaucaucaucuccgacacccccguccacgacugcaacaccaccugccagacccccaagggcgccaucaacaccucccuccccuuccagaacauccaccccaucaccaucggcaagugccccaaguacgucaaguccaccaagcuccgccucgccaccggccuccgcaacguccccuccauccagucccgcggccucuucggcgccaucgccggcuucaucgagggcggcuggaccggcauggucgacggcugguacggcuaccaccaccagaacgagcagggcuccggcuacgccgccgaccucaaguccacccagaacgccaucgacgagaucaccaacaaggucaacuccgucaucgagaagaugaacacccaguucaccgccgucggcaaggaguucaaccaccucgagaagcgcaucgagaaccucaacaagaaggucgacgacggcuuccucgacaucuggaccuacaacgccgagcuccucguccuccucgagaacgagcgcacccucgacuaccacgacuccaacgucaagaaccucuacgagaagguccgcucccagcucaagaacaacgccaaggaggucggcaacggcugcuucgaguucuaccacaagugcgacaacaccugcauggaguccgucaagaacggcaccuacgacuaccccaaguacuccgaggaggccaagcucaaccgcgaggagaucgacggcgucaagcucgaguccacccgcaucuaccagauccucgccaucuacuccaccgucgccuccucccucguccucgucgucucccucggcgccaucuccuucuggaugugcuccuggucccuccagugccgcaucugcaucuga

SEQ ID NO: 99586 - RNA, 1698 nt, Artificial Sequence
  derived and/or modified CDS sequence (opt2) from hemagglutinin__InfluenzaA__ACY77693
augaaggccauccucgucguccuccucuacaccuucgccaccgccaacgccgacacccucugcaucggcuaccacgccaacaacuccaccgacaccgucgacaccguccucgagaagaacgucaccgucacccacuccgucaacauccucgaggacaagcacaacggcaagcucugcaagcuccgcggcgucgccccccuccaccucggcaagugcaacaucgccggcuggauccucggcaaccccgagugcgagucccucuccaccgccuccuccugguccuacaucgucgagaccuccuccuccgacaacggcaccugcuaccccggcgacuucaucgacuacgaggagcuccgcgagcagcucuccuccgucuccuccuucgagcgcuucgagaucuuccccaagaccuccuccuggcccaaccacgacuccaacaagggcgucaccgccgccugcccccacgccggcgccaaguccuucuacaagaaccucaucuggcucgucaagaagggcaacuccuaccccaagcucuccaaguccuacaucaacgacaagggcaaggagguccucguccucuggggcauccaccaccccuccaccuccgccgaccagcagucccucuaccagaacgccgacgccuacgucuucgucggcuccucccgcuacuccaagaaguucaagcccgagaucaccauccgccccaagguccgcgaccaggagggccgcaugaacuacuacuggacccucgucgagcccggcgacaagaucaccuucgaggccaccggcaaccucgucgucccccgcuacgccuucgccauggagcgcaacgccggcuccggcaucaucaucuccgacacccccguccacgacugcaacaccaccugccagacccccaagggcgccaucaacaccucccuccccuuccagaacauccaccccaucaccaucggcaagugccccaaguacgucaaguccaccaagcuccgccucgccaccggccuccgcaacguccccuccauccagucccgcggccucuucggcgccaucgccggcuucaucgagggcggcuggaccggcauggucgacggcugguacggcuaccaccaccagaacgagcagggcuccggcuacgccgccgaccucaaguccacccagaacgccaucgacgagaucaccaacaaggucaacuccgucaucgagaagaugaacacccaguucaccggccagugcaaggaguucaaccaccucgagaagcgcaucgagaaccucaacaagaaggucgacgacggcuuccucgacaucuggaccuacaacgccgagcuccucguccuccucgagaacgagcgcacccucgacuaccacgacuccaacgucaagaaccucuacgagaagguccgcucccagcucaagaacaacgccaaggaggucggcaacggcugcuucgaguucuaccacaagugcgacaacaccugcauggaguccgucaagaacggcaccuacgacuaccccaaguacuccgaggaggccaagcucaaccgcgaggagaucgacggcgucaagcucgaguccacccgcaucuaccagauccucgccaucuacuccaccgucgccuccucccucguccucgucgucucccucggcgccaucuccuucuggaugugcuccuggucccuccagugccgcaucugcaucuga

SEQ ID NO: 99587 - RNA, 1698 nt, Artificial Sequence
  derived and/or modified CDS sequence (opt2) from hemagglutinin__InfluenzaA__ACY77703
augaaggccauccucgucguccuccucuacaccuucgccaccgccaacgccgacacccucugcaucggcuaccacgccaacaacuccaccgacaccgucgacaccguccucgagaagaacgucaccgucacccacuccgucaacauccucgaggacaagcacaacggcaagcucugcaagcuccgcggcgucgccccccuccaccucggcaagugcaacaucgccggcuggauccucggcaaccccgagugcgagucccucuccaccgccuccuccugguccuacaucgucgagaccuccuccuccgacaacggcaccugcuaccccggcgacuucaucgacuacgaggagcuccgcgagcagcucuccuccgucuccuccuucgagcgcuucgagaucuuccccaagaccuccuccuggcccaaccacgacuccaacaagggcgucaccgccgccugcccccacgccggcgccaaguccuucuacaagaaccucaucuggcucgucaagaagggcaacuccuaccccaagcucuccaaguccuacaucaacgacaagggcaaggagguccucguccucuggggcauccaccaccccuccaccuccgccgaccagcagucccucuaccagaacgccgacgccuacgucuucgucggcuccucccgcuacuccaagaaguucaagcccgagaucgccauccgccccaagguccgcgaccaggagggccgcaugaacuacuacuggacccucgucgagcccggcgacaagaucaccuucgaggccaccggcaaccucgucgucccccgcuacgccuucgccauggagcgcaacgccggcuccggcaucaucaucuccgacacccccguccacgacugcaacaccaccugccagacccccaagggcgccaucaacaccucccuccccuuccagaacauccaccccaucaccaucggcaagugccccaaguacgucaaguccaccaagcuccgccucgccaccggccuccgcaacguccccuccauccagucccgcggccucuucggcgccaucgccggcuucaucgagggcggcuggaccggcauggucgacggcugguacggcuaccaccaccagaacgagcagggcuccggcuacgccgccgaccucaaguccacccagaacgccaucgacgagaucaccaacaaggucaacuccgucaucgagaagaugaacacccaguucaccggccagugcaaggaguucaaccaccucgagaagcgcaucgagaaccucaacaagaaggucgacgacggcuuccucgacaucuggaccuacaacgccgagcuccucguccuccucgagaacgagcgcacccucgacuaccacgacuccaacgucaagaaccucuacgagaagguccgcucccagcucaagaacaacgccaaggaggucggcaacggcugcuucgaguucuaccacaagugcgacaacaccugcauggaguccgucaagaacggcaccuacgacuaccccaaguacuccgaggaggccaagcucaaccgcgaggagaucgacggcgucaagcucgaguccacccgcaucuaccagauccucgccaucuacuccaccgucgccuccucccucguccucgucgucucccucggcgccaucuccuucuggaugugcuccuggucccuccagugccgcaucugcaucuga

SEQ ID NO: 99588 - RNA, 1698 nt, Artificial Sequence
  derived and/or modified CDS sequence (opt2) from hemagglutinin__InfluenzaA__ACY77713
augaaggccauccucgucguccuccucuacaccuucgccaccgccaacgccgacacccucugcaucggcuaccacgccaacaacuccaccgacaccgucgacaccguccucgagaagaacgucaccgucacccacuccgucaacauccucgaggacaagcacaacggcaagcucugcaagcuccgcggcgucgccccccuccaccucggcaagugcaacaucgccggcuggauccucggcaaccccgagugcgagucccucuccaccgccuccuccugguccuacaucgucgagaccuccuccuccgacaacggcaccugcuaccccggcgacuucaucgacuacgaggagcuccgcgagcagcucuccuccgucuccuccuucgagcgcuucgagaucuuccccaagaccuccuccuggcccaaccacgacuccaacaagggcgucaccgccgccugcccccacgccggcgccaaguccuucuacaagaaccucaucuggcucgucaagaagggcaacuccuaccccaagcucuccaaguccuacaucaacgacaagggcaaggagguccucguccucuggggcauccaccaccccuccaccuccgccgaccagcagucccucuaccagaacgccgacgccuacgucuucgucggcuccucccgcuacuccaagaaguucaagcccgagaucgccauccgccccaagguccgcgaccaggagggccgcaugaacuacuacuggacccucgucgagcccggcgacaagaucaccuucgaggccaccggcaaccucgucgucccccgcuacgccuucgccauggagcgcaacgccggcuccggcaucaucaucuccgacacccccguccacgacugcaacaccaccugccagacccccaagggcgccaucaacaccucccuccccuuccagaacauccaccccaucaccaucggcaagugccccaaguacgucaaguccaccaagcuccgccucgccaccggccuccgcaacguccccuccauccagucccgcggccucuucggcgccaucgccggcuucaucgagggcggcuggaccggcauggucgacggcugguacggcuaccaccaccagaacgagcagggcuccggcuacgccgccgaccucaaguccacccagaacgccaucgacgagaucaccaacaaggucaacuccgucaucgagaagaugaacacccaguucaccggccagugcaaggaguucaaccaccucgagaagcgcaucgagaaccucaacaagaaggucgacgacggcuuccucgacaucuggaccuacaacgccgagcuccucguccuccucgagaacgagcgcacccucgacuaccacgacuccaacgucaagaaccucuacgagaagguccgcucccagcucaagaacaacgccaaggaggucggcaacggcugcuucgaguucuaccacaagugcgacaacaccugcauggaguccgucaagaacggcaccuacgacuaccccaaguacuccgaggaggccaagcucaaccgcgaggagaucgacggcgucaagcucgaguccacccgcaucuaccagauccucgccaucuacuccaccgucgccuccucccucguccucgucgucucccucggcgccaucuccuucuggaugugcuccggccaccuccagugccgcaucugcaucuga

SEQ ID NO: 99589 - RNA, 1701 nt, Artificial Sequence; identical to SEQ ID NO: 99018
  derived and/or modified CDS sequence (opt2) from hemagglutinin__InfluenzaA__ACY77723

SEQ ID NO: 99590 - RNA, 1695 nt, Artificial Sequence
  derived and/or modified CDS sequence (opt2) from hemagglutinin__InfluenzaA__ACY77733
augaaggccauccucgucguccuccucuacaccuucgccaccgccaacgccgacacccucugcaucggcuaccacgccaacaacuccaccgacaccgucgacaccguccucgagaagaacgucaccgucacccacuccgucaacauccucgaggacaagcacaacggcaagcucugcaagcuccgcggcgucgccccccuccaccucggcaagugcaacaucgccggcuggauccucggcaaccccgagugcgagucccucuccaccgccuccuccugguccuacaucgucgagaccuccuccuccgacaacggcaccugcuaccccggcgacuucaucgacuacgaggagcuccgcgagcagcucuccuccgucuccuccuucgagcgcuucgagaucuuccccaagaccuccuccuggcccaaccacgacuccaacaagggcgucaccgccgccugcccccacgccggcgccaaguccuucuacaagaaccucaucuggcucgucaagaccggcaacuccuaccccaagcucuccaaguccuacaucaacgacaagggcaaggagguccucguccucuggggcauccaccaccccuccaccuccgccgaccagcagucccucuaccagaacgccgacgccuacgucuucgucggcuccucccgcuacuccaagaaguucaagcccgagaucgccauccgccccaagguccgcgaccaggagggccgcaugaacuacuacuggacccucgucgagcccggcgacaagaucaccuucgaggccaccggcaaccucgucgucccccgcuacgccuucgccauggagcgcaacgccggcuccggcaucaucaucuccgacacccccguccacgacugcaacaccaccugccagacccccaagggcgccaucaacaccucccuccccuuccagaacauccaccccaucaccaucggcaagugccccaaguacgucaaguccaccaagcuccgccucgccaccggccuccgcaacguccccuccauccagucccgcggccucuucggcgccaucgccggcuucaucgagggcggcuggaccggcauggucgacggcugguacggcuaccaccaccagaacgagcagggcuccggcuacgccgccgaccucaaguccacccagaacgccaucgacgagaucaccaacaaggucaacuccgucaucgagaagaugaacacccaguucaccgccgucggcaaggaguucaaccaccucgagaagcgcaucgagaaccucaacaagaaggucgacgacggcuuccucgacaucuggaccuacaacgccgagcuccucguccuccucgagaacgagcgcacccucgacuaccacgacuccaacgucaagaaccucuacgagaagguccgcucccagcucaagaacaacgccaaggagaucggcaacggcugcuucgaguucuaccacaagugcgacaacaccugcauggaguccgucaagaacggcaccuacgacuaccccaaguacuccgaggaggccaagcucaaccgcgaggagaucgacggcgucaagcucgaguccacccgcaucuaccagauccucgccaucuacuccaccgucgccuccucccucguccucgucgucucccucggcgccaucuccuucuggaugugcuccggccuccagugccgcaucugcaucuga

SEQ ID NO: 99591 - RNA, 1698 nt, Artificial Sequence
  derived and/or modified CDS sequence (opt2) from hemagglutinin__InfluenzaA__ACY77743
augaaggccauccucgucguccuccucuacaccuucgccaccgccaacgccgacacccucugcaucggcuaccacgccaacaacuccaccgacaccgucgacaccguccucgagaagaacgucaccgucacccacuccgucaaccuccucgaggacaagcacaacggcaagcucugcaagcuccgcggcgucgccccccuccaccucggcaagugcaacaucgccggcuggauccucggcaaccccgagugcgagucccucuccaccgccuccuccugguccuacaucgucgagaccuccuccuccgacaacggcaccugcuaccccggcgacuucaucgacuacgaggagcuccgcgagcagcucuccuccgucuccuccuucgagcgcuucgagaucuuccccaagaccuccuccuggcccaaccacgacuccaacaagggcgucaccgccgccugcccccacgccggcgccaaguccuucuacaagaaccucaucuggcucgucaagaagggcaacuccuaccccaagcucuccaaguccuacaucaacgacaagggcaaggagguccucguccucuggggcauccaccaccccuccaccuccgccgaccagcagucccucuaccagaacgccgacgccuacgucuucgucggcuccucccgcuacuccaagaaguucaagcccgagaucgccauccgccccaagguccgcgaccaggagggccgcaugaacuacuacuggacccucgucgagcccggcgacaagaucaccuucgaggccaccggcaaccucgucgucccccgcuacgccuucgccauggagcgcaacgccggcuccggcaucaucaucuccgacacccccguccacgacugcaacaccaccugccagacccccaagggcgccaucaacaccucccuccccuuccagaacauccaccccaucaccaucggcaagugccccaaguacgucaaguccaccaagcuccgccucgccaccggccuccgcaacguccccuccauccagucccgcggccucuucggcgccaucgccggcuucaucgagggcggcuggaccggcauggucgacggcugguacggcuaccaccaccagaacgagcagggcuccggcuacgccgccgaccucaaguccacccagaacgccaucgacgagaucaccaacaaggucaacuccgucaucgagaagaugaacacccaguucaccgccgucggcaaggaguucaaccaccucgagaagcgcaucgagaaccucaacaagaaggucgacgacggcuuccucgacaucuggaccuacaacgccgagcuccucguccuccucgagaacgagcgcacccucgacuaccacgacuccaacgucaagaaccucuacgagaagguccgcucccagcucaagaacaacgccaaggaggucggcaacggcugcuucgaguucuaccacaagugcgacaacaccugcauggaguccgucaagaacggcaccuacgacuaccccaaguacuccgaggaggccaagcucaaccgcgaggagaucgacggcgucaagcucgaguccacccgcaucuaccagauccucgccaucuacuccaccgucgccuccucccucguccucgucgucucccucggcgccaucuccuucuggaugugcuccuggucccuccagugccgcaucugcaucuga

SEQ ID NO: 99592 - RNA, 1701 nt, Artificial Sequence; identical to SEQ ID NO: 98705
  derived and/or modified CDS sequence (opt2) from hemagglutinin__InfluenzaA__ACY77753

SEQ ID NO: 99593 - RNA, 1695 nt, Artificial Sequence
  derived and/or modified CDS sequence (opt2) from hemagglutinin__InfluenzaA__ACY77783
augaaggccauccucgucguccuccucuacaccuucgccaccgccaacgccgacacccucugcaucggcuaccacgccaacaacuccaccgacaccgucgacaccguccucgagaagaacgucaccgucacccacuccgucaaccuccucggcgacaagcacaacggcaagcucugcaagcuccgcggcgucgccccccuccaccucggcaagugcaacaucgccggcuggauccucggcaaccccgagugcgagucccucuccaccgccuccuccugguccuacaucgucgagaccuccuccuccgacaacggcaccugcuaccccggcgacuucaucgacuacgaggagcuccgcgagcagcucuccuccgucuccuccuucgagcgcuucgagaucuuccccaagaccuccuccuggcccaaccacgacuccgacaagggcgucaccgccgccugcccccacgccggcgccaaguccuucuacaagaaccucaucuggcucgucaagaagggcaacuccuaccccaagcucuccaaguccuacaucaacgacaagggcaaggagguccucguccucuggggcauccaccaccccuccaccuccgccgaccagcagucccucuaccagaacgccgacaccuacgucuucgucggcaccucccgcuacuccaagaaguucaagcccgagaucgccauccgccccaagguccgcgaccaggagggccgcaugaacuacuacuggacccucgucgagcccggcgacaagaucaccuucgaggccaccggcaaccucgucgucccccgcuacgccuucgccauggagcgcaacgccggcuccggcaucaucaucuccgacacccccguccacgacugcaacaccaccugccagacccccaagggcgccaucaacaccucccuccccuuccagaacauccaccccaucaccaucggcaagugccccaaguacgucaaguccaccaagcuccgccucgccaccggccuccgcaacguccccuccauccagucccgcggccucuucggcgccaucgccggcuucaucgagggcggcuggaccggcauggucgacggcugguacggcuaccaccaccagaacgagcagggcuccggcuacgccgccgaccucaaguccacccagaacgccaucgacgagaucaccaacaaggucaacuccgucaucgagaagaugaacacccaguucaccgccgucggcaaggaguucaaccaccucgagaagcgcaucgagaaccucaacaagaaggucgacgacggcuuccucgacaucuggaccuacaacgccgagcuccucguccuccucgagaacgagcgcacccucgacuaccacgacuccaacgucaagucccucuacgagaagguccgcucccagcucaagaacaacgccaaggagaucggcaacggcugcuucgaguucuaccacaagugcgacaacaccugcauggaguccgucaagaacggcaccuacgacuaccccaaguacuccgaggaggccaagcucaaccgcgaggagaucgacggcgucaagcucgaguccacccgcaucuaccagauccucgccaucuacuccaccgucgccuccucccucguccucgucgucucccucggcgccaucuccuucuggaugugcuccggccacuccugccgcaucugcaucuga

SEQ ID NO: 99594 - RNA, 1698 nt, Artificial Sequence
  derived and/or modified CDS sequence (opt2) from hemagglutinin__InfluenzaA__ACY77813
augaaggccauccucgucguccuccucuacaccuucgccaccgccaacgccgacacccucugcaucggcuaccacgccaacaacuccaccgacaccgucgacaccguccucgagaagaacgucaccgucacccacuccgucaaccuccucgaggacaagcacaacggcaagcucugcaagcuccgcggcgucgccccccuccaccucggcaagugcaacaucgccggcuggauccucggcaaccccgagugcgagucccucuccaccgccuccuccugguccuacaucgucgagaccuccuccuccgacaacggcaccugcuaccccggcgacuucaucgacuacgaggagcuccgcgagcagcucuccuccgucuccuccuucgagcgcuucgagaucuuccccaagaccuccuccuggcccaaccacgacuccaacaagggcgucaccgccgccugcccccacgccggcgccaaguccuucuacaagaaccucaucuggcucgucaagaagggcaacuccuaccccaagcucuccaaguccuacaucaacgacaagggcaaggagguccucguccucuggggcauccaccaccccuccaccuccgccgaccagcagucccucuaccagaacgccgacgccuacgucuucgucggcaccucccgcuacuccaagaaguucaagcccgagaucgccauccgccccaagguccgcgaccaggagggccgcaugaacuacuacuggacccucgucgagcccggcgacaagaucaccuucgaggccaccggcaaccucgucgucccccgcuacgccuucgccauggagcgcaacgccggcuccggcaucaucaucuccgacacccccguccacgacugcaacaccaccugccagacccccaagggcgccaucaacaccucccuccccuuccagaacauccaccccaucaccaucggcaagugccccaaguacgucaaguccaccaagcuccgccucgccaccggccuccgcaacguccccuccauccagucccgcggccucuucggcgccaucgccggcuucaucgagggcggcuggaccggcauggucgacggcugguacggcuaccaccaccagaacgagcagggcuccggcuacgccgccgaccucaaguccacccagaacgccaucgacgagaucaccaacaaggucaacuccgucaucgagaagaugaacacccaguucaccggccagugcaaggaguucaaccaccucgagaagcgcaucgagaaccucaacaagaaggucgacgacggcuuccucgacaucuggaccuacaacgccgagcuccucguccuccucgagaacgagcgcacccucgacuaccacgacuccaacgucaagaaccucuacgagaagguccgcucccagcucaagaacaacgccaaggagaucggcaacggcugcuucgaguucuaccacaagugcgacaacaccugcauggaguccgucaagaacggcaccuacgacuaccccaaguacuccgaggaggccaagcucaaccgcgaggagaucgacggcgucaagcucgaguccacccgcaucuaccagauccucgccaucuacuccaccgucgccuccucccucguccucgucgucucccucggcgccaucuccuucuggaugugcuccggccaccuccagugccgcaucugcaucuga

SEQ ID NO: 99595 - RNA, 1698 nt, Artificial Sequence
  derived and/or modified CDS sequence (opt2) from hemagglutinin__InfluenzaA__ACY77823
augaaggccauccucgucguccuccucuacaccuucgccaccgccaacgccgacacccucugcaucggcuaccacgccaacaacuccaccgacaccgucgacaccguccucgagaagaacgucaccgucacccacuccgucaaccuccucgaggacaagcacaacggcaagcucugcaagcuccgcggcgucgccccccuccaccucggcaagugcaacaucgccggcuggauccucggcaaccccgagugcgagucccucuccaccgccuccuccugguccuacaucgucgagaccuccuccuccgacaacggcaccugcuaccccggcgacuucaucgacuacgaggagcuccgcgagcagcucuccuccgucuccuccuucgagcgcuucgagaucuuccccaagaccuccuccuggcccaaccacgacuccaacaagggcgucaccgccgccugcccccacgccggcgccaaguccuucuacaagaaccucaucuggcucgucaagaagggcaacuccuaccccaagcucuccaaguccuacaucaacgacaagggcaaggagguccucguccucuggggcauccaccaccccuccaccuccgccgaccagcagucccucuaccagaacgccgacgccuacgucuucgucggcaccucccgcuacuccaagaaguucaagcccgagaucgccauccgccccaagguccgcgaccaggagggccgcaugaacuacuacuggacccucgucgagcccggcgacaagaucaccuucgaggccaccggcaaccucgucgucccccgcuacgccuucgccauggagcgcaacgccggcuccggcaucaucaucuccgacacccccguccacgacugcaacaccaccugccagacccccaagggcgccaucaacaccucccuccccuuccagaacauccaccccaucaccaucggcaagugccccaaguacgucaaguccaccaagcuccgccucgccaccggccuccgcaacguccccuccauccagucccgcggccucuucggcgccaucgccggcuucaucgagggcggcuggaccggcauggucgacggcugguacggcuaccaccaccagaacgagcagggcuccggcuacgccgccgaccucaaguccacccagaacgccaucgacgagaucaccaacaaggucaacuccgucaucgagaagaugaacacccaguucaccggccagugcaaggaguucaaccaccucgagaagcgcaucgagaaccucaacaagaaggucgacgacggcuuccucgacaucuggaccuacaacgccgagcuccucguccuccucgagaacgagcgcacccucgacuaccacgacuccaacgucaagaaccucuacgagaagguccgcucccagcucaagaacaacgccaaggagaucggcaacggcugcuucgaguucuaccacaagugcgacaacaccugcauggaguccgucaagaacggcaccuacgacuaccccaaguacuccgaggaggccaagcucaaccgcgaggagaucgacggcgucaagcucgaguccacccgcaucuaccagauccucgccaucuacuccaccgucgccuccucccucguccucgucgucucccucggcgccaucuccuucuggaugugcuccuggucccuccagugccgcaucugcaucuga

SEQ ID NO: 99596 - RNA, 1698 nt, Artificial Sequence
  derived and/or modified CDS sequence (opt2) from hemagglutinin__InfluenzaA__ACY77833
augaaggccauccucgucguccuccucuacaccuucgccaccgccaacgccgacacccucugcaucggcuaccacgccaacaacuccaccgacaccgucgacaccguccucgagaagaacgucaccgucacccacuccgucaaccuccucgaggacaagcacaacggcaagcucugcaagcuccgcggcgucgccccccuccaccucggcaagugcaacaucgccggcuggauccucggcaaccccgagugcgagucccucuccaccgccuccuccugguccuacaucgucgagaccuccuccuccgacaacggcaccugcuaccccggcgacuucaucgacuacgaggagcuccgcgagcagcucuccuccgucuccuccuucgagcgcuucgagaucuuccccaagaccuccuccuggcccaaccacgacuccaacaagggcgucaccgccgccugcccccacgccggcgccaaguccuucuacaagaaccucaucuggcucgucaagaagggcaacuccuaccccaagcucuccaaguccuacaucaacgacaagggcaaggagguccucguccucuggggcauccaccaccccuccaccuccgccgaccagcagucccucuaccagaacgccgacgccuacgucuucgucggcaccucccgcuacuccaagaaguucaagcccgagaucgccauccgccccaagguccgcgaccaggagggccgcaugaacuacuacuggacccucgucgagcccggcgacaagaucaccuucgaggccaccggcaaccucgucgucccccgcuacgccuucgccauggagcgcaacgccggcuccggcaucaucaucuccgacacccccguccacgacugcaacaccaccugccagacccccaagggcgccaucaacaccucccuccccuuccagaacauccaccccaucaccaucggcaagugccccaaguacgucaaguccaccaagcuccgccucgccaccggccuccgcaacguccccuccauccagucccgcggccucuucggcgccaucgccggcuucaucgagggcggcuggaccggcauggucgacggcugguacggcuaccaccaccagaacgagcagggcuccggcuacgccgccgaccucaaguccacccagaacgccaucgacgagaucaccaacaaggucaacuccgucaucgagaagaugaacacccaguucaccgccgucggcaaggaguucaaccaccucgagaagcgcaucgagaaccucaacaagaaggucgacgacggcuuccucgacaucuggaccuacaacgccgagcuccucguccuccucgagaacgagcgcacccucgacuaccacgacuccaacgucaagaaccucuacgagaagguccgcucccagcucaagaacaacgccaaggagaucggcaacggcugcuucgaguucuaccacaagugcgacaacaccugcauggaguccgucaagaacggcaccuacgacuaccccaaguacuccgaggaggccaagcucaaccgcgaggagaucgacggcgucaagcucgaguccacccgcaucuaccagauccucgccaucuacuccaccgucgccuccucccucguccucgucgucucccucggcgccaucuccuucuggaugugcuccuggucccuccagugccgcaucugcaucuga

SEQ ID NO: 99597 - RNA, 1698 nt, Artificial Sequence
  derived and/or modified CDS sequence (opt2) from hemagglutinin__InfluenzaA__ACY77843
augaaggccauccucgucgucaugcucuacaccuucgccaccgccaacgccgacacccucugcaucggcuaccacgccaacaacuccaccgacaccgucgacaccguccucgagaagaacgucaccgucacccacuccgucaaccuccucgaggacaagcacaacggcaagcucugcaagcuccgcggcgucgccccccuccaccucggcaagugcaacaucgccggcuggauccucggcaaccccgagugcgagucccucuccaccgccuccuccugguccuacaucgucgagaccuccuccuccgacaacggcaccugcuaccccggcgacuucaucgacuacgaggagcuccgcgagcagcucuccuccgucuccuccuucgagcgcuucgagaucuuccccaagaccuccuccuggcccaaccacgacuccaacaagggcgucaccgccgccugcccccacgccggcgccaaguccuucuacaagaaccucaucuggcucgucaagaagggcaacuccuaccccaagcucuccaaguccuacaucaacgacaagggcaaggagguccucguccucuggggcauccaccaccccuccaccuccgccgaccagcagucccucuaccagaacgccgacgccuacgucuucgucggcuccucccgcuacuccaagaaguucaagcccgagaucgccauccgccccaagguccgcgaccaggagggccgcaugaacuacuacuggacccucgucgagcccggcgacaagaucaccuucgaggccaccggcaaccucgucgucccccgcuacgccuucgccauggagcgcaacgccggcuccggcaucaucaucuccgacaccaccguccacgacugcaacaccaccugccagacccccaagggcgccaucaacaccucccuccccuuccagaacauccaccccaucaccaucggcaagugccccaaguacgucaaguccaccaagcuccgccucgccaccggccuccgcaacguccccuccauccagucccgcggccucuucggcgccaucgccggcuucaucgagggcggcuggaccggcauggucgacggcugguacggcuaccaccaccagaacgagcagggcuccggcuacgccgccgaccucaaguccacccagaacgccaucgacgagaucaccaacaaggucaacuccgucaucgagaagaugaacacccaguucaccgccgucggcaaggaguucaaccaccucgagaagcgcaucgagaaccucaacaagaaggucgacgacggcuuccucgacaucuggaccuacaacgccgagcuccucguccuccucgagaacgagcgcacccucgacuaccacgacuccaacgucaagaaccucuacgagaagguccgcucccagcucaagaacaacgccaaggagaucggcaacggcugcuucgaguucuaccacaagugcgacaacaccugcauggaguccgucaagaacggcaccuacgacuaccccaaguacuccgaggaggccaagcucaaccgcgaggagaucgacggcgucaagcucgaguccacccgcaucuaccagauccucgccaucuacuccaccgucgccuccucccucguccucgucgucucccucggcgccaucuccuucuggaugugcuccggccaccuccagugccgcaucugcaucuga

SEQ ID NO: 99598 - RNA, 1701 nt, Artificial Sequence
  derived and/or modified CDS sequence (opt2) from hemagglutinin__InfluenzaA__ACY77863
augaaggccauccucgucguccuccucuacaccuucgccaccgccaacgccgacacccucugcaucggcuaccacgccaacaacuccaccgacaccgucgacaccguccucgagaagaacgucaccgucacccacuccgucaaccuccucgaggacaagcacaacggcaagcucugcaagcuccgcggcgucgccccccuccaccucggcaagugcaacaucgccggcuggauccucggcaaccccgagugcgagucccucuccaccgccuccuccugguccuacaucgucgagaccuccuccuccgacaacggcaccugcuaccccggcgacuucaucgacuacgaggagcuccgcgagcagcucuccuccgucuccuccuucgagcgcuucgagaucuuccccaagaccuccuccuggcccaaccacgacuccaacaagggcgucaccgccgccugcccccacgccggcgccaaguccuucuacaagaaccucaucuggcucgucaagaagggcaacuccuaccccaagcucuccaaguccuacaucaacgacaagggcaaggagguccucguccucuggggcauccaccaccccuccaccuccgccgaccagcagucccucuaccagaacgccgacgccuacgucuucgucggcaccucccgcuacuccaagaaguucaagcccgagaucgccauccgccccaagguccgcgaccaggagggccgcaugaacuacuacuggacccucgucgagcccggcgacaagaucaccuucgaggccaccggcaaccucgucgucccccgcuacgccuucgccauggagcgcaacgccggcuccggcaucaucaucuccgacacccccguccacgacugcaacaccaccugccagacccccaagggcgccaucaacaccucccuccccuuccagaacauccaccccaucaccaucggcaagugccccaaguacgucaaguccaccaagcuccgccucgccaccggccuccgcaacguccccuccauccagucccgcggccucuucggcgccaucgccggcuucaucgagggcggcuggaccggcauggucgacggcugguacggcuaccaccaccagaacgagcagggcuccggcuacgccgccgaccucaaguccacccagaacgccaucgacgagaucaccaacaaggucaacuccgucaucgagaagaugaacacccaguucaccgccgucggcaaggaguucaaccaccucgagaagcgcaucgagaaccucaacaagaaggucgacgacggcuuccucgacaucuggaccuacaacgccgagcuccucguccuccucgagaacgagcgcacccucgacuaccacgacuccaacgucaagaaccucuacgagaagguccgcucccagcucaagaacaacgccaaggagaucggcaacggcugcuucgaguucuaccacaagugcgacaacaccugcauggaguccgucaagaacggcaccuacgacuaccccaaguacuccgaggaggccaagcucaaccgcgaggagaucgacggcgucaagcucgaguccacccgcaucuaccagauccucgccaucuacuccaccgucgccuccucccucguccucgucgucucccucggcgccaucuccuucuggaugugcuccggcaugucccuccagugccgcaucugcaucuga

SEQ ID NO: 99599 - RNA, 1701 nt, Artificial Sequence; identical to SEQ ID NO: 98692
  derived and/or modified CDS sequence (opt2) from hemagglutinin__InfluenzaA__ACY77874

SEQ ID NO: 99600 - RNA, 1701 nt, Artificial Sequence; identical to SEQ ID NO: 98692
  derived and/or modified CDS sequence (opt2) from hemagglutinin__InfluenzaA__ACY77884

SEQ ID NO: 99601 - RNA, 1701 nt, Artificial Sequence
  derived and/or modified CDS sequence (opt2) from hemagglutinin__InfluenzaA__ACY77904
augaaggccauccucgucguccuccucuacaccuucgccaccgccaacgccgacacccucugcaucggcuaccacgccaacaacuccaccgacaccgucgacaccguccucgagaagaacgucaccgucacccacuccgucaaccuccucgaggacaagcacaacggcaagcucugcaagcuccgcggcgucgccccccuccaccucggcaagugcaacaucgccggcuggauccucggcaaccccgagugcgagucccucuccaccgccuccuccugguccuacaucgucgagaccuccuccuccgacaacggcaccugcuaccccggcgacuucaucgacuacgaggagcuccgcgagcagcucuccuccgucuccuccuucgagcgcuucgagaucuuccccaagaccuccuccuggcccaaccacgacuccaacaagggcgucaccgccgccugcccccacgccggcgccaaguccuucuacaagaaccucaucuggcucgucaagaagggcaacuccuaccccaagcucuccaaguccuacaucaacgacaagggcaaggagguccucguccucuggggcauccaccaccccuccaccuccgccgaccagcagucccucuaccagaacgccgacgccuacgucuucgucggcuccuccaaguacuccaagaaguucaagcccgagaucgccauccgccccaagguccgcgaccaggagggccgcaugaacuacuacuggacccucgucgagcccggcgacaagaucaccuucgaggccaccggcaaccucgucgucccccgcuacgccuucgccauggagcgcaacgccggcuccggcaucaucaucuccgacacccccguccacgacugcaacaccaccugccagacccccaagggcgccaucaacaccucccuccccuuccagaacauccaccccaucaccaucggcaagugccccaagcacgucaaguccaccaagcuccgccucgccaccggccuccgcaacguccccuccauccagucccgcggccucuucggcgccaucgccggcuucaucgagggcggcuggaccggcauggucgacggcugguacggcuaccaccaccagaacgagcagggcuccggcuacgccgccgaccucaaguccacccagaacgccaucgacgagaucaccaacaaggucaacuccgucaucgagaagaugaacacccaguucaccgccgucggcaaggaguucaaccaccucgagaagcgcaucgagaaccucaacaagaaggucgacgacggcuuccucgacaucuggaccuacaacgccgagcuccucguccuccucgagaacgagcgcacccucgacuaccacgacuccaacgucaagaaccucuacgagaagguccgcucccagcucaagaacaacgccaaggagaucggcaacggcugcuucgaguucuaccacaagugcgacaacaccugcauggaguccgucaagaacggcaccuacgacuaccccaaguacuccgaggaggccaagcucaaccgcgaggagaucgacggcgucaagcucgaguccacccgcaucuaccagauccucgccaucuacuccaccgucgccuccucccucguccucgucgucucccucggcgccaucuccuucuggaugugcuccaacggcucccuccagugccgcaucugcaucuga

SEQ ID NO: 99602 - RNA, 1701 nt, Artificial Sequence; identical to SEQ ID NO: 98885
  derived and/or modified CDS sequence (opt2) from hemagglutinin__InfluenzaA__ACY77914

SEQ ID NO: 99603 - RNA, 1701 nt, Artificial Sequence
  derived and/or modified CDS sequence (opt2) from hemagglutinin__InfluenzaA__ACY77924
augaaggccauccucgucguccuccucuacaccuucgccaccgccaacgccgacacccucugcaucggcuaccacgccaacaacuccaccgacaccgucgacaccguccucgagaagaacgucaccgucacccacuccgucaaccuccucgaggacaagcacgacggcaagcucugcaagcuccgcggcgucgccccccuccaccucggcaagugcaacaucgccggcuggauccucggcaaccccgagugcgagucccucuccaccgccuccuccugguccuacaucgucgagaccuccuccuccgacaacggcaccugcuaccccggcgacuucaucgacuacgaggagcuccgcgagcagcucuccuccgucuccuccuucgagcgcuucgagaucuuccccaagaccuccuccuggcccaaccacgacuccaacaagggcgucaccgccgccugcccccacgccggcgccaaguccuucuacaagaaccucaucuggcucgucaagaagggcaacuccuaccccaagcucuccaaguccuacaucaacgacaagggcaaggagguccucguccucuggggcauccaccaccccuccaccuccgccgaccagcagucccucuaccagaacgccgacgccuacgucuucgucggcaccucccgcuacuccaagaaguucaagcccgagaucgccauccgccccaagguccgcgaccaggagggccgcaugaacuacuacuggacccucgucgagcccggcgacaagaucaccuucgaggccaccggcaaccucgucgucccccgcuacgccuucgccauggagcgcaacgccggcuccggcaucaucaucuccgacacccccguccacgacugcaacaccaccugccagacccccaagggcgccaucaacaccucccuccccuuccagaacauccaccccaucaccaucggcaagugccccaaguacgucaaguccaccaagcuccgccucgccaccggccuccgcaacguccccuccauccagucccgcggccucuucggcgccaucgccggcuucaucgagggcggcuggaccggcauggucgacggcugguacggcuaccaccaccagaacgagcagggcuccggcuacgccgccgaccucaaguccacccagaacgccaucgacgagaucaccaacaaggucaacuccgucaucgagaagaugaacacccaguucaccgccgucggcaaggaguucaaccaccucgagaagcgcaucgagaaccucaacaagaaggucgacgacggcuuccucgacaucuggaccuacaacgccgagcuccucguccuccucgagaacgagcgcacccucgacuaccacgacuccaacgucaagaaccucuacgagaagguccgcucccagcucaagaacaacgccaaggagaucggcaacggcugcuucgaguucuaccacaagugcgacaacaccugcauggaguccgucaagaacggcaccuacgacuaccccaaguacuccgaggaggccaagcucaaccgcgaggagaucgacggcgucaagcucgaguccacccgcaucuaccagauccucgccaucuacuccaccgucgccuccucccucguccucgucgucucccucggcgccaucuccuucuggaugugcuccaacggcucccuccagugccgcaucugcaucuga

SEQ ID NO: 99604 - RNA, 1701 nt, Artificial Sequence; identical to SEQ ID NO: 99453
  derived and/or modified CDS sequence (opt2) from hemagglutinin__InfluenzaA__ACY77934

SEQ ID NO: 99605 - RNA, 1701 nt, Artificial Sequence
  derived and/or modified CDS sequence (opt2) from hemagglutinin__InfluenzaA__ACY77944
augaaggccauccucgucguccuccucuacaccuucgccaccgccaacgccgacacccucugcaucggcuaccacgccaacaacuccaccgacaccgucgacaccguccucgagaagaacgucaccgucacccacuccgucaaccuccucgaggacaagcacaacggcaagcucugcaagcuccgcggcgucgccccccuccaccucggcaagugcaacaucgccggcuggauccucggcaaccccgagugcgagucccucuccaccgccuccuccugguccuacaucgucgagaccuccuccuccgacaacggcaccugcuaccccggcgacuucaucgacuacgaggagcuccgcgagcagcucuccuccgucuccuccuucgagcgcuucgagaucuuccccaagaccuccuccuggcccaaccacgacuccaacaagggcgucaccgccgccugcccccacgccggcgccaaguccuucuacaagaaccucaucuggcucgucaagaagggcaacuccuaccccaagcucuccaaguccuacaucaacgacaagggcaaggagguccucguccucuggggcauccaccaccccuccaccuccgccgaccagcagucccucuaccagaacgccgacgccuacgucuucgucggcuccucccgcuacuccaagaaguucaagcccgagaucgccauccgccccaagguccgcgaccaggagggccgcaugaacuacuacuggacccucgucgagcccggcgacaagaucaccuucgaggccaccggcaaccucgucgucccccgcuacgccuucgccauggagcgcaacgccgaguccggcaucaucaucuccgacacccccguccacgacugcaacaccaccugccagacccccaagggcgccaucaacaccucccuccccuuccagaacauccaccccaucaccaucggcaagugccccaaguacgucaaguccaccaagcuccgccucgccaccggccuccgcaacguccccuccauccagucccgcggccucuucggcgccaucgccggcuucaucgagggcggcuggaccggcauggucgacggcugguacggcuaccaccaccagaacgagcagggcuccggcuacgccgccgaccucaaguccacccagaacgccaucgacgagaucaccaacaaggucaacuccgucaucgagaagaugaacacccaguucaccgccgucggcaaggaguucaaccaccucgagaagcgcaucgagaaccucaacaagaaggucgacgacggcuuccucgacaucuggaccuacaacgccgagcuccucguccuccucgagaacgagcgcacccucgacuaccacgacuccaacgucaagaaccucuacgagaagguccgcucccagcucaagaacaacgccaaggagaucggcaacggcugcuucgaguucuaccacaagugcgacaacaccugcauggaguccgucaagaacggcaccuacgacuaccccaaguacuccgaggaggccaagcucaaccgcgaggagaucgacggcgucaagcucgaguccacccgcaucuaccagauccucgccaucuacuccaccgucgccuccucccucguccucgucgucucccucggcgccaucuccuucuggaugugcuccaacggcucccuccagugccgcaucugcaucuga

SEQ ID NO: 99606 - RNA, 1701 nt, Artificial Sequence; identical to SEQ ID NO: 98692
  derived and/or modified CDS sequence (opt2) from hemagglutinin__InfluenzaA__ACY77954

SEQ ID NO: 99607 - RNA, 1701 nt, Artificial Sequence; identical to SEQ ID NO: 98692
  derived and/or modified CDS sequence (opt2) from hemagglutinin__InfluenzaA__ACY77964

SEQ ID NO: 99608 - RNA, 1701 nt, Artificial Sequence; identical to SEQ ID NO: 98692
  derived and/or modified CDS sequence (opt2) from hemagglutinin__InfluenzaA__ACY77974

SEQ ID NO: 99609 - RNA, 1701 nt, Artificial Sequence; identical to SEQ ID NO: 98692
  derived and/or modified CDS sequence (opt2) from hemagglutinin__InfluenzaA__ACY77984

SEQ ID NO: 99610 - RNA, 1701 nt, Artificial Sequence; identical to SEQ ID NO: 98692
  derived and/or modified CDS sequence (opt2) from hemagglutinin__InfluenzaA__ACY77994

SEQ ID NO: 99611 - RNA, 1701 nt, Artificial Sequence
  derived and/or modified CDS sequence (opt2) from hemagglutinin__InfluenzaA__ACY79633
augaaggagauccucgucguccuccucuacaccuucgccaccgccaacgccgacacccucugcaucggcuaccacgccaacaacuccaccgacaccgucgacaccguccucgagaagaacgucaccgucacccacuccgucaaccuccucgaggacaagcacaacggcaagcucugcaagcuccgcggcgucgccccccuccaccucggcaagugcaacaucgccggcuggauccucggcaaccccgagugcgagucccucuccaccgccuccuccugguccuacaucgucgagaccuccuccuccgacaacggcaccugcuaccccggcgacuucaucgacuacgaggagcuccgcgagcagcucuccuccgucuccuccuucgagcgcuucgagaucuuccccaagaccuccuccuggcccaaccacgacuccaacaagggcgucaccgccgccugcccccacgccggcgccaaguccuucuacaagaaccucaucuggcucgucaagaagggcaacuccuaccccaagcucuccaaguccuacaucaacgacaagggcaaggagguccucguccucuggggcauccaccaccccuccaccuccgccgaccagcagucccucuaccagaacgccgacgccuacgucuucgucggcaccucccgcuacuccaagaaguucaagcccgagaucgccauccgccccaagguccgcgaccaggagggccgcaugaacuacuacuggacccucgucgagcccggcgacaagaucaccuucgaggccaccggcaaccucgucgucccccgcuacgccuucgccauggagcgcaacgcccgcuccggcaucaucaucuccgacacccccguccacgacugcaacaccaccugccagacccccaagggcgccaucaacaccucccuccccuuccagaacauccaccccaucaccaucggcaagugccccaaguacgucaaguccaccaagcuccgccucgccaccggccuccgcaacguccccuccauccagucccgcggccucuucggcgccaucgccggcuucaucgagggcggcuggaccggcauggucgacggcugguacggcuaccaccaccagaacgagcagggcuccggcuacgccgccgaccucaaguccacccagaacgccaucgacgagaucaccaacaaggucaacuccgucaucgagaagaugaacacccaguucaccgccgucggcaaggaguucaaccaccucgagaagcgcaucgagaaccucaacaagaaggucgacgacggcuuccucgacaucuggaccuacaacgccgagcuccucguccuccucgagaacgagcgcacccucgacuaccacgacuccaacgucaagaaccucuacgagaagguccgcucccagcucaagaacaacgccaaggagaucggcaacggcugcuucgaguucuaccacaagugcgacaacaccugcauggaguccgucaagaacggcaccuacgacuaccccaaguacuccgaggaggccaagcucaaccgcgaggagaucgacggcgucaagcucgaguccacccgcaucuaccagauccucgccaucuacuccaccgucgccuccucccucguccucgucgucucccucggcgccaucuccuucuggaugugcuccaacggcucccuccagugccgcaucugcaucuga

SEQ ID NO: 99612 - RNA, 1701 nt, Artificial Sequence; identical to SEQ ID NO: 99503
  derived and/or modified CDS sequence (opt2) from hemagglutinin__InfluenzaA__ACZ01953

SEQ ID NO: 99613 - RNA, 1701 nt, Artificial Sequence
  derived and/or modified CDS sequence (opt2) from hemagglutinin__InfluenzaA__ACZ05050
augaaggccauccucgucguccuccucuacaccuucgccaccgccaacgccgacacccucugcaucggcuaccacgccaacaacuccaccgacaccgucgacaccguccucgagaagaacgucaccgucacccacuccgucaaccuccucgaggacaagcacaacggcaagcucugcaagcuccgcggcgucgccccccuccaccucggcaagugcaacaucgccggcuggauccucggcaaccccgagugcgagucccucuccaccgccuccuccugguccuacaucgucgagaccuccuccuccgacaacggcaccugcuaccccggcgacuucaucgacuacgaggagcuccgcgagcagcucuccuccgucuccuccuucgagcgcuucgagaucuuccccaagaccuccuccuggcccaaccacgacuccaacaagggcgucaccgccgccugcucccacgccggcgccaaguccuucuacaagaaccucaucuggcucgucaagaagggcaacuccuaccccaagcucuccaaguccuacaucaacgacaagggcaaggagguccucguccucuggggcauccaccaccccuccaccuccgccgaccagcagucccucuaccagaacgccgacgccuacgucuucgucggcuccucccgcuacuccaagaaguucaagcccgagaucgccauccgccccaagguccgcgaccaggagggccgcaugaacuacuacuggacccucgucgagcccggcgacaagaucaccuucgaggccaccggcaaccucgucgucccccgcuacgccuucgccauggagcgcaacgccggcuccggcaucaucaucuccgacacccccguccacgacugcaacaccaccugccagacccccaagggcgccaucaacaccucccuccccuuccagaacauccaccccaucaccaucggcaagugccccaaguacgucaaguccaccaagcuccgccucgccaccggccuccgcaacguccccuccauccagucccgcggccucuucggcgccaucgccggcuucaucgagggcggcuggaccggcauggucgacggcugguacggcuaccaccaccagaacgagcagggcuccggcuacgccgccgaccucaaguccacccagaacgccaucgacgagaucaccaacaaggucaacuccgucaucgagaagaugaacacccaguucaccgccgucggcaaggaguucaaccaccucgagaagcgcaucgagaaccucaacaagaaggucgacgacggcuuccucgacaucuggaccuacaacgccgagcuccucguccuccucgagaacgagcgcacccucgacuaccacgacuccaacgucaagaaccucuacgagaagguccgcucccagcucaagaacaacgccaaggagaucggcaacggcugcuucgaguucuaccacaagugcgacaacaccugcauggaguccgucaagaacggcaccuacgacuaccccaaguacuccgaggaggccaagcucaaccgcgaggagaucgacggcgucaagcucgaguccacccgcaucuaccagauccucgccaucuacuccaccgucgccuccucccucguccucgucgucucccucggcgccaucuccuucuggaugugcuccaacggcucccuccagugccgcaucugcaucuga

SEQ ID NO: 99614 - RNA, 1701 nt, Artificial Sequence
  derived and/or modified CDS sequence (opt2) from hemagglutinin__InfluenzaA__ACZ05061
auggaggccauccucgucguccuccucuacaccuucaccaccgccaacgccgacacccucugcaucggcuaccacgccaacaacuccaccgacaccgucgacaccguccucgagaagaacgucaccgucacccacuccgucaaccuccucgaggacaagcacaacggcaagcucugcaagcuccgcggcgucgccccccuccaccucggcaagugcaacaucgccggcuggauccucggcaaccccgagugcgagucccucuccaccgccuccuccugguccuacaucgucgagaccuccuccuccgacaacggcaccugcuaccccggcgacuucaucgacuacgaggagcuccgcgagcagcucuccuccgucuccuccuucgagcgcuucgagaucuuccccaagaccuccuccuggcccaaccacgacuccaacaagggcgucaccgccgccugcccccacgccggcgccaaguccuucuacaagaaccucaucuggcucgucaagaagggcaacuccuaccccaagcucuccaaguccuacaucaacgacaagggcaaggagguccucguccucuggggcauccaccaccccuccaccuccgccgaccagcagucccucuaccagaacgccgacgccuacgucuucgucggcuccucccgcuacuccaagaaguucaagcccgagaucgccauccgccccaagguccgcgaccaggagggccgcaugaacuacuacuggacccucgucgagcccggcgacaagaucaccuucgaggccaccggcaaccucgucgucccccgcuacgccuucgccauggagcgcaacgccggcuccggcaucaucaucuccgacacccccguccacgacugcaacaccaccugccagacccucaagggcgccaucaacaccucccuccccuuccagaacauccaccccaucaccaucggcaagugccccaaguacgucaaguccaccaagcuccgccucgccaccggccuccgcaacguccccuccauccagucccgcggccucuucggcgccaucgccggcuucaucgagggcggcuggaccggcauggucgacggcugguacggcuaccaccaccagaacgagcagggcuccggcuacgccgccgaccucaaguccacccagaacgccaucgacgagaucaccaacaaggucaacuccgucaucgagaagaugaacacccaguucaccgccgucggcaaggaguucaaccaccucgagaagcgcaucgagaaccucaacaagaaggucgacgacggcuuccucgacaucuggaccuacaacgccgagcuccucguccuccucgagaacgagcgcacccucgacuaccacgacuccaacgucaagaaccucuacgagaagguccgcucccagcucaagaacaacgccaaggagaucggcaacggcugcuucgaguucuaccacaagugcgacaacaccugcauggaguccgucaagaacggcaccuacgacuaccccaaguacuccgaggaggccaagcucaaccgcgaggagaucgacggcgucaagcucgaguccacccgcaucuaccagauccucgccaucuacuccaccgucgccuccucccucguccucgucgucucccucggcgccaucuccuucuggaugugcuccaacggcucccuccagugccgcaucugcaucuga

SEQ ID NO: 99615 - RNA, 1701 nt, Artificial Sequence; identical to SEQ ID NO: 98692
  derived and/or modified CDS sequence (opt2) from hemagglutinin__InfluenzaA__ACZ05071

SEQ ID NO: 99616 - RNA, 1701 nt, Artificial Sequence; identical to SEQ ID NO: 98692
  derived and/or modified CDS sequence (opt2) from hemagglutinin__InfluenzaA__ACZ05081

SEQ ID NO: 99617 - RNA, 1701 nt, Artificial Sequence; identical to SEQ ID NO: 98692
  derived and/or modified CDS sequence (opt2) from hemagglutinin__InfluenzaA__ACZ05091

SEQ ID NO: 99618 - RNA, 1701 nt, Artificial Sequence; identical to SEQ ID NO: 98692
  derived and/or modified CDS sequence (opt2) from hemagglutinin__InfluenzaA__ACZ05101

SEQ ID NO: 99619 - RNA, 1701 nt, Artificial Sequence; identical to SEQ ID NO: 98692
  derived and/or modified CDS sequence (opt2) from hemagglutinin__InfluenzaA__ACZ05111

SEQ ID NO: 99620 - RNA, 1701 nt, Artificial Sequence
  derived and/or modified CDS sequence (opt2) from hemagglutinin__InfluenzaA__ACZ05121
augaaggccauccucgucguccuccucuacaccuucgccaccgccaacgccgacacccucugcaucggcuaccacgccaacaacuccaccgacaccgucgacaccguccucgagaagaacgucaccgucacccacuccgucaaccuccucgaggacaagcacaacggcaagcucugcaagcuccgcggcgucgccccccuccaccucggcaagugcaacaucgccggcuggauccucggcaaccccgagugcgagucccucuccaccgccuccuccugguccuacaucgucgagaccuccuccuccgacaacggcaccugcuaccccggcgacuucaucgacuacgaggagcuccgcgagcagcucuccuccgucuccuccuucgagcgcuucgagaucuuccccaagaccuccuccuggcccaaccacgacuccaacaagggcgucaccgccgccugcccccacgccggcgccaaguccuucuacaacaaccucaucuggcucgucaagaagggcaacuccuaccccaagcucuccaaguccuacaucaacgacaagggcaaggagguccucguccucuggggcauccaccaccccuccaccuccgccgaccagcagucccucuaccagaacgccgacgccuacgucuucgucggcuccucccgcuacuccaagaaguucaagcccgagaucgccauccgccccaagguccgcgaccaggagggccgcaugaacuacuacuggacccucgucgagcccggcgacaagaucaccuucgaggccaccggcaaccucgucgucccccgcuacgccuucgccauggagcgcaacgccggcuccggcaucaucaucuccgacacccccguccacgacugcaacaccaccugccagacccccaagggcgccaucaacaccucccuccccuuccagaacauccaccccaucaccaucggcaagugccccaaguacgucaaguccaccaagcuccgccucgccaccggccuccgcaacguccccuccauccagucccgcggccucuucggcgccaucgccggcuucaucgagggcggcuggaccggcauggucgacggcugguacggcuaccaccaccagaacgagcagggcuccggcuacgccgccgaccucaaguccacccagaacgccaucgacgagaucaccaacaaggucaacuccgucaucgagaagaugaacacccaguucaccgccgucggcaaggaguucaaccaccucgagaagcgcaucgagaaccucaacaagaaggucgacgacggcuuccucgacaucuggaccuacaacgccgagcuccucguccuccucgagaacgagcgcacccucgacuaccacgacuccaacgucaagaaccucuacgagaagguccgcucccagcucaagaacaacgccaaggagaucggcaacggcugcuucgaguucuaccacaagugcgacaacaccugcaugggcuccgucaagaacggcaccuacgacuaccccaaguacuccgaggaggccaagcucaaccgcgaggagaucgacggcgucaagcucgaguccacccgcaucuaccagauccucgccaucuacuccaccgucgccuccucccucguccucgucgucucccucggcgccaucuccuucuggaugugcuccaacggcucccuccagugccgcaucugcaucuga

SEQ ID NO: 99621 - RNA, 1701 nt, Artificial Sequence; identical to SEQ ID NO: 98692
  derived and/or modified CDS sequence (opt2) from hemagglutinin__InfluenzaA__ACZ05131

SEQ ID NO: 99622 - RNA, 1701 nt, Artificial Sequence; identical to SEQ ID NO: 98692
  derived and/or modified CDS sequence (opt2) from hemagglutinin__InfluenzaA__ACZ05141

SEQ ID NO: 99623 - RNA, 1701 nt, Artificial Sequence; identical to SEQ ID NO: 98692
  derived and/or modified CDS sequence (opt2) from hemagglutinin__InfluenzaA__ACZ05151

SEQ ID NO: 99624 - RNA, 1701 nt, Artificial Sequence
  derived and/or modified CDS sequence (opt2) from hemagglutinin__InfluenzaA__ACZ05172
augaagaccaucaucgcccucuccuacauccucugccucgucuucgcccagaagcuccccggcaacgacaacuccaccgccacccucugccucggccaccacgccguccccaacggcaccaucgucaagaccaucaccaacgaccagaucgaggucaccaacgccaccgagcucguccaguccuccuccaccggcgagaucugcgacuccccccaccagauccucgacggcaagaacugcacccucaucgacgcccuccucggcgacccccagugcgacggcuuccagaacaagaagugggaccucuucgucgagcgcuccaaggccuacuccaacugcuaccccuacgacguccccgacuacgccucccuccgcucccucgucgccuccuccggcacccucgaguucaacaacgaguccuucaacuggaccggcgucacccaggacggcaccuccuccgccugcauccgccgcuccaagaacuccuucuucucccgccucaacuggcucacccaccucaacuucaaguaccccgcccucaacgucaccaugcccaacaacgagcaguucgacaagcucuacaucuggggcguccaccaccccggcaccgacaaggaccagaucuuccucuacgcccaggccuccggccgcaucaccgucuccaccaagcgcucccagcagaccgccauccccaacaucggcucccgcccccgcguccgcaacauccccucccgcaucuccaucuacuggaccaucgucaagcccggcgacauccuccucaucaacuccaccggcaaccucaucgccccccgcggcuacuucaagauccgcuccggcaaguccuccaucaugcgcuccgacgcccccaucggcaagugcaacuccgagugcaucacccccaacggcuccauccccaacgacaagcccuuccagaacgucaaccgcaucaccuacggcgccugcccccgcuacgucaagcagaacacccucaagcucgccaccggcaugcgcaacguccccgagaagcagacccgcggcaucuucggcgccaucgccggcuucaucgagaacggcugggagggcauggucgacggcugguacggcuuccgccaccagaacuccgagggccgcggccaggccgccgaccucaaguccacccaggccgccaucgaccagaucaacggcaagcucaaccgccucaucggcaagaccaacgagaaguuccaccagaucgagaaggaguucuccgaggucgagggccgcauccaggaccucgagaaguacgucgaggacaccaagaucgaccucugguccuacaacgccgagcuccucgucgcccucgagaaccagcacaccaucgaccucaccgacuccgagaugaacaagcucuucgagaagaccaagaagcagcuccgcgagaacgccgaggacaugggcaacggcugcuucaagaucuaccacaagugcgacaacgccugcaucggcuccauccgcaacggcaccuacgaccacgacgucuaccgcgacgaggcccucaacaaccgcuuccagaucaagggcgucgagcucaaguccggcuacaaggacuggauccucuggaucuccuucgccaucuccugcuuccuccucugcgucgcccuccucggcuucaucaugugggccugccagaagggcaacauccgcugcaacaucugcaucuga

SEQ ID NO: 99625 - RNA, 1698 nt, Artificial Sequence; identical to SEQ ID NO: 99167
  derived and/or modified CDS sequence (opt2) from hemagglutinin__InfluenzaA__ACZ05194

SEQ ID NO: 99626 - RNA, 1701 nt, Artificial Sequence; identical to SEQ ID NO: 99624
  derived and/or modified CDS sequence (opt2) from hemagglutinin__InfluenzaA__ACZ05205

SEQ ID NO: 99627 - RNA, 1701 nt, Artificial Sequence
  derived and/or modified CDS sequence (opt2) from hemagglutinin__InfluenzaA__ACZ05216
augaagaccaucaucgcccucuccuacauccucugccucgucuucgcccagaagauccccggcaacgacaacaacaccgccacccucugccucggccaccacgccguccccaacggcaccaucgucaagaccaucaccaacgaccagaucgaggucaccaacgccaccgagcucguccaguccuccuccaccggcgagaucugcgacuccccccaccagauccucgacggcgagaacugcacccucaucgacgcccuccucggcgacccccagugcgacggcuuccagaacaagaagugggaccucuucgucgagcgcuccaaggccuacuccaacugcuaccccuacgacguccccgacuacgccucccuccgcucccucgucgccuccuccggcacccucgaguucaacaacgaguccuucaacuggaccggcgucacccagaacggcaccuccuccgccugcauccgccgcuccaacaacuccuucuucucccgccucaacuggcucacccaccucaaguucaaguaccccgcccucaacgucaccaugcccaacaacgagcaguucgacaagcucuacaucuggggcguccaccaccccggcaccgacaacgaccagaucuuccucuacgcccaggccuccggccgcaucaccgucuccaccaagcgcucccagcagaccgucauccccaacaucggcucccgcccccgcguccgcaacauccccucccgcaucuccaucuacuggaccaucgucaagcccggcgacauccuccucaucaacuccaccggcaaccucaucgccccccgcggcuacuucaagauccgcuccggcaaguccuccaucaugcgcuccgacgcccccaucggcaagugcaacuccgagugcaucacccccaacggcuccauccccaacgacaagcccuuccagaacgucaaccgcaucaccuacggcgccugcccccgcuacgucaagcagaacacccucaagcucgccaccggcaugcgcaacguccccgagaagcagacccgcggcaucuucggcgccaucgccggcuucaucgagaacggcugggagggcauggucgacggcugguacggcuuccgccaccagaacuccgagggccgcggccaggccgccgaccucaaguccacccaggccgccaucgaccagaucaacggcaagcucaaccgccucaucggcaagaccaacgagaaguuccaccagaucgagaaggaguucuccgaggucgagggccgcauccaggaccucgagaaguacgucgaggacaccaagaucgaccucugguccuacaacgccgagcuccucgucgcccucgagaaccagcacaccaucgaccucaccgacuccgagaugaacaagcucuucgagaagaccaagaagcagcuccgcgagaacgccgaggacaugggcaacggcugcuucaagaucuaccacaagugcgacaacgccugcaucggcuccauccgcaacggcaccuacgaccacgacgucuaccgcgacgaggcccucaacaaccgcuuccagaucaagggcgucgagcucaaguccggcuacaaggacuggauccucuggaucuccuucgccaucuccugcuuccuccucugcgucgcccuccucggcuucaucaugugggccugccagaagggcaacauccgcugcaacaucugcaucuga

SEQ ID NO: 99628 - RNA, 1701 nt, Artificial Sequence; identical to SEQ ID NO: 99624
  derived and/or modified CDS sequence (opt2) from hemagglutinin__InfluenzaA__ACZ05227

SEQ ID NO: 99629 - RNA, 1701 nt, Artificial Sequence
  derived and/or modified CDS sequence (opt2) from hemagglutinin__InfluenzaA__ACZ05238
augaagaccaucaucgcccucuccuacauccucugccucgucuucgcccagaagcuccccggcaacgacaacuccaccgccacccucugccucggccaccacgccguccccaacggcaccaucgucaagaccaucaccaacgaccagaucgaggucaccaacgccaccgagcucguccaguccuccuccaccggcgagaucugcgacuccccccaccagauccucgacggcaagaacugcacccucaucgacgcccuccucggcgacccccagugcgacggcuuccagaacaagaagugggaccucuucgucgagcgcuccaaggccuacuccaacugcuaccccuacgacguccccgacuacgccucccuccgcucccucgucgccuccuccggcacccucgaguucaacaacgaguccuucaacugggccggcgucacccagaacggcaccuccuccgccugcauccgccgcuccaagaacuccuucuucucccgccucaacuggcucacccaccucaacuucaaguaccccgcccucaacgucaccaugcccaacaacgagcaguucgacaagcucuacaucuggggcguccaccaccccggcaccgacaaggaccagaucuuccucuacgcccaggccuccggccgcaucaccgucuccaccaagcgcucccagcagaccgccauccccaacaucggcucccgcccccgcguccgcaacauccccucccgcaucuccaucuacuggaccaucgucaagcccggcgacauccuccucaucaacuccaccggcaaccucaucgccccccgcggcuacuucaagauccgcuccggcaaguccuccaucaugcgcuccgacgcccccaucggcaagugcaacuccgagugcaucacccccaacggcuccauccccaacgacaagcccuuccagaacgucaaccgcaucaccuacggcgccugcccccgcuacgucaagcagaacacccucaagcucgccaccggcaugcgcaacguccccgagaagcagacccgcggcaucuucggcgccaucgccggcuucaucgagaacggcugggagggcauggucgacggcugguacggcuuccgccaccagaacuccgagggccgcggccaggccgccgaccucaaguccacccaggccgccaucgaccagaucaacggcaagcucaaccgccucaucggcaagaccaacgagaaguuccaccagaucgagaaggaguucuccgaggucgagggccgcauccaggaccucgagaaguacgucgaggacaccaagaucgaccucugguccuacaacgccgagcuccucgucgcccucgagaaccagcacaccaucgaccucaccgacuccgagaugaacaagcucuucgagaagaccaagaagcagcuccgcgagaacgccgaggacaugggcaacggcugcuucaagaucuaccacaagugcgacaacgccugcaucggcuccauccgcaacggcaccuacgaccacgacgucuaccgcgacgaggcccucaacaaccgcuuccagaucaagggcgucgagcucaaguccggcuacaaggacuggauccucuggaucuccuucgccaucuccugcuuccuccucugcgucgcccuccucggcuucaucaugugggccugccagaagggcaacauccgcugcaacaucugcaucuga

SEQ ID NO: 99630 - RNA, 1701 nt, Artificial Sequence; identical to SEQ ID NO: 99624
  derived and/or modified CDS sequence (opt2) from hemagglutinin__InfluenzaA__ACZ05249

SEQ ID NO: 99631 - RNA, 1701 nt, Artificial Sequence; identical to SEQ ID NO: 99624
  derived and/or modified CDS sequence (opt2) from hemagglutinin__InfluenzaA__ACZ05260

SEQ ID NO: 99632 - RNA, 1701 nt, Artificial Sequence
  derived and/or modified CDS sequence (opt2) from hemagglutinin__InfluenzaA__ACZ05271
augaagaccaucaucgcccucuccuacauccucugccucgucuucgcccagaagcuccccggcaacgacaacuccaccgccacccucugccucggccaccacgccguccccaacggcaccaucgucaagaccaucaccaacgaccagaucgaggucaccaacgccaccgagcucguccaguccuccuccaccggcgagaucugcgacuccccccaccagauccucgacggcgagaacugcacccucaucgacgcccuccucggcgacccccagugcgacggcuuccagaacaagaagugggaccucuucgucgagcgcuccaaggccuacuccaacugcuaccccuacgacguccccgacuacgccucccuccgcucccucgucgccuccuccggcacccucgaguucaacaacgaguccuucaacuggaccggcgucacccagaacggcaccuccuccgccugcauccgccgcuccaacaacuccuucuucucccgccucaacuggcucacccaccucaaguucaaguaccccgcccucaacgucaccaugcccaacaacgagcaguucgacaagcucuacaucuggggcguccaccaccccggcaccgacaacgaccagaucuuccucuacgcccaggccuccggccgcaucaccgucuccaccaagcgcucccagcagaccgucauccccaacaucggcucccgcccccgcguccgcaacauccccucccgcaucuccaucuacuggaccaucgucaagcccggcgacauccuccucaucaacuccaccggcaaccucaucgccccccgcggcuacuucaagauccgcuccggcaaguccuccaucaugcgcuccgacgcccccaucggcaagugcaacuccgagugcaucacccccaacggcuccauccccaacgacaagcccuuccagaacgucaaccgcaucaccuacggcgccugcccccgcuacgucaagcagaacacccucaagcucgccaccggcaugcgcaacguccccgagcgccagacccgcggcaucuucggcgccaucgccggcuucaucgagaacggcugggagggcauggucgacggcugguacggcuuccgccaccagaacuccgagggccgcggccaggccgccgaccucaaguccacccaggccgccaucgaccagaucaacggcaagcucaaccgccucaucggcaagaccaacgagaaguuccaccagaucgagaaggaguucuccgaggucgagggccgcauccaggaccucgagaaguacgucgaggacaccaagaucgaccucugguccuacaacgccgagcuccucgucgcccucgagaaccagcacaccaucgaccucaccgacuccgagaugaacaagcucuucgagaagaccaagaagcagcuccgcgagaacgccgaggacaugggcaacggcugcuucaagaucuaccacaagugcgacaacgccugcaucggcuccauccgcaacggcaccuacgaccacgacgucuaccgcgacgaggcccucaacaaccgcuuccagaucaagggcgucgagcucaaguccggcuacaaggacuggauccucuggaucuccuucgccaucuccugcuuccuccucugcgucgcccuccucggcuucaucaugugggccugccagaagggcaacauccgcugcaacaucugcaucuga

SEQ ID NO: 99633 - RNA, 1701 nt, Artificial Sequence
  derived and/or modified CDS sequence (opt2) from hemagglutinin__InfluenzaA__ACZ05282
augaagaccaccaucgcccucuccuacauccucugccucgucuucgcccagaagcuccccggcaacgacaacuccaccgccacccucugccucggccaccacgccguccccaacggcaccaucgucaagaccaucaccaacgaccagaucgaggucaccaacgccaccgagcucguccaguccuccuccaccggcgagaucugcgacuccccccaccagauccucgacggcgagaacugcacccucaucgacgcccuccucggcgacccccagugcgacggcuuccagaacaagaagugggaccucuucgucgagcgcuccaaggccuacuccaacugcuaccccuacgacguccccgacuacgccucccuccgcucccucgucgccuccuccggcacccucgaguucaacaacgaguccuucaacuggaccggcgucacccagaacggcaccuccuccgccugcauccgccgcuccaacaacuccuucuucucccgccucaacuggcucacccaccucaaguucaaguaccccgcccucaacgucaccaugcccaacaacgagcaguucgacaagcucuacaucuggggcguccaccaccccggcaccgacaacgaccagaucuuccucuacgcccaggccuccggccgcaucaccgucuccaccaagcgcucccagcagaccgucauccccaacaucggcucccgcccccgcguccgcaacauccccucccgcaucuccaucuacuggaccaucgucaagcccggcgacauccuccucaucaacuccaccggcaaccucaucgccccccgcggcuacuucaagauccaguccggcaaguccuccaucaugcgcuccgacgcccccaucggcaagugcaacuccgagugcaucacccccaacggcuccauccccaacgacaagcccuuccagaacgucaaccgcaucaccuacggcgccugcccccgcuacgucaagcagaacacccucaagcucgccaccggcaugcgcaacguccccgagaagcagacccgcggcaucuucggcgccaucgccggcuucaucgagaacggcugggagggcauggucgacggcugguacggcuuccgccaccagaacuccgagggccgcggccaggccgccgaccucaaguccacccaggccgccaucgaccagaucaacggcaagcucaaccgccucaucggcaagaccaacgagaaguuccaccagaucgagaaggaguucuccgaggucgagggccgcauccaggaccucgagaaguacgucgaggacaccaagaucgaccucugguccuacaacgccgagcuccucgucgcccucgagaaccagcacaccaucgaccucaccgacuccgagaugaacaagcucuucgagaagaccaagaagcagcuccgcgagaacgccgaggacaugggcaacggcugcuucaagaucuaccacaagugcgacaacgccugcaucggcuccauccgcaacggcaccuacgaccacgacgucuaccgcgacgaggcccucaacaaccgcuuccagaucaagggcgucgagcucaaguccggcuacaaggacuggauccucuggaucuccuucgccaucuccugcuuccuccucugcgucgcccuccucggcuucaucaugugggccugccagaagggcaacauccgcugcaacaucugcaucuga

SEQ ID NO: 99634 - RNA, 1701 nt, Artificial Sequence; identical to SEQ ID NO: 99624
  derived and/or modified CDS sequence (opt2) from hemagglutinin__InfluenzaA__ACZ05304

SEQ ID NO: 99635 - RNA, 1701 nt, Artificial Sequence; identical to SEQ ID NO: 99447
  derived and/or modified CDS sequence (opt2) from hemagglutinin__InfluenzaA__ACZ05315

SEQ ID NO: 99636 - RNA, 1701 nt, Artificial Sequence; identical to SEQ ID NO: 99624
  derived and/or modified CDS sequence (opt2) from hemagglutinin__InfluenzaA__ACZ05326

SEQ ID NO: 99637 - RNA, 1701 nt, Artificial Sequence
  derived and/or modified CDS sequence (opt2) from hemagglutinin__InfluenzaA__ACZ05337
augaagaccaucaucgcccucuccuacauccucugccucgucuucacccagaagcuccccggcaacgacaacuccaccgccacccucugccucggccaccacgccguccccaacggcaccaucgucaagaccaucaccaacgaccagaucgaggucaccaacgccaccgagcucguccaguccuccuccaccggcgagaucugcgacuccccccaccagauccucgacggcaagaacugcacccucaucgacgcccuccucggcgacccccagugcgacggcuuccagaacaagaagugggaccucuucgucgagcgcuccaaggccuacuccaacugcuaccccuacgacguccccgacuacgccucccuccgcucccucgucgccuccuccggcacccucgaguucaacaacgagcgcuucaacuggaccggcgucacccagaacggcaccuccuccgccugcauccgccgcuccaagaacuccuucuucucccgccucaacuggcucacccaccucaacuucaaguaccccgcccucaacgucaccaugcccaacaacgagcaguucgacaagcucuacaucuggggcguccaccaccccggcaccgacaaggaccagaucuuccucuacgcccaggccuccggccgcaucaccgucuccaccaagcgcucccagcagaccgucauccccaacaucggcucccgcccccgcguccgcaacauccccucccgcaucuccaucuacuggaccaucgucaagcccggcgacauccuccucaucuccuccaccggcaaccucaucgccccccgcggcuacuucaagauccgcuccggcaaguccuccaucaugcgcuccgacgcccccaucggcaagugcaacuccgagugcaucacccccaacggcuccauccccaacgacaagcccuuccagaacgucaaccgcaucaccuacggcgccugcccccgcuacgucaagcagaacacccucaagcucgccaccggcaugcgcaacguccccgagaagcagacccgcggcaucuucggcgccaucgccggcuucaucgagaacggcugggagggcauggucgacggcugguacggcuuccgccaccagaacuccgagggccgcggccaggccgccgaccucaaguccacccaggccgccaucgaccagaucaacggcaagcucaaccgccucaucggcaagaccaacgagaaguuccaccagaucgagaaggaguucuccgaggucgagggccgcauccaggaccucgagaaguacgucgaggacaccaagaucgaccucugguccuacaacgccgagcuccucgucgcccucgagaaccagcacaccaucgaccucaccgacuccgagaugaacaagcucuucgagaagaccaagaagcagcuccgcgagaacgccgaggacaugggcaacggcugcuucaagaucuaccacaagugcgacaacgccugcaucggcuccauccgcaacggcaccuacgaccacgacgucuaccgcgacgaggcccucaacaaccgcuuccagaucaagggcgucgagcucaaguccggcuucaaggacuggauccucuggaucuccuucgccaucuccugcuuccuccucugcgucgcccuccucggcuucaucaugugggccugccagaagggcaacauccgcugcaacaucugcaucuga

SEQ ID NO: 99638 - RNA, 1701 nt, Artificial Sequence; identical to SEQ ID NO: 99624
  derived and/or modified CDS sequence (opt2) from hemagglutinin__InfluenzaA__ACZ05348

SEQ ID NO: 99639 - RNA, 1701 nt, Artificial Sequence; identical to SEQ ID NO: 99629
  derived and/or modified CDS sequence (opt2) from hemagglutinin__InfluenzaA__ACZ05359

SEQ ID NO: 99640 - RNA, 1701 nt, Artificial Sequence; identical to SEQ ID NO: 99624
  derived and/or modified CDS sequence (opt2) from hemagglutinin__InfluenzaA__ACZ05370

SEQ ID NO: 99641 - RNA, 1701 nt, Artificial Sequence
  derived and/or modified CDS sequence (opt2) from hemagglutinin__InfluenzaA__ACZ05392
augaagaccaucaucgcccucuccuacauccucugccucgucuucgcccagaagcuccccggcaacgacaacuccaccgccacccucugccucggccaccacgccguccccaacggcaccaucgucaagaccaucaccaacgaccagaucgaggucaccaacgccaccgagcucguccaguccuccuccaccggcgagaucugcgacuccccccaccagauccucgacggcaagaacugcacccucaucgacgcccuccucggcgacccccagugcgacggcuuccagaacaagaagugggaccucuucgucgagcgcuccaaggccuacuccaacugcuaccccuacgacguccccgacuacgccucccuccgcucccucgucgccuccuccggcacccucgaguucaacaacgaguccuucaacuggaccggcgucacccagaacggcgccuccuccgccugcauccgccgcuccaagaacuccuucuucucccgccucaacuggcucacccaccucaacuucaaguaccccgcccucaacgucaccaugcccaacaacgagcaguucgacaagcucuacaucuggggcguccaccaccccggcaccgacaaggaccagaucuuccucuacgcccaggccuccggccgcaucaccgucuccaccaagcgcucccagcagaccgccauccccaacaucggcucccgcccccgcguccgcaacauccccucccgcaucuccaucuacuggaccaucgucaagcccggcgacauccuccucaucaacuccaccggcaaccucaucgccccccgcggcuacuucaagauccgcuccggcaaguccuccaucaugcgcuccgacgcccccaucggcaagugcaacuccgagugcaucacccccaacggcuccauccccaacgacaagcccuuccagaacgucaaccgcaucaccuacggcgccugcccccgcuacgucaagcagaacacccucaagcucgccaccggcaugcgcaacguccccgagaagcagacccgcggcaucuucggcgccaucgccggcuucaucgagaacggcugggagggcauggucgacggcugguacggcuuccgccaccagaacuccgagggccgcggccaggccgccgaccucaaguccacccaggccgccaucgaccagaucaacggcaagcucaaccgccucaucggcaagaccaacgagaaguuccaccagaucgagaaggaguucuccgaggucgagggccgcauccaggaccucgagaaguacgucgaggacaccaagaucgaccucugguccuacaacgccgagcuccucgucgcccucgagaaccagcacaccaucgaccucaccgacuccgagaugaacaagcucuucgagaagaccaagaagcagcuccgcgagaacgccgaggacaugggcaacggcugcuucaagaucuaccacaagugcgacaacgccugcaucggcuccauccgcaacggcaccuacgaccacgacgucuaccgcgacgaggcccucaacaaccgcuuccagaucaagggcgucgagcucaaguccggcuacaaggacuggauccucuggaucuccuucgccaucuccugcuuccuccucugcgucgcccuccucggcuucaucaugugggccugccagaagggcaacauccgcugcaacaucugcaucuga

SEQ ID NO: 99642 - RNA, 1701 nt, Artificial Sequence; identical to SEQ ID NO: 99624
  derived and/or modified CDS sequence (opt2) from hemagglutinin__InfluenzaA__ACZ05403

SEQ ID NO: 99643 - RNA, 1701 nt, Artificial Sequence
  derived and/or modified CDS sequence (opt2) from hemagglutinin__InfluenzaA__ACZ05436
augaagaccaucaucgcccucuccuacauccucugccucgucuucgcccagaagcuccccggcaacgacaacuccaccgccacccucugccucggccaccacgccguccccaacggcaccaucgucaagaccaucaccaacgaccagaucgaggucaccaacgccaccgagcucguccaguccuccuccaccggcgagaucugcgacuccccccaccagauccucgacggcaaguccugcacccucaucgacgcccuccucggcgacccccagugcgacggcuuccagaacaagaagugggaccucuucgucgagcgcuccaaggccuacuccaacugcuaccccuacgacguccccgacuacgccucccuccgcucccucgucgccuccuccggcacccucgaguucaacaacgaguccuucaacuggaccggcgucacccagaacggcaccuccuccgccugcauccgccgcuccaagaacuccuucuucucccgccucaacuggcucacccaccucaacuucaaguaccccgcccucaacgucaccaugcccaacaacgagcaguucgacaagcucuacaucuggggcguccaccaccccggcaccgacaaggaccagaucuuccucuacgcccaggccuccggccgcaucaccgucuccaccaagcgcucccagcagaccgccauccccaacaucggcucccgcccccgcguccgcaacauccccucccgcaucuccaucuacuggaccaucgucaagcccggcgacauccuccucaucaacuccaccggcaaccucaucgccccccgcggcuacuucaagauccgcuccggcaaguccuccaucaugcgcuccgacgcccccaucggcaagugcaacuccgagugcaucacccccaacggcuccauccccaacgacaagcccuuccagaacgucaaccgcaucaccuacggcgccugcccccgcuacgucaagcagaacacccucaagcucgccaccggcaugcgcaacguccccgagaagcagacccgcggcaucuucggcgccaucgccggcuucaucgagaacggcugggagggcauggucgacggcugguacggcuuccgccaccagaacuccgagggccgcggccaggccgccgaccucaaguccacccaggccgccaucgaccagaucaacggcaagcucaaccgccucaucggcaagaccaacgagaaguuccaccagaucgagaaggaguucuccgaggucgagggccgcauccaggaccucgagaaguacgucgaggacaccaagaucgaccucugguccuacaacgccgagcuccucgucgcccucgagaaccagcacaccaucgaccucaccgacuccgagaugaacaagcucuucgagaagaccaagaagcagcuccgcgagaacgccgaggacaugggcaacggcugcuucaagaucuaccacaagugcgacaacgccugcaucggcuccauccgcaacggcaccuacgaccacgacgucuaccgcgacgaggcccucaacaaccgcuuccagaucaagggcgucgagcucaaguccggcuacaaggacuggauccucuggaucuccuucgccaucuccugcuuccuccucugcgucgcccuccucggcuucaucaugugggccugccagaagggcaacauccgcugcaacaucugcaucuga

SEQ ID NO: 99644 - RNA, 1701 nt, Artificial Sequence; identical to SEQ ID NO: 99624
  derived and/or modified CDS sequence (opt2) from hemagglutinin__InfluenzaA__ACZ05458

SEQ ID NO: 99645 - RNA, 1701 nt, Artificial Sequence; identical to SEQ ID NO: 99624
  derived and/or modified CDS sequence (opt2) from hemagglutinin__InfluenzaA__ACZ05469

SEQ ID NO: 99646 - RNA, 1701 nt, Artificial Sequence; identical to SEQ ID NO: 99643
  derived and/or modified CDS sequence (opt2) from hemagglutinin__InfluenzaA__ACZ05480

SEQ ID NO: 99647 - RNA, 1701 nt, Artificial Sequence; identical to SEQ ID NO: 99447
  derived and/or modified CDS sequence (opt2) from hemagglutinin__InfluenzaA__ACZ05513

SEQ ID NO: 99648 - RNA, 1701 nt, Artificial Sequence; identical to SEQ ID NO: 99624
  derived and/or modified CDS sequence (opt2) from hemagglutinin__InfluenzaA__ACZ05524

SEQ ID NO: 99649 - RNA, 1701 nt, Artificial Sequence
  derived and/or modified CDS sequence (opt2) from hemagglutinin__InfluenzaA__ACZ05535
augaagaccaucaucgcccucuccuacauccucugccucgucuucgcccagaagcuccccggcaacgacaacuccaccgccacccucugccucggccaccacgccguccccaacggcaccaucgucaagaccaucaccaacgaccagaucgaggucaccaacgccaccgagcucguccaguccuccuccaccggcgagaucugcgacuccccccaccagauccucgacggcaagaacugcacccucaucgacgcccuccucggcgacccccagugcgacggcuuccagaacaagaagugggaccucuucgucgagcgcuccaaggccuacuccaacugcuaccccuacgacguccccgacuacgccucccuccgcucccucgucgccuccuccggcacccucgaguucaacaacgaguccuucaacuggaccggcgucacccagaacggcaccuccuccgccugcauccgccgcuccaagaacuccuucuucucccgccucaacuggcucacccaccucaacuucaaguaccccgcccucaacgucaccaugcccaacaacgagcaguucgacaagcucuacaucuggggcguccaccaccccggcaccgacaaggaccagaucuuccucuacgcccaggccuccggccgcaucaccgucuccaccaagcgcucccagcagaccgccauccccaacaucggcucccgcccccgcguccgcaacauccccucccgcaucuccaucuacuggaccaucgucaagcccggcgacauccuccucaucaacuccaccggcaaccucaucgccccccgcggcuacuucaagauccgcuccggcaaguccuccaucaugcgcuccgacgcccccaucggcaagugcaacuccgagugcaucacccccaacggcuccauccccaacgacaagcccuuccagaacgucaaccgcaucaccuacggcgccugcccccgcuacgucaagcagaacacccucaagcucgccaccggcaugcgcaacguccccgagaagcagacccgcggcaucuucggcgccaucgccggcuucaucgagaacggcugggagggcauggucgacggcugguacggcuuccgccaccagaacuccgagggccgcggccaggccgccgaccucaaguccacccaggccgccaucgaccagaucaacggcaagcucaaccgccucaucggcaagaccaacgagaaguuccaccagaucgagaaggaguucuccgaggucgagggccgcauccaggaccucgagaaguacgucgaggacaccaagaucgaccucugguccuacaacgccgagcuccucgucgcccucgagaaccagcacaccaucgaccucaccgacuccgagaugaacaagcucuucgagaagaccaagaagcagcuccgcgagaacgccgaggacaugggcaacggcugcuucaagaucuaccacaagugcgacaacgccugcaucggcuccauccgcaacggcaccuacgaccacgacgucuaccgcgacgaggcccucaacaaccgcuuccagaucaagggcgucgagcucaaguccggcuacaaggacuggauccucuggaucuccuucgccaucuccugcuuccuccucugcgucgcccuccucggcuucaucaugugggccugccagaagggcaacauccgcugcaacaucugcaucuga

SEQ ID NO: 99650 - RNA, 1701 nt, Artificial Sequence; identical to SEQ ID NO: 99649
  derived and/or modified CDS sequence (opt2) from hemagglutinin__InfluenzaA__ACZ05546

SEQ ID NO: 99651 - RNA, 1701 nt, Artificial Sequence; identical to SEQ ID NO: 99624
  derived and/or modified CDS sequence (opt2) from hemagglutinin__InfluenzaA__ACZ05557

SEQ ID NO: 99652 - RNA, 1698 nt, Artificial Sequence
  derived and/or modified CDS sequence (opt2) from hemagglutinin__InfluenzaA__ACZ05579
augaaggucaagcuccucguccuccucugcaccuucaccgccaccuacgccgacaccaucugcaucggcuaccacgccaacaacuccaccgacaccgucgacaccguccucgagaagaacgucaccgucacccacuccgucaaccuccucgagaacucccacaacggcaagcucugccuccucaagggcaucgccccccuccagcucggcaacugcuccgucgccggcuggauccucggcaaccccgagugcgagcuccucaucuccaaggaguccugguccuacaucgucgagaagcccaaccccgagaacggcaccugcuaccccggccacuucgccgacuacgaggagcuccgcgagcagcucuccuccgucuccuccuucgagcgcuucgagaucuuccccaaggaguccuccuggcccaaccacaccgucaccggcgucuccgccuccugcucccacaacggcgaguccuccuucuaccgcaaccuccucuggcucaccgucaagaacggccucuaccccaaccucuccaaguccuacgccaacaacaaggagaaggagguccucguccucuggggcguccaccacccccccaacaucgucgaccagaagacccucuaccgcaccgagaacgccuacgucuccgucgucuccucccacuacucccgcaaguucacccccgagaucgccaagcgccccaagguccgcgaccaggagggccgcaucaacuacuacuggacccuccucgagcccggcgacaccaucaucuucgaggccaacggcaaccucaucgccccccgcuacgccuucgcccucucccgcggcuucggcuccggcaucaucaacuccaacgcccccauggacaagugcgacgccaagugccagaccccccgcggcgccaucaacuccucccuccccuuccagaacguccaccccgucaccaucggcgagugccccaaguacguccgcuccgccaagcuccgcauggucaccggccuccgcaacauccccuccauccagucccgcggccucuucggcgccaucgccggcuucaucgagggcggcuggaccggcauggucgacggcugguacggcuaccaccaccagaacgagcagggcuccggcuacgccgccgaccagaaguccacccagaacgccaucaacggcaucaccaacaaggucaacuccgucaucgagaagaugaacacccaguucaccgccgucggcaaggaguucaacaagcucgagcgccgcauggagaaccucaacaagaaggucgacgacggcuucaucgacaucuggaccuacaacgccgagcuccucguccuccucgagaacgagcgcacccucgacuuccacgacuccaacgucaagaaccucuacgagaaggucaagucccagcucaagaacaacgccaaggagaucggcaacggcugcuucgaguucuaccacaagugcaacgacgagugcauggaguccgucaagaacggcaccuacgacuaccccaaguacuccgaggaguccaagcucaaccgcgagaagaucgacggcgucaagcucgaguccaugggcgucuaccagauccucgccaucuacuccaccgucgccuccucccucguccuccucgucucccucggcgccaucuccuucuggaugugcuccaacggcucccuccagugccgcaucugcaucuga

SEQ ID NO: 99653 - RNA, 1698 nt, Artificial Sequence
  derived and/or modified CDS sequence (opt2) from hemagglutinin__InfluenzaA__ACZ05590
augaaggucaagcuccucguccuccucugcaccuucaccgccaccuacgccgacaccaucugcaucggcuaccacgccaacaacuccaccgacaccgucgacaccguccucgagaagaacgucaccgucacccacuccgucaaccuccucgagaacucccacaacggcaagcucugccuccucaagggcaucgccccccuccagcucggcaacugcuccgucgccggcuggauccucggcaaccccgagugcgagcuccucaucuccaaggaguccugguccuacaucgucgagaagcccaaccccgagaacggcaccugcuaccccggccacuucgccgacuacgaggagcuccgcgagcagcucuccuccgucuccuccuucgagcgcuucgagaucuuccccaaggaguccuccuggcccaaccacaccgucaccggcgucuccgccuccugcucccacaacggcgaguccuccuucuaccgcaaccuccucuggcucaccggcaagaacggccucuaccccaaccucuccaaguccuacgccaacaacaaggagaaggagguccucguccucuggggcguccaccacccccccuccaucuccgaccagaagacccucuaccacaccgaggacgccuacgucuccgucgucuccucccacuacucccgcaaguucacccccgagaucgccaagcgccccaagguccgcgaccaggagggccgcaucaacuacuacuggacccuccucgagcccggcgacaccaucaucuucgaggccaacggcaaccucaucgccccccgcuacgccuucgcccucucccgcggcuucggcuccggcaucaucaacuccaacgcccccaugggcaagugcgacgccaagugccagaccccccagggcgccaucaacuccucccuccccuuccagaacguccaccccgucaccaucggcgagugccccaaguacguccgcuccgccaagcuccgcauggucaccggccuccgcaacauccccuccauccagucccgcggccucuucggcgccaucgccggcuucaucgagggcggcuggaccggcauggucgacggcugguacggcuaccaccaccagaacgagcagggcuccggcuacgccgccgaccagaaguccacccagaacgccaucaacggcaucaccaacaaggucaacuccgucaucgagaagaugaacacccaguucaccgccgucggcaaggaguucaacaagcucgagcgccgcauggagaaccucaacaagaaggucgacgacggcuucaucgacaucuggaccuacaacgccgagcuccucguccuccucgagaacgagcgcacccucgacuuccacgacuccaacgucaagaaccucuacgagaaggucaagucccagcucaagaacaacgccaaggagaucggcaacggcugcuucgaguucuaccacaagugcaacgacgagugcauggaguccgucaagaacggcaccuacgacuaccccaaguacuccgaggaguccaagcucaaccgcgagaagaucgacggcgucaagcucgaguccaugggcgucuaccagauccucgccaucuacuccaccgucgccuccucccucguccuccucgucucccucggcgccaucuccuucuggaugugcuccaacggcucccuccagugccgcaucugcaucuga

SEQ ID NO: 99654 - RNA, 1701 nt, Artificial Sequence; identical to SEQ ID NO: 99649
  derived and/or modified CDS sequence (opt2) from hemagglutinin__InfluenzaA__ACZ05950

SEQ ID NO: 99655 - RNA, 1701 nt, Artificial Sequence; identical to SEQ ID NO: 99624
  derived and/or modified CDS sequence (opt2) from hemagglutinin__InfluenzaA__ACZ05961

SEQ ID NO: 99656 - RNA, 1701 nt, Artificial Sequence
  derived and/or modified CDS sequence (opt2) from hemagglutinin__InfluenzaA__ACZ05972
augaagaccaucaucgcccucuccuacauccucugccucgucuucgcccagaagcuccccggcaacgacaacuccaccgccacccucugccucggccaccacgccguccccaacggcaccaucgucaagaccaucaccaacgaccagaucgaggucaccaacgccaccgagcucguccaguccuccuccaccggcgagaucugcgacuccccccaccagauccucgacggcaagaacugcacccucaucgacgcccuccucggcgacccccagugcgacggcuuccagaacaagaagugggaccucuucgucgagcgcuccaaggccuacuccaacugcuaccccuacgacguccccgacuacgccucccuccgcucccucgucgccuccuccggcacccucgaguucaacaacgaguccuucaacuggaccggcgucacccagaacggcaccuccuccgccugcauccgccgcuccaagaacuccuucuucucccgccucaacuggcucacccaccucaacuucaaguaccccgcccucaacgucaccaugcccaacaacgagcaguucgacaagcucuacaucuggggcguccaccaccccggcaccgacaaggaccagaucuuccucuacgcccaggccuccggccgcaucaccgucuccaccaagcgcucccagcagaccgccauccccaacaucggcucccgcccccgcguccgcaacauccccucccgcaucuccaucuacuggaccaucgucaagcccggcgacauccuccucaucaacuccaccggcaaccucaucgccccccgcggcuacuucaagauccgcuccggcaaguccuccaucaugcgcuccgacgcccccaucggcaagugcaacuccgagugcaucacccccaacggcuccauccccaacgacaagcccuuccagaacgucaaccgcaucaccuacggcgccugcccccgcuacgucaagcagaacacccucaagcucgccaccggcaugcgcaacguccccgagaagcagacccgcggcaucuucggcgccaucgccggcuucaucgagaacggcugggagggcauggucgacggcugguacggcuuccgccaccagaacuccgagggccgcggccaggccgccgaccucaaguccacccaggccgccaucgaccagaucaacggcaagcucaaccgccucaucggcaagaccaacgagaaguuccaccagaucgagaaggaguucuccgaggucgagggccgcauccaggaccucgagaaguacgucgaggacaccaagaucgaccucugguccuacaacgccgagcuccucgucgcccucgagaaccagcacaccaucgaccucaccgacuccgagaugaacaagcucuucgagaagaccaagaagcagcuccgcgagaacgccgaggacaugggcaacggcugcuucaagaucuaccacaagugcgacaacgccugcaucggcuccauccgcaacggcaccuacgaccacgacgucuaccgcgacgaggcccucaacaaccgcuuccagaucaagggcgucgagcucaaguccggcuacaaggacuggauccucuggaucuccuucgccaucuccugcucccuccucugcgucgcccuccucggcuucaucaugugggccugccagaagggcaacauccgcugcaacaucugcaucuga

SEQ ID NO: 99657 - RNA, 1701 nt, Artificial Sequence
  derived and/or modified CDS sequence (opt2) from hemagglutinin__InfluenzaA__ACZ05983
augaagaccaucaucgcccucuccuacauccucugccucgucuucgcccagaagcuccccggcaacgacaacuccaccgccacccucugccucggccaccacgccguccccaacggcaccaucgucaagaccaucaccaacgaccagaucgaggucaccaacgccaccgagcucguccaguccuccuccaccggcgagaucugcgacuccccccaccagauccucgacggcaagaacugcacccucaucgacgcccuccucggcgacccccagugcgacggcuuccagaacaagaagugggaccucuucgucgagcgcuccaaggccuacuccaacugcuaccccuacgacguccccgacuacgccucccuccgcucccucgucgccuccuccggcacccucgaguucaacaacgaguccuucaacuggaccggcgucacccagaacggcaccuccuccgccugcauccgccgcuccaagaacuccuucuucucccgccucaacuggcucacccaccucaacuucaaguaccccgcccucaacgucaccaugcccaacaacgagcaguucgacaagcucuacaucuggggcguccaccaccccggcaccgacaaggaccagaucuuccucuacgcccaggccuccggccgcaucaccgucuccaccaagcgcucccagcagaccgccauccccaacaucggcucccgcccccgcguccgcaacauccccucccgcaucuccaucuacuggaccaucgucaagcccggcgacauccuccucaucaacuccaccggcaaccucaucgccccccgcggcuacuucaagauccgcuccggcaaguccuccaucaugcgcuccgacgcccccaucggcaagugcaacuccgagugcaucacccccaacggcuccauccccaacgacaagcccuuccagaacgucaaccgcaacaccuacggcgccugcccccgcuacgucaagcagaacacccucaagcucgccaccggcaugcgcaacguccccgagaagcagacccgcggcaucuucggcgccaucgccggcuucaucgagaacggcugggagggcauggucgacggcugguacggcuuccgccaccagaacuccgagggccgcggccaggccgccgaccucaaguccacccaggccgccaucgaccagaucaacggcaagcucaaccgccucaucggcaagaccaacgagaaguuccaccagaucgagaaggaguucuccgaggucgagggccgcauccaggaccucgagaaguacgucgaggacaccaagaucgaccucugguccuacaacgccgagcuccucgucgcccucgagaaccagcacaccaucgaccucaccgacuccgagaugaacaagcucuucgagaagaccaagaagcagcuccgcgagaacgccgaggacaugggcaacggcugcuucaagaucuaccacaagugcgacaacgccugcaucggcuccauccgcaacggcaccuacgaccacgacgucuaccgcgacgaggcccucaacaaccgcuuccagaucaagggcgucgagcucaaguccggcuacaaggacuggauccucuggaucuccuucgccaucuccugcuuccuccucugcgucgcccuccucggcuucaucaugugggccugccagaagggcaacauccgcugcaacaucugcaucuga

SEQ ID NO: 99658 - RNA, 1701 nt, Artificial Sequence
  derived and/or modified CDS sequence (opt2) from hemagglutinin__InfluenzaA__ACZ05994
augaagaccaucaucgcccucuccuacauccucugccucgucuucgcccagaagcuccccggcaacgacaacuccaccgccacccucugccucggccaccacgccguccccaacggcaccaucgucaagaccaucaccaacgaccagaucgaggucaccaacgccaccgagcucguccaguccuccuccaccggcgagaucugcgacuccccccaccagauccucgacggcaagaacugcacccucaucgacgcccuccucggcgacccccagugcgacggcuuccagaacaagaagugggaccucuucgucgagcgcuccaaggccuacuccaacugcuaccccuacgacguccccgacuacgccucccuccgcucccucgucgccuccuccggcacccucgaguucaacaacgaguccuucaacuggaccggcgucacccagaacggcaccuccuccgccugcauccgccgcuccaagaacuccuucuucucccgccucaacuggcucacccaccucaacuucaaguaccccgcccucaacgucaccguccccaacaacgagcaguucgacaagcucuacaucuggggcguccaccaccccggcaccgacaaggaccagaucuuccucuacgcccaggccuccggccgcaucaccgucuccaccaagcgcucccagcagaccgccauccccaacaucggcucccgcccccgcguccgcaacauccccucccgcaucuccaucuacuggaccaucgucaagcccggcgacauccuccucaucaacuccaccggcaaccucaucgccccccgcggcuacuucaagauccgcuccggcaaguccuccaucaugcgcuccgacgcccccaucggcaagugcaacuccgagugcaucacccccaacggcuccauccccaacgacaagcccuuccagaacgucaaccgcaucaccuacggcgccugcccccgcuacgucaagcagaacacccucaagcucgccaccggcaugcgcaacguccccgagaagcagacccgcggcaucuucggcgccaucgccggcuucaucgagaacggcugggagggcauggucgacggcugguacggcuuccgccaccagaacuccgagggccgcggccaggccgccgaccucaaguccacccaggccgccaucgaccagaucaacggcaagcucaaccgccucaucggcaagaccaacgagaaguuccaccagaucgagaaggaguucuccgaggucgagggccgcauccaggaccucgagaaguacgucgaggacaccaagaucgaccucugguccuacaacgccgagcuccucgucgcccucgagaaccagcacaccaucgaccucaccgacuccgagaugaacaagcucuucgagaagaccaagaagcagcuccgcgagaacgccgaggacaugggcaacggcugcuucaagaucuaccacaagugcgacaacgccugcaucggcuccauccgcaacggcaccuacgaccacgacgucuaccgcgacgaggcccucaacaaccgcuuccagaucaagggcgucgagcucaaguccggcuacaaggacuggauccucuggaucuccuucgccaucuccugcuuccuccucugcgucgcccuccucggcuucaucaugugggccugccagaagggcaacauccgcugcaacaucugcaucuga

SEQ ID NO: 99659 - RNA, 1701 nt, Artificial Sequence; identical to SEQ ID NO: 99624
  derived and/or modified CDS sequence (opt2) from hemagglutinin__InfluenzaA__ACZ06005

SEQ ID NO: 99660 - RNA, 1701 nt, Artificial Sequence; identical to SEQ ID NO: 99624
  derived and/or modified CDS sequence (opt2) from hemagglutinin__InfluenzaA__ACZ06016

SEQ ID NO: 99661 - RNA, 1698 nt, Artificial Sequence
  derived and/or modified CDS sequence (opt2) from hemagglutinin__InfluenzaA__ACZ16013
augaaggucaagcuccucguccuccucugcaccuucaccgccaccuacgccgacaccaucugcaucggcuaccacgccaacaacuccaccgacaccgucgacaccguccucgagaagaacgucaccgucacccacuccgucaaccuccucgagaacucccacaacggcaagcucugccuccucaagggcaucgccccccuccagcucggcaacugcuccgucgccggcuggauccucggcaaccccgagugcgagcuccucaucuccaaggaguccugguccuacaucgucgagaagcccaaccccgagaacggcaccugcuaccccggccacuucgccgacuacgaggagcuccgcgagcagcucuccuccgucuccuccuucgagcgcuucgagaucuuccccaaggaguccuccuggcccaaccacaccgucaccggcgucuccgccuccugcucccacaacggcgagaacuccuucuaccgcaaccuccucuggcucaccggcaagaacggccucuaccccaaccucuccaaguccuacgccaacaacaaggagaaggagguccucguccucuggggcguccaccacccccccaacaucgccgaccagaagacccucuaccacaccgagaaggccuacgucuccgucgucuccucccacuacucccgcaaguucacccccgagaucgccaagcgccccaagguccgcgaccaggagggccgcaucaacuacuacuggacccuccucgagcccggcgacaccaucaucuucgaggccaacggcaaccucaucgccccccgcuacgccuucgcccucucccgcggcuucggcuccggcaucaucaacuccaacgcccccauggacaagugcgacgccaagugccagaccccccagggcgccaucaacuccucccuccccuuccagaacguccaccccgucaccaucggcgagugccccaaguacguccgcuccgccaagcuccgcauggucaccggccuccgcaacauccccuccauccagucccgcggccucuucggcgccaucgccggcuucaucgagggcggcuggaccggcauggucgacggcugguacggcuaccaccaccagaacgagcagggcuccggcuacgccgccgaccagaaguccacccagaacgccaucaacggcaucaccaacaaggucaacuccgucaucgagaagaugaacacccaguucaccgccgucggcaaggaguucaacaagcucgagcgccgcauggagaaccucaacaagaaggucgacgacggcuucaucgacaucuggaccuacaacgccgagcuccucguccuccucgagaacgagcgcacccucgacuuccacgacuccaacgucaagaaccucuacgagaaggucaagucccagcucaagaacaacgccaaggagaucggcaacggcugcuucgaguucuaccacaagugcaacgacgagugcauggaguccgucaagaacggcaccuacgacuaccccaaguacuccgaggaguccaagcucaaccgcgagaagaucgacggcgucaagcucgaguccaugggcgucuaccagauccucgccaucuacuccaccgucgccuccucccucguccuccucgucucccucggcgccaucuccuucuggaugugcuccaacggcucccuccagugccgcaucugcaucuga

SEQ ID NO: 99662 - RNA, 1698 nt, Artificial Sequence
  derived and/or modified CDS sequence (opt2) from hemagglutinin__InfluenzaA__ACZ16023
augaaggucaagcuccucguccuccucugcaccuucaccgccaccuacgccgacaccaucugcaucggcuaccacgccaacaacuccaccgacaccgucgacaccguccucgagaagaacgucaccgucacccacuccgucaaccuccucgagaacucccacaacggcaagcucugccuccucaagggcaucgccccccuccagcucggcaacugcuccgucgccggcuggauccucggcaaccccgagugcgagcuccucaucuccaaggaguccugguccuacaucgucgagaagcccaaccccgagaacggcaccugcuaccccggccacuucgccgacuacgaggagcuccgcgagcagcucuccuccgucuccuccuucgagcgcuucgagaucuuccccaaggaguccuccuggcccaaccacaccgucaccggcgucuccgccuccugcucccacaacggcgagaacuccuucuaccgcaaccuccucuggcucaccggcaagaacggccucuaccccaaccucuccaaguccuacgccaacaacaaggagaaggagguccucguccucuggggcguccaccacccccccaacaucgccgaccagaagacccucuaccacaccgagaacgccuacgucuccgucgucuccucccacuacucccgcaaguucacccccgagaucgccaagcgccccaagguccgcgaccaggagggccgcaucaacuacuacuggacccuccucgagcccggcgacaccaucaucuucgaggccaacggcaaccucaucgccccccgcuacgccuucgcccucucccgcggcuucggcuccggcaucaucaacuccaacgcccccauggacaagugcgacgccaagugccagaccccccagggcgccaucaacuccucccuccccuuccagaacguccaccccgucaccaucggcgagugccccaaguacguccgcuccgccaagcuccgcauggucaccggccuccgcaacauccccuccauccagucccgcggccucuucggcgccaucgccggcuucaucgagggcggcuggaccggcauggucgacggcugguacggcuaccaccaccagaacgagcagggcuccggcuacgccgccgaccagaaguccacccagaacgccaucaacggcaucaccaacaaggucaacuccgucaucgagaagaugaacacccaguucaccgccgucggcaaggaguucaacaagcucgagcgccgcauggagaaccucaacaagaaggucgacgacggcuucaucgacaucuggaccuacaacgccgagcuccucguccuccucgagaacgagcgcacccucgacuuccacgacuccaacgucaagaaccucuacgagaaggucaagucccagcucaagaacaacgccaaggagaucggcaacggcugcuucgaguucuaccacaagugcaacgacgagugcauggaguccgucaagaacggcaccuacgacuaccccaaguacuccgaggaguccaagcucaaccgcgagaagaucgacggcgucaagcucgaguccaugggcgucuaccagauccucgccaucuacuccaccgucgccuccucccucguccuccucgucucccucggcgccaucuccuucuggaugugcuccaacggcucccuccagugccgcaucugcaucuga

SEQ ID NO: 99663 - RNA, 1698 nt, Artificial Sequence
  derived and/or modified CDS sequence (opt2) from hemagglutinin__InfluenzaA__ACZ16033
augaaggucaagcuccucguccuccucugcaccuucaccgccaccuacgccgacaccaucugcaucggcuaccacgccaacaacuccaccgacaccgucgacaccguccucgagaagaacgucaccgucacccacuccgucaaccuccucgagaacucccacaacggcaagcucugccuccucaagggcaucgccccccuccagcucggcaacugcuccgucgccggcuggauccucggcaaccccgagugcgagcuccucaucuccaaggaguccugguccuacaucgucgagaagcccaaccccgagaacggcaccugcuaccccggccacuucgccgacuacgaggagcuccgcgagcagcucuccuccgucuccuccuucgagcgcuucgagaucuuccccaaggaguccuccuggcccaaccacaccgucaccggcgccuccgccuccugcucccacaacggcgagaacuccuucuaccgcaaccuccucuggcucaccggcaagaacggccucuaccccaaccucuccaaguccuacgccaacaacaaggagaaggagguccucguccucuggggcguccaccacccccccaacaucgccgaccagaagacccucuaccacaccgagaacgccuacgucuccgucgucuccucccacuacucccgcaaguucacccccgagaucgccaagcgccccaagguccgcgaccaggagggccgcaucaacuacuacuggacccuccucgagcccggcgacaccaucaucuucgaggccaacggcaaccucaucgccccccgcuacgccuucgcccucucccgcggcuucggcuccggcaucaucaacuccaacgcccccauggacaagugcgacgccaagugccagaccccccagggcgccaucaacuccucccuccccuuccagaacauccaccccgucaccaucggcgagugccccaaguacguccgcuccgccaagcuccgcauggucaccggccuccgcaacauccccuccauccagucccgcggccucuucggcgccaucgccggcuucaucgagggcggcuggaccggcauggucgacggcugguacggcuaccaccaccagaacgagcagggcuccggcuacgccgccgaccagaaguccacccagaacgccaucaacggcaucaccaacaaggucaacuccgucaucgagaagaugaacacccaguucaccgccgucggcaaggaguucaacaagcucgagcgccgcauggagaaccucaacaagaaggucgacgacggcuucaucgacaucuggaccuacaacgccgagcuccucguccuccucgagaacgagcgcacccucgacuuccacgacuccaacgucaagaaccucuacgagaaggucaagucccagcucaagaacaacgccaaggagaucggcaacggcugcuucgaguucuaccacaagugcaacgacgagugcauggaguccgucaagaacggcaccuacgacuaccccaaguacuccgaggaguccaagcucaacaaggagaagaucgacggcgucaagcucgaguccaugggcgucuaccagauccucgccaucuacuccaccgucgccuccucccucguccuccucgucucccucggcgccaucuccuucuggaugugcuccaacggcucccuccagugccgcaucugcaucuga

SEQ ID NO: 99664 - RNA, 1701 nt, Artificial Sequence; identical to SEQ ID NO: 98692
  derived and/or modified CDS sequence (opt2) from hemagglutinin__InfluenzaA__ACZ16040

SEQ ID NO: 99665 - RNA, 1701 nt, Artificial Sequence; identical to SEQ ID NO: 98692
  derived and/or modified CDS sequence (opt2) from hemagglutinin__InfluenzaA__ACZ16050

SEQ ID NO: 99666 - RNA, 1701 nt, Artificial Sequence; identical to SEQ ID NO: 98692
  derived and/or modified CDS sequence (opt2) from hemagglutinin__InfluenzaA__ACZ16060

SEQ ID NO: 99667 - RNA, 1701 nt, Artificial Sequence
  derived and/or modified CDS sequence (opt2) from hemagglutinin__InfluenzaA__ACZ16070
augaaggccauccucgucguccuccucuacaccuucgccaccgccaacgccgacacccucugcaucggcuaccacgccaacaacuccaccgacaccgucgacaccguccucgagaagaacgucaccgucacccacuccgucucccuccucgaggacaagcacaacggcaagcucugcaagcuccgcggcgucgccccccuccaccucggcaagugcaacaucgccggcuggauccucggcaaccccgagugcgagucccucuccaccgccuccuccugguccuacaucgucgagaccuccuccuccgacaacggcaccugcuaccccggcgacuucaucgacuacgaggagcuccgcgagcagcucuccuccgucuccuccuucgagcgcuucgagaucuuccccaagaccuccuccuggcccaaccacgacuccaacaagggcgucaccgccgccugcccccacgccggcgccaaguccuucuacaagaaccucaucuggcucgucaagaagggcaacuccuaccccaagcucuccaaguccuacaucaacgacaagggcaaggagguccucguccucuggggcauccaccaccccuccaccuccgccgaccagcagucccucuaccagaacgccgacgccuacgucuucgucggcuccucccgcuacuccaagaaguucaagcccgagaucgccauccgccccaagguccgcgaccaggagggccgcaugaacuacuacuggacccucgucgagcccggcgacaagaucaccuucgaggccaccggcaaccucgucgucccccgcuacgccuucgccauggagcgcaacgccggcuccggcaucaucaucuccgacacccccguccacgacugcaacaccaccugccagacccccaagggcgccaucaacaccucccuccccuuccagaacauccaccccaucaccaucggcaagugccccaaguacgucaaguccaccaagcuccgccucgccaccggccuccgcaacguccccuccauccagucccgcggccucuucggcgccaucgccggcuucaucgagggcggcuggaccggcauggucgacggcugguacggcuaccaccaccagaacgagcagggcuccggcuacgccgccgaccucaaguccacccagaacgccaucgacgagaucaccaacaaggucaacuccgucaucgagaagaugaacacccaguucaccgccgucggcaaggaguucaaccaccucgagaagcgcaucgagaaccucaacaagaaggucgacgacggcuuccucgacaucuggaccuacaacgccgagcuccucguccuccucgagaacgagcgcacccucgacuaccacgacuccaacgucaagaaccucuacgagaagguccgcucccagcucaagaacaacgccaaggagaucggcaacggcugcuucgaguucuaccacaagugcgacaacaccugcauggaguccgucaagaacggcaccuacgacuaccccaaguacuccgaggaggccaagcucaaccgcgaggagaucgacggcgucaagcucgaguccacccgcaucuaccagauccucgccaucuacuccaccgucgccuccucccucguccucgucgucucccucggcgccaucuccuucuggaugugcuccaacggcucccuccagugccgcaucugcaucuga

SEQ ID NO: 99668 - RNA, 1701 nt, Artificial Sequence
  derived and/or modified CDS sequence (opt2) from hemagglutinin__InfluenzaA__ACZ16080
augaaggccauccucgucguccuccucuacaccuucgccaccgccaacgccgacacccucugcaucggcuaccacgccaacaacuccaccgacaccgucgacaccguccucgagaagaacgucaccgucacccacuccgucaaccuccucgaggacaagcacaacggcaagcucugcaagcuccgcggcgucgccccccuccaccucggcaagugcaacaucgccggcuggauccucggcaaccccgagugcgagucccucuccaccgccuccuccugguccuacaucgucgagaccuccuccuccgacaacggcaccugcuaccccggcgacuucaucgacuacgaggagcuccgcgagcagcucuccuccgucuccuccuucgagcgcuucgagaucuuccccaagaccuccuccuggcccaaccacgacuccaacaagggcgucaccgccgccugcccccacgccggcgccaaguccuucuacaagaaccucaucuggcucgucaagaagggcaacuccuaccccaagcucuccaaguccuacaucaacgacaagggcaaggagguccucguccucuggggcauccaccaccccuccaccuccgccgaccagcagucccucuaccagaacgccgacgccuacgucuucgucggcuccucccgcuacuccaagaaguucaagcccgagaucgccauccgccccaagguccgcgaccaggagggccgcaugaacuacuacuggacccucgucgagcccggcgacaagaucaccuucgaggccaccggcaaccucgucgucccccgcuacgccuucgccauggagcgcaacgacggcuccggcaucaucaucuccgacacccccguccacgacugcaacaccaccugccagacccccaagggcgccaucaacaccucccuccccuuccagaacauccaccccaucaccaucggcaagugccccaaguacgucaaguccaccaagcuccgccucgccaccggccuccgcaacguccccuccauccagucccgcggccucuucggcgccaucgccggcuucaucgagggcggcuggaccggcauggucgacggcugguacggcuaccaccaccagaacgagcagggcuccggcuacgccgccgaccucaaguccacccagaacgccaucgacgagaucaccaacaaggucaacuccgucaucgagaagaugaacacccaguucaccgccgucggcaaggaguucaaccaccucgagaagcgcaucgagaaccucaacaagaaggucgacgacggcuuccucgacaucuggaccuacaacgccgagcuccucguccuccucgagaacgagcgcacccucgacuaccacgacuccaacgucaagaaccucuacgagaagguccgcucccagcucaagaacaacgccaaggagaucggcaacggcugcuucgaguucuaccacaagugcgacaacaccugcauggaguccgucaagaacggcaccuacgacuaccccaaguacuccgaggaggccaagcucaaccgcgaggagaucgacggcgucaagcucgaguccacccgcaucuaccagauccucgccaucuacuccaccgucgccuccucccucguccucgucgucucccucggcgccaucuccuucuggaugugcuccaacggcucccuccagugccgcaucugcaucuga

SEQ ID NO: 99669 - RNA, 1701 nt, Artificial Sequence
  derived and/or modified CDS sequence (opt2) from hemagglutinin__InfluenzaA__ACZ16090
augaaggccauccuccucguccuccucuacaccuucgccaccgccaacgccgacacccucugcaucggcuaccacgccaacaacuccaccgacaccgucgacaccguccucgagaagaacgucaccgucacccacuccgucaaccuccucgaggacaagcacaacggcaagcucugcaagcuccgcggcgucgccccccuccaccucggcaagugcaacaucgccggcuggauccucggcaaccccgagugcgagucccucuccaccgccuccuccugguccuacaucgucgagaccuccuccuccgacaacggcaccugcuaccccggcgacuucaucgacuacgaggagcuccgcgagcagcucuccuccauguccuccuucgagcgcuucgagaucuuccccaagaccuccuccuggcccaaccacgacuccaacaagggcgucaccgccgccugcccccacgccggcgccaaguccuucuacaagaaccucaucuggcucgucaagaagggcaacuccuaccccaagcucuccaaguccuacaucaacgacaagggcaaggagguccucguccucuggggcauccaccaccccuccaccuccgccgaccagcagucccucuaccagaacgccgacgccuacgucuucgucggcuccucccgcuacuccaagaaguucaagcccgagaucgccauccgccccaagguccgcgaccaggagggccgcaugaacuacuacuggacccucgucgagcccggcgacaagaucaccuucgaggccaccggcaaccucgucgucccccgcuacgccuucgccauggagcgcaacgccggcuccggcaucaucaucuccgacacccccguccacgacugcaacaccaccugccagacccccaagggcgccaucaacaccucccuccccuuccagaacauccaccccaucaccaucggcaagugccccaaguacgucaaguccaccaagcuccgccucgccaccggccuccgcaacguccccuccauccagucccgcggccucuucggcgccaucgccggcuucaucgagggcggcuggaccggcauggucgacggcugguacggcuaccaccaccagaacgagcagggcuccggcuacgccgccgaccucaaguccacccagaacgccaucgacgagaucaccaacaaggucaacuccgucaucgagaagaugaacacccaguucaccgccgucggcaaggaguucaaccaccucgagaagcgcaucgagaaccucaacaagaaggucgacgacggcuuccucgacaucuggaccuacaacgccgagcuccucguccuccucgagaacgagcgcacccucgacuaccacgacuccaacgucaagaaccucuacgagaagguccgcucccagcucaagaacaacgccaaggagaucggcaacggcugcuucgaguucuaccacaagugcgacaacaccugcauggaguccgucaagaacggcaccuacgacuaccccaaguacuccgaggaggccaagcucaaccgcgaggagaucgacggcgucaagcucgaguccacccgcaucuaccagauccucgccaucuacuccaccgucgccuccucccucguccucgucgucucccucggcgccaucuccuucuggaugugcuccaacggcucccuccagugccgcaucugcaucuga

SEQ ID NO: 99670 - RNA, 1701 nt, Artificial Sequence; identical to SEQ ID NO: 98692
  derived and/or modified CDS sequence (opt2) from hemagglutinin__InfluenzaA__ACZ16100

SEQ ID NO: 99671 - RNA, 1701 nt, Artificial Sequence; identical to SEQ ID NO: 98692
  derived and/or modified CDS sequence (opt2) from hemagglutinin__InfluenzaA__ACZ16110

SEQ ID NO: 99672 - RNA, 1701 nt, Artificial Sequence; identical to SEQ ID NO: 98692
  derived and/or modified CDS sequence (opt2) from hemagglutinin__InfluenzaA__ACZ16120

SEQ ID NO: 99673 - RNA, 1701 nt, Artificial Sequence; identical to SEQ ID NO: 99440
  derived and/or modified CDS sequence (opt2) from hemagglutinin__InfluenzaA__ACZ16130

SEQ ID NO: 99674 - RNA, 1701 nt, Artificial Sequence; identical to SEQ ID NO: 98692
  derived and/or modified CDS sequence (opt2) from hemagglutinin__InfluenzaA__ACZ16140

SEQ ID NO: 99675 - RNA, 1701 nt, Artificial Sequence; identical to SEQ ID NO: 98692
  derived and/or modified CDS sequence (opt2) from hemagglutinin__InfluenzaA__ACZ16150

SEQ ID NO: 99676 - RNA, 1701 nt, Artificial Sequence; identical to SEQ ID NO: 98692
  derived and/or modified CDS sequence (opt2) from hemagglutinin__InfluenzaA__ACZ16160

SEQ ID NO: 99677 - RNA, 1701 nt, Artificial Sequence; identical to SEQ ID NO: 98885
  derived and/or modified CDS sequence (opt2) from hemagglutinin__InfluenzaA__ACZ16170

SEQ ID NO: 99678 - RNA, 1701 nt, Artificial Sequence
  derived and/or modified CDS sequence (opt2) from hemagglutinin__InfluenzaA__ACZ16180
augaaggccauccucgucguccuccucuacaccuucgccaccgccaacgccgacacccucugcaucggcuaccacgccaacaacuccaccgacaccgucgacaccguccucgagaagaacgucaccgucacccacuccgucaaccuccucgaggacaagcacaacggcaagcucugcaagcuccgcggcgucgccccccuccaccucggcaagugcaacaucgccggcuggauccucggcaaccccgagugcgagucccucuacaccgccuccuccugguccuacaucgucgagaccuccuccuccgacaacggcaccugcuaccccggcgacuucaucgacuacgaggagcuccgcgagcagcucuccuccgucuccuccuucgagcgcuucgagaucuuccccaagaccuccuccuggcccaaccacgacuccaacaagggcgucaccgccgccugcccccacgccggcgccaaguccuucuacaagaaccucaucuggcucgucaagaagggcaacuccuaccccaagcucuccaaguccuacaucaacgacaagggcaaggagguccucguccucuggggcauccaccaccccuccaccuccgccgaccagcagucccucuaccagaacgccgacgccuacgucuucgucggcuccucccgcuacuccaagaaguucaagcccgagaucgccauccgccccaagguccgcgaccaggagggccgcaugaacuacuacuggacccucgucgagcccggcgacaagaucaccuucgaggccaccggcaaccucgucgucccccgcuacgccuucgccauggagcgcaacgccggcuccggcaucaucaucuccgacacccccguccacgacugcaacaccaccugccagacccccaagggcgccaucaacaccucccuccccuuccagaacauccaccccaucaccaucggcaagugccccaaguacgucaaguccaccaagcuccgccucgccaccggccuccgcaacguccccuccauccagucccgcggccucuucggcgccaucgccggcuucaucgagggcggcuggaccggcauggucgacggcugguacggcuaccaccaccagaacgagcagggcuccggcuacgccgccgaccucaaguccacccagaacgccaucgacgagaucaccaacaaggucaacuccgucaucgagaagaugaacacccaguucaccgccgucggcaaggaguucaaccaccucgagaagcgcaucgagaaccucaacaagaaggucgacgacggcuuccucgacaucuggaccuacaacgccgagcuccucguccuccucgagaacgagcgcacccucgacuaccacgacuccaacgucaagaaccucuacgagaagguccgcucccagcucaagaacaacgccaaggagaucggcaacggcugcuucgaguucuaccacaagugcgacaacaccugcauggaguccgucaagaacggcaccuacgacuaccccaaguacuccgaggaggccaagcucaaccgcgaggagaucgacggcgucaagcucgaguccacccgcaucuaccagauccucgccaucuacuccaccgucgccuccucccucguccucgucgucucccucggcgccaucuccuucuggaugugcuccaacggcucccuccagugccgcaucugcaucuga

SEQ ID NO: 99679 - RNA, 1701 nt, Artificial Sequence; identical to SEQ ID NO: 98692
  derived and/or modified CDS sequence (opt2) from hemagglutinin__InfluenzaA__ACZ16190

SEQ ID NO: 99680 - RNA, 1701 nt, Artificial Sequence
  derived and/or modified CDS sequence (opt2) from hemagglutinin__InfluenzaA__ACZ16200
augaaggccauccucgucguccuccucuacaccuucgccaccgccaaccccgacacccucugcaucggcuaccacgccaacaacuccaccgacaccgucgacaccguccucgagaagaacgucaccgucacccacuccgucaaccuccucgaggacaagcacaacggcaagcucugcaagcuccgcggcgucgccccccuccaccucggcaagugcaacaucgccggcuggauccucggcaaccccgagugcgagucccucuccaccgccuccuccugguccuacaucgucgagaccuccuccuccgacaacggcaccugcuaccccggcgacuucaucgacuacgaggagcuccgcgagcagcucuccuccgucuccuccuucgagcgcuucgagaucuuccccaagaccuccuccuggcccaaccacgacuccaacaagggcgucaccgccgccugcccccacgccggcgccaaguccuucuacaagaaccucaucuggcucgucaagaagggcaacuccuaccccaagcucuccaaguccuacaucaacgacaagggcaaggagguccucguccucuggggcauccaccaccccuccaccuccgccgaccagcagucccucuaccagaacgccgacgccuacgucuucgucggcuccucccgcuacuccaagaaguucaagcccgagaucgccauccgccccaagguccgcgaccaggagggccgcaugaacuacuacuggacccucgucgagcccggcgacaagaucaccuucgaggccaccggcaaccucgucgucccccgcuacgccuucgccauggagcgcaacgccggcuccggcaucaucaucuccgacacccccguccacgacugcaacaccaccugccagacccccaagggcgccaucaacaccucccuccccuuccagaacauccaccccaucaccaucggcaagugccccaaguacgucaaguccaccaagcuccgccucgccaccggccuccgcaacguccccuccauccagucccgcggccucuucggcgccaucgccggcuucaucgagggcggcuggaccggcauggucgacggcugguacggcuaccaccaccagaacgagcagggcuccggcuacgccgccgaccucaaguccacccagaacgccaucgacgagaucaccaacaaggucaacuccgucaucgagaagaugaacacccaguucaccgccgucggcaaggaguucaaccaccucgagaagcgcaucgagaaccucaacaagaaggucgacgacggcuuccucgacaucuggaccuacaacgccgagcuccucguccuccucgagaacgagcgcacccucgacuaccacgacuccaacgucaagaaccucuacgagaagguccgcucccagcucaagaacaacgccaaggagaucggcaacggcugcuucgaguucuaccacaagugcgacaacaccugcauggaguccgucaagaacggcaccuacgacuaccccaaguacuccgaggaggccaagcucaaccgcgaggagaucgacggcgucaagcucgaguccacccgcaucuaccagauccucgccaucuacuccaccgucgccuccucccucguccucgucgucucccucggcgccaucuccuucuggaugugcuccaacggcucccuccagugccgcaucugcaucuga

SEQ ID NO: 99681 - RNA, 1701 nt, Artificial Sequence; identical to SEQ ID NO: 98692
  derived and/or modified CDS sequence (opt2) from hemagglutinin__InfluenzaA__ACZ16210

SEQ ID NO: 99682 - RNA, 1701 nt, Artificial Sequence; identical to SEQ ID NO: 98692
  derived and/or modified CDS sequence (opt2) from hemagglutinin__InfluenzaA__ACZ16220

SEQ ID NO: 99683 - RNA, 1701 nt, Artificial Sequence; identical to SEQ ID NO: 99440
  derived and/or modified CDS sequence (opt2) from hemagglutinin__InfluenzaA__ACZ16230

SEQ ID NO: 99684 - RNA, 1701 nt, Artificial Sequence
  derived and/or modified CDS sequence (opt2) from hemagglutinin__InfluenzaA__ACZ16240
augaaggccauccucgucguccuccucuacaccuucgccaccgccaacgccgacacccucugcaucggcuaccacgccaacaacuccaccgacaccgucgacaccguccucgagaagaacgucaccgucacccacuccgucaacauccucgaggacaagcacaacggcaagcucugcaagcuccgcggcgucgccccccuccaccucggcaagugcaacaucgccggcuggauccucggcaaccccgagugcgagucccucuccaccgccuccuccugguccuacaucgucgagaccuccuccuccgacaacggcaccugcuaccccggcgacuucaucgacuacgaggagcuccgcgagcagcucuccuccgucuccuccuucgagcgcuucgagaucuuccccaagaccuccuccuggcccaaccacgacuccaacaagggcgucaccgccgccugcccccacgccggcgccaaguccuucuacaagaaccucaucuggcucgucaagaagggcaacuccuaccccaagcucuccaaguccuacaucaacgacaagggcaaggagguccucguccucuggggcauccaccaccccuccaccuccgccgaccagcagucccucuaccagaacgccgacgccuacgucuucgucggcuccucccgcuacuccaagaaguucaagcccgagaucgccauccgccccaagguccgcgaccaggagggccgcaugaacuacuacuggacccucgucgagcccggcgacaagaucaccuucgaggccaccggcaaccucgucgucccccgcuacgccuucgccauggagcgcaacgccggcuccggcaucaucaucuccgacacccccguccacgacugcaacaccaccugccagacccccaagggcgccaucaacaccucccuccccuuccagaacauccaccccaucaccaucggcaagugccccaaguacgucaaguccaccaagcuccgccucgccaccggccuccgcaacguccccuccauccagucccgcggccucuucggcgccaucgccggcuucaucgagggcggcuggaccggcauggucgacggcugguacggcuaccaccaccagaacgagcagggcuccggcuacgccgccgaccucaaguccacccagaacgcccucgacgagaucaccaacaaggucaacuccgucaucgagaagaugaacacccaguucaccgccgucggcaaggaguucaaccaccucgagaagcgcaucgagaaccucaacaagaaggucgacgacggcuuccucgacaucuggaccuacaacgccgagcuccucguccuccucgagaacgagcgcacccucgacuaccacgacuccaacgucaagaaccucuacgagaagguccgcucccagcucaagaacaacgccaaggagaucggcaacggcugcuucgaguucuaccacaagugcgacaacaccugcauggaguccgucaagaacggcaccuacgacuaccccaaguacuccgaggaggccaagcucaaccgcgaggagaucgacggcgucaagcucgaguccacccgcaucuaccagauccucgccaucuacuccaccgucgccuccucccucguccucgucgucucccucggcgccaucuccuucuggaugugcuccaacggcucccuccagugccgcaucugcaucuga

SEQ ID NO: 99685 - RNA, 1701 nt, Artificial Sequence; identical to SEQ ID NO: 98692
  derived and/or modified CDS sequence (opt2) from hemagglutinin__InfluenzaA__ACZ16260

SEQ ID NO: 99686 - RNA, 1701 nt, Artificial Sequence
  derived and/or modified CDS sequence (opt2) from hemagglutinin__InfluenzaA__ACZ16270
augaaggccauccucgucguccuccucuacaccuucgccaccgccaacgccgacacccucugcaucggcuaccacgccaacaacuccaccgacaccgucgacaccguccucgagaagaacgucaccgucacccacuccgucaaccuccucgaggacaagcacaacggcaagcucugcaagcuccgcggcgucgccccccuccaccucggcaagugcaacaucgccggcuggauccucggcaaccccgagugcgagucccucuccaccgccuccuccugguccuacaucgucgagaccuccuccuccgacaacggcaccugcuaccccggcgacuucaucgacuacgaggagcuccgcgagcagcucuccuccgucuccuccuucgagcgcuucgagaucuuccccaagaccuccuccuggcccaaccacgacuccaacaagggcgucaccgccgccugcccccacgccggcgccaaguccuucuacaagaaccucaucuggcucgucaagaagggcaacuccuaccccaagcucuccaaguccuacaucaacgacaagggcaaggagguccucguccucuggggcauccaccaccccuccaccuccgccgaccagcagaaccucuaccagaacgccgacgccuacgucuucgucggcuccucccgcuacuccaagaaguucaagcccgagaucgccauccgccccaagguccgcgaccaggagggccgcaugaacuacuacuggacccucgucgagcccggcgacaagaucaccuucgaggccaccggcaaccucgucgucccccgcuacgccuucgccauggagcgcaacgccggcuccggcaucaucaucuccgacacccccguccacgacugcaacaccaccugccagacccccaagggcgccaucaacaccucccuccccuuccagaacauccaccccaucaccaucggcaagugccccaaguacgucaaguccaccaagcuccgccucgccaccggccuccgcaacguccccuccauccagucccgcggccucuucggcgccaucgccggcuucaucgagggcggcuggaccggcauggucgacggcugguacggcuaccaccaccagaacgagcagggcuccggcuacgccgccgaccucaaguccacccagaacgccaucgacgagaucaccaacaaggucaacuccgucaucgagaagaugaacacccaguucaccgccgucggcaaggaguucaaccaccucgagaagcgcaucgagaaccucaacaagaaggucgacgacggcuuccucgacaucuggaccuacaacgccgagcuccucguccuccucgagaacgagcgcacccucgacuaccacgacuccaacgucaagaaccucuacgagaagguccgcucccagcucaagaacaacgccaaggagaucggcaacggcugcuucgaguucuaccacaagugcgacaacaccugcauggaguccgucaagaacggcaccuacgacuaccccaaguacuccgaggaggccaagcucaaccgcgaggagaucgacggcgucaagcucgaguccacccgcaucuaccagauccucgccaucuacuccaccgucgccuccucccucauccucgucgucucccucggcgccaucuccuucuggaugugcuccaacggcucccuccagugccgcaucugcaucuga

SEQ ID NO: 99687 - RNA, 1701 nt, Artificial Sequence; identical to SEQ ID NO: 99367
  derived and/or modified CDS sequence (opt2) from hemagglutinin__InfluenzaA__ACZ16280

SEQ ID NO: 99688 - RNA, 1701 nt, Artificial Sequence; identical to SEQ ID NO: 98692
  derived and/or modified CDS sequence (opt2) from hemagglutinin__InfluenzaA__ACZ16290

SEQ ID NO: 99689 - RNA, 1701 nt, Artificial Sequence
  derived and/or modified CDS sequence (opt2) from hemagglutinin__InfluenzaA__ACZ16300
augaaggccauccucgucguccuccucuacaccuucgccaccgccaacgccgacacccucugcaucggcuaccacgccaacaacuccaccgacaccgucgacaccguccucgagaagaacgucaucgucacccacuccgucaaccuccucgaggacaagcacaacggcaagcucugcaagcuccgcggcgucgccccccuccaccucggcaagugcaacaucgccggcuggauccucggcaaccccgagugcgagucccucuccaccgccuccuccugguccuacaucgucgagaccuccuccuccgacaacggcaccugcuaccccggcgacuucaucgacuacgaggagcuccgcgagcagcucuccuccgucuccuccuucgagcgcuucgagaucuuccccaagaccuccuccuggcccaaccacgacuccaacaagggcgucaccgccgccugcccccacgccggcgccaaguccuucuacaagaaccucaucuggcucgucaagaagggcaacuccuaccccaagcucuccaaguccuacaucaacgacaagggcaaggagguccucguccucuggggcauccaccaccccuccaccuccgccgaccagcagucccucuaccagaacgccgacgccuacgucuucgucggcuccucccgcuacuccaagaaguucaagcccgagaucgccauccgccccaagguccgcgaccaggagggccgcaugaacuacuacuggacccucgucgagcccggcgacaagaucaccuucgaggccaccggcaaccuccucgucccccgcuacgccuucgccauggagcgcaacgccggcuccggcaucaucaucuccgacacccccguccacgacugcaacaccaccugccagacccccaagggcgccaucaacaccucccuccccuuccagaacauccaccccaucaccaucggcaagugccccaaguacgucaaguccaccaagcuccgccucgccaccggccuccgcaacguccccuccauccagucccgcggccucuucggcgccaucgccggcuucaucgagggcggcuggaccggcauggucgacggcugguacggcuaccaccaccagaacgagcagggcuccggcuacgccgccgaccucaaguccacccagaacgccaucgacgagaucaccaacaaggucaacuccgucaucgagaagaugaacacccaguucaccgccgucggcaaggaguucaaccaccucgagaagcgcaucgagaaccucaacaagaaggucgacgacggcuuccucgacaucuggaccuacaacgccgagcuccucguccuccucgagaacgagcgcacccucgacuaccacgacuccaacgucaagaaccucuacgagaagguccgcucccagcucaagaacaacgccaaggagaucggcaacggcugcuucgaguucuaccacaagugcgacaacaccugcauggaguccgucaagaacggcaccuacgacuaccccaaguacuccgaggaggccaagcucaaccgcgaggagaucgacggcgucaagcucgaguccacccgcaucuaccagauccucgccaucuacuccaccgucgccuccucccucguccucgucgucucccucggcgccaucuccuucuggaugugcuccaacggcucccuccagugccgcaucugcaucuga

SEQ ID NO: 99690 - RNA, 1701 nt, Artificial Sequence; identical to SEQ ID NO: 99435
  derived and/or modified CDS sequence (opt2) from hemagglutinin__InfluenzaA__ACZ16310

SEQ ID NO: 99691 - RNA, 1701 nt, Artificial Sequence
  derived and/or modified CDS sequence (opt2) from hemagglutinin__InfluenzaA__ACZ16320
augaaggccauccucgucguccuccucuacaccuucgccaccgccaacgccgacacccucugcaucggcuaccacgccaacaacuccaccgacaccgucgacaccguccucgagaagaacgucaccgucacccacuccgucaaccuccucgaggacaagcacaacggcaagcucugcaagcuccgcggcgucgccccccuccaccucggcaagugcaacaucgccggcuggauccucggcaaccccgagugcgagucccucuccaccgccuccuccugguccuacaucgucgagaccuccuccuccgacaacggcaccugcuaccccggcgacuucaucgacuacgaggagcuccgcgagcagcucuccuccgucuccuccuucgagcgcuucgagaucuuccccaagaccuccuccuggcccaaccacgacuccaacaagggcgucaccgccgccugcccccacgccggcgccaaguccuucuacaagaaccucaucuggcucgucaagaagggcaacuccuaccccaagcucuccaaguccuacaucaacgacaagggcaaggagguccucguccucuggggcauccaccaccccuccaccuccgccgaccagcagucccucuaccagaacgccgacgccuacgucuucgucggcuccucccgcuacuccaagaaguucaagcccgagaucgccauccgccccaagguccgcgaccaggagggccgcaugaacuacuacuggacccucgucgagcccggcgacaagaucaccuucgaggccaccggcaaccucgucgucccccgcuacgccuucgccauggagcgcaacgccggcuccggcaucaucaucuccgacacccccguccacgacugcaacaccaccugccagacccccaagggcgccaucaacaccucccuccccuuccagaacauccaccccaucaccaucggcaagugccccaaguacgucaaguccacccgccuccgccucgccaccggccuccgcaacguccccuccauccagucccgcggccucuucggcgccaucgccggcuucaucgagggcggcuggaccggcauggucgacggcugguacggcuaccaccaccagaacgagcagggcuccggcuacgccgccgaccucaaguccacccagaacgccaucgacgagaucaccaacaaggucaacuccgucaucgagaagaugaacacccaguucaccgccgucggcaaggaguucaaccaccucgagaagcgcaucgagaaccucaacaagaaggucgacgacggcuuccucgacaucuggaccuacaacgccgagcuccucguccuccucgagaacgagcgcacccucgacuaccacgacuccaacgucaagaaccucuacgagaagguccgcucccagcucaagaacaacgccaaggagaucggcaacggcugcuucgaguucuaccacaagugcgacaacaccugcauggaguccgucaagaacggcaccuacgacuaccccaaguacuccgaggaggccaagcucaaccgcgaggagaucgacggcgucaagcucgaguccacccgcaucuaccagauccucgccaucuacuccaccgucgccuccucccucguccucgucgucucccucggcgccaucuccuucuggaugugcuccaacggcucccuccagugccgcaucugcaucuga

SEQ ID NO: 99692 - RNA, 1701 nt, Artificial Sequence; identical to SEQ ID NO: 99435
  derived and/or modified CDS sequence (opt2) from hemagglutinin__InfluenzaA__ACZ16330

SEQ ID NO: 99693 - RNA, 1701 nt, Artificial Sequence; identical to SEQ ID NO: 98885
  derived and/or modified CDS sequence (opt2) from hemagglutinin__InfluenzaA__ACZ16340

SEQ ID NO: 99694 - RNA, 1701 nt, Artificial Sequence; identical to SEQ ID NO: 98692
  derived and/or modified CDS sequence (opt2) from hemagglutinin__InfluenzaA__ACZ16350

SEQ ID NO: 99695 - RNA, 1701 nt, Artificial Sequence; identical to SEQ ID NO: 98692
  derived and/or modified CDS sequence (opt2) from hemagglutinin__InfluenzaA__ACZ16360

SEQ ID NO: 99696 - RNA, 1701 nt, Artificial Sequence; identical to SEQ ID NO: 98885
  derived and/or modified CDS sequence (opt2) from hemagglutinin__InfluenzaA__ACZ16370

SEQ ID NO: 99697 - RNA, 1701 nt, Artificial Sequence; identical to SEQ ID NO: 98692
  derived and/or modified CDS sequence (opt2) from hemagglutinin__InfluenzaA__ACZ16380

SEQ ID NO: 99698 - RNA, 1701 nt, Artificial Sequence; identical to SEQ ID NO: 98692
  derived and/or modified CDS sequence (opt2) from hemagglutinin__InfluenzaA__ACZ16390

SEQ ID NO: 99699 - RNA, 1701 nt, Artificial Sequence; identical to SEQ ID NO: 98692
  derived and/or modified CDS sequence (opt2) from hemagglutinin__InfluenzaA__ACZ16400

SEQ ID NO: 99700 - RNA, 1701 nt, Artificial Sequence; identical to SEQ ID NO: 98692
  derived and/or modified CDS sequence (opt2) from hemagglutinin__InfluenzaA__ACZ16410

SEQ ID NO: 99701 - RNA, 1701 nt, Artificial Sequence; identical to SEQ ID NO: 99329
  derived and/or modified CDS sequence (opt2) from hemagglutinin__InfluenzaA__ACZ16420

SEQ ID NO: 99702 - RNA, 1701 nt, Artificial Sequence; identical to SEQ ID NO: 98692
  derived and/or modified CDS sequence (opt2) from hemagglutinin__InfluenzaA__ACZ16430

SEQ ID NO: 99703 - RNA, 1701 nt, Artificial Sequence; identical to SEQ ID NO: 98692
  derived and/or modified CDS sequence (opt2) from hemagglutinin__InfluenzaA__ACZ16440

SEQ ID NO: 99704 - RNA, 1701 nt, Artificial Sequence
  derived and/or modified CDS sequence (opt2) from hemagglutinin__InfluenzaA__ACZ16450
augaaggccauccucgucguccuccucuacaccuucgccaccgccaacgccgacacccucugcaucggcuaccacgccaacaacuccaccgacaccgucgacaccguccucgagaagaacgucaccgucacccacuccgucaaccuccucgaggacaagcacaacggcaagcucugcaagcuccgcggcgucgccccccuccaccucggcaagugcaacaucgccggcuggauccucggcaaccccgagugcgagucccucuccaccgccuccuccugguccuacaucgucgagaccuccuccuccgacaacggcaccugcuaccccggcgacuucaucgacuacgaggagcuccgcgagcagcucuccuccgucuccuccuucgagcgcuucgagaucuuccccaagaccuccuccuggcccaaccacgacuccaacaagggcgucaccgccgccugcccccacgccggcgccaaguccuucuacaagaaccucaucuggcucgucaagaagggcaacuccuaccccaagcucuccaaguccuacaucaacgacaagggcaaggagguccucguccucuggggcauccaccaccccuccaccuccgccgaccagcagucccucuaccagaacgccgacgccuacgucuucgucggcuccucccgcuacuccaagaaguucaagcccgagaucgccauccgccccaagguccgcgaccaggagggccgcaugaacuacuacuggacccucgucaagcccggcgacaagaucaccuucgaggccaccggcaaccucgucgucccccgcuacgccuucgccauggagcgcaacgccggcuccggcaucaucaucuccgacacccccguccacgacugcaacaccaccugccagacccccaagggcgccaucaacaccucccuccccuuccagaacauccaccccaucaccaucggcaagugccccaaguacgucaaguccaccaagcuccgccucgccaccggccuccgcaacguccccuccauccagucccgcggccucuucggcgccaucgccggcuucaucgagggcggcuggaccggcauggucgacggcugguacggcuaccaccaccagaacgagcagggcuccggcuacgccgccgaccucaaguccacccagaacgccaucgacgagaucaccaacaaggucaacuccgucaucgagaagaugaacacccaguucaccgccgucggcaaggaguucaaccaccucgagaagcgcaucgagaaccucaacaagaaggucgacgacggcuuccucgacaucuggaccuacaacgccgagcuccucguccuccucgagaacgagcgcacccucgacuaccacgacuccaacgucaagaaccucuacgagaagguccgcucccagcucaagaacaacgccaaggagaucggcaacggcugcuucgaguucuaccacaagugcgacaacaccugcauggaguccgucaagaacggcaccuacgacuaccccaaguacuccgaggaggccaagcucaaccgcgaggagaucgacggcgucaagcucgaguccacccgcaucuaccagauccucgccaucuacuccaccgucgccuccucccucguccucgucgucucccucggcgccaucuccuucuggaugugcuccaacggcucccuccagugccgcaucugcaucuga

SEQ ID NO: 99705 - RNA, 1701 nt, Artificial Sequence; identical to SEQ ID NO: 98885
  derived and/or modified CDS sequence (opt2) from hemagglutinin__InfluenzaA__ACZ16460

SEQ ID NO: 99706 - RNA, 1701 nt, Artificial Sequence; identical to SEQ ID NO: 98692
  derived and/or modified CDS sequence (opt2) from hemagglutinin__InfluenzaA__ACZ16470

SEQ ID NO: 99707 - RNA, 1701 nt, Artificial Sequence; identical to SEQ ID NO: 98692
  derived and/or modified CDS sequence (opt2) from hemagglutinin__InfluenzaA__ACZ16480

SEQ ID NO: 99708 - RNA, 1701 nt, Artificial Sequence; identical to SEQ ID NO: 99440
  derived and/or modified CDS sequence (opt2) from hemagglutinin__InfluenzaA__ACZ16490

SEQ ID NO: 99709 - RNA, 1701 nt, Artificial Sequence; identical to SEQ ID NO: 98692
  derived and/or modified CDS sequence (opt2) from hemagglutinin__InfluenzaA__ACZ16500

SEQ ID NO: 99710 - RNA, 1701 nt, Artificial Sequence; identical to SEQ ID NO: 98885
  derived and/or modified CDS sequence (opt2) from hemagglutinin__InfluenzaA__ACZ16510

SEQ ID NO: 99711 - RNA, 1701 nt, Artificial Sequence; identical to SEQ ID NO: 98692
  derived and/or modified CDS sequence (opt2) from hemagglutinin__InfluenzaA__ACZ16530

SEQ ID NO: 99712 - RNA, 1701 nt, Artificial Sequence
  derived and/or modified CDS sequence (opt2) from hemagglutinin__InfluenzaA__ACZ16540
augaaggccauccucgucguccuccucuacaccuucgccaccgccaacgccgacacccucugcaucggcuaccacgccaacaacuccaccgacaccgucgacaccguccucgagaagaacgucaccgucacccacuccgucaacauccucgaggacaagcacaacggcaagcucugcaagcuccgcggcgucgccccccuccaccucggcaagugcaacaucgccggcuggauccucggcaaccccgagugcgagucccucuccaccgccuccuccugguccuacaucgucgagaccuccuccuccgacaacggcaccugcuaccccggcgacuucaucgacuacgaggagcuccgcgagcagcucuccuccgucuccuccuucgagcgcuucgagaucuuccccaagaccuccuccuggcccaaccacgacuccaacaagggcgucaccgccgccugcccccacgccggcgccaaguccuucuacaagaaccucaucuggcucgucaagaagggcaacuccuaccccaagcucuccaaguccuacaucaacgacaagggcaaggagguccucguccucuggggcauccaccaccccuccaccuccgccgaccagcagucccucuaccagaacgccgacgccuacgucuucgucggcuccucccgcuacuccaagaaguucaagcccgagaucgccauccgccccaagguccgcgaccaggagggccgcaugaacuacuacuggacccucgucgagcccggcgacaagaucaccuucgaggccaccggcaaccucgucgucccccgcuacgccuucgccauggagcgcaacgccggcuccggcaucaucaucuccgacacccccguccacgacugcaacaccaccugccagacccccaagggcgccaucaacaccucccuccccuuccagaacauccaccccaucaccaucggcaagugccccaaguacgucaaguccaccaagcuccgccucgccaccggccuccgcaacguccccuccauccagucccgcggccuccucggcgccaucgccggcuucaucgagggcggcuggaccggcauggucgacggcugguacggcuaccaccaccagaacgagcagggcuccggcuacgccgccgaccucaaguccacccagaacgccaucgacgagaucaccaacaaggucaacuccgucaucgagaagaugaacacccaguucaccgccgucggcaaggaguucaaccaccucgagaagcgcaucgagaaccucaacaagaaggucgacgacggcuuccucgacaucuggaccuacaacgccgagcuccucguccuccucgagaacgagcgcacccucgacuaccacgacuccaacgucaagaaccucuacgagaagguccgcucccagcucaagaacaacgccaaggagaucggcaacggcugcuucgaguucuaccacaagugcgacaacaccugcauggaguccgucaagaacggcaccuacgacuaccccaaguacuccgaggaggccaagcucaaccgcgaggagaucgacggcgucaagcucgaguccacccgcaucuaccagauccucgccaucuacuccaccgucgccuccucccucguccucgucgucucccucggcgccaucuccuucuggaugugcuccaacggcucccuccagugccgcaucugcaucuga

SEQ ID NO: 99713 - RNA, 1701 nt, Artificial Sequence; identical to SEQ ID NO: 99435
  derived and/or modified CDS sequence (opt2) from hemagglutinin__InfluenzaA__ACZ16550

SEQ ID NO: 99714 - RNA, 1701 nt, Artificial Sequence; identical to SEQ ID NO: 98692
  derived and/or modified CDS sequence (opt2) from hemagglutinin__InfluenzaA__ACZ16583

SEQ ID NO: 99715 - RNA, 1701 nt, Artificial Sequence; identical to SEQ ID NO: 99435
  derived and/or modified CDS sequence (opt2) from hemagglutinin__InfluenzaA__ACZ16593

SEQ ID NO: 99716 - RNA, 1701 nt, Artificial Sequence; identical to SEQ ID NO: 98692
  derived and/or modified CDS sequence (opt2) from hemagglutinin__InfluenzaA__ACZ16603

SEQ ID NO: 99717 - RNA, 1701 nt, Artificial Sequence; identical to SEQ ID NO: 99435
  derived and/or modified CDS sequence (opt2) from hemagglutinin__InfluenzaA__ACZ16630

SEQ ID NO: 99718 - RNA, 1701 nt, Artificial Sequence; identical to SEQ ID NO: 98692
  derived and/or modified CDS sequence (opt2) from hemagglutinin__InfluenzaA__ACZ16640

SEQ ID NO: 99719 - RNA, 1701 nt, Artificial Sequence; identical to SEQ ID NO: 98692
  derived and/or modified CDS sequence (opt2) from hemagglutinin__InfluenzaA__ACZ16650

SEQ ID NO: 99720 - RNA, 1701 nt, Artificial Sequence; identical to SEQ ID NO: 98692
  derived and/or modified CDS sequence (opt2) from hemagglutinin__InfluenzaA__ACZ16660

SEQ ID NO: 99721 - RNA, 1701 nt, Artificial Sequence; identical to SEQ ID NO: 98692
  derived and/or modified CDS sequence (opt2) from hemagglutinin__InfluenzaA__ACZ16670

SEQ ID NO: 99722 - RNA, 1701 nt, Artificial Sequence; identical to SEQ ID NO: 98692
  derived and/or modified CDS sequence (opt2) from hemagglutinin__InfluenzaA__ACZ16680

SEQ ID NO: 99723 - RNA, 1701 nt, Artificial Sequence; identical to SEQ ID NO: 98692
  derived and/or modified CDS sequence (opt2) from hemagglutinin__InfluenzaA__ACZ16690

SEQ ID NO: 99724 - RNA, 1701 nt, Artificial Sequence; identical to SEQ ID NO: 98692
  derived and/or modified CDS sequence (opt2) from hemagglutinin__InfluenzaA__ACZ16700

SEQ ID NO: 99725 - RNA, 1701 nt, Artificial Sequence; identical to SEQ ID NO: 98692
  derived and/or modified CDS sequence (opt2) from hemagglutinin__InfluenzaA__ACZ16710

SEQ ID NO: 99726 - RNA, 1701 nt, Artificial Sequence; identical to SEQ ID NO: 98692
  derived and/or modified CDS sequence (opt2) from hemagglutinin__InfluenzaA__ACZ16720

SEQ ID NO: 99727 - RNA, 1701 nt, Artificial Sequence; identical to SEQ ID NO: 99435
  derived and/or modified CDS sequence (opt2) from hemagglutinin__InfluenzaA__ACZ16730

SEQ ID NO: 99728 - RNA, 1701 nt, Artificial Sequence; identical to SEQ ID NO: 99435
  derived and/or modified CDS sequence (opt2) from hemagglutinin__InfluenzaA__ACZ16740

SEQ ID NO: 99729 - RNA, 1701 nt, Artificial Sequence; identical to SEQ ID NO: 98692
  derived and/or modified CDS sequence (opt2) from hemagglutinin__InfluenzaA__ACZ16750

SEQ ID NO: 99730 - RNA, 1701 nt, Artificial Sequence; identical to SEQ ID NO: 98692
  derived and/or modified CDS sequence (opt2) from hemagglutinin__InfluenzaA__ACZ16760

SEQ ID NO: 99731 - RNA, 1701 nt, Artificial Sequence; identical to SEQ ID NO: 98885
  derived and/or modified CDS sequence (opt2) from hemagglutinin__InfluenzaA__ACZ16770

SEQ ID NO: 99732 - RNA, 1701 nt, Artificial Sequence; identical to SEQ ID NO: 98692
  derived and/or modified CDS sequence (opt2) from hemagglutinin__InfluenzaA__ACZ16780

SEQ ID NO: 99733 - RNA, 1701 nt, Artificial Sequence; identical to SEQ ID NO: 98692
  derived and/or modified CDS sequence (opt2) from hemagglutinin__InfluenzaA__ACZ16790

SEQ ID NO: 99734 - RNA, 1701 nt, Artificial Sequence; identical to SEQ ID NO: 98692
  derived and/or modified CDS sequence (opt2) from hemagglutinin__InfluenzaA__ACZ16800

SEQ ID NO: 99735 - RNA, 1701 nt, Artificial Sequence; identical to SEQ ID NO: 98692
  derived and/or modified CDS sequence (opt2) from hemagglutinin__InfluenzaA__ACZ16810

SEQ ID NO: 99736 - RNA, 1701 nt, Artificial Sequence; identical to SEQ ID NO: 99367
  derived and/or modified CDS sequence (opt2) from hemagglutinin__InfluenzaA__ACZ16820

SEQ ID NO: 99737 - RNA, 1701 nt, Artificial Sequence; identical to SEQ ID NO: 98692
  derived and/or modified CDS sequence (opt2) from hemagglutinin__InfluenzaA__ACZ16830

SEQ ID NO: 99738 - RNA, 1701 nt, Artificial Sequence
  derived and/or modified CDS sequence (opt2) from hemagglutinin__InfluenzaA__ACZ16840
augaaggccauccucgucguccuccucuacaccuucgccaccgccaacgccgacacccucugcaucggcuaccacgccaacaacuccaccgacaccgucgacaccguccucgagaagaacgucaccgucacccacuccgucaaccuccucgaggacaagcacaacggcaagcucugcaagcuccgcggcgucgccccccuccaccucggcaagugcaacaucgccggcuggauccucggcaaccccgagugcgagucccucuccaccgccuccuccugguccuacaucgucgagaccuccuccuccgacaacggcaccugcuaccccggcgacuucaucgacuacgaggagcuccgcgagcagcucuccuccgucuccuccuucgagcgcuucgagaucuuccccaagaccuccuccuggcccaaccacgacuccaacaagggcgucaccgccgccugcccccacgccggcgccaaguccuucuacaagaaccucaucuggcucgucaagaagggcaacuccuaccccaagcucuccaaguccuacaucaacgacaagggcaaggagguccucguccucuggggcauccaccaccccuccaccuccgccgaccagcagucccucuaccagaacgccgacgccuacgucuucgucggcuccucccgcuacuccaagaaguucaagcccgagaucgccauccgcaccaagguccgcgaccaggagggccgcaugaacuacuacuggacccucgucgagcccggcgacaagaucaccuucgaggccaccggcaaccucgucgucccccgcuacgccuucgccauggagcgcaacgccggcuccggcaucaucaucuccgacacccccguccacgacugcaacaccaccugccagacccccaagggcgccaucaacaccucccuccccuuccagaacauccaccccaucaccaucggcaagugccccaaguacgucaaguccaccaagcuccgccucgccaccggccuccgcaacguccccuccauccagucccgcggccucuucggcgccaucgccggcuucaucgagggcggcuggaccggcauggucgacggcugguacggcuaccaccaccagaacgagcagggcuccggcuacgccgccgaccucaaguccacccagaacgccaucgacgagaucaccaacaaggucaacuccgucaucgagaagaugaacacccaguucaccgccgucggcaaggaguucaaccaccucgagaagcgcaucgagaaccucaacaagaaggucgacgacggcuuccucgacaucuggaccuacaacgccgagcuccucguccuccucgagaacgagcgcacccucgacuaccacgacuccaacgucaagaaccucuacgagaagguccgcucccagcucaagaacaacgccaaggagaucggcaacggcugcuucgaguucuaccacaagugcgacaacaccugcauggaguccgucaagaacggcaccuacgacuaccccaaguacuccgaggaggccaagcucaaccgcgaggagaucgacggcgucaagcucgaguccacccgcaucuaccagauccucgccaucuacuccaccgucgccuccucccucguccucgucgucucccucggcgccaucuccuucuggaugugcuccaacggcucccuccagugccgcaucugcaucuga

SEQ ID NO: 99739 - RNA, 1701 nt, Artificial Sequence; identical to SEQ ID NO: 98692
  derived and/or modified CDS sequence (opt2) from hemagglutinin__InfluenzaA__ACZ16850

SEQ ID NO: 99740 - RNA, 1701 nt, Artificial Sequence
  derived and/or modified CDS sequence (opt2) from hemagglutinin__InfluenzaA__ACZ16860
augaaggccauccucgucguccuccucuacaccuucgccaccgccaacgccgacacccucugcaucggcuaccacgccaacaacuccaccgacaccgucgacaccguccucgagaagaacgucaccgucacccacuccgucaaccuccucgaggacaagcacaacggcaagcucugcaagcuccgcggcgucgccccccuccaccucggcaagugcaacaucgccggcuggauccucggcaaccccgagugcgagucccucuccaccgccuccuccugguccuacaucgucgagaccuccuccuccgacaacggcaccugcuaccccggcgacuucaucgacuacgaggagcuccgcgagcagcucuccuccgucuccuccuucgagcgcuucgagaucuuccccaagaccuccuccuggcccaaccacgacuccaacaagggcgucaccgccgccugcccccacgccggcgccaaguccuucuacaagaaccucaucuggcucgucaagaagggcaacuccuaccccaagcucuccaaguccuacaucaacgacaagggcaaggagguccucguccucuggggcauccaccaccccuccaccuccgccgaccagcagucccucuaccagaacgccgacgccuacgucuucgucggcuccucccgcuacuccaagaaguucaagcccgagaucgccauccgccccaagguccgcgaccaggagggccgcaugaacuacuacuggacccucgucgagcccggcgacaagaucaccuucgaggccaccggcaaccucgucgccccccgcuacgccuucgccauggagcgcaacgccggcuccggcaucaucaucuccgacacccccguccacgacugcaacaccaccugccagacccccaagggcgccaucaacaccucccuccccuuccagaacauccaccccaucaccaucggcaagugccccaaguacgucaaguccaccaagcuccgccucgccaccggccuccgcaacguccccuccauccagucccgcggccucuucggcgccaucgccggcuucaucgagggcggcuggaccggcauggucgacggcugguacggcuaccaccaccagaacgagcagggcuccggcuacgccgccgaccucaaguccacccagaacgccaucgacgagaucaccaacaaggucaacuccgucaucgagaagaugaacacccaguucaccgccgucggcaaggaguucaaccaccucgagaagcgcaucgagaaccucaacaagaaggucgacgacggcuuccucgacaucuggaccuacaacgccgagcuccucguccuccucgagaacgagcgcacccucgacuaccacgacuccaacgucaagaaccucuacgagaagguccgcucccagcucaagaacaacgccaaggagaucggcaacggcugcuucgaguucuaccacaagugcgacaacaccugcauggaguccgucaagaacggcaccuacgacuaccccaaguacuccgaggaggccaagcucaaccgcgaggagaucgacggcgucaagcucgaguccacccgcaucuaccagauccucgccaucuacuccaccgucgccuccucccucguccucgucgucucccucggcgccaucuccuucuggaugugcuccaacggcucccuccagugccgcaucugcaucuga

SEQ ID NO: 99741 - RNA, 1701 nt, Artificial Sequence; identical to SEQ ID NO: 99435
  derived and/or modified CDS sequence (opt2) from hemagglutinin__InfluenzaA__ACZ16870

SEQ ID NO: 99742 - RNA, 1701 nt, Artificial Sequence
  derived and/or modified CDS sequence (opt2) from hemagglutinin__InfluenzaA__ACZ16880
augaaggccauccucgucguccuccucuacaccuucgccaccgccaacgccgacacccucugcaucggcuaccacgccaacaacuccaccgacaccgucgacaccguccucgagaagaacgucaccgucacccacuccgucaaccuccucgaggacaagcacaacggcaagcucugcaagcuccgcggcgucgccccccuccaccucggcaagugcaacaucgccggcuggauccucggcaaccccgagugcgagucccucuccaccgccuccuccugguccuacaucgucgagaccuccuccuccgacaacggcaccugcuaccccggcgacuucaucgacuacgaggagcuccgcgagcagcucuccuccgucuccuccuucgagcgcuucgagaucuuccccaagaccuccuccuggcccaaccacgacuccaacaagggcgucaccgccgccugcccccacgccggcgccaaguccuucuacaagaaccucaucuggcucgucaagaagggcaacuccuaccccaagcucuccaaguccuacaucaacgacaagggcaaggagguccucguccucuggggcauccaccaccccuccaccuccgccgaccagcagucccucuaccagaacgccgacgccuacgucuucgucggcuccucccgcuacuccaagaaguucaagcccgagaucgccauccgccccaagguccgcgaccaggagggccgcaugaacuacuacuggacccucgucgagcccggcgacaagaucaccuucgaggccaccggcaaccucgucgucccccgcuacgccuucgccauggagcgcaacgacggcuccggcaucaucaucuccgacacccccguccacgacugcaacaccaccugccagacccccaagggcgccaucaacaccucccuccccuuccagaacauccaccccaucaccaucggcaagugccccaaguacgucaaguccaccaagcuccgccucgccaccggccuccgcaacguccccuccauccagucccgcggccucuucggcgccaucgccggcuucaucgagggcggcuggaccggcauggucgacggcugguacggcuaccaccaccagaacgagcagggcuccggcuacgccgccgaccucaaguccacccagaacgccaucgacgagaucaccaacaaggucaacuccgucaucgagaagaugaacacccaguucaccgccgucggcaaggaguucaaccaccucgagaagcgcaucgagaaccucaacaagaaggucgacgacggcuuccucgacaucuggaccuacaacgccgagcuccucguccuccucgagaacgagcgcacccucgacuaccacgacuccaacgucaagaaccucuacgagaagguccgcucccagcucaagaacaacgccaaggagaucggcaacggcugcuucgaguucuaccacaagugcaacaacaccugcauggaguccgucaagaacggcaccuacgacuaccccaaguacuccgaggaggccaagcucaaccgcgaggagaucgacggcgucaagcucgaguccacccgcaucuaccagauccucgccaucuacuccaccgucgccuccucccucguccucgucgucucccucggcgccaucuccuucuggaugugcuccaacggcucccuccagugccgcaucugcaucuga

SEQ ID NO: 99743 - RNA, 1701 nt, Artificial Sequence; identical to SEQ ID NO: 99440
  derived and/or modified CDS sequence (opt2) from hemagglutinin__InfluenzaA__ACZ16890

SEQ ID NO: 99744 - RNA, 1701 nt, Artificial Sequence; identical to SEQ ID NO: 98692
  derived and/or modified CDS sequence (opt2) from hemagglutinin__InfluenzaA__ACZ16900

SEQ ID NO: 99745 - RNA, 1701 nt, Artificial Sequence; identical to SEQ ID NO: 98692
  derived and/or modified CDS sequence (opt2) from hemagglutinin__InfluenzaA__ACZ16910

SEQ ID NO: 99746 - RNA, 1701 nt, Artificial Sequence; identical to SEQ ID NO: 98692
  derived and/or modified CDS sequence (opt2) from hemagglutinin__InfluenzaA__ACZ16920

SEQ ID NO: 99747 - RNA, 1701 nt, Artificial Sequence; identical to SEQ ID NO: 98705
  derived and/or modified CDS sequence (opt2) from hemagglutinin__InfluenzaA__ACZ16930

SEQ ID NO: 99748 - RNA, 1701 nt, Artificial Sequence; identical to SEQ ID NO: 98705
  derived and/or modified CDS sequence (opt2) from hemagglutinin__InfluenzaA__ACZ16940

SEQ ID NO: 99749 - RNA, 1701 nt, Artificial Sequence; identical to SEQ ID NO: 98692
  derived and/or modified CDS sequence (opt2) from hemagglutinin__InfluenzaA__ACZ16950

SEQ ID NO: 99750 - RNA, 1701 nt, Artificial Sequence; identical to SEQ ID NO: 98947
  derived and/or modified CDS sequence (opt2) from hemagglutinin__InfluenzaA__ACZ16960

SEQ ID NO: 99751 - RNA, 1701 nt, Artificial Sequence
  derived and/or modified CDS sequence (opt2) from hemagglutinin__InfluenzaA__ACZ16970
augaaggccauccucgucguccuccucuacaccuucgccaccgccaacgccgacacccucugcaucggcuaccacgccaacaacuccaccgacaccgucgacaccguccucgagaagaacgucaccgucacccacuccgucaaccuccucgaggacaagcacaacggcaagcucugcaagcuccgcggcgucgccccccuccaccucggcaagugcaacaucgccggcuggauccucggcaaccccgagugcgagucccucuccaccgccuccuccugguccuacaucgucgagaccuccuccuccgacaacggcaccugcuaccccggcgacuucaucgacuacgaggagcuccgcgagcagcucuccuccgucuccuccuucgagcgcuucgagaucuuccccaagaccuccuccuggcccaaccacgacuccaacaagggcgucaccgccgccugcccccacgccggcgccaaguccuucuacaagaaccucaucuggcucgucaaggagggcaacuccuaccccaagcucuccaaguccuacaucaacgacaagggcaaggagguccucguccucuggggcauccaccaccccuccaccuccgccgaccagcagucccucuaccagaacgccgacgccuacgucuucgucggcaccucccgcuacuccaagaaguucaagcccgagaucgccauccgccccaagguccgcgaccaggagggccgcaugaacuacuacuggacccucgucgagcccggcgacaagaucaccuucgaggccaccggcaaccucgucgucccccgcuacgccuucgccauggagcgcaacgccggcuccggcaucaucaucuccgacacccccguccacgacugcaacaccaccugccagacccccaagggcgccaucaacaccucccuccccuuccagaacauccaccccaucaccaucggcaagugccccaaguacgucaaguccaccaagcuccgccucgccaccggccuccgcaacguccccuccauccagucccgcggccucuucggcgccaucgccggcuucaucgagggcggcuggaccggcauggucgacggcugguacggcuaccaccaccagaacgagcagggcuccggcuacgccgccgaccucaaguccacccagaacgccaucgacgagaucaccaacaaggucaacuccgucaucgagaagaugaacacccaguucaccgccgucggcaaggaguucaaccaccucgagaagcgcaucgagaaccucaacaagaaggucgacgacggcuuccucgacaucuggaccuacaacgccgagcuccucguccuccucgagaacgagcgcacccucgacuaccacgacuccaacgucaagaaccucuacgagaagguccgcucccagcucaagaacaacgccaaggagaucggcaacggcugcuucgaguucuaccacaagugcgacaacaccugcauggaguccgucaagaacggcaccuacgacuaccccaaguacuccgaggaggccaagcucaaccgcgaggagaucgacggcgucaagcucgaguccacccgcaucuaccagauccucgccaucuacuccaccgucgccuccucccucguccucgucgucucccucggcgccaucuccuucuggaugugcuccaacggcucccuccagugccgcaucugcaucuga

SEQ ID NO: 99752 - RNA, 1701 nt, Artificial Sequence; identical to SEQ ID NO: 98705
  derived and/or modified CDS sequence (opt2) from hemagglutinin__InfluenzaA__ACZ16980

SEQ ID NO: 99753 - RNA, 1701 nt, Artificial Sequence; identical to SEQ ID NO: 98705
  derived and/or modified CDS sequence (opt2) from hemagglutinin__InfluenzaA__ACZ17000

SEQ ID NO: 99754 - RNA, 1701 nt, Artificial Sequence
  derived and/or modified CDS sequence (opt2) from hemagglutinin__InfluenzaA__ACZ17010
augaaggccauccucgucguccuccucuacaccuucgccaccgccaacgccgacacccucugcaucggcuaccacgccaacaacuccaccgacaccgucgacaccguccucgagaagaacgucaccgucacccacuccgucaaccuccucgaggacaagcacaacggcaagcucugcaagcuccgcggcgucgccccccuccaccucggcaagugcaacaucgccggcuggauccucggcaaccccgagugcgagucccucuccaccgccuccuccugguccuacaucgucgagaccuccuccuccgacaacggcaccugcuaccccggcgacuucaucgacuacgaggagcuccgcgagcagcucuccuccgucuccuccuucgagcgcuucgagaucuuccccaagaccuccuccuggcccaaccacgacuccaacaagggcgucaccgccgccugcccccacgccggcgccaaguccuucuacaagaaccucaucuggcucgucaagaagggcaacuccuaccccaagcucuccaaguccuacaucaacgacaagggcaaggagguccucguccucuggggcauccaccaccccuccaccuccgccgaccagcagucccucuaccagaacgccgacgccuacgucuucgucggcuccuccaaguacuccaagaaguucaagcccgagaucgccauccgccccaagguccgcgaccaggagggccgcaugaacuacuacuggacccucgucgagcccggcgacaagaucaccuucgaggccaccggcaaccucgucgucccccgcuacgccuucgccauggagcgcaacgccggcuccggcaucaucaucuccgacacccccguccacgacugcaacaccaccugccagacccccaagggcgccaucaacaccucccuccccuuccagaacauccaccccaucaccaucggcaagugccccaaguacgucaaguccaccaagcuccgccucgccaccggccuccgcaacguccccuccauccagucccgcggccucuucggcgccaucgccggcuucaucgagggcggcuggaccggcauggucgacggcugguacggcuaccaccaccagaacgagcagggcuccggcuacgccgccgaccucaaguccacccagaacgccaucgacaagaucaccaacaaggucaacuccgucaucgagaagaugaacacccaguucaccgccgucggcaaggaguucaaccaccucgagaagcgcaucgagaaccucaacaagaaggucgacgacggcuuccucgacaucuggaccuacaacgccgagcuccucguccuccucgagaacgagcgcacccucgacuaccacgacuccaacgucaagaaccucuacgagaagguccgcucccagcucaagaacaacgccaaggagaucggcaacggcugcuucgaguucuaccacaagugcgacaacaccugcauggaguccgucaagaacggcaccuacgacuaccccaaguacuccgaggaggccaagcucaaccgcgaggagaucgacggcgucaagcucgaguccacccgcaucuaccagauccucgccaucuacuccaccgucgccuccucccucguccucgucgucucccucggcgccaucuccuucuggaugugcuccaacggcucccuccagugccgcaucugcaucuga

SEQ ID NO: 99755 - RNA, 1701 nt, Artificial Sequence; identical to SEQ ID NO: 98705
  derived and/or modified CDS sequence (opt2) from hemagglutinin__InfluenzaA__ACZ17020

SEQ ID NO: 99756 - RNA, 1701 nt, Artificial Sequence
  derived and/or modified CDS sequence (opt2) from hemagglutinin__InfluenzaA__ACZ17030
augaaggccacccucgucguccuccucuacaccuucgccaccgccaacgccgacacccucugcaucggcuaccacgccaacaacuccaccgacaccgucgacaccguccucgagaagaacgucaccgucacccacuccgucaaccuccucgaggacaagcacaacggcaagcucugcaagcuccgcggcgucgccccccuccaccucggcaagugcaacaucgccggcuggauccucggcaaccccgagugcgagucccucuccaccgccuccuccugguccuacaucgucgaggccuccuccuccgacaacggcaccugcuaccccggcgacuucaucgacuacgaggagcuccgcgagcagcucuccuccgucuccuccuucgagcgcuucgagaucuuccccaagaccuccuccuggcccaaccacgacuccaacaagggcgucaccgccgccugcccccacgccggcgccaaguccuucuacaagaaccucaucuggcucgucaagaagggcaacuccuaccccaagcucuccaaguccuacaucaacgacaagggcaaggagguccucguccucuggggcauccaccaccccuccaccuccgccgaccagcagucccucuaccagaacgccgacgccuacgucuucgucggcaccucccgcuacuccaagaaguucaagcccgagaucgccauccgccccaagguccgcgaccaggagggccgcaugaacuacuacuggacccucgucgagcccggcgacaagaucaccuucgaggccaccggcaaccucgucgucccccgcuacgccuucgccauggagcgcaacgccggcuccggcaucaucaucuccgacacccccguccacgacugcaacaccaccugccagacccccaagggcgccaucaacaccucccuccccuuccagaacauccaccccaucaccaucggcaagugccccaaguacgucaaguccaccaagcuccgccucgccaccggccuccgcaacguccccuccauccagucccgcggccucuucggcgccaucgccggcuucaucgagggcggcuggaccggcauggucgacggcugguacggcuaccaccaccagaacgagcagggcuccggcuacgccgccgaccucaaguccacccagaacgccaucgacgagaucaccaacaaggucaacuccgucaucgagaagaugaacacccaguucaccgccgucggcaaggaguucaaccaccucgagaagcgcaucgagaaccucaacaagaaggucgacgacggcuuccucgacaucuggaccuacaacgccgagcuccucguccuccucgagaacgagcgcacccucgacuaccacgacuccaacgucaagaaccucuacgagaagguccgcucccagcucaagaacaacgccaaggagaucggcaacggcugcuucgaguucuaccacaagugcgacaacaccugcauggaguccgucaagaacggcaccuacgacuaccccaaguacuccgaggaggccaagcucaaccgcgaggagaucgacggcgucaagcucgaguccacccgcaucuaccagauccucgccaucuacuccaccgucgccuccucccucguccucgucgucucccucggcgccaucuccuucuggaugugcuccaacggcucccuccagugccgcaucugcaucuga

SEQ ID NO: 99757 - RNA, 1701 nt, Artificial Sequence
  derived and/or modified CDS sequence (opt2) from hemagglutinin__InfluenzaA__ACZ17040
augaaggccauccucgucguccuccucuacaccuucgccaccgccaacgccgacacccucugcaucggcuaccacgccaacaacuccaccgacaccgucgacaccguccucgagaagaacgucaccgucacccacuccgucaaccuccucgaggacaagcacaacggcaagcucugcaagcuccgcggcgucgccccccuccaccucggcaagugcaacaucgccggcuggauccucggcaaccccgagugcgagucccucuccaccgccuccuccugguccuacaucgucgagaccuccuccuccgacaacggcaccugcuaccccggcgacuucaucgacuacgaggagcuccgcgagcagcucuccuccgucuccuccuucgagcgcuucgagaucuuccccaagaccuccuccuggcccaaccacgacuccaacaagggcgucaccgccgccugcccccacgccggcgccaaguccuucuacaagaaccucaucuggcucgucaagaagggcaacuccuaccccaagcucuccaaguccuacaucaacgacaagggcaaggagguccucguccucuggggcauccaccaccccuccaccuccgccgaccagcagucccucuaccagaacgccgacgccuacgucuucgucggcaccucccgcuacuccaagaaguucaagcccgagaucgccauccgccccaagguccgcgaccaggagggccgcaugaacuacuacuggacccucgucgagcccggcgacaagaucaccuucgaggccaccggcaaccucgucgucccccgcuacgccuucgccauggagcgcaacgccggcuccggcaucaucaucuccgacacccccguccacgacugcaacaccaccugccagacccccaagggcgccaucaacaccucccuccccuuccagaacauccaccccaucaccaucggcaagugccccaaguacgucaaguccaccaagcuccgccucgccaccggccuccgcaacguccccuccauccagucccgcggccucuucggcgccaucgccggcuucaucgagggcggcuggaccggcauggucgacggcugguacggcuaccaccaccagaacgagcagggcuccggcuacgccgccgaccucaaguccacccagaacgccaucgacgagaucaccaacaaggucaacuccgucaucgagaagaugaacacccaguucaccgccgucggcaaggaguucaaccaccucgagaagcgcaucgagaaccucaacaagaaggucgacgacggcuuccucgacaucuggaccuacaacgccgagcuccucguccuccucgagaacgagcgcacccucgacuaccacgacuccaacgucaagaaccucuacgagaagguccgcucccagcucaagaacaacgccaaggagaucggcaacggcugcuucgaguucuaccacaagugcgacaacaccugcauggaguccgucaagaacggcaccuacgacuaccccaaguacuccaaggaggccaagcucaaccgcgaggagaucgacggcgucaagcucgaguccacccgcaucuaccagauccucgccaucuacuccaccgucgccuccucccucguccucgucgucucccucggcgccaucuccuucuggaugugcuccaacggcucccuccagugccgcaucugcaucuga

SEQ ID NO: 99758 - RNA, 1701 nt, Artificial Sequence; identical to SEQ ID NO: 98705
  derived and/or modified CDS sequence (opt2) from hemagglutinin__InfluenzaA__ACZ17050

SEQ ID NO: 99759 - RNA, 1701 nt, Artificial Sequence; identical to SEQ ID NO: 98705
  derived and/or modified CDS sequence (opt2) from hemagglutinin__InfluenzaA__ACZ17060

SEQ ID NO: 99760 - RNA, 1701 nt, Artificial Sequence; identical to SEQ ID NO: 98705
  derived and/or modified CDS sequence (opt2) from hemagglutinin__InfluenzaA__ACZ17070

SEQ ID NO: 99761 - RNA, 1701 nt, Artificial Sequence; identical to SEQ ID NO: 98885
  derived and/or modified CDS sequence (opt2) from hemagglutinin__InfluenzaA__ACZ17080

SEQ ID NO: 99762 - RNA, 1701 nt, Artificial Sequence
  derived and/or modified CDS sequence (opt2) from hemagglutinin__InfluenzaA__ACZ17090
augaaggccauccucgucguccuccucuacaccuucgccaccgccaacgccgacacccucugcaucggcuaccacgccaacaacuccaccgacaccgucgacaccguccucgagaagaacgucaccgucacccacuccgucaaccuccucggcgacaagcacaacggcaagcucugcaagcuccgcggcgucgccccccuccaccucggcaagugcaacaucgccggcuggauccucggcaaccccgagugcgagucccucuccaccgccuccuccugguccuacaucgucgagaccuccuccuccgacaacggcaccugcuaccccggcgacuucaucgacuacgaggagcuccgcgagcagcucuccuccgucuccuccuucgagcgcuucgagaucuuccccaagaccuccuccuggcccaaccacgacuccaacaagggcgucaccgccgccugcccccacgccggcgccaaguccuucuacaagaaccucaucuggcucgucaagaagggcaacuccuaccccaagcucuccaaguccuacaucaacgacaagggcaaggagguccucguccucuggggcauccaccaccccuccaccuccgccgaccagcagucccucuaccagaacgccgacgccuacgucuucgucggcaccucccgcuacuccaagaaguucaagcccgagaucgccauccgccccaagguccgcgaccaggagggccgcaugaacuacuacuggacccucgucgagcccggcgacaagaucaccuucgaggccaccggcaaccucgucgucccccgcuacgccuucgccauggagcgcaacgccggcuccggcaucaucaucuccgacacccccguccacgacugcaacaccaccugccagacccccaagggcgccaucaacaccucccuccccuuccagaacauccaccccaucaccaucggcaagugccccaaguacgucaaguccaccaagcuccgccucgccaccggccuccgcaacguccccuccauccagucccgcggccucuucggcgccaucgccggcuucaucgagggcggcuggaccggcauggucgacggcugguacggcuaccaccaccagaacgagcagggcuccggcuacgccgccgaccucaaguccacccagaacgccaucgacgagaucaccaacaaggucaacuccgucaucgagaagaugaacacccaguucaccgccgucggcaaggaguucaaccaccucgagaagcgcaucgagaaccucaacaagaaggucgacgacggcuuccucgacaucuggaccuacaacgccgagcuccucguccuccucgagaacgagcgcacccucgacuaccacgacuccaacgucaagaaccucuacgagaaggucaagucccagcucaagaacaacgccaaggagaucggcaacggcugcuucgaguucuaccacaagugcgacaacaccugcauggaguccgucaagaacggcaccuacgacuaccccaaguacuccgaggaggccaagcucaaccgcgaggagaucgacggcgucaagcucgaguccacccgcaucuaccagauccucgccaucuacuccaccgucgccuccucccucguccucgucgucucccucggcgccaucuccuucuggaugugcuccaacggcucccuccagugccgcaucugcaucuga

SEQ ID NO: 99763 - RNA, 1701 nt, Artificial Sequence; identical to SEQ ID NO: 98692
  derived and/or modified CDS sequence (opt2) from hemagglutinin__InfluenzaA__ACZ17100

SEQ ID NO: 99764 - RNA, 1701 nt, Artificial Sequence
  derived and/or modified CDS sequence (opt2) from hemagglutinin__InfluenzaA__ACZ17110
augaaggccauccucgucguccuccucuacaccuucgccaccgccaacgccgacacccucugcaucggcuaccacgccaacaacuccaccgacaccgucgacaccguccucgagaagaacgucaccgucacccacuccgucaaccuccucgaggacaagcacaacggcaagcucugcaagcuccgcggcgucgccccccuccaccucggcaagugcaacaucgccggcuggauccucggcaaccccgagugcgagucccucuccaccgccuccuccugguccuacaucgucgagaccuccuccuccgacaacggcaccugcuaccccggcgacuucaucgacuacgaggagcuccgcgagcagcucuccuccgucuccuccuucgagcgcuucgagaucuuccccaagaccuccuccuggcccaaccacgacuccaacaagggcgucaccgccgccugcccccacgccggcgccaaguccuucuacaagaaccucaucuggcucgucaagaagggcaacuccuaccccgagcucuccaaguccuacaucaacgacaagggcaaggagguccucguccucuggggcauccaccaccccuccaccuccgccgaccagcagucccucuaccagaacgccgacgccuacgucuucgucggcaccucccgcuacuccaagaaguucaagcccgagaucgccauccgccccaagguccgcgaccaggagggccgcaugaacuacuacuggacccucgucgagcccggcgacaagaucaccuucgaggccaccggcaaccucgucgucccccgcuacgccuucgccauggagcgcaacgccggcuccggcaucaucaucuccgacacccccguccacgacugcaacaccaccugccagacccccaagggcgccaucaacaccucccuccccuuccagaacauccaccccaucaccaucggcaagugccccaaguacgucaaguccaccaagcuccgccucgccaccggccuccgcaacguccccuccauccagucccgcggccucuucggcgccaucgccggcuucaucgagggcggcuggaccggcauggucgacggcugguacggcuaccaccaccagaacgagcagggcuccggcuacgccgccgaccucaaguccacccagaacgccaucgacgagaucaccaacaaggucaacuccgucaucgagaagaugaacacccaguucaccgccgucggcaaggaguucaaccaccucgagaagcgcaucgagaaccucaacaagaaggucgacgacggcuuccucgacaucuggaccuacaacgccgagcuccucguccuccucgagaacgagcgcacccucgacuaccacgacuccaacgucaagaaccucuacgagaagguccgcucccagcucaagaacaacgccaaggagaucggcaacggcugcuucgaguucuaccacaagugcgacaacaccugcauggaguccgucaagaacggcaccuacgacuaccccaaguacuccgaggaggccaagcucaaccgcgaggagaucgacggcgucaagcucgaguccacccgcaucuaccagauccucgccaucuacuccaccgucgccuccucccucguccucgucgucucccucggcgccaucuccuucuggaugugcuccaacggcucccuccagugccgcaucugcaucuga

SEQ ID NO: 99765 - RNA, 1701 nt, Artificial Sequence
  derived and/or modified CDS sequence (opt2) from hemagglutinin__InfluenzaA__ACZ17120
augaaggccauccucgucguccuccucuacaccuucgccaccgccaacgccgacacccucugcaucggcuaccacgccaacaacuccaccgacaccgucgacaccguccucgagaagaacgucaccgucacccacuccgucaaccuccucgaggacaagcacaacggcaagcucugcaagcuccgcggcgucgccccccuccaccucggcaagugcaacaucgccggcuggauccucggcaaccccgagugcgagucccucuccaccgccuccuccugguccuacaucgucgagaccuccuccuccgacaacggcaccugcuaccccggcgacuucaucgacuacgaggagcuccgcgagcagcucuccuccgucuccuccuucgagcgcuucgagaucuuccccaagaccuccuccuggcccaaccacgacuccaacaagggcgucaccgccgccugcccccacgccggcgccaaguccuucuacaagaaccucaucuggcucgucaagaagggcaacuccuaccccaagcucuccaaguccuacaucaacgacaagggcaaggagguccucguccucuggggcauccaccaccccuccaccuccgccgaccagcagucccucuaccagaacgccgacgccuacgucuucgucggcaccucccgcuacuccaagaaguucaagcccgagaucgccauccgccccaagguccgcgaccaggagggccgcaugaacuacuacuggacccucgucgagcccggcgacaagaucaccuucgaggccaccggcaaccucgucgucccccgcuacgccuucgccauggagcgcaacgccggcuccggcaucaucaucuccgacacccccguccacgacugcaacaccaccugccagacccccaagggcgccaucaacaccucccuccccuuccagaacauccaccccaucaccaucggcaagugccccaaguacgucaaguccaccaagcuccgccucgccaccggccuccgcaacguccccuccauccagucccgcggccucuucggcgccaucgccggcuucaucgagggcggcuggaccggcauggucgacggcugguacggcuaccaccaccagaacgagcagggcuccggcuacgccgccgaccucaaguccacccagaacgccaucgacgagaucaccaacaaggucaacuccgucaucgagaagaugaacacccaguucaccgccgucggcaaggaguucaaccaccucgagaagcgcaucgagaaccucaacaagaaggucgacgacggcuuccucgacaucuggaccuacaacgccgagcuccucguccuccucgagaacgagcgcacccucgacuaccacgacuccaacgucaagaaccucuacgagaagguccgcucccagcucaagaccaacgccaaggagaucggcaacggcugcuucgaguucuaccacaagugcgacaacaccugcauggaguccgucaagaacggcaccuacgacuaccccaaguacuccgaggaggccaagcucaaccgcgaggagaucgacggcgucaagcucgaguccacccgcaucuaccagauccucgccaucuacuccaccgucgccuccucccucguccucgucgucucccucggcgccaucuccuucuggaugugcuccaacggcucccuccagugccgcaucugcaucuga

SEQ ID NO: 99766 - RNA, 1701 nt, Artificial Sequence
  derived and/or modified CDS sequence (opt2) from hemagglutinin__InfluenzaA__ACZ17130
augaaggccauccucgucguccuccucuacaccuucgccaccgccaacgccgacacccucugcaucggcuaccacgccaacaacuccaccgacaccgucgacaccguccucgagaagaacgucaccgucacccacuccgucaaccuccucgaggacaagcacaacggcaagcucugcaagcuccgcggcgucgccccccuccaccucggcaagugcaacaucgccggcuggauccucggcaaccccgagugcgagucccucuccaccgccuccuccugguccuacaucgucgagaccuccuccuccgacaacggcaccugcuaccccggcgacuucaucgacuacgaggagcuccgcgagcagcucuccuccgucuccuccuucgagcgcuucgagaucuuccccaagaccuccuccuggcccaaccacgacuccaacaagggcgucaccgccgccugcccccacgccggcgccaaguccuucuacaagaaccucaucuggcucgucaagaagggcaacuccuaccccaagcucuccaaguccuacaucaacgacaagggcaaggagguccucguccucuggggcauccaccaccccuccaccuccgccgaccagcagucccucuaccagaacgccgacgccuacgucuucgucggcaccucccgcuacuccaagaaguucaagcccgagaucgccauccgccccaagguccgcgaccaggagggccgcaugaacuacuacuggacccucgucgagcccggcgacaagaucaccuucgaggccaccggcaaccucgucgucccccgcuacgccuucgccauggagcgcaacgccggcuccggcaucaucaucuccgacacccccguccacgacugcaacaccaccugccagacccccaagggcgccaucaacaccucccuccccuuccagaacauccaccccaucaccaucggcaagugccccaaguacgucaaguccaccaagcuccgccucgccaccggccuccgcaacguccccuccauccagucccgcggccucuucggcgccaucgccggcuucaucgagggcggcuggaccggcauggucgacggcugguacggcuaccaccaccagaacgagcagggcuccggcuacgccgccgaccucaaguccacccagaacgccaucgacgagaucaccaacaaggucaacuccgucaucgagaagaugaacgcccaguucaccgccgucggcaaggaguucaaccaccucgagaagcgcaucgagaaccucaacaagaaggucgacgacggcuuccucgacaucuggaccuacaacgccgagcuccucguccuccucgagaacgagcgcacccucgacuaccacgacuccaacgucaagaaccucuacgagaagguccgcucccagcucaagaacaacgccaaggagaucggcaacggcugcuucgaguucuaccacaagugcgacaacaccugcauggaguccgucaagaacggcaccuacgacuaccccaaguacuccgaggaggccaagcucaaccgcgaggagaucgacggcgucaagcucgaguccacccgcaucuaccagauccucgccaucuacuccaccgucgccuccucccucguccucgucgucucccucggcgccaucuccuucuggaugugcuccaacggcucccuccagugccgcaucugcaucuga

SEQ ID NO: 99767 - RNA, 1701 nt, Artificial Sequence; identical to SEQ ID NO: 99503
  derived and/or modified CDS sequence (opt2) from hemagglutinin__InfluenzaA__ACZ17140

SEQ ID NO: 99768 - RNA, 1701 nt, Artificial Sequence; identical to SEQ ID NO: 99334
  derived and/or modified CDS sequence (opt2) from hemagglutinin__InfluenzaA__ACZ17150

SEQ ID NO: 99769 - RNA, 1701 nt, Artificial Sequence; identical to SEQ ID NO: 99334
  derived and/or modified CDS sequence (opt2) from hemagglutinin__InfluenzaA__ACZ17160

SEQ ID NO: 99770 - RNA, 1701 nt, Artificial Sequence; identical to SEQ ID NO: 99334
  derived and/or modified CDS sequence (opt2) from hemagglutinin__InfluenzaA__ACZ17170

SEQ ID NO: 99771 - RNA, 1701 nt, Artificial Sequence
  derived and/or modified CDS sequence (opt2) from hemagglutinin__InfluenzaA__ACZ17190
augaaggccauccucgucguccuccucuacaccuucgccaccgccaacgccgacacccucugcaucggcuaccacgccaacaacuccaccgacaccgucgacaccguccucgagaagaacgucaccgucacccacuccgucaaccuccucgaggacaagcacaacggcaagcucugcaagcuccgcggcgucgccccccuccaccucggcaagugcaacaucgccggcuggauccucggcaaccccgagugcgagucccucuccaccgccuccuccugguccuacaucgucgagaccuccuccuccgacaacggcaccugcuaccccggcgacuucaucgacuacgaggagcuccgcgagcagcucuccuccgucuccuccuucgagcgcuucgagaucuuccccaagaccuccuccuggcccaaccacgacuccaacaagggcgucaccgccgccugcccccacgccggcgccaaguccuucuacaagaaccucaucuggcucgucaagaagggcaacuccuaccccaagcucuccaaguccuacaucaacgacaagggcaaggagguccucguccucuggggcauccaccaccccuccaccuccgccgaccagcagucccucuaccagaacgccgacgccuacgucuucgucggcaccucccgcuacuccaagaaguucaagcccgagaucgccauccgccccaagguccgcgaccaggagggccgcaugaacuacuacuggacccucgucgagcccggcgacaagaucaccuucgaggccaccggcaaccucgucgucccccgcuacgccuucgccauggagcgcaacgccggcuccggcaucaucaucuccgacacccccguccacgacugcuccaccaccugccagacccccgagggcgccaucaacaccucccuccccuuccagaacauccaccccaucaccaucggcaagugccccaaguacgucaaguccaccaagcuccgccucgccaccggccuccgcaacguccccuccauccagucccgcggccucuucggcgccaucgccggcuucaucgagggcggcuggaccggcauggucgacggcugguacggcuaccaccaccagaacgagcagggcuccggcuacgccgccgaccucaaguccacccagaacgccaucgacgagaucaccaacaaggucaacuccgucaucgagaagaugaacacccaguucaccgccgucggcaaggaguucaaccaccucgagaagcgcaucgagaaccucaacaagaaggucgacgacggcuuccucgacaucuggaccuacaacgccgagcuccucguccuccucgagaacgagcgcacccucgacuaccacgacuccaacgucaagaaccucuacgagaagguccgcucccagcucaagaacaacgccaaggagaucggcaacggcugcuucgaguucuaccacaagugcgacaacaccugcauggaguccgucaagaacggcaccuacgacuaccccaaguacuccgaggaggccaagcucaaccgcgaggagaucgacggcgucaagcucgaguccacccgcaucuaccagauccucgccaucuacuccaccgucgccuccucccucguccucgucgucucccucggcgccaucuccuucuggaugugcuccaacggcucccuccagugccgcaucugcaucuga

SEQ ID NO: 99772 - RNA, 1701 nt, Artificial Sequence; identical to SEQ ID NO: 99771
  derived and/or modified CDS sequence (opt2) from hemagglutinin__InfluenzaA__ACZ17200

SEQ ID NO: 99773 - RNA, 1701 nt, Artificial Sequence; identical to SEQ ID NO: 98705
  derived and/or modified CDS sequence (opt2) from hemagglutinin__InfluenzaA__ACZ17220

SEQ ID NO: 99774 - RNA, 1701 nt, Artificial Sequence
  derived and/or modified CDS sequence (opt2) from hemagglutinin__InfluenzaA__ACZ17230
augaaggccauccucgucguccuccucuacaccuucgccaccgccaacgccgacacccucugcaucggcuaccacgccaacaacuccaccgacaccgucgacaccguccucgagaagaacgucaccgucacccacuccgucaaccuccucgaggacaagcacaacggcaagcucugcaagcuccgcggcgucgccccccuccaccucggcaagugcaacaucgccggcuggauccucggcaaccccgagugcgagucccucuccaccgccuccuccugguccuacaucgucgagaccuccuccuccgacaacggcaccugcuaccccggcgacuucaucgacuacgaggagcucaaggagcagcucuccuccgucuccuccuucgagcgcuucgagaucuuccccaagaccuccuccuggcccaaccacgacuccaacaagggcgucaccgccgccugcccccacgccggcgccaaguccuucuacaagaaccucaucuggcucgucaagaagggcaacuccuaccccaagcucuccaaguccuacaucaacgacaagggcaaggagguccucguccucuggggcauccaccaccccuccaccuccgccgaccagcagucccucuaccagaacgccgacgccuacgucuucgucggcaccucccgcuacuccaagaaguucaagcccgagaucgccauccgccccaagguccgcgaccaggagggccgcaugaacuacuacuggacccucgucgagcccggcgacaagaucaccuucgaggccaccggcaaccucgucgucccccgcuacgccuucgccauggagcgcaacgccggcuccggcaucaucaucuccgacacccccguccacgacugcaacaccaccugccagacccccaagggcgccaucaacaccucccuccccuuccagaacauccaccccaucaccaucggcaagugccccaaguacgucaaguccaccaagcuccgccucgccaccggccuccgcaacguccccuccauccagucccgcggccucuucggcgccaucgccggcuucaucgagggcggcuggaccggcauggucgacggcugguacggcuaccaccaccagaacgagcagggcuccggcuacgccgccgaccucaaguccacccagaacgccaucgacgagaucaccaacaaggucaacuccgucaucgagaagaugaacacccaguucaccgccgucggcaaggaguucaaccaccucgagaagcgcaucgagaaccucaacaagaaggucgacgacggcuuccucgacaucuggaccuacaacgccgagcuccucguccuccucgagaacgagcgcacccucgacuaccacgacuccaacgucaagaaccucuacgagaagguccgcucccagcucaagaacaacgccaaggagaucggcaacggcugcuucgaguucuaccacaagugcgacaacaccugcauggaguccgucaagaacggcaccuacgacuaccccaaguacuccgaggaggccaagcucaaccgcgaggagaucgacggcgucaagcucgaguccacccgcaucuaccagauccucgccaucuacuccaccgucgccuccucccucguccucgucgucucccucggcgccaucuccuucuggaugugcuccaacggcucccuccagugccgcaucugcaucuga

SEQ ID NO: 99775 - RNA, 1701 nt, Artificial Sequence; identical to SEQ ID NO: 98705
  derived and/or modified CDS sequence (opt2) from hemagglutinin__InfluenzaA__ACZ17240

SEQ ID NO: 99776 - RNA, 1701 nt, Artificial Sequence; identical to SEQ ID NO: 98705
  derived and/or modified CDS sequence (opt2) from hemagglutinin__InfluenzaA__ACZ17250

SEQ ID NO: 99777 - RNA, 1701 nt, Artificial Sequence; identical to SEQ ID NO: 98705
  derived and/or modified CDS sequence (opt2) from hemagglutinin__InfluenzaA__ACZ17260

SEQ ID NO: 99778 - RNA, 1701 nt, Artificial Sequence
  derived and/or modified CDS sequence (opt2) from hemagglutinin__InfluenzaA__ACZ17270
augaaggccauccucgucguccuccucuacaccuucgccaccgccaacgccgacacccucugcaucggcuaccacgccaacaacuccaccgacaccgucgacaccguccucgagaagaacgucaccgucacccacuccgucaaccuccucgaggacaagcacaacggcaagcucugcaagcuccgcggcgucgccccccuccaccucggccgcugcaacaucgccggcuggauccucggcaaccccgagugcgagucccucuccaccgccuccuccugguccuacaucgucgagaccuccuccuccgacaacggcaccugcuaccccggcgacuucaucgacuacgaggagcuccgcgagcagcucuccuccgucuccuccuucgagcgcuucgagaucuuccccaagaccuccuccuggcccaaccacgacuccaacaagggcgucaccgccgccugcccccacgccggcgccaaguccuucuacaagaaccucaucuggcucgucaagaagggcaacuccuaccccaagcucuccaaguccuacaucaacgacaagggcaaggagguccucguccucuggggcauccaccaccccuccaccuccgccgaccagcagucccucuaccagaacgccgacgccuacgucuucgucggcaccucccgcuacuccaagaaguucaagcccgagaucgccauccgccccaagguccgcgaccaggagggccgcaugaacuacuacuggacccucgucgagcccggcgacaagaucaccuucgaggccaccggcaaccucgucgucccccgcuacgccuucgccauggagcgcaacgccggcuccggcaucaucaucuccgacacccccguccacgacugcaacaccaccugccagacccccaagggcgccaucaacaccucccuccccuuccagaacauccaccccaucaccaucggcaagugccccaaguacgucaaguccaccaagcuccgccucgccaccggccuccgcaacguccccuccauccagucccgcggccucuucggcgccaucgccggcuucaucgagggcggcuggaccggcauggucgacggcugguacggcuaccaccaccagaacgagcagggcuccggcuacgccgccgaccucaaguccacccagaacgccaucgacgagaucaccaacaaggucaacuccgucaucgagaagaugaacacccaguucaccgccgucggcaaggaguucaaccaccucgagaagcgcaucgagaaccucaacaagaaggucgacgacggcuuccucgacaucuggaccuacaacgccgagcuccucguccuccucgagaacgagcgcacccucgacuaccacgacuccaacgucaagaagcucuacgagaagguccgcucccagcucaagaacaacgccaaggagaucggcaacggcugcuucgaguucuaccacaagugcgacaacaccugcauggaguccgucaagaacggcaccuacgacuaccccaaguacuccgaggaggccaagcucaaccgcgaggagaucgacggcgucaagcucgaguccacccgcgucuaccagauccucgccaucuacuccaccgucgccuccucccucguccucgucgucucccucggcgccaucuccuucuggaugugcuccaacggcucccuccagugccgcaucugcaucuga

SEQ ID NO: 99779 - RNA, 1701 nt, Artificial Sequence; identical to SEQ ID NO: 98885
  derived and/or modified CDS sequence (opt2) from hemagglutinin__InfluenzaA__ACZ17290

SEQ ID NO: 99780 - RNA, 1701 nt, Artificial Sequence; identical to SEQ ID NO: 98885
  derived and/or modified CDS sequence (opt2) from hemagglutinin__InfluenzaA__ACZ17300

SEQ ID NO: 99781 - RNA, 1701 nt, Artificial Sequence; identical to SEQ ID NO: 98885
  derived and/or modified CDS sequence (opt2) from hemagglutinin__InfluenzaA__ACZ17310

SEQ ID NO: 99782 - RNA, 1701 nt, Artificial Sequence; identical to SEQ ID NO: 98705
  derived and/or modified CDS sequence (opt2) from hemagglutinin__InfluenzaA__ACZ17398

SEQ ID NO: 99783 - RNA, 1701 nt, Artificial Sequence; identical to SEQ ID NO: 98705
  derived and/or modified CDS sequence (opt2) from hemagglutinin__InfluenzaA__ACZ17408

SEQ ID NO: 99784 - RNA, 1701 nt, Artificial Sequence; identical to SEQ ID NO: 98705
  derived and/or modified CDS sequence (opt2) from hemagglutinin__InfluenzaA__ACZ17418

SEQ ID NO: 99785 - RNA, 1701 nt, Artificial Sequence
  derived and/or modified CDS sequence (opt2) from hemagglutinin__InfluenzaA__ACZ17438
augaaggccauccucgucguccuccucuacaccuucgccaccgccaacgccgacacccucugcaucggcuaccacgccaacaacuccaccgacaccgucgacaccguccucgagaagaacgucaccgucacccacuccgucaaccuccucgaggacaagcacaacggcaagcucugcaagcuccgcggcgucgccccccuccaccucggcaagugcaacaucgccggcuggauccucggcaaccccgagugcgagucccucuccaccgccuccuccugguccuacaucgucgagaccuccuccuccgacaacggcaccugcuaccccggcgacuucaucgacuacgaggagcuccgcgagcagcucuccuccgucuccuccuucgagcgcuucgagaucuuccccaagaccuccuccuggcccaaccacgacuccaacaagggcgucaccgccgccugcccccacgccggcgccaaguccuucuacaagaaccucaucuggcucgucaagaagggcaacuccuaccccaagcucuccaaguccuacaucaacgacaagggcaaggagguccucguccucuggggcauccaccaccccuccaccuccgccgaccagcagucccucuaccagaacgccgacuccuacgucuucgucggcuccucccgcuacuccaagaaguucaagcccgagaucgccauccgccccaagguccgcgaccaggagggccgcaugaacuacuacuggacccucgucgagcccggcgacaagaucaccuucgaggccaccggcaaccucgucgucccccgcuacgccuucgccauggagcgcaacgccggcuccggcaucaucaucuccgacacccccguccacgacugcaacaccaccugccagacccccaagggcgccaucaacaccucccuccccuuccagaacauccaccccaucaccaucggcaagugccccaaguacgucaaguccaccaagcuccgccucgccaccggccuccgcaacguccccuccauccagucccgcggccucuucggcgccaucgccggcuucaucgagggcggcuggaccggcauggucgacggcugguacggcuaccaccaccagaacgagcagggcuccggcuacgccgccgaccucaaguccacccagaacgccaucgacgagaucaccaacaaggucaacuccgucaucgagaagaugaacacccaguucaccgccgucggcaaggaguucaaccaccucgagaagcgcaucgagaaccucaacaagaaggucgacgacggcuuccucgacaucuggaccuacaacgccgagcuccucguccuccucgagaacgagcgcacccucgacuaccacgacuccaacgucaagaaccucuacgagaagguccgcucccagcucaagaacaacgccaaggagaucggcaacggcugcuucgaguucuaccacaagugcgacaacaccugcauggaguccgucaagaacggcaccuacgacuaccccaaguacuccgaggaggccaagcucaaccgcgaggagaucgacggcgucaagcucgaguccacccgcaucuaccagauccucgccaucuacuccaccgucgccuccucccucguccucgucgucucccucggcgccaucuccuucuggaugugcuccaacggcucccuccagugccgcaucugcaucuga

SEQ ID NO: 99786 - RNA, 1701 nt, Artificial Sequence; identical to SEQ ID NO: 98692
  derived and/or modified CDS sequence (opt2) from hemagglutinin__InfluenzaA__ACZ17448

SEQ ID NO: 99787 - RNA, 1701 nt, Artificial Sequence; identical to SEQ ID NO: 98705
  derived and/or modified CDS sequence (opt2) from hemagglutinin__InfluenzaA__ACZ17458

SEQ ID NO: 99788 - RNA, 1701 nt, Artificial Sequence; identical to SEQ ID NO: 98692
  derived and/or modified CDS sequence (opt2) from hemagglutinin__InfluenzaA__ACZ17478

SEQ ID NO: 99789 - RNA, 1701 nt, Artificial Sequence; identical to SEQ ID NO: 98705
  derived and/or modified CDS sequence (opt2) from hemagglutinin__InfluenzaA__ACZ17488

SEQ ID NO: 99790 - RNA, 1701 nt, Artificial Sequence
  derived and/or modified CDS sequence (opt2) from hemagglutinin__InfluenzaA__ACZ18240
augaaggccauccucgucguccuccucuacaccuucgccaccgccaacgccgacacccucugcaucggcuaccacgccaacaacuccaccgacaccgucgacaccguccucgagaagaacgucaccgucacccacuccgucaaccuccucgaggacaagcacaacggcaagcucugcaagcuccgcggcgucgccccccuccaccucggcaagugcaacaucgccggcuggauccucggcaaccccgagugcgagucccucuccaccaccuccuccugguccuacaucgucgagaccuccuccuccgacaacggcaccugcuaccccggcgacuucaucgacuacgaggagcuccgcgagcagcucuccuccgucuccuccuucgagcgcuucgagaucuuccccaagaccuccuccuggcccaaccacgaccccaacaagggcgucaccgccgccugcccccacgccggcgccaaguccuucuacaagaaccucaucuggcucgucaagaagggcaacuccuaccccaagcucuccaaguccuacaucaacgacaagggcaaggagguccucguccucuggggcauccaccaccccuccaccuccgccgaccagcagucccucuaccagaacgccgacgccuacgucuucgucggcaccucccgcuacuccaagaaguucaagcccgagaucgccauccgccccaagguccgcgaccaggagggccgcaugaacuacuacuggacccucgucgagcccggcgacaagaucaccuucgaggccaccggcaaccucgucgucccccgcuacgccuucgccauggagcgcaacgccggcuccggcaucaucaucuccgacacccccguccacgacugcaacaccaccugccagacccccaagggcgccaucaacaccucccuccccuuccagaacauccaccccaucaccaucggcaagugccccaaguacgucaaguccaccaagcuccgccucgccaccggccuccgcaacguccccuccauccagucccgcggccucuucggcgccaucgccggcuucaucgagggcggcuggaccggcauggucgacggcugguacggcuaccaccaccagaacgagcagggcuccggcuacgccgccgaccucaaguccacccagaacgccaucgacgagaucaccaacaaggucaacuccgucaucgagaagaugaacacccaguucaccgccgucggcaaggaguucaaccaccucgagaagcgcaucgagaaccucaacaagaaggucgacgacggcuuccucgacaucuggaccuacaacgccgagcuccucguccuccucgagaacgagcgcacccucgacuaccacgacuccaacgucaagaaccucuacgagaagguccgcucccagcucaagaacaacgccaaggagaucggcaacggcugcuucgaguucuaccacaagugcgacaacaccugcauggaguccgucaagaacggcaccuacgacuaccccaaguacuccgaggaggccaagcucaaccgcgaggagaucgacggcgucaagcucgaguccacccgcaucuaccagauccucgccaucuacuccaccgucgccuccucccucguccucgucgucucccucggcgccaucuccuucuggaugugcuccaacggcucccuccagugccgcaucugcaucuga

SEQ ID NO: 99791 - RNA, 1701 nt, Artificial Sequence; identical to SEQ ID NO: 98705
  derived and/or modified CDS sequence (opt2) from hemagglutinin__InfluenzaA__ACZ18241

SEQ ID NO: 99792 - RNA, 1701 nt, Artificial Sequence
  derived and/or modified CDS sequence (opt2) from hemagglutinin__InfluenzaA__ACZ27800
augaaggccauccucgucguccuccucuacaccuucgccaccgccaacgccgacacccucugcaucggcuaccacgccaacaacuccaccgacaccgucgacaccguccucgagaagaacgucaccgucacccacuccgucaaccuccucgaggacaagcacaacggcaagcucugcaagcuccgcggcgucgccccccuccaccucggcaagugcaacaucgccggcuggauccucggcaaccccgagugcgagucccucuccaccgccuccuccugguccuacaucgucgagaccuccuccuccgacaacggcaccugcuaccccggcgacuucaucgacuacgaggagcuccgcgagcagcucuccuccgucuccuccuucgagcgcuucgagaucuuccccaagaccuccuccuggcccaaccacgacuccaacaagggcgucaccgccgccugcccccacgccggcgccaaguccuucuacaagaaccucaucuggcucgucaagaagggcaacuccuaccccaagcucuccaaguccuacaucaacgacaagggcaaggagguccucguccucuggggcauccaccaccccuccaccuccgccgaccagcagucccucuaccagaacgccgacgccuacgucuucgucggcuccucccgcuacuccaaggaguucaagcccgagaucgccauccgccccaagguccgcggccaggagggccgcaugaacuacuacuggacccucgucgagcccggcgacaagaucaccuucgaggccaccggcaaccucgucgucccccgcuacgccuucgccauggagcgcaacgccggcuccggcaucaucaucuccgacacccccguccacgacugcaacaccaccugccagacccccaagggcgccaucaacaccucccuccccuuccagaacauccaccccaucaccaucggcaagugccccaaguacgucaaguccaccaagcuccgccucgccaccggccuccgcaacguccccuccauccagucccgcggccucuucggcgccaucgccggcuucaucgagggcggcuggaccggcauggucgacggcugguacggcuaccaccaccagaacgagcagggcuccggcuacgccgccgaccucaaguccacccagaacgccaucgacgagaucaccaacaaggucaacuccgucaucgagaagaugaacacccaguucaccgccgucggcaaggaguucaaccaccucgagaagcgcaucgagaaccucaacaagaaggucgacgacggcuuccucgacaucuggaccuacaacgccgagcuccucguccuccucgagaacgagcgcacccucgacuaccacgacuccaacgucaagaaccucuacgagaagguccgcucccagcucaagaacaacgccaaggagaucggcaacggcugcuucgaguucuaccacaagugcgacaacaccugcauggaguccgucaagaacggcaccuacgacuaccccaaguacuccgaggaggccaagcucaaccgcgaggagaucgacggcgucaagcucgaguccacccgcaucuaccagauccucgccaucuacuccaccgucgccuccucccucguccucgucgucucccucggcgccaucuccuucuggaugugcuccaacggcucccuccagugccgcaucugcaucuga

SEQ ID NO: 99793 - RNA, 1701 nt, Artificial Sequence; identical to SEQ ID NO: 98705
  derived and/or modified CDS sequence (opt2) from hemagglutinin__InfluenzaA__ACZ27810

SEQ ID NO: 99794 - RNA, 1701 nt, Artificial Sequence; identical to SEQ ID NO: 98705
  derived and/or modified CDS sequence (opt2) from hemagglutinin__InfluenzaA__ACZ27820

SEQ ID NO: 99795 - RNA, 1701 nt, Artificial Sequence; identical to SEQ ID NO: 98705
  derived and/or modified CDS sequence (opt2) from hemagglutinin__InfluenzaA__ACZ27830

SEQ ID NO: 99796 - RNA, 1701 nt, Artificial Sequence; identical to SEQ ID NO: 99058
  derived and/or modified CDS sequence (opt2) from hemagglutinin__InfluenzaA__ACZ27840

SEQ ID NO: 99797 - RNA, 1701 nt, Artificial Sequence; identical to SEQ ID NO: 98692
  derived and/or modified CDS sequence (opt2) from hemagglutinin__InfluenzaA__ACZ45006

SEQ ID NO: 99798 - RNA, 1701 nt, Artificial Sequence
  derived and/or modified CDS sequence (opt2) from hemagglutinin__InfluenzaA__ACZ45007
augaaggccauccucgucguccuccucuacaccuucgccaccgccaacgccgacacccucugcaucggcuaccacgccaacaacuccaccgacaccgucgacaccguccucgagaagaacgucaccgucacccacuccgucaaccuccucgaggacaagcacaacggcaagcucugcaagcuccgcggcgucgccccccuccaccucggcaagugcaacaucgccggcuggauccucggcaaccccgagugcgagucccucuccaccgccuccuccugguccuacaucgucgagaccuccuccuccgacaacggcaccugcuaccccggcgacuucaucgacuacgaggagcuccgcgagcagcucuccuccgucuccuccuucgagcgcuucgagaucuuccccaagaccuccuccuggcccaaccacgacuccaacaagggcgucaccgccgccugcccccacgccggcgccaaguccuucuacaagaaccucaucuggcucgucaagaagggcaacuccuaccccaagcucuccaaguccuacaucaacgacaagggcaaggagguccucguccucuggggcauccaccaccccuccaccuccgccgaccagcagucccucuaccagaacgccgacgccuacgucuucgucggcaccucccgcuacuccaagaaguucaagcccgagaucgccauccgccccaagguccgcgaccaggagggccgcaugaacuacuacuggacccucgucgagcccggcgacaagaucaccuucgaggccaccggcaaccucgucgucccccgcuacgccuucgccauggagcgcaacgccggcuccggcaucaucaucuccgacacccccguccacgacugcaacaccaccugccagacccccaagggcgccaucaacaccucccuccccuuccagaacauccaccccaucaccaucggcaagugccccaaguacgucaaguccaccaagcuccgccucgccaccggccuccgcaacguccccuccauccagucccgcggccucuucggcgccaucgccggcuucaucgagggcggcuggaccggcauggucgacggcugguacggcuaccaccaccagaacgagcagggcuccggcgacgccgccgaccucaaguccacccagaacgccaucgacgagaucaccaacaaggucaacuccgucaucgagaagaugaacacccaguucaccgccgucggcaaggaguucaaccaccucgagaagcgcaucgagaaccucaacaagaaggucgacgacggcuuccucgacaucuggaccuacaacgccgagcuccucguccuccucgagaacgagcgcacccucgacuaccacgacuccaacgucaagaaccucuacgagaagguccgcucccagcucaagaacaacgccaaggagaucggcaacggcugcuucgaguucuaccacaagugcgacaacaccugcauggaguccgucaagaacggcaccuacgacuaccccaaguacuccgaggaggccaagcucaaccgcgaggagaucgacggcgucaagcucgaguccacccgcaucuaccagauccucgccaucuacuccaccgucgccuccucccucguccucgucgucucccucggcgccaucuccuucuggaugugcuccaacggcucccuccagugccgcaucugcaucuga

SEQ ID NO: 99799 - RNA, 1701 nt, Artificial Sequence; identical to SEQ ID NO: 99058
  derived and/or modified CDS sequence (opt2) from hemagglutinin__InfluenzaA__ACZ45008

SEQ ID NO: 99800 - RNA, 1701 nt, Artificial Sequence; identical to SEQ ID NO: 99058
  derived and/or modified CDS sequence (opt2) from hemagglutinin__InfluenzaA__ACZ45009

SEQ ID NO: 99801 - RNA, 1701 nt, Artificial Sequence; identical to SEQ ID NO: 98947
  derived and/or modified CDS sequence (opt2) from hemagglutinin__InfluenzaA__ACZ45010

SEQ ID NO: 99802 - RNA, 1701 nt, Artificial Sequence; identical to SEQ ID NO: 98705
  derived and/or modified CDS sequence (opt2) from hemagglutinin__InfluenzaA__ACZ45012

SEQ ID NO: 99803 - RNA, 1701 nt, Artificial Sequence
  derived and/or modified CDS sequence (opt2) from hemagglutinin__InfluenzaA__ACZ45013
augaaggccauccucgucguccuccucuacaccuucgccaccgccaacgccgacacccucugcaucggcuaccacgccaacaacuccaccgacaccgucgacaccguccucgagaagaacgucaccgucacccacuccgucaaccuccucgaggacaagcacaacggcaagcucugcaagcuccgcggcgucgccccccuccaccucggcaagugcaacaucgccggcuggauccucggcaaccccgagugcgagucccucuccaccgccuccuccugguccuacaucgucgagaccuccuccuccgacaacggcaccugcuaccccggcgacuucaucgacuacgaggagcuccgcgagcagcucuccuccgucuccuccuucgagcgcuucgagaucuuccccaagaccuccuccuggcccaaccacgacuccuccaagggcgucaccgccgccugcccccacgccggcgccaaguccuucuacaagaaccucaucuggcucgucaagaagggcaacuccuaccccaagcucuccaaguccuacaucaacgacaagggcaaggagguccucguccucuggggcauccaccaccccuccaccuccgccgaccagcagucccucuaccagaacgccgacgccuacgucuucgucggcaccucccgcuacuccaagaaguucaagcccgagaucgccauccgccccaagguccgcgagcaggagggccgcaugaacuacuacuggacccucgucgagcccggcgacaagaucaccuucgaggccaccggcaaccucgucgucccccgcuacgccuucgccauggagcgcaacgccggcuccggcaucaucaucuccgacacccccguccacgacugcaacaccaccugccagacccccaagggcgccaucaacaccucccuccccuuccagaacauccaccccaucaccaucggcaagugccccaaguacgucaaguccaccaagcuccgccucgccaccggccuccgcaacguccccuccauccagucccgcggccucuucggcgccaucgccggcuucaucgagggcggcuggaccggcauggucgacggcugguacggcuaccaccaccagaacgagcagggcuccggcuacgccgccgaccucaaguccacccagaacgccaucgacgagaucaccaacaaggucaacuccgucaucgagaagaugaacacccaguucaccgccgucggcaaggaguucaaccaccucgagaagcgcaucgagaaccucaacaagaaggucgacgacggcuuccucgacaucuggaccuacaacgccgagcuccucguccuccucgagaacgagcgcacccucgacuaccacgacuccaacgucaagaaccucuacgagaagguccgcucccagcucaagaacaacgccaaggagaucggcaacggcugcuucgaguucuaccacaagugcgacaacaccugcauggaguccgucaagaacggcaccuacgacuaccccaaguacuccgaggaggccaagcucaaccgcgaggagaucgacggcgucaagcucgaguccacccgcaucuaccagauccucgccaucuacuccaccgucgccuccucccucguccucgucgucucccucggcgccaucuccuucuggaugugcuccaacggcucccuccagugccgcaucugcaucuga

SEQ ID NO: 99804 - RNA, 1701 nt, Artificial Sequence; identical to SEQ ID NO: 98705
  derived and/or modified CDS sequence (opt2) from hemagglutinin__InfluenzaA__ACZ45014

SEQ ID NO: 99805 - RNA, 1701 nt, Artificial Sequence; identical to SEQ ID NO: 98705
  derived and/or modified CDS sequence (opt2) from hemagglutinin__InfluenzaA__ACZ45016

SEQ ID NO: 99806 - RNA, 1701 nt, Artificial Sequence
  derived and/or modified CDS sequence (opt2) from hemagglutinin__InfluenzaA__ACZ45028
augaaggccauccucgucguccuccucuacaccuucgccaccgccaacgccgacacccucugcaucggcuaccacgccaacaacuccaccgacaccgucgacaccguccucgagaagaacgucaccgucacccacuccgucaaccuccucgaggacaagcacaacggcaagcucugcaagcuccgcggcgucgccccccuccaccucggcaagugcaacaucgccggcuggauccucggcaaccccgagugcgagucccucuccaccgccuccuccugguccuacaucgucgagaccuccuccuccgacaacggcaccugcuaccccggcgacuucaucgacuacgaggagcuccgcgagcagcucuccuccgucuccuccuucgagcgcuucgagaucuuccccaagaccuccuccuggcccaaccacgacuccaacaagggcgucaccgccgccugcccccacgccggcgccaaguccuucuacaagaaccucaucuggcucgucaagaagggcaacuccuaccccaagcucuccaaguccuacaucaacgacaagggcaaggagguccucguccucuggggcauccaccaccccuccaccuccgccgaccagcagucccucuaccagaacgccgacgccuacgucuucgucggcaccucccgcuacuccaagaaguucaagcccgagaucgccauccgccccaagguccgcgaccaggagggccgcaugaacuacuacuggacccucgucgagcccggcgacaagaucaccuucgaggccaccggcaaccucgucgucccccgcuacgccuucgccauggagcgcaacgccggcuccggcaucaucaucuccgacacccccguccacgacugcaacaccaccugccagacccccaagggcgccaucaacaccucccuccccuuccagaacauccaccccaucaccaucggcaagugccccaaguacgucaaguccaccaagcuccgccucgccaccggccuccgcaacauccccuccauccagucccgcggccucuucggcgccaucgccggcuucaucgagggcggcuggaccggcauggucgacggcugguacggcuaccaccaccagaacgagcagggcuccggcuacgccgccgaccucaaguccacccagaacgccaucgacgagaucaccaacaaggucaacuccgucaucgagaagaugaacacccaguucaccgccgucggcaaggaguucaaccaccucgagaagcgcaucgagaaccucaacaagaaggucgacgacggcuuccucgacaucuggaccuacaacgccgagcuccucguccuccucgagaacgagcgcacccucgacuaccacgacuccaacgucaagaaccucuacgagaagguccgcucccagcucaagaacaacgccaaggagaucggcaacggcugcuucgaguucuaccacaagugcgacaacaccugcauggaguccgucaagaacggcaccuacgacuaccccaaguacuccgaggaggccaagcucaaccgcgaggagaucgacggcgucaagcucgaguccacccgcaucuaccagauccucgccaucuacuccaccgucgccuccucccucguccucgucgucucccucggcgccaucuccuucuggaugugcuccaacggcucccuccagugccgcaucugcaucuga

SEQ ID NO: 99807 - RNA, 1701 nt, Artificial Sequence
  derived and/or modified CDS sequence (opt2) from hemagglutinin__InfluenzaA__ACZ45029
augaaggccauccucgucguccuccucuacaccuucgccaccgccaacgccgacacccucugcaucggcuaccacgccaacaacuccaccgacaccgucgacaccguccucgagaagaacgucaccgucacccacuccgucaaccuccucgaggacaagcacaacggcaagcucugcaagcuccgcggcgucgccccccuccaccucggcaagugcaacaucgccggcuggauccucggcaaccccgagugcgagucccucuccaccgccuccuccugguccuacaucgucgagaccuccuccuccggcaacggcaccugcuaccccggcgacuucaucgacuacgaggagcuccgcgagcagcucuccuccgucuccuccuucgagcgcuucgagaucuuccccaagaccuccuccuggcccaaccacgacuccaacaagggcgucaccgccgccugcccccacgccggcgccaaguccuucuacaagaaccucaucuggcucgucaagaagggcaacuccuaccccaagcucuccaaguccuacaucaacgacaagggcaaggagguccucguccucuggggcauccaccaccccuccaccuccgccgaccagcagucccucuaccagaacgccgacgccuacgucuucgucggcaccucccgcuacuccaagaaguucaagcccgagaucgccauccgccccaagguccgcgaccaggagggccgcaugaacuacuacuggacccucgucgagcccggcgacaagaucaccuucgaggccaccggcaaccucgucgucccccgcuacgccuucgccauggagcgcaacgccggcuccggcaucaucaucuccgacacccccguccacgacugcaacaccaccugccagacccccaagggcgccaucaacaccucccuccccuuccagaacauccaccccaucaccaucggcaagugccccaaguacgucaaguccaccaagcuccgccucgccaccggccuccgcaacguccccuccauccagucccgcggccucuucggcgccaucgccggcuucaucgagggcggcuggaccggcauggucgacggcugguacggcuaccaccaccagaacgagcagggcuccggcuacgccgccgaccucaaguccacccagaacgccaucgacgagaucaccaacaaggucaacuccgucaucgagaagaugaacacccaguucaccgccgucggcaaggaguucaaccaccucgagaagcgcaucgagaaccucaacaagaaggucgacgacggcuuccucgacaucuggaccuacaacgccgagcuccucguccuccucgagaacgagcgcacccucgacuaccacgacuccaacgucaagaaccucuacgagaagguccgcucccagcucaagaacaacgccaaggagaucggcaacggcugcuucgaguucuaccacaagugcgacaacaccugcauggaguccgucaagaacggcaccuacgacuaccccaaguacuccgaggaggccaagcucaaccgcgaggagaucgacggcgucaagcucgaguccacccgcaucuaccagauccucgccaucuacuccaccgucgccuccucccucguccucgucgucucccucggcgccaucuccuucuggaugugcuccaacggcucccuccagugccgcaucugcaucuga

SEQ ID NO: 99808 - RNA, 1701 nt, Artificial Sequence
  derived and/or modified CDS sequence (opt2) from hemagglutinin__InfluenzaA__ACZ45030
augaaggccauccucgucguccuccucuacaccuucgccaccgccaacgccgacacccucugcaucggcuaccacgccaacaacuccaccgacaccgucgacaccguccucgagaagaacgucaccgucacccacuccgucaaccuccucgaggacaagcacaacggcaagcucugcaagcuccgcggcgucgccccccuccaccucggcaagugcaacaucgccggcuggauccucggcaaccccgagugcgagucccucuccaccgccuccuccugguccuacaucgucgagaccuccuccuccgacaacggcaccugcuaccccggcgacuucaucgacuacgaggagcuccgcgagcagcucuccuccgucuccuccuucgagcgcuucgagaucuuccccaagaccuccuccuggcccaaccacgacuccaacaagggcgucaccgccgccugcccccacgccggcgccaaguccuucuacaagaaccucaucuggcucgucaagaagggcaacuccuaccccaagcucuccaaguccuacaucaacgacaagggcaaggagguccucguccucuggggcauccaccaccccuccaccuccgccgaccagcagucccucuaccagaacgccgacgccuacgucuucgucggcaccuccaccuacuccaagaaguucaagcccgagaucgccauccgccccaagguccgcgaccaggagggccgcaugaacuacuacuggacccucgucgagcccggcgacaagaucaccuucgaggccaccggcaaccucgucgucccccgcuacgccuucaccauggagcgcaacgccggcuccggcaucaucaucuccgacacccccguccacgacugcaacaccaccugccagacccccaagggcgccaucaacaccucccuccccuuccagaacauccaccccaucaccaucggcaagugccccaaguacgucaaguccaccaagcuccgccucgccaccggccuccgcaacauccccuccauccagucccgcggccucuucggcgccaucgccggcuucaucgagggcggcuggaccggcauggucgacggcugguacggcuaccaccaccagaacgagcagggcuccggcuacgccgccgaccucaaguccacccagaacgccaucgacgagaucaccaacaaggucaacuccgucaucgagaagaugaacacccaguucaccgccgucggcaaggaguucaaccaccucgagaagcgcaucgagaaccucaacaagaaggucgacgacggcuuccucgacaucuggaccuacaacgccgagcuccucguccuccucgagaacgagcgcacccucgacuaccacgacuccaacgucaagaaccucuacgagaagguccgcucccagcucaagaacaacgccaaggagaucggcaacggcugcuucgaguucuaccacaagugcgacaacaccugcauggaguccgucaagaacggcaccuacgacuaccccaaguacuccgaggaggccaagcucaaccgcgaggagaucgacggcgucaagcucgaguccacccgcaucuaccagauccucgccaucuacuccaccgucgccuccucccucguccucgucgucucccucggcgccaucuccuucuggaugugcuccaacggcucccuccagugccgcaucugcaucuga

SEQ ID NO: 99809 - RNA, 1701 nt, Artificial Sequence
  derived and/or modified CDS sequence (opt2) from hemagglutinin__InfluenzaA__ACZ45031
augaaggccauccucgucguccuccucuacaccuucgccaccgccaacgccgacacccucugcaucggcuaccacgccaacaacuccaccgacaccgucgacaccguccucgagaagaacgucaccgucacccacuccgucaaccuccucgaggacaagcacaacggcaagcucugcaagcuccgcggcgucgccccccuccaccucggcaagugcaacaucgccggcuggauccucggcaaccccgagugcgagucccucuccaccgccuccuccugguccuacaucgucgagaccuccuccuccgacaacggcaccugcuaccccggcgacuucaucgacuacgaggagcuccgcgagcagcucuccuccgucuccuccuucgagcgcuucgagaucuuccccaagaccuccuccuggcccaaccacgacuccaacaagggcgucaccgccgccugcccccacgccggcgccaaguccuucuacaagaaccucaucuggcucgucaagaagggcaacuccuaccccaagcucuccaaguccuacaucaacgacaagggcaaggagguccucguccucuggggcauccaccaccccuccaccuccgccgaccagcagucccucuaccagaacgccgacgccuacgucuucgucggcaccucccgcuacuccaagaaguucaagcccgagaucgccauccgccccaagguccgcgagcaggagggccgcaugaacuacuacuggacccucgucgagcccggcgacaagaucaccuucgaggccaccggcaaccucgucgucccccgcuacgccuucaccauggagcgcaacgucggcuccggcaucaucaucuccgacacccccguccacgacugcaacaccaccugccagacccccaagggcgccaucaacaccucccuccccuuccagaacauccaccccaucaccaucggcaagugccccaaguacgucaaguccaccaagcuccgccucgccaccggccuccgcaacguccccuccauccagucccgcggccucuucggcgccaucgccggcuucaucgagggcggcuggaccggcauggucgacggcugguacggcuaccaccaccagaacgagcagggcuccggcuacgccgccgaccucaaguccacccagaacgccaucgacgagaucaccaacaaggucaacuccgucaucgagaagaugaacacccaguucaccgccgucggcaaggaguucaaccaccucgagaagcgcaucgagaaccucaacaagaaggucgacgacggcuuccucgacaucuggaccuacaacgccgagcuccucguccuccucgagaacgagcgcacccucgacuaccacgacuccaacgucaagaaccucuacgagaagguccgcucccagcucaagaacaacgccaaggagaucggcaacggcugcuucgaguucuaccacaagugcgacaacaccugcauggaguccgucaagaacggcaccuacgacuaccccaaguacuccgaggaggccaagcucaaccgcgaggagaucgacggcgucaagcucgaguccacccgcaucuaccagauccucgccaucuacuccaccgucgccuccucccucguccucgucgucucccucggcgccaucuccuucuggaugugcuccaacggcucccuccagugccgcaucugcaucuga

SEQ ID NO: 99810 - RNA, 1701 nt, Artificial Sequence
  derived and/or modified CDS sequence (opt2) from hemagglutinin__InfluenzaA__ACZ45034
augaaggccauccucgucguccuccucuacaccuucgccaccgccaacgccgacacccucugcaucggcuaccacgccaacaacuccaccgacaccgucgacaccguccucgagaagaacgucaccgucacccacuccgucaaccuccucgaggacaagcacaacggcaagcucugcaagcuccgcggcgucgccccccuccaccucggcaagugcaacaucgccggcuggauccucggcaaccccgagugcgagucccucuccaccgccuccuccugguccuacaucgucgagaccuccuccuccgacaacggcaccugcuaccccggcgacuucaucgacuacgaggagcuccgcgagcagcucuccuccgucuccuccuucgagcgcuucgagaucuuccccaagaccuccuccuggcccaaccacgacuccaacaagggcgucaccgccgccugcccccacgccggcgccaaguccuucuacaagaaccucaucuggcucgucaagaagggcaacuccuaccccaagcucuccaaguccuacaucaacgacaagggcaaggagguccucguccucuggggcauccaccaccccuccaccuccgccgaccagcagucccucuaccagaacgccgacgccuacgucuucgucggcaccucccgcuacuccaagaaguucaagcccgagaucgccauccgccccaagguccgcgaccaggagggccgcaugaacuacuacuggacccucgucgagcccggcgacaagaucaccuucgaggccaccggcaaccucgucgucccccgcuacgccuucgccauggagcgcaacgccggcuccggcaucaucaucuccgacacccccguccacgacugcaacaccaccugccagacccccaagggcgccaucaacaccucccuccccuuccagaacguccaccccaucaccaucggcaagugccccaaguacgucaaguccaccaagcuccgccucgccaccggccuccgcaacgucccccccauccagucccgcggccucuucggcgccaucgccggcuucaucgagggcggcuggaccggcauggucgacggcugguacggcuaccaccaccagaacgagcagggcuccggcuacgccgccgaccucaaguccacccagaacgccaucgacgagaucaccaacaaggucaacuccgucaucgagaagaugaacacccaguucaccgccgucggcaaggaguucaaccaccucgagaagcgcaucgagaaccucaacaagaaggucgacgacggcuuccucgacaucuggaccuacaacgccgagcuccucguccuccucgagaacgagcgcacccucgacuaccacgacuccaacgucaagaaccucuacgagaagguccgcucccagcucaagaacaacgccaaggagaucggcaacggcugcuucgaguucuaccacaagugcgacaacaccugcauggaguccgucaagaacggcaccuacgacuaccccaaguacuccgaggaggccaagcucaaccgcgaggagaucgacggcgucaagcucgaguccacccgcaucuaccagauccucgccaucuacuccaccgucgccuccucccucguccucgucgucucccucggcgccaucuccuucuggaugugcuccaacggcucccuccagugccgcaucugcaucuga

SEQ ID NO: 99811 - RNA, 1701 nt, Artificial Sequence; identical to SEQ ID NO: 98705
  derived and/or modified CDS sequence (opt2) from hemagglutinin__InfluenzaA__ACZ45036

SEQ ID NO: 99812 - RNA, 1701 nt, Artificial Sequence; identical to SEQ ID NO: 98705
  derived and/or modified CDS sequence (opt2) from hemagglutinin__InfluenzaA__ACZ45037

SEQ ID NO: 99813 - RNA, 1701 nt, Artificial Sequence; identical to SEQ ID NO: 99806
  derived and/or modified CDS sequence (opt2) from hemagglutinin__InfluenzaA__ACZ45038

SEQ ID NO: 99814 - RNA, 1701 nt, Artificial Sequence; identical to SEQ ID NO: 99058
  derived and/or modified CDS sequence (opt2) from hemagglutinin__InfluenzaA__ACZ45039

SEQ ID NO: 99815 - RNA, 1701 nt, Artificial Sequence; identical to SEQ ID NO: 98705
  derived and/or modified CDS sequence (opt2) from hemagglutinin__InfluenzaA__ACZ45040

SEQ ID NO: 99816 - RNA, 1701 nt, Artificial Sequence; identical to SEQ ID NO: 98705
  derived and/or modified CDS sequence (opt2) from hemagglutinin__InfluenzaA__ACZ52567

SEQ ID NO: 99817 - RNA, 1701 nt, Artificial Sequence; identical to SEQ ID NO: 98705
  derived and/or modified CDS sequence (opt2) from hemagglutinin__InfluenzaA__ACZ52568

SEQ ID NO: 99818 - RNA, 1701 nt, Artificial Sequence; identical to SEQ ID NO: 99274
  derived and/or modified CDS sequence (opt2) from hemagglutinin__InfluenzaA__ACZ52569

SEQ ID NO: 99819 - RNA, 1701 nt, Artificial Sequence
  derived and/or modified CDS sequence (opt2) from hemagglutinin__InfluenzaA__ACZ53956
augaagaccaucaucgcccucuccuacaucuucugccucgcccucgcccagaagcuccccggcaacgacaacuccaccgccacccucugccucggccaccacgccguccccaacggcacccucgucaagaccaucaccaacgaccagaucgaggucaccaacgccaccgagcucguccaguccuccuccaccggccgcaucugcgacuccccccaccagauccucgacggcgagaacugcacccucaucgacgcccuccucggcgacccccacugcgacggcuuccagaacaaggagugggaccucuucgucgagcgcuccaaggccuacuccaacugcuaccccuacgacguccccgacuacgccucccuccgcucccucgucgccuccuccggcacccucgaguucaacaacgaguccuucaacuggaccggcgucgcccagaacggcaccuccuccgccugcaagcgccgcuccaucaaguccuucuucuccacccucaacuggcuccaccagcuccagaaccgcuaccccgcccucaacgucaccaugcccaacaacgacaaguucgacaagcucuacaucuggggcguccaccaccccuccaccgacuccgaccagaucuccgucuacgcccaggccuccggccgcgucaccgucuccaccaagcgcucccagcagaccgucauccccaacaucggcucccgccccuggguccgcggcgucuccucccgcaucuccaucuacuggaccaucgucaagcccggcgacauccuccucaucaacuccaccggcaaccucaucgccccccgcggcuacuucaagauccgcuccggcaaguccuccaucaugcgcuccgacgcccccaucggcaagugcaacuccgagugcaucacccccaacggcuccauccccaacgacaagcccuuccagaacgucaaccgcaucaccuacggcgccugcccccgcuacgucaagcagaacacccucaagcucgccaccggcaugcgcaacguccccgagaagcagacccgcggcaucuucggcgccaucgccggcuucaucgagaacggcugggagggcaugauggacggcugguacggcuuccgccaccagaacuccgagggcaccggccaggccgccgaccucaaguccacccaggccgccaucaaccagaucaacggcaagcucaaccgccucaucgagaagaccaacgagaaguuccaccagaucgagaaggaguucuccgaggucgagggccgcauccaggaccucgagaaguacgucgaggacaccaagaucgaccucugguccuacaacgccgagcuccucgucgcccucgagaaccagcacaccaucgaccucaccgacuccgagaugaacaagcucuucgagcgcacccgcaagcagcuccgcgagaacgccgaggacaugggcaacggcugcuucaagaucuaccacaagugcgacaacgccugcaucggcuccauccgcaacggcaccuacgaccacgacgucuaccgcgacgaggcccucaacaaccgcuuccagaucaagggcgucgagcucaaguccggcuacaaggacuggauccucuggaucuccuucgccaucuccugcuuccuccucugcgucguccuccucggcuucaucaugugggccugccagcgcggcaacauccgcugcaacaucugcaucuga

SEQ ID NO: 99820 - RNA, 1701 nt, Artificial Sequence
  derived and/or modified CDS sequence (opt2) from hemagglutinin__InfluenzaA__ACZ53967
augaagaccaucaucgcccucuccuacaucuucugccucgcccucgcccagaagcuccccggcaacgacaacuccaccgccacccucugccucggccaccacgccguccccaacggcacccucgucaagaccaucaccaacgaccagaucgaggucaccaacgccaccgagcucguccaguccuccuccaccggccgcaucugcgacuccccccaccagauccucgacggcgagaacugcacccucaucgacgcccuccucggcgacccccacugcgacggcuuccagaacaaggagugggaccucuucgucgagcgcuccaaggccuacuccaacugcuaccccuacgacguccccgacuacgccucccuccgcucccucgucgccuccuccggcacccucgaguucaacaacgaguccuucaacuggaccggcgucgcccagaacggcaccuccuccgccugcaagcgccgcuccaucaaguccuucuucuccacccucaacuggcuccaccagcuccagaaccgcuaccccgcccucaacgucaccaugcccaacaacgacaaguucgacaagcucuacaucuggggcguccaccaccccuccaccgacuccgaccagaccucccucuacgcccaggccuccggccgcgucaccgucuccaccaagcgcucccagcagaccgucauccccaacaucggcucccgccccuggguccgcggcgucuccucccgcaucuccaucuacuggaccaucgucaagcccggcgacguccucgucaucaacuccaacggcaaccucaucgccccccgcggcuacuucaagaugcgcuccggcaaguccuccaucaugcgcuccgacgcccccaucggcaagugcaacuccgagugcaucacccccaacggcuccauccccaacgacaagcccuuccagaacgucaaccgcaucaccuacggcgccugcccccgcuacgucaagcagaacacccucaagcucgccaccggcaugcgcaacguccccgagaagcagacccgcggcaucuucggcgccaucgccggcuucaucgagaacggcugggagggcaugauggacggcugguacggcuuccgccaccagaacuccgagggcaccggccaggccgccgaccucaaguccacccaggccgccaucaaccagaucaacggcaagcucaacaagcucaucgagaagaccaacgagaaguuccaccagaucgagaaggaguucuccgaggucgagggccgcauccaggaccucgagaaguacgucgaggacaccaagaucgaccucugguccuacaacgccgagcuccucgucgcccucgagaaccagcacaccaucgaccucaccgacuccgagaugaacaagcucuucgagcgcacccgcaagcagcuccgcgagaacgccgaggacaugggcaacggcugcuucaagaucuaccacaagugcgacaacgccugcaucggcuccauccgcaacggcaccuacgaccacgacgucuaccgcgacgaggcccucaacaaccgcuuccagaucaagggcgucgagcucaaguccggcuacaaggacuggauccucuggaucuccuucgccaucuccugcuuccuccucugcgucguccuccucggcuccaucaugugggccugccagcgcggcaacauccgcugcaacaucugcaucuga

SEQ ID NO: 99821 - RNA, 1701 nt, Artificial Sequence
  derived and/or modified CDS sequence (opt2) from hemagglutinin__InfluenzaA__ACZ53978
augaagaccaucaucgcccucuccuacaucuucugccucgcccucgcccagaagcuccccggcaacgacaacuccaccgccacccucugccucggccaccacgccguccccaacggcacccucgucaagaccaucaccaacgaccagaucgaggucaccaacgccaccgagcucguccaguccuccuccaccggccgcaucugcgacuccccccaccagauccucgacggcgagaacugcacccucaucgacgcccuccucggcgacccccacugcgacggcuuccagaacaaggagugggaccucuucgucgagcgcuccaaggccuacuccaacugcuaccccuacgacguccccgacuacgccucccucaagucccucaucgccuccuccggcacccucgaguucaacaacgaguccuucaacuggaucggcgucucccagaacggcaccuccuccgccugcaagcgcaucuccaucaccgucuccuucaacaagcucaacuggcuccaccagcucaaguaccgcuaccccgcccucaacgucaccaugcccaacaacgacaaguucgacaagcucuacaucuggggcguccaccaccccuccaccgacuccgaccagaccucccucuacgcccaggccuccggccgcgucaccgucuccaccaagcgcucccagcagaccgucauccccaacaucggcucccgccccuggguccgcggcgucuccucccgcaucuccaucuacuggaccaucgucaagcccggcgacguccucgucaucaacuccaacggcaaccucaucgccccccgcggcuacuucaagaugcgcuccggcaaguccuccaucaugcgcuccgacgcccccaucggcaagugcaacuccgagugcaucacccccaacggcuccauccccaacgacaagcccuuccagaacgucaaccgcaucaccuacggcgccugcccccgcuacgucaagcagaacacccucaagcucgccaccggcaugcgcaacguccccgagaagcagacccgcggcaucuucggcgccaucgccggcuucaucgagaacggcugggagggcauggucgacggcugguacggcuuccgccaccagaacuccgagggcaccggccaggccgccgaccucaaguccacccaggccgccaucaaccagaucaccggcaagcucaacaagcucaucgagaagaccaacgagaaguuccaccagaucgagaaggaguucuccgaggucgagggccgcauccaggaccucgagaaguacgucgaggacaccaagaucgaccucugguccuacaacgccgagcuccucgucgcccucgagaaccagcacaccaucgaccucaccgacuccgagaugaacaagcucuucgagcgcacccgcaagcagcuccgcgagaacgccgaggacaugggcaacggcugcuucaagaucuaccacaagugcgacaacgccugcaucggcuccauccgcaacggcaccuacgaccacgacgucuaccgcgacgaggcccucaacaaccgcuuccagaucaagggcgucgagcucaaguccggcuacaaggacuggauccucuggaucuccuucgccaucuccugcuuccuccucugcgucguccuccucggcuucaucaugugggccugccagcgcggcaacauccgcugcaacaucugcaucuga

SEQ ID NO: 99822 - RNA, 1701 nt, Artificial Sequence
  derived and/or modified CDS sequence (opt2) from hemagglutinin__InfluenzaA__ACZ56080
augaaggccauccucgucguccuccucuacaccuucgccaccgccaacgccgacacccucugcaucggcuaccacgccaacaacuccaccgacaccgucgacaccguccucgagaagaacgucaccgucacccacuccgucaaccuccucgaggacaagcacaacggcaagcucugcaagcuccgcggcgucgccccccuccaccucggcaagugcaacaucgccggcuggauccucggcaaccccgagugcgagucccucuccaccgccuccuccugguccuacaucgucgagaccuccuccuccgacaacggcaccugcuaccccggcgacuucaucgacuacgaggagcuccgcgagcagcucuccuccgucuccuccuucgagcgcuucgagaucuuccccaagaccuccuccuggcccaaccacgacuccaacaagggcgucaccgccgccugcucccacgccggcgccaaguccuucuacaagaaccucaucuggcucgucaagaagggcaacuccuaccccaagcucuccaaguccuacaucaacgacaagggcaaggagguccucguccucuggggcauccaccaccccuccaccuccgccgaccagcagucccucuaccagaacgccgacgccuacgucuucgucggcaccucccgcuacuccaagaaguucaagcccgagaucgccauccgccccaagguccgcggccaggagggccgcaugaacuacuacuggacccucgucgagcccggcgacaagaucaccuucgaggccaccggcaaccucgucgucccccgcuacgccuucgccauggagcgcaacgccggcuccggcaucaucaucuccgacacccccguccacgacugcaacaccaccugccagacccccaagggcgccaucaacaccucccuccccuuccagaacauccaccccaucaccaucggcaagugccccaaguacgucaaguccaccaagcuccgccucgccaccggccuccgcaacguccccuccauccagucccgcggccucuucggcgccaucgccggcuucaucgagggcggcuggaccggcauggucgacggcugguacggcuaccaccaccagaacgagcagggcuccggcuacgccgccgaccucaaguccacccagaacgccaucgacgagaucaccaacaaggucaacuccgucaucgagaagaugaacacccaguucaccgccgucggcaaggaguucaaccaccucgagaagcgcaucgagaaccucaacaagaaggucgacgacggcuuccucgacaucuggaccuacaacgccgagcuccucguccuccucgagaacgagcgcacccucgacuaccacgacuccaacgucaagaaccucuacgagaagguccgcucccagcucaagaacaacgccaaggagaucggcaacggcugcuucgaguucuaccacaagugcgacaacaccugcauggaguccgucaagaacggcaccuacgacuaccccaaguacuccgaggaggccaagcucaaccgcgaggagaucgacggcgucaagcucgaguccacccgcaucuaccagauccucgccaucuacuccaccgucgccuccucccucguccucgucgucucccucggcgccaucuccuucuggaugugcuccaacggcucccuccagugccgcaucugcaucuga

SEQ ID NO: 99823 - RNA, 1701 nt, Artificial Sequence
  derived and/or modified CDS sequence (opt2) from hemagglutinin__InfluenzaA__ACZ61118
augaaggccauccucgucguccuccucuacaccuucgccaccgccaacgccgacacccucugcaucggcuaccacgccaacaacuccaccgacaccgucgacaccguccucgagaagaacgucaccgucacccacuccgucaaccuccucgaggacaagcacaacggcaagcucugcaagcuccgcggcgucgccccccuccaccucggcaagugcaacaucgccggcuggauccucggcaaccccgagugcgagucccucuccaccgccuccuccugguccuacaucgucgagaccuccuccuccgacaacggcaccugcuaccccggcgacuucaucgacuacgaggagcuccgcgagcagcucuccuccgucuccuccuucgagcgcuucgagaucuuccccaagaccuccuccuggcccaaccacgacuccaacaagggcgucaccgccgccugcccccacgccggcgccaaguccuucuacaagaaccucaucuggcucgucaagaagggcaacuccuaccccaagcucuccaaguccuacaucaacgacaagggcaaggagguccucguccucuggggcauccaccaccaguccaccuccgccgaccagcagucccucuaccagaacgccgacgccuacgucuucgucggcuccucccgcuacuccaagaaguucaagcccgagaucgccauccgccccaagguccgcgaccaggagggccgcaugaacuacuacuggacccucgucgagcccggcgacaagaucaccuucgaggccaccggcaaccucgucgucccccgcuacgccuucgccauggagcgcaacgccggcuccggcaucaucaucuccgacacccccguccacgacugcaacaccaccugccagacccccaagggcgccaucaacaccucccuccccuuccagaacauccaccccaucaccaucggcaagugccccaaguacgucaaguccaccaagcuccgccucgccaccggccuccgcaacguccccuccauccagucccgcggccucuucggcgccaucgccggcuucaucgagggcggcuggaccggcauggucgacggcugguacggcuaccaccaccagaacgagcagggcuccggcuacgccgccgaccucaaguccacccagaacgccaucgacgagaucaccaacaaggucaacuccgucaucgagaagaugaacacccaguucaccgccgucggcaaggaguucaaccaccucgagaagcgcaucgagaaccucaacaagaaggucgacgacggcuuccucgacaucuggaccuacaacgccgagcuccucguccuccucgagaacgagcgcacccucgacuaccacgacuccaacgucaagaaccucuacgagaagguccgcucccagcucaagaacaacgccaaggagaucggcaacggcugcuucgaguucuaccacaagugcgacaacaccugcauggaguccgucaagaacggcaccuacgacuaccccaaguacuccgaggaggccaagcucaaccgcgaggagaucgacggcgucaagcucgaguccacccgcaucuaccagauccucgccaucuacuccaccgucgccuccucccucguccucgucgucucccucggcgccaucuccuucuggaugugcuccaacggcucccuccagugccgcaucugcaucuga

SEQ ID NO: 99824 - RNA, 1701 nt, Artificial Sequence
  derived and/or modified CDS sequence (opt2) from hemagglutinin__InfluenzaA__ACZ61119
auggaggccauccucgucguccuccucuacaccuucgccaccgccaacgccgacacccucugcaucggcuaccacgccaacaacuccaccgacaccgucgacaccguccucgagaagaacgucaccgucacccacuccgucaaccuccucgaggacaagcacaacggcaagcucugcaagcuccgcggcgucgccccccuccaccucggcaagugcaacaucgccggcuggauccucggcaaccccgagugcgagucccucuccaccgccuccuccugguccuacaucgucgagaccuccuccuccgacaacggcaccugcuaccccggcgacuucaucgacuacgaggagcuccgcgagcagcucuccuccgucuccuccuucgagcgcuucgagaucuuccccaagaccuccuccuggcccaaccacgacuccaacaagggcgucaccgccgccugcccccacgccggcgccaaguccuucuacaagaaccucaucuggcucgucaagaagggcaacuccuaccccaagcucuccaaguccuacaucaacgacaagggcaaggagguccucguccucuggggcauccaccaccccuccaccuccgccgaccagcagucccucuaccagaacgccgacgccuacgucuucgucggcuccucccgcuacuccaagaaguucaagcccgagaucgccauccgccccaagguccgcgaccaggagggccgcaugaacuacuacuggacccucgucgagcccggcgacaagaucaccuucgaggccaccggcaaccucgucgucccccgcuacgccuucgccauggagcgcaacgccggcuccggcaucaucaucuccgacacccccguccacgacugcaacaccaccugccagacccccaagggcgccaucaacaccucccuccccuuccacaacauccaccccaucaccaucggcaagugccccaaguacgucaaguccaccaagcuccgccucgccaccggccuccgcaacguccccuccauccagucccgcggccucuucggcgccaucgccggcuucaucgagggcggcuggaccggcauggucgacggcugguacggcuaccaccaccagaacgagcagggcuccggcuacgccgccgaccucaaguccacccagaacgccaucgacgagaucaccaacaaggucaacuccgucaucgagaagaugaacacccaguucaccgccgucggcaaggaguucaaccaccucgagaagcgcaucgagaaccucaacaagaaggucgacgacggcuuccucgacaucuggaccuacaacgccgagcuccucauccuccucgagaacgagcgcacccucgacuaccacgacuccaacgucaagaaccucuacgagaagguccgcucccagcucaagaacaacgccaaggagaucggcaacggcugcuucgaguucuaccacaagugcgacaacaccugcauggaguccgucaagaacggcaccuacgacuaccccaaguacuccgaggaggccaagcucaaccgcgaggagaucgacggcgucaagcucgaguccacccgcaucuaccagauccucgccaucuacuccaccgucgccuccucccucguccucgucgucucccucggcgccaucuccuucuggaugugcuccaacggcucccuccagugccgcaucugcaucuga

SEQ ID NO: 99825 - RNA, 1701 nt, Artificial Sequence; identical to SEQ ID NO: 98705
  derived and/or modified CDS sequence (opt2) from hemagglutinin__InfluenzaA__ACZ61122

SEQ ID NO: 99826 - RNA, 1701 nt, Artificial Sequence; identical to SEQ ID NO: 98705
  derived and/or modified CDS sequence (opt2) from hemagglutinin__InfluenzaA__ACZ61123

SEQ ID NO: 99827 - RNA, 1701 nt, Artificial Sequence; identical to SEQ ID NO: 99503
  derived and/or modified CDS sequence (opt2) from hemagglutinin__InfluenzaA__ACZ74627

SEQ ID NO: 99828 - RNA, 1698 nt, Artificial Sequence
  derived and/or modified CDS sequence (opt2) from hemagglutinin__InfluenzaA__ACZ81554
augaaggucaagcuccucguccuccucugcaccuucaccgccaccuacgccgacaccaucugcaucggcuaccacgccaacaacuccaccgacaccgucgacaccguccucgagaagaacgucaccgucacccacuccgucaaccuccucgagaacaaccacaacggcaagcucugccuccucaagggcaucgccccccuccagcucggcaacugcaccgucgccggcuggauccucggcaaccccgagugcgagcuccucaucuccaaggaguccugguccuacaucgucgagaagcccaaccccgagaacggcaccugcuaccccggccacuucgccgacuacgaggagcuccgcgagcagcucuccuccgucuccuccuucgagcgcuucgagaucuuccccaaggaguccuccuggcccaaccacaccgucaccggcgucuccgccuccugcucccacaacggcgagaacuccuucuaccgcaaccuccucuggcucaccggcaagaacggccucuaccccaaccucuccaaguccuacgccaacaacaaggagaaggagguccucguccucuggggcguccaccacccccccaacaucgccgaccagaagacccucuaccacaccgagaacgccuacgucuccgucgucuccucccacuacucccgcaaguucacccccgagaucgccaagcgccccaagauccgcgaccaggagggccgcaucaacuacuacuggacccuccucgagcccggcgacaccaucaucuucgaggccaacggcaaccucaucgccccccgcuacgccuucgcccucucccgcggcuucggcuccggcaucaucaacuccaacgcccccauggacaagugcgacgccaagugccagaccccccagggcgccaucaacuccucccuccccuuccagaacguccaccccgucaccaucggcgagugccccaaguacguccgcuccgccaagcuccgcauggucaccggccuccgcaacauccccuccauccagucccgcggccucuucggcgccaucgccggcuucaucgagggcggcuggaccggcauggucgacggcugguacggcuaccaccaccagaacgagcagggcuccggcuacgccgccgaccagaaguccacccagaacgccaucaacggcaucaccaacaaggucaacuccgucaucgagaagaugaacacccaguucaccgccgucggcaaggaguucaacaagcucgagcgccgcauggagaaccucaacaagaaggucgacgacggcuucaucgacaucuggaccuacaacgccgagcuccucguccuccucgagaacgagcgcacccucgacuuccacgacuccaacgucaagaaccucuacgagaaggucaagucccagcucaagaacaacgccaaggagaucggcaacggcugcuucgaguucuaccacaagugcaacgacgagugcauggaguccgucaagaacggcaccuacgacuaccccaaguacuccgaggaguccaagcucaaccgcgagaagaucgacggcgucaagcucgaguccaugggcgucuaccagauccucgccaucuacuccaccgucgccuccucccucguccuccucgucucccucggcgccaucuccuucuggaugugcuccaacggcucccuccagugccgcaucugcaucuga

SEQ ID NO: 99829 - RNA, 1698 nt, Artificial Sequence
  derived and/or modified CDS sequence (opt2) from hemagglutinin__InfluenzaA__ACZ81555
augaaggucaagcuccucguccuccucugcaccuucaccgccaccuacgccgacaccaucugcaucggcuaccacgccaacaacuccaccgacaccgucgacaccguccucgagaagaacgucaccgucacccacuccgucaaccuccucgagaacucccacaacggcaagcucugccuccucaagggcaucgccccccuccagcucggcaacugcuccgucgccggcuggauccucggcaaccccgagugcgagcuccucaucuccaaggaguccugguccuacaucgucgagaagcccaaccccgagaacggcaccugcuaccccggccacuucgccgacuacgaggagcuccgcgagcagcucuccuccgucuccuccuucgagcgcuucgagaucuuccccaaggaguccuccuggcccaaccacaccgucaccggcgucuccgccuccugcucccacaacggcgagaacuccuucuaccgcaaccuccucuggcucaccggcaagaacggccucuaccccaaccucuccaaguccuacgccaacaacaaggagaaggagguccucguccucuggggcguccaccacccccccaacaucggcgaccagaagacccucuaccacaccgagaacgccuacgucuccgucgucuccucccacuacucccgcaaguucacccccgagaucgccaagcgccccaagguccgcgaccaggagggccgcaucaacuacuacugggcccuccucgagcccggcgacaccaucaucuucgaggccaacggcaaccucaucgccccccgcuacgccuucgcccucucccgcggcuucggcuccggcaucaucaacuccaacgcccccauggacaagugcgacgccaagugccagaccccccagggcgccaucaacuccucccuccccuuccagaacguccaccccgucaccaucggcgagugccccaaguacguccgcuccgccaagcuccgcauggucaccggccuccgcaacauccccuccauccagucccgcggccucuucggcgccaucgccggcuucaucgagggcggcuggaccggcauggucgacggcugguacggcuaccaccaccagaacgagcagggcuccggcuacgccgccgaccagaaguccacccagaacgccaucaacggcaucaccaacaaggucaacuccgucaucgagaagaugaacacccaguucaccgccgucggcaaggaguucaacaagcucgagcgccgcauggagaaccucaacaagaaggucgacgacggcuucaucgacaucuggaccuacaacgccgagcuccucguccuccucgagaacgagcgcacccucgacuuccacgacuccaacgucaagaaccucuacgagaaggucaagucccagcucaagaacaacgccaaggagaucggcaacggcugcuucgaguucuaccacaagugcaacgacgagugcauggaguccgucaagaacggcaccuacgacuaccccaaguacuccgaggaguccaagcucaaccgcgagaagaucgacggcgucaagcucgaguccaugggcgucuaccagauccucgccaucuacuccaccgucgccuccucccucguccuccucgucucccucggcgccaucuccuucuggaugugcuccaacggcucccuccagugccgcaucugcaucuga

SEQ ID NO: 99830 - RNA, 1698 nt, Artificial Sequence
  derived and/or modified CDS sequence (opt2) from hemagglutinin__InfluenzaA__ACZ81556
augaaggucaagcuccucguccuccucugcaccuucaccgccaccuacgccgacaccaucugcaucggcuaccacgccaacaacuccaccgacaccgucgacaccguccucgagaagaacgucaccgucacccacuccgucaaccuccucgagaacucccacaacggcaagcucugccuccucaagggcaucgccccccuccagcucggcaacugcuccgucgccggcuggauccucggcaaccccgagugcgagcuccucaucuccaaggaguccugguccuacaucgucgagaagcccaaccccgagaacggcaccugcuaccccggccacuucgccgacuacgaggagcuccgcgagcagcucuccuccgucuccuccuucgagcgcuucgagaucuuccccaaggaguccuccuggcccaaccacaccgucaccggcgccuccgccuccugcucccacaacggcgagaacuccuucuaccgcaaccuccucuggcucaccggcaagaacggccucuaccccaaccucuccaaguccuacgccaacaacaaggagaaggagguccucguccucuggggcguccaccacccccccaacaucgccgaccagaagacccucuaccacaccgagaacgccuacgucuccgucgucuccucccacuacucccgcaaguucacccccgagaucgccaagcgccccaagguccgcgaccaggagggccgcaucaacuacuacuggacccuccucgagcccggcgacaccaucaucuucgaggccaacggcaaccucaucgccccccgcuacgccuucgcccucucccgcggcuucggcuccggcaucaucaacuccaacgcccccauggacaagugcgacgccaagugccagaccccccagggcgccaucaacuccucccuccccuuccagaacguccaccccgucaccaucggcgagugccccaaguacguccgcuccgccaagcuccgcauggucaccggccuccgcaacauccccuccauccagucccgcggccucuucggcgccaucgccggcuucaucgagggcggcuggaccggcauggucgacggcugguacggcuaccaccaccagaacgagcagggcuccggcuacgccgccgaccagaaguccacccagaacgccaucaacggcaucaccaacaaggucaacuccgucaucgagaagaugaacacccaguucaccgccgucggcaaggaguucaacaagcucgagcgccgcauggagaaccucaacaagaaggucgacgacggcuucaucgacaucuggaccuacaacgccgagcuccucguccuccucgagaacgagcgcacccucgacuuccacgacuccaacgucaagaaccucuacgagaaggucaagucccagcucaagaacaacgccaaggagaucggcaacggcugcuucgaguucuaccacaagugcaacgacgagugcauggaguccgucaagaacggcaccuacgacuaccccaaguacuccgaggaguccaagcucaacaaggagaagaucgacggcgucaagcucgaguccaugggcgucuaccagauccucgccaucuacuccaccgucgccuccucccucguccuccucgucucccucggcgccaucuccuucuggaugugcuccaacggcucccuccagugccgcaucugcaucuga

SEQ ID NO: 99831 - RNA, 1701 nt, Artificial Sequence
  derived and/or modified CDS sequence (opt2) from hemagglutinin__InfluenzaA__ACZ81557
augaagaccaucaucgcccucuccuacauccucugccucgucuucgcccagaagcuccccggcaacgacaacuccaccgccacccucugccucggccaccacgccguccccaacggcaccaucgucaagaccaucaccaacgaccagaucgaggucaccaacgccaccgagcucguccaguccuccuccaccggcgagaucugcggcuccccccaccagauccucgacggcaagaacugcacccucaucgacgcccuccucggcgacccccagugcgacggcuuccagaacaagaagugggaccucuucgucgagcgcuccaaggccuacuccaacugcuaccccuacgacguccccgacuacgccucccuccgcucccucgucgccuccuccggcacccucgaguucaacaacgaguccuucaacuggaccggcgucacccagaacggcaccuccuccgccugcauccgccgcuccaagaacuccuucuucucccgccucaacuggcucacccaccucaacuucaaguaccaggcccucaacgucaccaugcccaacaacgagcaguucgacaagcucuacaucuggggcguccaccaccccggcaccgacaaggaccagaucuuccucuacgcccaggccuccggccgcaucaccgucuccaccaagcgcucccagcagaccgucauccccaacaucggcucccgcccccgcguccgcaacauccccucccgcaucuccaucuacuggaccaucgucaagcccggcgacauccuccucaucaacuccaccggcaaccucaucgccccccgcggcuacuucaagauccaguccggcaaguccuccaucaugcgcuccgacgcccccaucggcaagugcaacuccgagugcaucacccccaacggcuccauccccaacgacaagcccuuccagaacgucaaccgcaucaccuacggcgccugcccccgcuacgucaagcagaacacccucaagcucgccaccggcaugcgcaacguccccgagaagcagacccgcggcaucuucggcgccaucgccggcuucaucgagaacggcugggagggcauggucgacggcugguacggcuuccgccaccagaacuccgagggccgcggccaggccgccgaccucaaguccacccaggccgccaucgaccagaucaacggcaagcucaaccgccucaucggcaagaccaacgagaaguuccaccagaucgagaaggaguucuccgaggucgagggccgcauccaggaccucgagaaguacgucgaggacaccaagaucgaccucugguccuacaacgccgagcuccucgucgcccucgagaaccagcacaccaucgaccucaccgacuccgagaugaacaagcucuucgagaagaccaagaagcagcuccgcgagaacgccgaggacaugggcaacggcugcuucaagaucuaccacaagugcgacaacgccugcaucggcuccauccgcaacggcaccuacgaccacgacgucuaccgcgacgaggcccucaacaaccgcuuccagaucaagggcgucgagcucaaguccggcuacaaggacuggauccucuggaucuccuucgccaucuccugcuuccuccucugcgucgcccuccucggcuucaucaugugggccugccagaagggcaacauccgcugcaacaucugcaucuga

SEQ ID NO: 99832 - RNA, 1701 nt, Artificial Sequence
  derived and/or modified CDS sequence (opt2) from hemagglutinin__InfluenzaA__ACZ81558
augaagaccaucaucgcccucuccuacauccucugccucgucuucgcccagaagcuccccggcaacgacaacuccaccgccacccucugccucggccaccacgccguccccaacggcaccaucgucaagaccaucaccaacgaccagaucgaggucaccaacgccaccgagcucguccaguccuccuccaccggcgagaucugcgacuccccccaccagauccucgacggcaagaacugcacccucaucgacgcccuccucggcgacccccacugcgacggcuuccagaacaagaagugggaccucuucgucgagcgcuccaaggccuacuccaacugcuaccccuacgacguccccgacuacgccucccuccgcucccucgucgccuccuccggcacccucgaguucaacaacgaguccuucaacuggaccggcgucacccagaacggcaccuccuccgccugcauccgccgcuccaagaacuccuucuucucccgccucaacuggcucacccaccucaacuucaaguaccccgcccucaacgucaccaugcccaacaacgagcaguucgacaagcucuacaucuggggcguccaccaccccggcaccgacaaggaccagaucuuccucuacgcccaggccuccggccgcaucaccgucuccaccaagcgcucccagcagaccgccauccccaacaucggcucccgcccccgcguccgcaacauccccucccgcaucuccaucuacuggaccaucgucaagcccggcgacauccuccucaucaacuccaccggcaaccucaucgccccccgcggcuacuucaagauccgcuccggcaaguccuccaucaugcgcuccgacgcccccaucggcaagugcaacuccgagugcaucacccccaacggcuccauccccaacgacaagcccuuccagaacgucaaccgcaucaccuacggcgccugcccccgcuacgucaagcagaacacccucaagcucgccaccggcaugcgcaacguccccgagaagcagacccgcggcaucuucggcgccaucgccggcuucaucgagaacggcugggagggcauggucgacggcugguacggcuuccgccaccagaacuccgagggccgcggccaggccgccgaccucaaguccacccaggccgccaucgaccagaucaacggcaagcucaaccgccucaucgagaagaccaacgagaaguuccaccagaucgagaaggaguucuccgaggucgagggccgcauccaggaccucgagaaguacgucgaggacaccaagaucgaccucugguccuacaacgccgagcuccucgucgcccucgagaaccagcacaccaucgaccucaccgacuccgagaugaacaagcucuucgagaagaccaagaagcagcuccgcgagaacgccgaggacaugggcaacggcugcuucaagaucuaccacaagugcgacaacgccugcaucggcuccauccgcaacggcaccuacgaccacgacgucuaccgcgacgaggcccucaacaaccgcuuccagaucaagggcgucgagcucaaguccggcuacaaggacuggauccucuggaucuccuucgccaucuccugcuuccuccucugcgucgcccuccucggcuucaucaugugggccugccagaagggcaacauccgcugcaacaucugcaucuga

SEQ ID NO: 99833 - RNA, 1701 nt, Artificial Sequence
  derived and/or modified CDS sequence (opt2) from hemagglutinin__InfluenzaA__ACZ81559
augaagaccaucaucgcccucuccuacauccucugccucgucuucgcccagaagcuccccggcaacgacaacuccaccgccacccucugccucggccaccacgccguccccaacggcaccaucgucaagaccaucaccaacgaccagaucgaggucaccaacgccaccgagcucguccaguccuccuccaccggcgagaucugcgacuccccccaccagauccucgacggcaagaacugcacccucaucgacgcccuccucggcgacccccacugcgacggcuuccagaacaagaagugggaccucuucgucgagcgcuccaaggccuacuccaacugcuaccccuacgacguccccgacuacgccucccuccgcucccucgucgccuccuccggcacccucgaguucaacaacgaguccuucaacuggaccggcgucacccagaacggcaccuccuccgccugcauccgccgcuccaagaacuccuucuucucccgccucaacuggcucacccaccucaacuucaaguaccccgcccucaacgucaccaugcccaacaacgagcaguucgacaagcucuacaucuggggcguccaccaccccggcaccgacaaggaccagaucuuccucuacgcccaggccuccggccgcaucaccgucuccaccaagcgcucccagcagaccgccauccccaacaucggcucccgcccccgcguccgcaacauccccucccgcaucuccaucuacuggaccaucgucaagcccggcgacauccuccucaucaacuccaccggcaaccucaucgccccccgcggcuacuucaagauccgcuccggcaaguccuccaucaugcgcuccgacgcccccaucggcaagugcaacuccgagugcaucacccccaacggcuccauccccaacgacaagcccuuccagaacgucaaccgcaucaccuacggcgccugcccccgcuacgucaagcagaacacccucaagcucgccaccggcaugcgcaacguccccgagaagcagacccgcggcaucuucggcgccaucgccggcuucaucgagaacggcugggagggcauggucgacggcugguacggcuuccgccaccagaacuccgagggccgcggccaggccgccgaccucaaguccacccaggccgccaucgaccagaucaacggcaagcucaaccgccucaucggcaagaccaacgagaaguuccaccagaucgagaaggaguucuccgaggucgagggccgcauccaggaccucgagaaguacgucgaggacaccaagaucgaccucugguccuacaacgccgagcuccucgucgcccucgagaaccagcacaccaucgaccucaccgacuccgagaugaacaagcucuucgagaagaccaagaagcagcuccgcgagaacgccgaggacaugggcaacggcugcuucaagaucuaccacaagugcgacaacgccugcaucggcuccauccgcaacggcaccuacgaccacgacgucuaccgcgacgaggcccucaacaaccgcuuccagaucaagggcgucgagcucaaguccggcuacaaggacuggauccucuggaucuccuucgccaucuccugcuuccuccucugcgucgcccuccucggcuucaucaugugggccugccagaagggcaacauccgcugcaacaucugcaucuga

SEQ ID NO: 99834 - RNA, 1701 nt, Artificial Sequence; identical to SEQ ID NO: 98705
  derived and/or modified CDS sequence (opt2) from hemagglutinin__InfluenzaA__ACZ81632

SEQ ID NO: 99835 - RNA, 1701 nt, Artificial Sequence; identical to SEQ ID NO: 98705
  derived and/or modified CDS sequence (opt2) from hemagglutinin__InfluenzaA__ACZ81642

SEQ ID NO: 99836 - RNA, 1701 nt, Artificial Sequence
  derived and/or modified CDS sequence (opt2) from hemagglutinin__InfluenzaA__ACZ81652
augaaggccauccucgucguccuccucuacaccuucgccaccgccaacgccgacacccucugcaucggcuaccacgccaacaacuccaccgacaccgucgacaccguccucgagcgcaacgucaccgucacccacuccgucaaccuccucgaggacaagcacaacggcaagcucugcaagcuccgcggcgucgccccccuccaccucggcaagugcaacaucgccggcuggauccucggcaaccccgagugcgagucccucuccaccgccuccuccugguccuacaucgucgagaccuccuccuccgacaacggcaccugcuaccccggcgacuucaucgacuacgaggagcuccgcgagcagcucuccuccgucuccuccuucgagcgcuucgagaucuuccccaagaccuccuccuggcccaaccacgacuccaacaagggcgucaccgccgccugcccccacgccgaggccaaguccuucuacaagaaccucaucuggcucgucaagaagggcaacuccuaccccaagcucuccaaguccuacaucaacgacaagggcaaggagguccucguccucuggggcauccaccaccccuccaccuccgccgaccagcagucccucuaccagaacgccgacgccuacgucuucgucggcaccucccgcuacuccaagaaguucaagcccgagaucgccauccgccccaagguccgcggccaggagggccgcaugaacuacuacuggacccucgucgagcccggcgacaagaucaccuucgaggccaccggcaaccucgucgucccccgcuacgccuucgccauggagcgcaacgccggcuccggcaucaucaucuccgacacccccguccacgacugcaacaccaccugccagacccccaagggcgccaucaacaccucccuccccuuccagaacauccaccccaucaccaucggcaagugccccaaguacgucaaguccaccaagcuccgccucgccaccggccuccgcaacguccccuccauccagucccgcggccucuucggcgccaucgccggcuucaucgagggcggcuggaccggcauggucgacggcugguacggcuaccaccaccagaacgagcagggcuccggcuacgccgccgaccucaaguccacccagaacgccaucgacgagaucaccaacaaggucaacuccgucaucgagaagaugaacacccaguucaccgccgucggcaaggaguucaaccaccucgagaagcgcaucgagaaccucaacaagaaggucgacgacggcuuccucgacaucuggaccuacaacgccgagcuccucguccuccucgagaacgagcgcacccucgacuaccacgacuccaacgucaagaaccucuacgagaagguccgcucccagcucaagaacaacgccaaggagaucggcaacggcugcuucgaguucuaccacaagugcgacaacaccugcauggaguccgucaagaacggcaccuacgacuaccccaaguacuccgaggaggccaagcucaaccgcgaggagaucgacggcgucaagcucgaguccacccgcaucuaccagauccucgccaucuacuccaccgucgccuccucccucguccucgucgucucccucggcgccaucuccuucuggaugugcuccaacggcucccuccagugccgcaucugcaucuga

SEQ ID NO: 99837 - RNA, 1701 nt, Artificial Sequence
  derived and/or modified CDS sequence (opt2) from hemagglutinin__InfluenzaA__ACZ92130
auggaggccauccucgucguccuccucuacaccuucgccaccgccaacgccgacacccucugcaucggcuaccacgccaacaacuccaccgacaccgucgacaccguccucgagaagaacgucaccgucacccacuccgucaaccuccucgaggacaagcacaacggcaagcucugcaagcuccgcggcgucgccccccuccaccucggcaagugcaacaucgccggcuggauccucggcaaccccgagugcgagucccucuccaccgccuccuccugguccuacaucgucgagaccuccuccuccgacaacggcaccugcuaccccggcgacuucaucgacuacgaggagcuccgcgagcagcucuccuccgucuccuccuucgagcgcuucgagaucuuccccaagaccuccuccuggcccaaccacgacuccaacaagggcgucaccgccgccugcccccacgccggcgccaaguccuucuacaagaaccucaucuggcucgucaagaagggcaacuccuaccccaagcucuccaaguccuacaucaacgacaagggcaaggagguccucguccucuggggcauccaccaccccuccaccuccgccgaccagcagucccucuaccagaacgccgacgccuacgucuucgucggcuccucccgcuacuccaagaaguucaagcccgagaucgccauccgccccaagguccgcgaccaggagggccgcaugaacuacuacuggacccucgucgagcccggcgacaagaucaccuucgaggccaccggcaaccucgucgucccccgcuacgccuucgccauggagcgcaacgccggcuccggcaucaucaucuccgacacccccguccacgacugcaacaccaccugccagacccccaagggcgccaucaacaccucccuccccuuccacaacauccaccccaucaccaucggcaagugccccaaguacgucaaguccaccaagcuccgccucgccaccggccuccgcaacguccccuccauccagucccgcggccucuucggcgccaucgccggcuucaucgagggcggcuggaccggcauggucgacggcugguacggcuaccaccaccagaacgagcagggcuccggcuacgccgccgaccucaaguccacccagaacgccaucgacgagaucaccaacaaggucaacuccgucaucgagaagaugaacacccaguucaccgccgucggcaaggaguucaaccaccucgagaagcgcaucgagaaccucaacaagaaggucgacgacggcuuccucgacaucuggaccuacaacgccgagcuccucguccuccucgagaacgagcgcacccucgacuaccacgacuccaacgucaagaaccucuacgagaagguccgcucccagcucaagaacaacgccaaggagaucggcaacggcugcuucgaguucuaccacaagugcgacaacaccugcaucgaguccgucaagaacggcaccuacgacuaccccaaguacuccgaggaggccaagcucaaccgcgaggagaucgacggcgucaagcucgaguccacccgcaucuaccagauccucgccaucuacuccaccgucgccuccucccucguccucgucgucucccucggcgccaucuccuucuggaugugcuccaacggcucccuccagugccgcaucugcaucuga

SEQ ID NO: 99838 - RNA, 1701 nt, Artificial Sequence; identical to SEQ ID NO: 98947
  derived and/or modified CDS sequence (opt2) from hemagglutinin__InfluenzaA__ACZ92131

SEQ ID NO: 99839 - RNA, 1701 nt, Artificial Sequence; identical to SEQ ID NO: 98947
  derived and/or modified CDS sequence (opt2) from hemagglutinin__InfluenzaA__ACZ92132

SEQ ID NO: 99840 - RNA, 1701 nt, Artificial Sequence; identical to SEQ ID NO: 98947
  derived and/or modified CDS sequence (opt2) from hemagglutinin__InfluenzaA__ACZ92133

SEQ ID NO: 99841 - RNA, 1701 nt, Artificial Sequence; identical to SEQ ID NO: 98705
  derived and/or modified CDS sequence (opt2) from hemagglutinin__InfluenzaA__ACZ92134

SEQ ID NO: 99842 - RNA, 1701 nt, Artificial Sequence; identical to SEQ ID NO: 98705
  derived and/or modified CDS sequence (opt2) from hemagglutinin__InfluenzaA__ACZ95465

SEQ ID NO: 99843 - RNA, 1701 nt, Artificial Sequence; identical to SEQ ID NO: 98692
  derived and/or modified CDS sequence (opt2) from hemagglutinin__InfluenzaA__ACZ95837

SEQ ID NO: 99844 - RNA, 1701 nt, Artificial Sequence; identical to SEQ ID NO: 98705
  derived and/or modified CDS sequence (opt2) from hemagglutinin__InfluenzaA__ACZ95847

SEQ ID NO: 99845 - RNA, 1701 nt, Artificial Sequence
  derived and/or modified CDS sequence (opt2) from hemagglutinin__InfluenzaA__ACZ95857
augaaggccauccucgucguccuccucuacaccuucgccaccgccaacgccgacacccucugcaucggcuaccacgccaacaacuccaccgacaccgucgacaccguccucgagaagaacgucaccgucacccacuccgucaaccuccucgaggacaagcacaacggcaagcucugcaagcuccgcggcgucgccccccuccaccucggcaagugcaacaucgccggcuggauccucggcaaccccgagugcgagucccucuccaccgccuccuccugguccuacaucgucgagaccuccuccuccgacaacggcaccugcuaccccggcgacuucaucgacuacgaggagcuccgcgagcagcucuccuccgucuccuccuucgagcgcuucgagaucuuccccaagaccuccuccuggcccaaccacgacuccaacaagggcgucaccgccgccugcccccacgccggcgccaaguccuucuacaagaaccucaucuggcucgucaagaagggcaacuccuaccccaagcucuccaaguccuacaucaacgacaagggcaaggagguccucguccucuggggcauccaccaccccuccaccuccgccgaccagcagucccucuaccagaacgccgacgccuacgucuucgucggcaccucccgcuacuccaagaaguucaagcccgagaucgccauccgccccaagguccgcgaccaggagggccgcaugaacuacuacuggacccucgucgagcccggcgacaagaucaccuucgaggccaccggcaaccucgucgucccccgcuacgccuucgccauggagcgcaacgccggcuccggcaucaucaucuccgacacccccguccacgacugcaacaccaccugccagaccuccaagggcgccaucaacaccucccuccccuuccagaacauccaccccaucaccaucggcaagugccccaaguacgucaaguccaccaagcuccgccucgccaccggccuccgcaacguccccuccauccagucccgcggccucuucggcgccaucgccggcuucaucgagggcggcuggaccggcauggucgacggcugguacggcuaccaccaccagaacgagcagggcuccggcuacgccgccgaccucaaguccacccagaacgccaucgacgagaucaccaacaaggucaacuccgucaucgagaagaugaacacccaguucaccgccgucggcaaggaguucaaccaccucgagaagcgcaucgagaaccucaacaagaaggucgacgacggcuuccucgacaucuggaccuacaacgccgagcuccucguccuccucgagaacgagcgcacccucgacuaccacgacuccaacgucaagaaccucuacgagaagguccgcucccagcucaagaacaacgccaaggagaucggcaacggcugcuucgaguucuaccacaagugcgacaacaccugcauggaguccgucaagaacggcaccuacgacuaccccaaguacuccgaggaggccaagcucaaccgcgaggagaucgacggcgucaagcucgaguccacccgcaucuaccagauccucgccaucuacuccaccgucgccuccucccucguccucgucgucucccucggcgccaucuccuucuggaugugcuccaacggcucccuccagugccgcaucugcaucuga

SEQ ID NO: 99846 - RNA, 1701 nt, Artificial Sequence; identical to SEQ ID NO: 98705
  derived and/or modified CDS sequence (opt2) from hemagglutinin__InfluenzaA__ACZ95867

SEQ ID NO: 99847 - RNA, 1701 nt, Artificial Sequence
  derived and/or modified CDS sequence (opt2) from hemagglutinin__InfluenzaA__ACZ95887
auggaggccauccucgucguccuccucuacaccuucgccaccgccaacgccgacacccucugcaucggcuaccacgccaacaacuccaccgacaccgucgacaccguccucgagaagaacgucaccgucacccacuccgucaaccuccucgaggacaagcacaacggcaagcucugcaagcuccgcggcgucgccccccuccaccucggcaagugcaacaucgccggcuggauccucggcaaccccgagugcgagucccucuccaccgccuccuccugguccuacaucgucgagaccuccuccuccgacaacggcaccugcuaccccggcgacuucaucgacuacgaggagcuccgcgagcagcucuccuccgucuccuccuucgagcgcuucgagaucuuccccaagaccuccuccuggcccaaccacgacuccaacaagggcgucaccgccgccugcccccacgccggcgccaaguccuucuacaagaaccucaucuggcucgucaagaagggcaacuccuaccccaagcucuccaaguccuacaucaacgacaagggcaaggagguccucguccucuggggcauccaccaccccuccaccuccgccgaccagcagucccucuaccagaacgccgacgccuacgucuucgucggcuccucccgcuacuccaagaaguucaagcccgagaucgccauccgccccaagguccgcaaccaggagggccgcaugaacuacuacuggacccucgucgagcccggcgacaagaucaccuucgaggccaccggcaaccucgucgucccccgcuacgccuucgccauggagcgcaacgccggcuccggcaucaucaucuccgacacccccguccacgacugcaacaccaccugccagacccccaagggcgccaucaacaccucccuccccuuccacaacauccaccccaucaccaucggcaagugccccaaguacgucaaguccaccaagcuccgccucgccaccggccuccgcaacguccccuccauccagucccgcggccucuucggcgccaucgccggcuucaucgagggcggcuggaccggcauggucgacggcugguacggcuaccaccaccagaacgagcagggcuccggcuacgccgccgaccucaaguccacccagaacgccaucgacgagaucaccaacaaggucaacuccgucaucgagaagaugaacacccaguucaccgccgucggcaaggaguucaaccaccucgagaagcgcaucgagaaccucaacaagaaggucgacgacggcuuccucgacaucuggaccuacaacgccgagcuccucguccuccucgagaacgagcgcacccucgacuaccacgacuccaacgucaagaaccucuacgagaagguccgcucccagcucaagaacaacgccaaggagaucggcaacggcugcuucgaguucuaccacaagugcgacaacaccugcauggaguccgucaagaacggcaccuacgacuaccccaaguacuccgaggaggccaagcucaaccgcgaggagaucgacggcgucaagcucgaguccacccgcaucuaccagauccucgccaucuacuccaccgucgccuccucccucguccucgucgucucccucggcgccaucuccuucuggaugugcuccaacggcucccuccagugccgcaucugcaucuga

SEQ ID NO: 99848 - RNA, 1701 nt, Artificial Sequence; identical to SEQ ID NO: 98705
  derived and/or modified CDS sequence (opt2) from hemagglutinin__InfluenzaA__ACZ95897

SEQ ID NO: 99849 - RNA, 1701 nt, Artificial Sequence
  derived and/or modified CDS sequence (opt2) from hemagglutinin__InfluenzaA__ACZ95907
augaaggccauccucgucguccuccucuacaccuucgccaccgccaacgccgacacccucugcaucggcuaccacgccaacaacuccaccgacaccgucgacaccguccucgagaagaacgucaccgucacccacuccgucaaccuccucgaggacaagcacaacggcaagcucugcaagcuccgcggcgucgccccccuccaccucggcaagugcaacaucgccggcuggauccucggcaaccccgagugcgagucccucuccaccgccuccuccugguccuacaucgucgagaccuccuccuccgacaacggcaccugcuaccccggcgacuucaucgacuacgaggagcuccgcgagcagcucuccuccgucuccuccuucgagcgcuucgagaucuuccccaagaccuccuccuggcccaaccacgacuccaacaagggcgucaccgccgccugcccccacgccggcgccaaguccuucuacaagaaccucaucuggcucgucaagaagggcaacuccuaccccaagcucuccaaguccuacaucaacgacaagggcaaggagguccucguccucuggggcauccaccaccccuccaccuccgccgaccagcagucccucuaccagaacgccgacgccuacgucuucgucggcaccucccgcuacuccaagaaguucaagcccgagaucgccauccgccccaagguccgcgaccaggagggccgcaugaacuacuacuggacccucgucgagcccggcgacaagaucaccuucgaggccaccggcaaccucgucgucccccgcuacgccuucgccauggagcgcaacgccggcuccggcaucaucaucuccgacacccccgucuacgacugcaacaccaccugccagacccccaagggcgccaucaacaccucccuccccuuccagaacauccaccccaucaccaucggcaagugccccaaguacgucaaguccaccaagcuccgccucgccaccggccuccgcaacguccccuccauccagucccgcggccucuucggcgccaucgccggcuucaucgagggcggcuggaccggcauggucgacggcugguacggcuaccaccaccagaacgagcagggcuccggcuacgccgccgaccucaaguccacccagaacgccaucgacgagaucaccaacaaggucaacuccgucaucgagaagaugaacacccaguucaccgccgucggcaaggaguucaaccaccucgagaagcgcaucgagaaccucaacaagaaggucgacgacggcuuccucgacaucuggaccuacaacgccgagcuccucguccuccucgagaacgagcgcacccucgacuaccacgacuccaacgucaagaaccucuacgagaagguccgcucccagcucaagaacaacgccaaggagaucggcaacggcugcuucgaguucuaccacaagugcgacaacaccugcauggaguccgucaagaacggcaccuacgacuaccccaaguacuccgaggaggccaagcucaaccgcgaggagaucgacggcgucaagcucgaguccacccgcaucuaccagauccucgccaucuacuccaccgucgccuccucccucguccucgucgucucccucggcgccaucuccuucuggaugugcuccaacggcucccuccagugccgcaucugcaucuga

SEQ ID NO: 99850 - RNA, 1701 nt, Artificial Sequence; identical to SEQ ID NO: 98705
  derived and/or modified CDS sequence (opt2) from hemagglutinin__InfluenzaA__ACZ95927

SEQ ID NO: 99851 - RNA, 1701 nt, Artificial Sequence
  derived and/or modified CDS sequence (opt2) from hemagglutinin__InfluenzaA__ACZ95937
auggaggccauccucgucguccuccucuacaccuucgccaccgccaacgccgacacccucugcaucggcuaccacgccaacaacuccaccgacaccgucgacaccguccucgagaagaacgucaccgucacccacuccgucaaccuccucgaggacaagcacaacggcaagcucugcaagcuccgcggcgucgccccccuccaccucggcaagugcaacaucgccggcuggauccucggcaaccccgagugcgagucccucuccaccgccuccuccugguccuacaucgucgagaccuccuccuccgacaacggcaccugcuaccccggcgacuucaucgacuacgaggagcuccgcgagcagcucuccuccgucuccuccuucgagcgcuucgagaucuuccccaagaccuccuccuggcccaaccacgacuccaacaagggcgucaccgccgccugcccccacgccggcgccaaguccuucuacaagaaccucaucuggcucgucaagaagggcaacuccuaccccaagcucuccaaguccuacaucaacgacaagggcaaggagguccucguccucuggggcauccaccaccccuccaccaacgccgaccagcagucccucuaccagaacgccgacgccuacgucuucgucggcuccucccgcuacuccaagaaguucaagcccgagaucgccauccgccccaagguccgcgaccaggagggccgcaugaacuacuacuggacccucgucgagcccggcgacaagaucaccuucgaggccaccggcaaccucgucgucccccgcuacgccuucgccauggagcgcaacgccggcuccggcaucaucaucuccgacacccccguccacgacugcaacaccaccugccagacccccaagggcgccaucaacaccucccuccccuuccacaacauccaccccaucaccaucggcaagugccccaaguacgucaaguccaccaagcuccgccucgccaccggccuccgcaacguccccuccauccagucccgcggccucuucggcgccaucgccggcuucaucgagggcggcuggaccggcauggucgacggcugguacggcuaccaccaccagaacgagcagggcuccggcuacgccgccgaccucaaguccacccagaacgccaucgacgagaucaccaacaaggucaacuccgucaucgagaagaugaacacccaguucaccgccgucggcaaggaguucaaccaccucgagaagcgcaucgagaaccucaacaagaaggucgacgacggcuuccucgacaucuggaccuacaacgccgagcuccucguccuccucgagaacgagcgcacccucgacuaccacgacuccaacgucaagaaccucuacgagaagguccgcucccagcucaagaacaacgccaaggagaucggcaacggcugcuucgaguucuaccacaagugcgacaacaccugcauggaguccgucaagaacggcaccuacgacuaccccaaguacuccgaggaggccaagcucaaccgcgaggagaucgacggcgucaagcucgaguccacccgcaucuaccagauccucgccaucuacuccaccgucgccuccucccucguccucgucgucucccucggcgccaucuccuucuggaugugcuccaacggcucccuccagugccgcaucugcaucuga

SEQ ID NO: 99852 - RNA, 1701 nt, Artificial Sequence; identical to SEQ ID NO: 98947
  derived and/or modified CDS sequence (opt2) from hemagglutinin__InfluenzaA__ACZ95947

SEQ ID NO: 99853 - RNA, 1701 nt, Artificial Sequence; identical to SEQ ID NO: 98705
  derived and/or modified CDS sequence (opt2) from hemagglutinin__InfluenzaA__ACZ95957

SEQ ID NO: 99854 - RNA, 1701 nt, Artificial Sequence; identical to SEQ ID NO: 98947
  derived and/or modified CDS sequence (opt2) from hemagglutinin__InfluenzaA__ACZ95967

SEQ ID NO: 99855 - RNA, 1701 nt, Artificial Sequence; identical to SEQ ID NO: 99851
  derived and/or modified CDS sequence (opt2) from hemagglutinin__InfluenzaA__ACZ95977

SEQ ID NO: 99856 - RNA, 1701 nt, Artificial Sequence
  derived and/or modified CDS sequence (opt2) from hemagglutinin__InfluenzaA__ACZ95987
augaaggccauccucgucguccuccucuacaccuucgccaccgccaacgccgacacccucugcaucggcuaccacgccaacaacuccaccgacaccgucgacaccguccucgagaagaacgucaccgucacccacuccgucaaccuccucgaggacaagcacaacggcaagcucugcaagcuccgcggcgucgccccccuccaccucggcaagugcaacaucgccggcuggauccucggcaaccccgagugcgagucccucuccaccgccuccuccugguccuacaucgucgagaccuccuccuccgacaacggcaccugcuaccccggcgacuucaucgacuacgaggagcuccgcgagcagcucuccuccgucuccuccuucgagcgcuucgagaucuuccccaagaccuccuccuggcccaaccacgacuccaacaagggcgucaccgccgccugcccccacgccggcgccaaguccuucuacaagaaccucaucuggcucgucaagaagggcaacuccuaccccaagcucuccaaguccuacaucaacgacaagggcaaggagguccucguccucuggggcauccaccaccccuccaccuccgccgaccagcagucccucuaccagaacgccgacgccuacgucuucgucggcaccucccgcuacuccaagaaguucaagcccgagaucgccauccgccccaagguccgcgaccaggagggccgcaugaacuacuacuggacccucgucgagcccggcgacaagaucaccuucgaggccaccggcaaccucgucgucccccgcuacgccuucgccauggagcgcaacgccggcuccggcaucaucaucuccgacacccccguccacgacugcaacaccaccugccagacccccaagggcgccaucaacaccucccuccccuuccagaacauccaccccaucaccaucggcaagugccccaaguacgucaaguccaccaagcuccgccucgccaccggccuccgcaacauccccuccauccagucccgcggccucuucggcgccaucgccggcuucaucgagggcggcuggaccggcaugaucgacggcugguacggcuaccaccaccagaacgagcagggcuccggcuacgccgccgaccucaaguccacccagaacgccaucgacgagaucaccaacaaggucaacuccgucaucgagaagaugaacacccaguucaccgccgucggcaaggaguucaaccaccucgagaagcgcaucgagaaccucaacaagaaggucgacgacggcuuccucgacaucuggaccuacaacgccgagcuccucguccuccucgagaacgagcgcacccucgacuaccacgacuccaacgucaagaaccucuacgagaagguccgcucccagcucaagaacaacgccaaggagaucggcaacggcugcuucgaguucuaccacaagugcgacaacaccugcauggaguccgucaagaacggcaccuacgacuaccccaaguacuccgaggaggccaagcucaaccgcgaggagaucgacggcgucaagcucgaguccacccgcaucuaccagauccucgccaucuacuccaccgucgccuccucccucguccucgucgucucccucggcgccaucuccuucuggaugugcuccaacggcucccuccagugccgcaucugcaucuga

SEQ ID NO: 99857 - RNA, 1701 nt, Artificial Sequence; identical to SEQ ID NO: 98705
  derived and/or modified CDS sequence (opt2) from hemagglutinin__InfluenzaA__ACZ95997

SEQ ID NO: 99858 - RNA, 1701 nt, Artificial Sequence; identical to SEQ ID NO: 98705
  derived and/or modified CDS sequence (opt2) from hemagglutinin__InfluenzaA__ACZ96007

SEQ ID NO: 99859 - RNA, 1701 nt, Artificial Sequence; identical to SEQ ID NO: 98692
  derived and/or modified CDS sequence (opt2) from hemagglutinin__InfluenzaA__ACZ96017

SEQ ID NO: 99860 - RNA, 1701 nt, Artificial Sequence; identical to SEQ ID NO: 98705
  derived and/or modified CDS sequence (opt2) from hemagglutinin__InfluenzaA__ACZ96027

SEQ ID NO: 99861 - RNA, 1701 nt, Artificial Sequence; identical to SEQ ID NO: 99851
  derived and/or modified CDS sequence (opt2) from hemagglutinin__InfluenzaA__ACZ96047

SEQ ID NO: 99862 - RNA, 1701 nt, Artificial Sequence
  derived and/or modified CDS sequence (opt2) from hemagglutinin__InfluenzaA__ACZ96057
augaaggccauccucgucguccuccucuacaccuucgccaccgccaacgccgacacccucugcaucggcuaccacgccaacaacuccaccgacaccgucgacaccguccucgagaagaacgucaccgucacccacuccgucaaccuccucgaggacaagcacaacggcaagcucugcaagcuccgcggcgucgccccccuccaccucggcaagugcaacaucgccggcuggauccucggcaaccccgagugcgagucccucuccaccgccuccuccugguccuacaucgucgagaccuccuccuccgacaacggcaccugcuaccccggcgacuucaucgacuacgaggagcuccgcgagcagcucuccuccgucuccuccuucgagcgcuucgagaucuuccccaagaccuccuccuggcccaaccacgacuccaacaagggcgucaccgccgccugccuccacgccggcgccaaguccuucuacaagaaccucaucuggcucgucaagaagggcaacuccuaccccaagcucuccaaguccuacaucaacgacaagggcaaggagguccucguccucuggggcauccaccaccccuccaccuccgccgaccagcagucccucuaccagaacgccgacgccuacgucuucgucggcaccucccgcuacuccaagaaguucaagcccgagaucgccauccgccccaagguccgcgaccaggagggccgcaugaacuacuacuggacccucgucgagcccggcgacaagaucaccuucgaggccaccggcaaccucgucgucccccgcuacgccuucgccauggagcgcaacgccggcuccggcaucaucaucuccgacacccccguccacgacugcaacaccaccugccagacccccaagggcgccaucaacaccucccuccccuuccagaacauccaccccaucaccaucggcaagugccccaaguacgucaaguccaccaagcuccgccucgccaccggccuccgcaacauccccuccauccagucccgcggccucuucggcgccaucgccggcuucaucgagggcggcuggaccggcauggucgacggcugguacggcuaccaccaccagaacgagcagggcuccggcuacgccgccgaccucaaguccacccagaacgccaucgacgagaucaccaacaaggucaacuccgucaucgagaagaugaacacccaguucaccgccgucggcaaggaguucaaccaccucgagaagcgcaucgagaaccucaacaagaaggucgacgacggcuuccucgacaucuggaccuacaacgccgagcuccucguccuccucgagaacgagcgcacccucgacuaccacgacuccaacgucaagaaccucuacgagaagguccgcucccagcucaagaacaacgccaaggagaucggcaacggcugcuucgaguucuaccacaagugcgacaacaccugcauggaguccgucaagaacggcaccuacgacuaccccaaguacuccgaggaggccaagcucaaccgcgaggagaucgacggcgucaagcucgaguccacccgcaucuaccagauccucgccaucuacuccaccgucgccuccucccucguccucgucgucucccucggcgccaucuccuucuggaugugcuccaacggcucccuccagugccgcaucugcaucuga

SEQ ID NO: 99863 - RNA, 1701 nt, Artificial Sequence
  derived and/or modified CDS sequence (opt2) from hemagglutinin__InfluenzaA__ACZ96069
augaaggccauccucgucguccuccucuacaccuucgccaccgccaacgccgacacccucugcaucggcuaccacgccaacaacuccaccgacaccgucgacaccguccucgagaagaacgucaccgucacccacuccgucaaccuccucgaggacaagcacaacggcaagcucugcaagcuccgcggcgucgccccccuccaccucggcaagugcaacaucgccggcuggauccucggcaaccccgagugcgagucccucuccaccgccuccuccugguccuacaucgucgagaccuccuccuccgacaacggcaccugcuaccccggcgacuucaucgacuacgaggagcuccgcgagcagcucuccuccgucuccuccuucgagcgcuucgagaucuuccccaagaccuccuccuggcccaaccacgacuccaacaagggcgucaccgccgccugcccccacgccggcgccaaguccuucuacaagaaccucaucuggcucgucaagaagggcaacuccuaccccaagcucuccaaguccuacaucaacgacaagggcaaggagguccucguccucuggggcauccaccaccccuccaccuccgccgaccagcagucccucuaccagaacgccgacgccuacgucuucgucggcaccucccgcuacuccaagaaguucaagcccgagaucgccauccgccccaagguccgcgaccaggagggccgcaugaacuacuacuggacccucgucgagcccggcaacaagaucaccuucgaggccaccggcaaccucgucgucccccgcuacgccuucgccauggagcgcaacgccggcuccggcaucaucaucuccgacacccccguccacgacugcaacaccaccugccagacccccaagggcgccaucaacaccucccuccccuuccagaacauccaccccaucaccaucggcaagugccccaaguacgucaaguccaccaagcuccgccucgccaccggccuccgcaacguccccuccauccagucccgcggccucuucggcgccaucgccggcuucaucgagggcggcuggaccggcauggucgacggcugguacggcuaccaccaccagaacgagcagggcuccggcuacgccgccgaccucaaguccacccagaacgccaucgacgagaucaccaacaaggucaacuccgucaucgagaagaugaacacccaguucaccgccgucggcaaggaguucaaccaccucgagaagcgcaucgagaaccucaacaagaaggucgacgacggcuuccucgacaucuggaccuacaacgccgagcuccucguccuccucgagaacgagcgcacccucgacuaccacgacuccaacgucaagaaccucuacgagaagguccgcucccagcucaagaacaacgccaaggagaucggcaacggcugcuucgaguucuaccacaagugcgacaacaccugcauggaguccgucaagaacggcaccuacgacuaccccaaguacuccgaggaggccaagcucaaccgcgaggagaucgacggcgucaagcucgaguccacccgcaucuaccagauccucgccaucuacuccaccgucgccuccucccucguccucgucgucucccucggcgccaucuccuucuggaugugcuccaacggcucccuccagugccgcaucugcaucuga

SEQ ID NO: 99864 - RNA, 1701 nt, Artificial Sequence; identical to SEQ ID NO: 99851
  derived and/or modified CDS sequence (opt2) from hemagglutinin__InfluenzaA__ACZ96089

SEQ ID NO: 99865 - RNA, 1701 nt, Artificial Sequence
  derived and/or modified CDS sequence (opt2) from hemagglutinin__InfluenzaA__ACZ96119
augaaggccauccucgucguccuccucuacaccuucgccaccgccaacgccgacacccucugcaucggcuaccacgccaacaacuccaccgacaccgucgacaccguccucgagaagaacgucaccgucacccacuccgucaaccuccucgaggacaagcacaacggcaagcucugcaagcuccgcggcgucgccccccuccaccucggcaagugcaacaucgccggcuggauccucggcaaccccgagugcgagucccucuccaccgccuccuccugguccuacaucgucgagaccuccuccuccgacaacggcaccugcuaccccggcgacuucaucgacuacgaggagcuccgcgagcagcucuccuccgucuccuccuucgagcgcuucgagauguuccccaagaccuccuccuggcccaaccacgacuccaacaagggcgucaccgccgccugcccccacgccggcgccaaguccuucuacaagaaccucaucuggcucgucaagaagggcaacuccuaccccaagcucuccaaguccuacaucaacgacaagggcaaggagguccucguccucuggggcauccaccaccccuccaccuccgccgaccagcagucccucuaccagaacgccgacgccuacgucuucgucggcaccucccgcuacuccaagaaguucaagcccgagaucgccauccgccccaagguccgcgaccaggagggccgcaugaacuacuacuggacccucgucgagcccggcgacaagaucaccuucgaggccaccggcaaccucgucgucccccgcuacgccuucgccauggagcgcaacgccggcuccggcaucaucaucuccgacacccccguccacgacugcaacaccaccugccagacccccaagggcgccaucaacaccucccuccccuuccagaacauccaccccaucaccaucggcaagugccccaaguacgucaaguccaccaagcuccgccucgccaccggccuccgcaacguccccuccauccagucccgcggccucuucggcgccaucgccggcuucaucgagggcggcuggaccggcauggucgacggcugguacggcuaccaccaccagaacgagcagggcuccggcuacgccgccgaccucaaguccacccagaacgccaucgacgagaucaccaacaaggucaacuccgucaucgagaagaugaacacccaguucaccgccgucggcaaggaguucaaccaccucgagaagcgcaucgagaaccucaacaagaaggucgacgacggcuuccucgacaucuggaccuacaacgccgagcuccucguccuccucgagaacgagcgcacccucgacuaccacgacuccaacgucaagaaccucuacgagaagguccgcucccagcucaagaacaacgccaaggagaucggcaacggcugcuucgaguucuaccacaagugcgacaacaccugcauggaguccgucaagaacggcaccuacgacuaccccaaguacuccgaggaggccaagcucaaccgcgaggagaucgacggcgucaagcucgaguccacccgcaucuaccagauccucgccaucuacuccaccgucgccuccucccucguccucgucgucucccucggcgccaucuccuucuggaugugcuccaacggcucccuccagugccgcaucugcaucuga

SEQ ID NO: 99866 - RNA, 1701 nt, Artificial Sequence
  derived and/or modified CDS sequence (opt2) from hemagglutinin__InfluenzaA__ACZ96129
augaaggccauccucgucguccuccucuacaccuucgccaccgccaacgccgacacccucugcaucggcuaccacgccaacaacuccaccgacaccgucgacaccguccucgagaagaacgucaccgucacccacuccgucaaccuccucgaggacaagcacaacggcaagcucugcaagcuccgcggcgucgccccccuccaccucggcaagugcaacaucgccggcuggauccucggcaaccccgagugcgagucccucuccaccgccuccuccugguccuacaucgucgagaccuccuccuccgacaacggcaccugcuaccccggcgaguucaucgacuacgaggagcuccgcgagcagcucuccuccgucuccuccuucgagcgcuucgagaucuuccccaagaccuccuccuggcccaaccacgacuccaacaagggcgucaccgccgccugcccccacgccggcgccaaguccuucuacaagaaccucaucuggcucgucaagaagggcaacuccuaccccaagcucuccaaguccuacaucaacgacaagggcaaggagguccucguccucuggggcauccaccaccccuccaccuccgccgaccagcagucccucuaccagaacgccgacgccuacgucuucgucggcaccucccgcuacuccaagaaguucaagcccgagaucgccauccgccccaagguccgcgaccaggagggccgcaugaacuacuacuggacccucgucgagcccggcgacaagaucaccuucgaggccaccggcaaccucgucgucccccgcuacgccuucgccauggagcgcaacgccggcuccggcaucaucaucuccgacacccccguccacgacugcaacaccaccugccagacccccaagggcgccaucaacaccucccuccccuuccagaacauccaccccaucaccaucggcaagugccccaaguacgucaaguccaccaagcuccgccucgccaccggccuccgcaacguccccuccauccagucccgcggccucuucggcgccaucgccggcuucaucgagggcggcuggaccggcauggucgacggcugguacggcuaccaccaccagaacgagcagggcuccggcuacgccgccgaccucaaguccacccagaacgccaucgacgagaucaccaacaaggucaacuccgucaucgagaagaugaacacccaguucaccgccgucggcaaggaguucaaccaccucgagaagcgcaucgagaaccucaacaagaaggucgacgacggcuuccucgacaucuggaccuacaacgccgagcuccucguccuccucgagaacgagcgcacccucgacuaccacgacuccaacgucaagaaccucuacgagaagguccgcucccagcucaagaacaacgccaaggagaucggcaacggcugcuucgaguucuaccacaagugcgacaacaccugcauggaguccgucaagaacggcaccuacgacuaccccaaguacuccgaggaggccaagcucaaccgcgaggagaucgacggcgucaagcucgaguccacccgcaucuaccagauccucgccaucuacuccaccgucgccuccucccucguccucgucgucucccucggcgccaucuccuucuggaugugcuccaacggcucccuccagugccgcaucugcaucuga

SEQ ID NO: 99867 - RNA, 1701 nt, Artificial Sequence; identical to SEQ ID NO: 98705
  derived and/or modified CDS sequence (opt2) from hemagglutinin__InfluenzaA__ACZ96149

SEQ ID NO: 99868 - RNA, 1701 nt, Artificial Sequence; identical to SEQ ID NO: 98705
  derived and/or modified CDS sequence (opt2) from hemagglutinin__InfluenzaA__ACZ96159

SEQ ID NO: 99869 - RNA, 1701 nt, Artificial Sequence
  derived and/or modified CDS sequence (opt2) from hemagglutinin__InfluenzaA__ACZ96179
augaaggccauccucgucguccuccucuacaccuucgccaccgccaacgccgacacccucugcaucggcuaccacgccaacaacuccaccgacaccgucgacaccguccucgagaagaacgucaccgucacccacuccgucaaccuccucgaggacaagcacaacggcaagcucugcaagcuccgcggcgucgccccccuccaccucggcaagugcaacaucgccggcuggauccucggcaaccccgagugcgagucccucuccaccgccuccuccugguccuacaucgucgagaccuccuccuccgacaacggcaccugcuaccccggcgacuucaucgacuacgaggagcuccgcgagcagcucuccuccgucuccuccuucgagcgcuucgagaucuuccccaagaccuccuccuggcccaaccacgacuccaacaagggcgucaccgccgccugcccccacgccggcgccaaguccuucuacaagaaccucaucuggcucgucaagaagggcaacuccuaccccaagcucuccaaguccuacaucaacgacaagggcaaggagguccucguccucuggggcauccaccaccccuccaccuccgccgaccagcagucccucuaccagaacgccgacgccuacgucuucgucggcaccucccgcuacuccaagaaguucaagcccgagaucgccauccgccccaagguccgcgaccaggagggccgcaugaacuacuacuggacccucgucgagcccggcgacaagaucaccuucgaggccaccggcaaccucgucgucccccgcuacgccuucgccauggagcgcaacgccggcuccggcaucaucaucuccgacacccccguccacgacugcaacaccaccugccagacccccaagggcgccaucaacaccucccuccccuuccagaacauccaccccaucaccaucggcaagugccccaaguacgucaaguccaccaagcuccgccucgccaccggccuccgcaacguccccuccauccagucccgcggccucuucggcgccaucgccggcuucaucgagggcggcuggaccggcauggucgacggcugguacggcuaccaccaccagaacgagcagggcuccggcuacgccgccgaccucaaguccacccagaacgccaucgacaagaucaccaacaaggucaacuccgucaucgagaagaugaacacccaguucaccgccgucggcaaggaguucaaccaccucgagaagcgcaucgagaaccucaacaagaaggucgacgacggcuuccucgacaucuggaccuacaacgccgagcuccucguccuccucgagaacgagcgcacccucgacuaccacgacuccaacgucaagaaccucuacgagaagguccgcucccagcucaagaacaacgccaaggagaucggcaacggcugcuucgaguucuaccacaagugcgacaacaccugcauggaguccgucaagaacggcaccuacgacuaccccaaguacuccgaggaggccaagcucaaccgcgaggagaucgacggcgucaagcucgaguccacccgcaucuaccagauccucgccaucuacuccaccgucgccuccucccucguccucgucgucucccucggcgccaucuccuucuggaugugcuccaacggcucccuccagugccgcaucugcaucuga

SEQ ID NO: 99870 - RNA, 1701 nt, Artificial Sequence; identical to SEQ ID NO: 99862
  derived and/or modified CDS sequence (opt2) from hemagglutinin__InfluenzaA__ACZ96189

SEQ ID NO: 99871 - RNA, 1701 nt, Artificial Sequence; identical to SEQ ID NO: 99869
  derived and/or modified CDS sequence (opt2) from hemagglutinin__InfluenzaA__ACZ96199

SEQ ID NO: 99872 - RNA, 1701 nt, Artificial Sequence; identical to SEQ ID NO: 98705
  derived and/or modified CDS sequence (opt2) from hemagglutinin__InfluenzaA__ACZ96209

SEQ ID NO: 99873 - RNA, 1701 nt, Artificial Sequence
  derived and/or modified CDS sequence (opt2) from hemagglutinin__InfluenzaA__ACZ96219
augaaggccauccucgucguccuccucuacaccuucgccaccgccaacgccgacacccucugcaucggcuaccacgccaacaacuccaccgacaccgucgacaccguccucgagaagaacgucaccgucacccacuccgucaaccuccucgaggacaagcacaacggcaagcucugcaagcuccgcggcgucgccccccuccaccucggcaagugcaacaucgccggcuggauccucggcaaccccgagugcgagucccucuccaccgccuccuccugguccuacaucgucgagaccuccuccuccgacaacggcaccugcuaccccggcgacuucaucgacuacgaggagcuccgcgagcagcucuccuccgucuccuccuucgagcgcuucgagaucuuccccaagaccuccuccuggcccaaccacgacuccaacaagggcgucaccgccgccugcccccacgccggcgccaaguccuucuacaagaaccucaucuggcucgucaagaagggcaacuccuaccccaagcucuccaaguccuacaucaacgacaagggcaaggagguccucguccucuggggcauccaccaccccuccaccuccgccgaccagcagucccucuaccagaacgccgacgccuacgucuucgucggcaccucccgcuacuccaagaaguucaagcccgagaucgccauccgccccaagguccgcgaccaggagggccgcaugaacuacuacuggacccucgucgagcccggcgacaagaucaaguucgaggccaccggcaaccucgucgucccccgcuacgccuucgccauggagcgcaacgccggcuccggcaucaucaucuccgacacccccguccacgacugcaacaccaccugccagaccuccaagggcgccaucaacaccucccuccccuuccagaacauccaccccaucaccaucggcaagugccccaaguacgucaaguccaccaagcuccgccucgccaccggccuccgcaacguccccuccauccagucccgcggccucuucggcgccaucgccggcuucaucgagggcggcuggaccggcauggucgacggcugguacggcuaccaccaccagaacgagcagggcuccggcuacgccgccgaccucaaguccacccagaacgccaucgacgagaucaccaacaaggucaacuccgucaucgagaagaugaacacccaguucaccgccgucggcaaggaguucaaccaccucgagaagcgcaucgagaaccucaacaagaaggucgacgacggcuuccucgacaucuggaccuacaacgccgagcuccucguccuccucgagaacgagcgcacccucgacuaccacgacuccaacgucaagaaccucuacgagaagguccgcucccagcucaagaacaacgccaaggagaucggcaacggcugcuucgaguucuaccacaagugcgacaacaccugcauggaguccgucaagaacggcaccuacgacuaccccaaguacuccgaggaggccaagcucaaccgcgaggagaucgccggcgucaagcucgaguccacccgcaucuaccagauccucgccaucuacuccaccgucgccuccucccucguccucgucgucucccucggcgccaucuccuucuggaugugcuccaacggcucccuccagugccgcaucugcaucuga

SEQ ID NO: 99874 - RNA, 1701 nt, Artificial Sequence; identical to SEQ ID NO: 98705
  derived and/or modified CDS sequence (opt2) from hemagglutinin__InfluenzaA__ACZ96229

SEQ ID NO: 99875 - RNA, 1701 nt, Artificial Sequence; identical to SEQ ID NO: 99869
  derived and/or modified CDS sequence (opt2) from hemagglutinin__InfluenzaA__ACZ96239

SEQ ID NO: 99876 - RNA, 1701 nt, Artificial Sequence; identical to SEQ ID NO: 98705
  derived and/or modified CDS sequence (opt2) from hemagglutinin__InfluenzaA__ACZ96249

SEQ ID NO: 99877 - RNA, 1701 nt, Artificial Sequence
  derived and/or modified CDS sequence (opt2) from hemagglutinin__InfluenzaA__ACZ96269
augaaggccauccucgucguccuccucuacaccuucgccaccgccaacgccgacacccucugcaucggcuaccacgccaacaacuccaccgacaccgucgacaccguccucgagcgcaacgucaccgucacccacuccgucaaccuccucgaggacaagcacaacggcaagcucugcaagcuccgcggcgucgccccccuccaccucggcaagugcaacaucgccggcuggauccucggcaaccccgagugcgagucccucuccaccgccuccuccugguccuacaucgucgagaccuccuccuccgacaacggcaccugcuaccccggcgacuucaucgacuacgaggagcuccgcgagcagcucuccuccgucuccuccuucgagcgcuucgagaucuuccccaagaccuccuccuggcccaaccacgacuccaacaagggcgucaccgccgccugcccccacgccggcgccaaguccuucuacaagaaccucaucuggcucgucaagaagggcaacuccuaccccaagcucuccaaguccuacaucaacgacaagggcaaggagguccucguccucuggggcauccaccaccccuccaccuccgccgaccagcagucccucuaccagaacgccgacgccuacgucuucgucggcaccucccgcuacuccaagaaguucaagcccgagaucgccauccgccccaagguccgcgaccaggagggccgcaugaacuacuacuggacccucgucgagcccggcgacaagaucaccuucgaggccaccggcaaccucgucgucccccgcuacgccuucgccauggagcgcaacgccggcuccggcaucaucaucuccgacacccccguccacgacugcaacaccaccugccagacccccaagggcgccaucaacaccucccuccccuuccagaacauccaccccaucaccaucggcaagugccccaaguacgucaaguccaccaagcuccgccucgccaccggccuccgcaacguccccuccauccagucccgcggccucuucggcgccaucgccggcuucaucgagggcggcuggaccggcauggucgacggcugguacggcuaccaccaccagaacgagcagggcuccggcuacgccgccgaccucaaguccacccagaacgccaucgacgagaucaccaacaaggucaacuccgucaucgagaagaugaacacccaguucaccgccgucggcaaggaguucaaccaccucgagaagcgcaucgagaaccucaacaagaaggucgacgacggcuuccucgacaucuggaccuacaacgccgagcuccucguccuccucgagaacgagcgcacccucgacuaccacgacuccaacgucaagaaccucuacgagaagguccgcucccagcucaagaacaacgccaaggagaucggcaacggcugcuucgaguucuaccacaagugcgacaacaccugcauggaguccgucaagaacggcaccuacgacuaccccaaguacuccgaggaggccaagcucaaccgcgaggagaucgacggcgucaagcucgaguccacccgcaucuaccagauccucgccaucuacuccaccgucgccuccucccucguccucgucgucucccucggcgccaucuccuucuggaugugcuccaacggcucccuccagugccgcaucugcaucuga

SEQ ID NO: 99878 - RNA, 1701 nt, Artificial Sequence; identical to SEQ ID NO: 98705
  derived and/or modified CDS sequence (opt2) from hemagglutinin__InfluenzaA__ACZ96299

SEQ ID NO: 99879 - RNA, 1701 nt, Artificial Sequence; identical to SEQ ID NO: 98705
  derived and/or modified CDS sequence (opt2) from hemagglutinin__InfluenzaA__ACZ96309

SEQ ID NO: 99880 - RNA, 1701 nt, Artificial Sequence
  derived and/or modified CDS sequence (opt2) from hemagglutinin__InfluenzaA__ACZ96319
augaaggccauccucgucguccuccucuacaccuucgccaccgccaacgccgacacccucugcaucggcuaccacgccaacaacuccaccgacaccgucgacaccguccucgagaagaacgucaccgucacccacuccgucaaccuccucgaggacaagcacaacggcaagcucugcaagcuccgcggcgucgccccccuccaccucggcaucugcaacaucgccggcuggauccucggcaaccccgagugcgagucccucuccaccgccuccuccugguccuacaucgucgagaccuccuccuccgacaacggcaccugcuaccccggcgacuucaucgacuacgaggagcuccgcgagcagcucuccuccgucuccuccuucgagcgcuucgagaucuuccccaagaccuccuccuggcccaaccacgacuccaacaagggcgucaccgccgccugcccccacgccggcgccaaguccuucuacaagaaccucaucuggcucgucaagaagggcaacuccuaccccaagcucuccaaguccuacaucaacgacaagggcaaggagguccucguccucuggggcauccaccaccccuccaccuccgccgaccagcagucccucuaccagaacgccgacgccuacgucuucgucggcaccucccgcuacuccaagaaguucaagcccgagaucgccauccgccccaagguccgcgaccaggagggccgcaugaacuacuacuggacccucgucgagcccggcgacaagaucaccuucgaggccaccggcaaccucgucgucccccgcuacgccuucgccauggagcgcaacgccggcuccggcaucaucaucuccgacacccccguccacgacugcaacaccaccugccagacccccaagggcgccaucaacaccucccuccccuuccagaacauccaccccaucaccaucggcaagugccccaaguacgucaaguccaccaagcuccgccucgccaccggccuccgcaacguccccuccauccagucccgcggccucuucggcgccaucgccggcuucaucgagggcggcuggaccggcauggucgacggcugguacggcuaccaccaccagaacgagcagggcuccggcuacgccgccgaccucaaguccacccagaacgccaucgacgagaucaccaacaaggucaacuccgucaucgagaagaugaacacccaguucaccgccgucggcaaggaguucaaccaccucgagaagcgcaucgagaaccucaacaagaaggucgacgacggcuuccucgacaucuggaccuacaacgccgagcuccucguccuccucgagaacgagcgcacccucgacuaccacgacuccaacgucaagaaccucuacgagaagguccgcucccagcucaagaacaacgccaaggagaucggcaacggcugcuucgaguucuaccacaagugcgacaacaccugcauggaguccgucaagaacggcaccuacgacuaccccaaguacuccgaggaggccaagcucaaccgcgaggagaucgacggcgucaagcucgaguccacccgcaucuaccagauccucgccaucuacuccaccgucgccuccucccucguccucgucgucucccucggcgccaucuccuucuggaugugcuccaacggcucccuccagugccgcaucugcaucuga

SEQ ID NO: 99881 - RNA, 1701 nt, Artificial Sequence; identical to SEQ ID NO: 99880
  derived and/or modified CDS sequence (opt2) from hemagglutinin__InfluenzaA__ACZ96329

SEQ ID NO: 99882 - RNA, 1701 nt, Artificial Sequence
  derived and/or modified CDS sequence (opt2) from hemagglutinin__InfluenzaA__ACZ96339
augaaggccauccucgucguccuccucuacaccuucgccaccgccaacgccgacacccucugcaucggcuaccacgccaacaacuccaccgacaccgucgacaccguccucgagaagaacgucaccgucacccacuccgucaaccuccucgaggacaagcacaacggcaagcucugcaagcuccgcggcgucgccccccuccaccucggcaagugcaacaucgccggcuggauccucggcaaccccgagugcgagucccucuccaccgccuccuccugguccuacaucgucgagaccuccuccuccgacaacggcaccugcuaccccggcgacuucaucgacuacgaggagcuccgcgagcagcucuccuccgucuccuccuucgagcgcuucgagaucuuccccaagaccuccuccuggcccaaccacgacuccaacaagggcgucaccgccgccugcccccacgccggcgccaaguccuucuacaagaaccucaucuggcucgucaagaagggcaacuccuaccccaagcucuccaaguccuacaucaacgacaagggcaaggagguccucguccucuggggcauccaccaccccuccaccuccgccgaccagcagucccucuaccagaacgccgacuccuacgucuucgucggcaccucccgcuacuccaagaaguucaagcccgagaucgccauccgccccaagguccgcgaccaggagggccgcaugaacuacuacuggacccucgucgagcccggcgacaagaucaccuucgaggccaccggcaaccucgucgucccccgcuacgccuucgccauggagcgcaacgccggcuccggcaucaucaucuccgacacccccguccacgacugcaacaccaccugccagacccccgagggcgccaucaacaccucccuccccuuccagaacauccaccccaucaccaucggcaagugccccaaguacgucaaguccaccaagcuccgccucgccaccggccuccgcaacguccccuccauccagucccgcggccucuucggcgccaucgccggcuucaucgagggcggcuggaccggcauggucgacggcugguacggcuaccaccaccagaacgagcagggcuccggcuacgccgccgaccucaaguccacccagaacgccaucgacgagaucaccaacaaggucaacuccgucaucaagaagaugaacacccaguucaccgccgucggcaaggaguucaaccaccucgagaagcgcaucgagaaccucaacaagaaggucgacgacggcuuccucgacaucuggaccuacaacgccgagcuccucguccuccucgagaacgagcgcacccucgacuaccacgacuccaacgucaagaaccucuacgagaagguccgcucccagcucaagaacaacgccaaggagaucggcaacggcugcuucgaguucuaccacaagugcgacaacaccugcauggaguccgucaagaacggcaccuacgacuaccccaaguacuccgaggaggccaagcucaaccgcgaggagaucgacggcgucaagcucgaguccacccgcaucuaccagauccucgccaucuacuccaccgucgccuccucccucguccucgucgucucccucggcgccaucuccuucuggaugugcuccaacggcucccuccagugccgcaucugcaucuga

SEQ ID NO: 99883 - RNA, 1701 nt, Artificial Sequence; identical to SEQ ID NO: 98705
  derived and/or modified CDS sequence (opt2) from hemagglutinin__InfluenzaA__ACZ96349

SEQ ID NO: 99884 - RNA, 1701 nt, Artificial Sequence; identical to SEQ ID NO: 99880
  derived and/or modified CDS sequence (opt2) from hemagglutinin__InfluenzaA__ACZ96359

SEQ ID NO: 99885 - RNA, 1701 nt, Artificial Sequence; identical to SEQ ID NO: 98705
  derived and/or modified CDS sequence (opt2) from hemagglutinin__InfluenzaA__ACZ96372

SEQ ID NO: 99886 - RNA, 1701 nt, Artificial Sequence; identical to SEQ ID NO: 99880
  derived and/or modified CDS sequence (opt2) from hemagglutinin__InfluenzaA__ACZ96382

SEQ ID NO: 99887 - RNA, 1701 nt, Artificial Sequence; identical to SEQ ID NO: 98692
  derived and/or modified CDS sequence (opt2) from hemagglutinin__InfluenzaA__ACZ96392

SEQ ID NO: 99888 - RNA, 1701 nt, Artificial Sequence; identical to SEQ ID NO: 98947
  derived and/or modified CDS sequence (opt2) from hemagglutinin__InfluenzaA__ACZ96405

SEQ ID NO: 99889 - RNA, 1701 nt, Artificial Sequence; identical to SEQ ID NO: 98705
  derived and/or modified CDS sequence (opt2) from hemagglutinin__InfluenzaA__ACZ96415

SEQ ID NO: 99890 - RNA, 1701 nt, Artificial Sequence; identical to SEQ ID NO: 98705
  derived and/or modified CDS sequence (opt2) from hemagglutinin__InfluenzaA__ACZ96425

SEQ ID NO: 99891 - RNA, 1701 nt, Artificial Sequence
  derived and/or modified CDS sequence (opt2) from hemagglutinin__InfluenzaA__ACZ96435
augaaggccauccucgucguccuccucuacaccuucgccaccgccaacgccgacacccucugcaucggcuaccacgccaacaacuccaccgacaccgucgacaccguccucgagaagaacgucaccgucacccacuccgucaaccuccucgaggacaagcacaacggcaagcucugcaagcuccgcggcgucgcccagcuccaccucggcaagugcaacaucgccggcuggauccucggcaaccccgagugcgagucccucuccaccgccuccuccugguccuacaucgucgagaccuccuccuccgacaacggcaccugcuaccccggcgacuucaucgacuacgaggagcuccgcgagcagcucuccuccgucuccuccuucgagcgcuucgagaucuuccccaagaccuccuccuggcccaaccacgacuccaacaagggcgucaccgccgccugcccccacgccggcgccaaguccuucuacaagaaccucaucuggcucgucaagaagggcaacuccuaccccaagcucuccaaguccuacaucaacgacaagggcaaggagguccucguccucuggggcauccaccaccccuccaccuccgccgaccagcagucccucuaccagaacgccgacgccuacgucuucgucggcaccucccgcuacuccaagaaguucaagcccgagaucgccauccgccccaagguccgcgaccaggagggccgcaugaacuacuacuggacccucgucgagcccggcgacaagaucaccuucgaggccaccggcaaccucauggucccccgcuacgccuucgccauggagcgcaacgccggcuccggcaucaucaucuccgacacccccguccacgacugcaacaccaccugccagacccccaagggcgccaucaacaccucccuccccuuccagaacauccaccccaucaccaucggcaagugccccaaguacgucaaguccaccaagcuccgccucgccaccggccuccgcaacguccccuccauccagucccgcggccucuucggcgccaucgccggcuucaucgagggcggcuggaccggcauggucgacggcugguacggcuaccaccaccagaacgagcagggcuccggcuacgccgccgaccucaaguccacccagaacgccaucgacgagaucaccaacaaggucaacuccgucaucgagaagaugaacacccaguucaccgccgucggcaaggaguucaaccaccucgagaagcgcaucgagaaccucaacaagaaggucgacgacggcuuccucgacaucuggaccuacaacgccgagcuccucguccuccucgagaacgagcgcacccucgacuaccacgacuccaacgucaagaaccucuacgagaagguccgcucccagcucaagaacaacgccaaggagaucggcaacggcugcuucgaguucuaccacaagugcgacaacaccugcauggaguccgucaagaacggcaccuacgacuaccccaaguacuccgaggaggccaagcucaaccgcgaggagaucgacggcgucaagcucgaguccacccgcaucuaccagauccucgccaucuacuccaccgucgccuccucccucguccucgucgucucccucggcgccaucuccuucuggaugugcuccaacggcucccuccagugccgcaucugcaucuga

SEQ ID NO: 99892 - RNA, 1701 nt, Artificial Sequence; identical to SEQ ID NO: 98705
  derived and/or modified CDS sequence (opt2) from hemagglutinin__InfluenzaA__ACZ96445

SEQ ID NO: 99893 - RNA, 1701 nt, Artificial Sequence
  derived and/or modified CDS sequence (opt2) from hemagglutinin__InfluenzaA__ACZ96476
augaaggccauccucgucguccuccucuacaccuucgccaccgccuacgccgacacccucugcaucggcuaccacgccaacaacuccaccgacaccgucgacaccguccucgagaagaacgucaccgucacccacuccgucaaccuccucgaggacaagcacaacggcaagcucugcaagcuccgcggcgucgccccccuccaccucggcaagugcaacaucgccggcuggauccucggcaaccccgagugcgagucccucuccaccgccuccuccugguccuacaucgucgagaccuccuccuccgacaacggcaccugcuaccccggcgacuucaucgacuacgaggagcuccgcgagcagcucuccuccgucuccuccuucgagcgcuucgagaucuuccccaagaccuccuccuggcccaaccacgacuccaacaagggcgucaccgccgccugcccccacgccggcgccaaguccuucuacaagaaccucaucuggcucgucaagaagggcaacuccuaccccaagcucuccaaguccuacaucaacgacaagggcaaggagguccucguccucuggggcauccaccaccccuccaccuccgccgaccagcagucccucuaccagaacgccgacgccuacgucuucgucggcaccucccgcuacuccaagaaguucaagcccgagaucgccauccgccccaagguccgcgaccaggagggccgcaugaacuacuacuggacccucgucgagcccggcgacaagaucaccuucgaggccaccggcaaccucgucgucccccgcuacgccuucgccauggagcgcaacgccggcuccggcaucaucaucuccgacacccccguccacgacugcaacaccaccugccagacccccaagggcgccaucaacaccucccuccccuuccagaacauccaccccaucaccaucggcaagugccccaaguacgucaaguccaccaagcuccgccucgccaccggccuccgcaacguccccuccauccagucccgcggccucuucggcgccaucgccggcuucaucgagggcggcuggaccggcauggucgacggcugguacggcuaccaccaccagaacgagcagggcuccggcuacgccgccgaccucaaguccacccagaacgccaucgacgagaucaccaacaaggucaacuccgucaucgagaagaugaacacccaguucaccgccgucggcaaggaguucaaccaccucgagaagcgcaucgagaaccucaacaagaaggucgacgacggcuuccucgacaucuggaccuacaacgccgagcuccucguccuccucgagaacgagcgcacccucgacuaccacgacuccaacgucaagaaccucuacgagaagguccgcucccagcucaagaacaacgccaaggagaucggcaacggcugcuucgaguucuaccacaagugcgacaacaccugcauggaguccgucaagaacggcaccuacgacuaccccaaguacuccgaggaggccaagcucaaccgcgaggagaucgacggcgucaagcucgaguccacccgcaucuaccagauccucgccaucuacuccaccgucgccuccucccucguccucgucgucucccucggcgccaucuccuucuggaugugcuccaacggcucccuccagugccgcaucugcaucuga

SEQ ID NO: 99894 - RNA, 1701 nt, Artificial Sequence; identical to SEQ ID NO: 98705
  derived and/or modified CDS sequence (opt2) from hemagglutinin__InfluenzaA__ACZ96496

SEQ ID NO: 99895 - RNA, 1701 nt, Artificial Sequence; identical to SEQ ID NO: 98705
  derived and/or modified CDS sequence (opt2) from hemagglutinin__InfluenzaA__ACZ96506

SEQ ID NO: 99896 - RNA, 1701 nt, Artificial Sequence; identical to SEQ ID NO: 98705
  derived and/or modified CDS sequence (opt2) from hemagglutinin__InfluenzaA__ACZ96526

SEQ ID NO: 99897 - RNA, 1701 nt, Artificial Sequence
  derived and/or modified CDS sequence (opt2) from hemagglutinin__InfluenzaA__ACZ96536
augaaggccauccucgucguccuccucuacaccuucgccaccgccaacgccgacacccucugcaucggcuaccacgccaacaacuccaccgacaccgucgacaccguccucgagaagaacgucaccgucacccacuccgucaacauccucgaggacaagcacaacggcaagcucugcaagcucaagggcgucgccccccuccaccucggcaagugcaacaucgccggcuggauccucggcaaccccgagugcgagucccucuccaccgccuccuccugguccuacaucgucgagaccuccuccuccgacaacggcaccugcuaccccggcgacuucaucgacuacgaggagcuccgcgagcagcucuccuccgucuccuccuucgagcgcuucgagaucuuccccaagaccuccuccuggcccaaccacgacuccaacaagggcgucaccgccgccugcccccacgccggcgccaaguccuucuacaagaaccucaucuggcucgucaagaagggcaacuccuaccccaagcucuccaaguccuacaucaacgacaagggcaaggagguccucguccucuggggcauccaccaccccuccaccuccgccgaccagcagucccucuaccagaacgccgacaccuacgucuucgucggcuccuccaaguacuccaagaaguucaagcccgagaucgccauccgccccaagguccgcgaccaggagggccgcaugaacuacuacuggacccucgucgagcccggcgacaagaucaccuucgaggccaccggcaaccucgucgucccccgcuacgccuucgccauggagcgcaacgccggcuccggcaucaucaucuccgacacccccguccacgacugcaacaccaccugccagacccccaagggcgccaucaacaccucccuccccuuccagaacauccaccccaucaccaucggcaagugccccaagcacgucaaguccaccaagcuccgccucgccaccggccuccgcaacguccccuccauccagucccgcggccucuucggcgccaucgccggcuucaucgagggcggcuggaccggcauggucgacggcugguacggcuaccaccaccagaacgagcagggcuccggcuacgccgccgaccucaaguccacccagaacgccaucgacgagaucaccaacaaggucaacuccgucaucgagaagaugaacacccaguucaccgccgucggcaaggaguucaaccaccucgagaagcgcaucgagaaccucaacaagaaggucgacgacggcuuccucgacaucuggaccuacaacgccgagcuccucguccuccucgagaacgagcgcacccucgacuaccacgacuccaacgucaagaaccucuacgagaagguccgcucccagcucaagaacaacgccaaggagaucggcaacggcugcuucgaguucuaccacaagugcgacaacaccugcauggaguccgucaagaacggcaccuacgacuaccccaaguacuccgaggaggccaagcucaaccgcgaggagaucgacggcgucaagcucgaguccacccgcaucuaccagauccucgccaucuacuccaccgucgccuccucccucguccucgucgucucccucggcgccaucuccuucuggaugugcuccaacggcucccuccagugccgcaucugcaucuga

SEQ ID NO: 99898 - RNA, 1701 nt, Artificial Sequence; identical to SEQ ID NO: 98705
  derived and/or modified CDS sequence (opt2) from hemagglutinin__InfluenzaA__ACZ96549

SEQ ID NO: 99899 - RNA, 1701 nt, Artificial Sequence
  derived and/or modified CDS sequence (opt2) from hemagglutinin__InfluenzaA__ACZ96559
augaaggccauccucgucguccuccucuacaccuucgccaccgccaacgccgacacccucugcaucggcuaccacgccaacaacuccaccgacaccgucgacaccguccucgagaagaacgucaccgucacccacuccgucaaccuccucgaggacaagcacaacggcaagcucugcaagcuccgcggcgucgccccccuccaccucggcaagugcaacaucgccggcuggauccucggcaaccccgagugcgagucccucuccaccgccuccuccugguccuacaucgucgagaccuccuccuccgacaacggcaccugcuaccccggcgacuucaucaacuacgaggagcuccgcgagcagcucuccuccgucuccuccuucgagcgcuucgagaucuuccccaagaccuccuccuggcccaaccacgacuccaacaagggcgucaccgccgccugcccccacgccggcgccaaguccuucuacaagaaccucaucuggcucgucaagaagggcaacuccuaccccaagcucuccaaguccuacaucaacgacaagggcaaggagguccucguccucuggggcauccaccaccccuccaccuccgccgaccagcagucccucuaccagaacgccgacgccuacgucuucgucggcaccucccgcuacuccaagaaguucaagcccgagaucgccauccgccccaagguccgcgaccaggagggccgcaugaacuacuacuggacccucgucgagcccggcgacaagaucaccuucgaggccaccggcaaccucgucgucccccgcuacgccuucgccauggagcgcaacgccggcuccggcaucaucaucuccgacacccccguccacgacugcaacaccaccugccagacccccaagggcgccaucaacaccucccuccccuuccagaacauccaccccaucaccaucggcaagugccccaaguacgucaaguccaccaagcuccgccucgccaccggccuccgcaacguccccuccauccagucccgcggccucuucggcgccaucgccggcuucaucgagggcggcuggaccggcauggucgacggcugguacggcuaccaccaccagaacgagcagggcuccggcuacgccgccgaccucaaguccacccagaacgccaucgacgagaucaccaacaaggucaacuccgucaucgagaagaugaacacccaguucaccgccgucggcaaggaguucaaccaccucgagaagcgcaucgagaaccucaacaagaaggucgacgacggcuuccucgacaucuggaccuacaacgccgagcuccucguccuccucgagaacgagcgcacccucgacuaccacgacuccaacgucaagaaccucuacgagaagguccgcucccagcucaagaacaacgccaaggagaucggcaacggcugcuucgaguucuaccacaagugcgacaacaccugcauggaguccgucaagaacggcaccuacgacuaccccaaguacuccgaggaggccaagcucaaccgcgaggagaucgacggcgucaagcucgaguccacccgcaucuaccagauccucgccaucuacuccaccgucgccuccucccucguccucgucgucucccucggcgccaucuccuucuggaugugcuccaacggcucccuccagugccgcaucugcaucuga

SEQ ID NO: 99900 - RNA, 1701 nt, Artificial Sequence
  derived and/or modified CDS sequence (opt2) from hemagglutinin__InfluenzaA__ACZ96569
auggaggccauccucgucguccuccucuacaccuucgccaccgccaacgccgacacccucugcaucggcuaccacgccaacaacuccaccgacaccgucgacaccguccucgagaagaacgucaccgucacccacuccgucaaccuccucgaggacaagcacaacggcaagcucugcaagcuccgcggcgucgccccccuccaccucggcaagugcaacaucgccggcuggauccucggcaaccccgagugcgagucccucuccaccgccuccuccugguccuacaucgucgagaccuccuccuccgacaacggcaccugcuaccccggcgacuucaucaacuacgaggagcuccgcgagcagcucuccuccgucuccuccuucgagcgcuucgagaucuuccccaagaccuccuccuggcccaaccacgacuccaacaagggcgucaccgccgccugcccccacgccggcgccaaguccuucuacaagaaccucaucuggcucgucaagaagggcaacuccuaccccaagcucuccaaguccuacaucaacgacaagggcaaggagguccucguccucuggggcauccaccaccccuccaccuccgccgaccagcagucccucuaccagaacgccgacgccuacgucuucgucggcuccucccgcuacuccaagaaguucaagcccgagaucgccauccgccccaagguccgcgaccaggagggccgcaugaacuacuacuggacccucgucgagcccggcgacaagaucaccuucgaggccaccggcaaccucgucgucccccgcuacgccuucgccauggagcgcaacgccggcuccggcaucaucaucuccgacacccccguccacgacugcaacaccaccugccagacccccaagggcgccaucaacaccucccuccccuuccacaacauccaccccaucaccaucggcaagugccccaaguacgucaaguccaccaagcuccgccucgccaccggccuccgcaacguccccuccauccagucccgcggccucuucggcgccaucgccggcuucaucgagggcggcuggaccggcauggucgacggcugguacggcuaccaccaccagaacgagcagggcuccggcuacgccgccgaccucaaguccacccagaacgccaucgacgagaucaccaacaaggucaacuccgucaucgagaagaugaacacccaguucaccgccgucggcaaggaguucaaccaccucgagaagcgcaucgagaaccucaacaagaaggucgacgacggcuuccucgacaucuggaccuacaacgccgagcuccucguccuccucgagaacgagcgcacccucgacuaccacgacuccaacgucaagaaccucuacgagaagguccgcucccagcucaagaacaacgccaaggagaucggcaacggcugcuucgaguucuaccacaagugcgacaacaccugcauggaguccgucaagaacggcaccuacgacuaccccaaguacuccgaggaggccaagcucaaccgcgaggagaucgacggcgucaagcucgaguccacccgcaucuaccagauccucgccaucuacuccaccgucgccuccucccucguccucgucgucucccucggcgccaucuccuucuggaugugcuccaacggcucccuccagugccgcaucugcaucuga

SEQ ID NO: 99901 - RNA, 1701 nt, Artificial Sequence
  derived and/or modified CDS sequence (opt2) from hemagglutinin__InfluenzaA__ACZ96579
auggaggccauccucgucguccuccucuacaccuucgccaccgccaacgccgacacccucugcaucggcuaccacgccaacaacuccaccgacaccgucgacaccguccucgagaagaacgucaccgucacccacuccgucaaccuccucgaggacaagcacaacggcaagcucugcaagcuccgcggcgucgccccccuccaccucggcaagugcaacaucgccggcuggauccucggcaaccccgagugcgagucccucuccaccgccuccuccugguccuacaucgucgagaccuccuccuccgacaacggcaccugcuaccccggcgacuucaucgacuacgaggagcuccgcgagcagcucuccuccgucuccuccuucgagcgcuucgagaucuuccccaagaccuccuccuggcccaaccacgacuccaacaagggcgucaccgccgccugcccccacgccggcgccaaguccuucuacaagaaccucaucuggcucgucaagaagggcaacuccuaccccaagcucuccaaguccuacaucaacgacaagggcaaggagguccucguccucuggggcauccaccaccccuccuccuccgccgaccagcagucccucuaccagaacgccgacgccuacgucuucgucggcuccucccgcuacuccaagaaguucaagcccgagaucgccauccgccccaagguccgcgaccaggagggccgcaugaacuacuacuggacccucgucgagcccggcgacaagaucaccuucgaggccaccggcaaccucgucgucccccgcuacgccuucgccauggagcgcaacgccggcuccggcaucaucaucuccgacacccccguccacgacugcaacaccaccugccagacccccaagggcgccaucaacaccucccuccccuuccacaacauccaccccaucaccaucggcaagugccccaaguacgucaaguccaccaagcuccgccucgccaccggccuccgcaacguccccuccauccagucccgcggccucuucggcgccaucgccggcuucaucgagggcggcuggaccggcauggucgacggcugguacggcuaccaccaccagaacgagcagggcuccggcuacgccgccgaccucaaguccacccagaacgccaucgacgagaucaccaacaaggucaacuccgucaucgagaagaugaacacccaguucaccgccgucggcaaggaguucaaccaccucgagaagcgcaucgagaaccucaacaagaaggucgacgacggcuuccucgacaucuggaccuacaacgccgagcuccucguccuccucgagaacgagcgcacccucgacuaccacgacuccaacgucaagaaccucuacgagaagguccgcucccagcucaagaacaacgccaaggagaucggcaacggcugcuucgaguucuaccacaagugcgacaacaccugcauggaguccgucaagaacggcaccuacgacuaccccaaguacuccgaggaggccaagcucaaccgcgaggagaucgacggcgucaagcucgaguccacccgcaucuaccagauccucgccaucuacuccaccgucgccuccucccucguccucgucgucucccucggcgccaucuccuucuggaugugcuccaacggcucccuccagugccgcaucugcaucuga

SEQ ID NO: 99902 - RNA, 1701 nt, Artificial Sequence; identical to SEQ ID NO: 98705
  derived and/or modified CDS sequence (opt2) from hemagglutinin__InfluenzaA__ACZ96589

SEQ ID NO: 99903 - RNA, 1701 nt, Artificial Sequence
  derived and/or modified CDS sequence (opt2) from hemagglutinin__InfluenzaA__ACZ96599
augaaggccauccucgucguccuccucuacaccuucgccaccgccaacgccgacacccucugcaucggcuaccacgccaacaacuccaccgacaccgucgacaccguccucgagaagaacgucaccgucacccacuccgucaaccuccucgaggacaagcacaacggcaagcucugcaagcuccgcggcgucgccccccuccaccucggcaagugcaacaucgccggcuggauccucggcaaccccgagugcgagucccucuccaccgccuccuccugguccuacaucgucgagaccuccuccuccgacaacggcaccugcuaccccggcgacuucaucgacuacgaggagcuccgcgagcagcucuccuccgucuccuccuucgagcgcuucgagaucuuccccaagaccuccuccuggcccaaccacgacuccaacaagggcgucaccgccgccugcccccacgccggcgccaaguccuucuacaagaaccucaucuggcucgucaagaagggcaacuccuaccccaagcucuccaaguccuacaucaacgacaagggcaaggagguccucguccucuggggcauccaccaccccuccaccuccgccgaccagcagucccucuaccagaacgccgacgccuacgucuucgucggcaccucccgcuacuccaagaaguucaagcccgagaucgccauccgccccaagguccgcgagcaggagggccgcaugaacuacuacuggacccucgucgagcccggcgacaagaucaccuucgaggccaccggcaaccucgucgucccccgcuacgccuucgccauggagcgcaacaccggcuccggcaucaucaucuccgacacccccguccacgacugcaacaccaccugccagacccccaagggcgccaucaacaccucccuccccuuccagaacauccacuccaucaccaucggcaagugccccaaguacgucaaguccaccaagcuccgccucgccaccggccuccgcaacguccccuccauccagucccgcggccucuucggcgccaucgccggcuucaucgagggcggcuggaccggcauggucgacggcugguacggcuaccaccaccagaacgagcagggcuccggcuacgccgccgaccucaaguccacccagaacgccaucgacgagaucaccaacaaggucaacuccgucaucgagaagaugaacacccaguucaccgccgucggcaaggaguucaaccaccucgagaagcgcaucgagaaccucaacaagaaggucgacgacggcuuccucgacaucuggaccuacaacgccgagcuccucguccuccucgagaacgagcgcacccucgacuaccacgacuccaacgucaagaaccucuacgagaagguccgcucccagcucaagaacaacgccaaggagaucggcaacggcugcuucgaguucuaccacaagugcgacaacaccugcauggaguccgucaagaacggcaccuacgacuaccccaaguacuccgaggaggccaagcucaaccgcgaggagaucgacggcgucaagcucgaguccacccgcaucuaccagauccucgccaucuacuccaccgucgccuccucccucguccucgucgucucccucggcgccaucuccuucuggaugugcuccaacggcucccuccagugccgcaucugcaucuga

SEQ ID NO: 99904 - RNA, 1701 nt, Artificial Sequence
  derived and/or modified CDS sequence (opt2) from hemagglutinin__InfluenzaA__ACZ96609
augaaggccauccucgucguccuccucuacaccuucgccaccgccaacgccgacacccucugcaucggcuaccacgccaacaacuccaccgacaccgucgacaccguccucgagaagaacgucaccgucacccacuccgucaaccuccucgaggacaagcacaacggcaagcucugcaagcuccgcggcgucgccccccuccaccucggcaagugcaacaucgccggcuggauccucggcaaccccgagugcgagucccucuccaccgccuccuccugguccuacaucgucgagaccuccuccuccgacaacggcaccugcuaccccggcgacuucaucaacuacgaggagcuccgcgagcagcucuccuccgucuccuccuucgagcgcuucgagaucuuccccaagaccuccuccuggcccaaccacgacuccaacaagggcgucaccgccgccugcccccacgccggcgccaaguccuucuacaagaaccucaucuggcucgucaagaagggcaacuccuaccccaagcucuccaaguccuacaucaacgacaagggcaaggagguccucguccucuggggcauccaccaccccuccaccuccgccgaccagcagucccucuaccagaacgccgacgccuacgucuucgucggcuccucccgcuacuccaagaaguucaagcccgagaucgccauccgccccaagguccgcgaccaggagggccgcaugaacuacuacuggacccucgucgagcccggcgacaagaucaccuucgaggccaccggcaaccucgucgucccccgcuacgccuucgccauggagcgcaacgccggcuccggcaucaucaucuccgacacccccguccacgacugcaacaccaccugccagacccccaagggcgccaucaacaccucccuccccuuccagaacauccaccccaucaccaucggcaccugccccaaguacgucaaguccaccaagcuccgccucgccaccggccuccgcaacguccccuccauccagucccgcggccucuucggcgccaucgccggcuucaucgagggcggcuggaccggcauggucgacggcugguacggcuaccaccaccagaacgagcagggcuccggcuacgccgccgaccucaaguccacccagaacgccaucgacgagaucaccaacaaggucaacuccgucaucgagaagaugaacacccaguucaccgccgucggcaaggaguucaaccaccucgagaagcgcaucgagaaccucaacaagaaggucgacgacggcuuccucgacaucuggaccuacaacgccgagcuccucguccuccucgagaacgagcgcacccucgacuaccacgacuccaacgucaagaaccucuacgagaagguccgcucccagcucaagaacaacgccaaggagaucggcaacggcugcuucgaguucuaccacaagugcgacaacaccugcauggaguccgucaagaacggcaccuacgacuaccccaaguacuccgaggaggccaagcucaaccgcgaggagaucgacggcgucaagcucgaguccacccgcaucuaccagauccucgccaucuacuccaccgucgccuccucccucguccucgucgucucccucggcgccaucuccuucuggaugugcuccaacggcucccuccagugccgcaucugcaucuga

SEQ ID NO: 99905 - RNA, 1701 nt, Artificial Sequence; identical to SEQ ID NO: 98885
  derived and/or modified CDS sequence (opt2) from hemagglutinin__InfluenzaA__ACZ96619

SEQ ID NO: 99906 - RNA, 1701 nt, Artificial Sequence; identical to SEQ ID NO: 98885
  derived and/or modified CDS sequence (opt2) from hemagglutinin__InfluenzaA__ACZ96629

SEQ ID NO: 99907 - RNA, 1701 nt, Artificial Sequence; identical to SEQ ID NO: 98885
  derived and/or modified CDS sequence (opt2) from hemagglutinin__InfluenzaA__ACZ96639

SEQ ID NO: 99908 - RNA, 1701 nt, Artificial Sequence; identical to SEQ ID NO: 98885
  derived and/or modified CDS sequence (opt2) from hemagglutinin__InfluenzaA__ACZ96649

SEQ ID NO: 99909 - RNA, 1701 nt, Artificial Sequence; identical to SEQ ID NO: 98885
  derived and/or modified CDS sequence (opt2) from hemagglutinin__InfluenzaA__ACZ96659

SEQ ID NO: 99910 - RNA, 1701 nt, Artificial Sequence; identical to SEQ ID NO: 98885
  derived and/or modified CDS sequence (opt2) from hemagglutinin__InfluenzaA__ACZ96669

SEQ ID NO: 99911 - RNA, 1701 nt, Artificial Sequence; identical to SEQ ID NO: 98885
  derived and/or modified CDS sequence (opt2) from hemagglutinin__InfluenzaA__ACZ96679

SEQ ID NO: 99912 - RNA, 1701 nt, Artificial Sequence; identical to SEQ ID NO: 98885
  derived and/or modified CDS sequence (opt2) from hemagglutinin__InfluenzaA__ACZ96689

SEQ ID NO: 99913 - RNA, 1701 nt, Artificial Sequence; identical to SEQ ID NO: 98885
  derived and/or modified CDS sequence (opt2) from hemagglutinin__InfluenzaA__ACZ96699

SEQ ID NO: 99914 - RNA, 1701 nt, Artificial Sequence; identical to SEQ ID NO: 98885
  derived and/or modified CDS sequence (opt2) from hemagglutinin__InfluenzaA__ACZ96719

SEQ ID NO: 99915 - RNA, 1701 nt, Artificial Sequence; identical to SEQ ID NO: 98885
  derived and/or modified CDS sequence (opt2) from hemagglutinin__InfluenzaA__ACZ96729

SEQ ID NO: 99916 - RNA, 1701 nt, Artificial Sequence; identical to SEQ ID NO: 98885
  derived and/or modified CDS sequence (opt2) from hemagglutinin__InfluenzaA__ACZ96739

SEQ ID NO: 99917 - RNA, 1701 nt, Artificial Sequence
  derived and/or modified CDS sequence (opt2) from hemagglutinin__InfluenzaA__ACZ96749
augaagaccauccucgucguccuccucuacaccuucgccaccgccaacgccgacacccucugcaucggcuaccacgccaacaacuccaccgacaccgucgacaccguccucgagaagaacgucaccgucacccacuccgucaaccuccucgaggacaagcacaacggcaagcucugcaagcuccgcggcgucgccccccuccaccucggcaagugcaacaucgccggcuggauccucggcaaccccgagugcgagucccucuccaccgccuccuccugguccuacaucgucgagaccuccuccuccgacaacggcaccugcuaccccggcgacuucaucgacuacgaggagcuccgcgagcagcucuccuccgucuccuccuucgagcgcuucgagaucuuccccaagaccuccuccuggcccaaccacgacuccaacaagggcgucaccgccgccugcccccacgccggcgccaaguccuucuacaagaaccucaucuggcucgucaagaagggcaacuccuaccccaagcucuccaaguccuacaucaacgacaagggcaaggagguccucguccucuggggcauccaccaccccuccaccuccgccgaccagcagucccucuaccagaacgccgacgccuacgucuucgucggcuccucccgcuacuccaagaaguucaagcccgagaucgccauccgccccaagguccgcgaccaggagggccgcaugaacuacuacuggacccucgucgagcccggcgacaagaucaccuucgaggccaccggcaaccucgucgucccccgcuacgccuucgccauggagcgcaacgccggcuccggcaucaucaucuccgacacccccguccacgacugcaacaccaccugccagacccccaagggcgccaucaacaccucccuccccuuccagaacauccaccccaucaccaucggcaagugccccaaguacgucaaguccaccaagcuccgccucgccaccggccuccgcaacguccccuccauccagucccgcggccucuucggcgccaucgccggcuucaucgagggcggcuggaccggcauggucgacggcugguacggcuaccaccaccagaacgagcagggcuccggcuacgccgccgaccucaaguccacccagaacgccaucgacgagaucaccaacaaggucaacuccgucaucgagaagaugaacacccaguucaccgccgucggcaaggaguucaaccaccucgagaagcgcaucgagaaccucaacaagaaggucgacgacggcuuccucgacaucuggaccuacaacgccgagcuccucguccuccucgagaacgagcgcacccucgacuaccacgacuccaacgucaagaaccucuacgagaagguccgcucccagcucaagaacaacgccaaggagaucggcaacggcugcuucgaguucuaccacaagugcgacaacaccugcauggaguccgucaagaacggcaccuacgacuaccccaaguacuccgaggaggccaagcucaaccgcgaggagaucgacggcgucaagcucgaguccacccgcaucuaccagauccucgccaucuacuccaccgucgccuccucccucguccucgucgucucccucggcgccaucuccuucuggaugugcuccaacggcucccuccagugccgcaucugcaucuga

SEQ ID NO: 99918 - RNA, 1701 nt, Artificial Sequence; identical to SEQ ID NO: 98692
  derived and/or modified CDS sequence (opt2) from hemagglutinin__InfluenzaA__ACZ96759

SEQ ID NO: 99919 - RNA, 1701 nt, Artificial Sequence; identical to SEQ ID NO: 98692
  derived and/or modified CDS sequence (opt2) from hemagglutinin__InfluenzaA__ACZ96769

SEQ ID NO: 99920 - RNA, 1701 nt, Artificial Sequence; identical to SEQ ID NO: 98692
  derived and/or modified CDS sequence (opt2) from hemagglutinin__InfluenzaA__ACZ96779

SEQ ID NO: 99921 - RNA, 1701 nt, Artificial Sequence; identical to SEQ ID NO: 98692
  derived and/or modified CDS sequence (opt2) from hemagglutinin__InfluenzaA__ACZ96789

SEQ ID NO: 99922 - RNA, 1701 nt, Artificial Sequence
  derived and/or modified CDS sequence (opt2) from hemagglutinin__InfluenzaA__ACZ96809
augaaggccauccucgucguccuccucuacaccuucgccaccgccaacgccgacacccucugcaucggcuaccacgccaacaacuccaccgacaccgucgacaccguccucgagaagaacgucaccgucacccacuccgucaaccuccucgaggacaagcacaacggcaagcucugcaagcuccgcggcgucgccccccuccaccucggcaagugcaacaucgccggcuggauccucggcaaccccgagugcgagucccucuccaccgccuccuccugguccuacaucgucgagaccuccuccuccgacaacggcaccugcuaccccggcgacuucaucgacuacgaggagcuccgcgagcagcucuccuccgucuccuccuucgagcgcuucgagaucuuccccaagaccuccuccuggcccaaccacgacuccaacaagggcgucaccgccgccugcccccacgccggcgccaaguccuucuacaagaaccucaucuggcucgucaagaagggcaacuccuaccccaagcucuccaaguccuacaucaacgacaagggcaaggagguccucguccucuggggcauccaccaccccuccaccaacgccgaccagcagucccucuaccagaacgccgacgccuacgucuucgucggcaccucccgcuacuccaagaaguucaagcccgagaucgccauccgccccaagguccgcgaccaggagggccgcaugaacuacuacuggacccucgucgagcccggcgacaagaucaccuucgaggccaccggcaaccucgucgucccccgcuacgccuucgccauggagcgcaacgccggcuccggcaucaucaucuccgacacccccguccacgacugcaacaccaccugccagacccccaagggcgccaucaacaccucccuccccuuccagaacauccaccccaucaccaucggcaagugccccaaguacgucaaguccaccaagcuccgccucgccaccggccuccgcaacguccccuccauccagucccgcggccucuucggcgccaucgccggcuucaucgagggcggcuggaccggcauggucgacggcugguacggcuaccaccaccagaacgagcagggcuccggcuacgccgccgaccucaaguccacccagaacgccaucgacgagaucaccaacaaggucaacuccgucaucgagaagaugaacacccaguucgccgccgucggcaaggaguucaaccaccucgagaagcgcaucgagaaccucaacaagaaggucgacgacggcuuccucgacaucuggaccuacaacgccgagcuccucguccuccucgagaacgagcgcacccucgacuaccacgacuccaacgucaagaaccucuacgagaagguccgcucccagcucaagaacaacgccaaggagaucggcaacggcugcuucgaguucuaccacaagugcgacaacaccugcauggaguccgucaagaacggcaccuacgacuaccccaaguacuccgaggaggccaagcucaaccgcgaggagaucgacggcgucaagcucgaguccacccgcaucuaccagauccucgccaucuacuccaccgucgccuccucccucguccucgucgucucccucggcgccaucuccuucuggaugugcuccaacggcucccuccagugccgcaucugcaucuga

SEQ ID NO: 99923 - RNA, 1701 nt, Artificial Sequence; identical to SEQ ID NO: 98692
  derived and/or modified CDS sequence (opt2) from hemagglutinin__InfluenzaA__ACZ96819

SEQ ID NO: 99924 - RNA, 1701 nt, Artificial Sequence; identical to SEQ ID NO: 98692
  derived and/or modified CDS sequence (opt2) from hemagglutinin__InfluenzaA__ACZ96829

SEQ ID NO: 99925 - RNA, 1701 nt, Artificial Sequence; identical to SEQ ID NO: 98692
  derived and/or modified CDS sequence (opt2) from hemagglutinin__InfluenzaA__ACZ96839

SEQ ID NO: 99926 - RNA, 1701 nt, Artificial Sequence; identical to SEQ ID NO: 99845
  derived and/or modified CDS sequence (opt2) from hemagglutinin__InfluenzaA__ACZ96849

SEQ ID NO: 99927 - RNA, 1701 nt, Artificial Sequence; identical to SEQ ID NO: 98705
  derived and/or modified CDS sequence (opt2) from hemagglutinin__InfluenzaA__ACZ96859

SEQ ID NO: 99928 - RNA, 1701 nt, Artificial Sequence; identical to SEQ ID NO: 98692
  derived and/or modified CDS sequence (opt2) from hemagglutinin__InfluenzaA__ACZ96869

SEQ ID NO: 99929 - RNA, 1701 nt, Artificial Sequence; identical to SEQ ID NO: 98692
  derived and/or modified CDS sequence (opt2) from hemagglutinin__InfluenzaA__ACZ96879

SEQ ID NO: 99930 - RNA, 1701 nt, Artificial Sequence
  derived and/or modified CDS sequence (opt2) from hemagglutinin__InfluenzaA__ACZ96899
augaaggccauccucgucguccuccucuacaccuucgccaccgccaacgccgacacccucugcaucggcuaccacgccaacaacuccaccgacaccgucgacaccguccucgagaagaacgucaccgucacccacuccgucaaccuccucgaggacaagcacaacggcaagcucugcaagcuccgcggcgucgccccccuccaccucggcaagugcaacaucgccggcuggauccucggcaaccccgagugcgagucccucuccaccgccuccuccugguccuacaucgucgagaccuccuccuccgacaacggcaccugcuaccccggcgacuucaucgacuacgaggagcuccgcgagcagcucuccuccgucuccuccuucgagcgcuucgagaucuuccccaagaccuccuccuggcccaaccacgacuccaacaagggcgucaccgccgccugcccccacgccggcgccaaguccuucuacaagaaccucaucuggcucgucaagaagggcaacuccuaccccaagcucuccaaguccuacaucaacgacaagggcaaggagguccucguccucuggggcauccaccacuccuccaccuccgccgaccagcagucccucuaccagaacgccgacgccuacgucuucgucggcuccucccgcuacuccaagaaguucaagcccgagaucgccauccgccccaagguccgcgaccaggagggccgcaugaacuacuacuggacccucgucgagcccggcgacaagaucaccuucgaggccaccggcaaccucgucgucccccgcuacgccuucgccauggagcgcaacgccggcuccggcaucaucaucuccgacacccccguccacgacugcaacaccaccugccagacccccaagggcgccaucaacaccucccuccccuuccagaacauccaccccaucaccaucggcaagugccccaaguacgucaaguccaccaagcuccgccucgccaccggccuccgcaacguccccuccauccagucccgcggccucuucggcgccaucgccggcuucaucgagggcggcuggaccggcauggucgacggcugguacggcuaccaccaccagaacgagcagggcuccggcuacgccgccgaccucaaguccacccagaacgccaucgacgagaucaccaacaaggucaacuccgucaucgagaagaugaacacccaguucaccgccgucggcaaggaguucaaccaccucgagaagcgcaucgagaaccucaacaagaaggucgacgacggcuuccucgacaucuggaccuacaacgccgagcuccucguccuccucgagaacgagcgcacccucgacuaccacgacuccaacgucaagaaccucuacgagaagguccgcucccagcucaagaacaacgccaaggagaucggcaacggcugcuucgaguucuaccacaagugcgacaacaccugcauggaguccgucaagaacggcaccuacgacuaccccaaguacuccgaggaggccaagcucaaccgcgaggagaucgacggcgucaagcucgaguccacccgcaucuaccagauccucgccaucuacuccaccgucgccuccucccucguccucgucgucucccucggcgccaucuccuucuggaugugcuccaacggcucccuccagugccgcaucugcaucuga

SEQ ID NO: 99931 - RNA, 1701 nt, Artificial Sequence; identical to SEQ ID NO: 98692
  derived and/or modified CDS sequence (opt2) from hemagglutinin__InfluenzaA__ACZ96909

SEQ ID NO: 99932 - RNA, 1701 nt, Artificial Sequence; identical to SEQ ID NO: 98692
  derived and/or modified CDS sequence (opt2) from hemagglutinin__InfluenzaA__ACZ96919

SEQ ID NO: 99933 - RNA, 1701 nt, Artificial Sequence; identical to SEQ ID NO: 98692
  derived and/or modified CDS sequence (opt2) from hemagglutinin__InfluenzaA__ACZ96929

SEQ ID NO: 99934 - RNA, 1701 nt, Artificial Sequence; identical to SEQ ID NO: 98692
  derived and/or modified CDS sequence (opt2) from hemagglutinin__InfluenzaA__ACZ96939

SEQ ID NO: 99935 - RNA, 1701 nt, Artificial Sequence
  derived and/or modified CDS sequence (opt2) from hemagglutinin__InfluenzaA__ACZ96949
augaaggccauccucgucguccuccucuacaccuucgccaccgccaacgccgacacccucugcaucggcuaccacgccaacaacuccaccgacaccgucgacaccguccucgagaagaacgucaccgucacccacuccgucaaccuccucgaggacaagcacaacggcaagcucugcaagcuccgcggcgucgccccccuccaccucggcaagugcaacaucgccggcuggauccucggcaaccccgagugcgagucccucuccaccgccuccuccugguccuacaucgucgagaccuccuccuccgacaacggcaccugcuaccccggcgacuucaucgacuacgaggagcuccgcgagcagcucuccuccgucuccuccuucgagcgcuucgagaucuuccccaagaccuccuccuggcccaaccacgacuccaacaagggcgucaccgccgccugcccccacgccggcgccaaguccuucuacaagaaccucaucuggcucgucaagaagggcaacuccuaccccaagcucuccaaguccuacaucaacgacaagggcaaggagguccucguccucuggggcauccaccaccccuccaccuccgccgaccagcagucccucuaccagaacgccgacgccuacgucuucgucggcuccucccgcuacuccaagaaguucaagcccgagaucgccauccgccccaagguccgcgaccaggagggccgcaugaacuacuacuggacccucgucgagcccggcgacaagaucaccuucgaggccaccggcaaccucgucgucccccgcuacgccuucgccauggagcgcaacgccggcuccggcaucaucaucuccgacacccccguccacgacugcaacaccaccugccagacccccaagggcgccaucaacaccucccuccccuuccagaacauccaccccaucaccaucggcaagugccccaaguacgucaaguccaccaagcuccgccucgccaccggccuccgcaacguccccuccauccagucccgcggccucuucggcgccaucgccggcuucaucgagggcggcuggaccggcauggucgacggcugguacggcuaccaccaccagaacgagcagggcuccggcuacgccgccgaccucaaguccacccagaacgccaucgacgagaucaccaacaaggucaacuccgucaucgagaagaugaacacccaguucaccgccgucggcaaggaguucaaccaccucgagaagcgcaucgagaaccucaacaagaaggucgacgacggcuuccucgacaucuggaccuacaacgccgagaugcucguccuccucgagaacgagcgcacccucgacuaccacgacuccaacgucaagaaccucuacgagaagguccgcucccagcucaagaacaacgccaaggagaucggcaacggcugcuucgaguucuaccacaagugcgacaacaccugcauggaguccgucaagaacggcaccuacgacuaccccaaguacuccgaggaggccaagcucaaccgcgaggagaucgacggcgucaagcucgaguccacccgcaucuaccagauccucgccaucuacuccaccgucgccuccucccucguccucgucgucucccucggcgccaucuccuucuggaugugcuccaacggcucccuccagugccgcaucugcaucuga

SEQ ID NO: 99936 - RNA, 1701 nt, Artificial Sequence; identical to SEQ ID NO: 98692
  derived and/or modified CDS sequence (opt2) from hemagglutinin__InfluenzaA__ACZ97021

SEQ ID NO: 99937 - RNA, 1701 nt, Artificial Sequence; identical to SEQ ID NO: 99059
  derived and/or modified CDS sequence (opt2) from hemagglutinin__InfluenzaA__ACZ97343

SEQ ID NO: 99938 - RNA, 1701 nt, Artificial Sequence; identical to SEQ ID NO: 99059
  derived and/or modified CDS sequence (opt2) from hemagglutinin__InfluenzaA__ACZ97353

SEQ ID NO: 99939 - RNA, 1701 nt, Artificial Sequence; identical to SEQ ID NO: 98692
  derived and/or modified CDS sequence (opt2) from hemagglutinin__InfluenzaA__ACZ97363

SEQ ID NO: 99940 - RNA, 1701 nt, Artificial Sequence
  derived and/or modified CDS sequence (opt2) from hemagglutinin__InfluenzaA__ACZ97383
augaaggccauccucgucguccuccucuacaccuucgccaccgccaacgccgacacccucugcaucggcuaccacgccaacaacuccaccgacaccgucgacaccguccucgagaagaacgucaccgucacccacuccgucaaccuccucgaggacaagcacaacggcaagcucugcaagcuccgcggcgucgccccccuccaccucggcaagugcaacaucgccggcuggauccucggcaaccccgagugcgagucccucuccaccgccuccuccugguccuacaucgucgagaccuccaccuccgacaacggcaccugcuaccccggcgacuucaucgacuacgaggagcuccgcgagcagcucuccuccgucuccuccuucgagcgcuucgagaucuuccccaagaccuccuccuggcccaaccacgacuccaacaagggcgucaccgccgccugcccccacgccggcgccaaguccuucuacaagaaccucaucuggcucgucaagaagggcaacuccuaccccaagcucuccaaguccuacaucaacgacaagggcaaggagguccucguccucuggggcauccaccaccccuccaccuccgccgaccagcagucccucuaccagaacgccgacgccuacgucuucgucggcuccucccgcuacuccaagaaguucaagcccgagaucgccauccgccccaagguccgcgaccaggagggccgcaugaacuacuacuggacccucgucgagcccggcgacaagaucaccuucgaggccaccggcaaccucgucgucccccgcuacgccuucgccauggagcgcaacgccggcuccggcaucaucaucuccgacacccccguccacgacugcaacaccaccugccagacccccaagggcgccaucaacaccucccuccccuuccagaacauccaccccaucaccaucggcaagugccccaaguacgucaaguccaccaagcuccgccucgccaccggccuccgcaacguccccuccauccagucccgcggccucuucggcgccaucgccggcuucaucgagggcggcuggaccggcauggucgacggcugguacggcuaccaccaccagaacgagcagggcuccggcuacgccgccgaccucaaguccacccagaacgccaucgacgagaucaccaacaaggucaacuccgucaucgagaagaugaacacccaguucaccgccgucggcaaggaguucaaccaccucgagaagcgcaucgagaaccucaacaagaaggucgacgacggcuuccucgacaucuggaccuacaacgccgagcuccucguccuccucgagaacgagcgcacccucgacuaccacgacuccaacgucaagaaccucuacgagaagguccgcucccagcucaagaacaacgccaaggagaucggcaacggcugcuucgaguucuaccacaagugcgacaacaccugcauggaguccgucaagaacggcaccuacgacuaccccaaguacuccgaggaggccaagcucaaccgcgaggagaucgacggcgucaagcucgaguccacccgcaucuaccagauccucgccaucuacuccaccgucgccuccucccucguccucgucgucucccucggcgccaucuccuucuggaugugcuccaacggcucccuccagugccgcaucugcaucuga

SEQ ID NO: 99941 - RNA, 1701 nt, Artificial Sequence; identical to SEQ ID NO: 98692
  derived and/or modified CDS sequence (opt2) from hemagglutinin__InfluenzaA__ACZ97393

SEQ ID NO: 99942 - RNA, 1701 nt, Artificial Sequence
  derived and/or modified CDS sequence (opt2) from hemagglutinin__InfluenzaA__ACZ98178
augaaggccauccucgucguccuccucuacaccuucgccaccgccaacgccgacacccucugcaucggcuaccacgccaacaacuccaccgacaccgucgacaccguccucgagaagaacgucaccgucacccacuccgucaaccuccucgaggacaagcacuacggcaagcucugcaagcuccgcggcgucgccccccuccaccucggcaagugcaacaucgccggcuggauccucggcaaccccgagugcgagucccucuccaccgccuccuccugguccuacaucgucgagaccuccuccuccgacaacggcaccugcuaccccggcgacuucaucgacuacgaggagcuccgcgagcagcucuccuccgucuccuccuucgagcgcuucgagaucuuccccaagaccuccuccuggcccaaccacgacuccaacaagggcgucaccaccgccugcccccacgccggcgccaaguccuucuacaagaaccucaucuggcucgucaagaagggcaacuccuaccccaagcucuccaaguccuacaucaacgacaagggcaaggagguccucguccucuggggcauccaccaccccuccaccuccgccgaccagcagucccucuaccagaacgccgacgccuacgucuucgucggcaccucccgcuacuccaagaaguucaagcccgagaucgccauccgccccaagguccgcgaccaggagggccgcaugaacuacuacuggacccucgucgagcccggcgacaagaucaccuucgaggccaccggcaaccucgucgucccccgcuacgccuucgccauggagcgcaacgccggcuccggcaucaucaucuccgacacccccguccacgacugcaacaccaccugccagacccccaagggcgccaucaacaccucccuccccuuccagaacauccaccccaucaccaucggcaagugccccaaguacgucaaguccaccaagcuccgccucgccaccggccuccgcaacguccccuccauccagucccgcggccucuucggcgccaucgccggcuucaucgagggcggcuggaccggcauggucgacggcugguacggcuaccaccaccagaacgagcagggcuccggcuacgccgccgaccucaaguccacccagaacgccaucgacgagaucaccaacaaggucaacuccgucaucgagaagaugaacacccaguucaccgccgucggcaaggaguucaaccaccucgagaagcgcaucgagaaccucaacaagaaggucgacgacggcuuccucgacaucuggaccuacaacgccgagcuccucguccuccucgagaacgagcgcacccucgacuaccacgacuccaacgucaagaaccucuacgagaagguccgcucccagcucaagaacaacgccaaggagaucggcaacggcugcuucgaguucuaccacaagugcgacaacaccugcauggaguccgucaagaacggcaccuacgacuaccccaaguacuccgaggaggccaagcucaaccgcgaggagaucgacggcgucaagcucgaguccacccgcaucuaccagauccucgccaucuacuccaccgucgccuccucccucguccucgucgucucccucggcgccaucuccuucuggaugugcuccaacggcucccuccagugccgcaucugcaucuga

SEQ ID NO: 99943 - RNA, 1701 nt, Artificial Sequence; identical to SEQ ID NO: 98692
  derived and/or modified CDS sequence (opt2) from hemagglutinin__InfluenzaA__ACZ98188

SEQ ID NO: 99944 - RNA, 1701 nt, Artificial Sequence; identical to SEQ ID NO: 98885
  derived and/or modified CDS sequence (opt2) from hemagglutinin__InfluenzaA__ACZ98198

SEQ ID NO: 99945 - RNA, 1701 nt, Artificial Sequence; identical to SEQ ID NO: 98705
  derived and/or modified CDS sequence (opt2) from hemagglutinin__InfluenzaA__ACZ98208

SEQ ID NO: 99946 - RNA, 1701 nt, Artificial Sequence; identical to SEQ ID NO: 98705
  derived and/or modified CDS sequence (opt2) from hemagglutinin__InfluenzaA__ACZ98218

SEQ ID NO: 99947 - RNA, 1701 nt, Artificial Sequence; identical to SEQ ID NO: 98705
  derived and/or modified CDS sequence (opt2) from hemagglutinin__InfluenzaA__ACZ98228

SEQ ID NO: 99948 - RNA, 1701 nt, Artificial Sequence; identical to SEQ ID NO: 98705
  derived and/or modified CDS sequence (opt2) from hemagglutinin__InfluenzaA__ACZ98238

SEQ ID NO: 99949 - RNA, 1701 nt, Artificial Sequence; identical to SEQ ID NO: 99334
  derived and/or modified CDS sequence (opt2) from hemagglutinin__InfluenzaA__ACZ98248

SEQ ID NO: 99950 - RNA, 1701 nt, Artificial Sequence; identical to SEQ ID NO: 98705
  derived and/or modified CDS sequence (opt2) from hemagglutinin__InfluenzaA__ACZ98258

SEQ ID NO: 99951 - RNA, 1701 nt, Artificial Sequence; identical to SEQ ID NO: 98705
  derived and/or modified CDS sequence (opt2) from hemagglutinin__InfluenzaA__ACZ98268

SEQ ID NO: 99952 - RNA, 1701 nt, Artificial Sequence; identical to SEQ ID NO: 99845
  derived and/or modified CDS sequence (opt2) from hemagglutinin__InfluenzaA__ACZ98278

SEQ ID NO: 99953 - RNA, 1701 nt, Artificial Sequence; identical to SEQ ID NO: 99845
  derived and/or modified CDS sequence (opt2) from hemagglutinin__InfluenzaA__ACZ98288

SEQ ID NO: 99954 - RNA, 1701 nt, Artificial Sequence
  derived and/or modified CDS sequence (opt2) from hemagglutinin__InfluenzaA__ACZ98298
augaaggccauccucgucguccuccucuacaccuucgccaccgccaacgccgacacccucugcaucggcuaccacgccaacaacuccaccgacaccgucgacaccguccucgagaagaacgucaccgucacccacuccgucaaccuccucgaggacaagcacaacggcaagcucugcaagcuccgcggcgucgccccccuccaccucggcaagugcaacaucgccggcuggauccucggcaaccccgagugcgagucccucuccaccgccuccuccugguccuacaucgucgagaccuccuccuccgacaacggcaccugcuaccccggcgacuucaucgacuacgaggagcuccgcgagcagcucuccuccgucuccuccuucgagaaguucgagaucuuccccaagaccuccuccuggcccaaccacgacuccaacaagggcgucaccgccgccugcccccacgccggcgccaaguccuucuacaagaaccucaucuggcucgucaagaagggcaacuccuaccccaagcucuccaaguccuacaucaacgacaagggcaaggagguccucguccucuggggcauccaccaccccuccaccuccgccgaccagcagucccucuaccagaacgccgacgccuacgucuucgucggcuccucccgcuacuccaagaaguucaagcccgagaucgccauccgccccaagguccgcgaccaggagggccgcaugaacuacuacuggacccucgucgagcccggcgacaagaucaccuucgaggccaccggcaaccucgucgucccccgcuacgccuucgccauggagcgcaacgccggcuccggcaucaucaucuccgacacccccguccacgacugcaacaccaccugccagacccccaagggcgccaucaacaccucccuccccuuccagaacauccaccccaucaccaucggcaagugccccaaguacgucaaguccaccaagcuccgccucgccaccggccuccgcaacguccccuccauccagucccgcggccucuucggcgccaucgccggcuucaucgagggcggcuggaccggcauggucgacggcugguacggcuaccaccaccagaacgagcagggcuccggcuacgccgccgaccucaaguccacccagaacgccaucgacggcaucaccaacaaggucaacuccgucaucgagaagaugaacacccaguucaccgccgucggcaaggaguucaaccaccucgagaagcgcaucgagaaccucaacaagaaggucgacgacggcuuccucgacaucuggaccuacaacgccgagcuccucguccuccucgagaacgagcgcacccucgacuaccacgacuccaacgucaagaaccucuacgagaagguccgcucccagcucaagaacaacgccaaggagaucggcaacggcugcuucgaguucuaccacaagugcgacaacaccugcauggaguccgucaagaacggcaccuacgacuaccccaaguacuccgaggaggccaagcucaaccgcgaggagaucgacggcgucaagcucgaguccacccgcaucuaccagauccucgccaucuacuccaccgucgccuccucccucguccucgucgucucccucggcgccaucuccuucuggaugugcuccaacggcucccuccagugccgcaucugcaucuga

SEQ ID NO: 99955 - RNA, 1701 nt, Artificial Sequence
  derived and/or modified CDS sequence (opt2) from hemagglutinin__InfluenzaA__ACZ98318
augaaggccauccucgucguccuccucuacaccuucgccaccgccaacgccgacacccucugcaucggcuaccacgccaacaacuccaccgacaccgucgacaccguccucgagaagaacgucaccgucacccacuccgucaaccuccucgaggacaagcacaacggcaagcucugcaagcuccgcggcgucgccccccuccaccucggcaagugcaacaucgccggcuggauccucggcaaccccgagugcgagucccucuccaccgccuccuccugguccuacaucgucgagaccuccuccuccgacaacggcaccugcuaccccggcgacuucaucgacuacgaggagcuccgcgagcagcucuccuccgucuccuccuucgagcgcuucgagaucuuccccaagaccuccuccuggcccaaccacgacuccaacaagggcgucaccgccgccugcccccacgccggcgccaaguccuucuacaagaaccucaucuggcucgucaagaagggcaacuccuaccccaagcucuccaaguccuacaucaacgacaagggcaaggagguccucguccucuggggcauccaccaccccuccaccuccgccgaccagcagucccucuaccagaacgccgacgccuacgucuucgucggcaccucccgcuacuccaagaaguucaagcccgagaucgccauccgccccaagguccgcgaccaggagggccgcaugaacuacuacuggacccucgucgagcccggcgacaagaucaccuucgaggccaccggcaaccucgucgucccccgcuacgccuucgccauggagcgcaacgccggcuccggcaucaucaucuccgacacccccguccacgacugcaacaccaccugccagacccccaagggcgccaucaacaccucccuccccuuccagaacauccaccccaucaccaucggcaagugccccaaguacgucaaguccaccaagcuccgccucgccaccggccuccgcaacguccccuccauccagucccgcggccucuucggcgccaucgccggcuucaucgagggcggcuggaccggcauggucgacggcugguacggcuaccaccaccagaacgagcagggcuccggcuacgccgccgaccucaaguccacccagaacgccaucgacgagaucaccaacaaggucaacuccgucaucgagaagaugaacacccaguucaccgccgucggcaaggaguucaaccaccucgagaagcgcaucgagaaccucaacaagaaggucgacgacggcuuccucgacaucuggaccuacaacgccgagcuccucguccuccucgagaacgagcgcacccucgacuaccacgacuccaacgucaagaaccucuacgagaagguccgcucccagcucaagaacaacgccaaggagaucggcaacggcugcuucgaguucuaccacaagugcgacaacaccugcauggaguccgucaagaacggcaccuacgacuaccccaaguacuccgaggaggccaagcucaaccgcgaggagaucgacggcgucaagcucgaguccacccgcaucuaccacauccucgccaucuacuccaccgucgccuccucccucguccucgucgucucccucggcgccaucuccuucuggaugugcuccaacggcucccuccagugccgcaucugcaucuga

SEQ ID NO: 99956 - RNA, 1701 nt, Artificial Sequence; identical to SEQ ID NO: 98947
  derived and/or modified CDS sequence (opt2) from hemagglutinin__InfluenzaA__ACZ98328

SEQ ID NO: 99957 - RNA, 1701 nt, Artificial Sequence; identical to SEQ ID NO: 98705
  derived and/or modified CDS sequence (opt2) from hemagglutinin__InfluenzaA__ACZ98338

SEQ ID NO: 99958 - RNA, 1701 nt, Artificial Sequence; identical to SEQ ID NO: 99845
  derived and/or modified CDS sequence (opt2) from hemagglutinin__InfluenzaA__ACZ98348

SEQ ID NO: 99959 - RNA, 1701 nt, Artificial Sequence; identical to SEQ ID NO: 98705
  derived and/or modified CDS sequence (opt2) from hemagglutinin__InfluenzaA__ACZ98358

SEQ ID NO: 99960 - RNA, 1701 nt, Artificial Sequence; identical to SEQ ID NO: 98705
  derived and/or modified CDS sequence (opt2) from hemagglutinin__InfluenzaA__ACZ98368

SEQ ID NO: 99961 - RNA, 1701 nt, Artificial Sequence; identical to SEQ ID NO: 98947
  derived and/or modified CDS sequence (opt2) from hemagglutinin__InfluenzaA__ACZ98388

SEQ ID NO: 99962 - RNA, 1701 nt, Artificial Sequence; identical to SEQ ID NO: 98705
  derived and/or modified CDS sequence (opt2) from hemagglutinin__InfluenzaA__ACZ98398

SEQ ID NO: 99963 - RNA, 1701 nt, Artificial Sequence; identical to SEQ ID NO: 98705
  derived and/or modified CDS sequence (opt2) from hemagglutinin__InfluenzaA__ACZ98408

SEQ ID NO: 99964 - RNA, 1701 nt, Artificial Sequence; identical to SEQ ID NO: 98885
  derived and/or modified CDS sequence (opt2) from hemagglutinin__InfluenzaA__ACZ98418

SEQ ID NO: 99965 - RNA, 1701 nt, Artificial Sequence; identical to SEQ ID NO: 98705
  derived and/or modified CDS sequence (opt2) from hemagglutinin__InfluenzaA__ACZ98428

SEQ ID NO: 99966 - RNA, 1701 nt, Artificial Sequence; identical to SEQ ID NO: 98705
  derived and/or modified CDS sequence (opt2) from hemagglutinin__InfluenzaA__ACZ98438

SEQ ID NO: 99967 - RNA, 1701 nt, Artificial Sequence; identical to SEQ ID NO: 98705
  derived and/or modified CDS sequence (opt2) from hemagglutinin__InfluenzaA__ACZ98448

SEQ ID NO: 99968 - RNA, 1701 nt, Artificial Sequence; identical to SEQ ID NO: 99845
  derived and/or modified CDS sequence (opt2) from hemagglutinin__InfluenzaA__ACZ98458

SEQ ID NO: 99969 - RNA, 1701 nt, Artificial Sequence
  derived and/or modified CDS sequence (opt2) from hemagglutinin__InfluenzaA__ACZ98546
augaaggccauccucgucguccuccucuacaccuucgccaccgccaacgccgacacccucugcaucggcuaccacgccaacaacuccaccgacaccgucgacaccguccucgagaagaacgucaccgucacccacuccgucaaccuccucgaggacaagcacaacggcaagcucugcaagcuccgcggcgucgccccccuccaccucggcaagugcaacaucgccggcuggauccucggcaaccccgagugcgagucccucuccaccgccuccuccugguccuacaucgucgagaccuccuccuccgacaacggcaccugcuaccccggcgacuucaucgacuacgaggagcuccgcgagcagcucuccuccgucuccuccuucgagcgcuucgagaucuuccccaagaccuccuccuggcccaaccacgaccccaacaagggcgucaccgccgccugcccccacgccggcgccaaguccuucuacaagaaccucaucuggcucgucaagaagggcaacuccuaccccaagcucuccaaguccuacaucaacgacaagggcaaggagguccucguccucuggggcauccaccaccccuccaccuccgccgaccagcagucccucuaccagaacgccgacgccuacgucuucgucggcaccucccgcuacuccaagaaguucaagcccgagaucgccauccgccccaagguccgcgaccaggagggccgcaugaacuacuacuggacccucgucgagcccggcgacaagaucaccuucgaggccaccggcaaccucgucgucccccgcuacgccuucgccauggagcgcaacgccggcuccggcaucaucaucuccgacacccccguccacgacugcaacaccaccugccagacccccaagggcgccaucaacaccucccuccccuuccagaacauccaccccaucaccaucggcaagugccccaaguacgucaaguccaccaagcuccgccucaccaccggccuccgcaacguccccuccauccaguaccgcggccucuucggcgccaucaccggcuucaucgagggcggcuggaccggcauggucgacggcugguacggcuaccaccaccagaacgagcagggcuccggcuacgccgccgaccucaaguccacccagaacgccaucgacgagaucaccaacaaggucaacuccgucaucgagaagaugaacacccaguucaccgccgucggcaaggaguucaaccaccucgagaagcgcaucgagaaccucaacaagaaggucgacgacggcuuccucgacaucuggaccuacaacgccgagcuccucguccuccucgagaacgagcgcacccucgacuaccacgacuccaacgucaagaaccucuacgagaagguccgcucccagcucaagaacaacgccaaggagaucggcaacggcugcuucgaguucuaccacaagugcgacaacaccugcauggaguccgucaagaacggcaccuacgacuaccccaaguacuccgaggaggccaagcucaaccgcgaggagaucgacggcgucaagcucgaguccacccgcaucuaccagauccucgccaucuacuccaccgucgccuccucccucguccucgucgucucccucggcgccaucuccuucuggaugugcuccaacggcucccuccagugccgcaucugcaucuga

SEQ ID NO: 99970 - RNA, 1701 nt, Artificial Sequence
  derived and/or modified CDS sequence (opt2) from hemagglutinin__InfluenzaA__ACZ98560
augaaggccauccgcgucguccuccucuacaccuucgccaccgccaacgccgacacccucugcaucggcuaccacgccaacaacuccaccgacaccgucgacaccguccucgagaagaacgucaccgucacccacuccgucaaccuccucgaggacaagcacaacggcaagcucugcaagcuccgcggcgucgccccccuccaccucggcaagugcaacaucgccggcuggauccucggcaaccccgagugcgagucccucuccaccgccuccuccugguccuacaucgucgagaccuccuccuccgacaacggcaccugcuaccccggcgacuucaucgacuacgaggagcuccgcgagcagcucuccuccgucuccuccuucgagcgcuucgagaucuuccccaagaccuccuccuggcccaaccacgaccccaacaagggcgucaccgccgccugcccccacgccggcgccaaguccuucuacaagaaccucaucuggcucgucaagaagggcaacuccuaccccaagcucuccaaguccuacaucaacgacaagggcaaggagguccucguccucuggggcauccaccaccccuccaccuccgccgaccagcagucccucuaccagaacgccgacgccuacgucuucgucggcaccucccgcuacuccaagaaguucaagcccgagaucgccauccgccccaagguccgcgaccaggagggccgcaugaacuacuacuggacccucgucgagcccggcgacaagaucaccuucgaggccaccggcaaccucgucgucccccgcuacgccuucgccauggagcgcaacgccggcuccggcaucaucaucuccgacacccccguccacgacugcaacaccaccugccagacccccaagggcgccaucaacaccucccuccccuuccagaacauccaccccaucaccaucggcaagugccccaaguacgucaagucccccaagcuccgccucgccaccggcaugcgcaacguccccuucauccaguaccgcggccucuucggcgccaucaccggcuucaucgagggcggcuggaccggcauggucgacggcugguacggcuaccaccaccagaacgagcagggcuccggcuacgccgccgaccucaaguccacccagaacgccaucgacgagaucaccaacaaggucaacuccgucaucgagaagaugaacacccaguucaccgccgucggcaaggaguucaaccaccucgagaagcgcaucgagaaccucaacaagaaggucgacgacggcuuccucgacaucuggaccuacaacgccgagcuccucguccuccucgagaacgagcgcacccucgacuaccacgacuccaacgucaagaaccucuacgagaagguccgcucccagcucaagaacaacgccaaggagaucggcaacggcugcuucgaguucuaccacaagugcgacaacaccugcauggaguccgucaagaacggcaccuacgacuaccccaaguacuccgaggaggccaagcucaaccgcgaggagaucgacggcgucaagcucgaguccacccgcaucuaccagauccucgccaucuacuccaccgucgccuccucccucguccucgucgucucccucggcgccaucuccuucuggaugugcuccaacggcucccuccagugccgcaucugcaucuga

SEQ ID NO: 99971 - RNA, 1701 nt, Artificial Sequence
  derived and/or modified CDS sequence (opt2) from hemagglutinin__InfluenzaA__ACZ98567
augaaggccauccucgucguccuccucuacaccuucgccaccgccaacgccgacacccucugcaucggcuaccacgccaacaacuccaccgacaccgucgacaccguccucgagaagaacgucaccgucacccacuccgucaaccuccucgaggacaagcacaacggcaagcucugcaagcuccgcggcgucgccccccuccaccucggcaagugcaacaucgccggcuggauccucggcaaccccgagugcgagucccucuccaccgccuccuccugguccuacaucgucgagaccuccuccuccgacaacggcaccugcuaccccggcgacuucaucgacuacgaggagcuccgcgagcagcucuccuccgucuccuccuucgagcgcuucgagaucuuccccaagaccuccuccuggcccaaccacgaccccaacaagggcgucaccgccgccugcccccacgccggcgccaaguccuucuacaagaaccucaucuggcucgucaagaagggcaacuccuaccccaagcucuccaaguccuacaucaacgacaagggcaaggagguccucguccucuggggcauccaccaccccuccaccuccgccgaccagcagucccucuaccagaacgccgacgccuacgucuucgucggcaccucccgcuacuccaagaaguucaagcccgagaucgccauccgccccaagguccgcgaccaggagggccgcaugaacuacuacuggacccucgucgagcccggcgacaagaucaccuucgaggccaccggcaaccucgucgucccccgcuacgccuucgccauggagcgcaacgccggcuccggcaucaucaucuccgacacccccguccacgacugcaacaccaccugccagacccccaagggcgccaucaacaccucccuccccuuccagaacauccaccccaucaccaucggcaagugccccaaguacgucaagucccccaagcuccgccucgccuccggcaugcgcaacguccccuucauccagucccgcggccucuucggcgccaucaccggcuucaucgaggagggcuggaccggcauggucgacggcugguacggcuuccaccaccagaacgagcagggcuccggcuacgccgccgaccucaaguccacccagaacgccaucgacgagaucaccaacaaggucaacuccgucaucgagaagaugaacacccaguucaccgccgucggcaaggaguucaaccaccucgagaagcgcaucgagaaccucaacaagaaggucgacgacggcuuccucgacaucuggaccuacaacgccgagcuccucguccuccucgagaacgagcgcacccucgacuaccacgacuccaacgucaagaaccucuacgagaagguccgcucccagcucaagaacaacgccaaggagaucggcaacggcugcuucgaguucuaccacaagugcgacaacaccugcauggaguccgucaagaacggcaccuacgacuaccccaaguacuccgaggaggccaagcucaaccgcgaggagaucgacggcgucaagcucgaguccacccgcaucuaccagauccucgccaucuacuccaccgucgccuccucccucguccucgucgucucccucggcgccaucuccuucuggaugugcuccaacggcucccuccagugccgcaucugcaucuga

SEQ ID NO: 99972 - RNA, 1701 nt, Artificial Sequence; identical to SEQ ID NO: 98692
  derived and/or modified CDS sequence (opt2) from hemagglutinin__InfluenzaA__ACZ98671

SEQ ID NO: 99973 - RNA, 1701 nt, Artificial Sequence; identical to SEQ ID NO: 98692
  derived and/or modified CDS sequence (opt2) from hemagglutinin__InfluenzaA__ACZ98681

SEQ ID NO: 99974 - RNA, 1701 nt, Artificial Sequence; identical to SEQ ID NO: 98705
  derived and/or modified CDS sequence (opt2) from hemagglutinin__InfluenzaA__ACZ98691

SEQ ID NO: 99975 - RNA, 1701 nt, Artificial Sequence
  derived and/or modified CDS sequence (opt2) from hemagglutinin__InfluenzaA__ADA60799
augaaggccauccucgucguccuccucuacaccuucgccaccgccaacgccgacacccucugcaucggcuaccacgccaacaacuccaccgacaccgucgacaccguccucgagcgcaacgucaccgucacccacuccgucaaccuccucgaggacaagcacaacggcaagcucugcaagcuccgcggcgucgccccccuccaccucggcaagugcaacaucgccggcuggauccucggcaaccccgagugcgagucccucuccaccgccuccuccugguccuacaucgucgagaccuccuccuccgacaacggcaccugcuaccccggcgacuucaucgacuacgaggagcuccgcgagcagcucuccuccgucuccuccuucgagcgcuucgagaucuuccccaagaccuccuccuggcccaaccacgacuccaacaagggcgucaccgccgccugcccccacgccggcgccaaguccuucuacaagaaccucaucuggcucgucaagaagggcaacuccuaccccaagcucuccaaguccuacaucaacgacaagggcaaggagguccucguccucuggggcauccaccaccccuccaccuccgccgaccagcagucccucuaccagaacgccgacgccuacgucuucgucggcaccucccgcuacuccaagaaguucaagcccgagaucgccauccgccccaagguccgcgaccaggagggccgcaugaacuacuacuggacccucgucgagcccggcgacaagaucaccuucgaggccaccggcaaccucgucgucccccgcuacgccuucgccauggagcgcaacgccggcuccggcaucaucaucuccgacacccccguccacgacugcaacaccaccugccagacccccaagggcgccaucaacaccucccuccccuuccagaacauccaccccaucaccaucggcaagugccccaaguacgucaaguccaccaagcuccgccucgccaccggccuccgcaacauccccuccauccagucccgcggccucuucggcgccaucgccggcuucaucgagggcggcuggaccggcauggucgacggcugguacggcuaccaccaccagaacgagcagggcuccggcuacgccgccgaccucaaguccacccagaacgccaucgacgagaucaccaacaaggucaacuccgucaucgagaagaugaacacccaguucaccgccgucggcaaggaguucaaccaccucgagaagcgcaucgagaaccucaacaagaaggucgacgacggcuuccucgacaucuggaccuacaacgccgagcuccucguccuccucgagaacgagcgcacccucgacuaccacgacuccaacgucaagaaccucuacgagaagguccgcucccagcucaagaacaacgccaaggagaucggcaacggcugcuucgaguucuaccacaagugcgacaacaccugcauggaguccgucaagaacggcaccuacgacuaccccaaguacuccgaggaggccaagcucaaccgcgaggagaucgacggcgucaagcucgaguccacccgcaucuaccagauccucgccaucuacuccaccgucgccuccucccucguccucgucgucucccucggcgccaucuccuucuggaugugcuccaacggcucccuccagugccgcaucugcaucuga

SEQ ID NO: 99976 - RNA, 1701 nt, Artificial Sequence; identical to SEQ ID NO: 99869
  derived and/or modified CDS sequence (opt2) from hemagglutinin__InfluenzaA__ADA69302

SEQ ID NO: 99977 - RNA, 1701 nt, Artificial Sequence; identical to SEQ ID NO: 99869
  derived and/or modified CDS sequence (opt2) from hemagglutinin__InfluenzaA__ADA69312

SEQ ID NO: 99978 - RNA, 1701 nt, Artificial Sequence; identical to SEQ ID NO: 99869
  derived and/or modified CDS sequence (opt2) from hemagglutinin__InfluenzaA__ADA69322

SEQ ID NO: 99979 - RNA, 1701 nt, Artificial Sequence; identical to SEQ ID NO: 99869
  derived and/or modified CDS sequence (opt2) from hemagglutinin__InfluenzaA__ADA69332

SEQ ID NO: 99980 - RNA, 1701 nt, Artificial Sequence; identical to SEQ ID NO: 99806
  derived and/or modified CDS sequence (opt2) from hemagglutinin__InfluenzaA__ADA70329

SEQ ID NO: 99981 - RNA, 1698 nt, Artificial Sequence
  derived and/or modified CDS sequence (opt2) from hemagglutinin__InfluenzaA__ADA71150
augaaggucaagcuccucguccuccucugcaccuucaccgccaccuacgccgacaccaucugcaucggcuaccacgccaacaacuccaccgacaccgucgacaccguccucgagaagaacgucaccgucacccacuccgucaaccucgucgagaacucccacaacggcaagcucugccuccucaagggcaucgccccccuccagcucggcaacugcuccgucgccggcuggauccucggcaaccccgagugcgagcuccucaucuccaaggaguccugguccuacaucgucgagaagcccaaccccgagaacggcaccugcuaccccggccacuucgccgacuacgaggagcuccgcgagcagcucuccuccgucuccuccuucgagcgcuucgagaucuuccccaaggaguccuccuggcccaaccacaccgucaccggcgucuccgccuccugcucccacaacggcgaguccuccuucuaccgcaaccuccucuggcucaccggcaagaacggccucuaccccaaccucuccaaguccuacgccaacaacaaggagaaggagguccucguccucuggggcguccaccacccccccuccaucuccaaccagaagacccucuaccacaccgagaacgccuacgucuccgucgucuccucccacuacucccgcaaguucacccccgagaucgccaagcgccccaagguccgcgaccaggagggccgcaucaacuacuacuggacccuccucgagcccggcgacaccaucaucuucgaggccaacggcaaccucaucgccccccgcuacgccuucgcccucucccgcggcuucggcuccggcaucaucaacuccaacgcccccauggacaagugcgacgccaagugccagaccccccagggcgccaucaacuccucccuccccuuccagaacguccaccccgucaccaucggcgagugccccaaguacguccgcuccgccaagcuccgcauggucaccggccuccgcaacauccccuccauccagucccgcggccucuucggcgccaucgccggcuucaucgagggcggcuggaccggcauggucgacggcugguacggcuaccaccaccagaacgagcagggcuccggcuacgccgccgaccagaaguccacccagaacgccaucaacggcaucaccaagaaggucaacuccgucaucgagaagaugaacacccaguucaccgccgucggcaaggaguucaacaagcucgagcgccgcauggagaaccucaacaagaaggucgacgacggcuucaucgacaucuggaccuacaacgccgagcuccucguccuccucgagaacgagcgcacccucgacuuccacgacuccaacgucaagaaccucuacgagaaggucaagucccagcucaagaacaacgccaaggagaucggcaacggcugcuucgaguucuaccacaagugcaacgacgagugcauggaguccgucaagaacggcaccuacgacuaccccaaguacuccgaggaguccaagcucaaccgcgagaagaucgacggcgucaagcucgaguccaugggcgucuaccagauccucgccaucuacuccaccgucgccuccucccucguccuccucgucucccucggcgccaucuccuucuggaugugcuccaacggcucccuccagugccgcaucugcaucuga

SEQ ID NO: 99982 - RNA, 1701 nt, Artificial Sequence
  derived and/or modified CDS sequence (opt2) from hemagglutinin__InfluenzaA__ADA71152
augaagaccaucaucgcccucuccuacauccucugccucgucuucgcccagaagcuccccggcaacgacaacuccaccgccacccucugccucggccaccacgccguccccaacggcaccaucgucaagaccaucaccaacgaccagaucgaggucaccaacgccaccgagcucguccaguccuccuccaccggcgagaucugcgacuccccccaccagauccucgacggcggcaacugcacccucaucgacgcccuccucggcgacccccagugcgacggcuuccagaacaagaagugggaccucuucgucgagcgcuccaaggccuacuccaacugcuaccccuacgacguccccgacuacgccucccuccgcucccucgucgccuccuccggcacccucgaguucaacaacgaguccuucaacuggaccggcgucacccagaacggcaccuccuccgccugcauccgccgcuccaacaacuccuucuucucccgccucaacuggcucacccaccucaaguucaaguaccccgcccucaacgucaccaugcccaacaacgagcaguucgacaagcucuacaucuggggcguccaccaccccggcaccgacaacgaccagaucuuccucuacgcccaggccuccggccgcaucaccgucuccaccaagcgcucccagcagaccgucauccccaacaucggcucccgcccccgcguccgcaacauccccucccgcaucuccaucuacuggaccaucgucaagcccggcgacauccuccucaucaacuccaccggcaaccucaucgccccccgcggcuacuucaagauccgcuccggcaaguccuccaucaugcgcuccgacgcccccaucggcaagugcaacuccgagugcaucacccccaacggcuccauccccaacgacaagcccuuccagaacgucaaccgcaucaccuacggcgccugcccccgcuacgucaagcagaacacccucaagcucgccaccggcaugcgcaacguccccgagaagcagacccgcggcaucuucggcgccaucgccggcuucaucgagaacggcugggagggcauggucgacggcugguacggcuuccgccaccagaacuccgagggccgcggccaggccgccgaccucaaguccacccaggccgccaucgaccagaucaacggcaagcucaaccgccucaucggcaagaccaacgagaaguuccaccagaucgagaaggaguucuccgaggucgagggccgcauccaggaccucgagaaguacgucgaggacaccaagaucgaccucugguccuacaacgccgagcuccucgucgcccucgagaaccagcacaccaucgaccucaccgacuccgagaugaacaagcucuucgagaagaccaagaagcagcuccgcgagaacgccgaggacaugggcaacggcugcuucaagaucuaccacaagugcgacaacgccugcaucggcuccauccgcaacggcaccuacgaccacgacgucuaccgcgacgaggcccucaacaaccgcuuccagaucaagggcgucgagcucaaguccggcuacaaggacuggauccucuggaucuccuucgccaucuccugcuuccuccucugcgucgcccuccucggcuucaucaugugggccugccagaagggcaacauccgcugcaacaucugcaucuga

SEQ ID NO: 99983 - RNA, 1698 nt, Artificial Sequence
  derived and/or modified CDS sequence (opt2) from hemagglutinin__InfluenzaA__ADA71154
augaaggucaagcuccucguccuccucugcaccuucaccgccaccuacgccgacaccaucugcaucggcuaccacgccaacaacuccaccgacaccgucgacaccguccucgagaagaacgucaccgucacccacuccgucaaccuccucgagaacucccacaacggcaagcucugccuccucaagggcaucgccccccuccagcucggcaacugcuccgucgccggcuggauccucggcaacuccgagugcgagcuccucaucuccaaggaguccugguccuacaucgucgagaagcccaaccccgagaacggcaccugcuacuucggccacuucgccgacuacgaggagcuccgcgagcaguucggcuccgucuccuccuucgagcgcuucgagaucuuccccaaggaguccuccuggcccaaccacaccgucaccggcgucuccgccuccugcucccacaacggcgaguccuccuucuaccgcaaccuccucuggcucaccggcaagaacggccucuaccccaaccucuccaaguccuacgccaacaacaaggagaaggagguccucguccucuggggcguccaccacccccccuccaucaacgaccagaagacccucuaccacaccgagaacgccuacgucuccgucgucuccucccacuacucccgcaaguucacccccgagaucgccaagcgccccaagguccgcgaccaggagggccgcaucaacuacuacuggacccuccucgagccccgcgacaccaucaucuucgaggccaacggcaaccucaucgccccccgcuacgccuucgcccucucccgcggcuucggcuccggcaucaucaacuccaacgcccccauggacaagugcgacgccaagugccagaccccccagggcgccaucaacuccucccuccccuuccagaacguccaccccgucaccaucggcgagugccccaaguacguccgcuccgccaagcuccgcauggucaccggccuccgcaacauccccuccauccagucccgcggccucuucggcgccaucgccggcuucaucgagggcggcuggaccggcauggucgacggcugguacggcuaccaccaccagaacgagcagggcuccggcuacgccgccgaccagaaguccacccagaacgccaucaacggcaucaccaacaaggucaacuccgucaucgagaagaugaacacccaguucaccgccgucggcaaggaguucaacaagcucgagcgccgcauggagaaccucaacaagaaggucgacgacggcuucaucgacaucuggaccuacaacgccgagcuccucguccuccucgagaacgagcgcacccucgacuuccacgacuccaacgucaagaaccucuacgagaaggucaagucccagcucaagaacaacgccaaggagaucggcaacggcugcuucgaguucuaccacaagugcaacgacgagugcauggaguccgucaagaacggcaccuacgacuaccccaaguacuccgaggaguccaagcucaaccgcgagaagaucgacggcgucaagcucgaguccaugggcgucuaccagauccucgccaucuacuccaccgucgccuccucccucguccuccucgucucccucggcgccaucuccuucuggaugugcuccaacggcucccuccagugccgcaucugcaucuga

SEQ ID NO: 99984 - RNA, 1698 nt, Artificial Sequence
  derived and/or modified CDS sequence (opt2) from hemagglutinin__InfluenzaA__ADA71158
augaaggucaagcuccucguccuccucugcaccuucaccgccaccuacgccgacaccaucugcaucggcuaccacgccaacaacuccaccgacaccgucgacaccguccucgagaagaacgucaccgucacccacuccgucaaccuccucgagaacucccacaacggcaagcucugccuccucaagggcaucgccccccuccagcucggcaacugcuccgucgccggcuggauccucggcaaccccgagugcgagcuccucaucuccaaggagaccugguccuacaucgucgagaagcccaaccccgagaacggcaccugcuaccccggccacuucgccgacuacgaggagcuccgcgagcagcucuccuccgucuccuccuucgagcgcuucgagaucuuccccaaggaguccuccuggcccaaccacaccgucaccggcgucuccgccuccugcucccacaacggcgaguccuccuucuaccgcaaccuccucuggcucaccggcaagaacggccucuaccccaaccucuccaaguccuacgccaacaacaaggagaaggagguccucguccucuggggcguccaccacccccccuccaucaacgaccagcgcacccucuaccacaccgagaacgccuacgucuccgucgucuccucccacuacucccgcaaguucacccccgagaucgccaagcgccccaagguccgcgaccaggagggccgcaucaacuacuacuggacccuccucgagccccgcgacaccaucaucuucgaggccaacggcaaccucaucgccccccgcuacgccuucgcccucucccgcggcuucggcuccggcaucaucaacuccaacgcccccauggacaagugcgacgccaagugccagaccccccagggcgccaucaacuccucccuccccuuccagaacguccaccccgucaccaucggcgagugccccaaguacguccgcuccgccaagcuccgcauggucaccggccuccgcaacacccccuccauccagucccgcggccucuucggcgccaucgccggcuucaucgagggcggcuggaccggcauggucgacggcugguacggcuaccaccaccagaacgagcagggcuccggcuacgccgccgaccagaaguccacccagaacgccaucaacggcaucaccaacaaggucaacuccgucaucgagaagaugaacacccaguucaccgccgucggcaaggaguucaacaagcucgagucccucauggacauccucaacaagaaggucgacgacggcuucaucgacaucuggaccuacaacgccgagcuccucguccuccucgagaacgagcgcacccucgacuuccacgacuccaacgucaagaaccucuacgagaaggucaagucccagcucaagaacaacgccaaggagaucggcaacggcugcuucgaguucuaccacaagugcaacgacgagugcauggaguccgucaagaacggcaccuacgacuaccccaaguacuccgaggaguccaagcucaaccgcgagaagaucgacggcgucaagcucgaguccaugggcgucuaccagauccucgccaucuacuccaccgucgccuccucccucguccuccucgucucccucggcgccaucuccuucuggaugugcuccaacggcucccuccagugccgcaucugcaucuga

SEQ ID NO: 99985 - RNA, 1701 nt, Artificial Sequence; identical to SEQ ID NO: 98470
  derived and/or modified CDS sequence (opt2) from hemagglutinin__InfluenzaA__ADA71162

SEQ ID NO: 99986 - RNA, 1698 nt, Artificial Sequence
  derived and/or modified CDS sequence (opt2) from hemagglutinin__InfluenzaA__ADA71164
augaaggucaagcuccucguccuccucugcaccuucaccgccaccuacgccgacaccaucugcaucggcuaccacgccaacaacuccaccgacaccgucgacaccguccucgagaagaacgucaccgucacccacuccgucaaccuccucgagaacucccacaacggcaagcucugccuccucaagggcaucgccccccuccagcucggcaacugcuccgucgccggcuggauccucggcaaccccgagugcgagcuccucgucuccaaggaguccugguccuacaucgucgagaagcccaaccccgagaacggcaccugcuaccccggccacuucgccgacuacgaggagcuccgcgagcagcucuccuccgucuccuccuucgagcgcuucgagaucuuccccaaggaguccuccuggcccaaccacaccgucaccggcgccuccgccuccugcucccacaacggcgagaacuccuucuaccgcaaccuccucuggcucaccggcaagaacggccucuaccccaaccucuccaaguccuacgccaacaacaaggagaaggagguccucguccucuggggcguccaccacccccccuccaucgccgaccagaagacccucuaccacaccgagaacgccuacgucuccgucgucuccucccacuacucccgcaaguucacccccgagaucgccaagcgccccaagguccgcgaccaggagggccgcauccacuacuacuggacccuccucgagcccggcgacaccaucaucuucgaggccaacggcaaccucaucgccccccgcuacgccuucgcccucucccgcggcuucggcuccggcaucaucaacuccaacgcccccauggacaagugcgacgccaccugccagaccccccagggcgccaucaacuccucccuccccuuccagaacguccaccccgucaccaucggcgagugccccaaguacguccgcuccgccaagcuccgcauggucaccggccuccgcaacauccccuccauccagucccgcggccucuucggcgccaucgccggcuucaucgagggcggcuggaccggcauggucgacggcugguacggcuaccaccaccagaacgagcagggcuccggcuacgccgccgaccagaaguccacccagaacgccaucaacggcaucaccaacaaggucaacuccgucaucgagaagaugaacacccaguucaccgccgucggcaaggaguucaacaagcucgagcgccgcauggagaaccucaacaagaaggucgacgacggcuucaucgacaucuggaccuacaacgccgagcuccucguccuccucgagaacgagcgcacccucgacuuccacgacuccaacgucaagaaccucuacgagaaggucaucucccagcucaagaucaacgccaaggaccucggcuacggcugcuucgaguucuaccacaagugcaacgacgagugcauggaguccgucaagaacggcaccuacgacuaccccaaguacuccgaggaguccaagcucaaccgcgagaagaucgacggcgucaagcucgaguccaugggcgucuaccagauccucgccaucuacuccaccgucgccuccucccucguccuccucgucucccucggcgccaucuccuucuggaugugcuccaacggcucccuccagugccgcaucugcaucuga

SEQ ID NO: 99987 - RNA, 1698 nt, Artificial Sequence
  derived and/or modified CDS sequence (opt2) from hemagglutinin__InfluenzaA__ADA71168
augaaggucaagcuccucguccuccucugcaccuucaccgccaccuacgccgacaccaucugcaucggcuaccacgccaacaacuccaccgacaccgucgacaccguccucgagaagaacgucaccgucacccacuccgucaaccuccucgaggacaaccacaacggcaagcucugccuccucaagggcaaggccccccuccagcucggcaacugcuccgucgccggcuggauccucggcaaccccgagugcggccuccucaucuccaaggaguccugguccuacaucgucgagcgccccaaccccgagaacggcaccugcuaccccggccacuucgccgacuacgaggagcuccgcgagcagcucuccuccgucuccuccuucgagcgcuucgagaucuuccccaaggaguccuccuggcccaaccacaccgucaccggcgucuccgccuccugcucccacaacggcgaguccuccuucuacaagaaccuccucuggcucaccggcaagaacggccucuaccccaaccucuccaaguccuacgccaacaacaaggagaaggagguccucguccucuggggcguccaccacccccccaacaucggcguccagaugacccucuaccacaaggagaacgccuacgucuccgucgucuccucccacuacucccgcaaguucacccccgagaucgucaagcgccccaagguccgcgaccaggagggccgcaucaacuacuacuggacccuccucgagcccggcgacaccaucaucuucgaggccaacggcaaccucaucgccccccgcuacgccuucgcccucucccgcggcuucggcuccggcaucaucaacuccaacgcccccauggacgagugcgacgccaagugccagaccccccagggcgccaucaacuccucccuccccuuccagaacguccaccccgucaccaucggcgagugccccaaguacguccgcuccgccaagcuccgcauggucaccggccuccgcaacauccccuccauccagucccgcggccucuucggcgccaucgccggcuucaucgagggcggcuggaccggcauggucgacggcugguacggcuaccaccaccagaacgagcagggcuccggcuacgccgccgaccagaaguccacccagaacgccaucaacggcaucaccaacaaggucaacuccgucaucgagaagaugaacacccaguucaccgccgucggcaaggaguucaacaagcucgagcgccgcauggagaaccucaacaagaaggucgacgacggcuucaucgacaucuggaccuacaacgccgagcuccucguccuccucgagaacgagcgcacccucgacuuccacgacuccaacgucaagaaccucuacgagaaggucaagucccagcucaagaacaacgccaaggagaucggcaacggcugcuucgaguucuaccacaagugcaacgacgagugcauggaguccgucaagaacggcaccuacgacuaccccaaguacuccgaggaguccaagcucaaccgcgagaagaucgacggcgucaagcucgaguccaugggcgucuaccagauccucgccaucuacuccaccgucgccuccucccucguccuccucgucucccucggcgccaucuccuucuggaugugcuccaacggcucccuccagugccgcaucugcaucuga

SEQ ID NO: 99988 - RNA, 1698 nt, Artificial Sequence
  derived and/or modified CDS sequence (opt2) from hemagglutinin__InfluenzaA__ADA71170
augaaggucaagcuccucguccuccucugcaccuucaccgccaccuacgccgacaccaucugcaucggcuaccacgccaacaacuccaccgacaccgucgacaccguccucgagaagaacggcaccgucacccccuccggcaaccucgucgagaacucccccaacggcaagcucugccuccucaagggcaucaccccccuccagcucggcaagugcuccgucgccggcuggauccucggcaaccccaagugggagcuccucgucuccaaggaguccugguccuacaucggcaagaagcccaaccccgagaacggcaccugcuaccccggccacuuccccuacuacgaggagcuccgcgagcagcucuccuccgucuccuccuucgagcgcuucgagaucuuccccaaggaguccuccuggcccaaccacaccgucaccggcgccuccgccuccugcucccacaacggcgagaacuccuucuaccgcaaccuccucuggcucaccggcaagaacggccucuaccccaaccucuccaaguccuacgccaacaacaaggagaaggagguccucguccucuggggcguccaccacccccccaacaucgccgaccagaagacccucuaccacaccgagaacgccuacgucuccgucgucuccucccacuacucccgcaaguucacccccgagaucgccaagcgccccaagguccgcgaccaggagggccgcaucaacuacuacuggacccuccucgagcccggcgacaccaucaucuucgaggccaacggcaaccucaucgccccccgcuacgccuucgcccucucccgcggcuucggcuccggcaucaucaacuccaacgcccccauggacaagugcgacgccaagugccagaccccccagggcgccaucaacuccucccuccccuuccagaacguccaccccgucaccaucggcgagugccccaaguacguccgcuccgccaagcuccgcauggucaccggccuccgcaacauccccuccauccagucccgcggccucuucggcgccaucgccggcuucaucgagggcggcuggaccggcauggucgacggcugguacggcuaccaccaccagaacgagcagggcuccggcuacgccgccgaccagaaguccacccagaacgccaucaacggcaucaccaacaaggucaacuccgucaucgagaagaugaacacccaguucaccgccgucggcaaggaguucaacaagcucgagcgccgcauggagaaccucaacaagaaggucgacgacggcuucaucgacaucuggaccuacaacgccgagcuccucguccuccucgagaacgagcgcacccucgacuuccacgacuccaacgucaagaaccucuacgagaaggucaagucccagcucaagaacaacgccaaggagaucggcaacggcugcuucgaguucuaccacaagugcaacgacgagugcauggaguccgucaagaacggcaccuacgacuaccccaaguacuccgaggaguccaagcucaaccgcgagaagaucgacggcgucaagcucgaguccaugggcgucuaccagauccucgccaucuacuccaccgucgccuccucccucguccuccucgucucccucggcgccaucuccuucuggaugugcuccaacggcucccuccagugccgcaucugcaucuga

SEQ ID NO: 99989 - RNA, 1701 nt, Artificial Sequence
  derived and/or modified CDS sequence (opt2) from hemagglutinin__InfluenzaA__ADA71172
augaagaccaucaucgcccucuccuacauccucugccucgucuucacccagaagcuccccggcaacgacaacuccaccgccacccucugccucggccaccacgccguccccaacggcaccaucgucaagaccaucaccaacgaccagaucgaggucaccaacgccaccgagcucguccaguccuccuccaccggcgagaucugcgacuccccccaccagauccucgacggcgagaacugcacccucaucgacgcccuccucggcgacccccagugcgacggcuuccagaacaagaagugggaccucuucgucgagcgcuccaaggccuacuccaacugcuaccccuacgacguccccgacuacgccucccuccgcucccucgucgccuccuccggcacccucgaguucaacaacgaguccuucaacuggaccggcgucacccagaacggcaccuccuccgccugcauccgccgcuccaacaacuccuucuucucccgccucaacuggcucacccaccucaaguucaaguaccccgcccucaacgucaccaugcccaacaacgagcaguucgacaagcucuacaucuggggcguccaccaccccggcaccgacaacgaccagaucuuccucuacgcccaggccuccggccgcaucaccgucuccaccaagcgcucccagcagaccgucauccccaacaucggcucccgcccccgcguccgcaacauccccucccgcaucuccaucuacuggaccaucgucaagcccggcgacauccuccucaucaacuccaccggcaaccucaucgccccccgcggcuacuucaagauccgcuccggcaaguccuccaucaugcgcuccgacgcccccaucggcaagugcaacuccgagugcaucacccccaacggcuccauccccaacgacaagcccuuccagaacgucaaccgcaucaccuacggcgccugcccccgcuacgucaagcagaacacccucaagcucgccaccggcaugcgcaacguccccgagaagcagacccgcggcaucuucggcgccaucgccggcuucaucgagaacggcugggagggcauggucgacggcugguacggcuuccgccaccagaacuccgagggccgcggccaggccgccgaccucaaguccacccaggccgccaucgaccagaucaacggcaagcucaaccgccucaucggcaagaccaacgagaaguuccaccagaucgagaaggaguucuccgaggucgagggccgcauccaggaccucgagaaguacgucgaggacaccaagaucgaccucugguccuacaacgccgagcuccucgucgcccucgagaaccagcacaccaucgaccucaccgacuccgagaugaacaagcucuucgagaagaccaagaagcagcuccgcgagaacgccgaggacaugggcaacggcugcuucaagaucuaccacaagugcgacaacgccugcaucggcuccauccgcaacggcaccuacgaccacgacgucuaccgcgacgaggcccucaacaaccgcuuccagaucaagggcgucgagcucaaguccggcuacaaggacuggauccucuggaucuccuucgccaucuccugcuuccuccucugcgucgcccuccucggcuucaucaugugggccugccagaagggcaacauccgcugcaacaucugcaucuga

SEQ ID NO: 99990 - RNA, 1698 nt, Artificial Sequence
  derived and/or modified CDS sequence (opt2) from hemagglutinin__InfluenzaA__ADA71176
augaaggucaagcuccucguccuccucugcaccuucaccgccaccuacgccgacaccaucugcaucggcuaccacgccaacaacuccaccgacaccgucgacaccguccucgagaagaacgucaccgucacccacuccgucaaccuccucgagaacucccacaacggcaagcucugccuccucaagggcaucgccccccuccagcucggcaacugcuccgucgccggcuggauccucggcaaccccgagugcgagcuccucaucuccaaggaguccugguccuacaucgucgagaagcccaaccccgagaacggcaccugcuaccccggccacuucgccgacuacgaggagcuccgcgagcagcucuccuccgucuccuccuucgagcgcuucgagaucuuccccaaggaguccuccuggcccaaccacaccgucaccggcgccuccgccuccugcucccacaacggcgagaacuccuucuaccgcaaccuccucuggcucaccggcaagaacggccucuaccccaaccucuccaaguccuacgccaacaacaaggagaaggagguccucguccucuggggcguccaccacccccccaacaucgccaaccagaagacccucuaccacaccgagaacgccuacgucuccgucgucuccucccacuacucccgcaaguucacccccgagaucgccaagcgccccaagguccgcgaccaggagggccgcaucaacuacuacuggacccuccucgagcccggcgacaccaucaucuucgaggccaacggcaaccucaucgccccccgcuacgccuucgcccucucccgcggcuucggcuccggcaucaucaacuccaacgcccccauggacaagugcgacgccaccugccagaccccccagggcgccaucaacuccucccuccccuuccagaacguccaccccgucaccaucggcgagugccccaaguacguccgcuccgccaagcuccgcauggucaccggccuccgcaacauccccuccauccagucccgcggccucuucggcgccaucgccggcuucaucgagggcggcuggaccggcauggucgacggcugguacggcuaccaccaccagaacgagcagggcuccggcuacgccgccgaccagaaguccacccagaacgccaucaacggcaucaccaacaaggucaacuccgucaucgagaagaugaacacccaguucaccgccgucggcaaggaguucaacaagcucgagcgccgcauggagaaccucaacaagaaggucgacgacggcuucaucgacaucuggaccuacaacgccgagcuccucguccuccucgagaacgagcgcacccucgacuuccacgacuccaacgucaagaaccucuacgagaaggucaagucccagcucaagaacaacgccaaggagaucggcaacggcugcuucgaguucuaccacaagugcaacgacgagugcauggaguccgucaagaacggcaccuacgacuaccccaaguacuccgaggaguccaagcucaaccgcgagaagaucgacggcgucaagcucgaguccaugggcgucuaccagauccucgccaucuacuccaccgucgccuccucccucguccuccucgucucccucggcgccaucuccuucuggaugugcuccaacggcucccuccagugccgcaucugcaucuga

SEQ ID NO: 99991 - RNA, 1701 nt, Artificial Sequence; identical to SEQ ID NO: 99806
  derived and/or modified CDS sequence (opt2) from hemagglutinin__InfluenzaA__ADA71181

SEQ ID NO: 99992 - RNA, 1701 nt, Artificial Sequence; identical to SEQ ID NO: 99806
  derived and/or modified CDS sequence (opt2) from hemagglutinin__InfluenzaA__ADA71191

SEQ ID NO: 99993 - RNA, 1701 nt, Artificial Sequence
  derived and/or modified CDS sequence (opt2) from hemagglutinin__InfluenzaA__ADA79587
augaaggccauccucgucguccuccucuacaccuucgccaccgccaacgccgacacccucugcaucggcuaccacgccaacaacuccaccgacaccgucgacaccguccucgagaagaacgucaccgucacccacuccgucaaccuccucgaggacaagcacaacggcaagcucugcaagcuccgcggcgucgccccccuccaccucggcaagugcaacaucgccggcuggauccucggcaaccccgagugcgagucccucuccaccgccaacuccugguccuacaucgucgagaccuccuccuccgacaacggcaccugcuaccccggcgacuucaucgacuacgaggagcuccgcgagcagcucuccuccgucuccuccuucgagcgcuucgagaucuuccccaagaccuccuccuggcccaaccacgacuccaacaagggcgucaccgccgccugcccccacgccggcgccaaguccuucuacaagaaccucaucuggcucgucaagaagggcaacuccuaccccaagcucuccaaguccuacaucaacgacaagggcaaggagguccucguccucuggggcauccaccaccccuccaccuccgccgaccagcagucccucuaccagaacgccgacgccuacgucuucgucggcaccucccgcuacuccaagaaguucaagcccgagaucgccauccgccccaagguccgcgaccaggagggccgcaugaacuacuacuggacccucgucgagcccggcgacaagaucaccuucgaggccaccggcaaccucgucgucccccgcuacgccuucgccauggagcgcaacgccggcuccggcaucaucaucuccgacacccccguccacgacugcaacaccaccugccagacccccaagggcgccaucaacaccucccuccccuuccagaacauccaccccaucaccaucggcaagugccccaaguacgucaaguccaccaagcuccgccucgccaccggccuccgcaacauccccuccauccagucccgcggccucuucggcgccaucgccggcuucaucgagggcggcuggaccggcauggucgacggcugguacggcuaccaccaccagaacgagcagggcuccggcuacgccgccgaccucaaguccacccagaacgccaucgacgagaucaccaacaaggucaacuccgucaucgagaagaugaacacccaguucaccgccgucggcaaggaguucaaccaccucgagaagcgcaucgagaaccucaacaagaaggucgacgacggcuuccucgacaucuggaccuacaacgccgagcuccucguccuccucgagaacgagcgcacccucgacuaccacgacuccaacgucaagaaccucuacgagaagguccgcucccagcucaagaacaacgccaaggagaucggcaacggcugcuucgaguucuaccacaagugcgacaacaccugcauggaguccgucaagaacggcaccuacgacuaccccaaguacuccgaggaggccaagcucaaccgcgaggagaucgacggcgucaagcucgaguccacccgcaucuaccagauccucgccaucuacuccaccgucgccuccucccucguccucgucgucucccucggcgccaucuccuucuggaugugcuccaacggcucccuccagugccgcaucugcaucuga

SEQ ID NO: 99994 - RNA, 1701 nt, Artificial Sequence
  derived and/or modified CDS sequence (opt2) from hemagglutinin__InfluenzaA__ADA79607
augaaggccauccucgucguccuccucuacaccuucgccaccgccaacgccgacacccucugcaucggcuaccacgccaacaacuccaccgacaccgucgacaccguccucgagaagaacgucaccgucacccacuccgucaaccuccucgaggacaagcacaacggcaagcucugcaagcuccgcggcgucgccccccuccaccucggcaagugcaacaucgccggcuggauccucggcaaccccgagugcgagucccucuccaccgccuccuccugguccuacaucgucgagaccuccuccuccgacaacggcaccugcuaccccggcgacuucaucgacuacgaggagcuccgcgagcagcucuccuccgucuccuccuucgagcgcuucgagaucuuccccaagaccuccuccuggcccaaccacgacuccaacaagggcgucaccgccgccugcccccacgccggcgccaagggcuucuacaagaaccucaucuggcucgucaagaagggcaacuccuaccccaagcucuccaaguccuacaucaacgacaagggcaaggagguccucguccucuggggcauccaccaccccuccaccuccgccgaccagcagucccucuaccagaacgccgacgccuacgucuucgucggcaccucccgcuacuccaagaaguucaagcccgagaucgccauccgccccaagguccgcgaccaggagggccgcaugaacuacuacuggacccucgucgagcccggcgacaagaucaccuucgaggccaccggcaaccucgucgucccccgcuacgccuucgccauggagcgcaacgccggcuccggcaucaucaucuccgacacccccguccacgacugcaacaccaccugccagacccccaagggcgccaucaacaccucccuccccuuccagaacauccaccccaucaccaucggcaagugccccaaguacgucaaguccaccaagcuccgccucgccaccggccuccgcaacguccccuccauccagucccgcggccucuucggcgccaucgccggcuucaucgagggcggcuggaccggcauggucgacggcugguacggcuaccaccaccagaacgagcagggcuccggcuacgccgccgaccucaaguccacccagaacgccaucgacgagaucaccaacaaggucaacuccgucaucgagaagaugaacacccaguucaccgccgucggcaaggaguucaaccaccucgagaagcgcaucgagaaccucaacaagaaggucgacgacggcuuccucgacaucuggaccuacaacgccgagcuccucguccuccucgagaacgagcgcacccucgacuaccacgacuccaacgucaagaaccucuacgagaagguccgcucccagcucaagaacaacgccaaggagaucggcaacggcugcuucgaguucuaccacaagugcgacaacaccugcauggaguccgucaagaacggcaccuacgacuaccccaaguacuccgaggaggccaagcucaaccgcgaggagaucgacggcgucaagcucgaguccacccgcaucuaccagauccucgccaucuacuccaccgucgccuccucccucguccucgucgucucccucggcgccaucuccuucuggaugugcuccaacggcucccuccagugccgcaucugcaucuga

SEQ ID NO: 99995 - RNA, 1701 nt, Artificial Sequence
  derived and/or modified CDS sequence (opt2) from hemagglutinin__InfluenzaA__ADA83043
augaaggccauccucgucguccuccucuacaccuucgccaccgccaacgccgacacccucugcaucggcuaccacgccaacaacuccaccgacaccgucgacaccguccucgagaagaacgucaccgucacccacuccgucaaccuccucgaggacaagcacaacggcaagcucugcaagcuccgcggcgucgccccccuccaccucggcaagugcaacaucgccggcuggauccucggcaaccccgagugcgagucccucuccaccgccuccuccugguccuacaucgucgagaccuccuccuccgacaacggcaccugcuaccccggcgacuucaucgacuacgaggagcuccgcgagcagcucuccuccgucuccuccuucgagcgcuucgagaucuuccccaagaccuccuccuggcccaaccacgacuccaacaagggcgucaccgccgccugcccccacgccggcgccaaguccuucuacaagaaccucaucuggcucgucaagaagggcaacuccuaccccaagcucuccaaguccuacaucaacgacaagggcaaggagguccucguccucuggggcauccaccaccccuccaccuccgccgaccagcagucccucuaccagaacgccgacgccuacgucuucgucggcaccucccgcuacuccaagaaguucaagcccgagaucgccauccgccccaagguccgcgagcgcgagggccgcaugaacuacuacuggacccucgucgagcccggcgacaagaucaccuucgaggccaccggcaaccucgucgucccccgcuacgccuucgccauggagcgcaacgccggcuccggcaucaucaucuccgacacccccguccacgacugcaacaccaccugccagacccccaagggcgccaucaacaccucccuccccuuccagaacauccaccccaucaccaucggcaagugccccaaguacgucaaguccaccaagcuccgccucgccaccggccuccgcaacguccccuccauccagucccgcggccucuucggcgccaucgccggcuucaucgagggcggcuggaccggcauggucgacggcugguacggcuaccaccaccagaacgagcagggcuccggcuacgccgccgaccucaaguccacccagaacgccaucgacgagaucaccaacaaggucaacuccgucaucgagaagaugaacacccaguucaccgccgucggcaaggaguucaaccaccucgagaagcgcaucgagaaccucaacaagaaggucgacgacggcuuccucgacaucuggaccuacaacgccgagcuccucguccuccucgagaacgagcgcacccucgacuaccacgacuccaacgucaagaaccucuacgagaagguccgcucccagcucaagaacaacgccaaggagaucggcaacggcugcuucgaguucuaccacaagugcgacaacaccugcauggaguccgucaagaacggcaccuacgacuaccccaaguacuccgaggaggccaagcucaaccgcgaggagaucgacggcgucaagcucgaguccacccgcaucuaccagauccucgccaucuacuccaccgucgccuccucccucguccucgucgucucccucggcgccaucuccuucuggaugugcuccaacggcucccuccagugccgcaucugcaucuga

SEQ ID NO: 99996 - RNA, 1701 nt, Artificial Sequence
  derived and/or modified CDS sequence (opt2) from hemagglutinin__InfluenzaA__ADA83044
augaaggccauccucgucguccuccucuacaccuucgccaccgccaacgccgacacccucugcaucggcuaccacgccaacaacuccaccgacaccgucgacaccguccucgagaagaacgucaccgucacccacuccgucaaccuccucgaggacaagcacaacggcaagcucugcaagcuccgcggcgucgccccccuccaccucggcaagugcaacaucgccggcuggauccucggcaaccccgagugcgagucccucuccaccgccuccuccugguccuacaucgucgagaccuccuccuccaacaacggcaccugcuaccccggcgacuucaucgacuacgaggagcuccgcgagcagcucuccuccgucuccuccuucgagcgcuucgagaucuuccccaagaccuccuccuggcccaaccacgacuccaacaagggcgucaccgccgccugcccccacgccggcgccaaguccuucuacaagaaccucaucuggcucgucaagaaggagaacuccuaccccaagcucaacaaguccuacaucaacgacaagggcaaggagguccucguccucuggggcauccaccaccccuccaccuccgccgaccagcagucccucuaccagaacgccgacgccuacgucuucgucggcaccucccgcuacuccaagaaguucaagcccgagaucgccauccgccccaagguccgcggccaggagggccgcaugaacuacuacuggacccucgucgagcccggcgacaagaucaccuucgaggccaccggcaaccucgucgucccccgcuacgccuucgccauggagcgcaacgccggcuccggcaucaucaucuccgacacccccguccacgacugcaacaccaccugccagacccccaagggcgccaucaacaccucccuccccuuccagaacauccaccccaucaccaucggcaagugccccaaguacgucaaguccaccaagcuccgccucgccaccggccuccgcaacguccccuccauccagucccgcggccucuucggcgccaucgccggcuucaucgagggcggcuggaccggcauggucgacggcugguacggcuaccaccaccagaacgagcagggcuccggcuacgccgccgaccucaaguccacccagaacgccaucgacgagaucaccaacaaggucaacuccgucaucgagaagaugaacacccaguucaccgccgucggcaaggaguucaaccaccucgagaagcgcaucgagaaccucaacaagaaggucgacgacggcuuccucgacaucuggaccuacaacgccgagcuccucguccuccucgagaacgagcgcacccucgacuaccacgacuccgacgucaagaaccucuacgagaagguccgcucccagcucaagaacaacgccaaggagaucggcaacggcugcuucgaguucuaccacaagugcgacaacaccugcauggaguccgucaagaacggcaccuacgacuaccccaaguacuccgaggaggccaagcucaaccgcgaggagaucgacggcgucaagcucgaguccacccgcaucuaccagauccucgccaucuacuccaccgucgccuccucccucguccucgucgucucccucggcgccaucuccuucuggaugugcuccaacggcucccuccagugccgcaucugcaucuga

SEQ ID NO: 99997 - RNA, 1701 nt, Artificial Sequence; identical to SEQ ID NO: 98705
  derived and/or modified CDS sequence (opt2) from hemagglutinin__InfluenzaA__ADA83580

SEQ ID NO: 99998 - RNA, 1701 nt, Artificial Sequence; identical to SEQ ID NO: 98705
  derived and/or modified CDS sequence (opt2) from hemagglutinin__InfluenzaA__ADA83587

SEQ ID NO: 99999 - RNA, 1701 nt, Artificial Sequence
  derived and/or modified CDS sequence (opt2) from hemagglutinin__InfluenzaA__ADA83591
augaaggccauccucgucguccuccucuacaccuucgccaccgccaacgccgacacccucugcaucggcuaccacgccaacaacuccaccgacaccgucgacaccguccucgagaagaacgucaccgucacccacuccgucaaccuccucgaggacaagcacaacggcaagcucugcaagcuccgcggcgucgccccccuccaccucggcaagugcaacaucgccggcuggauccucggcaaccccgagugcgagucccucuccaccgccuccuccugguccuacaucgucgagaccuccuccuccgacaacggcaccugcuaccccggcgacuucaucgacuacgaggagcuccgcgagcagcucuccuccgucuccuccuucgagcgcuucgagaucuuccccaagaccuccuccuggcccaaccacgacuccaacaagggcgucaccgccgccugcccccacgccggcgccaaguccuucuacaagaaccucaucuggcucgucaagaagggcaacuccuaccccaagcucuccaaguccuacaucaacgacaagggcaaggagguccucguccucuggggcauccaccaccccuccaccuccgccgaccagcagucccucuaccagaacgccgacgccuacgucuucgucggcaccucccgcuacuccaagaaguucaagcccgagaucuccauccgccccaagguccgcgaccaggagggccgcaugaacuacuacuggacccucgucgagcccggcgacaagaucaccuucgaggccaccggcaaccucgucgucccccgcuacgccuucgccauggagcgcaacgccggcuccggcaucaucaucuccgacacccccguccacgacugcaacaccaccugccagacccccaagggcgccaucaacaccucccuccccuuccagaacauccaccccaucaccaucggcaagugccccaaguacgucaaguccaccaagcuccgccucgccaccggccuccgcaacguccccuccauccagucccgcggccucuucggcgccaucgccggcuucaucgagggcggcuggaccggcauggucgacggcugguacggcuaccaccaccagaacgagcagggcuccggcuacgccgccgaccucaaguccacccagaacgccaucgacgagaucaccaacaaggucaacuccgucaucgagaagaugaacacccaguucaccgccgucggcaaggaguucaaccaccucgagaagcgcaucgagaaccucaacaagaaggucgacgacggcuuccucgacaucuggaccuacaacgccgagcuccucguccuccucgagaacgagcgcacccucgacuaccacgacuccaacgucaagaaccucuacgagaagguccgcucccagcucaagaacaacgccaaggagaucggcaacggcugcuucgaguucuaccacaagugcgacaacaccugcauggaguccgucaagaacggcaccuacgacuaccccaaguacuccgaggaggccaagcucaaccgcgaggagaucgacggcgucaagcucgaguccacccgcaucuaccagauccucgccaucuacuccaccgucgccuccucccucguccucgucgucucccucggcgccaucuccuucuggaugugcuccaacggcucccuccagugccgcaucugcaucuga

SEQ ID NO: 100000 - RNA, 1701 nt, Artificial Sequence; identical to SEQ ID NO: 99450
  derived and/or modified CDS sequence (opt2) from hemagglutinin__InfluenzaA__ADA83595

SEQ ID NO: 100001 - RNA, 1701 nt, Artificial Sequence; identical to SEQ ID NO: 98705
  derived and/or modified CDS sequence (opt2) from hemagglutinin__InfluenzaA__ADA83599

SEQ ID NO: 100002 - RNA, 1701 nt, Artificial Sequence; identical to SEQ ID NO: 98705
  derived and/or modified CDS sequence (opt2) from hemagglutinin__InfluenzaA__ADA83603

SEQ ID NO: 100003 - RNA, 1701 nt, Artificial Sequence; identical to SEQ ID NO: 98705
  derived and/or modified CDS sequence (opt2) from hemagglutinin__InfluenzaA__ADA83611

SEQ ID NO: 100004 - RNA, 1701 nt, Artificial Sequence
  derived and/or modified CDS sequence (opt2) from hemagglutinin__InfluenzaA__ADA83615
augaaggccauccucgucguccuccucuacaccuucgccaccgccaacgccgacacccucugcaucggcuaccacgccaacaacuccaccgacaccgucgacaccguccucgagaagaacgucaccgucacccacuccgucaaccuccucgaggacaagcacaacggcaagcucugcaagcuccgcggcgucgccccccuccaccucggcaagugcaacaucgccggcuggauccucggcaaccccgagugcgagucccucuccaccgccuccuccugguccuacaucgucgagaccuccuccuccgacaacggcaccugcuaccccggcgacuucaucgacuacgaggagcuccgcgagcagcucuccuccgucuccuccuucgagcgcuucgagaucuuccccaagaccuccuccuggcccaaccacgacuccaacaagggcgucaccgccgccugcccccacgccggcgccaaguccuucuacaagaaccucaucuggcucgucaagaagggcaacuccuaccccaagcucuccaaguccuacaucaacgacaagggcaaggagguccucguccucuggggcauccaccaccccuccaccuccgccgaccagcagucccucuaccagaacgccgacgccuacgucuucgucggcaccucccgcuacuccaagaaguucaagcccgagaucgccauccgccccaagguccgcgaccaggagggccgcaugaacuacuacuggacccucgucgagcccggcgacaagaucaccuucgaggccaccggcaaccucgucgucccccgcuacgccuucgccauggagcgcaacgccggcuccggcaucaucaucuccgacacccccguccacgacugcaacaccaccugccagacccccaagggcgccaucaacaccucccuccccuuccagaacauccaccccaucaccaucggcaagugccccaaguacgucaaguccaccaagcuccgccucgccaccggccuccgcaacguccccuccauccagucccgcggccucuucggcgccaucgccggcuucaucgagggcggcuggaccggcauggucgacggcugguacggcuaccaccaccagaacgagcagggcuccggcuacgccgccgaccucaaguccacccagaacgccaucgacgagaucaccaacaaggucaacuccgucaucgagaagaugaacacccaguucaccgccgucggcaaggaguucaaccaccucgagaagcgcaucgagaaccucaacaagaaggucgacgacggcuuccucgacaucuggaccuacaacgccgagcuccucguccuccucgagaacgagcgcacccucgacuaccacgaccucaacgucaagaaccucuacgagaagguccgcucccagcucaagaacaacgccaaggagaucggcaacggcugcuucgaguucuaccacaagugcgacaacaccugcauggaguccgucaagaacggcaccuacgacuaccccaaguacuccgaggaggccaagcucaaccgcgaggagaucgacggcgucaagcucgaguccacccgcaucuaccagauccucgccaucuacuccaccgucgccuccucccucguccucgucgucucccucggcgccaucuccuucuggaugugcuccaacggcucccuccagugccgcaucugcaucuga

SEQ ID NO: 100005 - RNA, 1701 nt, Artificial Sequence
  derived and/or modified CDS sequence (opt2) from hemagglutinin__InfluenzaA__ADA83622
augaaggccauccucgucguccuccucuacaccuucgccaccgccaacgccgacacccucugcaucggcuaccacgccaacaacuccaccgacaccgucgacaccguccucgagaagaacgucaccgucacccacuccgucaaccuccucgaggacaagcacaacggcaagcucugcaagcuccgcggcgucgccccccuccaccucggcaagugcaacaucgccggcuggauccucggcaaccccgagugcgagucccucuccaccgccuccuccugguccuacaucgucgagaccuccuccuccgacaacggcaccugcuaccccggcgacuucaucgacuacgaggagcuccgcgagcagcucuccuccgucuccuccuucgagcgcuucgagaucuuccccaagaccuccuccuggcccaaccacgacuccaacaagggcgucaccgccgccugcccccacgccggcgccaaguccuucuacaagaaccucaucuggcucgucaagaagggcaacuccuaccccaagcucuccaaguccuacaucaacgacaagggcaaggagguccucguccucuggggcauccaccaccccuccaccuccgccgaccagcagcgccucuaccagaacgccgacgccuacgucuucgucggcaccucccgcuacuccaagaagcucaagcccgagaucgccauccgccccaagguccgcgaccaggagggccgcaugaacuacuacuggacccucgucgagcccggcgacaagaucaccuucgaggccaccggcaaccucgucgucccccgcuacgccuucgccauggagcgcaacgccggcuccggcaucaucaucuccgacacccccguccacgacugcaacaccaccugccagacccccaagggcgccaucaacaccucccuccccuuccagaacauccaccccaucaccaucggcaagugccccaaguacgucaaguccaccaagcuccgccucgccaccggccuccgcaacguccccuccauccagucccgcggccucuucggcgccaucgccggcuucaucgagggcggcuggaccggcauggucgacggcugguacggcuaccaccaccagaacgagcagggcuccggcuacgccgccgaccucaaguccacccagaacgccaucgacgagaucaccaacaaggucaacuccgucaucgagaagaugaacacccaguucaccgccgucggcaaggaguucaaccaccucgagaagcgcaucgagaaccucaacaagaaggucgacgacggcuuccucgacaucuggaccuacaacgccgagcuccucguccuccucgagaacgagcgcacccucgacuaccacgacuccaacgucaagaaccucuacgagaagguccgcucccagcucaagaacaacgccaaggagaucggcaacggcugcuucgaguucuaccacaagugcgacaacaccugcauggaguccgucaagaacggcaccuacgacuaccccaaguacuccgaggaggccaagcucaaccgcgaggagaucgacggcgucaagcucgaguccacccgcaucuaccagauccucgccaucuacuccaccgucgccuccucccucguccucgucgucucccucggcgccaucuccuucuggaugugcuccaacggcucccuccagugccgcaucugcaucuga

SEQ ID NO: 100006 - RNA, 1701 nt, Artificial Sequence; identical to SEQ ID NO: 98705
  derived and/or modified CDS sequence (opt2) from hemagglutinin__InfluenzaA__ADA83633

SEQ ID NO: 100007 - RNA, 1701 nt, Artificial Sequence; identical to SEQ ID NO: 98705
  derived and/or modified CDS sequence (opt2) from hemagglutinin__InfluenzaA__ADA83637

SEQ ID NO: 100008 - RNA, 1701 nt, Artificial Sequence; identical to SEQ ID NO: 98705
  derived and/or modified CDS sequence (opt2) from hemagglutinin__InfluenzaA__ADA83641

SEQ ID NO: 100009 - RNA, 1701 nt, Artificial Sequence; identical to SEQ ID NO: 98705
  derived and/or modified CDS sequence (opt2) from hemagglutinin__InfluenzaA__ADA83645

SEQ ID NO: 100010 - RNA, 1701 nt, Artificial Sequence; identical to SEQ ID NO: 98705
  derived and/or modified CDS sequence (opt2) from hemagglutinin__InfluenzaA__ADA83648

SEQ ID NO: 100011 - RNA, 1701 nt, Artificial Sequence; identical to SEQ ID NO: 98705
  derived and/or modified CDS sequence (opt2) from hemagglutinin__InfluenzaA__ADA83656

SEQ ID NO: 100012 - RNA, 1701 nt, Artificial Sequence; identical to SEQ ID NO: 98705
  derived and/or modified CDS sequence (opt2) from hemagglutinin__InfluenzaA__ADA83660

SEQ ID NO: 100013 - RNA, 1701 nt, Artificial Sequence
  derived and/or modified CDS sequence (opt2) from hemagglutinin__InfluenzaA__ADA83664
augaaggccauccucgucguccuccucuacaccuucgccaccgccaacgccgacacccucugcaucggcuaccacgccaacaacuccaccgacaccgucgacaccguccucgagaagaacgucaccgucacccacuccgucaaccuccucgaggacaagcacaacggcaagcucugcaagcuccgcggcgucgccccccuccaccucggcaagugcaacaucgccggcuggauccucggcaaccccgagugcgagucccucuccaccgccuccuccugguccuacaucgucgagaccuccuccuccgacaacggcaccugcuaccccggcgacuucaucgacuacgaggagcuccgcgagcagcucuccuccgucuccuccuucgagcgcuucgagaucuuccccaagaccuccuccuggcccaaccacgacuccaacaagggcgucaccgccgccugcccccacgccggcgccaaguccuucuacaagaaccucaucuggcucgucaagaagggcaacuccuaccccaagcucuccaaguccuacaucaacgacaagggcaaggagguccucguccucuggggcauccaccaccccuccaccuccgccgaccagcagucccucuaccagaacgccgacgccuacgucuucgucggcaccucccgcuacuccaagaaguucaagcccgagaccgccauccgccccaagguccgcgaccaggagggccgcaugaacuacuacuggacccucgucgagcccggcgacaagaucaccuucgaggccaccggcaaccucgucgucccccgcuacgccuucgccauggagcgcaacgccggcuccggcaucaucaucuccgacacccccguccacgacugcaacaccaccugccagacccccaagggcgccaucaacaccucccuccccuuccagaacauccaccccaucaccaucggcaagugccccaaguacgucaaguccaccaagcuccgccucgccaccggccuccgcaacguccccuccauccagucccgcggccucuucggcgccaucgccggcuucaucgagggcggcuggaccggcauggucgacggcugguacggcuaccaccaccagaacgagcagggcuccggcuacgccgccgaccucaaguccacccagaacgccaucgacgagaucaccaacaaggucaacuccgucaucgagaagaugaacacccaguucaccgccgucggcaaggaguucaaccaccucgagaagcgcaucgagaaccucaacaagaaggucgacgacggcuuccucgacaucuggaccuacaacgccgagcuccucguccuccucgagaacgagcgcacccucgacuaccacgacuccaacgucaagaaccucuacgagaagguccgcucccagcucaagaacaacgccaaggagaucggcaacggcugcuucgaguucuaccacaagugcgacaacaccugcauggaguccgucaagaacggcaccuacgacuaccccaaguacuccgaggaggccaagcucaaccgcgaggagaucgacggcgucaagcucgaguccacccgcaucuaccagauccucgccaucuacuccaccgucgccuccucccucguccucgucgucucccucggcgccaucuccuucuggaugugcuccaacggcucccuccagugccgcaucugcaucuga

SEQ ID NO: 100014 - RNA, 1701 nt, Artificial Sequence
  derived and/or modified CDS sequence (opt2) from hemagglutinin__InfluenzaA__ADA83668
augaaggccauccucgucguccuccucuacaccuucgccaccgccaacgccgacacccucugcaucggcuaccacgccaacaacuccaccgacaccgucgacaccguccucgagaagaacgucaccgucacccacuccgucaaccuccucgaggacaagcacaacggcaagcucugcaagcuccgcggcgucgccccccuccaccucggcaagugcaacaucgccggcuggauccucggcaaccccgagugcggcucccucuccaccgccuccuccugguccuacaucgucgagaccuccuccuccgacaacggcaccugcuaccccggcgacuucaucgacuacgaggagcuccgcgagcagcucuccuccgucuccuccuucgagcgcuucgagaucuuccccaagaccuccuccuggcccaaccacgacuccaacaagggcgucaccgccgccugcccccacgccggcgccaaguccuucuacaagaaccucaucuggcucgucaagaagggcaacuccuaccccaagcucuccaaguccuacaucaacgacaagggcaaggagguccucguccucuggggcauccaccaccccuccaccuccgccgaccagcagucccucuaccagaacgccgacgccuacgucuucgucggcaccucccgcuacuccaagaaguucaagcccgagaucgccauccgccccaagguccgcgaccaggagggccgcaugaacuacuacuggacccucgucgagcccggcgacaagaucaccuucgaggccaccggcaaccucgucgucccccgcuacgccuucgccauggagcgcaacgccggcuccggcaucaucaucuccgacacccccguccacgacugcaacaccaccugccagacccccaagggcgccaucaacaccucccuccccuuccagaacauccaccccaucaccaucggcaagugccccaaguacgucaaguccaccaagcuccgccucgccaccggccuccgcaacguccccuccauccagucccgcggccucuucggcgccaucgccggcuucaucgagggcggcuggaccggcauggucgacggcugguacggcuaccaccaccagaacgagcagggcuccggcuacgccgccgaccucaaguccacccagaacgccaucgacgagaucaccaacaaggucaacuccgucaucgagaagaugaacacccaguucaccgccgucggcaaggaguucaaccaccucgagaagcgcaucgagaaccucaacaagaaggucgacgacggcuuccucgacaucuggaccuacaacgccgagcuccucguccuccucgagaacgagcgcacccucgacuaccacgacuccaacgucaagaaccucuacgagaagguccgcucccagcucaagaacaacgccaaggagaucggcaacggcugcuucgaguucuaccacaagugcgacaacaccugcauggaguccgucaagaacggcaccuacgacuaccccaaguacuccgaggaggccaagcucaaccgcgaggagaucgacggcgucaagcucgaguccacccgcaucuaccagauccucgccaucuacuccaccgucgccuccucccucguccucgucgucucccucggcgccaucuccuucuggaugugcuccaacggcucccuccagugccgcaucugcaucuga

SEQ ID NO: 100015 - RNA, 1701 nt, Artificial Sequence; identical to SEQ ID NO: 98705
  derived and/or modified CDS sequence (opt2) from hemagglutinin__InfluenzaA__ADA83672

SEQ ID NO: 100016 - RNA, 1701 nt, Artificial Sequence; identical to SEQ ID NO: 98705
  derived and/or modified CDS sequence (opt2) from hemagglutinin__InfluenzaA__ADA83676

SEQ ID NO: 100017 - RNA, 1701 nt, Artificial Sequence; identical to SEQ ID NO: 98705
  derived and/or modified CDS sequence (opt2) from hemagglutinin__InfluenzaA__ADA83680

SEQ ID NO: 100018 - RNA, 1701 nt, Artificial Sequence
  derived and/or modified CDS sequence (opt2) from hemagglutinin__InfluenzaA__ADA86068
augaaggccauccucgucguccuccucuacaccuucgccaccgccaacgccgacacccucugcaucggcuaccacgccaacaacuccaccgacaccgucgacaccguccucgagaagaacgucaccgucacccacuccgucgaccuccucgaggacaagcacaacggcaagcucugcaagcuccgcggcgucgccccccuccaccucggcaagugcaacaucgccggcuggauccucggcaaccccgagugcgagucccucuccaccgccuccuccugguccuacaucgucgagaccuccuccuccgacaacggcaccugcuaccccggcgacuucaucgacuacgaggagcuccgcgagcagcucuccuccgucuccuccuucgagcgcuucgagaucuuccccaagaccuccuccuggcccaaccacgacuccaacaagggcgucaccgccgccugcccccacgccggcgccaaguccuucuacaagaaccucaucuggcucgucaagaagggcaacuccuaccccaagcucuccaaguccuacaucaacgacaagggcaaggagguccucguccucuggggcauccaccaccccuccaccuccgccgaccagcagucccucuaccagaacgccgacgccuacgucuucgucggcaccucccgcuacuccaagaaguucaagcccgagaucgccauccgccccaagguccgcaaccaggagggccgcaugaacuacuacuggacccucgucgagcccggcgacaagaucaccuucgaggccaccggcaaccucgucgucccccgcuacgccuucgccauggagcgcaacgccggcuccggcaucaucaucuccgacacccccguccacgacugcaacaccaccugccagacccccaagggcgccaucaacaccucccuccccuuccagaacauccaccccaucaccaucggcaagugccccaaguacgucaaguccaucaagcuccgccucgccaccggccuccgcaacguccccuccauccagucccgcggccucuucggcgccaucgccggcuucaucgagggcggcuggaccggcauggucgacggcugguacggcuaccaccaccagaacgagcagggcuccggcuacgccgccgaccucaaguccacccagaacgccaucgacgagaucaccaacaaggucaacuccgucaucgagaagaugaacacccaguucaccgccgucggcaaggaguucaaccaccucgagaagcgcaucgagaaccucaacaagaaggucgacgacggcuuccucgacaucuggaccuacaacgccgagcuccucguccuccucgagaacgagcgcacccucgacuaccacgacuccaacgucaagaaccucuacgagaagguccgcucccagcucaagaacaacgccaaggagaucggcaacggcugcuucgaguucuaccacaagugcgacaacaccugcauggaguccgucaagaacggcaccuacgacuaccccaaguacuccgaggaggccaagcucaaccgcgaggagaucgacggcgucaagcucgaguccacccgcaucuaccagauccucgccaucuacuccaccgucgccuccucccucguccucgucgucucccucggcgccaucuccuucuggaugugcuccaacggcucccuccagugccgcaucugcaucuga

SEQ ID NO: 100019 - RNA, 1701 nt, Artificial Sequence
  derived and/or modified CDS sequence (opt2) from hemagglutinin__InfluenzaA__ADA86086
augaaggccauccucgucguccuccucuacaccuucgccaccgccaacgccgacacccucugcaucggcuaccacgccaacaacuccaccgacaccgucgacaccguccucgagaagaacgucaccgucacccacuccgucaaccuccucgaggacaagcacaacggcaagcucugcaagcuccgcggcgucgccccccuccaccucggcaagugcaacaucgccggcuggauccucggcaaccccgagugcgagucccucuccaccgccuccuccugguccuacaucgucgagaccuccuccuccgacaacggcaccugcuaccccggcgacuucaucgacuacgaggagcuccgcgagcagcucuccuccgucuccuccuucgagcgcuucgagaucuuccccaagaccuccuccuggcccaaccacgacuccaacaagggcgucaccgccgccugcccccacgccggcgccaaguccuucuacaagaaccucaucuggcucgucaagaagggcaacuccuaccccaagcucuccaaguccuacaucaacgacaagggcaaggagguccucguccucuggggcauccaccaccccuccaccaacgccgaccagcagucccucuaccagaacgccgacgccuacgucuucgucggcaccucccgcuacuccaagaaguucaagcccgagaucgccauccgccccaagguccgcgaccaggagggccgcaugaacuacuacuggacccucgucgagcccggcgacaagaucaccuucgaggccaccggcaaccucgucgucccccgcuacgccuucgccauggagcgcaacgccggcuccggcaucaucaucuccgacacccccguccacgacugcaacaccaccugccagacccccaagggcgccaucaacaccucccuccccuuccagaacauccaccccaucaccaucggcaagugccccaaguacgucaaguccaccaagcuccgccucgccaccggccuccgcaacguccccuccauccagucccgcggccucuucggcgccaucgccggcuucaucgagggcggcuggaccggcauggucgacggcugguacggcuaccaccaccagaacgagcagggcuccggcuacgccgccgaccucaaguccacccagaacgccaucgacgagaucaccaacaaggucaacuccgucaucgagaagaugaacacccaguucaccgccgucggcaaggaguucaaccaccucgagaagcgcaucgagaaccucaacaagaaggucgacgacggcuuccucgacaucuggaccuacaacgccgagcuccucguccuccucgagaacgagcgcacccucgacuaccacgacuccaacgucaagaaccucuacgagaagguccgcucccagcucaagaacaacgccaaggagaucggcaacggcugcuucgaguucuaccacaagugcgacaacaccugcauggaguccgucaagaacggcaccuacgacuaccccaaguacuccgaggaggccaagcucaaccgcgaggagaucgacggcgucaagcucgaguccacccgcaucuaccagauccucgccaucuacuccaccgucgccuccucccucguccucgucgucucccucggcgccaucuccuucuggaugugcuccaacggcucccuccagugccgcaucugcaucuga

SEQ ID NO: 100020 - RNA, 1701 nt, Artificial Sequence
  derived and/or modified CDS sequence (opt2) from hemagglutinin__InfluenzaA__ADA86087
augaaggccauccucgucguccuccucuacaccuucgccaccgccaacgccgacacccucugcaucggcuaccacgccaacaacuccaccgacaccgucgacaccguccucgagaagaacgucaccgucacccacuccgucaaccuccucgaggacaagcacaacggcaagcucugcaagcuccgcggcgucgccccccuccaccucggcaagugcaacaucgccggcuggauccucggcaaccccgagugcgagucccucuccaccgccuccuccugguccuacaucgucgagaccuucuccuccgacaacggcaccugcuaccccggcgacuucaucgacuacgaggagcuccgcgagcagcucuccuccgucuccuccuucgagcgcuucgagaucuuccccaagaccuccuccuggcccaaccacgacuccaacaagggcgucaccgccgccugcccccacgccggcgccaaguccuucuacaagaaccucaucuggcucgucaagaagggcaacuccuaccccaagcucuccaaguccuacaucaacgacaagggcaaggagguccucguccucuggggcauccaccaccccuccaccuccgccgaccagcagucccucuaccagaacgccgacgccuacgucuucgucggcaccucccgcuacuccaagaaguucaagcccgagaucgccauccgccccaagguccgcgaccaggagggccgcaugaacuacuacuggacccucgucgagcccggcgacaagaucaccuucgaggccaccggcaaccucgucgucccccgcuacgccuucgccauggagcgcaacgccggcuccggcaucaucaucuccgacacccccguccacgacugcaacaccaccugccagacccccaagggcgcccucaacaccucccuccccuuccagaacauccaccccaucaccaucggcaagugccccaaguacgucaaguccaccaagcuccgccucgccaccggccuccgcaacguccccuccauccagucccgcggccucuucggcgccaucgccggcuucaucgagggcggcuggaccggcauggucgacggcugguacggcuaccaccaccagaacgagcagggcuccggcuacgccgccgaccucaaguccacccagaacgccaucgacgagaucaccaacaaggucaacuccgucaucgagaagaugaacacccaguucaccgccgucggcaaggaguucaaccaccucgagaagcgcaucgagaaccucaacaagaaggucgacgacggcuuccucgacaucuggaccuacaacgccgagcuccucguccuccucgagaacgagcgcacccucgacuaccacgacuccaacgucaagaaccucuacgagaagguccgcaaccagcucaagaacaacgccaaggagaucggcaacggcugcuucgaguucuaccacaagugcgacaacaccugcauggaguccgucaagaacggcaccuacgacuaccccaaguacuccgaggaggccaagcucaaccgcgaggagaucgacggcgucaagcucgaguccacccgcaucuaccagauccucgccaucuacuccaccgucgccuccucccucguccucgucgucucccucggcgccaucuccuucuggaugugcuccaacggcucccuccagugccgcaucugcaucuga

SEQ ID NO: 100021 - RNA, 1701 nt, Artificial Sequence; identical to SEQ ID NO: 99503
  derived and/or modified CDS sequence (opt2) from hemagglutinin__InfluenzaA__ADA86088

SEQ ID NO: 100022 - RNA, 1701 nt, Artificial Sequence
  derived and/or modified CDS sequence (opt2) from hemagglutinin__InfluenzaA__ADB03603
augaaggccauccucaucguccuccucuacaccuucgccaccgcccacgccgacacccucugcaucggcuaccacgccaacaacuccaccgacaccgucgacaccguccucgagaagaacgucaccgucacccacuccgucaaccuccucgaggacaagcacaacggcaagcucugcaagcuccgcggcgucgccccccuccaccucggcaagugcaacaucgccggcuggauccucggcaaccccgagugcgagucccucuccaccgccuccuccugguccuacaucgucgagaccuccuccuccgacaacggcaccugcuaccccggcgacuucaucgacuacgaggagcuccgcgagcagcucuccuccgucuccuccuucgagcgcuucgagaucuuccccaagaccuccuccuggcccaaccacgacuccaacaagggcgucaccgccgccugcccccacgccggcgccaaguccuucuacaagaaccucaucuggcucgucaagaagggcaacuccuaccccaagcucuccaaguccuacaucaacgacaagggcaaggagguccucguccucuggggcauccaccaccccuccaccuccgccgaccagcagucccucuaccagaacgccgacgccuacgucuucgucggcaccucccgcuacuccaagaaguucaagcccgagaucgccauccgccccaagguccgcgaccaggagggccgcauggacuacuacuggacccucgucgagcccggcgacaagaucaccuucgaggccaccggcaaccucgucgucccccgcuacgccuucgccauggagcgcaacgccggcuccggcaucaucaucuccgacacccccguccacgacugcaacaccaccugccagacccccaagggcgccaucaacaccucccuccccuuccagaacauccaccccaucaccaucggcaagugccccaaguacgucaaguccaccaagcuccgccucgccaccggccuccgcaacguccccuccauccagucccgcggccucuucggcgccaucgccggcuucaucgagggcggcuggaccggcauggucgacggcugguacggcuaccaccaccagaacgagcagggcuccggcuacgccgccgaccucaaguccacccagaacgccaucgacgagaucaccaacaaggucaacuccgucaucgagaagaugaacacccaguucaccgccgucggcaaggaguucaaccaccucgagaagcgcaucgagaaccucaacaagaaggucgacgacggcuuccucgacaucuggaccuacaacgccgagcuccucguccuccucgagaacgagcgcacccucgacuaccacgacuccaacgucaagaaccucuacgagaagguccgcucccagcucaagaacaacgccaaggagaucggcaacggcugcuucgaguucuaccacaagugcgacaacaccugcauggaguccgucaagaacggcaccuacgacuaccccaaguacuccgaggaggccaagcucaaccgcgaggagaucgacggcgucaagcucgaguccacccgcaucuaccagauccucgccaucuacuccaccgucgccuccucccucguccucgucgucucccucggcgccaucuccuucuggaugugcuccaacggcucccuccagugccgcaucugcaucuga

SEQ ID NO: 100023 - RNA, 1701 nt, Artificial Sequence; identical to SEQ ID NO: 98692
  derived and/or modified CDS sequence (opt2) from hemagglutinin__InfluenzaA__ADB03604

SEQ ID NO: 100024 - RNA, 1701 nt, Artificial Sequence
  derived and/or modified CDS sequence (opt2) from hemagglutinin__InfluenzaA__ADB03605
augaaggccauccucgucguccuccucuacaccuucgccaccgccaacgccgacacccucugcaucggcuaccacgccaacaacuccaccgacaccgucgacaccguccucgagaagaacgucaccgucacccacuccgucaaccuccucgaggacaagcacaacggcaagcucugcaagcuccgcggcgucgccccccuccaccucggcaagugcaacaucgccggcuggauccucggcaaccccgagugcgagucccucuccaccgccuccuccugguccuacaucgucgagaccuccuccuccgacaacggcaccugcuaccccggcgacuucaucgacuacgaggagcuccgcgagcagcucuccuccgucuccuccuucgagcgcuucgagaucuuccccaagaccuccuccuggcccaaccacgacuccaacaagggcgucaccgccgccugcccccacgccggcgccaaguccuucuacaagaaccucaucuggcucgucaagaagggcaacuccuaccccaagcucuccaaguccuacaucaacgacaagggcaaggagguccucguccucuggggcauccaccaccccuccaccuccgccgaccagcagucccucuaccagaacgccgacgccuacgucuucgucggcaccucccgcuacuccaagaaguucaagcccgagaucgccauccgccccaagguccgcgagcaggagggccgcauggacuacuacuggacccucgucgagcccggcgacaagaucaccuucgaggccaccggcaaccucgucgucccccgcuacgccuucgccauggagcgcaacgccggcuccggcaucaucaucuccgacacccccguccacgacugcaacaccaccugccagacccccaagggcgccaucaacaccucccuccccuuccagaacauccaccccaucaccaucggcaagugccccaaguacgucaaguccaccaagcuccgccucgccaccggccuccgcaacguccccuccauccagucccgcggccucuucggcgccaucgccggcuucaucgagggcggcuggaccggcauggucgacggcugguacggcuaccaccaccagaacgagcagggcuccggcuacgccgccgaccucaaguccacccagaacgccaucgacgagaucaccaacaaggucaacuccgucaucgagaagaugaacacccaguucaccgccgucggcaaggaguucaaccaccucgagaagcgcaucgagaaccucaacaagaaggucgacgacggcuuccucgacaucuggaccuacaacgccgagcuccucguccuccucgagaacgagcgcacccucgacuaccacgacuccaacgucaagaaccucuacgagaagguccgcucccagcucaagaacaacgccaaggagaucggcaacggcugcuucgaguucuaccacaagugcgacaacaccugcauggaguccgucaagaacggcaccuacgacuaccccaaguacuccgaggaggccaagcucaaccgcgaggagaucgacggcgucaagcucgaguccacccgcaucuaccagauccucgccaucuacuccaccgucgccuccucccucguccucgucgucucccucggcgccaucuccuucuggaugugcuccaacggcucccuccagugccgcaucugcaucuga

SEQ ID NO: 100025 - RNA, 1701 nt, Artificial Sequence; identical to SEQ ID NO: 98705
  derived and/or modified CDS sequence (opt2) from hemagglutinin__InfluenzaA__ADB03607

SEQ ID NO: 100026 - RNA, 1701 nt, Artificial Sequence; identical to SEQ ID NO: 99058
  derived and/or modified CDS sequence (opt2) from hemagglutinin__InfluenzaA__ADB03609

SEQ ID NO: 100027 - RNA, 1701 nt, Artificial Sequence; identical to SEQ ID NO: 98705
  derived and/or modified CDS sequence (opt2) from hemagglutinin__InfluenzaA__ADB03611

SEQ ID NO: 100028 - RNA, 1701 nt, Artificial Sequence
  derived and/or modified CDS sequence (opt2) from hemagglutinin__InfluenzaA__ADB03612
augaaggccauccucgucguccuccucuacaccuucgccaccgccaacgccgacacccucugcaucggcuaccacgccaacaacuccaccgacaccgucgacaccguccucgagaagaacgucaccgucacccacuccgucaaccuccucgaggacaagcacaacggcaagcucugcaagcuccgcggcgucgccccccuccaccucggcaagugcaacaucgccggcuggauccucggcaaccccgagugcgagucccucuccaccgccuccuccugguccuacaucgucgagaccuccuccuccgacaacggcaccugcuaccccggcgacuucaucgacuacgaggagcuccgcgagcagcucuccuccgucuccuccuucgagcgcuucgagaucuuccccaagaccuccuccuggcccaaccacgacuccaacaagggcgucaccgccgccugcccccacgccggcgccaaguccuucuacaagaaccucaucuggcucgucaagaagggcaacuccuaccccaagcucuccaaguccuacaucaacgacaagggcaaggagguccucguccucuggggcauccaccaccccuccaccuccgccgaccagcagucccucuaccagaacgccgacgccuacgucuucgucggcaccucccgcuacuccaagaaguucaagcccgagaucgccauccgccccaagguccgcgaccaggagggccgcaugaacuacuacuggacccucgucgagcccggcgacaagaucaccuucgaggccaccggcaaccucgucgucccccgcuacgccuucgccauggagcgcaacgccggcuccggcaucaucaucuccgacacccccguccacgacugcaacaccaccugccagacccccaagggcgccaucaacaccucccuccccuuccagaacauccaccccaucaccaucggcaagugccccaaguacgucaaguccaccaagcuccgccucgccaccggccuccgcaacguccccuucauccagucccgcggccucuucggcgccaucgccggcuucaucgagggcggcuggaccggcauggucgacggcugguacggcuaccaccaccagaacgagcagggcuccggcuacgccgccgaccucaaguccacccagaacgccaucgacgagaucaccaacaaggucaacuccgucaucgagaagaugaacacccaguucaccgccgucggcaaggaguucaaccaccucgagaagcgcaucgagaaccucaacaagaaggucgacgacggcuuccucgacaucuggaccuacaacgccgagcuccucguccuccucgagaacgagcgcacccucgacuaccacgacuccaacgucaagaaccucuacgagaagguccgcucccagcucaagaacaacgccaaggagaucggcaacggcugcuucgaguucuaccacaagugcgacaacaccugcauggaguccgucaagaacggcaccuacgacuaccccaaguacuccgaggaggccaagcucaaccgcgaggagaucgacggcgucaagcucgaguccacccgcaucuaccagauccucgccaucuacuccaccgucgccuccucccucguccucgucgucucccucggcgccaucuccuucuggaugugcuccaacggcucccuccagugccgcaucugcaucuga

SEQ ID NO: 100029 - RNA, 1701 nt, Artificial Sequence; identical to SEQ ID NO: 98705
  derived and/or modified CDS sequence (opt2) from hemagglutinin__InfluenzaA__ADB03614

SEQ ID NO: 100030 - RNA, 1701 nt, Artificial Sequence
  derived and/or modified CDS sequence (opt2) from hemagglutinin__InfluenzaA__ADB03617
augaaggccauccucgucguccuccucuacaccuucgccaccgccaacgccgacacccucugcaucggcuaccacgccaacaacuccaccgacaccgucgacaccguccucgagaagaacgucaccgucacccacuccgucaaccuccucgaggacaagcacaacggcaagcucugcaagcuccgcggcgucgccccccuccaccucggcaagugcaacaucgccggcuggauccucggcaaccccgagugcgagucccucuccaccgccuccuccugguccuacaucgucgagaccuccuccuccgacaacggcaccugcuaccccggcgacuucaucgacuacgaggagcuccgcgagcagcucuccuccgucuccuccuucgagcgcuucgagaucuuccccaagaccuccuccuggcccaaccacgacuccaacaagggcgucaccgccgccugcccccacgccggcgccaaguccuucuacaagaaccucaucuggcucgucaagaagggcaacuccuaccccaagcucuccaaguccuacaucaacgacaagggcaaggagguccucguccucuggggcauccaccaccccuccaccuccgccgaccagcagucccucuaccagaacgccgacgccuacgucuucgucggcaccucccgcuacuccaagaaguucaagcccgagaucgccauccgccccaagguccgcgagcaggagggccgcaugaacuacuacuggacccucgucgagcccggcgacaagaucaccuucgaggccaccggcaaccucgucgucccccgcuacgccuucgccauggagcgcaacgccggcuccggcaucaucaucuccgacacccccguccacgacugcaacaccaccugccagacccccaagggcgccaucaacaccucccuccccuuccagaacauccaccccaucaccaucggcaagugccccaaguacgucaaguccaccaagcuccgccucgccaccggccuccgcaacguccccuccauccagucccgcggccucuucggcgccaucgccggcuucaucgagggcggcuggaccggcauggucgacggcugguacggcuaccaccaccagaacgagcagggcuccggcuacgccgccgaccucaaguccacccagaacgccaucgacgagaucaccaacaaggucaacuccgucaucgagaagaugaacacccaguucaccgccgucggcaaggaguucaaccaccucgagaagcgcaucgagaaccucaacaagaaggucgacgacggcuuccucgacaucuggaccuacaacgccgagcuccucguccuccucgagaacgagcgcacccucgacuaccacgacuccaacgucaagaaccucuacgagaagguccgcucccagcucaagaacaacgccaaggagaucggcaacggcugcuucgaguucuaccacaagugcgacaacaccugcauggaguccgucaagaacggcaccuacgacuaccccaaguacuccaaggaggccaagcucaaccgcgaggagaucgacggcgucaagcucgaguccacccgcaucuaccagauccucgccaucuacuccaccgucgccuccucccucguccucgucgucucccucggcgccaucuccuucuggaugugcuccaacggcucccuccagugccgcaucugcaucuga

SEQ ID NO: 100031 - RNA, 1701 nt, Artificial Sequence; identical to SEQ ID NO: 99058
  derived and/or modified CDS sequence (opt2) from hemagglutinin__InfluenzaA__ADB03619

SEQ ID NO: 100032 - RNA, 1701 nt, Artificial Sequence
  derived and/or modified CDS sequence (opt2) from hemagglutinin__InfluenzaA__ADB03620
augaaggccauccucgucguccuccucuacaccuucgccaccgccaacgccgacacccucugcaucggcuaccacgccaacaacuccaccgacaccgucgacaccguccucgagaagaacgucaccgucacccacuccgucaaccuccucgagggcaagcacaacggcaagcucugcaagcuccgcggcgucgccccccuccaccucggcaagugcaacaucgccggcuggauccucggcaaccccgagugcgagucccucuccaccgccuccuccugguccuacaucgucgagaccuccuccuccgacaacggcaccugcuaccccggcgacuucaucgacuacgaggagcuccgcgagcagcucuccuccgucuccuccuucgagcgcuucgagaucguccccaagaccuccuccuggcccaaccacgacuccaacaagggcgucaccgccgccugcccccacgccggcgccaaguccuucuacaagaaccucaucuggcucgucaagaagggcaacuccuaccccaagcucuccaaguccuacaucaacgacaagggcaaggagguccucguccucuggggcauccaccaccccuccaccuccgccgaccagcagucccucuaccagaacgccgacgccuacgucuucgucggcaccucccgcuacuccaagaaguucaagcccgagaucgccauccgccccaagguccgcgaccaggagggccgcaugaacuacuacuggacccucgucgagcccggcgacaagaucaccuucgaggccaccggcaaccucgucgucccccgcuacgccuucgccauggagcgcaacgccggcuccggcaucaucaucuccgacacccccguccacgacugcaacaccaccugccagacccccaagggcgccaucaacaccucccuccccuuccagaacauccaccccaucaccaucggcaagugccccaaguacgucaaguccaccaagcuccgccucgccaccggccuccgcaacguccccuccauccagucccgcggccucuucggcgccaucgccggcuucaucgagggcggcuggaccggcauggucgacggcugguacggcuaccaccaccagaacgagcagggcuccggcuacgccgccgaccucaaguccacccagaacgccaucgacgagaucaccaacaaggucaacuccgucaucgagaagaugaacacccaguucaccgccgucggcaaggaguucaaccaccucgagaagcgcaucgagaaccucaacaagaaggucgacgacggcuuccucgacaucuggaccuacaacgccgagcuccucguccuccucgagaacgagcgcacccucgacuaccacgacuccaacgucaagaaccucuacgagaagguccgcucccagcucaagaacaacgccaaggagaucggcaacggcugcuucgaguucuaccacaagugcgacaacaccugcauggaguccgucaagaacggcaccuacgacuaccccaaguacuccgaggaggccaagcucaaccgcgaggagaucgacggcgucaagcucgaguccacccgcaucuaccagauccucgccaucuacuccaccgucgccuccucccucguccucgucgucucccucggcgccaucuccuucuggaugugcuccaacggcucccuccagugccgcaucugcaucuga

SEQ ID NO: 100033 - RNA, 1701 nt, Artificial Sequence
  derived and/or modified CDS sequence (opt2) from hemagglutinin__InfluenzaA__ADB03622
augaaggccauccucgucguccuccucuacaccuucgccaccgccaacgccgacacccucugcaucggcuaccacgccaacaacuccaccgacaccgucgacaccguccucgagaagaacgucaccgucacccacuccgucaaccuccucgaggacaagcacaacggcaagcucugcaagcuccgcggcgucgccccccuccaccucggcaagugcaacaucgccggcuggauccucggcaaccccgagugcgagucccucuccaccgccuccuccugguccuacaucgucgagaccuccuccuccgacaacggcaccugcuaccccggcgacuucaucaacuacgaggagcuccgcgagcagcucuccuccgucuccuccuucgagcgcuucgagaucuuccccaagaccuccuccuggcccaaccacgacuccaacaagggcgucaccgccgccugcccccacgccggcgccaaguccuucuacaagaaccucaucuggcucgucaagaagggcaacuccuaccccaagcucuccaaguccuacaucaacgacaagggcaaggagguccucguccucuggggcauccaccaccccuccaccuccgccgaccagcagucccucuaccagaacgccgacgccuacgucuucgucggcaccucccgcuacuccaagaaguucaagcccgagaucgccauccgccccaagguccgcgaccaggagggccgcaugaacuacuacuggacccucgucgagcccggcgacaagaucaccuucgaggccaccggcaaccucgucgucccccgcuacgccuucgccauggagcgcaacgccggcuccggcaucaucaucuccgacacccccguccacgacugcaacaccaccugccagacccccaacggcgccaucaacaccucccuccccuuccagaacauccaccccaucaccaucggcaagugccccaaguacgucaaguccaccaagcuccgccucgccaccggccuccgcaacguccccuccauccagucccgcggccucuucggcgccaucgccggcuucaucgagggcggcuggaccggcauggucgacggcugguacggcuaccaccaccagaacgagcagggcuccggcuacgccgccgaccucaaguccacccagaacgccaucgacaagaucaccaacaaggucaacuccgucaucgagaagaugaacacccaguucaccgccgucggcaaggaguucaaccaccucgagaagcgcaucgagaaccucaacaagaaggucgacgacggcuuccucgacaucuggaccuacaacgccgagcuccucguccuccucgagaacgagcgcacccucgacuaccacgacuccaacgucaagaaccucuacgagaagguccgcucccagcucaagaacaacgccaaggagaucggcaacggcugcuucgaguucuaccacaagugcgacaacaccugcauggaguccgucaagaacggcaccuacgacuaccccaaguacuccgaggaggccaagcucaaccgcgaggagaucgacggcgucaagcucgaguccacccgcaucuaccagauccucgccaucuacuccaccgucgccuccucccucguccucgucgucucccucggcgccaucuccuucuggaugugcuccaacggcucccuccagugccgcaucugcaucuga

SEQ ID NO: 100034 - RNA, 1701 nt, Artificial Sequence; identical to SEQ ID NO: 100033
  derived and/or modified CDS sequence (opt2) from hemagglutinin__InfluenzaA__ADB03623

SEQ ID NO: 100035 - RNA, 1701 nt, Artificial Sequence
  derived and/or modified CDS sequence (opt2) from hemagglutinin__InfluenzaA__ADB03628
auggaggccauccucgucguccuccucuacaccuucgccaccgccaacgccgacacccucugcaucggcuaccacgccaacaacuccaccgacaccgucgacaccguccucgagaagaacgucaccgucacccacuccgucaaccuccucgaggacaagcacaacggcaagcucugcaagcuccgcggcgucgccccccuccaccucggcaagugcaacaucgccggcuggauccucggcaaccccgagugcgagucccucuccaccgccuccuccugguccuacaucgucgagaccuccuccuccgacaacggcaccugcuaccccggcgacuucaucgacuacgaggagcuccgcgagcagcucuccuccgucuccuccuucgagcgcuucgagaucuuccccaagaccuccuccuggcccaaccacgacuccaacaagggcgucaccgccgccugcccccacgccggcgccaaguccuucuacaagaaccucaucuggcucgucaagaagggcaacuccuaccccaagcucuccaaguccuacaucaacgacaagggcaaggagguccucguccucuggggcauccaccaccccuccaccuccgccgaccagcagucccucuaccagaacgccgacgccuacgucuucgucggcaccucccgcuacuccaagaaguucaagcccgagaucgccauccgccccaagguccgcgaccaggagggccgcaugaacuacuacuggacccucgucgagcccggcgacaagaucaccuucgaggccaccggcaaccucgucgucccccgcuacgccuucgccauggagcgcaacgccggcuccggcaucaucaucuccgacacccccguccacgacugcaacaccaccugccagacccccaagggcgccaucaacaccucccuccccuuccacaacauccaccccaucaccaucggcaagugccccaaguacgucaaguccaccaagcuccgccucgccaccggccuccgcaacguccccuccauccagucccgcggccucuucggcgccaucgccggcuucaucgagggcggcuggaccggcauggucgacggcugguacggcuaccaccaccagaacgagcagggcuccggcuacgccgccgaccucaaguccacccagaacgccaucgacgagaucaccaacaaggucaacuccgucaucgagaagaugaacacccaguucaccgccgucggcaaggaguucaaccaccucgagaagcgcaucgagaaccucaacaagaaggucgacgacggcuuccucgacaucuggaccuacaacgccgagcuccucguccuccucgagaacgagcgcacccucgacuaccacgacuccaacgucaagaaccucuacgagaagguccgcucccagcucaagaacaacgccaaggagaucggcaacggcugcuucgaguucuaccacaagugcgacaacaccugcauggaguccgucaagaacggcaccuacgacuaccccaaguacuccgaggaggccaagcucaaccgcgaggagaucgacggcgucaagcucgaguccacccgcaucuaccagauccucgccaucuacuccaccgucgccuccucccucguccucgucgucucccucggcgccaucuccuucuggaugugcuccaacggcucccuccagugccgcaucugcaucuga

SEQ ID NO: 100036 - RNA, 1701 nt, Artificial Sequence
  derived and/or modified CDS sequence (opt2) from hemagglutinin__InfluenzaA__ADB03629
augaaggccauccucgucguccuccucuacaccuucaccaccgccaacgccgacacccucugcaucggcuaccacgccaacaacuccaccgacaccgucgacaccguccucgagaagaacgucaccgucacccacuccgucaaccuccucgaggacaagcacaacggcaagcucugcaagcuccgcggcgucgccccccuccaccucggcaagugcaacaucgccggcuggauccucggcaaccccgagugcgagucccucuccaccgccuccuccugguccuacaucgucgagaccuccuccuccgacaacggcaccugcuaccccggcgacuucaucgacuacgaggagcuccgcgagcagcucuccuccgucuccuccuucgagcgcuucgagaucuuccccaagaccuccuccuggcccaaccacgacuccaacaagggcgucaccgccgccugcccccacgccggcgccaaguccuucuacaagaaccucaucuggcucgucaagaagggcaacuccuaccccaagcucuccaaguccuacaucaacgacaagggcaaggagguccucguccucuggggcauccaccaccccuccaccuccgccgaccagcagucccucuaccagaacgccgacgccuacgucuucgucggcaccucccgcuacuccaagaaguucaagcccgagaucgccauccgccccaagguccgcgagcaggagggccgcaugaacuacuacuggacccucgucgagcccggcgacaagaucaccuucgaggccaccggcaaccucgucgucccccgcuacgccuucgccauggagcgcaacgccggcuccggcaucaucaucuccgacacccccguccacgacugcaacaccaccugccagacccccaagggcgccaucaacaccucccuccccuuccagaacauccacuccaucaccaucggcaagugccccaaguacgucaaguccaccaagcuccgccucgccaccggccuccgcaacguccccuccauccagucccgcggccucuucggcgccaucgccggcuucaucgagggcggcuggaccggcauggucgacggcugguacggcuuccaccaccagaacgagcagggcuccggcuacgccgccgaccucaaguccacccagaacgccaucgacgagaucaccaacaaggucaacuccgucaucgagaagaugaacacccaguucaccgccgucggcaaggaguucaaccaccucgagaagcgcaucgagaaccucaacaagaaggucgacgacggcuuccucgacaucuggaccuacaacgccgagcuccucguccuccucgagaacgagcgcacccucgacuaccacgacuccaacgucaagaaccucuacgagaagguccgcucccagcucaagaacaacgccaaggagaucggcaacggcugcuucgaguucuaccacaagugcgacaacaccugcauggaguccgucaagaacggcaccuacgacuaccccaaguacuccgaggaggccaagcucaaccgcgaggagaucgacggcgucaagcucgaguccacccgcaucuaccagauccucgccaucuacuccaccgucgccuccucccucguccucgucgucucccucggcgccaucuccuucuggaugugcuccaacggcucccuccagugccgcaucugcaucuga

SEQ ID NO: 100037 - RNA, 1701 nt, Artificial Sequence
  derived and/or modified CDS sequence (opt2) from hemagglutinin__InfluenzaA__ADB03630
augaaggccauccucgucguccuccucuacaccuucgccaccgccaacgccgacacccucugcaucggcuaccacgccaacaacuccaccgacaccgucgacaccguccucgagaagaacgucaccgucacccacuccgucaaccuccucgaggacaagcacaacggcaagcucugcaagcuccgcggcgucgccccccuccaccucggcaagugcaacaucgccggcuggauccucggcaaccccgagugcgagucccucuccaccgccuccuccugguccuacaucgucgagaccuccuccuccgacaacggcaccugcuaccccggcgacuucaucgacuacgaggagcuccgcgagcagcucuccuccgucuccuccuucgagcgcuucgagaucuuccccaagaccuccuccuggcccaaccacgacuccaacaagggcgucaccgccgccugcccccacgccggcgccaaguccuucuacaagaaccucaucuggcucgucaagaagggcaacuccuaccccaagcucuccaaguccuacaucaacgacaagggcaaggagguccucguccucuggggcauccaccaccccuccaccuccgccgaccagcagucccucuaccagaacgccgacgccuacgucuucgucggcaccucccgcuacuccaagaaguucaagcccgagaucgccauccgccccaagguccgcgaccaggagggccgcaugaacuaccacuggacccucgucgagcccggcgacaagaucaccuucgaggccaccggcaaccucgucgucccccgcuacgccuucgccauggagcgcaacgccggcuccggcaucaucaucuccgacacccccguccacgacugcaacaccaccugccagacccccaagggcgccaucaacaccucccuccccuuccagaacauccaccccaucaccaucggcaagugccccaaguacgucaaguccaccaagcuccgccucgccaccggccuccgcaacguccccuccauccagucccgcggccucuucggcgccaucgccggcuucaucgagggcggcuggaccggcauggucgacggcugguacggcuaccaccaccagaacgagcagggcuccggcuacgccgccgaccucaaguccacccagaacgccaucgacgagaucaccaacaaggucaacuccgucaucgagaagaugaacacccaguucaccgccgucggcaaggaguucaaccaccucgagaagcgcaucgagaaccucaacaagaaggucgacgacggcuuccucgacaucuggaccuacaacgccgagcuccucguccuccucgagaacgagcgcacccucgacuaccacgacuccaacgucaagaaccucuacgagaagguccgcucccagcucaagaacaacgccaaggagaucggcaacggcugcuucgaguucuaccacaagugcgacaacaccugcauggaguccgucaagaacggcaccuacgacuaccccaaguacuccaaggaggccaagcucaaccgcgaggagaucgacggcgucaagcucgaguccacccgcaucuaccagauccucgccaucuacuccaccgucgccuccucccucguccucgucgucucccucggcgccaucuccuucuggaugugcuccaacggcucccuccagugccgcaucugcaucuga

SEQ ID NO: 100038 - RNA, 1701 nt, Artificial Sequence; identical to SEQ ID NO: 99450
  derived and/or modified CDS sequence (opt2) from hemagglutinin__InfluenzaA__ADB25319

SEQ ID NO: 100039 - RNA, 1701 nt, Artificial Sequence; identical to SEQ ID NO: 98705
  derived and/or modified CDS sequence (opt2) from hemagglutinin__InfluenzaA__ADB25321

SEQ ID NO: 100040 - RNA, 1701 nt, Artificial Sequence
  derived and/or modified CDS sequence (opt2) from hemagglutinin__InfluenzaA__ADB27970
augaaggccauccucgucguccuccucuacaccuucgccaccgccaacgccgacacccucugcaucggcuaccacgccaacaacuccaccgacaccgucgacaccguccucgagaagaacgucaccgucacccacuccgucaaccuccucgaggacaagcacaacggcaagcucugcaagcuccgcggcgucgccccccuccaccucggcaagugcaacaucgccggcuggauccucggcaaccccgagugcgagucccucuccaccgccuccuccugguccuacaucgucgagaccuccuccuccgacaacggcaccugcuaccccggcgacuucaucgacuacgaggagcuccgcgagcagcucuccuccgucuccuccuucgagcgcuucgagaucuuccccaagaccuccuccuggcccaaccacgacuccaacaagggcgucaccgccgccugcccccacgccggcgccaaguccuucuacaagaaccucaucuggcucgucaagaagggcaacuccuaccccaagcucuccaaguccuacaucaacgacaagggcaaggagguccucguccucuggggcauccaccaccccuccaccuccgccgaccagcagucccucuaccagaacgccgacgccuacgucuucgucggcaccucccgcuacuccaagaaguucaagcccgagaucgccauccgccccaagguccgcgaccaggagggccgcaugaacuacuacuggacccucgucgagcccggcgacaagaucaccuucgaggccaccggcaaccucgucgucccccgcuacgccuucgccauggagcgcgacgccggcuccggcaucaucaucuccgacacccccguccacgacugcaacaccaccugccagacccccaagggcgccaucaacaccucccuccccuuccagaacauccaccccaucaccaucggcaagugccccaaguacgucaaguccaccaagcuccgccucgccaccggccuccgcaacguccccuccauccagucccgcggccucuucggcgccaucgccggcuucaucgagggcggcuggaccggcauggucgacggcugguacggcuaccaccaccagaacgagcagggcuccggcuacgccgccgaccucaaguccacccagaacgccaucgacgagaucaccaacaaggucaacuccgucaucgagaagaugaacacccaguucaccgccgucggcaaggaguucaaccaccucgagaagcgcaucgagaaccucaacaagaaggucgacgacggcuuccucgacaucuggaccuacaacgccgagcuccucguccuccucgagaacgagcgcacccucgacuaccacgacuccaacgucaagaaccucuacgagaagguccgcucccagcucaagaacaacgccaaggagaucggcaacggcugcuucgaguucuaccacaagugcgacaacaccugcauggaguccgucaagaacggcaccuacgacuaccccaaguacuccgaggaggccaagcucaaccgcgaggagaucgacggcgucaagcucgaguccacccgcaucuaccagauccucgccaucuacuccaccgucgccuccucccucguccucgucgucucccucggcgccaucuccuucuggaugugcuccaacggcucccuccagugccgcaucugcaucuga

SEQ ID NO: 100041 - RNA, 1701 nt, Artificial Sequence; identical to SEQ ID NO: 98705
  derived and/or modified CDS sequence (opt2) from hemagglutinin__InfluenzaA__ADB27980

SEQ ID NO: 100042 - RNA, 1701 nt, Artificial Sequence; identical to SEQ ID NO: 98705
  derived and/or modified CDS sequence (opt2) from hemagglutinin__InfluenzaA__ADB54352

SEQ ID NO: 100043 - RNA, 1701 nt, Artificial Sequence; identical to SEQ ID NO: 98705
  derived and/or modified CDS sequence (opt2) from hemagglutinin__InfluenzaA__ADB54355

SEQ ID NO: 100044 - RNA, 1698 nt, Artificial Sequence
  derived and/or modified CDS sequence (opt2) from hemagglutinin__InfluenzaA__ADB65926
augaaggucaagcuccucguccuccucugcaccuucaccgccaccuacgccgacaccaucugcaucggcuaccacgccaacaacuccaccgacaccgucgacaccguccucgagaagaacgucaccgucacccacuccgucaaccuccucgaggacaagcacaacggcaagcucugccuccucaagggcaaggccccccuccagcucggcaacugcuccgucgccggcuggauccucggcaaccccgagugcggccuccucaucuccaaggaguccugguccuacaucgucgagcgccccaaccccgagaacggcaccugcuaccccggccacuucgccgacuacgaggagcuccgcgagcagcucuccuccgucuccuccuucgagcgcuucgagaucuuccccaagggcuccuccuggcccaaccacaccgucaccggcgucuccgccuccugcucccacaacggcgaguccuccuucuacaagaaccuccucuggcucaccggcaagaacggccucuaccccaaccucuccaaguccuacgccaacaacaaggagaaggagguccucguccucuggggcguccaccacccccccaacaucggcgaccagaugacccucuaccacaaggagaacgccuacgucuccgucgucuccucccacuacucccgcaaguucacccccgagaucgccaagcgccccaagguccgcgaccaggagggccgcaucaacuacuacuggacccuccucgagcccggcgacaccaucaucuucgaggccaacggcaaccucaucgccccccgcuacgccuucgcccucucccgcggcuucggcuccggcaucaucaacuccaacgcccccauggacgagugcgacgccaagugccagaccccccagggcgccaucaacuccucccuccccuuccagaacguccaccccgucaccaucggcgagugccccaaguacguccgcuccgccaagcuccgcauggucaccggccuccgcaacauccccuccauccagucccgcggccucuucggcgccaucgccggcuucaucgagggcggcuggaccggcauggucgacggcugguacggcuaccaccaccagaacgagcagggcuccggcuacgccgccgaccagaaguccacccagaacgccaucaacggcaucaccaacaaggucaacuccgucaucgagaagaugaacacccaguucaccgccgucggcaaggaguucaacaagcucgagcgccgcauggagaaccucaacaagaaggucgacgacggcuucaucgacgucuggaccuacaacgccgagcuccucguccuccucgagaacgagcgcacccucgacuuccacgacuccaacgucaagaaccucuacgagaaggucaagaaccagcucaagaacaacgccaaggagaugggcaacggcugcuucgaguucuaccacaagugcaacgacgagugcauggaguccgucaagaacggcaccuacgacuaccccaaguacuccgaggaguccaagcucucccgcgagaagaucgacggcgucaagcucgaguccaugggcgucuaccagauccucgccaucuacuccaccgucgccuccucccucguccuccucgucucccucggcgccaucggcuucuggaugugcuccaacggcucccuccagugccgcaucugcaucuga

SEQ ID NO: 100045 - RNA, 1698 nt, Artificial Sequence
  derived and/or modified CDS sequence (opt2) from hemagglutinin__InfluenzaA__ADB80153
augaaggucaagcuccucgcccuccucugcaccuucaccgccaccuacgccgacaccaucugcaucggcuaccacgccaacaacuccaccgacaccgucgacaccguccucgagaagaacgucaccgucacccacuccgucaaccuccucgaggacaaccacaacggcaagcucugccuccucaagggcaucgccccccuccagcucggcaacugcuccgucgccggcuggauccucggcaaccccgagugcgagcuccucaucuccaaggaguccugguccuacaucgucgagaagcccaaccccgagaacggcaccugcuaccccggccacuucgccgacuacgaggagcuccgcgagcagcucuccuccgucuccuccuucgagcgcuucgagaucuuccccaaggaguccuccuggcccaaccacaccgucaccggcgucuccgccuccugcucccacaacggcgaguccuccuucuacaagaaccuccucuggcucaccggcaagaacggccucuaccccaaccucuccaaguccuucgccaacaacaaggagaaggagguccucguccucuggggcguccaccacccccccaacaucggcgaccagaugacccucuaccacaaggagaacgccuacgucuccgucgucuccucccacuacucccgcaaguucacccccgagaucgccaagcgccccaagguccgcgaccaggagggccgcaucaacuacuacuggacccuccucgagcccggcgacaccaucaucuucgaggccaacggcaaccucaucgccccccgcuacgccuucgcccucucccgcggcuucggcuccggcaucaucaacuccaacgcccccauggacgagugcgacgccaagugccagaccccccagggcgccaucaacuccucccuccccuuccagaacguccaccccgucaccaucggcgagugccccaaguacguccgcuccaccaagcuccgcauggucaccggccuccgcaacauccccuccauccagucccgcggccucuucggcgccaucgccggcuucaucgagggcggcuggaccggcauggucgacggcugguacggcuaccaccaccagaacgagcagggcuccggcuacgccgccgaccagaaguccacccagaacgccaucaacggcaucaccaacaaggucaacuccgucaucgagaagaugaacacccaguucaccgccgucggcaaggaguucaacaagcucgagcgccgcauggagaaccucaacaagaaggucgacgacggcuucaucgacgucuggaccuacaacgccgagcuccucguccuccucgagaacgagcgcacccucgacuuccacgacuccaacgucaagaaccucuacgagaaggucaagaaccagcucaagaacaacgccaaggagaucggcaacggcugcuucgaguucuaccacaagugcaacgacgagugcauggaguccgucaagaacggcaccuacgacuaccccaaguacuccgaggaguccaagcucucccgcgagaagaucgacggcgucaagcucgaguccaugggcgucuaccagauccucgccaucuacuccaccgucgccuccucccucguccuccucgucucccucggcgccaucuccuucuggaugugcuccaacggcucccuccagugccgcaucugcaucuga

SEQ ID NO: 100046 - RNA, 1701 nt, Artificial Sequence; identical to SEQ ID NO: 99806
  derived and/or modified CDS sequence (opt2) from hemagglutinin__InfluenzaA__ADB81399

SEQ ID NO: 100047 - RNA, 1701 nt, Artificial Sequence; identical to SEQ ID NO: 99806
  derived and/or modified CDS sequence (opt2) from hemagglutinin__InfluenzaA__ADB81409

SEQ ID NO: 100048 - RNA, 1701 nt, Artificial Sequence
  derived and/or modified CDS sequence (opt2) from hemagglutinin__InfluenzaA__ADB81419
augaaggccauccucgucguccuccucuacaccuucgccaccgccaacgccgacacccucugcaucggcuaccacgccaacaacuccaccgacaccgucgacaccguccucgagaagaacgucaccgucacccacuccgucaaccuccucgaggacaagcacaacggcaagcucugcaagcuccgcggcgucgccccccuccaccucggcaagugcaacaucgccggcuggauccucggcaaccccgagugcgagucccucuccaccgccuccuccugguccuacaucgucgagaccuccuccuccgacaacggcaccugcuaccccggcgacuucaucgacuacgaggagcuccgcgagcagcucuccuccgucuccuccuucgagcgcuucgagaucuuccccaagaccuccuccuggcccaaccacgacuccaacaagggcgucaccgccgccugcccccacgccggcgccaaguccuucuacaagaaccucaucuggcucgucaagaagggcaacuccuaccccaagcucuccaaguccuacaucaacgacaagggcaaggagguccucguccucuggggcauccaccaccccuccaccuccgccgaccagcagucccucuaccagaacgccgacgccuacgucuucgucggcaccucccgcuacuccaagaaguucaagcccgagaucgccauccgccccaagguccgcgaccaggagggccgcaugaacuacuacuggacccucgucgagcccggcgacaagaucaccuucgaggccaccggcaaccucgucgucccccgcuacgccuucgccauggagcgcaacgccggcuccggcaucaucaucuccgacacccccguccacgacugcaacaccaccugccagacccccaagggcgccaucaacaccucccuccccuuccagaacauccaccccaucaccaucggcaagugccccaaguacgucaaguccaccaagcuccgccucgccaccggccuccgcaacauccccuccauccagucccgcggccucuucggcgccaucgccggcuucaucgagggcggcuggaccggcauggucgacggcugguacggcuaccaccaccagaacgagcagggcuccggcuacgccgccgaccucaaguccacccagaacgccaucgacgagaucaccaacaaggucaacuccgucaucgagaagaugaacacccaguucaccgccgucggcaaggaguucaaccaccucgagaagcgcaucgagaaccucaacaagaaggucgacgacggcuuccucgacaucuggaccuacaacgccgagcuccucguccuccucgagaacgagcgcacccucgacuaccacgacuccaacgucaagaaccucuacgagaagguccgcucccagcucaagaacaacgccaaggagaucggcaacggcugcuucgaguucuaccacaagugcgacaacaccugcauggaguccgucaagaacggcaccuacgacuaccccgaguacuccgaggaggccaagcucaaccgcgaggagaucgacggcgucaagcucgaguccacccgcaucuaccagauccucgccaucuacuccaccgucgccuccucccucguccucgucgucucccucggcgccaucuccuucuggaugugcuccaacggcucccuccagugccgcaucugcaucuga

SEQ ID NO: 100049 - RNA, 1701 nt, Artificial Sequence; identical to SEQ ID NO: 99865
  derived and/or modified CDS sequence (opt2) from hemagglutinin__InfluenzaA__ADB81429

SEQ ID NO: 100050 - RNA, 1701 nt, Artificial Sequence
  derived and/or modified CDS sequence (opt2) from hemagglutinin__InfluenzaA__ADB81439
augaaggccauccucgucguccuccucuacaccuucgccaccgccaacgccgacacccucugcaucggcuaccacgccaacaacuccaccgacaccgucgacaccguccucgagaagaacgucaccgucacccacuccgucaaccuccucgaggacaagcacaacggcaagcucugcaagcuccgcggcgucgccccccuccaccucggcaagugcaacaucgccggcuggauccucggcaaccccgagugcgagucccucuccaccgccuccuccugguccuacaucgucgagaccuccuccuccgacaacggcaccugcuaccccggcgacuucaucgacuacgaggagcuccgcgagcagcucuccuccgucuccuccuucgagcgcuucgagaucuuccccaagaccuccuccuggcccaaccacgaccccaacaagggcgucaccgccgccugcccccacgccggcgccaaguccuucuacaagaaccucaucuggcucgucaagaagggcaacuccuaccccaagcucuccaaguccuacaucaacgacaagggcaaggagguccucguccucuggggcauccaccaccccuccaccuccgccgaccagcagucccucuaccagaacgccgacgccuacgucuucgucggcaccucccgcuacuccaagaaguucaagcccgagaucgccauccgccccaagguccgcaaccaggagggccgcaugaacuacuacuggacccucgucgagcccggcgacaagaucaccuucgaggccaccggcaaccucgucgucccccgcuacgccuucgccauggagcgcaacgccggcuccggcaucaucaucuccgacacccccguccacgacugcaacaccaccugccagacccccaagggcgccaucaacaccucccuccccuuccagaacauccaccccaucaccaucggcaagugccccaaguacgucaaguccaccaagcuccgccucgccaccggccuccgcaacguccccuccauccagucccgcggccucuucggcgccaucgccggcuucaucgagggcggcuggaccggcauggucgacggcugguacggcuaccaccaccagaacgagcagggcuccggcuacgccgccgaccucaaguccacccagaacgccaucgacgagaucaccaacaaggucaacuccgucaucgagaagaugaacacccaguucaccgccgucggcaaggaguucaaccaccucgagaagcgcaucgagaaccucaacaagaaggucgacgacggcuuccucgacaucuggaccuacaacgccgagcuccucguccuccucgagaacgagcgcacccucgacuaccacgacuccaacgucaagaaccucuacgagaagguccgcucccagcucaagaacaacgccaaggagaucggcaacggcugcuucgaguucuaccacaagugcgacaacaccugcauggaguccgucaagaacggcaccuacgacuaccccaaguacuccgaggaggccaagcucaaccgcgaggagaucgacggcgucaagcucgaguccacccgcaucuaccagauccucgccaucuacuccaccgucgccuccucccucguccucgucgucucccucggcgccaucuccuucuggaugugcuccaacggcucccuccagugccgcaucugcaucuga

SEQ ID NO: 100051 - RNA, 1701 nt, Artificial Sequence
  derived and/or modified CDS sequence (opt2) from hemagglutinin__InfluenzaA__ADB81449
augaaggccauccucgucguccuccucuacaccuucgccaccgccaacgccgacacccucugcaucggcuaccacgccaacaacuccaccgacaccgucgacaccguccucgagaagaacgucaccgucacccacuccgucaaccuccucgaggacaagcacaacggcaagcucugcaagcuccgcggcgucgccccccuccaccucggcaagugcaacaucgccggcuggauccucggcaaccccgagugcgagucccucuccaccgccuccuccugguccuacaucgucgagaccuccuccuccgacaacggcaccugcuaccccggcgacuucaucgacuacgaggagcuccgcgagcagcucuccuccgucuccuccuucgagcgcuucgagaucuuccccaagaccuccuccuggcccaaccacgacuccaacaagggcgucaccgccgccugcccccacgccggcgccaaguccuucuacaagaaccucaucuggcucgucaagaagggcaacuccuaccccaagcucaacaaguccuacaucaacgacaagggcaaggagguccucguccucuggggcauccaccaccccuccaccuccgccgaccagcagucccucuaccagaacgccgacgccuacgucuucgucggcaccucccgcuacuccaagaaguucaagcccgagaucgccauccgccccaagguccgcgaccaggagggccgcaugaacuacuacuggacccucgucgagcccggcgacaagaucaccuucgaggccaccggcaaccucgucgucccccgcuacgccuucgccauggagcgcaacgccggcuccggcaucaucaucuccgacacccccguccacgacugcaacaccaccugccagacccccaagggcgccaucaacaccucccuccccuuccagaacauccaccccaucaccaucggcaagugccccaaguacgucaaguccaccaagcuccgccucgccaccggccuccgcaacguccccuccauccagucccgcggccucuucggcgccaucgccggcuucaucgagggcggcuggaccggcauggucgacggcugguacggcuaccaccaccagaacgagcagggcuccggcuacgccgccgaccucaaguccacccagaacgccaucgacgagaucaccaacaaggucaacuccgucaucgagaagaugaacacccaguucaccgccgucggcaaggaguucaaccaccucgagaagcgcaucgagaaccucaacaagaaggucgacgacggcuuccucgacaucuggaccuacaacgccgagcuccucguccuccucgagaacgagcgcacccucgacuaccacgacuccaacgucaagaaccucuacgagaagguccgcucccagcucaagaacaacgccaaggagaucggcaacggcugcuucgaguucuaccacaagugcgacaacaccugcauggaguccgucaagaacggcaccuacgacuaccccaaguacuccgaggaggccaagcucaaccgcgaggagaucgacggcgucaagcucgaguccacccgcaucuaccagauccucgccaucuacuccaccgucgccuccucccucguccucgucgucucccucggcgccaucuccuucuggaugugcuccaacggcucccuccagugccgcaucugcaucuga

SEQ ID NO: 100052 - RNA, 1701 nt, Artificial Sequence
  derived and/or modified CDS sequence (opt2) from hemagglutinin__InfluenzaA__ADB81459
augaaggccauccucgucguccuccucuacaccuucgccaccgccaacgccgacacccucugcaucggcuaccacgccaacaacuccaccgacaccgucgacaccguccucgagaagaacgucaccgucacccacuccgucaaccuccucgaggacaagcacaacggcaagcucugcaagcuccgcggcgucgccccccuccaccucggcaagugcaacaucgccggcuggauccucggcaaccccgagugcgagucccucuccaccgccuccuccugguccuacaucgucgagaccuccuccuccgacaacggcaccugcuaccccggcgacuucaucgacuacgaggagcuccgcgagcagcucuccuccgucuccuccuucgagcgcuucgagaucuuccccaagaccuccuccuggcccaaccacgacuccaacaagggcgucaccgccgccugcccccacgccggcgccaaguccuucuacaagaaccucaucuggcucgucaagaagggcaacuccuaccccaagcucaacaaguccuacaucaacgacaagggcaaggagguccucguccucuggggcauccaccaccccuccaccuccgccgaccagcagucccucuaccagaacgccgacgccuacgucuucgucggcaccucccgcuacuccaagaaguucaagcccgagaucgccauccgccccaagguccgcgaccaggagggccgcaugaacuacuacuggacccucgucgagcccggcgacaagaucaccuucgaggccaccggcaaccucgucgucccccgcuacgccuucgccauggagcgcaacggcggcuccggcaucaucaucuccgacacccccguccacgacugcaacaccaccugccagacccccaagggcgccaucaacaccucccuccccuuccagaacauccaccccaucaccaucggcaagugccccaaguacgucaaguccaccaagcuccgccucgccaccggccuccgcaacguccccuccauccagucccgcggccucuucggcgccaucgccggcuucaucgagggcggcuggaccggcauggucgacggcugguacggcuaccaccaccagaacgagcagggcuccggcuacgccgccgaccucaaguccacccagaacgccaucgacgagaucaccaacaaggucaacuccgucaucgagaagaugaacacccaguucaccgccgucggcaaggaguucaaccaccucgagaagcgcaucgagaaccucaacaagaaggucgacgacggcuuccucgacaucuggaccuacaacgccgagcuccucguccuccucgagaacgagcgcacccucgacuaccacgacuccaacgucaagaaccucuacgagaagguccgcucccagcucaagaacaacgccaaggagaucggcaacggcugcuucgaguucuaccacaagugcgacaacaccugcauggaguccgucaagaacggcaccuacgacuaccccaaguacuccgaggaggccaagcucaaccgcgaggagaucgacggcgucaagcucgaguccacccgcaucuaccagauccucgccaucuacuccaccgucgccuccucccucguccucgucgucucccucggcgccaucuccuucuggaugugcuccaacggcucccuccagugccgcaucugcaucuga

SEQ ID NO: 100053 - RNA, 1701 nt, Artificial Sequence
  derived and/or modified CDS sequence (opt2) from hemagglutinin__InfluenzaA__ADB82655
augaaggccauccuccucguccuccucugcacccucgccgccgccaacgccgacacccucugcaucggcuaccacgccaacaacuccaccgacaccgucgacaccguccucgagaagaacgucaccgucacccacuccgucaaccuccucgaggaccgccacaacggcaagcucugcaaccuccgcggcaaggccccccuccaccucggcaagugcaacaucgccggcuggcuccucggcaaccccgagugcgagcuccucuucgccgucaacuccugguccuacaucgucgagaccuccaacuccgacaacggcaccugcuaccccggcgacuucaccuccuacgaggagcuccgcgagcagcucuccuccgucuccuccuucgagcgcuucgagaucuuccccaaggccuccuccuggcccaaccacgagaccaaccgcggcgucaccgccgccugccccuacgccggcaccaacggcuucuaccgcaaccucaucuggcucgucaagaaggagaacuccuaccccaagcuccgcaaguccuacgucaacaacaagaagaaggagguccucguccucuggggcauccaccacccccccaccaacaccgaccagcagucccucuaccagaacgccgacgccuacgucuucgucggcuccuccaaguacucccgcaaguucaagcccgagaucgccgagcgccccaagguccgcggccaggccggccgcaugaacuacuacuggacccucaucgagcccggcgacaccaucaccuucgaggccaccggcaaccucgucgccccccgcuacgccuucgccaugaaccgcggccccgucuccggcaucaucaccuccgacgcccccguccacgacugcaacgccaccugccagacccccaagggcgccaucaacaccucccuccccuuccagaacauccaccccaucaccaucggcgagugccccaaguacgucaaguccacccgccuccgcauggccaccggccuccgcaacauccccuccauccagucccgcggccucuucggcgccaucgccggcuucaucgagggcggcuggaccggcaugaucgacggcugguacggcuaccaccaccagaacggccagggcuccggcuacgccgccgaccagaaguccacccagaacgccaucgaccgcaucaccaacaaggucaacuccgucaucgagaagaugaacauccaguucaccgccgucggcaaggaguucaaccaccucgagcgccgcaucgagaaccucaacaagaaggucgacgacggcuuccucgacgucuggaccuacaacgccgagcuccucguccuccucgagaacgagcgcacccucgacuuccacgacuccaacgucaagacccucuacgagaaggucaagacccagcuccgcaacaacgccaaggagaucggcaacggcugcuucgaguucuaccacaagugcgacgacaccugcauggaguccaucaagaacggcaccuacaacuaccccaaguacuccgaggaguccaagcucaaccgcgaggagaucgacggcgucaagcucgaguccacccgcaucuaccagauccucgccaucuacuccaccgccgccuccucccucguccuccucgucucccucggcgccaucggcuucuggaugugcuccaacggcucccuccagugccgcaucugcaucuga

SEQ ID NO: 100054 - RNA, 1701 nt, Artificial Sequence
  derived and/or modified CDS sequence (opt2) from hemagglutinin__InfluenzaA__ADB82656
augaaggccauccuccucguccuccagugcauccucaccgccgccaacgccgacacccucugcaucggcuaccacgccaacaacuccaccgacaccgucgacaccguccucgagaagaacgucaccgucacccacuccgucaaccuccucgaggaccgccacaacggcaagcucugcaagcucaagggcaucgccccccuccaccucggcaagugcaacaucgccggcuggcuccucggcaaccccgagugcgagcuccucuucaaggccaacuccugguccuacaucgucgagaccuccuacuccgacaacggcaccugcuaccccggcgacuucaccaacuacgaggagcuccgcgagcagcucuccuccgucuccuccuucgagcgcuucgagauguuccccaaggccaacuccuggcccaaccacgagaccaacaagggcgucaccgccgccugccccuacgccggcgccaacuccuucuaccgcaaccucaucuggcucgucaagaagggcaacuccuacccccgccucuccaaguccuacgucaacaacaagaagaaggagguccucguccucuggggcauccaccaccccuccaccuccaccgaccagcagucccucuaccagaacgccgacgccuacgucuucgucuccuccuccaccuacaacaagcgcuucaagcccgagaucggcacccgccccaagguccgcgaccaguccggccgcaugaacuacuacuggaccaucgucgagcccggcgacaccaucaccuucgaggccaccggcaaccucgucgccccccgcuacgccuucgccaugaagcgcgacuccggcuccggcaucaucauguccgacacccccguccacgacugcaacaccaccugccagacccccaagggcgccaucaacaccucccuccccuuccagaacguccaccccgucaccaucggcgagugccccaaguacgucaaguccaccaagcuccgcauggccaccggccuccgcaacauccccuccauccagucccgcggccucuucggcgccaucgccggcuucaucgagggcggcuggaccggcaugaucgacggcugguacggcuaccaccaccagaacgagcagggcuccggcuacgccgccgaccgcaaguccacccagaacgccaucgacggcaucaccaacaaggucaacuccaucaucgagaagaugaacauccaguucaccgccgucggcaaggaguucucccaccucgagaagcgcgucgagaaccucaacaagaaggucgacgacggcuuccucgacgucuggaccuacaacgccgagcuccucguccuccucgagaacgagcgcacccucgacuaccacgacuccaacgucaagaaccucuacgagaagguccgcucccagcucaagaacaacgccaaggagaucggcaacggcugcuucgaguucuaccacaagugcgacgacuccugcauggaguccaucaagaacgagaccuacgacuacuccaaguacuccgaggagucccgccucaaccgcgagaagaucgacggcgucaagcucgaguccacccagaucuaccagauccucgccaucuacuccaccgucgccuccucccucguccuccucgucucccucggcgccaucuccuucuggaugugcuccaacggcucccuccagugccgcaucugcaucuga

SEQ ID NO: 100055 - RNA, 1701 nt, Artificial Sequence
  derived and/or modified CDS sequence (opt2) from hemagglutinin__InfluenzaA__ADB82944
augaaggccauccucgucguccuccucuacaccuucgccaccgccaacgccgacacccucugcaucggcuaccacgccaacaacuccaccgacaccgucgacaccguccucgagaagaacgucaccgucacccacuccgucaaccuccucgaggacaagcacaacggcaagcucugcaagcuccgcggcgucgccccccuccaccucggcaagugcaacaucgccggcuggauccucggcaaccccgagugcgagucccucuccaccgccuccuccugguccuacaucgucgagaccuccuccuccgacaacggcaccugcuaccccggcgacuucaucgacuacgaggagcuccgcgagcagcucuccuccgucuccuccuucgagcgcuucgagaucuuccccaagaccuccuccuggcccaaccacgaccccaacaagggcgucaccgccgccugcccccacgccggcgccaaguccuucuacaagaaccucaucuggcucgucaagaagggcaacuccuaccccaagcucuccaaguccuacaucaacgacaagggcaaggagguccucguccucuggggcauccaccaccccuccaccuccgccgaccagcagucccucuaccagaacgccgacgccuacgucuucgucggcaccucccgcuacuccaagaaguucaagcccgagaucgccauccgccccaagguccgcgaccaggagggccgcaugaacuacuacuggacccucgucgagcccggcgacaagaucaccuucgaggccaccggcaaccucgucgucccccgcuacgccuucgccauggagcgcaacgccggcuccggcaucaucaucuccgacacccccguccacgacugcaacaccaccugccagacccccaagggcgccaucaacaccucccuccccuuccagaacauccaccccaucaccaucggcaagugccccaaguacgucaaguccaccaagcuccgccucgccaccggccuccgcaacauccccuccauccagucccgcggccucuucggcgccaucgccggcuucaucgagggcggcuggaccggcauggucgacggcugguacggcuaccaccaccagaacgagcagggcuccggcuacgccgccgaccucaaguccacccagaacgccaucgacgagaucaccaacaaggucaacuccgucaucgagaagaugaacacccaguucaccgccgucggcaaggaguucaaccaccucgagaagcgcaucgagaaccucaacaagaaggucgacgacggcuuccucgacaucuggaccuacaacgccgagcuccucguccuccucgagaacgagcgcacccucgacuaccacgacuccaacgucaagaaccucuacgagaagguccgcucccagcucaagaacaacgccaaggagaucggcaacggcugcuucgaguucuaccacaagugcgacaacaccugcauggaguccgucaagaacggcaccuacgacuaccccaaguacuccgaggaggccaagcucaaccgcgaggagaucgacggcgucaagcucgaguccacccgcaucuaccagauccucgccaucuacuccaccgucgccuccucccucguccucgucgucucccucggcgccaucuccuucuggaugugcuccaacggcucccuccagugccgcaucugcaucuga

SEQ ID NO: 100056 - RNA, 1701 nt, Artificial Sequence
  derived and/or modified CDS sequence (opt2) from hemagglutinin__InfluenzaA__ADB82950
augaaggccauccucgucguccuccucuacaccuucgccaccgccaacgccgacacccucugcaucggcuaccacgccaacaacuccaccgacaccgucgacaccguccucgagaagaacgucaccgucacccacuccgucaaccuccucgaggacaagcacaacggcaagcucugcaagcuccgcggcgucgccccccuccaccucggcaagugcaacaucgccggcuggauccucggcaaccccgagugcgagucccucuccaccgccuccuccugguccuacaucgucgagaccuccuccuccgacaacggcaccugcuaccccggcgacuucaucgacuacgaggagcuccgcgagcagcucuccuccgucuccuccuucgagcgcuucgagaucuuccccaagaccuccuccuggcccaaccacgacuccaacaagggcgucaccgccgccugcccccacgccggcgccaaguccuucuacaagaaccucaucuggcucgucaagaagggcaacuccuaccccaagcucuccaaguccuacaucaacgacaagggcaaggagguccucguccucuggggcauccaccaccccuccaccuccgccgaccagcagucccucuaccagaacgccgacgccuacgucuucgucggcaccucccgcuacuccaagaaguucgagcccgagaucgccauccgccccaagguccgcgaccaggagggccgcaugaacuacuacuggacccucgucgagcccggcgacaagaucaccuucgaggccaccggcaaccucgucgucccccgcuacgccuucgccauggagcgcaacgccggcuccggcaucaucaucuccgacacccccguccacgacugcaacaccaccugccagacccccaagggcgccaucaacaccucccuccccuuccagaacauccaccccaucaccaucggcaagugccccaaguacgucaaguccaccaagcuccgccucgccaccggccuccgcaacguccccuccauccagucccgcggccucuucggcgccaucgccggcuucaucgagggcggcuggaccggcauggucgacggcugguacggcuaccaccaccagaacgagcagggcuccggcuacgccgccgaccucaaguccacccagaacgccaucgacgagaucaccaacaaggucaacuccgucaucgagaagaugaacacccaguucaccgccgucggcaaggaguucaaccaccucgagaagcgcaucgagaaccucaacaagaaggucgacgacggcuuccucgacaucuggaccuacaacgccgagcuccucguccuccucgagaacgagcgcacccucgacuaccacgacuccaacgucaagaaccucuacgagaagguccgcucccagcucaagaacaacgccaaggagaucggcaacggcugcuucgaguucuaccacaagugcgacaacaccugcauggaguccgucaagaacggcaccuacgacuaccccaaguacuccgaggaggccaagcucaaccgcgaggagaucgacggcgucaagcucgaguccacccgcaucuaccagauccucgccaucuacuccaccgucgccuccucccucguccucgucgucucccucggcgccaucuccuucuggaugugcuccaacggcucccuccagugccgcaucugcaucuga

SEQ ID NO: 100057 - RNA, 1701 nt, Artificial Sequence; identical to SEQ ID NO: 99503
  derived and/or modified CDS sequence (opt2) from hemagglutinin__InfluenzaA__ADB89129

SEQ ID NO: 100058 - RNA, 1701 nt, Artificial Sequence; identical to SEQ ID NO: 98705
  derived and/or modified CDS sequence (opt2) from hemagglutinin__InfluenzaA__ADB89139

SEQ ID NO: 100059 - RNA, 1701 nt, Artificial Sequence
  derived and/or modified CDS sequence (opt2) from hemagglutinin__InfluenzaA__ADB89149
augaaggccauccucgucguccuccucuacaccuucgccaccgccaacgccuacacccucugcaucggcuaccacgccaacaacuccaccgacaccgucgacaccguccucgagaagaacgucaccgucacccacuccgucaaccuccucgaggacaagcacaacggcaagcucugcaagcuccgcggcgucgccccccuccaccucggcaagugcaacaucgccggcuggauccucggcaaccccgagugcgagucccucuccaccgccuccuccugguccuacaucgucgagaccuccuccuccgacaacggcaccugcuaccccggcgacuucaucgacuacgaggagcuccgcgagcagcucuccuccgucuccuccuucgagcgcuucgagaucuuccccaagaccuccuccuggcccaaccacgacuccaacaagggcgucaccgccgccugcccccacgucggcgccaaguccuucuacaagaaccucaucuggcucgucaagaagggcaacuccuaccccaagcucuccaaguccuacaucaacgacaagggcaaggagguccucguccucuggggcauccaccaccccuccaccuccgccgaccagcagucccucuaccagaacgccgacgccuacgucuucgucggcaccucccgcuacuccaagaaguucaagcccgagaucgccauccgccccaagguccgcggccaggagggccgcaugaacuacuacuggacccucgucgagcccggcgacaagaucaccuucgaggccaccggcaaccucgucgucccccgcuacgccuucgccauggagcgcaacgccggcuccggcaucaucaucuccgacacccccguccacgacugcaacaccaccugccagacccccaagggcgccaucaacaccucccuccccuuccagaacauccaccccaucaccaucggcaagugccccaaguacgucaaguccaccaagcuccgccucgccaccggccuccgcaacauccccuccauccagucccgcggccucuucggcgccaucgccggcuucaucgagggcggcuggaccggcauggucgacggcugguacggcuaccaccaccagaacgagcagggcuccggcuacgccgccgaccucaaguccacccagaacgccaucgacgagaucaccaacaaggucaacuccgucaucgagaagaugaacacccaguucaccgccgucggcaaggaguucaaccaccucgagaagcgcaucgagaaccucaacaagaaggucgacgacggcuuccucgacaucuggaccuacaacgccgagcuccucguccuccucgagaacgagcgcacccucgacuaccacgacuccaacgucaagaaccucuacgagaagguccgcucccagcucaagaacaacgccaaggagaucggcaacggcugcuucgaguucuaccacaagugcgacaacaccugcauggaguccgucaagaacggcaccuacgacuaccccaaguacuccgaggaggccaagcucaaccgcgaggagaucgacggcgucaagcucgaguccacccgcaucuaccagauccucgccaucuacuccaccgucgccuccucccucguccucgucgucucccucggcgccaucuccuucuggaugugcuccaacggcucccuccagugccgcaucugcaucuga

SEQ ID NO: 100060 - RNA, 1701 nt, Artificial Sequence; identical to SEQ ID NO: 99058
  derived and/or modified CDS sequence (opt2) from hemagglutinin__InfluenzaA__ADB89150

SEQ ID NO: 100061 - RNA, 1701 nt, Artificial Sequence
  derived and/or modified CDS sequence (opt2) from hemagglutinin__InfluenzaA__ADB89221
augaaggccauccucgucguccuccucuacaccuucgccaccgccaacgccgacacccucugcaucggcuaccacgccaacaacuccaccgacaccgucgacaccguccucgagaagaacgucaccgucacccacuccgucaaccuccucgaggacaagcacaacggcaagcucugcaagcuccgcggcgucgccccccuccaccucggcaagugcaacaucgccggcuggauccucggcaaccccgagugcgagucccucuccaccgccuccuccugguccuacaucgucgagaccuccuccuccgacaacggcaccugcuaccccggcgacuucaucgacuacgaggagcuccgcgagcagcucuccuccgucuccuccuucgagcgcuucgagaucuuccccaagaccuccuccuggcccaaccacgacuccaacaagggcgucaccgccgccugcccccacgccggcgccaaguccuucuacaagaaccucaucuggcucgucaagaagggcaacuccuaccccaagcucuccaaguccuacaucaacgacaagggcaaggagguccucguccucuggggcauccaccaccccuccaccuccgccgaccagcagaaccucuaccagaacgccgacgccuacgucuucgucggcuccucccgcuacuccaagaaguucaagcccgagaucgccauccgccccaagguccgcgaccaggagggccgcaugaacuacuacuggacccucgucgagcccggcgacaagaucaccuucgaggccaccggcaaccucgucgucccccgcuacgccuucgccauggagcgcaacgccggcuccggcaucaucaucuccgacacccccguccacgacugcaacaccaccugccagacccccaagggcgccaucaacaccucccuccccuuccagaacauccaccccaucaccaucggcaagugccccaaguacgucaaguccaccaagcuccgccucgccaccggccuccgcaacguccccuccauccagucccgcggccucuucggcgccaucgccggcuucaucgagggcggcuggaccggcauggucgacggcugguacggcuaccaccaccagaacgagcagggcuccggcuacgccgccgaccucaaguccacccagaacgccaucgacgagaucaccaacaaggucaacuccgucaucgagaagaugaacacccaguucaccgccgucggcaaggaguucaaccaccucgagaagcgcaucgagaaccucaacaagaaggucgacgacggcuuccucgacaucuggaccuacaacgccgagcuccucguccuccucgagaacgagcgcacccucgacuaccacgacuccaacgucaagaaccucuacgagaagguccgcucccagcucaagaacaacgccaaggagaucggcaacggcugcuucgaguucuaccacaagugcgacaacaccugcauggaguccgucaagaacggcaccuacgacuaccccaaguacuccgaggaggccaagcucaaccgcgaggagaucgacggcgucaagcucgaguccacccgcaucuaccagauccucgccaucuacuccaccgucgccuccucccucguccucgucgucucccucggcgccaucuccuucuggaugugcuccaacggcucccuccagugccgcaucugcaucuga

SEQ ID NO: 100062 - RNA, 1701 nt, Artificial Sequence; identical to SEQ ID NO: 98758
  derived and/or modified CDS sequence (opt2) from hemagglutinin__InfluenzaA__ADB89241

SEQ ID NO: 100063 - RNA, 1701 nt, Artificial Sequence; identical to SEQ ID NO: 98705
  derived and/or modified CDS sequence (opt2) from hemagglutinin__InfluenzaA__ADB89251

SEQ ID NO: 100064 - RNA, 1701 nt, Artificial Sequence; identical to SEQ ID NO: 99152
  derived and/or modified CDS sequence (opt2) from hemagglutinin__InfluenzaA__ADB89261

SEQ ID NO: 100065 - RNA, 1701 nt, Artificial Sequence
  derived and/or modified CDS sequence (opt2) from hemagglutinin__InfluenzaA__ADB89271
augaaggccauccucgucguccuccucuacaccuucgccaccgccaacgccgacacccucugcaucggcuaccacgccaacaacuccaccgacaccgucgacaccguccucgagaagaacgucaccgucacccacuccgucaaccuccucgaggacaagcacaacggcaagcucugcaagcuccgcggcgucgccccccuccaccucggcaagugcaacaucgccggcuggauccucggcaaccccgagugcgagucccucuccaccgccuccuccugguccuacaucgucgagaccuccuccuccgacaacggcaccugcuaccccggcgacuucaucgacuacgaggagcuccgcgagcagcucuccuccgucuccuccuucgagcgcuucgagaucuuccccaagaccuccuccuggcccaaccacgacuccaacaagggcgucaccgccgccugcccccacgccggcgccaaguccuucuacaagaaccucaucuggcucgucaagaagggcaacuccuaccccaagcucuccaaguccuacaucaacgacaagggcaaggagguccucguccucuggggcauccaccaccccuccaccuccgccgaccagcagucccucuaccagaacgccgacgccuacgucuucgucggcuccucccgcuacuccaagaaguucaagcccgagaucgccauccgccccaagguccgcgaccaggagggccgcaugaacuacuacuggacccucgucgagcccggcgacaagaucaccuucgaggccaccggcaaccucgucgucccccgcuacgccuucgccauggagcgcaacgccggcuccggcaucaucaucuccgacacccccguccacgacugcaacaccaccugccagacccccaagggcgccaucaacaccucccuccccuuccagaacauccaccccaucaccaucggcaagugccccaaguacgucaaguccaccaagcuccgccucgccaccggccuccgcaacguccccuccauccagucccgcggccucuucggcgccaucgccggcuucaucgagggcggcuggaccggcauggucgacggcugguacggcuaccaccaccagaacgagcagggcuccggcuacgccgccgaccucaaguccacccagaacgccaucgacgagaucaccaacaaggucaacuccgucaucgagaagaugaacacccaguucaccgccgucggcaaggaguucaaccaccucgagaagcgcaucgagaaccucaacaagaaggucgacgacggcuuccucgacaucuggaccuacaacgccgagcuccucguccuccucgagaacgagcgcacccucgacuaccacgacuccaacgucaagaaccucuacgagaagguccgcucccagcucaagaacaacgccaaggagaucggcaacggcugcuucgaguucuaccacaagugcgacaacaccugcaugggcuccgucaagaacggcaccuacgacuaccccaaguacuccgaggaggccaagcucaaccgcgaggagaucgacggcgucaagcucgaguccacccgcaucuaccagauccucgccaucuacuccaccgucgccuccucccucguccucgucgucucccucggcgccaucuccuucuggaugugcuccaacggcucccuccagugccgcaucugcaucuga

SEQ ID NO: 100066 - RNA, 1701 nt, Artificial Sequence
  derived and/or modified CDS sequence (opt2) from hemagglutinin__InfluenzaA__ADB89281
augaaggccauccucgucguccuccucuacaccuucgccaccgccaacgccgacacccucugcaucggcuaccacgccaacaacuccaccgacaccgucgacaccguccucgagaagaacgucaccgucacccacuccgucaaccuccucgaggacaagcacaacggcaagcucugcaagcuccgcggcgucgccccccuccaccucggcaagugcaacaucgccggcuggauccucggcaaccccgagugcgagucccucuccaccgccuccuccugguccuacaucgucgagaccuccuccuccgacaacggcaccugcuaccccggcgacuucaucgacuacgaggagcuccgcgagcagcucuccuccgucuccuccuucgagcgcuucgagaucuuccccaagaccuccuccuggcccaaccacgacuccaacaagggcgucaccgccgccugcccccacgccggcgccaaguccuucuacaagaaccucaucuggcucgucaagaagggcaacuccuaccccaagcucuccaaguccuacaucaacgacaagggcaaggagguccucguccucuggggcauccaccacccccccaccuccgccgaccagcagucccucuaccagaacgccgacgccuacgucuucgucggcaccucccgcuacuccaagaaguucaagcccgagaucgccauccgccccaagguccgcggccaggagggccgcaugaacuacuacuggacccucgucgagcccggcgacaagaucaccuucgaggccaccggcaaccucgucgucccccgcuacgccuucgccauggagcgcaacgccggcuccggcaucaucaucuccgacacccccguccacgacugcaacaccaccugccagacccccaagggcgccaucaacaccucccuccccuuccagaacauccaccccaucaccaucggcaagugccccaaguacgucaaguccaccaagcuccgccucgccaccggccuccgcaacguccccuccauccagucccgcggccucuucggcgccaucgccggcuucaucgagggcggcuggaccggcauggucgacggcugguacggcuaccaccaccagaacgagcagggcuccggcuacgccgccgaccucaaguccacccagaacgccaucgacgagaucaccaacaaggucaacuccgucaucgagaagaugaacacccaguucaccgccgucggcaaggaguucaaccaccucgagaagcgcaucgagaaccucaacaagaaggucgacgacggcuuccucgacaucuggaccuacaacgccgagcuccucguccuccucgagaacgagcgcacccucgacuaccacgacuccaacgucaagaaccucuacgagaagguccgcucccagcucaagaacaacgccaaggagaucggcaacggcugcuucgaguucuaccacaagugcgacaacaccugcauggaguccgucaagaacggcaccuacgacuaccccaaguacuccgaggaggccaagcucaaccgcgaggagaucgacggcgucaagcucgaguccacccgcaucuaccagauccucgccaucuacuccaccgucgccuccucccucguccucgucgucucccucggcgccaucuccuucuggaugugcuccaacggcucccuccagugccgcaucugcaucuga

SEQ ID NO: 100067 - RNA, 1701 nt, Artificial Sequence; identical to SEQ ID NO: 98705
  derived and/or modified CDS sequence (opt2) from hemagglutinin__InfluenzaA__ADB89291

SEQ ID NO: 100068 - RNA, 1701 nt, Artificial Sequence; identical to SEQ ID NO: 98705
  derived and/or modified CDS sequence (opt2) from hemagglutinin__InfluenzaA__ADB89301

SEQ ID NO: 100069 - RNA, 1701 nt, Artificial Sequence; identical to SEQ ID NO: 98705
  derived and/or modified CDS sequence (opt2) from hemagglutinin__InfluenzaA__ADB89311

SEQ ID NO: 100070 - RNA, 1701 nt, Artificial Sequence
  derived and/or modified CDS sequence (opt2) from hemagglutinin__InfluenzaA__ADB89321
augaaggccauccucgucguccuccucuacaccuucgccaccgccaacgccgacacccucugcaucggcuaccacgccaacaacuccaccgacaccgucgacaccguccucgagaagaacgucaccgucacccacuccgucaaccuccucgaggacaagcacaacggcaagcucugcaagcuccgcggcgucgccccccuccaccucggcaagugcaacaucgccggcuggauccucggcaaccccgagugcgagucccucuccaccgccuccuccugguccuacaucgucgagaccuccuccuccgacaacggcaccugcuaccccggcgacuucaucgacuacgaggagcuccgcgagcagcucuccuccgucuccuccuucgagcgcuucgagaucuuccccaagaccuccuccuggcccaaccacgacuccaacaagggcgucaccgccgccugcccccacgccggcgccaaguccuucuacaagaaccucaucuggcucgucaagaagggcaacuccuaccccaagcucuccgaguccuacaucaacgacaagggcaaggagguccucguccucuggggcauccaccaccccuccaccuccgccgaccagcagucccucuaccagaacgccgacgccuacgucuucgucggcaccuccaaguacuccaagaaguucaagcccgagaucgccauccgccccaagguccgcgaccaggagggccgcaugaacuacuacuggacccucgucgagcccggcgacaagaucaccuucgaggccaccggcaaccucgucgucccccgcuacgccuucgccauggagcgcaacgccggcuccggcaucaucaucuccgacacccccguccacgacugcaacaccaccugccagacccccaagggcgccaucaacaccucccuccccuuccagaacauccaccccaucaccaucggcaagugccccaaguacgucaaguccaccaagcuccgccucgccaccggccuccgcaacguccccuccauccagucccgcggccucuucggcgccaucgccggcuucaucgagggcggcuggaccggcauggucgacggcugguacggcuaccaccaccagaacgagcagggcuccggcuacgccgccgaccucaaguccacccagaacgccaucgacgagaucaccaacaaggucaacuccgucaucgagaagaugaacacccaguucaccgccgucggcaaggaguucaaccaccucgagaagcgcaucgagaaccucaacaagaaggucgacgacggcuuccucgacaucuggaccuacaacgccgagcuccucguccuccucgagaacgagcgcacccucgacuaccacgacuccaacgucaagaaccucuacgagaagguccgcucccagcucaagaacaacgccaaggagaucggcaacggcugcuucgaguucuaccacaagugcgacaacaccugcauggaguccgucaagaacggcaccuacgacuaccccaaguacuccgaggaggccaagcucaaccgcgaggagaucgacggcgucaagcucgaguccacccgcaucuaccagauccucgccaucuacuccaccgucgccuccucccucguccucgucgucucccucggcgccaucuccuucuggaugugcuccaacggcucccuccagugccgcaucugcaucuga

SEQ ID NO: 100071 - RNA, 1701 nt, Artificial Sequence
  derived and/or modified CDS sequence (opt2) from hemagglutinin__InfluenzaA__ADB89331
augaaggccauccucgucguccuccucuacaccuucgccaccgccaacgccgacacccucugcaucggcuaccacgccaacaacuccaccgacaccgucgacaccguccucgagaagaacgucaccgucacccacuccgucaaccuccucgaggacaagcacaacggcaagcucugcaagcuccgcggcgucgccccccuccaccucggcaagugcaacaucgccggcuggauccucggcaaccccgagugcgagucccucuccaccgccuccuccugguccuacaucgucgagaccuccuccuccgacaacggcaccugcuaccccggcgacuucaucgacuacgaggagcuccgcgagcagcucuccuccgucuccuccuucgagcgcuucgagaucuuccccaagaccuccuccuggcccaaccacgacuccaacaagggcgucaccgccgccugcccccacgccggcgccaaguccuucuacaagaaccucaucuggcucgucaagaagggcaacuccuaccccaagcucuccaaguccuacaucaacgacaagggcaaggagguccucguccucuggggcauccaccaccccuccaccuccgccgaccagcagucccucuaccagaacgccgacgccuacgucuucgucggcuccuccaaguacuccaagaaguucaagcccgagaucgccauccgccccaagguccgcgaccaggagggccgcaugaacuacuacuggacccucgucgagcccggcgacaagaucaccuucgaggccaccggcaaccucgucgucccccgcuacgccuucgccauggagcgcaacgccggcuccggcaucaucaucuccgacacccccguccacgacugcaacaccaccugccagacccccaagggcgccaucaacaccucccuccccuuccagaacauccaccccaucaccaucggcaagugccccaaguacgucaaguccaccaagcuccgccucgccaccggccuccgcaacguccccuccauccagucccgcggccucuucggcgccaucgccggcuucaucgagggcggcuggaccggcauggucgacggcugguacggcuaccaccaccagaacgagcagggcuccggcuacgccgccgaccucaaguccacccagaacgccaucgacgagaucaccaacaaggucaacuccgucaucgagaagaugaacacccaguucaccgccgucggcaaggaguucaaccaccucgagaagcgcaucgagaaccucaacaagaaggucgacgacggcuuccucgacaucuggaccuacaacgccgagcuccucguccuccucgagaacgagcgcacccucgacuaccacgacuccaacgucaagaaccucuacgagaagguccgcucccagcucaagaacaacgccaaggagaucggcaacggcugcuucgaguucuaccacaagugcgacaacaccugcauggaguccgucaagaacggcaccuacgacuaccccaaguacuccgaggaggccaagcucaaccgcgaggagaucgacggcgucaagcucgaguccacccgcgucuaccagauccucgccaucuacuccaccgucgccuccucccucguccucgucgucucccucggcgccaucuccuucuggaugugcuccaacggcucccuccagugccgcaucugcaucuga

SEQ ID NO: 100072 - RNA, 1701 nt, Artificial Sequence; identical to SEQ ID NO: 98705
  derived and/or modified CDS sequence (opt2) from hemagglutinin__InfluenzaA__ADB89341

SEQ ID NO: 100073 - RNA, 1701 nt, Artificial Sequence; identical to SEQ ID NO: 98705
  derived and/or modified CDS sequence (opt2) from hemagglutinin__InfluenzaA__ADB89351

SEQ ID NO: 100074 - RNA, 1701 nt, Artificial Sequence; identical to SEQ ID NO: 98705
  derived and/or modified CDS sequence (opt2) from hemagglutinin__InfluenzaA__ADB89361

SEQ ID NO: 100075 - RNA, 1701 nt, Artificial Sequence; identical to SEQ ID NO: 98705
  derived and/or modified CDS sequence (opt2) from hemagglutinin__InfluenzaA__ADB89371

SEQ ID NO: 100076 - RNA, 1701 nt, Artificial Sequence; identical to SEQ ID NO: 99450
  derived and/or modified CDS sequence (opt2) from hemagglutinin__InfluenzaA__ADB89381

SEQ ID NO: 100077 - RNA, 1701 nt, Artificial Sequence
  derived and/or modified CDS sequence (opt2) from hemagglutinin__InfluenzaA__ADB89391
augaaggccauccucgucguccuccucuacaccuucgccaccgccaacgccgacacccucugcaucggcuaccacgccaacaacuccaccgacaccgucgacaccguccucgagaagaacgucaccgucacccacuccgucaaccuccucgaggacaagcacaacggcaagcucugcaagcuccgcggcgucgccccccuccaccucggcaagugcaacaucgccggcuggauccucggcaaccccgagugcgagucccucuccaccgccuccuccugguccuacaucgucgagaccuccuccuccgacaacggcaccugcuaccccggcgacuucaucgacuacgaggagcuccgcgagcagcucuccuccgucuccuccuucgagcgcuucgagaucuuccccaagaccuccuccuggcccaaccacgacuccaacaagggcgucaccgccgccugccuccacgccggcgccaaguccuucuacaagaaccucaucuggcucgucaagaagggcaacuccuaccccaagcucuccaaguccuacaucaacgacaagggcaaggagguccucguccucuggggcauccaccaccccuccaccuccgccgaccagcagucccucuaccagaacgccgacgccuacgucuucgucggcaccucccgcuacuccaagaaguucaagcccgagaucgccauccgccccaagguccgcgaccaggagggccgcaugaacuacuacuggacccucgucgagcccggcgacaagaucaccuucgaggccaccggcaaccucgucgucccccgcuacgccuucgccauggagcgcaacgccggcuccggcaucaucaucuccgacacccccguccacgacugcaacaccaccugccagacccccaagggcgccaucaacaccucccuccccuuccagaacauccaccccaucaccaucggcaagugccccaaguacgucaaguccaccaagcuccgccucgccaccggccuccgcaacguccccuccauccagucccgcggccucuucggcgccaucgccggcuucaucgagggcggcuggaccggcaugaucgacggcugguacggcuaccaccaccagaacgagcagggcuccggcuacgccgccgaccucaaguccacccagaacgccaucgacgagaucaccaacaaggucaacuccgucaucgagaagaugaacacccaguucaccgccgucggcaaggaguucaaccaccucgagaagcgcaucgagaaccucaacaagaaggucgacgacggcuuccucgacaucuggaccuacaacgccgagcuccucguccuccucgagaacgagcgcacccucgacuaccacgacuccaacgucaagaaccucuacgagaagguccgcucccagcucaagaacaacgccaaggagaucggcaacggcugcuucgaguucuaccacaagugcgacaacaccugcauggaguccgucaagaacggcaccuacgacuaccccaaguacuccgaggaggccaagcucaaccgcgaggagaucgacggcgucaagcucgaguccacccgcaucuaccagauccucgccaucuacuccaccgucgccuccucccucguccucgucgucucccucggcgccaucuccuucuggaugugcuccaacggcucccuccagugccgcaucugcaucuga

SEQ ID NO: 100078 - RNA, 1701 nt, Artificial Sequence; identical to SEQ ID NO: 98692
  derived and/or modified CDS sequence (opt2) from hemagglutinin__InfluenzaA__ADB89401

SEQ ID NO: 100079 - RNA, 1701 nt, Artificial Sequence; identical to SEQ ID NO: 98705
  derived and/or modified CDS sequence (opt2) from hemagglutinin__InfluenzaA__ADB89411

SEQ ID NO: 100080 - RNA, 1701 nt, Artificial Sequence; identical to SEQ ID NO: 99152
  derived and/or modified CDS sequence (opt2) from hemagglutinin__InfluenzaA__ADB89431

SEQ ID NO: 100081 - RNA, 1701 nt, Artificial Sequence; identical to SEQ ID NO: 99058
  derived and/or modified CDS sequence (opt2) from hemagglutinin__InfluenzaA__ADB89441

SEQ ID NO: 100082 - RNA, 1701 nt, Artificial Sequence; identical to SEQ ID NO: 98705
  derived and/or modified CDS sequence (opt2) from hemagglutinin__InfluenzaA__ADB89461

SEQ ID NO: 100083 - RNA, 1701 nt, Artificial Sequence; identical to SEQ ID NO: 99152
  derived and/or modified CDS sequence (opt2) from hemagglutinin__InfluenzaA__ADB89481

SEQ ID NO: 100084 - RNA, 1701 nt, Artificial Sequence; identical to SEQ ID NO: 99152
  derived and/or modified CDS sequence (opt2) from hemagglutinin__InfluenzaA__ADB89491

SEQ ID NO: 100085 - RNA, 1701 nt, Artificial Sequence
  derived and/or modified CDS sequence (opt2) from hemagglutinin__InfluenzaA__ADB89501
augaaggccauccucgucguccuccucuacaccuucgccaccgccaacgccgacacccucugcaucggcuaccacgccaacaacuccaccgacaccgucgacaccguccucgagaagaacgucaccgucacccacuccgucaaccuccucgaggacaagcacaacggcaagcucugcaagcuccgcggcgucgccccccuccaccucggcaagugcaacaucgccggcuggauccucggcaaccccgagugcgagucccucuccaccgccuccuccugguccuacaucgucgagaccuccuccuccgacaacggcaccugcuaccccggcgacuucaucgacuacgaggagcuccgcgagcagcucuccuccgucuccuccuucgagcgcuucgagaucuuccccaagaccuccuccuggcccaaccacgacuccaacaagggcgucaccgccgccugcccccacgccggcgccaaguccuucuacaagaaccucaucuggcucgucaagaagggcaacuccuaccccaagcucuccaaguccuacaucaacgacaagggcaaggagguccucguccucuggggcauccaccaccccuccaccuccgccgaccagcagucccucuaccagaacgccgacgccuacgucuucgucggcuccucccgcuacuccaagaaguucaagcccgagaucgccauccgccccaagguccgcgaccaggagggccgcaugaacuacuacuggacccucgucgagcccggcgacaagaucaccuucgaggccaccggcaaccucgucgucccccgcuacgccuucgccauggagcgcaacgccggcuccggcaucaucaucuccgacacccccguccacgacugcaacaccaccugccagacccccaagggcgccaucaacaccucccuccccuuccagaacauccaccccaucaccaucggcaagugccccaaguacgucaaguccaccaagcuccgccucgccaccggccuccgcaacguccccuccauccagucccgcggccucuucggcgccaucgccggcuucaucgagggcggcuggaccggccucgucgacggcugguacggcuaccaccaccagaacgagcagggcuccggcuacgccgccgaccucaaguccacccagaacgccaucgacgagaucaccaacaaggucaacuccgucaucgagaagaugaacacccaguucaccgccgucggcaaggaguucaaccaccucgagaagcgcaucgagaaccucaacaagaaggucgacgacggcuuccucgacaucuggaccuacaacgccgagcuccucguccuccucgagaacgagcgcacccucgacuaccacgacuccaacgucaagaaccucuacgagaagguccgcucccagcucaagaacaacgccaaggagaucggcaacggcugcuucgaguucuaccacaagugcgacaacaccugcauggaguccgucaagaacggcaccuacgacuaccccaaguacuccgaggaggccaagcucaaccgcgaggagaucgacggcgucaagcucgaguccacccgcaucuaccagauccucgccaucuacuccaccgucgccuccucccucguccucgucgucucccucggcgccaucuccuucuggaugugcuccaacggcucccuccagugccgcaucugcaucuga

SEQ ID NO: 100086 - RNA, 1701 nt, Artificial Sequence; identical to SEQ ID NO: 98705
  derived and/or modified CDS sequence (opt2) from hemagglutinin__InfluenzaA__ADB89511

SEQ ID NO: 100087 - RNA, 1701 nt, Artificial Sequence; identical to SEQ ID NO: 99152
  derived and/or modified CDS sequence (opt2) from hemagglutinin__InfluenzaA__ADB89531

SEQ ID NO: 100088 - RNA, 1701 nt, Artificial Sequence; identical to SEQ ID NO: 99152
  derived and/or modified CDS sequence (opt2) from hemagglutinin__InfluenzaA__ADB89541

SEQ ID NO: 100089 - RNA, 1701 nt, Artificial Sequence; identical to SEQ ID NO: 99865
  derived and/or modified CDS sequence (opt2) from hemagglutinin__InfluenzaA__ADB89551

SEQ ID NO: 100090 - RNA, 1701 nt, Artificial Sequence; identical to SEQ ID NO: 98705
  derived and/or modified CDS sequence (opt2) from hemagglutinin__InfluenzaA__ADB89561

SEQ ID NO: 100091 - RNA, 1701 nt, Artificial Sequence; identical to SEQ ID NO: 98705
  derived and/or modified CDS sequence (opt2) from hemagglutinin__InfluenzaA__ADB89571

SEQ ID NO: 100092 - RNA, 1701 nt, Artificial Sequence; identical to SEQ ID NO: 98705
  derived and/or modified CDS sequence (opt2) from hemagglutinin__InfluenzaA__ADB89581

SEQ ID NO: 100093 - RNA, 1701 nt, Artificial Sequence
  derived and/or modified CDS sequence (opt2) from hemagglutinin__InfluenzaA__ADB89591
augaaggccauccucgucguccuccucuacaccuucgccaccgccaacgccgacacccucugcaucggcuaccacgccaacaacuccaccgacaccgucgacaccguccucgagaagaacgucaccgucacccacuccgucaaccuccucgaggacaagcacaacggcaagcucugcaagcuccgcggcgucgccccccuccaccucggcaagugcaacaucgccggcuggauccucggcaaccccgagugcgagucccucuccaccgccuccuccugguccuacaucgucgagaccuccuccuccgacaacggcaccugcuaccccggcgacuucaucgacuacgaggagcuccgcgagcagcucuccuccgucuccuccuucgagcgcuucgagaucuuccccaagaccuccuccuggcccaaccacgacuccaacaagggcgucaccgccgccugcccccacgccggcgccaaguccuucuacaagaaccucaucuggcucgucaagaagggcaacuccuaccccaagcucuccaaguccuacaucaacgacaagggcaaggagguccucguccucuggggcauccaccaccccuccaccuccgccgaccagcagucccucuaccagaacgccgacgccuacgucuucgucggcaccucccgcuacuccaagaaguucaagcccgagaucgccauccgccccaagguccgcgagcaggagggccgcaugaacuacuacugggcccucgucgagcccggcgacaagaucaccuucgaggccaccggcaaccucgucgucccccgcuacgccuucgccauggagcgcaacgccggcuccggcaucaucaucuccgacacccccguccacgacugcaacaccaccugccagacccccaagggcgccaucaacaccucccuccccuuccagaacauccacuccaucaccaucggcaagugccccaaguacgucaaguccaccaagcuccgccucgccaccggccuccgcaacguccccuccauccagucccgcggccucuucggcgccaucgccggcuucaucgagggcggcuggaccggcauggucgacggcugguacggcuaccaccaccagaacgagcagggcuccggcuacgccgccgaccucaaguccacccagaacgccaucgacgagaucaccaacaaggucaacuccgucaucgagaagaugaacacccaguucaccgccgucggcaaggaguucaaccaccucgagaagcgcaucgagaaccucaacaagaaggucgacgacggcuuccucgacaucuggaccuacaacgccgagcuccucguccuccucgagaacgagcgcacccucgacuaccacgacuccaacgucaagaaccucuacgagaagguccgcucccagcucaagaacaacgccaaggagaucggcaacggcugcuucgaguucuaccacaagugcgacaacaccugcauggaguccgucaagaacggcaccuacgacuaccccaaguacuccgaggaggccaagcucaaccgcgaggagaucgacggcgucaagcucgaguccacccgcaucuaccagauccucgccaucuacuccaccgucgccuccucccucguccucgucgucucccucggcgccaucuccuucuggaugugcuccaacggcucccuccagugccgcaucugcaucuga

SEQ ID NO: 100094 - RNA, 1701 nt, Artificial Sequence
  derived and/or modified CDS sequence (opt2) from hemagglutinin__InfluenzaA__ADB89601
augaaggccaucaucgucguccuccucuacaccuucgccaccgccaacgccgacacccucugcaucggcuaccacgccaacaacuccaccgacaccgucgacaccguccucgagaagaacgucaccgucacccacuccgucaaccuccucgaggacaagcacaacggcaagcucugcaagcuccgcggcgucgccccccuccaccucggcaagugcaacaucgccggcuggauccucggcaaccccgagugcgagucccucuccaccgccuccuccugguccuacaucgucgagaccuccuccuccgacaacggcaccugcuaccccggcgacuucaucgacuacgaggagcuccgcgagcagcucuccuccgucuccuccuucgagcgcuucgagaucuuccccaagaccuccuccuggcccaaccacgacuccaacaagggcgucaccgccgccugcccccacgccggcgccaaguccuucuacaagaaccucaucuggcucgucaagaagggcaacuccuaccccaagcucuccaaguccuacaucaacgacaagggcaaggagguccucguccucuggggcauccaccaccccuccaccuccgccgaccagcagucccucuaccagaacgccgacgccuacgucuucgucggcaccucccgcuacuccaagaaguucaagcccgagaucgccauccgccccaagguccgcgaccaggagggccgcaugaacuacuacuggacccucgucgagcccggcgacaagaucaccuucgaggccaccggcaaccucgucgucccccgcuacgccuucgccauggagcgcaacgccggcuccggcaucaucaucuccgacacccccguccacgacugcaacaccaccugccagacccccaagggcgccaucaacaccucccuccccuuccagaacauccaccccaucaccaucggcaagugccccaaguacgucaaguccaccaagcuccgccucgccaccggccuccgcaacguccccuccauccagucccgcggccucuucggcgccaucgccggcuucaucgagggcggcuggaccggcauggucgacggcugguacggcuaccaccaccagaacgagcagggcuccggcuacgccgccgaccucaaguccacccagaacgccaucgacaagaucaccaacaaggucaacuccgucaucgagaagaugaacacccaguucaccgccgucggcaaggaguucaaccaccucgagaagcgcaucgagaaccucaacaagaaggucgacgacggcuuccucgacaucuggaccuacaacgccgagcuccucguccuccucgagaacgagcgcacccucgacuaccacgacuccaacgucaagaaccucuacgagaagguccgcucccagcucaagaacaacgccaaggagaucggcaacggcugcuucgaguucuaccacaagugcgacaacaccugcauggaguccgucaagaacggcaccuacgacuaccccaaguacuccgaggaggccaagcucaaccgcgaggagaucgacggcgucaagcucgaguccacccgcaucuaccagauccucaccaucuacuccaccgucgccuccucccucguccucgucgucucccucggcgccaucuccuucuggaugugcuccaacggcucccuccagugccgcaucugcaucuga

SEQ ID NO: 100095 - RNA, 1701 nt, Artificial Sequence; identical to SEQ ID NO: 99869
  derived and/or modified CDS sequence (opt2) from hemagglutinin__InfluenzaA__ADB89611

SEQ ID NO: 100096 - RNA, 1701 nt, Artificial Sequence; identical to SEQ ID NO: 99869
  derived and/or modified CDS sequence (opt2) from hemagglutinin__InfluenzaA__ADB89621

SEQ ID NO: 100097 - RNA, 1701 nt, Artificial Sequence
  derived and/or modified CDS sequence (opt2) from hemagglutinin__InfluenzaA__ADB89631
augaaggccauccucaucguccuccucuacaccuucgccaccgccaacgccgacacccucugcaucggcuaccacgccaacaacuccaccgacaccgucgacaccguccucgagaagaacgucaccgucacccacuccgucaaccuccucgaggacaagcacaacggcaagcucugcaagcuccgcggcgucgccccccuccaccucggcaagugcaacaucgccggcuggauccucggcaaccccgagugcgagucccucuccaccgccuccuccugguccuacaucgucgagaccuccuccuccgacaacggcaccugcuaccccggcgacuucaucgacuacgaggagcuccgcgagcagcucuccuccgucuccuccuucgagcgcuucgagaucuuccccaagaccuccuccuggcccaaccacgacuccaacaagggcgucaccgccgccugcccccacgccggcgccaaguccuucuacaagaaccucaucuggcucgucaagaagggcaacuccuaccccaagcucuccaaguccuacaucaacgacaagggcaaggagguccucguccucuggggcauccaccaccccuccaccuccgccgaccagcagucccucuaccagaacgccgacgccuacgucuucgucggcaccucccgcuacuccaagaaguucaagcccgagaucgccauccgccccaagguccgcgaccaggagggccgcaugaacuacuacuggacccucgucgagcccggcgacaagaucaccuucgaggccaccggcaaccucgucgucccccgcuacgccuucgccauggagcgcaacgccggcuccggcaucaucaucuccgacacccccguccacgacugcaacaccaccugccagacccccaagggcgccaucaacaccucccuccccuuccagaacauccaccccaucaccaucggcaagugccccaaguacgucaaguccaccaagcuccgccucgccaccggccuccgcaacauccccuccauccagucccgcggccucuucggcgccaucgccggcuucaucgagggcggcuggaccggcauggucgacggcugguacggcuaccaccaccagaacgagcagggcuccggcuacgccgccgaccucaaguccacccagaacgccaucgacgagaucaccaacaaggucaacuccgucaucgagaagaugaacacccaguucaccgccgucggcaaggaguucaaccaccucgagaagcgcaucgagaaccucaacaagaaggucgacgacggcuuccucgacaucuggaccuacaacgccgagcuccucguccuccucgagaacgagcgcacccucgacuaccacgacuccaacgucaagaaccucuacgagaagguccgcucccagcucaagaacaacgccaaggagaucggcaacggcugcuucgaguucuaccacaagugcgacaacaccugcauggaguccgucaagaacggcaccuacgacuaccccaaguacuccgaggaggccaagcucaaccgcgaggagaucgacggcgucaagcucgaguccacccgcaucuaccagauccucgccaucuacuccaccgucgccuccucccucguccucgucgucucccucggcgccaucuccuucuggaugugcuccaacggcucccuccagugccgcaucugcaucuga

SEQ ID NO: 100098 - RNA, 1701 nt, Artificial Sequence; identical to SEQ ID NO: 99869
  derived and/or modified CDS sequence (opt2) from hemagglutinin__InfluenzaA__ADB89641

SEQ ID NO: 100099 - RNA, 1701 nt, Artificial Sequence; identical to SEQ ID NO: 98705
  derived and/or modified CDS sequence (opt2) from hemagglutinin__InfluenzaA__ADB89651

SEQ ID NO: 100100 - RNA, 1701 nt, Artificial Sequence; identical to SEQ ID NO: 98705
  derived and/or modified CDS sequence (opt2) from hemagglutinin__InfluenzaA__ADB89661

SEQ ID NO: 100101 - RNA, 1701 nt, Artificial Sequence; identical to SEQ ID NO: 99869
  derived and/or modified CDS sequence (opt2) from hemagglutinin__InfluenzaA__ADB89671

SEQ ID NO: 100102 - RNA, 1701 nt, Artificial Sequence; identical to SEQ ID NO: 98705
  derived and/or modified CDS sequence (opt2) from hemagglutinin__InfluenzaA__ADB89681

SEQ ID NO: 100103 - RNA, 1701 nt, Artificial Sequence; identical to SEQ ID NO: 98705
  derived and/or modified CDS sequence (opt2) from hemagglutinin__InfluenzaA__ADB89691

SEQ ID NO: 100104 - RNA, 1701 nt, Artificial Sequence; identical to SEQ ID NO: 99807
  derived and/or modified CDS sequence (opt2) from hemagglutinin__InfluenzaA__ADB89701

SEQ ID NO: 100105 - RNA, 1701 nt, Artificial Sequence
  derived and/or modified CDS sequence (opt2) from hemagglutinin__InfluenzaA__ADB89711
augaaggccauccucgucguccuccucuacaccuucgccaccgccaacgccgacacccucugcaucggcuaccacgccaacaacuccaccgacaccgucgacaccguccucgagaagaacgucaccgucacccacuccgucaaccuccucgaggacaagcacaacggcaagcucugcaagcuccgcggcgucgccccccuccaccucggcaagugcaacaucgccggcuggauccucggcaaccccgagugcgagucccucuccaccgccuccuccugguccuacaucgucgagaccuccuccuccggcaacggcaccugcuaccccggcgacuucaucgacuacgaggagcuccgcgagcagcucuccuccgucuccuccuucgagcgcuucgagaucuuccccaagaccuccuccuggcccaaccacgacuccaacaagggcgucaccgccgccugcccccacgccggcgccaaguccuucuacaagaaccucaucuggcucgucaagaagggcaacuccuaccccaagcucuccaaguccuacaucaacgacaagggcaaggagguccucguccucuggggcauccaccaccccuccaccuccgccgaccagcagucccucuaccagaacgccgacgccuacgucuucgucggcaccucccgcuacuccaagaaguucaagcccgagaucgccauccgccccaagguccgcgaccaggagggccgcaugaacuaccacuggacccucgucgagcccggcgacaagaucaccuucgaggccaccggcaaccucgucgucccccgcuacgccuucgccauggagcgcaacgccggcuccggcaucaucaucuccgacacccccguccacgacugcaacaccaccugccagacccccaagggcgccaucaacaccucccuccccuuccagaacauccaccccaucaccaucggcaagugccccaaguacgucaaguccaccaagcuccgccucgccaccggccuccgcaacguccccuccauccagucccgcggccucuucggcgccaucgccggcuucaucgagggcggcuggaccggcauggucgacggcugguacggcuaccaccaccagaacgagcagggcuccggcuacgccgccgaccucaaguccacccagaacgccaucgacgagaucaccaacaaggucaacuccgucaucgagaagaugaacacccaguucaccgccgucggcaaggaguucaaccaccucgagaagcgcaucgagaaccucaacaagaaggucgacgacggcuuccucgacaucuggaccuacaacgccgagcuccucguccuccucgagaacgagcgcacccucgacuaccacgacuccaacgucaagaaccucuacgagaagguccgcucccagcucaagaacaacgccaaggagaucggcaacggcugcuucgaguucuaccacaagugcgacaacaccugcauggaguccgucaagaacggcaccuacgacuaccccaaguacuccgaggaggccaagcucaaccgcgaggagaucgacggcgucaagcucgaguccacccgcaucuaccagauccucgccaucuacuccaccgucgccuccucccucguccucgucgucucccucggcgccaucuccuucuggaugugcuccaacggcucccuccagugccgcaucugcaucuga

SEQ ID NO: 100106 - RNA, 1701 nt, Artificial Sequence
  derived and/or modified CDS sequence (opt2) from hemagglutinin__InfluenzaA__ADB89721
augaagaccaucaucgcccucuccuacauccucugccucgucuucgcccagaagcuccccggcaacgacaacuccaccgccacccucugccucggccaccacgccguccccaacggcaccaucgucaagaccaucaccaacgaccagaucgaggucaccaacgccaccgagcucguccaguccuccuccaccggcgagaucugcgacuccccccaccagauccucgacggcaagaacugcacccucaucgacgcccuccucggcgacccccagugcgacggcuuccagaacaagaagugggaccucuucgucgagcgcuccaaggccuacuccaacugcuaccccuacgacguccccgacuacgccucccuccgcucccucgucgccuccuccggcacccucgaguucgacaacgaguccuucaacuggaccggcgucacccagaacggcaccuccuccgccugcauccgccgcuccaagaacuccuucuucucccgccucaacuggcucacccaccucaacuucaaguaccccgcccucaacgucaccaugcccaacaacgagcaguucgacaagcucuaccucuggggcguccaccaccccggcaccgacaaggaccagaucuuccucuacgcccaggccuccggccgcaucaccgucuccaccaagcgcucccagcagaccgucauccccaacaucggcucccgcccccgcguccgcaacauccccucccgcaucuccaucuacuggaccaucgucaagcccggcgacauccuccucaucaacuccaccggcaaccucaucgccccccgcggcuacuucaagauccaguccggcaaguccuccaucaugcgcuccgacgcccccaucggcaagugcaacuccgagugcaucacccccaacggcuccauccccaacgacaagcccuuccagaacgucaaccgcaucaccuacggcgccugcccccgcuacgucaagcagaacacccucaagcucgccaccggcaugcgcaacguccccgagaagcagacccgcggcaucuucggcgccaucgccggcuucaucgagaacggcugggagggcauggucgacggcugguacggcuuccgccaccagaacuccgagggccgcggccaggccgccgaccucaaguccacccaggccgccaucgaccagaucaacggcaagcucaaccgccucaucggcaagaccaacgagaaguuccaccagaucgagaaggaguucuccgaggucgagggccgcauccaggaccucgagaaguacgucgaggacaccaagaucgaccucugguccuacaacgccgagcuccucgucgcccucgagaaccagcacaccaucgaccucaccgacuccgagaugaacaagcucuucgagaagaccaagaagcagcuccgcgagaacgccgaggacaugggcaacggcugcuucaagaucuaccacaagugcgacaacgccugcaucggcuccauccgcaacggcaccuacgaccacgacgucuaccgcgacgaggcccucaacaaccgcuuccagaucaagggcgucgagcucaaguccggcuacaaggacuggauccucuggaucuccuucgccaucuccugcuuccuccucugcgucgcccuccucggcuucaucaugugggccugccagaagggcaacauccgcugcaacaucugcaucuga

SEQ ID NO: 100107 - RNA, 1701 nt, Artificial Sequence
  derived and/or modified CDS sequence (opt2) from hemagglutinin__InfluenzaA__ADB90360
augaaggccauccucgucguccuccucuacaccuucgccaccgccaacgccgacacccucugcaucggcuaccacgccaacaacuccaccgacaccgucgacaccguccucgagaagaacgucaccgucacccacuccgucaaccuccucgaggacaagcacaacggcaagcucugcaagcuccgcggcgucgccccccuccaccucggcaagugcaacaucgccggcuggauccucggcaaccccgagugcgagucccucuccaccgccuccuccugguccuacaucgucgagaccuccuccuccaacaacggcaccugcuaccccggcgacuucaucgacuacgaggagcuccgcgagcagcucuccuccgucuccuccuucgagcgcuucgagaucuuccccaagaccuccuccuggcccaaccacgaccccaacaagggcgucaccgccgccugcccccacgccggcgccaaguccuucuacaagaaccucaucuggcucgucaagaagggcaacuccuaccccaagcucuccaaguccuacaucaacgacaagggcaaggagguccucguccucuggggcauccaccaccccuccaccuccgccgaccagcagucccucuaccagaacgccgacgccuacgucuucgucggcaccucccgcuacuccaagaaguucaagcccgagaucgccauccgccccaagguccgcggccaggagggccgcaugaacuacuacuggacccucgucgagcccggcgacaagaucaccuucgaggccaccggcaaccucgucgucccccgcuacgccuucgccauggagcgcaacgccggcuccggcaucaucaucuccgacacccccguccacgacugcaacaccaccugccagacccccaagggcgccaucaacaccucccuccccuuccagaacauccaccccaucaccaucggcaagugccccaaguacgucaaguccaccaagcuccgccucgccaccggccuccgcaacauccccuccauccagucccgcggccucuucggcgccaucgccggcuucaucgagggcggcuggaccggcauggucgacggcugguacggcuaccaccaccagaacgagcagggcuccggcuacgccgccgaccucaaguccacccagaacgccaucgacgagaucaccaacaaggucaacuccgucaucgagaagaugaacacccaguucaccgccgucggcaaggaguucaaccaccucgagaagcgcaucgagaaccucaacaagaaggucgacgacggcuuccucgacaucuggaccuacaacgccgagcuccucguccuccucgagaacgagcgcacccucgacuaccacgacuccaacgucaagaaccucuacgagaagguccgcucccagcucaagaacaacgccaaggagaucggcaacggcugcuucgaguucuaccacaagugcgacaacaccugcauggaguccgucaagaacggcaccuacgacuaccccaaguacuccgaggaggccaagcucaaccgcgaggagaucgacggcgucaagcucgaguccacccgcaucuaccagauccucgccaucuacuccaccgucgccuccucccucguccucgucgucucccucggcgccaucuccuucuggaugugcuccaacggcucccuccagugccgcaucugcaucuga

SEQ ID NO: 100108 - RNA, 1701 nt, Artificial Sequence
  derived and/or modified CDS sequence (opt2) from hemagglutinin__InfluenzaA__ADB90370
augaaggccauccucgucguccuccucuacaccuucgccaccgccaacgccgacacccucugcaucggcuaccacgccaacaacuccaccgacaccgucgacaccguccucgagaagaacgucaccgucacccacuccgucaaccuccucgaggacaagcacaacggcaagcucugcaagcuccgcggcgucgccccccuccaccucggcaagugcaacaucgccggcuggauccucggcaaccccgagugcgagucccucuccaccgccuccuccugguccuacaucgucgagaccuccuccuccgacaacggcaccugcuaccccggcgacuucaucgacuacgaggagcuccgcgagcagcucuccuccgucuccuccuucgagcgcuucgagaucuuccccaagaccuccuccuggcccaaccacgaccccaacaagggcgucaccgccgccugcccccacgccggcgccaaguccuucuacaagaaccucaucuggcucgucaagaagggcaacuccuaccccaagcucuccaaguccuacaucaacgacaagggcaaggagguccucguccucuggggcauccaccaccccuccaccuccgccgaccagcagucccucuaccagaacgccgacgccuacgucuucgucggcaccucccgcuacuccaagaaguucaagcccgagaucgccauccgccccaagguccgcggccaggagggccgcaugaacuacuacuggacccucgucgagcccggcgacaagaucaccuucgaggccaccggcaaccucgucgucccccgcuacgccuucgccauggagcgcaacgccggcuccggcaucaucaucuccgacacccccguccacgacugcaacaccaccugccagacccccaagggcgccaucaacaccucccuccccuuccagaacauccaccccaucaccaucggcaagugccccaaguacgucaaguccaccaagcuccgccucgccaccggccuccgcaacguccccuccauccagucccgcggccucuucggcgccaucgccggcuucaucgagggcggcuggaccggcauggucgacggcugguacggcuaccaccaccagaacgagcagggcuccggcuacgccgccgaccucaaguccacccagaacgccaucgacgagaucaccaacaaggucaacuccgucaucgagaagaugaacacccaguucaccgccgucggcaaggaguucaaccaccucgagaagcgcaucgagaaccucaacaagaaggucgacgacggcuuccucgacaucuggaccuacaacgccgagcuccucguccuccucgagaacgagcgcacccucgacuaccacgacuccaacgucaagaaccucuacgagaagguccgcucccagcucaagaacaacgccaaggagaucggcaacggcugcuucgaguucuaccacaagugcgacaacaccugcauggaguccgucaagaacggcaccuacgacuaccccaaguacuccgaggaggccaagcucaaccgcgaggagaucgacggcgucaagcucgaguccacccgcaucuaccagauccucgccaucuacuccaccgucgccuccucccucguccucgucgucucccucggcgccaucuccuucuggaugugcuccaacggcucccuccagugccgcaucugcaucuga

SEQ ID NO: 100109 - RNA, 1701 nt, Artificial Sequence; identical to SEQ ID NO: 99624
  derived and/or modified CDS sequence (opt2) from hemagglutinin__InfluenzaA__ADB90414

SEQ ID NO: 100110 - RNA, 1701 nt, Artificial Sequence; identical to SEQ ID NO: 99152
  derived and/or modified CDS sequence (opt2) from hemagglutinin__InfluenzaA__ADC32409

SEQ ID NO: 100111 - RNA, 1701 nt, Artificial Sequence
  derived and/or modified CDS sequence (opt2) from hemagglutinin__InfluenzaA__ADC32410
augaaggccauccucgucguccuccucuacaccuucgccaccgccaacgccgacacccucugcaucggcuaccacgccaacaacuccaccgacaccgucgacaccguccucgagaagaacgucaccgucacccacuccgucaaccuccucgaggacaagcacaacggcaagcucugcaagcuccgcggcgucgccccccuccaccucggcaagugcaacaucgccggcuggauccucggcaaccccgagugcgagucccucuccaccgccuccuccugguccuacaucgucgagaccuccuccuccgacaacggcaccugcuaccccggcgacuucaucgacuacgaggagcuccgcgagcagcucuccuccgucuccuccuucgagcgcuucgagaucuuccccaagaccuccuccuggcccaaccacgacuccaacaagggcgucaccgccgccugcccccacgccggcgccaaguccuucuacaagaaccucaucuggcucgucaagaagggcaacuccuaccccaagcucuccaaguccuacaucaacgacaagggcaaggagguccucguccucuggggcauccaccaccccuccaccuccgccgaccagcagucccucuaccagaacgccgacgccuacgucuucgucggcaccucccgcuacuccaagaaguucaagcccgagaucgccauccgccccaagguccgcgaccaggagggccgcaugaacuacuacuggacccucgucgagcccggcgacaagaucaccuucgaggccaccggcaaccucgucgucccccgcuacgccuucgccauggagcgcaacgccggcuccggcaucaucaucuccgacacccccguccacgacugcaacaccaccugccagacccccaagggcgccaucaacaccucccuccccuuccagaacauccaccccaucaccaucggcaagugccccaaguacgucaaguccaccaagcuccgccucgccaccggccuccgcaacguccccuccauccagucccgcggccucuucggcgccaucgccggcuucaucgagggcggcuggaccggcauggucgacggcugguacggcuaccaccaccagaacgagcagggcuccggcuacgccgccgaccucaaguccacccagaacgccaucgacgagaucaccaacaaggucaacuccgucaucgagaagaugaacacccaguucaccgccgucggcaaggaguucaaccaccucgagaagcgcaucgagaaccucaacaagaaggucgacgacggcuuccucgacaucuggaccuacaacgccgagcuccucguccuccucgagaacgagaagacccucgacuaccacgacuccaacgucaagaaccucuacgagaagguccgcucccagcucaagaacaacgccaaggagaucggcaacggcugcuucgaguucuaccacaagugcgacaacaccugcauggaguccgucaagaacggcaccuacgacuaccccaaguacuccgaggaggccaagcucaaccgcgaggagaucgacggcgucaagcucgaguccacccgcaucuaccagauccucgccaucuacuccaccgucgccuccucccucguccucgucgucucccucggcgccaucuccuucuggaugugcuccaacggcucccuccagugccgcaucugcaucuga

SEQ ID NO: 100112 - RNA, 1701 nt, Artificial Sequence
  derived and/or modified CDS sequence (opt2) from hemagglutinin__InfluenzaA__ADC32411
augaaggccauccucgucguccuccucuacaccuucgccaccgccaacgccgacacccucugcaucggcuaccacgccaacaacuccaccgacaccgucgacaccguccucgagaagaacgucaccgucacccacuccgucaaccuccucgaggacaagcacaacggcaagcucugcaagcuccgcggcgucgccccccuccaccucggcaagugcaacaucgccggcuggauccucggcaaccccgagugcgagucccucuccaccgccuccuccugguccuacaucgucgagaccuccuccuccgacaacggcaccugcuaccccggcgacuucaucgacuacgaggagcuccgcgagcagcucuccuccgucuccuccuucgagcgcuucgagaucuuccccaagaccuccuccuggcccaaccacgacuccaacaagggcgucaccgccgccugcccccacgccggcgccaaguccuucuacaagaaccucaucuggcucgucaagaagggcaacuccuaccccaagcucuccaaguccuacaucaacgacaagggcaaggagguccucguccucuggggcauccaccaccccuccaccuccgccgaccagcagucccucuaccagaacgccgacgccuacgucuucgucggcaccucccgcuacuccaagaaguucaagcccgagaucgccauccgccccaagguccgcgagcaggagggccgcaugaacuacuacuggacccucgucgagcccggcgacaagaucaccuucgaggccaccggcaaccucgucgucccccgcuacgccuucgccauggagcgcaacgccggcuccggcaucaucaucuccgacacccccguccacgacugcaacaccaccugccagacccccaagggcgccaucaacaccucccuccccuuccagaacauccacuccaucaccaucggcaagugccccaaguacgucaaguccaccaagcuccgccucgccaccggccuccgcaacguccccuccauccagucccgcggccucuucggcgccaucgccggcuucaucgagggcggcuggaccggcauggucgacggcugguacggcuaccaccaccagaacgagcagggcuccggcuacgccgccgaccucaaguccacccagaacgccaucgacgagaucaccaacaaggucaacuccgucaucgagaagaugaacacccaguucaccgccgucggcaaggaguucaaccaccucgccaagcgcaucgagaaccucaacaagaaggucgacgacggcuuccucgacaucuggaccuacaacgccgagcuccucguccuccucgagaacgagcgcacccucgacuaccacgacuccaacgucaagaaccucuacgagaagguccgcucccagcucaagaacaacgccaaggagaucggcaacggcugcuucgaguucuaccacaagugcgacaacaccugcauggaguccgucaagaacggcaccuacgacuaccccaaguacuccgaggaggccaagcucaaccgcgaggagaucgacggcgucaagcucgaguccacccgcaucuaccagauccucgccaucuacuccaccgucgccuccucccucguccucgucgucucccucggcgccaucuccuucuggaugugcuccaacggcucccuccagugccgcaucugcaucuga

SEQ ID NO: 100113 - RNA, 1701 nt, Artificial Sequence; identical to SEQ ID NO: 99058
  derived and/or modified CDS sequence (opt2) from hemagglutinin__InfluenzaA__ADC32412

SEQ ID NO: 100114 - RNA, 1701 nt, Artificial Sequence; identical to SEQ ID NO: 98705
  derived and/or modified CDS sequence (opt2) from hemagglutinin__InfluenzaA__ADC32413

SEQ ID NO: 100115 - RNA, 1701 nt, Artificial Sequence; identical to SEQ ID NO: 99152
  derived and/or modified CDS sequence (opt2) from hemagglutinin__InfluenzaA__ADC32414

SEQ ID NO: 100116 - RNA, 1701 nt, Artificial Sequence; identical to SEQ ID NO: 99152
  derived and/or modified CDS sequence (opt2) from hemagglutinin__InfluenzaA__ADC32415

SEQ ID NO: 100117 - RNA, 1701 nt, Artificial Sequence; identical to SEQ ID NO: 99152
  derived and/or modified CDS sequence (opt2) from hemagglutinin__InfluenzaA__ADC32416

SEQ ID NO: 100118 - RNA, 1701 nt, Artificial Sequence
  derived and/or modified CDS sequence (opt2) from hemagglutinin__InfluenzaA__ADC32417
augaaggccauccucgucguccuccucuacaccuucgccaccgccaacgccgacacccucugcaucggcuaccacgccaacaacuccaccgacaccgucgacaccguccucgagaagaacgucaccgucacccacuccgucaaccuccucgaguacaagcacaacggcaagcucugcaagcuccgcggcgucgccccccuccaccucggcaagugcaacaucgccggcuggauccucggcaaccccgagugcgagucccucuccaccgccuccuccugguccuacaucgucgagaccuccuccuccgacaacggcaccugcuaccccggcgacuucaucgacuacgaggagcuccgcgagcagcucuccuccgucuccuccuucgagcgcuucgagaucuuccccaagaccuccuccuggcccaaccacgacuccaacaagggcgucaccgccgccugcccccacgccggcgccaaguccuucuacaagaaccucaucuggcucgucaagaagggcaacuccuaccccaagcucuccaaguccuacaucaacgacaagggcaaggagguccucguccucuggggcauccaccaccccuccaccuccgccgaccagcagucccucuaccagaacgccgacgccuacgucuucgucggcaccucccgcuacuccaagaaguucaagcccgagaucgccauccgccccaagguccgcgagcaggagggccgcaugaacuacuacuggacccucgucgagcccggcgacaagaucaccuucgaggccaccggcaaccucgucgucccccgcuacgccuucgccauggagcgcaacgccggcuccggcaucaucaucuccgacacccccguccacgacugcaacaccaccugccagacccccaagggcgccaucaacaccucccuccccuuccagaacauccaccccaucaccaucggcaagugccccaaguacgucaaguccaccaagcuccgccucgccaccggccuccgcaacguccccuccauccagucccgcggccucuucggcgccaucgccggcuucaucgagggcggcuggaccggcauggucgacggcugguacggcuaccaccaccagaacgagcagggcuccggcuacgccgccgaccucaaguccacccagaacgccaucgacgagaucaccaacaaggucaacuccgucaucgagaagaugaacacccaguucaccgccgucggcaaggaguucaaccaccucgagaagcgcaucgagaaccucaacaagaaggucgacgacggcuuccucgacaucuggaccuacaacgccgagcuccucguccuccucgagaacgagcgcacccucgacuaccacgacuccaacgucaagaaccucuacgagaagguccgcucccagcucaagaacaacgccaaggagaucggcaacggcugcuucgaguucuaccacaagugcaacaacaccugcauggaguccgucaagaacggcaccuacgacuaccccaaguacuccgaggaggccaagcucaaccgcgaggagaucgacggcgucaagcucgaguccacccgcaucuaccagauccucgccaucuacuccaccgucgccuccucccucguccucgucgucucccucggcgccaucuccuucuggaugugcuccaacggcucccuccagugccgcaucugcaucuga

SEQ ID NO: 100119 - RNA, 1701 nt, Artificial Sequence; identical to SEQ ID NO: 99152
  derived and/or modified CDS sequence (opt2) from hemagglutinin__InfluenzaA__ADC32418

SEQ ID NO: 100120 - RNA, 1701 nt, Artificial Sequence
  derived and/or modified CDS sequence (opt2) from hemagglutinin__InfluenzaA__ADC32419
augaaggccauccucgucguccuccucuacaccuucgccaccgccaacgccgacacccucugcaucggcuaccacgccaacaacuccaccgacaccgucgacaccguccucgagaagaacgucaccgucacccacuccgucaaccuccucgaggacaagcacaacggcaagcucugcaagcuccgcggcgucgccccccuccaccucggcaagugcaacaucgccggcuggauccucggcaaccccgagugcgagucccucuccaccgccuccuccugguccuacaucgucgagaccuccuccuccgacaacggcaccugcuaccccggcgacuucaucgacuacgaggagcuccgcgagcagcucuccuccgucuccuccuucgagcgcuucgagaucuuccccaagaccuccuccuggcccaaccacgacuccaacaagggcgucaccgccgccugcccccacgccggcgccaaguccuucuacaagaaccucaucuggcucgucaagaagggcaacuccuaccccaagcucuccaaguccuacaucaacgacaagggcaaggagguccucguccucuggggcauccaccaccccuccaccuccgccgaccagcagucccucuaccagaacgccgacgccuacgucuucgucggcaccucccgcuacuccaagaaguucaagcccgagaucgccauccgccccaagguccgcgagcaggagggccgcaugaacuacuacuggacccucgucgagcccggcgacaagaucaccuucgaggccaccggcaaccucgucgucccccgcuacgccuucgccauggagcgcaacgccggcuccggcaucaucaucuccgacacccccguccacgacugcaacaccaccugccagacccccaagggcgccaucaacaccucccuccccuuccagaacauccacuccaucaccaucggcaagugccccaaguacgucaaguccaccaagcuccgccucgccaccggccuccgcaacguccccuccauccagucccgcggccucuucggcgccaucgccggcuucaucgagggcggcuggaccggcauggucgacggcugguucggcuaccaccaccagaacgaccagggcuccgccuacgccgccgaccucaaguccacccagaacgccaucgacgagaucaccaacaaggucaacuccgucaucgagaagaugaacacccaguucaccgccgucggcaaggaguucaaccaccucgagaagcgcaucgagaaccucaacaagaaggucgacgacggcuuccucgacaucuggaccuacaacgccgagcuccucguccuccucgagaacgagcgcacccucgacuaccacgacuccaacgucaagaaccucuacgagaagguccgcucccagcucaagaacaacgccaaggagaucggcaacggcugcuucgaguucuaccacaagugcgacaacaccugcauggaguccgucaagaacggcaccuacgacuaccccaaguacuccgaggaggccaagcucaaccgcgaggagaucgacggcgucaagcucgaguccacccgcaucuaccagauccucgccaucuacuccaccgucgccuccucccucguccucgucgucucccucggcgccaucuccuucuggaugugcuccaacggcucccuccagugccgcaucugcaucuga

SEQ ID NO: 100121 - RNA, 1701 nt, Artificial Sequence; identical to SEQ ID NO: 99152
  derived and/or modified CDS sequence (opt2) from hemagglutinin__InfluenzaA__ADC32420

SEQ ID NO: 100122 - RNA, 1701 nt, Artificial Sequence; identical to SEQ ID NO: 99152
  derived and/or modified CDS sequence (opt2) from hemagglutinin__InfluenzaA__ADC32421

SEQ ID NO: 100123 - RNA, 1701 nt, Artificial Sequence
  derived and/or modified CDS sequence (opt2) from hemagglutinin__InfluenzaA__ADC32422
augaaggccauccucgucguccuccucuacaccuucgccaccgccaacgccgacacccucugcaucggcuaccacgccaacaacuccaccgacaccgucgacaccguccucgagaagaacgucaccgucacccacuccgucaaccuccucgaggacaagcacaacggcaagcucugcaagcuccgcggcgucgccccccuccaccucggcaagugcaacaucgccggcuggauccucggcaaccccgagugcgagucccucuccaccgccuccuccugguccuacaucgucgagaccuccuccuccgacaacggcaccugcuaccccggcgacuucaucgacuacgaggagcuccgcgagcagcucuccuccgucuccuccuucgagcgcuucgagaucuuccccaagaccuccuccuggcccaaccacgacuccaacaagggcgucaccgccgccugcccccacgccggcgccaaguccuucuacaagaaccucaucuggcucgucaagaagggcaacuccuaccccaagcucuccaaguccuacaucaacgacaagggcaaggagguccucguccucuggggcauccaccaccccuccaccuccgccgaccagcagucccucuaccagaacgccgacgccuacgucuucgucggcaccucccgcuacuccaagaaguucaagcccgagaucgccauccgccccaagguccgcgagcaggagggccgcaugaacuacuacuggacccucgucgagcccggcgacaagaucaccuucgaggccaccggcaaccucauggucccccgcuacgccuucgccauggagcgcaacgccggcuccggcaucaucaucuccgacacccccguccacgacugcaacaccaccugccagacccccaagggcgccaucaacaccucccuccccuuccagaacauccacuccaucaccaucggcaagugccccaaguacgucaaguccaccaagcuccgccucgccaccggccuccgcaacguccccuccauccagucccgcggccucuucggcgccaucgccggcuucaucgagggcggcuggaccggcauggucgacggcugguacggcuaccaccaccagaacgagcagggcuccggcuacgccgccgaccucaaguccacccagaacgccaucgacgagaucaccaacaaggucaacuccgucaucgagaagaugaacacccaguucaccgccgucggcaaggaguucaaccaccucgagaagcgcaucgagaaccucaacaagaaggucgacgacggcuuccucgacaucuggaccuacaacgccgagcuccucguccuccucgagaacgagcgcacccucgacuaccacgacuccaacgucaagaaccucuacgagaagguccgcucccagcucaagaacaacgccaaggagaucggcaacggcugcuucgaguucuaccacaagugcgacaacaccugcauggaguccgucaagaacggcaccuacgacuaccccaaguacuccgaggaggccaagcucaaccgcgaggagaucgacggcgucaagcucgaguccacccgcaucuaccagauccucgccaucuacuccaccgucgccuccucccucguccucgucgucucccucggcgccaucuccuucuggaugugcuccaacggcucccuccagugccgcaucugcaucuga

SEQ ID NO: 100124 - RNA, 1701 nt, Artificial Sequence
  derived and/or modified CDS sequence (opt2) from hemagglutinin__InfluenzaA__ADC32423
augaaggccauccucgucguccuccucuacaccuucgccaccgccaacgccgacacccucugcaucggcuaccacgccaacaacuccaccgacaccgucgacaccguccucgagaagaacgucaccgucacccacuccgucaaccuccucgaggacaagcacaacggcaagcucugcaagcuccgcggcgucgccccccuccaccucggcaagugcaacaucgccggcuggauccucggcaaccccgagugcgagucccucuccaccgccuccuccugguccuacaucgucgagaccuccuccuccgacaacggcaccugcuaccccggcgacuucaucgacuacgaggagcuccgcgagcagcucuccuccgucuccuccuucgagcgcuucgagaucuuccccaagaccuccuccuggcccaaccacgacuccaacaagggcgucaccgccgccugcccccacgccggcgccaaguccuucuacaagaaccucaucuggcucgucaagaagggcaacuccuaccccaagcucuccaaguccuacaucaacgacaagggcaaggagguccucguccucuggggcauccaccaccccuccaccuccgccgaccagcagucccucuaccagaacgccgacgccuacgucuucgucggcaccucccgcuacuccaagaaguucaagcccgagaucgccauccgccccaagguccgcgagcaggagggccgcaugaacuacuacuggacccucgucgagcccggcgacaagaucaccuucgaggccaccggcaaccucgucgucccccgcuacgccuucgccauggagcgcaacgccggcuccggcaucaucaucuccgacacccccguccacgacugcaacaccaccugccagacccccaagggcgccaucaacaccucccuccccuuccagaacauccacuccaucaccaucggcaagugccccaaguacgucaaguccaccaagcuccgccucgccaccggccuccgcaacguccccuccauccagucccgcggccucuucggcgccaucgccggcuucaucgagggcggcuggaccggcauggucgacggcugguacggcuaccaccaccagaacgagcagggcuccggcuacgccgccgaccucaaguccacccagaacgccaucgacgagaucaccaacaaggucaacuccgucaucgagaagaugaacacccaguucaccgccgucggcaaggaguucaaccaccucgagaagcgcaucgagaaccucaacaagaaggucaacgacggcuuccucgacaucuggaccuacaacgccgagcuccucguccuccucgagaacgagcgcacccucgacuaccacgacuccaacgucaagaaccucuacgagaagguccgcucccagcucaagaacaacgccaaggagaucggcaacggcugcuucgaguucuaccacaagugcgacaacaccugcauggaguccgucaagaacggcaccuacgacuaccccaaguacuccgaggaggccaagcucaaccgcgaggagaucgacggcgucaagcucgaguccacccgcaucuaccagauccucgccaucuacuccaccgucgccuccucccucguccucgucgucucccucggcgccaucuccuucuggaugugcuccaacggcucccuccagugccgcaucugcaucuga

SEQ ID NO: 100125 - RNA, 1701 nt, Artificial Sequence
  derived and/or modified CDS sequence (opt2) from hemagglutinin__InfluenzaA__ADC32434
augaaggccauccucgucguccuccucuacaccuucgccaccgccaacgccgacacccucugcaucggcuaccacgccaacaacuccaccgacaccgucgacaccguccucgagaagaacgucaccgucacccacuccgucaaccuccucgaggacaagcacaacggcaagcucugcaagcuccgcggcgucgccccccuccaccucggcaagugcaacaucgccggcuggauccucggcaaccccgagugcgagucccucuccaccgccuccuccugguccuacaucgucgagaccuccuccuccgacaacggcaccugcuaccccggcgacuucaucgacuacgaggagcuccgcgagcagcucuccuccgucuccuccuucgagcgcuucgagaucuuccccaagaccuccuccuggcccaaccacgacuccaacaagggcgucaccgccgccugcccccacgccggcgccaaguccuucuacaagaaccucaucuggcucgucaagaagggcaacuccuaccccaagcucuccaaguccuacaucaacgacaagggcaaggagguccucguccucuggggcauccaccaccccuccaccuccgccgaccagcagucccucuaccagaacgccgacgccuacgucuucgucggcaccucccgcuacuccaagaaguucaagcccgagaucgccauccgccccaagguccgcgaccaggagggccgcaugaacuacuacuggacccucgucgagcccggcgacaagaucaccuucgaggccaccggcaaccucgucgucccccgcuacgccuucgccauggagcgcaacgccggcuccggcaucaucaucuccgacacccccguccacgacugcaacaccaccugccagacccccaagggcgccaucaacaccucccuccccuuccagaacauccaccccaucaccaucggcaagugccccaaguacgucaaguccaccaagcuccgccucgccaccggccuccgcaacguccccuccauccagucccgcggccucuucggcgccaucgccggcuucaucgagggcggcuggaccggcauggucgacggcugguacggcuaccaccaccagaacgagcagggcuccggcuacgccgccgaccucaaguccacccagcacgccaucgacgagaucaccaacaaggucaacuccgucaucgagaagaugaacacccaguucaccgccgucggcaaggaguucaaccaccucgagaagcgcaucgagaaccucaacaagaaggucgacgacggcuuccucgacaucuggaccuacaacgccgagcuccucguccuccucgagaacgagcgcacccucgacuaccacgacuccaacgucaagaaccucuacgagaagguccgcucccagcucaagaacaacgccaaggagaucggcaacggcugcuucgaguucuaccacaagugcgacaacaccugcauggaguccgucaagaacggcaccuacgacuaccccaaguacuccgaggaggccaagcucaaccgcgaggagaucgacggcgucaagcucgaguccacccgcaucuaccagauccucgccaucuacuccaccgucgccuccucccucguccucgucgucucccucggcgccaucuccuucuggaugugcuccaacggcucccuccagugccgcaucugcaucuga

SEQ ID NO: 100126 - RNA, 1701 nt, Artificial Sequence; identical to SEQ ID NO: 100125
  derived and/or modified CDS sequence (opt2) from hemagglutinin__InfluenzaA__ADC32435

SEQ ID NO: 100127 - RNA, 1701 nt, Artificial Sequence
  derived and/or modified CDS sequence (opt2) from hemagglutinin__InfluenzaA__ADC34940
augaagaccaucaucgcccucuccuacauccucugccucgucuucgcccagaagcuccccggcaacgacaacuccaccgccacccucugccucggccaccacgccguccccaacggcaccaucgucaagaccaucaccaacgaccagaucgaggucaccaacgccaccgagcucguccaguccuccuccaccggcggcaucugcgacuccccccaccagauccucgacggcgagaacugcacccucaucgacgcccuccucggcgacccccagugcgacggcuuccagaacaagaagugggaccucuucgucgagcgcuccaaggccuacuccaacugcuaccccuacgacguccccgacuacgccucccuccgcucccucgucgccuccuccggcacccucgaguucaacaacgagcgcuucaacuggaccggcgucacccagaacggcaccuccuccgccugcaagcgcggcuccgacaacuccuucuucucccgccucaacuggcucacccaccucaaguucaaguaccccgcccucaacgucaccaugcccaacaacgagaaguucgacaagcucuacaucuggggcguccaccaccccggcaccgacaacgaccagaucuuccuccacgcccaggccuccggccgcaucaccgucuccaccaagcgcucccagcagaccgucauccccaacaucggcucccgcccccgcguccgcaacauccccucccgcaucuccaucuacuggaccaucgucaagcccggcgacauccuccucaucaacuccaccggcaaccucaucgccccccgcggcuacuucaagauccgcuccggcaaguccuccaucaugaaguccgacgcccccaucggcaagugcaacuccgagugcaucacccccaacggcuccauccccaacgacaagcccuuccagaacgucaaccgcaucaccuacggcgccugcccccgcuacgucaagcagaacacccucaagcucgccaccggcaugcgcaacguccccgagaagcagacccgcggcaucuucggcgccaucgccggcuucaucgagaacggcugggagggcauggucgacggcugguacggcuuccgccaccagaacuccgagggcaucggccaggccgccgaccucaaguccacccaggccgccaucaaccagaucaacggcaagcucaaccgccucaucggcaagaccaacgagaaguuccaccagaucgagaaggaguucuccgaggucgagggccgcauccaggaccucgagaaguacgucgaggacaccaagaucgaccucugguccuacaacgccgagcuccucgucgcccucgagaaccagcacaccaucgaccucaccgacuccgagaugaacaagcucuucgagcgcaccaagaagcagcuccgcgagaacgccgaggacaugggcaacggcugcuucaagaucuaccacaagugcgacaacgccugcaucggcuccauccgcaacggcaccuacgaccacgacgucuaccgcgacgaggcccucaacaaccgcuuccagaucaagggcgucgagcucaaguccggcuacaaggacuggauccucuggaucuccuucgccaucuccugcuuccuccucugcgucgcccuccucggcuucaucaugugggccugccagaagggcaacauccgcugcaacaucugcaucuga

SEQ ID NO: 100128 - RNA, 1701 nt, Artificial Sequence; identical to SEQ ID NO: 100040
  derived and/or modified CDS sequence (opt2) from hemagglutinin__InfluenzaA__ADC38987

SEQ ID NO: 100129 - RNA, 1701 nt, Artificial Sequence
  derived and/or modified CDS sequence (opt2) from hemagglutinin__InfluenzaA__ADC38997
augaaggccauccucgucguccuccucuacaccuucgccaccgccaacgccgacacccucugcaucggcuaccacgccaacaacuccaccgacaccgucgacaccguccucgagaagaacgucaccgucacccacuccgucaaccuccucgaggacaagcacaacggcaagcucugcaagcuccgcggcgucgccccccuccaccucggcaagugcaacaucgccggcuggauccucggcaaccccgagugcgagucccucuccaccgccuccuccugguccuacaucgucgagaccuccuccuccgacaacggcaccugcuaccccggcgacuucaucgacuacgaggagcuccgcgagcagcucuccuccgucuccuccuucgagcgcuucgagaucuuccccaagaccuccuccuggcccaaccacgacuccaacaagggcgucaccgccgccugcccccacgccggcgccaaguccuucuacaagaaccucaucuggcucgucaagaagggcaacuccuaccccaagcucuccaaguccuacaucaacgacaagggcaaggacguccucguccucuggggcauccaccaccccuccaccuccgccgaccagcagucccucuaccagaacgccgacgccuacgucuucgucggcaccucccgcuacuccaagaaguucaagcccgagaucgccauccgccccaagguccgcgaccaggagggccgcaugaacuacuacuggacccucgucgagcccggcgacaagaucaccuucgaggccaccggcaaccucgucgucccccgcuacgccuucgccauggagcgcaacgccggcuccggcaucaucaucuccgacacccccguccacgacugcaacaccaccugccagacccccaagggcgccaucaacaccucccuccccuuccagaacauccaccccaucaccaucggcaagugccccaaguacgucaaguccaccaagcuccgccucgccaccggccuccgcaacguccccuccauccagucccgcggccucuucggcgccaucgccggcuucaucgagggcggcuggaccggcauggucgacggcugguacggcuaccaccaccagaacgagcagggcuccggcuacgccgccgaccucaaguccacccagaacgccaucgacgagaucaccaacaaggucaacuccgucaucgagaagaugaacacccaguucaccgccgucggcaaggaguucaaccaccucgagaagcgcaucgagaaccucaacaagaaggucgacgacggcuuccucgacaucuggaccuacaacgccgagcuccucguccuccucgagaacgagcgcacccucgacuaccacgacuccaacgucaagaaccucuacgagaagguccgcucccagcucaagaacaacgccaaggagaucggcaacggcugcuucgaguucuaccacaagugcgacaacaccugcauggaguccgucaagaacggcaccuacgacuaccccaaguacuccgaggaggccaagcucaaccgcgaggagaucgacggcgucaagcucgaguccacccgcaucuaccagauccucgccaucuacuccaccgucgccuccucccucguccucgucgucucccucggcgccaucuccuucuggaugugcuccaacggcucccuccagugccgcaucugcaucuga

SEQ ID NO: 100130 - RNA, 1701 nt, Artificial Sequence; identical to SEQ ID NO: 99806
  derived and/or modified CDS sequence (opt2) from hemagglutinin__InfluenzaA__ADC39007

SEQ ID NO: 100131 - RNA, 1698 nt, Artificial Sequence
  derived and/or modified CDS sequence (opt2) from hemagglutinin__InfluenzaA__ADC45604
augaaggccaagcuccucguccuccucugcaccuucaccgccaccuacgccgacaccaucugcaucggcuaccacgccaacaacuccaccgacaccgucgacaccguccucgagaagaacgucaccgucacccacuccgucaaccuccucgagaacucccacaacggcaagcucugccuccucaagggcaucgccccccuccagcucggcaacugcuccgucgccggcuggauccucggcaaccccgagugcgagcuccucaucuccaaggaguccugguccuacaucgucgagaagcccaaccccgagaacggcaccugcuaccccggccacuucgccgacuacgaggagcuccgcgagcagcucuccuccgucuccuccuucgagcgcuucgagaucuuccccaaggaguccuccuggcccaaccacaccgucaccggcgucuccgccuccugcucccacaacggcgaguccuccuucuaccgcaaccuccucuggcucaccggcaagaacggccucuaccccaaccucuccaaguccuacgccaacaacaaggagaaggagguccucguccucuggggcguccaccacccccccaacaucggcgaccagaaggcccucuaccacaccgagaacgccuacgucuccgucgucuccucccacuacucccgcaaguucacccccgagaucgccaagcgccccaagguccgcgaccaggagggccgcaucaacuacuacuggacccuccucgagcccggcgacaccaucaucuucgaggccaacggcaaccucaucgccccccgcuacgccuucgcccucucccgcggccucggcuccggcaucaucaacuccaacgcccccauggacaagugcgacgccaagugccagaccccccagggcgccaucaacuccucccuccccuuccagaacguccaccccgucaccaucggcgagugccccaaguacguccgcuccgccaagcuccgcauggucaccggccuccgcaacauccccuccauccagucccgcggccucuucggcgccaucgccggcuucaucgagggcggcuggaccggcauggucgacggcugguacggcuaccaccaccagaacgagcagggcuccggcuacgccgccgaccagaaguccacccagaacgccaucaacggcaucaccaacaaggucaacuccgucaucgagaagaugaacacccaguucaccgccgucggcaaggaguucaacaagcucgagcgccgcauggagaaccucaacaagaaggucgacgacggcuucaucgacaucuggaccuacaacgccgagcuccucguccuccucgagaacgagcgcacccucgacuuccacgacuccaacgucaagaaccucuacgagaaggucaagucccagcucaagaacaacgccaaggagaucggcaacggcugcuucgaguucuaccacaagugcaacgacgagugcauggaguccgucaagaacggcaccuacgacuaccccaaguacuccgaggaguccaagcucaaccgcgagaagaucgacggcgucaagcucgaguccaugggcgucuaccagauccucgccaucuacuccaccgucgccuccucccucguccuccucgucucccucggcgccaucuccuucuggaugugcuccaacggcucccuccagugccgcaucugcaucuga

SEQ ID NO: 100132 - RNA, 1698 nt, Artificial Sequence
  derived and/or modified CDS sequence (opt2) from hemagglutinin__InfluenzaA__ADC45626
augaaggucaagcuccucguccuccucugcaccuucaccgccaccuacgccgacaccaucugcaucggcuaccacgccaacaacuccaccgacaccgucgacaccguccucgagaagaacgucaccgucacccacuccgucaaccuccucgaggacaaccacaacggcaagcucugccuccucaagggcaucgccccccuccagcucggcaacugcuccgucgccggcuggauccucggcaaccccgagugcgagcuccucaucuccaaggaguccugguccuacaucgucgagaagcccaaccccgagaacggcaccugcuaccccggccacuucgccgacuacgaggagcuccgcgagcagcucuccuccgucuccuccuucgagcgcuucgagaucuuccccaaggaguccuccuggcccaaccacaccgucaccggcgucuccgccuccugcucccacaacggcgaguccuccuucuacaagaaccuccucuggcucaccggcaagaacggccucuaccccaaccucuccaaguccuacgccaacaacaaggagaaggagguccucguccucuggggcguccaccacccccccaacaucggcaaccagaugacccucuaccacaaggagaacgccuacgucuccgucgucuccucccacuacucccgcaaguucacccccgagaucgccaagcgccccaagguccgcgaccaggagggccgcaucaacuacuacuggacccuccucgagcccggcgacaccaucaucuucgaggccuccggcaaccucaucgccccccgcuacgccuucgcccucucccgcggcuucggcuccggcaucaucaacuccaacgcccccauggacgagugcgacgccaagugccagaccccccagggcgccaucaacuccucccuccccuuccagaacguccaccccgucaccaucggcgagugccccaaguacguccgcuccgccaagcuccgcauggucaccggccuccgcaacauccccuccauccagucccgcggccucuucggcgccaucgccggcuucaucgagggcggcuggaccggcauggucgacggcugguacggcuaccaccaccagaacgagcagggcuccggcuacgccgccgaccagaaguccacccagaacgccaucaacggcaucaccaacaaggucaacuccgucaucgagaagaugaacacccaguucaccgccgucggcaaggaguucaacaagcucgagcgccgcauggagaaccucaacaagaaggucgacgacggcuucaucgacgucuggaccuacaacgccgagcuccucguccuccucgagaacgagcgcacccucgacuuccacgacuccaacgucaagaaccucuacgagaaggucaagaaccagcucaagaacaacgccaaggagaucggcaacggcugcuucgaguucuaccacaagugcaacgacgagugcauggaguccgucaagaacggcaccuacgacuaccccaaguacuccgaggaguccaagcucucccgcgagaagaucgacggcgucaagcucgaguccaugggcgucuaccagauccucgccaucuacuccaccgucgccuccucccucguccuccucgucucccucggcgccaucuccuucuggaugugcuccaacggcucccuccagugccgcaucugcaucuga

SEQ ID NO: 100133 - RNA, 1698 nt, Artificial Sequence
  derived and/or modified CDS sequence (opt2) from hemagglutinin__InfluenzaA__ADC45637
augaaggucaagcuccucguccuccucugcaccuucaccgccaccuacgccgacaccaucugcaucggcuaccacgccaacaacuccaccgacaccgucgacaccguccucgagaagaacgucaccgucacccacuccgucaaccuccucgaggacaaccacaacggcaagcucugccuccucaagggcaucgccccccuccagcucggcaacugcuccgucgccggcuggauccucggcaaccccgagugcgagcuccucaucuccaaggaguccugguccuacaucgucgagaagcccaaccccgagaacggcaccugcuaccccggccacuucgccgacuacgaggagcuccgcgagcagcucuccuccgucuccuccuucgagcgcuucgagaucuuccccaaggaguccuccuggcccaaccacaccgucaccggcgucuccgccuccugcucccacaacggcgaguccuccuucuacaagaaccuccucuggcucaccggcaagaacggccucuaccccaaccucuccaaguccuacgccaacaacaaggagaaggagguccucguccucuggggcguccaccacccccccaacaucggcgaccagaugacccucuaccacaaggagaacgccuacgucuccgucgucuccucccacuacucccgcaaguucacccccgagaucgccaagcgccccaagguccgcgaccaggagggccgcaucaacuacuacuggacccuccucgagcccggcgacaccaucaucuucgaggccuccggcaaccucaucgccccccgcuacgccuucgcccucucccgcggcuucggcuccggcaucaucaacuccaacgcccccauggacgagugcgacgccaagugccagaccccccagggcgccaucaacuccucccuccccuuccagaacguccaccccgucaccaucggcgagugccccaaguacguccgcuccgccaagcuccgcauggucaccggccuccgcaacauccccuccauccagucccgcggccucuucggcgccaucgccggcuucaucgagggcggcuggaccggcauggucgacggcugguacggcuaccaccaccagaacgagcagggcuccggcuacgccgccgaccagaaguccacccagaacgccaucaacggcaucaccaacaaggucaacuccgucaucgagaagaugaacacccaguucaccgccgucggcaaggaguucaacaagcucgagcgccgcauggagaaccucaacaagaaggucgacgacggcuucaucgacgucuggaccuacaacgccgagcuccucguccuccucgagaacgagcgcacccucgacuuccacgacuccaacgucaagaaccucuacgagaaggucaagaaccagcucaagaacaacgccaaggagaucggcaacggcugcuucgaguucuaccacaagugcaacgacgagugcauggaguccgucaagaacggcaccuacgacuaccccaaguacuccgaggaguccaagcucucccgcgagaagaucgacggcgucaagcucgaguccaugggcgucuaccagauccucgccaucuacuccaccgucgccuccucccucguccuccucgucucccucggcgccaucuccuucuggaugugcuccaacggcucccuccagugccgcaucugcaucuga

SEQ ID NO: 100134 - RNA, 1698 nt, Artificial Sequence
  derived and/or modified CDS sequence (opt2) from hemagglutinin__InfluenzaA__ADC45648
augaaggucaagcuccucguccuccucugcaccuucgccgccaccuacgccgacaccaucugcaucggcuaccacgccaacaacuccaccgacaccgucgacaccguccucgagaagaacgucaccgucacccacuccgucaaccuccucgagaacucccacaacggcaagcucugccuccucaagggcaucgccccccuccagcucggcaacugcuccaucgccggcuggguccucggcaaccccgagugcgagcuccucaucuccaaggaguccugguccuacaucgucgagaagcccaaccccgagaacggcaccugcuaccccggccacuucgccgacuacgaggagcuccgcgagcagcucuccuccgucuccuccuucgagcgcuucgagaucuuccccaaggaguccuccuggcccaaccacaccgucaccggcgucuccgccuccugcucccacaacggcgaguccuccuucuaccgcaaccuccucuggcucaccggcaagaacggccucuaccccaaccucuccaaguccuacgccaacaacaaggagaaggagguccucguccucuggggcguccaccacccccccaacaucggcgaccagaaggcccucuaccacaccgagaacgccuacgucuccgucgucuccucccacuacucccgcaaguucacccccgagaucgccaagcgccccaagguccgcgaccaggagggccgcaucaacuacuacuggacccuccucgagcccggcgacaccaucaucuucgaggccaacggcaaccucaucgccccccgcuacgccuucgcccucucccgcggcuucggcuccggcaucaucaacuccaacgcccccauggacaagugcgacgccaagugccagaccccccagggcgccaucaacuccucccuccccuuccagaacguccaccccgucaccaucggcgagugccccaaguacguccgcuccgccaagcuccgcauggucaccggccuccgcaacauccccuccauccagucccgcggccucuucggcgccaucgccggcuucaucgagggcggcuggaccggcauggucgacggcugguacggcuaccaccaccagaacgagcagggcuccggcuacgccgccgaccagaaguccacccagaacgccaucaacggcaucaccaacaaggucaacuccgucaucgagaagaugaacacccaguucaccgccgucggcaaggaguucaacaagcucgagcgccgcauggagaaccucaacaagaaggucgacgacggcuucaucgacaucuggaccuacaacgccgagcuccucguccuccucgagaacgagcgcacccucgacuuccacgacuccaacgucaagaaccucuacgagaaggucaagucccagcucaagaacaacgccaaggagaucggcaacggcugcuucgaguucuaccacaagugcaacgacgagugcauggaguccgucaagaacggcaccuacgacuaccccaaguacuccgaggaguccaagcucaaccgcgagaagaucgacggcgucaagcucgaguccaugggcgucuaccagauccucgccaucuacuccaccgucgccuccucccucguccuccucgucucccucggcgccaucuccuucuggaugugcuccaacggcucccuccagugccgcaucugcaucuga

SEQ ID NO: 100135 - RNA, 1698 nt, Artificial Sequence
  derived and/or modified CDS sequence (opt2) from hemagglutinin__InfluenzaA__ADC45659
augaaggucaagcuccucguccuccucugcaccuucaccgccaccuacgccgacaccaucugcaucggcuaccacgccaacaacuccaccgacaccgucgacaccguccucgagaagaacgucaccgucacccacuccgucaaccuccucgagaacucccacaacggcaagcucugccuccucaagggcaucgccccccuccagcucggcaacugcuccgucgccggcuggauccucggcaaccccgagugcgagcuccucaucuccaaggaguccugguccuacaucgucgagaagcccaaccccgagaacggcaccugcuaccccggccacuucgccgacuacgaggagcuccgcgagcagcucuccuccgucuccuccuucgagcgcuucgagaucuuccccaagaaguccuccuggcccaaccacaccgucaccggcgucuccgccuccugcucccacaacggcgaguccuccuucuaccgcaaccuccucuggcucaccgagaagaacggccucuaccccaaccucuccaaguccuacgccaacaacaaggagaaggagguccucguccucuggggcguccaccacccccccaacaucggcgaccagaaggcccucuaccacaccgagaacgccuacgucuccgucgucuccucccacuacucccgcaaguucacccccgagaucgccaagcgccccaagguccgcgaccaggagggccgcaucaacuacuacuggacccuccucgagcccggcgacaccaucaucuucgaggccaacggcaaccucaucgccccccgcuacgccuucgcccucucccgcggcuucggcuccggcaucaucaacuccaacgcccccauggacaagugcgacgccaagugccagaccccccagggcgccaucaacuccucccuccccuuccagaacguccaccccgucaccaucggcgagugccccaaguacguccgcuccgccaagcuccgcauggucaccggccuccgcaacauccccuccauccagucccgcggccucuucggcgccaucgccggcuucaucgagggcggcuggaccggcauggucgacggcugguacggcuaccaccaccagaacgagcagggcuccggcuacgccgccgaccagaaguccacccagaacgccaucaacggcaucaccaacaaggucaacuccgucaucgagaagaugaacacccaguucaccgccgucggcaaggaguucaacaagcucgagcgccgcauggagaaccucaacaagaaggucgacgacggcuucaucgacaucuggaccuacaacgccgagcuccucguccuccucgagaacgagcgcacccucgacuuccacgacuccaacgucaagaaccucuacgagaaggucaagucccagcucaagaacaacgccaaggagaucggcaacggcugcuucgaguucuaccacaagugcaacgacgagugcauggaguccgucaagaacggcaccuacgacuaccccaaguacuccgaggaguccaagcucaaccgcgagaagaucgacggcgucaagcucgaguccaugggcgucuaccagauccucgccaucuacuccaccgucgccuccucccucguccuccucgucucccucggcgccaucuccuucuggaugugcuccaacggcucccuccagugccgcaucugcaucuga

SEQ ID NO: 100136 - RNA, 1698 nt, Artificial Sequence
  derived and/or modified CDS sequence (opt2) from hemagglutinin__InfluenzaA__ADC45670
augaaggucaagcuccucguccuccucugcaccuucaccgccaccuacgccgacaccaucugcaucggcuaccacgccaacaacuccaccgacaccgucgacaccguccucgagaagaacgucaccgucacccacuccgucaaccuccucgagaacucccacaacggcaagcucugccuccucaagggcaucgccccccuccagcucggcaacugcuccgucgccggcuggauccucggcaaccccgagugcgagcuccucaucuccaaggaguccugguccuacaucgucgagaagcccaaccccgagaacggcaccugcuaccccggccacuucgccgacuacgaggagcuccgcgagcagcucuccuccgucuccuccuucgagcgcuucgagaucuuccccaaggaguccuccuggcccaaccacaccgucaccggcggcuccgccuccugcucccacaacggcgaguccuccuucuaccgcaaccuccucuggcucaccggcaagaacggccucuaccccaaccucuccaaguccuacgccaacaacaaggagaaggagguccucguccucuggggcguccaccacccccccaacaucggcgaccagaaggcccucuaccacaccgagaacgccuacgucuccgucgucuccucccacuacucccgcaaguucacccccgagaucgccaagcgccccaagguccgcgaccaggagggccgcaucaacuacuacuggacccuccucgagcccggcgacaccaucaucuucgaggccaacggcaaccucaucgccccccgcuacgccuucgcccucucccgcggcuucggcuccggcaucaucaacuccaacgcccccauggacaagugcgacgccaagugccagaccccccagggcgccaucaacuccucccuccccuuccagaacguccaccccgucaccaucggcgagugccccaaguacguccgcuccgccaagcuccgcauggucaccggccuccgcaacauccccuccauccagucccgcggccucuucggcgccaucgccggcuucaucgagggcggcuggaccggcauggucgacggcugguacggcuaccaccaccagaacgagcagggcuccggcuacgccgccgaccagaaguccacccagaacgccaucaacggcaucaccaacaaggucaacuccgucaucgagaagaugaacacccaguucaccgccgucggcaaggaguucaacaagcucgagcgccgcauggagaaccucaacaagaaggucgacgacggcuucaucgacaucuggaccuacaacgccgagcuccucguccuccucgagaacgagcgcacccucgacuuccacgacuccaacgucaagaaccucuacgagaaggucaagucccagcucaagaacaacgccaaggagaucggcaacggcugcuucgaguucuaccacaagugcaacgacgagugcauggaguccgucaagaacggcaccuacgacuaccccaaguacuccgaggaguccaagcucaaccgcgagaagaucgacggcgucaagcucgaguccaugggcgucuaccagauccucgccaucuacuccaccgucgccuccucccucguccuccucgucucccucggcgccaucuccuucuggaugugcuccaacggcucccuccagugccgcaucugcaucuga

SEQ ID NO: 100137 - RNA, 1698 nt, Artificial Sequence
  derived and/or modified CDS sequence (opt2) from hemagglutinin__InfluenzaA__ADC45681
augaaggucaagcuccucguccuccucugcaccuucaccgccaccuacgccgacaccaucugcaucggcuaccacgccaacaacuccaccgacaccgucgacaccguccucgagaagaacgucaccgucacccacuccgucaaccuccucgaggacaaccacaacggcaagcucugccuccucaagggcaucgccccccuccagcucggcaacugcuccgucgccggcuggauccucggcaaccccgagugcgagcuccucaucuccaaggaguccugguccuacaucgucgagaagcccaaccccgagaacggcaccugcuaccccggccacuucgccgacuacgaggagcuccgcgagcagcucuccuccgccuccuccuucgagcgcuucgagaucuuccccaaggaguccuccuggcccaaccacaccgucaccggcgucuccgccuccugcucccacaacggcgaguccuccuucuacaagaaccuccucuggcucaccggcaagaacggccucuaccccaaccuccgcaaguccuacgccaacaacaaggagaaggagguccucguccucuggggcguccaccacccccccaacaucggcgaccagaugacccucuaccacaaggagaacgccuacgucuccgucgucuccucccacuacucccgcaaguucacccccgagaucgccaagcgccccaagguccgcgaccaggagggccgcaucaacuacuacuggacccuccucgagcccggcgacaccaucaucuucgaggccuccggcaaccucaucgccccccgcuacgccuucgcccucucccgcggcuucggcuccggcaucaucaacuccaacgcccccauggacgagugcgacgccaagugccagaccccccagggcgccaucaacuccucccuccccuuccagaacguccaccccgucaccaucggcgagugccccaaguacguccgcuccgccaagcuccgcauggucaccggccuccgcaacauccccuccauccagucccgcggccucuucggcgccaucgccggcuucaucgagggcggcuggaccggcauggucgacggcugguacggcuaccaccaccagaacgagcagggcuccggcuacgccgccgaccagaaguccacccagaacgccaucaacggcaucaccaacaaggucaacuccgucaucgagaagaugaacacccaguucaccgccgucggcaaggaguucaacaagcucgagcgccgcauggagaaccucaacaagaaggucgacgacggcuucaucgacgucuggaccuacaacgccgagcuccucguccuccucgagaacgagcgcacccucgacuuccacgacuccaacgucaagaaccucuacgagaaggucaagaaccagcucaagaacaacgccaaggagaucggcaacggcugcuucgaguucuaccacaagugcaacgacgagugcauggaguccgucaagaacggcaccuacgacuaccccaaguacuccgaggaguccaagcucucccgcgagaagaucgacggcgucaagcucgaguccaugggcgucuaccagauccucgccaucuacuccaccgucgccuccucccucguccuccucgucucccucggcgccaucuccuucuggaugugcuccaacggcucccuccagugccgcaucugcaucuga

SEQ ID NO: 100138 - RNA, 1698 nt, Artificial Sequence
  derived and/or modified CDS sequence (opt2) from hemagglutinin__InfluenzaA__ADC45692
augaaggucaagcuccucguccuccucugcaccuucaccgccaccuacgccgacaccaucugcaucggcuaccacgccaacaacuccaccgacaccgucgacaccguccucgagaagaacgucaccgucacccacuccgucaaccuccucgagaacucccacaacggcaagcucugccuccucaagggcaucgccccccuccagcucggcaacugcuccgucgccggcuggauccucggcaaccccgagugcgagcuccucaucuccaagaaguccugguccuacaucgucgagaagcccaaccccgagaacggcaccugcuaccccggccacuucgccgacuacgaggagcuccgcgagcagcucuccuccgucuccuccuucgagcgcuucgagaucuuccccaaggaguccuccuggcccaaccacaccgucaccggcgucuccgccuccugcucccacaacggcgaguccuccuucuaccgcaaccuccucuggcucaccggcaagaacggccucuaccccaaccucuccaaguccuacgccaacaacaaggagaaggagguccucguccucuggggcguccaccacccccccaacaucggcgaccagaaggcccucuaccacaccgagaacgccuacgucuccgucgucuccucccacuacucccgcaaguucacccccgagaucgccaagcgccccaagguccgcgaccaggagggccgcaucaacuacuacuggacccuccucgagcccggcgacaccaucaucuucgaggccaacggcaaccucaucgccccccgcuacgccuucgcccucucccgcggcuucggcuccggcaucaucaacuccaacgcccccauggacaagugcgacgccaagugccagaccccccagggcgccaucaacuccucccuccccuuccagaacguccaccccgucaccaucggcgagugccccaaguacguccgcuccgccaagcuccgcauggucaccggccuccgcaacauccccuccauccagucccgcggccucuucggcgccaucgccggcuucaucgagggcggcuggaccggcauggucgacggcugguacggcuaccaccaccagaacgagcagggcuccggcuacgccgccgaccagaaguccacccagaacgccaucaacggcaucaccaacaaggucaacuccgucaucgagaagaugaacacccaguucaccgccgucggcaaggaguucaacaagcucgagcgccgcauggagaaccucaacaagaaggucgacgacggcuucaucgacaucuggaccuacaacgccgagcuccucguccuccucgagaacgagcgcacccucgacuuccacgacuccaacgucaagaaccucuacgagaaggucaagucccagcucaagaacaacgccaaggagaucggcaacggcugcuucgaguucuaccacaagugcaacgacgagugcauggaguccgucaagaacggcaccuacgacuaccccaaguacuccgaggaguccaagcucaaccgcgagaagaucgacggcgucaagcucgaguccaugggcgucuaccagauccucgccaucuacuccaccgucgccuccucccucguccuccucgucucccucggcgccaucuccuucuggaugugcuccaacggcucccuccagugccgcaucugcaucuga

SEQ ID NO: 100139 - RNA, 1698 nt, Artificial Sequence; identical to SEQ ID NO: 99206
  derived and/or modified CDS sequence (opt2) from hemagglutinin__InfluenzaA__ADC45703

SEQ ID NO: 100140 - RNA, 1698 nt, Artificial Sequence
  derived and/or modified CDS sequence (opt2) from hemagglutinin__InfluenzaA__ADC45714
augaaggucaagcuccucguccuccucugcaccuucaccgccaccuacgccgacaccaucugcaucggcuaccacgccaacaacuccaccgacaccgucgacaccguccucgagaagaacgucaccgucacccacuccgucaaccuccucgaggacaaccacaacggcaagcucugccuccucaagggcaucgccccccuccagcucggcaacugcuccgucgccggcuggauccucggcaaccccgagugcgagcuccucaucuccaaggaguccugguccuacaucgucgagaagcccaaccccgagaacggcaccugcuaccccggccacuucgccgacuacgaggagcuccgcgagcagcucuccuccgucuccuccuucgagcgcuucgagaucuuccccaaggaguccuccuggcccaaccacaccgucaccggcgucuccgccuccugcucccacaacggcgaguccuccuucuacaagaaccuccucuggcucaccggcaagaacggccucuaccccaaccucuccaaguccuacgccaacaacaaggagaaggagguccucguccucuggggcguccaccacccccccaacaucggcgaccagaccacccucuaccacaaggagaacgccuacgucuccgucgucuccucccacuacucccgcaaguucacccccgagaucgccaagcgccccaagguccgcgaccaggagggccgcaucaacuacuacuggacccuccucgagcccggcgacaccaucaucuucgaggccuccggcaaccucaucgccccccgcuacgccuucgcccucucccgcggcuucggcuccggcaucaucaacuccaacgcccccauggacgagugcgacgccaagugccagaccccccagggcgccaucaacuccucccuccccuuccagaacguccaccccgucaccaucggcgagugccccaaguacguccgcuccgccaagcuccgcauggucaccggccuccgcaacauccccuccauccagucccgcggccucuucggcgccaucgccggcuucaucgagggcggcuggaccggcauggucgacggcugguacggcuaccaccaccagaacgagcagggcuccggcuacgccgccgaccagaaguccacccagaacgccaucaacggcaucaccaacaaggucaacuccgucaucgagaagaugaacacccaguucaccgccgucggcaaggaguucaacaagcucgagcgccgcauggagaaccucaacaagaaggucgacgacggcuucaucgacgucuggaccuacaacgccgagcuccucguccuccucgagaacgagcgcacccucgacuuccacgacuccaacgucaagaaccucuacgagaaggucaagaaccagcucaagaacaacgccaaggagaucggcaacggcugcuucgaguucuaccacaagugcaacgacgagugcauggaguccgucaagaacggcaccuacgacuaccccaaguacuccgaggaguccaagcucucccgcgagaagaucgacggcgucaagcucgaguccaugggcgucuaccagauccucgccaucuacuccaccgucgccuccucccucguccuccucgucucccucggcgccaucuccuucuggaugugcuccaacggcucccuccagugccgcaucugcaucuga

SEQ ID NO: 100141 - RNA, 1698 nt, Artificial Sequence; identical to SEQ ID NO: 99206
  derived and/or modified CDS sequence (opt2) from hemagglutinin__InfluenzaA__ADC45725

SEQ ID NO: 100142 - RNA, 1698 nt, Artificial Sequence
  derived and/or modified CDS sequence (opt2) from hemagglutinin__InfluenzaA__ADC45736
augaaggucaagcuccucguccuccucugcaccuucaccgccaccuacgccgacaccaucugcaucggcuaccacgccaacaacuccaccgacaccgucgacaccguccucgagaagaacgucaccgucacccacuccgucaaccuccucgagaacucccacaacggcaagcucugccuccucaagggcaucgccccccuccagcucggcaacugcuccgucgccggcuggauccucggcaaccccgagugcgagcuccucaucuccaaggaguccugguccuacaucgucgagaagcccaaccccgagaacggcaccugcuaccccggccacuucgccgacuacgaggagcuccgcgagcagcucuccuccgucuccuccuucgagcgcuucgagaucuuccccaaggaguccuccuggcccaaccacaccgucaccggcgucuccgccuccugcucccacaacggcgaguccuccuucuaccgcaaccuccucuggcucaccggcaagaacggccucuaccccaaccucuccaaguccuacgccaacaacaaggagaaggagguccucguccucuggggcguccaccacccccccaacaucggcgaccagaaggcccucuaccacaccgagaacaccuacgucuccgucgucuccucccacuacucccgcaaguucacccccgagaucgccaagcgccccaagguccgcgaccaggagggccgcaucaacuacuacuggacccuccucgagcccggcgacaccaucaucuucgaggccaacggcaaccucaucgccccccgcuacgccuucgcccucucccgcggcuucggcuccggcaucaucaacuccaacgcccccauggacaagugcgacgccaagugccagaccccccagggcgccaucaacuccucccuccccuuccagaacguccaccccgucaccaucggcgagugccccaaguacguccgcuccgccaagcuccgcauggucaccggccuccgcaacauccccuccauccagucccgcggccucuucggcgccaucgccggcuucaucgagggcggcuggaccggcauggucgacggcugguacggcuaccaccaccagaacgagcagggcuccggcuacgccgccgaccagaaguccacccagaacgccaucaacggcaucaccaacaaggucaacuccgucaucgagaagaugaacacccaguucaccgccgucggcaaggaguucaacaagcucgagcgccgcauggagaaccucaacaagaaggucgacgacggcuucaucgacaucuggaccuacaacgccgagcuccucguccuccucgagaacgagcgcacccucgacuuccacgacuccaacgucaagaaccucuacgagaaggucaagucccagcucaagaacaacgccaaggagaucggcaacggcugcuucgaguucuaccacaagugcaacgacgagugcauggaguccgucaagaacggcaccuacgacuaccccaaguacuccgaggaguccaagcucaaccgcgagaagaucgacggcgucaagcucgaguccaugggcgucuaccagauccucgccaucuacuccaccgucgccuccucccucguccuccucgucucccucggcgccaucuccuucuggaugugcuccaacggcucccuccagugccgcaucugcaucuga

SEQ ID NO: 100143 - RNA, 1698 nt, Artificial Sequence; identical to SEQ ID NO: 98524
  derived and/or modified CDS sequence (opt2) from hemagglutinin__InfluenzaA__ADC45747

SEQ ID NO: 100144 - RNA, 1698 nt, Artificial Sequence
  derived and/or modified CDS sequence (opt2) from hemagglutinin__InfluenzaA__ADC45758
augaaggucaagcuccucguccuccucugcaccuucaccgccaccuacgccgacaccaucugcaucggcuaccacgccaacaacuccaccgacaccgucgacaccguccucgagaagaacgucaccgucacccacuccgucaaccuccucgagaacucccacaacggcaagcucugccuccucaagggcaucgccccccuccagcucggcaacugcuccgucgccggcuggauccucggcaaccccgagugcgagcuccucaucuccaaggaguccugguccuacaucgucgagaagcccaaccccgagaacggcaccugcuaccccggccacuucgccgacuacgaggagcuccgcgagcagcucuccuccgucuccuccuucgagcgcuucgagaucuuccccaaggaguccuccuggcccaaccacaccgucaccggcgucuccgccuccugcucccacaacggcgagaacuccuucuaccgcaaccuccucuggcucaccggcaagaacggccucuaccccaaccucuccaaguccuacgccaacaacaaggagaaggagguccucguccucuggggcguccaccacccccccaacaucgccgaccagaagacccucuaccacaccgagaacgccuacgucuccgucgucuccucccacuacucccgcaaguucacccccgagaucgccaagcgccccaagguccgcgaccaggagggccgcaucaacuacuacuggacccuccucgagcccggcgacaccaucaucuucgaggccaacggcaaccucaucgccccccgcuacgccuucgcccucucccgcggcuucggcuccggcaucaucaacuccaacgcccccauggacaagugcgacgccaagugccagaccccccagggcgccaucaacuccucccuccccuuccagaacguccaccccgucaccaucggcgagugccccaaguacguccgcuccgccaagcuccgcauggucaccggccuccgcaacauccccuccauccagucccgcggccucuucggcgccaucgccggcuucaucgagggcggcuggaccggcauggucgacggcugguacggcuaccaccaccagaacgagcagggcuccggcuacgccgccgaccagaaguccacccagaacgccaucaacggcaucaccaacaaggucaacuccgucaucgagaagaugaacacccaguucaccgccgucggcaaggaguucaacaagcucgagcgccgcauggagaaccucaacaagaaggucgacgacggcuucaucgacaucuggaccuacaacgccgagcuccucguccuccucgagaacgagcgcacccucaacuuccacgacuccaacgucaagaaccucuacgagaaggucaagucccagcucaagaacaacgccaaggagaucggcaacggcugcuucgaguucuaccacaagugcaacgacgagugcauggaguccgucaagaacggcaccuacgacuaccccaaguacuccgaggaguccaagcucaaccgcgagaagaucgacggcgucaagcucgaguccaugggcgucuaccagauccucgccaucuacuccaccgucgccuccucccucguccuccucgucucccucggcgccaucuccuucuggaugugcuccaacggcucccuccagugccgcaucugcaucuga

SEQ ID NO: 100145 - RNA, 1698 nt, Artificial Sequence; identical to SEQ ID NO: 99662
  derived and/or modified CDS sequence (opt2) from hemagglutinin__InfluenzaA__ADC45780

SEQ ID NO: 100146 - RNA, 1698 nt, Artificial Sequence; identical to SEQ ID NO: 99167
  derived and/or modified CDS sequence (opt2) from hemagglutinin__InfluenzaA__ADC45791

SEQ ID NO: 100147 - RNA, 1698 nt, Artificial Sequence
  derived and/or modified CDS sequence (opt2) from hemagglutinin__InfluenzaA__ADC45813
augaaggucaagcuccucauccuccucugcaccuucaccgccaccuacgccgacaccaucugcaucggcuaccacgccaacaacuccaccgacaccgucgacaccguccucgagaagaacgucaccgucacccacuccgucaaccuccucgagaacucccacaacggcaagcucugccuccucaagggcaucgccccccuccagcucggcaacugcuccgucgccggcuggauccucggcaaccccgagugcgagcuccucaucuccaaggaguccugguccuacaucgucgagaagcccaaccccgagaacggcaccugcuaccccggccacuucgccgacuacgaggagcuccgcgagcagcucuccuccgucuccuccuucgagcgcuucgagaucuuccccaaggaguccuccuggcccaaccacaccgucaccggcgucuccgccuccugcucccacaacggcgaguccuccuucuaccgcaaccuccucuggcucaccaugaagaacggccucuaccccaaccucuccaaguccuacgccaacaacaaggagaaggagguccucguccucuggggcguccaccacccccccaacaucggcgaccagaagacccucuacaacaccgagaacgccuacgucuccgucgucuccucccacuacucccgcaaguucacccccgagaucgccaagcgccccaagguccgcgaccaggagggccgcaucaacuacuacuggacccuccucgagcccggcgacaccaucaucuucgaggccaacggcaaccucaucgccccccgcuacgccuucgcccucucccgcggcuucggcuccggcaucaucaacuccaacgcccccauggacaagugcgacgccaagugccagaccccccagggcgccaucaacuccucccuccccuuccagaacguccaccccgucaccaucggcgagugccccaaguacguccgcuccgccaagcuccgcauggucaccggccuccgcaacauccccuccauccagucccgcggccucuucggcgccaucgccggcuucaucgagggcggcuggaccggcauggucgacggcugguacggcuaccaccaccagaacgagcagggcuccggcuacgccgccgaccagaaguccacccagaacgccaucaacggcaucaccaacaaggucaacuccgucaucgagaagaugaacacccaguucaccgccgucggcaaggaguucaacaagcucgagcgccgcauggagaaccucaacaagaaggucgacgacggcuucaucgacaucuggaccuacaacgccgagcuccucguccuccucgagaacgagcgcacccucgacuuccacgacuccaacgucaagaaccucuacgagaaggucaagucccagcucaagaacaacgccaaggagaucggcaacggcugcuucgaguucuaccacaagugcaacgacgagugcauggaguccgucaagaacggcaccuacgacuaccccaaguacuccgaggaguccaagcucaaccgcgagaagaucgacggcgucaagcucgaguccaugggcgucuaccagauccucgccaucuacuccaccgucgccuccucccucguccuccucgucucccucggcgccaucuccuucuggaugugcuccaacggcucccuccagugccgcaucugcaucuga

SEQ ID NO: 100148 - RNA, 1698 nt, Artificial Sequence; identical to SEQ ID NO: 99167
  derived and/or modified CDS sequence (opt2) from hemagglutinin__InfluenzaA__ADC45824

SEQ ID NO: 100149 - RNA, 1698 nt, Artificial Sequence
  derived and/or modified CDS sequence (opt2) from hemagglutinin__InfluenzaA__ADC45835
augaaggucaagcuccucguccuccucugcaccuucaccgccaccuacgccgacaccaucugcaucggcuaccacgccaacaacuccaccgacaccgucgacaccguccucgagaagaacgucaccgucacccacuccgucaaccuccucgagaacucccacaacggcaagcucugccuccucaagggcaucgccccccuccagcucggcaacugcuccgucgccggcuggauccucggcaaccccgagugcgagcuccucaucuccaaggaguccugguccuacaucgucgagaagcccaaccccgagaacggcaccugcuaccccggccacuucgccgacuacgaggagcuccgcgagcagcucuccuccgucuccuccuucgagcgcuucgagaucuuccccaaggaguccuccuggcccaaccacaccgucaccggcgucuccgccuccugcucccacaacggcgagaacuccuucuaccgcaaccuccucuggcucaccggcaagaacggccucuaccccaaccucuccaaguccuacgccaacaacaaggagaaggagguccucguccucuggggcguccaccacccccccaacaucgccgaccagaagacccucuaccacaccgagaacgccuacgucuccgucgucuccucccacuacucccgcaaguucacccccgagaucgccaagcgccccaagguccgcgaccaggagggccgcaucaacuacuacuggacccuccucgagcccggcgacaccaucaucuucgaggccaacggcaaccucaucgccccccgcuacgccuucgcccucucccgcggcuucggcuccggcaucaucaacuccaacgcccccauggacaagugcgacgccaagugccagaccccccagggcgccaucaacuccucccuccccuuccagaacguccaccccgucaccaucggcgagugccccaaguacguccgcuccgccaagcuccgcauggucaccggccuccgcaacauccccuccauccagucccgcggccucuucggcgccaucgccggcuucaucgagggcggcuggaccggcauggucgacggcugguacggcuaccaccaccagaacgagcagggcuccggcuacgccgccgaccagaaguccacccagaacgccaucaacggcaucaccaacaaggucaacuccgucaucgagaagaugaacacccaguucaccgccgucggcaaggaguucaacaagcucgagcgccgcauggagaaccucaacaagaaggucgacgacggcuucaucgacaucuggaccuacaacgccgagcuccucguccuccucgagaacgagcgcacccucgacuuccacgacuccaacgucaagaaccucuacgagaaggucaagucccagcucaagaacaacgccaaggagaucggcaacggcugcuucgaguucuaccacaagugcaacgacgagugcauggaguccgucaagaacggcaccuacgacuaccccaaguacuccgaggaguccaagcucaaccgcgagaagaucgacggcgucacccucgaguccaugggcgucuaccagauccucgccaucuacuccaccgucgccuccucccucguccuccucgucucccucggcgccaucuccuucuggaugugcuccaacggcucccuccagugccgcaucugcaucuga

SEQ ID NO: 100150 - RNA, 1698 nt, Artificial Sequence; identical to SEQ ID NO: 98524
  derived and/or modified CDS sequence (opt2) from hemagglutinin__InfluenzaA__ADC45846

SEQ ID NO: 100151 - RNA, 1701 nt, Artificial Sequence; identical to SEQ ID NO: 98705
  derived and/or modified CDS sequence (opt2) from hemagglutinin__InfluenzaA__ADC53558

SEQ ID NO: 100152 - RNA, 1701 nt, Artificial Sequence; identical to SEQ ID NO: 98796
  derived and/or modified CDS sequence (opt2) from hemagglutinin__InfluenzaA__ADD14087

SEQ ID NO: 100153 - RNA, 1701 nt, Artificial Sequence; identical to SEQ ID NO: 98705
  derived and/or modified CDS sequence (opt2) from hemagglutinin__InfluenzaA__ADD14089

SEQ ID NO: 100154 - RNA, 1701 nt, Artificial Sequence; identical to SEQ ID NO: 98705
  derived and/or modified CDS sequence (opt2) from hemagglutinin__InfluenzaA__ADD14093

SEQ ID NO: 100155 - RNA, 1701 nt, Artificial Sequence
  derived and/or modified CDS sequence (opt2) from hemagglutinin__InfluenzaA__ADD14095
augaaggccauccucgucguccuccucuacaccuucgccaccgccaacgccgacacccucugcaucggcuaccacgccaacaacuccaccgacaccgucgacaccguccucgagaagaacgucaccgucacccacuccgucaaccuccucgaggacaagcacaacggcaagcucugcaagcuccgcggcgucgccccccuccaccucggcaagugcaacaucgccggcuggauccucggcaaccccgagugcgagucccucuccaccgccuccuccugguccuacaucgucgagaccuccuccuccgacaacggcaccugcuaccccggcgacuucaucgacuacgaggagcuccgcgagcagcucuccuccgucuccuccuucgagcgcuucgagaucuuccccaagaccuccuccuggcccaaccacgacuccaacaagggcgucaccgccgccugcccccacgccggcgccaaguccuucuacaagaaccucaucuggcucgucaagaagggcaacuccuaccccaagcucuccaaguccuacaucaacgacaagggcaaggagguccucguccucuggggcauccaccaccccuccaccuccgccgaccagcagucccucuaccagaacgccgacgccuacgucuucgucggcaccucccgcuacuccaagaaguucaagcccgagaucgccauccgccccaagguccgcgaccaggagggccgcaugaacuacuacuggacccucgucgagcccggcgacaagaucaccuucgaggccaccggcaaccucguccucccccgcuacgccuucgccauggagcgcaacgccggcuccggcaucaucaucuccgacacccccguccacgacugcaacaccaccugccagacccccaagggcgccaucaacaccucccuccccuuccagaacauccaccccaucaccaucggcaagugccccaaguacgucaaguccaccaagcuccgccucgccaccggccuccgcaacguccccuccauccagucccgcggccucuucggcgccaucgccggcuucaucgagggcggcuggaccggcauggucgacggcugguacggcuaccaccaccagaacgagcagggcuccggcuacgccgccgaccucaaguccacccagaacgccaucgacgagaucaccaacaaggucaacuccgucaucgagaagaugaacacccaguucaccgccgucggcaaggaguucaaccaccucgagaagcgcaucgagaaccucaacaagaaggucgacgacggcuuccucgacaucuggaccuacaacgccgagcuccucguccuccucgagaacgagcgcacccucgacuaccacgacuccaacgucaagaaccucuacgagaagguccgcucccagcucaagaacaacgccaaggagaucggcaacggcugcuucgaguucuaccacaagugcgacaacaccugcauggaguccgucaagaacggcaccuacgacuaccccaaguacuccgaggaggccaagcucaaccgcgaggagaucgacggcgucaagcucgaguccacccgcaucuaccagauccucgccaucuacuccaccgucgccuccucccucguccucgucgucucccucggcgccaucuccuucuggaugugcuccaacggcucccuccagugccgcaucugcaucuga

SEQ ID NO: 100156 - RNA, 1701 nt, Artificial Sequence; identical to SEQ ID NO: 98705
  derived and/or modified CDS sequence (opt2) from hemagglutinin__InfluenzaA__ADD14097

SEQ ID NO: 100157 - RNA, 1701 nt, Artificial Sequence; identical to SEQ ID NO: 98705
  derived and/or modified CDS sequence (opt2) from hemagglutinin__InfluenzaA__ADD14099

SEQ ID NO: 100158 - RNA, 1701 nt, Artificial Sequence; identical to SEQ ID NO: 98705
  derived and/or modified CDS sequence (opt2) from hemagglutinin__InfluenzaA__ADD14101

SEQ ID NO: 100159 - RNA, 1701 nt, Artificial Sequence
  derived and/or modified CDS sequence (opt2) from hemagglutinin__InfluenzaA__ADD14103
augaaggccauccucgucguccuccucugcaccuucgccaccgccaacgccgacacccucugcaucggcuaccacgccaacaacuccaccgacaccgucgacaccguccucgagaagaacgucaccgucacccacuccgucaaccuccucgaggacaagcacaacggcaagcucugcaagcuccgcggcgucgccccccuccaccucggcaagugcaacaucgccggcuggauccucggcaaccccgagugcgagucccucuccaccgccuccuccugguccuacaucgucgagaccuccuccuccgacaacggcaccugcuaccccggcgacuucaucgacuacgaggagcuccgcgagcagcucuccuccgucuccuccuucgagcgcuucgagaucuuccccaagaccuccuccuggcccaaccacgacuccaacaagggcgucaccgccgccugcccccacgccggcgccaaguccuucuacaagaaccucaucuggcucgucaagaagggcaacuccuaccccaagcucuccaaguccuacaucaacgacaagggcaaggagguccucguccucuggggcauccaccaccccuccaccuccgccgaccagcagucccucuaccagaacgccgacgccuacgucuucgucggcaccucccgcuacuccaagaaguucaagcccgagaucgccauccgccccaagguccgcgaccaggagggccgcaugaacuacuacuggacccucgucgagcccggcgacaagaucaccuucgaggccaccggcaaccucgucgucccccgcuacgccuucgccauggagcgcaacgccggcuccggcaucaucaucuccgacacccccguccacgacugcaacaccaccugccagacccccaagggcgccaucaacaccucccuccccuuccagaacauccaccccaucaccaucggcaagugccccaaguacgucaaguccaccaagcuccgccucgccaccggccuccgcaacguccccuccauccagucccgcggccucuucggcgccaucgccggcuucaucgagggcggcuggaccggcauggucgacggcugguacggcuaccaccaccagaacgagcagggcuccggcuacgccgccgaccucaaguccacccagaacgccaucgacgagaucaccaacaaggucaacuccgucaucgagaagaugaacacccaguucaccgccgucggcaaggaguucaaccaccucgacaagcgcaucgagaaccucaacaagaagaucgacgacggcuuccucgacaucuggaccuacaacgccgagcuccucguccuccucgagaacgagcgcacccucgacuaccacgacuccaacgucaagaaccucuacgagaagguccgcucccagcucaagaacaacgccaaggagaucggcaacggcugcuucgaguucuaccacaagugcgacaacaccugcauggaguccgucaagaacggcaccuacgacuaccccaaguacuccgaggaggccaagcucaaccgcgaggagaucgacggcgucaagcucgaguccacccgcaucuaccagauccucgccaucuacuccaccgucgccuccucccucguccucgucgucucccucggcgccaucuccuucuggaugugcuccaacggcucccuccagugccgcaucugcaucuga

SEQ ID NO: 100160 - RNA, 1701 nt, Artificial Sequence
  derived and/or modified CDS sequence (opt2) from hemagglutinin__InfluenzaA__ADD14111
augaaggccauccucgucguccuccucuacaccuucgccaccgccaacgccgacacccucugcaucggcuaccacgccaacaacuccaccgacaccgucgacaccguccucgagaagaacgucaccgucacccacuccgucaaccuccucgaggacaagcacaacggcaagcucugcaagcuccgcggcgucgccccccuccaccucggcaagugcaacaucgccggcuggauccucggcaaccccgagugcgagucccucuccaccgccuccuccugguccuacaucgucgagaucuccuccuccgacaacggcaccugcuaccccggcgacuucaucgacuacgaggagcuccgcgagcagcucuccuccgucuccuccuucgagcgcuucgagaucuuccccaagaccuccuccuggcccaaccacgacuccaacaagggcgucaccgccgccugcccccacgccggcgccaaguccuucuacaagaaccucaucuggcucgucaagaagggcaacuccuaccccaagcucuccaaguccuacaucaacgacaagggcaaggagguccucguccucuggggcauccaccaccccuccaccuccgccgaccagcagucccucuaccagaacgccgacgccuacgucuucgucggcaccucccgcuacuccaagaaguucaagcccgagaucgccauccgccccaagguccgcgaccaggagggccgcaugaacuacuacuggacccucgucgagcccggcgacaagaucaccuucgaggccaccggcaaccucgucgucccccgcuacgccuucgccauggagcgcaacgccggcuccggcaucaucaucuccgacacccccguccacgacugcaacaccaccugccagacccccaagggcgccaucaacaccucccuccccuuccagaacauccaccccaucaccaucggcaagugccccaaguacgucaaguccaccaagcuccgccucgccaccggccuccgcaacguccccuccauccagucccgcggccucuucggcgccaucgccggcuucaucgagggcggcuggaccggcauggucgacggcugguacggcuaccaccaccagaacgagcagggcuccggcuacgccgccgaccucaaguccacccagaacgccaucgacgagaucaccaacaaggucaacuccgucaucgagaagaugaacacccaguucaccgccgucggcaaggaguucaaccaccucgagaagcgcaucgagaaccucaacaagaaggucgacgacggcuuccucgacaucuggaccuacaacgccgagcuccucguccuccucgagaacgagcgcacccucgacuaccacgacuccaacgucaagaaccucuacgagaagguccgcucccagcucaagaacaacgccaaggagaucggcaacggcugcuucgaguucuaccacaagugcgacaacaccugcauggaguccgucaagaacggcaccuacgacuaccccaaguacuccgaggaggccaagcucaaccgcgaggagaucgacggcgucaagcucgaguccacccgcaucuaccagauccucgccaucuacuccaccgucgccuccucccucguccucgucgucucccucggcgccaucuccuucuggaugugcuccaacggcucccuccagugccgcaucugcaucuga

SEQ ID NO: 100161 - RNA, 1701 nt, Artificial Sequence; identical to SEQ ID NO: 98705
  derived and/or modified CDS sequence (opt2) from hemagglutinin__InfluenzaA__ADD14115

SEQ ID NO: 100162 - RNA, 1701 nt, Artificial Sequence; identical to SEQ ID NO: 98705
  derived and/or modified CDS sequence (opt2) from hemagglutinin__InfluenzaA__ADD14117

SEQ ID NO: 100163 - RNA, 1701 nt, Artificial Sequence; identical to SEQ ID NO: 98705
  derived and/or modified CDS sequence (opt2) from hemagglutinin__InfluenzaA__ADD14119

SEQ ID NO: 100164 - RNA, 1701 nt, Artificial Sequence; identical to SEQ ID NO: 98705
  derived and/or modified CDS sequence (opt2) from hemagglutinin__InfluenzaA__ADD14121

SEQ ID NO: 100165 - RNA, 1701 nt, Artificial Sequence; identical to SEQ ID NO: 98705
  derived and/or modified CDS sequence (opt2) from hemagglutinin__InfluenzaA__ADD14123

SEQ ID NO: 100166 - RNA, 1701 nt, Artificial Sequence; identical to SEQ ID NO: 98705
  derived and/or modified CDS sequence (opt2) from hemagglutinin__InfluenzaA__ADD14127

SEQ ID NO: 100167 - RNA, 1701 nt, Artificial Sequence
  derived and/or modified CDS sequence (opt2) from hemagglutinin__InfluenzaA__ADD14129
augaaggccauccucgucguccuccucuacaccuucgccaccgccaacgccgacacccucugcaucggcuaccacgccaacaacuccaccgacaccgucgacaccguccucgagaagaacgucaccgucacccacuccgucaaccuccucgaggacaagcacaacggcaagcucugcaagcuccgcggcgucgccucccuccaccucggcaagugcaacaucgccggcuggauccucggcaaccccgagugcgagucccucuccaccgccuccuccugguccuacaucgucgagaccuccuccuccgacaacggcaccugcuaccccggcgacuucaucgacuacgaggagcuccgcgagcagcucuccuccgucuccuccuucgagcgcuucgagaucuuccccaagaccuccuccuggcccaaccacgacuccaacaagggcgucaccgccgccugcccccacgccggcgccaaguccuucuacaagaaccucaucuggcucgucaagaagggcaacuccuaccccaagcucuccaaguccuacaucaacgacaagggcaaggagguccucguccucuggggcauccaccaccccuccaccuccgccgaccagcagucccucuaccagaacgccgacgccuacgucuucgucggcaccucccgcuacuccaagaaguucaagcccgagaucgccauccgccccaagguccgcgaccaggagggccgcaugaacuacuacuggacccucgucgagcccggcgacaagaucaccuucgaggccaccggcaaccucgucgucccccgcuacgccuucgccauggagcgcaacgccggcuccggcaucaucaucuccgacacccccguccacgacugcaacaccaccugccagacccccaagggcgccaucaacaccucccuccccuuccagaacauccaccccaucaccaucggcaagugccccaaguacgucaaguccaccaagcuccgccucgccaccggccuccgcaacguccccuccauccagucccgcggccucuucggcgccaucgccggcuucaucgagggcggcuggaccggcauggucgacggcugguacggcuaccaccaccagaacgagcagggcuccggcuacgccgccgaccucaaguccacccagaacgccaucgacgagaucaccaacaaggucaacuccgucaucgagaagaugaacacccaguucaccgccgucggcaaggaguucaaccaccucgagaagcgcaucgagaaccucaacaagaaggucgacgacggcuuccucgacaucuggaccuacaacgccgagcuccucguccuccucgagaacgagcgcacccucgacuaccacgacuccaacgucaagaaccucuacgagaagguccgcucccagcucaagaacaacgccaaggagaucggcaacggcugcuucgaguucuaccacaagugcgacaacaccugcauggaguccgucaagaacggcaccuacgacuaccccaaguacuccgaggaggccaagcucaaccgcgaggagaucgacggcgucaagcucgaguccacccgcaucuaccagauccucgccaucuacuccaccgucgccuccucccucguccucgucgucucccucggcgccaucuccuucuggaugugcuccaacggcucccuccagugccgcaucugcaucuga

SEQ ID NO: 100168 - RNA, 1701 nt, Artificial Sequence
  derived and/or modified CDS sequence (opt2) from hemagglutinin__InfluenzaA__ADD14133
augaaggccauccucgucguccuccucuacaccuucgccaccgccaacgccgacacccucugcaucggcuaccacgccaacaacuccaccgacaccgucgacaccguccucgagaagaacgucaccgucacccacuccgucaaccuccucgaggacaagcacaacggcaagcucugcaagcuccgcggcgucgccccccuccaccucggcaagugcaacaucgccggcuggauccucggcaaccccgagugcgagucccucuccaccgccuccuccugguccuacaucgucgagaccuccuccuccgacaacggcaccugcuaccccggcgacuucaucgacuacgaggagcuccgcgagcagcucuccuccgucuccuccuucgagcgcuucgagaucuuccccaagaccuccuccuggcccaaccacgacuccaacaagggcgucaccgccgccugcccccacgccggcgccaaguccuucuacaagaaccucaucuggcucgucaagaagggcaacuccuaccccaagcucuccaaguccuacaucaacgacaagggcaaggagguccucguccucuggggcauccaccaccccuccaccuccgccgaccagcagucccucuaccagaacgucgacgccuacgucuucgucggcaccucccgcuacuccaagaaguucaagcccgagaucgccauccgccccaagguccgcgaccaggagggccgcaugaacuacuacuggacccucgucgagcccggcgacaagaucaccuucgaggccaccggcaaccucgucgucccccgcuacgccuucgccauggagcgcaacgccggcuucggcaucaucaucuccgacacccccguccacgacugcaacaccaccugccagacccccaagggcgccaucaacaccucccuccccuuccagaacauccaccccaucaccaucggcaagugccccaaguacgucaaguccaccaagcuccgccucgccaccggccuccgcaacguccccuccauccagucccgcggccucuucggcgccaucgccggcuucaucgagggcggcuggaccggcauggucgacggcugguacggcuaccaccaccagaacgagcagggcuccggcuacgccgccgaccucaaguccacccagaacgccaucgacgagaucaccaacaaggucaacuccgucaucgagaagaugaacacccaguucaccgccgucggcaaggaguucaaccaccucgagaagcgcaucgagaaccucaacaagaaggucgacgacggcuuccucgacaucuggaccuacaacgccgagcuccucguccuccucgagaacgagcgcacccucgacuaccacgacuccaacgucaagaaccucuacgagaagguccgcucccagcucaagaacaacgccaaggagaucggcaacggcugcuucgaguucuaccacaagugcgacaacaccugcauggaguccgucaagaacggcaccuacgacuaccccaaguacuccgaggaggccaagcucaaccgcgaggagaucgacggcgucaagcucgaguccacccgcaucuaccagauccucgccaucuacuccaccgucgccuccucccucguccucgucgucucccucggcgccaucuccuucuggaugugcuccaacggcucccuccagugccgcaucugcaucuga

SEQ ID NO: 100169 - RNA, 1701 nt, Artificial Sequence; identical to SEQ ID NO: 98796
  derived and/or modified CDS sequence (opt2) from hemagglutinin__InfluenzaA__ADD14135

SEQ ID NO: 100170 - RNA, 1701 nt, Artificial Sequence; identical to SEQ ID NO: 98705
  derived and/or modified CDS sequence (opt2) from hemagglutinin__InfluenzaA__ADD14137

SEQ ID NO: 100171 - RNA, 1701 nt, Artificial Sequence; identical to SEQ ID NO: 99453
  derived and/or modified CDS sequence (opt2) from hemagglutinin__InfluenzaA__ADD14139

SEQ ID NO: 100172 - RNA, 1701 nt, Artificial Sequence; identical to SEQ ID NO: 98705
  derived and/or modified CDS sequence (opt2) from hemagglutinin__InfluenzaA__ADD14143

SEQ ID NO: 100173 - RNA, 1701 nt, Artificial Sequence; identical to SEQ ID NO: 98705
  derived and/or modified CDS sequence (opt2) from hemagglutinin__InfluenzaA__ADD14145

SEQ ID NO: 100174 - RNA, 1701 nt, Artificial Sequence; identical to SEQ ID NO: 98705
  derived and/or modified CDS sequence (opt2) from hemagglutinin__InfluenzaA__ADD14147

SEQ ID NO: 100175 - RNA, 1701 nt, Artificial Sequence
  derived and/or modified CDS sequence (opt2) from hemagglutinin__InfluenzaA__ADD14151
augaaggccauccucgucguccuccucuacaccuucgccaccgccaacgccgacacccucugcaucggcuaccacgccaacaacuccaccgacaccgucgacaccguccucgagaagaacgucaccgucacccacuccgucaaccuccucgaggacaagcacaacggcaagcucugcaagcuccgcggcgucgccccccuccaccucggcaagugcaacaucgccggcuggauccucggcaaccccgagugcgagucccucuccaccgccuccuccugguccuacaucgucgagaccuccuccuccgacaacggcaccugcuaccccggcgacuucaucgacuacgaggagcuccgcgagcagcucuccuccgucuccuccuucgagcgcuucgagaucuuccccaagaccuccuccuggcccaaccacgacuccaacaagggcgucaccgccgccugcccccgcgccggcgccaaguccuucuacaagaaccucaucuggcucgucaagaagggcaacuccuaccccaagcucuccaaguccuacaucaacgacaagggcaaggagguccucguccucuggggcauccaccaccccuccaccuccgccgaccagcagucccucuaccagaacgccgacgccuacgucuucgucggcaccucccgcuacuccaagaaguucaagcccgagaucgccauccgccccaagguccgcgaccaggagggccgcaugaacuacuacuggacccucgucgagcccggcgacaagaucaccuucgaggccaccggcaaccucgucgucccccgcuacgccuucgccauggagcgcaacgccggcuccggcaucaucaucuccgacacccccguccacgacugcaacaccaccugccagacccccaagggcgccaucaacaccucccuccccuuccagaacauccaccccaucaccaucggcaagugccccaaguacgucaaguccaccaagcuccgccucgccaccggccuccgcaacguccccuccauccagucccgcggccucuucggcgccaucgccggcuucaucgagggcggcuggaccggcauggucgacggcugguacggcuaccaccaccagaacgagcagggcuccggcuacgccgccgaccucaaguccacccagaacgccaucgacaagaucaccaacaaggucaacuccgucaucgagaagaugaacacccaguucaccgccgucggcaaggaguucaaccaccucgagaagcgcaucgagaaccucaacaagaaggucgacgacggcuuccucgacaucuggaccuacaacgccgagcuccucguccuccucgagaacgagcgcacccucgacuaccacgacuccaacgucaagaaccucuacgagaagguccgcucccagcucaagaacaacgccaaggagaucggcaacggcugcuucgaguucuaccacaagugcgacaacaccugcauggaguccgucaagaacggcaccuacgacuaccccaaguacuccgaggaggccaagcucaaccgcgaggagaucgacggcgucaagcucgaguccacccgcaucuaccagauccucgccaucuacuccaccgucgccuccucccucguccucgucgucucccucggcgccaucuccuucuggaugugcuccaacggcucccuccagugccgcaucugcaucuga

SEQ ID NO: 100176 - RNA, 1701 nt, Artificial Sequence; identical to SEQ ID NO: 98705
  derived and/or modified CDS sequence (opt2) from hemagglutinin__InfluenzaA__ADD14153

SEQ ID NO: 100177 - RNA, 1701 nt, Artificial Sequence; identical to SEQ ID NO: 98705
  derived and/or modified CDS sequence (opt2) from hemagglutinin__InfluenzaA__ADD14155

SEQ ID NO: 100178 - RNA, 1701 nt, Artificial Sequence; identical to SEQ ID NO: 98705
  derived and/or modified CDS sequence (opt2) from hemagglutinin__InfluenzaA__ADD14157

SEQ ID NO: 100179 - RNA, 1701 nt, Artificial Sequence; identical to SEQ ID NO: 98705
  derived and/or modified CDS sequence (opt2) from hemagglutinin__InfluenzaA__ADD14162

SEQ ID NO: 100180 - RNA, 1701 nt, Artificial Sequence; identical to SEQ ID NO: 98705
  derived and/or modified CDS sequence (opt2) from hemagglutinin__InfluenzaA__ADD14172

SEQ ID NO: 100181 - RNA, 1701 nt, Artificial Sequence; identical to SEQ ID NO: 98705
  derived and/or modified CDS sequence (opt2) from hemagglutinin__InfluenzaA__ADD14182

SEQ ID NO: 100182 - RNA, 1701 nt, Artificial Sequence; identical to SEQ ID NO: 98705
  derived and/or modified CDS sequence (opt2) from hemagglutinin__InfluenzaA__ADD14192

SEQ ID NO: 100183 - RNA, 1701 nt, Artificial Sequence; identical to SEQ ID NO: 98705
  derived and/or modified CDS sequence (opt2) from hemagglutinin__InfluenzaA__ADD14202

SEQ ID NO: 100184 - RNA, 1701 nt, Artificial Sequence
  derived and/or modified CDS sequence (opt2) from hemagglutinin__InfluenzaA__ADD21447
augaaggccauccucgucuuccuccucuacaccuucgccaccgccaacgccgacacccucugcaucggcuaccacgccaacaacuccaccgacaccgucgacaccguccucgagaagaacgucaccgucacccacuccgucaaccuccucgaggaccgccacaacggcaagcucugcaagcuccgcggcgucgccccccuccaccucggcaagugcaacaucgccggcuggcuccucggcaaccccgagugcgagcuccucuucaccgccuccuccugguccuacaucgucgagaccuccaacuccgacaacggcaccugcuaccccggcgacuucaucaacuacgaggagcuccgcgagcagcucuccuccgucuccuccuucgagcgcuucgagauguuccccaaguccuccuccuggcccaaccacgagaccaaccgcggcgucaccgccgccugccccuacgccggcgccaacuccuucuaccgcaaccucaucuggcucgucaagaaggagaacuccuaccccaagcucuccaaguccuacaucaacaacaaggagaaggagguccucguccucuggggcauccaccacccccccaccuccgccgaccagcagucccucuaccagaacgccgacgccuacgucuucgucggcuccuccaaguacaacaagaaguuccgccccgagaucgccgcccgccccaagguccgcggccagaccggccgcaugaacuacuacuggacccucgucgagcccggcgacaccaucaccuucgaggccaccgagaaccucgucgucccccgcuacgccuucgccaugaagcgcggcuccggcuccggcaucaucaucuccgacacccccguccacgacugcaacaccaccugccagacccccaagggcgccaucaacaccucccuccccuuccagaacauccaccccgucaccaucggcgagugccccaaguacgucaaguccaccaaccuccgcauggccaccggccuccgcaacauccccuccauccagucccgcggccucuucggcgccaucgccggcuucaucgagggcggcuggaccggcaugaucgacggcugguacggcuaccaccaccagaacgagcagggcuccggcuacgccgccgaccgcaaguccacccagaacgccaucgacggcaucaccaacaaggucaacuccgucaucgagaagaugaacacccaguucaccgccgucggcaaggaguucaaccaccucgagaagcgcaucgagaaccucaacaagaaggucgacgacggccuccucgacgucuggaccuacaacgccgagcuccucguccuccucgagaacgagcgcacccucgacuaccacgacuccaacgucaagaaccucuacgagaagguccgcucccagcucaagaacaacgccaaggagaucggcaacggcugcuucgaguucuaccacaagugcgacgacaccugcauggaguccguccgcaacggcgccuacgacuaccccaaguacuccgaggaggccaagcucaaccgcgaggagaucgacggcgucaagcucgaguccacccgcaucuaccagauccucgccaucuacuccaccgucgccuccucccucguccuccucgucucccucggcgccaucuccuucuggaugugcuccaacggcucccuccagugccgcaucugcaucuga

SEQ ID NO: 100185 - RNA, 1701 nt, Artificial Sequence
  derived and/or modified CDS sequence (opt2) from hemagglutinin__InfluenzaA__ADD21457
augaaggccauccucgucuuccuccucuacaccuucgccaccgccaacgccgacacccucugcaucggcuaccacgccaacaacuccaccgacaccgucgacaccguccucgagaagaacgucaccgucacccacuccgucaaccuccucgaggaccgccacaacggcaagcucugcaagcuccgcggcgucgccccccuccaccucggcaagugcaacaucgccggcuggcuccucggcaaccccgagugcgagcuccucuucaccgccuccuccugguccuacaucgucgagaccuccaacuccgacaacggcaccugcuaccccggcgacuucaucaacuacgaggagcuccgcgagcagcucuccuccgucuccuccuucgagcgcuucgagauguuccccaaguccuccuccuggcccaaccacgagaccaaccgcggcgucaccgccgccugccccuacgccggcgccaacuccuucuaccgcaaccucaucuggcucgucaagaaggagaacuccuaccccaagcucuccaaguccuacaucaacaacaaggagaaggagguccucguccucuggggcauccaccacccccccaccuccgccgaccagcagucccucuaccagaacgccgacgccuacgucuucgucggcuccuccaaguacaacaagaaguuccgccccgagaucgccgcccgccccaagguccgcggccagaccggccgcaugaacuacuacuggacccucgucgagcccggcgacaccaucaccuucgaggccaccggcaaccucgucgucccccgcuacgccuucgccaugaagcgcggcuccggcuccggcaucaucaucuccgacacccccguccacgacugcaacaccaccugccagacccccaagggcgccgucaacaccucccuccccuuccagaacauccaccccgucaccaucggcgagugccccaaguacgucaaguccaccaaccuccgcauggccaccggccuccgcaacauccccuccauccagucccgcggccucuucggcgccaucgccggcuucaucgagggcggcuggaccggcaugaucgacggcugguacggcuaccaccaccagaacgagcagggcuccggcuacgccgccgaccgcaaguccacccagaacgccaucgacggcaucaccaacaaggucaacuccgucaucgagaagaugaacacccaguucaccgccgucggcaaggaguucaaccaccucgagaagcgcaucgagaaccucaacaagaaggucgacgacggccuccucgacgucuggaccuacaacgccgagcuccucguccuccucgagaacgagcgcacccucgacuaccacgacuccaacgucaagaaccucuacgagaagguccgcucccagcucaagaacaacgccaaggagaucggcaacggcugcuucgaguucuaccacaagugcgacgacaccugcauggaguccguccgcaacggcaccuacgacuaccccaaguacuccgaggaggccaagcucaaccgcgaggagaucgacggcgucaagcucgaguccacccgcaucuaccagauccucgccaucuacuccaccgucgccuccucccucguccuccucgucucccucggcgccaucuccuucuggaugugcuccaacggcucccuccagugccgcaucugcaucuga

SEQ ID NO: 100186 - RNA, 1698 nt, Artificial Sequence
  derived and/or modified CDS sequence (opt2) from hemagglutinin__InfluenzaA__ADD21467
augaaggccaagcuccucguccuccucugcaccuucaccgccaccuacgccgacaccaucugcaucggcuaccacgccaacaacuccaccgacaccgucgacaccguccucgagaagaacgucaccgucacccacuccgucaaccuccucgaggacucccacaacggcaagcucugccuccucaagggcaucgccccccuccagcucggcaacugcuccgucgccggcuggauccucggcaaccccgagugcgagcuccucaucuccaaggaguccugguccuacaucgucgagacccccaaccccgagaacggcaccugcuaccccggcuacuucgccgacuacgaggagcuccgcgagcagcucuccuccgucuccuccuucgagcgcuucgagaucuuccccaaggaguccuccuggcccaaccacaccgucaccggcgucuccgccuccugcucccacaacggcaaguccuccuucuaccgcaaccuccucuggcucaccggcaagaacggccucuaccccaaccucuccaaguccuacgccaacaacaaggagaaggagguccucguccucuggggcguccaccacccccccaacauccgcgaccagcgcgcccucuaccacaccgagaacgccuacgucuccgucgucuccucccacuacucccgccgcuucacccccgagaucgccaagcgccccaagguccgcggccaggagggccgcaucaacuacuacuggacccuccucgagcccggcgacaccaucaucuucgaggccaacggcaaccucaucgcccccugguacgccuucgcccucucccgcggcuucggcuccggcaucaucaccuccaacgcccccauggacgagugcgacgccaagugccagaccccccagggcgccaucaacuccucccuccccuuccagaacguccaccccgucaccaucggcgagugccccaaguacgcccgcuccgccaagcuccgcauggucaccggccuccgcaacauccccuccauccagucccgcggccucuucggcgccaucgccggcuucaucgagggcggcuggaccggcauggucgacggcugguacggcuaccaccaccagaacgagcagggcuccggcuacgccgccgaccagaaguccacccagaacgccaucaacggcaucaccaacaaggucaacuccgucaucgagaagaugaacacccaguucaccgccgucggcaaggaguucaacaagcucgagcgccgcauggagaaccucaacaagaaggucgacgacggcuuccucgacaucuggaccuacaacgccgagcuccucguccuccucgagaacgagcgcacccucgacuuccacgacuccaacgucaagaaccucuacgagaaggucaagucccagcucaagaacaacgccaaggagaucggcaacggcugcuucgaguucuaccacaagugcaacaacgagugcauggaguccgucaagaacggcaccuacgacuaccccaaguacuccgaggaguccaagcucaaccgcgagaagaucgacggcgucaagcucgaguccaugggcgucuaccagauccucgccaucuacuccaccgucgccuccucccucguccuccucgucucccucggcgccaucuccuucuggaugugcuccaacggcucccuccagugccgcaucugcaucuga

SEQ ID NO: 100187 - RNA, 1701 nt, Artificial Sequence
  derived and/or modified CDS sequence (opt2) from hemagglutinin__InfluenzaA__ADD21560
augaagaccaucaucgccuucucccacauccucugccucaucuacgcccagaagcuccccggcuccgacaacuccauggccacccucugccucggccaccacgccguccccaacggcacccucgucaagaccaucaccgacgaccagaucgaggucaccaacgccaccgagcucguccaguccuccuccaccggccgcaucugcaacuccccccaccacauccucgacggcaagaacugcacccucaucgacgcccuccucggcgacccccacugcgacgacuuccagaacaaggagugggaccucuucgucgagcgcuccaccgccuacuccaacugcuaccccuacuacguccccgacuacgccucccuccgcucccucgucgccuccuccggcacccucgaguucacccaggaguccuucaacuggaccggcgucacccaggacggcuccuccuacaccugccgccgcaaguccgucaacuccuucuucucccgccucaacuggcuccacaaccucgacuacaaguaccccgcccucaacgucaccaugcccaacaacgacaaguucgacaagcucuacaucuggggcguccaccaccccggcaccgaccgcgaccagaccaaccucuacguccaggccuccggccgcgucaccgucuccaccaagcgcucccagcagaccgucauccccaacaucggcucccgccccuggguccgcggcgucuccuccaucaucuccaucuacuggaccaucgucaagcccggcgacauccuccucaucaacuccaccggcaaccucaucgccccccgcggcuacuucaagauccaguccggcaaguccuccaucaugcgcuccgacgcccccaucggcaacugcaacuccgagugcaucacccccaacggcuccauccccaacgacaagcccuuccagaacgucaaccgcaucaccuacggcgccugcccccgcuacgucaagcagaacacccucaagcucgccaccggcaugcgcaacguccccgagaagcagacccgcggcaucuucggcgccaucgccggcuucaucgagaacggcugggagggcauggucgacggcugguacggcuuccgccaccagaacuccgagggcaccggccaggccgccgaccucaaguccacccaggccgccaucaaccagaucaccggcaagcucaaccgcgucaucaagaagaccaacgagaaguuccaccagaucgagaaggaguucuccgaggucgagggccgcauccaggaccucgagaaguacgucgaggacaccaagaucgaccucugguccuacaacgccgagcuccucgucgcccucgagaaccagcacaccaucgaccucaccgacuccgagaugaacaagcucuucgagcgcacccgcaagcagcuccgcgagaacgccgaggacaugggcaacggcugcuucaagaucuaccacaagugcgacaacgccugcaucggcuccauccgcaacggcaccuacgaccacgacgucuaccgcgacgaggcccucaacaaccgcuuccagaucaaguccguccagcucaaguccggcuacaaggacuggauccucuggaucuccuucgccauguccugcuuccuccucugcgucguccuccucggcuucaucauguggaccugccagaagggcaacaucaagugcaacaucugcaucuga

SEQ ID NO: 100188 - RNA, 1701 nt, Artificial Sequence; identical to SEQ ID NO: 98692
  derived and/or modified CDS sequence (opt2) from hemagglutinin__InfluenzaA__ADD21734

SEQ ID NO: 100189 - RNA, 1701 nt, Artificial Sequence; identical to SEQ ID NO: 98705
  derived and/or modified CDS sequence (opt2) from hemagglutinin__InfluenzaA__ADD21744

SEQ ID NO: 100190 - RNA, 1701 nt, Artificial Sequence
  derived and/or modified CDS sequence (opt2) from hemagglutinin__InfluenzaA__ADD21764
augaaggccauccucgucguccuccucuacaccuucgccaccgccaacgccgacacccucugcaucggcuaccacgccaacaacuccaccgacaccgucgacaccguccucgagaagaacgucaccgucacccacuccgucaaccuccucgaggacaagcacaacggcaagcucugcaagcuccgcggcgucgccccccuccaccucggcaagugcaacaucgccggcuggauccucggcaaccccgagugcgagucccucuccaccgccuccuccugguccuacaucgucgagaccuccuccuccgacaacggcaccugcuaccccggcgacuucaucgacuacgaggagcuccgcgagcagcucuccuccgucuccuccuucgagcgcuucgagaucuuccccaagaccuccuccuggcccaaccacgacuccaacaagggcgucaccgccgccugcccccacgccggcgccaaguccuucuacaagaaccucaucuggcucgucaagaagggcaacuccuaccccaagcucuccaaguccuacaucaacgacaagggcaaggagguccucguccucuggggcauccaccaccccuccaccuccgccgaccagcagucccucuaccagaacgccgacgccuacgucuucgucggcaccucccgcuacuccaagaaguucaagcccgagaucgccauccgccccaagguccgcgaccaggagggccgcaugaacuacuacuggacccucgucgagcccggcgacaagaucaccuucgaggccaccggcaaccucgucgucccccgcuacgccuucgccauggagcgcaacgccgaguccggcaucaucaucuccgacacccccguccacgacugcaacaccaccugccagacccccaagggcgccaucaacaccucccuccccuuccagaacauccaccccaucaccaucggcaagugccccaaguacgucaaguccaccaagcuccgccucgccaccggccuccgcaacguccccuccauccagucccgcggccucuucggcgccaucgccggcuucaucgagggcggcuggaccggcauggucgacggcugguacggcuaccaccaccagaacgagcagggcuccggcuacgccgccgaccucaaguccacccagaacgccaucgacgagaucaccaacaaggucaacuccgucaucgagaagaugaacacccaguucaccgccgucggcaaggaguucaaccaccucgagaagcgcaucgagaaccucaacaagaaggucgacgacggcuuccucgacaucuggaccuacaacgccgagcuccucguccuccucgagaacgagcgcacccucgacuaccacgacuccaacgucaagaaccucuacgagaagguccgcucccagcucaagaacaacgccaaggagaucggcaacggcugcuucgaguucuaccacaagugcgacaacaccugcauggaguccgucaagaacggcaccuacgacuaccccaaguacuccgaggaggccaagcucaaccgcgaggagaucgacggcgucaagcucgaguccacccgcaucuaccagauccucgccaucuacuccaccgucgccuccucccucguccucgucgucucccucggcgccaucuccuucuggaugugcuccaacggcucccuccagugccgcaucugcaucuga

SEQ ID NO: 100191 - RNA, 1701 nt, Artificial Sequence
  derived and/or modified CDS sequence (opt2) from hemagglutinin__InfluenzaA__ADD21774
augaaggccauccucgucguccuccucuacaccuucgccaccgccaacgccgacacccucugcaucggcuaccacgccaacaacuccaccgacaccgucgacaccguccucgagaagaacgucaccgucacccacuccgucaaccuccucgaggacaagcacaacggcaagcucugcaagcuccgcggcgucgccccccuccaccucggcaagugcaacaucgccggcuggauccucggcaaccccgagugcgagucccucuccaccgccuccuccugguccuacaucgucgagaccuccuccuccgacaacggcaccugcuaccccggcgacuucaucgacuacgaggagcuccgcgagcagcucuccuccgucuccuccuucgagcgcuucgagaucuuccccaagaccuccuccuggcccaaccacgacuccaacaagggcgucaccgccgccugcccccacgccggcgccaaguccuucuacaagaaccucaucuggcucgucaagaagggcaacuccuaccccaagcucuccaaguccuacaucaacgacaagggcaaggagguccucguccucuggggcauccaccaccccuccaccuccgccgaccagcagucccucuaccagaacgccgacgccuacgucuucgucggcuccucccgcuacuccaagaaguucaagcccgagaucgccauccgccccaagguccgcgaccaggagggccgcaugaacuacuacuggacccucgucgagcccggcgacaagaucaccuucgaggccaccggcaaccucgucgucccccgcuacgccuucgccauggagcgcaacgccggcuccggcaucaucaucuccgacacccccguccacgacugcaacaccaccugccagacccccaagggcgccaucaacaccucccuccccuuccagaacauccaccccaucaccaucggcaagugccccaaguacgucaaguccaccaagcuccgccucgccaccggccuccgcaacguccccuccguccagucccgcggccucuucggcgccaucgccggcuucaucgagggcggcuggaccggcauggucgacggcugguacggcuaccaccaccagaacgagcagggcuccggcuacgccgccgaccucaaguccacccagaacgccaucgacgagaucaccaacaaggucaacuccgucaucgagaagaugaacacccaguucaccgccgucggcaaggaguucaaccaccucgagaagcgcaucgagaaccucaacaagaaggucgacgacggcuuccucgacaucuggaccuacaacgccgagcuccucguccuccucgagaacgagcgcacccucgacuaccacgacuccaacgucaagaaccucuacgagaagguccgcucccagcucaagaacaacgccaaggagaucggcaacggcugcuucgaguucuaccacaagugcgacaacaccugcauggaguccgucaagaacggcaccuacgacuaccccaaguacuccgaggaggccaagcucaaccgcgaggagaucgacggcgucaagcucgaguccacccgcaucuaccagauccucgccaucuacuccaccgucgccuccucccucguccucgucgucucccucggcgccaucuccuucuggaugugcuccaacggcucccuccagugccgcaucugcaucuga

SEQ ID NO: 100192 - RNA, 1701 nt, Artificial Sequence; identical to SEQ ID NO: 98705
  derived and/or modified CDS sequence (opt2) from hemagglutinin__InfluenzaA__ADD21784

SEQ ID NO: 100193 - RNA, 1701 nt, Artificial Sequence; identical to SEQ ID NO: 99865
  derived and/or modified CDS sequence (opt2) from hemagglutinin__InfluenzaA__ADD21794

SEQ ID NO: 100194 - RNA, 1701 nt, Artificial Sequence; identical to SEQ ID NO: 98705
  derived and/or modified CDS sequence (opt2) from hemagglutinin__InfluenzaA__ADD21804

SEQ ID NO: 100195 - RNA, 1701 nt, Artificial Sequence
  derived and/or modified CDS sequence (opt2) from hemagglutinin__InfluenzaA__ADD21814
augaaggccauccucgucguccuccucuacaccuucgccaccgccaacgccgacacccucugcaucggcuaccacgccaacaacuccaccgacaccgucgacaccguccucgagaagaacgucaccgucacccacuccgucaaccuccucgaggacaagcacaacggcaagcucugcaagcuccgcggcgucgccccccuccaccucggcaagugcaacaucgccuccuggauccucggcaaccccgagugcgagucccucuccaccgccuccuccugguccuacaucgucgagaccuccuccuccgacaacggcaccugcuaccccggcgacuucaucgacuacgaggagcuccgcgagcagcucuccuccgucuccuccuucgagcgcuucgagaucuuccccaagaccuccuccuggcccaaccacgacuccaacaagggcgucaccgccgccugcccccacgccggcgccaaguccuucuacaagaaccucaucuggcucgucaagaagggcaacuccuaccccaagcucuccaaguccuacaucaacgacaagggcaaggagguccucguccucuggggcauccaccaccccuccaccuccgccgaccagcagucccucuaccagaacgccgacgccuacgucuucgucggcaccucccgcuacuccaagaaguucaagcccgagaucgccauccgccccaagguccgcgaccaggagggccgcaugaacuacuacuggacccucgucgagcccggcgacaagaucaccuucgaggccaccggcaaccucgucgucccccgcuacgccuucgccauggagcgcaacgccggcuccggcaucaucaucuccgacacccccguccacgacugcaacaccaccugccagacccccaagggcgccaucaacaccucccuccccuuccagaacauccaccccaucaccaucggcaagugccccaaguacgucaaguccaccaagcuccgccucgccaccggccuccgcaacguccccuccauccagucccgcggccucuucggcgccaucgccggcuucaucgagggcggcuggaccggcauggucgacggcugguacggcuaccaccaccagaacgagcagggcuccggcuacgccgccgaccucaaguccacccagaacgccaucgacgagaucaccaacaaggucaacuccgucaucgagaagaugaacacccaguucaccgccgucggcaaggaguucaaccaccucgagaagcgcaucgagaaccucaacaagaaggucgacgacggcuuccucgacaucuggaccuacaacgccgagcuccucguccuccucgagaacgagcgcacccucgacuaccacgacuccaacgucaagaaccucuacgagaagguccgcucccagcucaagaacaacgccaaggagaucggcaacggcugcuucgaguucuaccacaagugcgacaacaccugcauggaguccgucaagaacggcaccuacgacuaccccaaguacuccgaggaggccaagcucaaccgcgaggagaucgacggcgucaagcucgaguccacccgcaucuaccagauccucgccaucuacuccaccgucgccuccucccucguccucgucgucucccucggcgccaucuccuucuggaugugcuccaacggcucccuccagugccgcaucugcaucuga

SEQ ID NO: 100196 - RNA, 1701 nt, Artificial Sequence; identical to SEQ ID NO: 99865
  derived and/or modified CDS sequence (opt2) from hemagglutinin__InfluenzaA__ADD21824

SEQ ID NO: 100197 - RNA, 1701 nt, Artificial Sequence; identical to SEQ ID NO: 99865
  derived and/or modified CDS sequence (opt2) from hemagglutinin__InfluenzaA__ADD21834

SEQ ID NO: 100198 - RNA, 1701 nt, Artificial Sequence; identical to SEQ ID NO: 99869
  derived and/or modified CDS sequence (opt2) from hemagglutinin__InfluenzaA__ADD21844

SEQ ID NO: 100199 - RNA, 1701 nt, Artificial Sequence; identical to SEQ ID NO: 99869
  derived and/or modified CDS sequence (opt2) from hemagglutinin__InfluenzaA__ADD21854

SEQ ID NO: 100200 - RNA, 1701 nt, Artificial Sequence; identical to SEQ ID NO: 99807
  derived and/or modified CDS sequence (opt2) from hemagglutinin__InfluenzaA__ADD21864

SEQ ID NO: 100201 - RNA, 1701 nt, Artificial Sequence
  derived and/or modified CDS sequence (opt2) from hemagglutinin__InfluenzaA__ADD21884
augaaggccauccucgucguccuccucuacaccuucgccaccgccaacgccgacacccucugcaucggcuaccacgccaacaacuccaccgacaccgucgacaccguccucgagaagaacgucaccgucacccacuccgucaaccuccucgaggacaagcacaacggcaagcucugcaagcuccgcggcgucgccccccuccaccucggcaagugcaacaucgccggcuggauccucggcaaccccgagugcgagucccucuccaccgccuccuccugguccuacaucgucgagaccuccuccuccggcaacggcaccugcuaccccggcgacuucaucgacuacgaggagcuccgcgagcagcucuccuccgucuccuccuucgagcgcuucgagaucuuccccaagaccuccuccuggcccaaccacgacuccaacaagggcgucaccgccgccugcccccacgccggcgccaaguccuucuacaagaaccucaucuggcucgucaagaagggcaacuccuaccccaagcucuccaaguccuacaucaacgacaagggcaaggagguccucguccucuggggcauccaccaccccuccaccuccgccgaccagcagucccucuaccagaacgccgacgccuacgucuucgucggcaccucccgcuacuccaagaaguucaagcccgagaucgccauccgccccaagguccgcgaccaggagggccgcaugaacuacuacuggacccucgucgagcccggcgacaagaucaccuucgaggccaccggcaaccucgucgucccccgcuacgccuucgccauggagcgcaacgccggcuccggcaucaucaucuccgacacccccguccacgacugcaacaccaccugccagacccccaagggcgccaucaacaccucccuccccuuccagaacauccaccccaucaccaucggcaagugccccaaguacgucaaguccaccaagcuccgccucgccaccggccuccgcaacguccccuccauccagucccgcggccucuucggcgccaucgccggcuucaucgagggcggcuggaccggcauggucgacggcugguacggcuaccaccaccagaacgagcagggcuccggcuacgccgccgaccucaaguccacccagaacgccaucgacgagaucaccaacaaggucaacuccgucaucgagaagaugaacacccaguucaccgccgucggcaaggaguucaaccaccucgagaagcgcaucgagaaccucaacaagaaggucgacgacggcuuccucgacaucuggaccuacaacgccgagcuccucguccuccucgagaacgagcgcacccucgacuaccacgacuccaacgucaagaaccucuacgagaagguccgcucccagcucaagaacaacgccaaggagaucggcaacggcugcuucgaguucuaccacaagugcgacaacaccugcaugggcuccgucaagaacggcaccuacgacuaccccaaguacuccgaggaggccaagcucaaccgcgaggagaucgacggcgucaagcucgaguccacccgcaucuaccagauccucgccaucuacuccaccgucgccuccucccucguccucgucgucucccucggcgccaucuccuucuggaugugcuccaacggcucccuccagugccgcaucugcaucuga

SEQ ID NO: 100202 - RNA, 1701 nt, Artificial Sequence; identical to SEQ ID NO: 99807
  derived and/or modified CDS sequence (opt2) from hemagglutinin__InfluenzaA__ADD21894

SEQ ID NO: 100203 - RNA, 1701 nt, Artificial Sequence
  derived and/or modified CDS sequence (opt2) from hemagglutinin__InfluenzaA__ADD22501
augaaggccauccucgucguccuccucuacaccuucgccaccgccaacgccgacacccucugcaucggcuaccacgccaacaacuccaccgacaccgucgacaccguccucgagaagaacgucaccgucacccacuccgucaaccuccucgaggacaagcacaacggcaagcucugcaagcuccgcggcgucgccccccuccaccucggcaagugcaacaucgccggcuggauccucggcaaccccgagugcgagucccucuccaccgccuccuccugguccuacaucgucgagaccuccuccuccgacaacggcaccugcuaccccggcgacuucaucgacuacgaggagcuccgcgagcagcucuccuccgucuccuccuucgagcgcuucgagaucuuccccaagaccuccuccuggcccaaccacgacuccaacaagggcgucaccgccgccugcccccacgccggcgccaaguccuucuacaagaaccucaucuggcucgucaagaagggcaacuccuaccccaagcucuccaaguccuacaucaacgacaagggcaaggagguccucguccucuggggcauccaccaccccuccaccuccgccgaccagcagucccucuaccagaacgccgacgccuacgucuucgucggcaccuccaaguacuccaagaaguucaagcccgagaucgccauccgccccaagguccgcgaccaggagggccgcaugaacuacuacuggacccucgucgagcccggcgacaagaucaccuucgaggccaccggcaaccucgucgucccccgcuacgccuucgccauggagcgcaacgccggcuccggcaucaucaucuccgacacccccguccacgacugcaacaccaccugccagacccccaagggcgccaucaacaccucccuccccuuccagaacauccaccccaucaccaucggcaagugccccaaguacgucaaguccaccaagcuccgccucgccaccggccuccgcaacguccccuccauccagucccgcggccucuucggcgccaucgccggcuucaucgagggcggcuggaccggcauggucgacggcugguacggcuaccaccaccagaacgagcagggcuccggcuacgccgccgaccucaaguccacccagaacgccaucgacgagaucaccaacaaggucaacuccgucaucgagaagaugaacacccaguucaccgccgucggcaaggaguucaaccaccucgagaagcgcaucgagaaccucaacaagaagaucgacgacggcuuccucgacaucuggaccuacaacgccgagcuccucguccuccucgagaacgagcgcacccucgacuaccacgacuccaacgucaagaaccucuacgagaagguccgcauccagcucaagaacaacgccaaggagaucggcaacggcugcuucgaguucuaccacaagugcgacaacaccugcauggaguccgucaagaacggcaccuacgacuaccccaaguacuccgaggaggccaagcucaaccgcgaggagaucgacggcgucaagcucgaguccacccgcaucuaccagauccucgccaucuacuccaccgucgccuccucccucguccucgucgucucccucggcgccaucuccuucuggaugugcuccaacggcucccuccagugccgcaucugcaucuga

SEQ ID NO: 100204 - RNA, 1701 nt, Artificial Sequence; identical to SEQ ID NO: 99807
  derived and/or modified CDS sequence (opt2) from hemagglutinin__InfluenzaA__ADD22511

SEQ ID NO: 100205 - RNA, 1701 nt, Artificial Sequence
  derived and/or modified CDS sequence (opt2) from hemagglutinin__InfluenzaA__ADD22521
augaaggccauccucgucguccuccucuacaccuucgccaccgccaacgccgacacccucugcaucggcuaccacgccaacaacuccaccgacaccgucgacaccguccucgagaagaacgucaccgucacccacuccgucaaccuccucgaggacaagcacaacggcaagcucugcaagcuccgcggcgucgccccccuccaccucggcaagugcaacaucgccggcuggauccucggcaaccccgagugcgagucccucuccaccgccuccuccugguccuacaucgucgagaccuccuccuccgacaacggcaccugcuaccccggcgacuucaucgacuacgaggagcuccgcgagcagcucuccuccgucuccuccuucgagcgcuucgagaucuuccccaagaccuccuccuggcccaaccacgacuccaacaagggcgucaccgccgccugcccccacgccggcgccaaguccuucuacaagaaccucaucuggcucgucaagaagggcaacuccuaccccaagcucuccaaguccuacaucaacgacaagggcaaggagguccucguccucuggggcauccaccaccccuccaccuccgccgaccagcagucccucuaccagaacgccgacaccuacgucuucgucggcaccucccgcuacuccaagaaguucaagcccgagaucgccauccgccccaagguccgcgaccaggagggccgcaugaacuacuacuggacccucgucgagcccggcgacaagaucaccuucgaggccaccggcaaccucgucgucccccgcuacgccuucgccauggagcgcaacgccggcuccggcaucaucaucuccgacacccccguccacgacugcaacaccaccugccagacccccaagggcgccaucaacaccucccuccccuuccagaacauccaccccaucaccaucggcaagugccccaaguacgucaaguccaccaagcuccgccucgccaccggccuccgcaacguccccuccauccagucccgcggccucuucggcgccaucgccggcuucaucgagggcggcuggaccggcauggucgacggcugguacggcuaccaccaccagaacgagcagggcuccggcuacgccgccgaccucaaguccacccagaacgccaucgacgagaucaccaacaaggucaacuccgucaucgagaagaugaacacccaguucaccgccgucggcaaggaguucaaccaccucgagaagcgcaucgagaaccucaacaagaagaucgacgacggcuuccucgacaucuggaccuacaacgccgagcuccucguccuccucgagaacgagcgcacccucgacuaccacgacuccaacgucaagaaccucuacgagaagguccgcucccagcucaagaacaacgccaaggagaucggcaacggcugcuucgaguucuaccacaagugcgacaacaccugcauggaguccgucaagaacggcaccuacgacuaccccaaguacuccgaggaggccaagcucaaccgcgaggagaucgacggcgucaagcucgaguccacccgcaucuaccagauccucgccaucuacuccaccgucgccuccucccucguccucgucgucucccucggcgccaucuccuucuggaugugcuccaacggcucccuccagugccgcaucugcaucuga

SEQ ID NO: 100206 - RNA, 1701 nt, Artificial Sequence; identical to SEQ ID NO: 98705
  derived and/or modified CDS sequence (opt2) from hemagglutinin__InfluenzaA__ADD22531

SEQ ID NO: 100207 - RNA, 1701 nt, Artificial Sequence
  derived and/or modified CDS sequence (opt2) from hemagglutinin__InfluenzaA__ADD22541
augaaggccauccucgucguccuccucuacaccuucgccaccgccaacgccgacacccucugcaucggcuaccacgccaacaacuccaccgacaccgucgacaccguccucgagaagaacgucaccgucacccacuccgucaaccuccucgaggacaagcacaacggcaagcucugcaagcuccgcggcgucgccccccuccaccucggcaagugcaacaucgccggcuggauccucggcaaccccgagugcgagucccucuccaccgccuccuccugguccuacaucgucgagaccuccuccuccggcaacggcaccugcuaccccggcgacuucaucgacuacgaggagcuccgcgagcagcucuccuccgucuccuccuucgagcgcuucgagaucuuccccaagaccuccuccuggcccaaccacgacuccaacaagggcgucaccgccgccugcccccacgccggcgccaaguccuucuacaagaaccucaucuggcucgucaagaagggcaacuccuaccccaagcucuccaaguccuacaucaacgacaagggcaaggagguccucguccucuggggcauccaccaccccuccaccuccgccgaccagcagucccucuaccagaacgccgacgccuacgucuucgucggcaccuccaaguacuccaagaaguucaagcccgagaucgccauccgccccaagguccgcgaccaggagggccgcaugaacuacuacuggacccucgucgagcccggcgacaagaucaccuucgaggccaccggcaaccucgucgucccccgcuacgccuucgccauggagcgcaacgccggcuccggcaucaucaucuccgacacccccguccacgacugcaacaccaccugccagacccccaagggcgccaucaacaccucccuccccuuccagaacauccaccccaucaccaucggcaagugccccaaguacgucaaguccaccaagcuccgccucgccaccggccuccgcaacguccccuccauccagucccgcggccucuucggcgccaucgccggcuucaucgagggcggcuggaccggcauggucgacggcugguacggcuaccaccaccagaacgagcagggcuccggcuacgccgccgaccucaaguccacccagaacgccaucgacgagaucaccaacaaggucaacuccgucaucgagaagaugaacacccaguucaccgccgucggcaaggaguucaaccaccucgagaagcgcaucgagaaccucaacaagaaggucgacgacggcuuccucgacaucuggaccuacaacgccgagcuccucguccuccucgagaacgagcgcacccucgacuaccacgacuccaacgucaagaaccucuacgagaagguccgcucccagcucaagaacaacgccaaggagaucggcaacggcugcuucgaguucuaccacaagugcgacaacaccugcauggaguccgucaagaacggcaccuacgacuaccccaaguacuccgaggaggccaagcucaaccgcgaggagaucgacggcgucaagcucgaguccacccgcaucuaccagauccucgccaucuacuccaccgucgccuccucccucguccucgucgucucccucggcgccaucuccuucuggaugugcuccaacggcucccuccagugccgcaucugcaucuga

SEQ ID NO: 100208 - RNA, 1701 nt, Artificial Sequence; identical to SEQ ID NO: 99807
  derived and/or modified CDS sequence (opt2) from hemagglutinin__InfluenzaA__ADD22554

SEQ ID NO: 100209 - RNA, 1701 nt, Artificial Sequence; identical to SEQ ID NO: 99807
  derived and/or modified CDS sequence (opt2) from hemagglutinin__InfluenzaA__ADD22564

SEQ ID NO: 100210 - RNA, 1701 nt, Artificial Sequence
  derived and/or modified CDS sequence (opt2) from hemagglutinin__InfluenzaA__ADD22574
augaaggccauccucgucguccuccucuacaccuucgccaccgccaacgccgacacccucugcaucggcuaccacgccaacaacuccaccgacaccgucgacaccguccucgagaagaacgucaccgucacccacuccgucaaccuccucgaggacaagcacaacggcaagcucugcaagcuccgcggcgucgccccccuccaccucggcaagugcaacaucgccggcuggauccucggcaaccccgagugcgagucccucuccaccgccuccuccugguccuacaucgucgagaccuccuccuccgacaacggcaccugcuaccccggcgacuucaucgacuacgaggagcuccgcgagcagcucuccuccgucuccuccuucgagcgcuucgagaucuuccccaagaccuccuccuggcccaaccacgacuccaacaagggcgucaccgccgccugcccccacgccggcgccaaguccuucuacaagaaccucaucuggcucgucaagaagggcaacuccuaccccaagcucuccaaguccuacaucaacgacaagggcaaggagguccucguccucuggggcauccaccaccccuccaccuccgccgaccagcagucccucuaccagaacgccgacaccuacgucuucgucggcaccucccgcuacuccaagaaguucaagcccgagaucgccauccgccccaagguccgcgaccaggagggccgcaugaacuacuacuggacccucgucgagcccggcgacaagaucaccuucgaggccaccggcaaccucgucgucccccgcuacgccuucgccauggagcgcaacgccggcuccggcaucaucaucuccgacacccccguccacgacugcaacaccaccugccagacccucaagggcgccaucaacaccucccuccccuuccagaacauccaccccaucaccaucggcaagugccccaaguacgucaaguccaccaagcuccgccucgccaccggccuccgcaacguccccuccauccagucccgcggccucuucggcgccaucgccggcuucaucgagggcggcuggaccggcauggucgacggcugguacggcuaccaccaccagaacgagcagggcuccggcuacgccgccgaccucaaguccacccagaacgccaucgacgagaucaccaacaaggucaacuccgucaucgagaagaugaacacccaguucaccgccgucggcaaggaguucaaccaccucgagaagcgcaucgagaaccucaacaagaagaucgacgacggcuuccucgacaucuggaccuacaacgccgagcuccucguccuccucgagaacgagcgcacccucgacuaccacgacuccaacgucaagaaccucuacgagaagguccgcucccagcucaagaacaacgccaaggagaucggcaacggcugcuucgaguucuaccacaagugcgacaacaccugcauggaguccgucaagaacggcaccuacgacuaccccaaguacuccgaggaggccaagcucaaccgcgaggagaucgacggcgucaagcucgaguccacccgcaucuaccagauccucgccaucuacuccaccgucgccuccucccucguccucgucgucucccucggcgccaucuccuucuggaugugcuccaacggcucccuccagugccgcaucugcaucuga

SEQ ID NO: 100211 - RNA, 1701 nt, Artificial Sequence; identical to SEQ ID NO: 99807
  derived and/or modified CDS sequence (opt2) from hemagglutinin__InfluenzaA__ADD22584

SEQ ID NO: 100212 - RNA, 1701 nt, Artificial Sequence; identical to SEQ ID NO: 98705
  derived and/or modified CDS sequence (opt2) from hemagglutinin__InfluenzaA__ADD22594

SEQ ID NO: 100213 - RNA, 1701 nt, Artificial Sequence; identical to SEQ ID NO: 99807
  derived and/or modified CDS sequence (opt2) from hemagglutinin__InfluenzaA__ADD22604

SEQ ID NO: 100214 - RNA, 1701 nt, Artificial Sequence; identical to SEQ ID NO: 99807
  derived and/or modified CDS sequence (opt2) from hemagglutinin__InfluenzaA__ADD22614

SEQ ID NO: 100215 - RNA, 1701 nt, Artificial Sequence; identical to SEQ ID NO: 99807
  derived and/or modified CDS sequence (opt2) from hemagglutinin__InfluenzaA__ADD22624

SEQ ID NO: 100216 - RNA, 1701 nt, Artificial Sequence
  derived and/or modified CDS sequence (opt2) from hemagglutinin__InfluenzaA__ADD22634
augaaggccauccucgucguccuccucugcaccuucgccaccgccaacgccgacacccucugcaucggcuaccacgccaacaacuccaccgacaccgucgacaccguccucgagaagaacgucaccgucacccacuccgucaaccuccucgaggacaagcacaacggcaagcucugcaagcuccgcggcgucgccccccuccaccucggcaagugcaacaucgccggcuggauccucggcaaccccgagugcgagucccucuccaccgccuccuccugguccuacaucgucgagaccuccuccuccgacaacggcaccugcuaccccggcgacuucaucgacuacgaggagcuccgcgagcagcucuccuccgucuccuccuucgagcgcuucgagaucuuccccaagaccuccuccuggcccaaccacgacuccaacaagggcgucaccgccgccugcccccacgccggcgccaaguccuucuacaagaaccucaucuggcucgucaagaagggcaacuccuaccccaagcucuccaaguccuacaucaacgacaagggcaaggagguccucguccucuggggcauccaccaccccuccaccuccgccgaccagcagucccucuaccagaacgccgacgccuacgucuucgucggcaccucccgcuacuccaagaaguucaagcccgagaucgccauccgccccaagguccgcgaccaggagggccgcaugaacuacuacuggacccucgucgagcccggcgacaagaucaccuucgaggccaccggcaaccucgucgucccccgcuacgccuucgccauggagcgcaacgccggcuccggcaucaucaucuccgacacccccguccacgacugcaacaccaccugccagacccccaagggcgccaucaacaccucccuccccuuccagaacauccaccccaucaccaucggcaagugccccaaguacgucaaguccaccaagcuccgccucgccaccggccuccgcaacguccccuccauccagucccgcggccucuucggcgccaucgccggcuucaucgagggcggcuggaccggcauggucgacggcugguacggcuaccaccaccagaacgagcagggcuccggcuacgccgccgaccucaaguccacccagaacgccaucgacgagaucaccaacaaggucaacuccgucaucgagaagaugaacacccaguucaccgccgucggcaaggaguucaaccaccucgagaagcgcaucgagaaccucaacaagaagaucgacgacggcuuccucgacaucuggaccuacaacgccgagcuccucguccuccucgagaacgagcgcacccucgacuaccacgacuccaacgucaagaaccucuacgagaagguccgcucccagcucaagaacaacgccaaggagaucggcaacggcugcuucgaguucuaccacaagugcgacaacaccugcauggaguccgucaagaacggcaccuacgacuaccccaaguacuccgaggaggccaagcucaaccgcgaggagaucgacggcgucaagcucgaguccacccgcaucuaccagauccucgccaucuacuccaccgucgccuccucccucguccucgucgucucccucggcgccaucuccuucuggaugugcuccaacggcucccuccagugccgcaucugcaucuga

SEQ ID NO: 100217 - RNA, 1701 nt, Artificial Sequence
  derived and/or modified CDS sequence (opt2) from hemagglutinin__InfluenzaA__ADD22645
augaaggccauccucgucguccuccucuacaccuucgccaccgccaacgccgacacccucugcaucggcuaccacgccaacaacuccaccgacaccgucgacaccguccucgagaagaacgucaccgucacccacuccgucaaccuccucgaggacaagcacaacggcaagcucugcaagcuccgcggcgucgccccccuccaccucggcaagugcaacaucgccggcuggauccucggcaaccccgagugcgagucccucuccaccgccuccuccugguccuacaucgucgagaccuccuccuccggcaacggcaccugcuaccccggcgacuucaucgacuacgaggagcuccgcgagcagcucuccuccgucuccuccuucgagcgcuucgagaucuuccccaagaccuccuccuggcccaaccacgacuccaacaagggcgucaccgccgccugcccccacgccggcgccaaguccuucuacaagaaccucaucuggcucgucaagaagggcaacuccuaccccaagcucuccaaguccuacaucaacgacaagggcaaggagguccucguccucuggggcauccaccaccccuccaccuccgccgaccagcagucccucuaccagaacgccgacgccuacgucuucgucggcaccucccgcuacuccaagaaguucaagcccgagaucgccauccgccccaagguccgcgaccaggagggccgcaugaacuacuacuggacccucgucgagcccggcgacaagaucaccuucgaggccaccggcaaccucgucgucccccgcuacgccuucgccauggagcgcaacgccggcuccggcaucaucaucuccgacacccccguccacgacugcaacaccaccugccagacccccaagggcgccaucaacaccucccuccccuuccagaacauccaccccaucaccaucggcaagugccccaaguacgucaaguccaccaagcuccgccucgccaccggccuccgcaacguccccuccauccagucccgcggccucuucggcgccaucgccggcuucaucgagggcggcuggaccggcauggucgacggcugguacggcuaccaccaccagaacgagcagggcuccggcuacgccgccgaccucaaguccacccagaacgccaucgacgagaucaccaacaaggucaacuccgucaucgagaagaugaacacccaguucaccgccgucggcaaggaguucaaccaccucgagaagcgcaucgagaaccucaacaagaaggucgacgacggcuuccucgacaucuggaccuacaacgccgagcuccucguccuccucgagaacgagcgcacccucgacuaccacgacuccaacgucaagaaccucuacgagaagguccgcucccagcucaagaacaacgccaaggagaucggcaacggcugcuucgaguucuaccacaagugcgacaacaccugcauggaguccgucaagaacggcaccuacgacuaccccaaguacuccgaggaggccaagcucaaccgcgaggagaucgagggcgucaagcucgaguccacccgcaucuaccagauccucgccaucuacuccaccgucgccuccucccucguccucgucgucucccucggcgccaucuccuucuggaugugcuccaacggcucccuccagugccgcaucugcaucuga

SEQ ID NO: 100218 - RNA, 1701 nt, Artificial Sequence
  derived and/or modified CDS sequence (opt2) from hemagglutinin__InfluenzaA__ADD22665
augaaggccauccucgucguccuccucuacaccuucgccaccgccaacgccgacacccucugcaucggcuaccacgccaacaacuccaccgacaccgucgacaccguccucgagaagaacgucaccgucacccacuccgucaaccuccucgaggacaagcacaacggcaagcucugcaagcuccgcggcgucgccccccuccaccucggcaagugcaacaucgccggcuggauccucggcaaccccgagugcgagucccucuccaccgccuccuccugguccuacaucgucgagaccuccuccuccggcaacggcaccugcuaccccggcgacuucaucgacuacgaggagcuccgcgagcagcucuccuccgucuccuccuucgagcgcuucgagaucuuccccaagaccuccuccuggcccaaccacgacuccaacaagggcgucaccgccgccugcccccacgccggcgccaaguccuucuacaagaaccucaucuggcucgucaagaagggcaacuccuaccccaagcucuccaaguccuacaucaacgacaagcgcaaggagguccucguccucuggggcauccaccaccccuccaccuccgccgaccagcagucccucuaccagaacgccgacgccuacgucuucgucggcaccuccaaguacuccaagaaguucaagcccgagaucgccauccgccccaagguccgcgaccaggagggccgcaugaacuacuacuggacccucgucgagcccggcgacaagaucaccuucgaggccaccggcaaccucgucgucccccgcuacgccuucgccauggagcgcaacgccggcuccggcaucaucaucuccgacacccccguccacgacugcaacaccaccugccagacccccaagggcgccaucaacaccucccuccccuuccagaacauccaccccaucaccaucggcaagugccccaaguacgucaaguccaccaagcuccgccucgccaccggccuccgcaacguccccuccauccagucccgcggccucuucggcgccaucgccggcuucaucgagggcggcuggaccggcauggucgacggcugguacggcuaccaccaccagaacgagcagggcuccggcuacgccgccgaccucaaguccacccagaacgccaucgacgagaucaccaacaaggucaacuccgucaucgagaagaugaacacccaguucaccgccgucggcaaggaguucaaccaccucgagaagcgcaucgagaaccucaacaagaaggucgacgacggcuuccucgacaucuggaccuacaacgccgagcuccucguccuccucgagaacgagcgcacccucgacuaccacgacuccaacgucaagaaccucuacgagaagguccgcucccagcucaagaacaacgccaaggagaucggcaacggcugcuucgaguucuaccacaagugcgacaacaccugcauggaguccgucaagaacggcaccuacgacuaccccaaguacuccgaggaggccaagcucaaccgcgaggagaucgacggcgucaagcucgaguccacccgcaucuaccagauccucgccaucuacuccaccgucgccuccucccucguccucgucgucucccucggcgccaucuccuucuggaugugcuccaacggcucccuccagugccgcaucugcaucuga

SEQ ID NO: 100219 - RNA, 1701 nt, Artificial Sequence; identical to SEQ ID NO: 99807
  derived and/or modified CDS sequence (opt2) from hemagglutinin__InfluenzaA__ADD22675

SEQ ID NO: 100220 - RNA, 1701 nt, Artificial Sequence; identical to SEQ ID NO: 99807
  derived and/or modified CDS sequence (opt2) from hemagglutinin__InfluenzaA__ADD22685

SEQ ID NO: 100221 - RNA, 1701 nt, Artificial Sequence; identical to SEQ ID NO: 99807
  derived and/or modified CDS sequence (opt2) from hemagglutinin__InfluenzaA__ADD22695

SEQ ID NO: 100222 - RNA, 1701 nt, Artificial Sequence
  derived and/or modified CDS sequence (opt2) from hemagglutinin__InfluenzaA__ADD22722
augaaggccauccucgucguccuccucuacaccuucgccaccgccaacgccgacacccucugcaucggcuaccacgccaacaacuccaccgacaccgucgacaccguccucgagaagaacgucaccgucacccacuccgucaaccuccucgaggaccgccacaacggcaagcucugcaagcuccgcggcgucgccccccuccaccucggcaagugcaacaucgccggcuggauccucggcaaccccgagugcgagucccucuccaccgccuccuccugguccuacaucgucgagaccuccuccuccggcaacggcaccugcuaccccggcgacuucaucgacuacgaggagcuccgcgagcagcucuccuccgucuccuccuucgagcgcuucgagaucuuccccaagaccuccuccuggcccaaccacgacuccaacaagggcgucaccgccgccugcccccacgccggcgccaaguccuucuacaagaaccucaucuggcucgucaagaagggcaacuccuaccccaagcucuccaaguccuacaucaacgacaagggcaaggagguccucguccucuggggcauccaccaccccuccaccuccgccgaccagcagucccucuaccagaacgccgacgccuacgucuucgucggcaccuccuccuacuccaagaaguucaagcccgagaucgccauccgccccaagguccgcgaccaggagggccgcaugaacuacuacuggacccucgucgagcccggcgacaagaucaccuucgaggccaccggcaaccucgucgucccccgcuacgccuucgccauggagcgcaacgccggcuccggcaucaucaucuccgacacccccguccacgacugcaacaccaccugccagacccccaagggcgccaucaacaccucccuccccuuccagaacauccaccccaucaccaucggcaagugccccaaguacgucaaguccaccaagcuccgccucgccaccggccuccgcaacguccccuccauccagucccgcggccucuucggcgccaucgccggcuucaucgagggcggcuggaccggcauggucgacggcugguacggcuaccaccaccagaacgagcagggcuccggcuacgccgccgaccucaaguccacccagaacgccaucgacgagaucaccaacaaggucaacuccgucaucgagaagaugaacacccaguucaccgccgucggcaaggaguucaaccaccucgagaagcgcaucgagaaccucaacaagaaggucgacgacggcuuccucgacaucuggaccuacaacgccgagcuccucguccuccucgagaacgagcgcacccucgacuaccacgacuccaacgucaagaaccucuacgagaagguccgcucccagcucaagaacaacgccaaggagaucggcaacggcugcuucgaguucuaccacaagugcgacaacaccugcauggaguccgucaagaacggcaccuacgacuaccccaaguacuccgaggaggccaagcucaaccgcgaggagaucgacggcgucaagcucgaguccacccgcaucuaccagauccucgccaucuacuccaccgucgccuccucccucguccucgucgucucccucggcgccaucuccuucuggaugugcuccaacggcucccuccagugccgcaucugcaucuga

SEQ ID NO: 100223 - RNA, 1701 nt, Artificial Sequence; identical to SEQ ID NO: 100205
  derived and/or modified CDS sequence (opt2) from hemagglutinin__InfluenzaA__ADD22732

SEQ ID NO: 100224 - RNA, 1701 nt, Artificial Sequence
  derived and/or modified CDS sequence (opt2) from hemagglutinin__InfluenzaA__ADD22742
augaaggccauccucgucguccuccucuacaccuucgccaccgccaacgccgacacccucugcaucggcuaccacgccaacaacuccaccgacaccgucgacaccguccucgagaagaacgucaccgucacccacuccgucaaccuccucgaggacaagcacaacggcaagcucugcaagcuccgcggcgucgccccccuccaccucggcaagugcaacaucgccggcuggauccucggcaaccccgagugcgagucccucuccaccgccuccuccugguccuacaucgucgagaccuccuccuccggcaacggcaccugcuaccccggcgacuucaucgacuacgaggagcuccgcgagcagcucuccuccgucuccuccuucgagcgcuucgagaucuuccccaagaccuccuccuggcccaaccacgacuccaacaagggcgucaccgccgccugcccccacgccggcgccaaguccuucuacaagaaccucaucuggcucgucaagaagggcaacuccuaccccaagcucuccaaguccuacaucaacgacaagggcaaggagguccucguccucuggggcauccaccaccccuccaccuccgccgaccagcagucccucuaccagaacgccgacgccuacgucuucgucggcaccuccuccuacuccaagaaguucaagcccgagaucgccauccgccccaagguccgcgaccaggagggccgcaugaacuacuacuggacccucgucgagcccggcgacaagaucaccuucgaggccaccggcaaccucgucgucccccgcuacgccuucgccauggagcgcaacgccggcuccggcaucaucaucuccgacacccccguccacgacugcaacaccaccugccagacccccaagggcgccaucaacaccucccuccccuuccagaacauccaccccaucaccaucggcaagugccccaaguacgucaaguccaccaagcuccgccucgccaccggccuccgcaacguccccuccauccagucccgcggccucuucggcgccaucgccggcuucaucgagggcggcuggaccggcauggucgacggcugguacggcuaccaccaccagaacgagcagggcuccggcuacgccgccgaccucaaguccacccagaacgccaucgacgagaucaccaacaaggucaacuccgucaucgagaagaugaacacccaguucaccgccgucggcaaggaguucaaccaccucgagaagcgcaucgagaaccucaacaagaaggucgacgacggcuuccucgacaucuggaccuacaacgccgagcuccucguccuccucgagaacgagcgcacccucgacuaccacgacuccaacgucaagaaccucuacgagaagguccgcucccagcucaagaacaacgccaaggagaucggcaacggcugcuucgaguucuaccacaagugcgacaacaccugcauggaguccgucaagaacggcaccuacgacuaccccaaguacuccgaggaggccaagcucaaccgcgaggagaucgacggcgucaagcucgaguccacccgcaucuaccagauccucgccaucuacuccaccgucgccuccucccucguccucgucgucucccucggcgccaucuccuucuggaugugcuccaacggcucccuccagugccgcaucugcaucuga

SEQ ID NO: 100225 - RNA, 1701 nt, Artificial Sequence; identical to SEQ ID NO: 98705
  derived and/or modified CDS sequence (opt2) from hemagglutinin__InfluenzaA__ADD22752

SEQ ID NO: 100226 - RNA, 1701 nt, Artificial Sequence; identical to SEQ ID NO: 98796
  derived and/or modified CDS sequence (opt2) from hemagglutinin__InfluenzaA__ADD22762

SEQ ID NO: 100227 - RNA, 1701 nt, Artificial Sequence; identical to SEQ ID NO: 99807
  derived and/or modified CDS sequence (opt2) from hemagglutinin__InfluenzaA__ADD22772

SEQ ID NO: 100228 - RNA, 1701 nt, Artificial Sequence; identical to SEQ ID NO: 99807
  derived and/or modified CDS sequence (opt2) from hemagglutinin__InfluenzaA__ADD22782

SEQ ID NO: 100229 - RNA, 1701 nt, Artificial Sequence
  derived and/or modified CDS sequence (opt2) from hemagglutinin__InfluenzaA__ADD22792
augaaggccauccucgucguccuccucuacaccuucgccaccgccaacgccgacacccucugcaucggcuaccacgccaacaacuccaccgacaccgucgacaccguccucgagaagaacgucaccgucacccacuccgucaaccuccucgaggacaagcacaacggcaagcucugcaagcuccgcggcgucgccccccuccaccucggcaagugcaacaucgccggcuggauccucggcaaccccgagugcgagucccucuccaccgccuccuccugguccuacaucgucgagaccuccuccuccggcaacggcaccugcuaccccggcgacuucaucaacuacgaggagcuccgcgagcagcucuccuccgucuccuccuucgagcgcuucgagaucuuccccaagaccuccuccuggcccaaccacgacuccaacaagggcgucaccgccgccugcccccacgccggcgccaaguccuucuacaagaaccucaucuggcucgucaagaagggcaacuccuaccccaagcucuccaaguccuacaucaacgacaagggcaaggagguccucguccucuggggcauccaccaccccuccaccuccgccgaccagcagucccucuaccagaacgccgacgccuacgucuucgucggcaccucccgcuacuccaagaaguucaagcccgagaucgccauccgccccaagguccgcgaccaggagggccgcaugaacuacuacuggacccucgucgagcccggcgacaagaucaccuucgaggccaccggcaaccucgucgucccccgcuacgccuucgccauggagcgcaacgccggcuccggcaucaucaucuccgacacccccguccacgacugcaacaccaccugccagacccccaagggcgccaucaacaccucccuccccuuccagaacauccaccccaucaccaucggcaagugccccaaguacgucaaguccaccaagcuccgccucgccaccggccuccgcaacguccccuccauccagucccgcggccucuucggcgccaucgccggcuucaucgagggcggcuggaccggcauggucgacggcugguacggcuaccaccaccagaacgagcagggcuccggcuacgccgccgaccucaaguccacccagaacgccaucgacgagaucaccaacaaggucaacuccgucaucgagaagaugaacacccaguucaccgccgucggcaaggaguucaaccaccucgagaagcgcaucgagaaccucaacaagaaggucgacgacggcuuccucgacaucuggaccuacaacgccgagcuccucguccuccucgagaacgagcgcacccucgacuaccacgacuccaacgucaagaaccucuacgagaagguccgcucccagcucaagaacaacgccaaggagaucggcaacggcugcuucgaguucuaccacaagugcgacaacaccugcauggaguccgucaagaacggcaccuacgacuaccccaaguacuccgaggaggccaagcucaaccgcgaggagaucgacggcgucaagcucgaguccacccgcaucuaccagauccucgccaucuacuccaccgucgccuccucccucguccucgucgucucccucggcgccaucuccuucuggaugugcuccaacggcucccuccagugccgcaucugcaucuga

SEQ ID NO: 100230 - RNA, 1701 nt, Artificial Sequence; identical to SEQ ID NO: 100205
  derived and/or modified CDS sequence (opt2) from hemagglutinin__InfluenzaA__ADD22802

SEQ ID NO: 100231 - RNA, 1701 nt, Artificial Sequence; identical to SEQ ID NO: 99807
  derived and/or modified CDS sequence (opt2) from hemagglutinin__InfluenzaA__ADD22812

SEQ ID NO: 100232 - RNA, 1701 nt, Artificial Sequence
  derived and/or modified CDS sequence (opt2) from hemagglutinin__InfluenzaA__ADD22822
augaaggccauccucgucguccuccucuacaccuucgccaccgccaacgccgacacccucugcaucggcuaccacgccaacaacuccaccgacaccgucgacaccguccucgagaagaacgucaccgucacccacuccgucaaccuccucgaggacaagcacaacggcaagcucugcaagcuccgcggcgucgccccccuccaccucggcaagugcaacaucgccggcuggauccucggcaaccccgagugcgagucccucuccaccgccuccuccugguccuacaucgucgagaccuccuccgccgacaacggcaccugcuaccccggcgacuucaucgacuacgaggagcuccgcgagcagcucuccuccgucuccuccuucgagcgcuucgagaucuuccccaagaccuccuccuggcccaaccacgacuccaacaagggcgucaccgccgccugcccccacgccggcgccaaguccuucuacaagaaccucaucuggcucgucaagaagggcaacuccuaccccaagcucuccaaguccuacaucaacgacaagggcaaggagguccucguccucuggggcauccaccaccccuccaccuccgccgaccagcagucccucuaccagaacgccgacgccuacgucuucgucggcaccuccaaguacuccaagaaguucaagcccgagaucgccauccgccccaagguccgcgaccaggagggccgcaugaacuacuacuggacccucgucgagcccggcgacaagaucaccuucgaggccaccggcaaccucgucgucccccgcuacgccuucgccauggagcgcaacgccggcuccggcaucaucaucuccgacacccccguccacgacugcaacaccaccugccagacccccaagggcgccaucaacaccucccuccccuuccagaacauccaccccaucaccaucggcaagugccccaaguacgucaaguccaccaagcuccgccucgccaccggccuccgcaacguccccuccauccagucccgcggccucuucggcgccaucgccggcuucaucgagggcggcuggaccggcauggucgacggcugguacggcuaccaccaccagaacgagcagggcuccggcuacgccgccgaccucaaguccacccagaacgccaucgacgagaucaccaacaaggucaacuccgucaucgagaagaugaacacccaguucaccgccgucggcaaggaguucaaccaccucgagaagcgcaucgagaaccucaacaagaagaucgacgacggcuuccucgacaucuggaccuacaacgccgagcuccucguccuccucgagaacgagcgcacccucgacuaccacgacuccaacgucaagaaccucuacgagaagguccgcucccagcucaagaacaacgccaaggagaucggcaacggcugcuucgaguucuaccacaagugcgacaacaugugcauggaguccgucaagaacggcaccuacgacuaccccaaguacuccgaggaggccaagcucaaccgcgaggagaucgacggcgucaagcucgaguccacccgcaucuaccagauccucgccaucuacuccaccgucgccuccucccucguccucgucgucucccucggcgccaucuccuucuggaugugcuccaacggcucccuccagugccgcaucugcaucuga

SEQ ID NO: 100233 - RNA, 1701 nt, Artificial Sequence; identical to SEQ ID NO: 99807
  derived and/or modified CDS sequence (opt2) from hemagglutinin__InfluenzaA__ADD22832

SEQ ID NO: 100234 - RNA, 1701 nt, Artificial Sequence; identical to SEQ ID NO: 99807
  derived and/or modified CDS sequence (opt2) from hemagglutinin__InfluenzaA__ADD22842

SEQ ID NO: 100235 - RNA, 1701 nt, Artificial Sequence
  derived and/or modified CDS sequence (opt2) from hemagglutinin__InfluenzaA__ADD22852
augaaggccauccucgucguccuccucuacaccuucgccaccgccaacgccgacacccucugcaucggcuaccacgccaacaacuccaccgacaccgucgacaccguccucgagaagaacgucaccgucacccacuccgucaaccuccucgaggacaagcacaacggcaagcucugcaagcuccgcggcgucgccccccuccaccucggcaagugcaacaucgccggcuggauccucggcaaccccgagugcgagucccucuccaccgccuccuccugguccuacaucgucgagaccuccuccuccgacaacggcaccugcuaccccggcgacuucaucgacuacgaggagcuccgcgagcagcucuccuccgucuccuccuucgagcgcuucgagaucuuccccaagaccuccuccuggcccaaccacgacuccaacaagggcgucaccgccgccugcccccacgccggcgccaaguccuucuacaagaaccucaucuggcucgucaagaagggcaacuccuaccccaagcucuccaaguccuacaucaacgacaagggcaaggagguccucguccucuggggcauccaccaccccuccaccuccgccgaccagcagucccucuaccagaacgccgacgccuacgucuucgucggcaccucccgcuacuccaagaaguucaagcccgagaucgccauccgccccaagguccgcgaccaggagggccgcaugaacuacuacuggacccucgucgagcccggcgacaagaucaccuucgaggccaccggcaaccucgucgucccccgcuacgccuucgccauggagcgcaacgccggcuccggcaucgucaucuccgacacccccguccacgacugcaacaccaccugccagacccccaagggcgccaucaacaccucccuccccuuccagaacauccaccccaucaccaucggcaagugccccaaguacgucaaguccaccaagcuccgccucgccaccggccuccgcaacguccccuccauccagucccgcggccucuucggcgccaucgccggcuucaucgagggcggcuggaccggcauggucgacggcugguacggcuaccaccaccagaacgagcagggcuccggcuacgccgccgaccucaaguccacccagaacgccaucgacgagaucaccaacaaggucaacuccgucaucgagaagaugaacacccaguucaccgccgucggcaaggaguucaaccaccucgagaagcgcaucgagaaccucaacaagaaggucgacgacggcuuccucgacaucuggaccuacaacgccgagcuccucguccuccucgagaacgagcgcacccucgacuaccacgacuccaacgucaagaaccucuacgagaagguccgcucccagcucaagaacaacgccaaggagaucggcaacggcugcuucgaguucuaccacaagugcgacaacaccugcauggaguccgucaagaacggcaccuacgacuaccccaaguacuccgaggaggccaagcucaaccgcgaggagaucgacggcgucaagcucgaguccacccgcaucuaccagauccucgccaucuacuccaccgucgccuccucccucguccucgucgucucccucggcgccaucuccuucuggaugugcuccaacggcucccuccagugccgcaucugcaucuga

SEQ ID NO: 100236 - RNA, 1701 nt, Artificial Sequence
  derived and/or modified CDS sequence (opt2) from hemagglutinin__InfluenzaA__ADD22941
augaaggccauccucgucguccuccucuacaccuucgccaccgccaacgccgacacccucugcaucggcuaccacgccaacaacuccaccgacaccgucgacaccguccucgagaagaacgucaccgucacccacuccgucaaccuccucgaggacaagcacaacggcaagcucugcaagcuccgcggcgucgccccccuccaccucggcaagugcaacaucgccggcuggauccucggcaaccccgagugcgagucccucuccaccgccaucuccugguccuacaucgucgagaccuccuccuccggcaacggcaccugcuaccccggcgacuucaucgacuacgaggagcuccgcgagcagcucuccuccgucuccuccuucgagcgcuucgagaucuuccccaagaccuccuccuggcccaaccacgacuccaacaagggcgucaccgccgccugcccccacgccggcgccaaguccuucuacaagaaccucaucuggcucgucaagaagggcaacuccuaccccaagcucuccaaguccuacaucaacgacaagggcaaggagguccucguccucuggggcauccaccaccccuccaccuccgccgaccagcagucccucuaccagaacgccgacgccuacgucuucgucggcaccucccgcuacuccaagaaguucaagcccgagaucgccauccgccccaagguccgcgaccaggagggccgcaugaacuacuacuggacccucgucgagcccggcgacaagaucaccuucgaggccaccggcaaccucgucgucccccgcuacgccuucgccauggagcgcaacgccggcuccggcaucaucaucuccgacacccccguccacgacugcaacaccaccugccagacccccaagggcgccaucaacaccucccuccccuuccagaacauccaccccaucaccaucggcaagugccccaaguacgucaaguccaccaagcuccgccucgccaccggccuccgcaacguccccuccauccagucccgcggccucuucggcgccaucgccggcuucaucgagggcggcuggaccggcauggucgacggcugguacggcuaccaccaccagaacgagcagggcuccggcuacgccgccgaccucaaguccacccagaacgccaucgacgagaucaccaacaaggucaacuccgucaucgagaagaugaacacccaguucaccgccgucggcaaggaguucaaccaccucgagaagcgcaucgagaaccucaacaagaaggucgacgacggcuuccucgacaucuggaccuacaacgccgagcuccucguccuccucgagaacgagcgcacccucgacuaccacgacuccaacgucaagaaccucuacgagaagguccgcucccagcucaagaacaacgccaaggagaucggcaacggcugcuucgaguucuaccacaagugcgacaacaccugcauggaguccgucaagaacggcaccuacgacuaccccaaguacuccgaggaggccaagcucaaccgcgaggagaucgacggcgucaagcucgaguccacccgcaucuaccagauccucgccaucuacuccaccgucgccuccucccucguccucgucgucucccucggcgccaucuccuucuggaugugcuccaacggcucccuccagugccgcaucugcaucuga

SEQ ID NO: 100237 - RNA, 1701 nt, Artificial Sequence; identical to SEQ ID NO: 99807
  derived and/or modified CDS sequence (opt2) from hemagglutinin__InfluenzaA__ADD22951

SEQ ID NO: 100238 - RNA, 1701 nt, Artificial Sequence; identical to SEQ ID NO: 99807
  derived and/or modified CDS sequence (opt2) from hemagglutinin__InfluenzaA__ADD22961

SEQ ID NO: 100239 - RNA, 1701 nt, Artificial Sequence; identical to SEQ ID NO: 99807
  derived and/or modified CDS sequence (opt2) from hemagglutinin__InfluenzaA__ADD22971

SEQ ID NO: 100240 - RNA, 1701 nt, Artificial Sequence; identical to SEQ ID NO: 99807
  derived and/or modified CDS sequence (opt2) from hemagglutinin__InfluenzaA__ADD23072

SEQ ID NO: 100241 - RNA, 1701 nt, Artificial Sequence
  derived and/or modified CDS sequence (opt2) from hemagglutinin__InfluenzaA__ADD23082
augaaggccauccucgucguccuccucuacaccuucgccaccgccaacgccgacacccucugcaucggcuaccacgccaacaacuccaccgacaccgucgacaccguccucgagaagaacgucaccgucacccacuccgucaaccuccucgaggacaagcacaacggcaagcucugcaagcuccgcggcgucgccccccuccaccucggcaagugcaacaucgccggcuggauccucggcaaccccgagugcgagucccucuccaccgccuccuccugguccuacaucgucgagaccuccuccuccggcaacggcaccugcuaccccggcgacuucaucgacuacgaggagcuccgcgagcagcucuccuccgucuccuccuucgagcgcuucgagaucuuccccaagaccuccuccuggcccaaccacgacuccaacaagggcgucaccgccgccugcccccacgccggcgccaaguccuucuacaagaaccucaucuggcucgucaagaagggcaacuccuaccccaagcucuccaaguccuacaucaacgacaagggcaaggagguccucguccucuggggcauccaccaccccuccaccuccgccgaccagcagucccucuaccagaacgccgacaccuacgucuucgucggcaccucccgcuacuccaagaaguucaagcccgagaucgccauccgccccaagguccgcgaccaggagggccgcaugaacuacuacuggacccucgucgagcccggcgacaagaucaccuucgaggccaccggcaaccucgucgucccccgcuacgccuucgccauggagcgcaacgccggcuccggcaucaucaucuccgacacccccguccacgacugcaacaccaccugccagacccccaagggcgccaucaacaccucccuccccuuccagaacauccaccccaucaccaucggcaagugccccaaguacgucaaguccaccaagcuccgccucgccaccggccuccgcaacguccccuccauccagucccgcggccucuucggcgccaucgccggcuucaucgagggcggcuggaccggcauggucgacggcugguacggcuaccaccaccagaacgagcagggcuccggcuacgccgccgaccucaaguccacccagaacgccaucgacgagaucaccaacaaggucaacuccgucaucgagaagaugaacacccaguucaccgccgucggcaaggaguucaaccaccucgagaagcgcaucgagaaccucaacaagaaggucgacgacggcuuccucgacaucuggaccuacaacgccgagcuccucguccuccucgagaacgagcgcacccucgacuaccacgacuccaacgucaagaaccucuacgagaagguccgcucccagcucaagaacaacgccaaggagaucggcaacggcugcuucgaguucuaccacaagugcgacaacaccugcauggaguccgucaagaacggcaccuacgacuaccccaaguacuccgaggaggccaagcucaaccgcgaggagaucgacggcgucaagcucgaguccacccgcaucuaccagauccucgccaucuacuccaccgucgccuccucccucguccucgucgucucccucggcgccaucuccuucuggaugugcuccaacggcucccuccagugccgcaucugcaucuga

SEQ ID NO: 100242 - RNA, 1701 nt, Artificial Sequence
  derived and/or modified CDS sequence (opt2) from hemagglutinin__InfluenzaA__ADD23102
augaaggccauccucgucguccuccucuacaccuucgccaccgccaacgccgacacccucugcaucggcuaccacgccaacaacuccaccgacaccgucgacaccguccucgagaagaacgucaccgucacccacuccgucaaccuccucgaggacaagcacaacggcaagcucugcaagcuccgcggcgucgccccccuccaccucggcaagugcaacaucgccggcuggauccucggcaaccccgagugcgagucccucuccaccgccuccuccugguccuacaucgucgagaccuccuccuccggcaacggcaccugcuaccccggcgacuucaucgacuacgaggagcuccgcgagcagcucuccuccgucuccuccuucgagaaguucgagaucuuccccaagaccuccuccuggcccaaccacgacuccaacaagggcgucaccgccgccugcccccacgccggcgccaaguccuucuacaagaaccucaucuggcucgucaagaagggcaacuccuaccccaagcucuccaaguccuacaucaacgacaagggcaaggagguccucguccucuggggcauccaccaccccuccaccuccgccgaccagcagucccucuaccagaacgccgacgccuacgucuucgucggcaccucccgcuacuccaagaaguucaagcccgagaucgccauccgccccaagguccgcgaccaggagggccgcaugaacuacuacuggacccucgucgagcccggcgacaagaucaccuucgaggccaccggcaaccucgucgucccccgcuacgccuucgccauggagcgcaacgccggcuccggcaucaucaucuccgacacccccguccacgacugcaacaccaccugccagacccccaagggcgccaucaacaccucccuccccuuccagaacauccaccccaucaccaucggcaagugccccaaguacgucaaguccaccaagcuccgccucgccaccggccuccgcaacguccccuccauccagucccgcggccucuucggcgccaucgccggcuucaucgagggcggcuggaccggcauggucgacggcugguacggcuaccaccaccagaacgagcagggcuccggcuacgccgccgaccucaaguccacccagaacgccaucgacgagaucaccaacaaggucaacuccgucaucgagaagaugaacacccaguucaccgccgucggcaaggaguucaaccaccucgagaagcgcaucgagaaccucaacaagaaggucgacgacggcuuccucgacaucuggaccuacaacgccgagcuccucguccuccucgagaacgagcgcacccucgacuaccacgacuccaacgucaagaaccucuacgagaagguccgcucccagcucaagaacaacgccaaggagaucggcaacggcugcuucgaguucuaccacaagugcgacaacaccugcauggaguccgucaagaacggcaccuacgacuaccccaaguacuccgaggaggccaagcucaaccgcgaggagaucgacggcgucaagcucgaguccacccgcaucuaccagauccucgccaucuacuccaccgucgccuccucccucguccucgucgucucccucggcgccaucuccuucuggaugugcuccaacggcucccuccagugccgcaucugcaucuga

SEQ ID NO: 100243 - RNA, 1701 nt, Artificial Sequence; identical to SEQ ID NO: 99807
  derived and/or modified CDS sequence (opt2) from hemagglutinin__InfluenzaA__ADD23112

SEQ ID NO: 100244 - RNA, 1701 nt, Artificial Sequence; identical to SEQ ID NO: 99807
  derived and/or modified CDS sequence (opt2) from hemagglutinin__InfluenzaA__ADD23122

SEQ ID NO: 100245 - RNA, 1701 nt, Artificial Sequence; identical to SEQ ID NO: 98705
  derived and/or modified CDS sequence (opt2) from hemagglutinin__InfluenzaA__ADD23132

SEQ ID NO: 100246 - RNA, 1701 nt, Artificial Sequence; identical to SEQ ID NO: 99869
  derived and/or modified CDS sequence (opt2) from hemagglutinin__InfluenzaA__ADD23142

SEQ ID NO: 100247 - RNA, 1701 nt, Artificial Sequence
  derived and/or modified CDS sequence (opt2) from hemagglutinin__InfluenzaA__ADD23162
augaaggccauccucgucguccuccucuacaccuucgccaccgccaacgccgacacccucugcaucggcuaccacgccaacaacuccaccgacaccgucgacaccguccucgagaagaacgucaccgucacccacuccgucaaccuccucgaggacaagcacaacggcaagcucugcaagcuccgcggcgucgccccccuccaccucggcaagugcaacaucgccggcuggauccucggcaaccccgagugcgagucccucuccaccgccuccuccugguccuacaucgucgagaccuccuccuccgacaacggcaccugcuaccccggcgacuucaucgacuacgaggagcuccgcgagcagcucuccuccgucuccuccuucgagcgcuucgagaucuuccccaagaccuccuccuggcccaaccacgacuccaacaagggcgucaccgccgccugcccccacgccggcgccaaguccuucuacaagaaccucaucuggcucgucaagaagggcaacuccuaccccaagcucuccaaguccuacaucaacgacaagggcaaggagguccucguccucuggggcauccaccaccccuccaccuccgccgaccagcagggccucuaccagaacgccgacgccuacgucuucgucggcaccucccgcuacuccaagaaguucaagcccgagaucgccauccgccccaagguccgcgaccaggagggccgcaugaacuacuacuggacccucgucgagcccggcgacaagaucaccuucgaggccaccggcaaccucgucgucccccgcuacgccuucgccauggagcgcaacgccggcuccggcaucaucaucuccgacacccccguccacgacugcaacaccaccugccagacccccaagggcgccaucaacaccucccuccccuuccagaacauccaccccaucaccaucggcaagugccccaaguacgucaaguccaccaagcuccgccucgccaccggccuccgcaacguccccuccauccagucccgcggccucuucggcgccaucgccggcuucaucgagggcggcuggaccggcauggucgacggcugguacggcuaccaccaccagaacgagcagggcuccggcuacgccgccgaccucaaguccacccagaacgccaucgacaagaucaccaacaaggucaacuccgucaucgagaagaugaacacccaguucaccgccgucggcaaggaguucaaccaccucgagaagcgcaucgagaaccucaacaagaaggucgacgacggcuuccucgacaucuggaccuacaacgccgagcuccucguccuccucgagaacgagcgcacccucgacuaccacgacuccaacgucaagaaccucuacgagaagguccgcucccagcucaagaacaacgccaaggagaucggcaacggcugcuucgaguucuaccacaagugcgacaacaccugcauggaguccgucaagaacggcaccuacgacuaccccaaguacuccgaggaggccaagcucaaccgcgaggagaucgacggcgucaagcucgaguccacccgcaucuaccagauccucgccaucuacuccaccgucgccuccucccucguccucgucgucucccucggcgccaucuccuucuggaugugcuccaacggcucccuccagugccgcaucugcaucuga

SEQ ID NO: 100248 - RNA, 1701 nt, Artificial Sequence; identical to SEQ ID NO: 99869
  derived and/or modified CDS sequence (opt2) from hemagglutinin__InfluenzaA__ADD23172

SEQ ID NO: 100249 - RNA, 1701 nt, Artificial Sequence; identical to SEQ ID NO: 99869
  derived and/or modified CDS sequence (opt2) from hemagglutinin__InfluenzaA__ADD23182

SEQ ID NO: 100250 - RNA, 1701 nt, Artificial Sequence; identical to SEQ ID NO: 99869
  derived and/or modified CDS sequence (opt2) from hemagglutinin__InfluenzaA__ADD23192

SEQ ID NO: 100251 - RNA, 1701 nt, Artificial Sequence; identical to SEQ ID NO: 99869
  derived and/or modified CDS sequence (opt2) from hemagglutinin__InfluenzaA__ADD23202

SEQ ID NO: 100252 - RNA, 1701 nt, Artificial Sequence; identical to SEQ ID NO: 99869
  derived and/or modified CDS sequence (opt2) from hemagglutinin__InfluenzaA__ADD23220

SEQ ID NO: 100253 - RNA, 1701 nt, Artificial Sequence; identical to SEQ ID NO: 99865
  derived and/or modified CDS sequence (opt2) from hemagglutinin__InfluenzaA__ADD23230

SEQ ID NO: 100254 - RNA, 1701 nt, Artificial Sequence; identical to SEQ ID NO: 99869
  derived and/or modified CDS sequence (opt2) from hemagglutinin__InfluenzaA__ADD23240

SEQ ID NO: 100255 - RNA, 1701 nt, Artificial Sequence
  derived and/or modified CDS sequence (opt2) from hemagglutinin__InfluenzaA__ADD23260
augaaggccauccucgucguccuccucuacaccuucgccaccgccaacgccgacacccucugcaucggcuaccacgccaacaacuccaccgacaccgucgacaccguccucgagaagaacgucaccgucacccacuccgucaaccuccucgaggacaagcacaacggcaagcucugcaagcuccgcggcgucgccccccuccaccucggcaagugcaacaucgccggcuggauccucggcaaccccgagugcgagucccucuccaccgccuccuccugguccuacaucgucgagaccuccuccuccgacaacggcaccugcuaccccggcgacuucaucgacuacgaggagcuccgcgagcagcucuccuccgucuccuccuucgagcgcuucgagaucuuccccaagaccuccuccuggcccaaccacgacuccaacaagggcgucaccgccgccugcccccacgccggcgccaaguccuucuacaagaaccucaucuggcucgucaagaagggcaacuccuaccccaagcucuccaaguccuacaucaacgacaagggcaaggagguccucguccucuggggcauccaccaccccuccaccuccgccgaccagcagucccucuaccagaacgccgacgccuacgucuucgucggcaccucccgcuacuccaagaaguucaagcccgagaucgccauccgccccaagguccgcgaccaggagggccgcaugaacuacuacuggacccucgucgagcccggcgacaagaucaccuucgaggccaccggcaaccucgucgucccccgcuacgccuucgccauggagcgcaacgccggcuccggcaucaucaucuccgacacccccguccacgacugcaacaccaccugccagacccccgagggcgccaucaacaccucccuccccuuccagaacauccaccccaucaccaucggcaagugccccaaguacgucaaguccaccaagcuccgccucgccaccggccuccgcaacguccccuccauccagucccgcggccucuucggcgccaucgccggcuucaucgagggcggcuggaccggcauggucgacggcugguacggcuaccaccaccagaacgagcagggcuccggcuacgccgccgaccucaaguccacccagaacgccaucgacaagaucaccaacaaggucaacuccgucaucgagaagaugaacacccaguucaccgccgucggcaaggaguucaaccaccucgagaagcgcaucgagaaccucaacaagaaggucgacgacggcuuccucgacaucuggaccuacaacgccgagcuccucguccuccucgagaacgagcgcacccucgacuaccacgacuccaacgucaagaaccucuacgagaagguccgcucccagcucaagaacaacgccaaggagaucggcaacggcugcuucgaguucuaccacaagugcgacaacaccugcauggaguccgucaagaacggcaccuacgacuaccccaaguacuccgaggaggccaagcucaaccgcgaggagaucgacggcgucaagcucgaguccacccgcaucuaccagauccucgccaucuacuccaccgucgccuccucccucguccucgucgucucccucggcgccaucuccuucuggaugugcuccaacggcucccuccagugccgcaucugcaucuga

SEQ ID NO: 100256 - RNA, 1701 nt, Artificial Sequence; identical to SEQ ID NO: 99058
  derived and/or modified CDS sequence (opt2) from hemagglutinin__InfluenzaA__ADD23280

SEQ ID NO: 100257 - RNA, 1701 nt, Artificial Sequence
  derived and/or modified CDS sequence (opt2) from hemagglutinin__InfluenzaA__ADD23290
augaaggccauccucgucguccuccucuacaccuucgccaccgccaacgccgacacccucugcaucggcuaccacgccaacaacuccaccgacaccgucgacaccguccucgagaagaacgucaccgucacccacuccgucaaccuccucgaggacaagcacaacggcaagcucugcaagcuccgcggcgucgccccccuccaccucggcaagugcaacaucgccggcuggauccucggcaaccccgagugcgagucccucuccaccgccuccuccugguccuacaucgucgagaccuccuccuccgacaacggcaccugcuaccccggcgacuucaucaacuacgaggagcuccgcgagcagcucuccuccgucuccuccuucgagcgcuucgagaucuuccccaagaccuccuccuggcccaaccacgacuccaacaagggcgucaccgccgccugcccccacgccggcgccaaguccuucuacaagaaccucaucuggcucgucaagaagggcaacuccuaccccaagcucuccaaguccuacaucaacgacaagggcaaggagguccucguccucuggggcauccaccaccccuccaccuccgccgaccagcagucccucuaccagaacgccgacgccuacgucuucgucggcaccucccgcuacuccaagaaguucaagcccgagaucgccauccgccccaagguccgcgaccaggagggccgcaugaacuacuacuggacccucgucgagcccggcgacaagaucaccuucgaggccaccggcaaccucgucgucccccgcuacgccuucgccauggagcgcaacgccggcuccggcaucaucaucuccgacacccccguccacgacugcaacaccaccugccagacccccaagggcgccaucaacaccucccuccccuuccagaacauccaccccaucaccaucggcaagugccccaaguacgucaaguccaccaagcuccgccucgccaccggccuccgcaacguccccuccauccagucccgcggccucuucggcgccaucgccggcuucaucgagggcggcuggaccggcauggucgacggcugguacggcuaccaccaccagaacgagcagggcuccggcuacgccgccgaccucaaguccacccagaacgccaucgacaagaucaccaacaaggucaacuccgucaucgagaagaugaacacccaguucaccgccgucggcaaggaguucaaccaccucgagaagcgcaucgagaaccucaacaagaaggucgacgacggcuuccucgacaucuggaccuacaacgccgagcuccucguccuccucgagaacgagcgcacccucgacuaccacgacuccaacgucaagaaccucuacgagaagguccgcucccagcucaagaacaacgccaaggagaucggcaacggcugcuucgaguucuaccacaagugcgacaacaccugcauggaguccgucaagaacggcaccuacgacuaccccaaguacuccgaggaggccaagcucaaccgcgaggagaucgacggcgucaagcucgaguccacccgcaucuaccagauccucgccaucuacuccaccgucgccuccucccucguccucgucgucucccucggcgccaucuccuucuggaugugcuccaacggcucccuccagugccgcaucugcaucuga

SEQ ID NO: 100258 - RNA, 1701 nt, Artificial Sequence; identical to SEQ ID NO: 99869
  derived and/or modified CDS sequence (opt2) from hemagglutinin__InfluenzaA__ADD23300

SEQ ID NO: 100259 - RNA, 1701 nt, Artificial Sequence; identical to SEQ ID NO: 100257
  derived and/or modified CDS sequence (opt2) from hemagglutinin__InfluenzaA__ADD23310

SEQ ID NO: 100260 - RNA, 1701 nt, Artificial Sequence; identical to SEQ ID NO: 99869
  derived and/or modified CDS sequence (opt2) from hemagglutinin__InfluenzaA__ADD23320

SEQ ID NO: 100261 - RNA, 1701 nt, Artificial Sequence
  derived and/or modified CDS sequence (opt2) from hemagglutinin__InfluenzaA__ADD23330
augaaggccauccucgucguccuccucuacaccuucgccaccgccaacgccgacacccucugcaucggcuaccacgccaacaacuccaccgacaccgucgacaccguccucgagaagaacgucaccgucacccacuccgucaaccuccucgaggacaagcacaacggcaagcucugcaagcuccgcggcgucgccccccuccaccucggcaagugcaacaucgccggcuggauccucggcaaccccgagugcgagucccucuccaccgccuccuccugguccuacaucgucgagaccuccuccuccgacaacggcaccugcuaccccggcgacuucaucaacuacgaggagcuccgcgagcagcucuccuccgucuccuccuucgagcgcuucgagaucuuccccaagaccuccuccuggcccaaccacgacuccaacaagggcgucaccgccgccugcccccacgccggcgccaaguccuucuacaagaaccucaucuggcucgucaagaagggcaacuccuaccccaagcucuccaaguccuacaucaacgacaagggcaaggagguccucguccucuggggcauccaccaccccuccaccuccgccgaccagcagucccucuaccagaacgccgacgccuacgucuucgucggcaccucccgcuacuccaagaaguucaagcccgagaucgccauccgccccaagguccgcgaccaggagggccgcaugaacuacuacuggacccucgucgagcccggcgacaagaucaccuucgaggccaccggcaaccucgucgucccccgcuacgccuucgccauggagcgcaacgccggcuccggcaucaucaucuccgacacccccguccacgacugcaacaccaccugccagacccccaagggcgccaucaacaccucccuccccuuccagaacauccaccccaucaccaucggcaagugccccaaguacgucaaguccaccaagcuccgccucgccaccggccuccgcaacguccccuccauccagucccgcggccucuucggcgccaucgccggcuucaucgagggcggcuggaccggcauggucgacggcugguacggcuaccaccaccagaacgagcagggcuccggcuacgccgccgaccucaaguccacccagaacgccaucgacaagaucaccaacaaggucaacuccgucaucgagaagaugaacacccaguucaccgccgucggcaaggaguucaaccaccucgagaagcgcaucgagaaccucaacaagaaggucgacgacggcuuccucgacaucuggaccuacaacgccgagcuccucguccuccucgagaacgagcgcacccucgacuaccacgacuccaacgucaagaaccucuacgagaagguccgcucccagcucaagaccaacgccaaggagaucggcaacggcugcuucgaguucuaccacaagugcgacaacaccugcauggaguccgucaagaacggcaccuacgacuaccccaaguacuccgaggaggccaagcucaaccgcgaggagaucgacggcgucaagcucgaguccacccgcaucuaccagauccucgccaucuacuccaccgucgccuccucccucguccucgucgucucccucggcgccaucuccuucuggaugugcuccaacggcucccuccagugccgcaucugcaucuga

SEQ ID NO: 100262 - RNA, 1701 nt, Artificial Sequence
  derived and/or modified CDS sequence (opt2) from hemagglutinin__InfluenzaA__ADD23355
augaaggccauccucgucguccuccucuacaccuucgccaccgccaacgccgacacccucugcaucggcuaccacgccaacaacuccaccgacaccgucgacaccguccucgagaagaacgucaccgucacccacuccgucaaccuccucgaggacaagcacaacggcaagcucugcaagcuccgcggcgucgccccccuccaccucggcaagugcaacaucgccggcuggauccucggcaaccccgagugcgagucccucuccaccgccuccuccugguccuacaucgucgagaccuccuccuccgacaacggcaccugcuaccccggcgacuucaucaacuacgaggagcuccgcgagcagcucuccuccgucuccuccuucgagauguucgagaucuuccccaagaccuccuccuggcccaaccacgacuccaacaagggcgucaccgccgccugcccccacgccggcgccaaguccuucuacaagaaccucaucuggcucgucaagaagggcaacuccuaccccaagcucuccaaguccuacaucaacgacaagggcaaggagguccucguccucuggggcauccaccaccccuccaccuccgccgaccagcagucccucuaccagaacgccgacgccuacgucuucgucggcaccucccgcuacuccaagaaguucaagcccgagaucgccauccgccccaagguccgcgaccaggagggccgcaugaacuacuacuggacccucgucgagcccggcgacaagaucaccuucgaggccaccggcaaccucgucgucccccgcuacgccuucgccauggagcgcaacgccggcuccggcaucaucaucuccgacacccccguccacgacugcaacaccaccugccagacccccaagggcgccaucaacaccucccuccccuuccagaacauccaccccaucaccaucggcaagugccccaaguacgucaaguccaccaagcuccgccucgccaccggccuccgcaacguccccuccauccagucccgcggccucuucggcgccaucgccggcuucaucgagggcggcuggaccggcauggucgacggcugguacggcuaccaccaccagaacgagcagggcuccggcuacgccgccgaccucaaguccacccagaacgccaucgacaagaucaccaacaaggucaacuccgucaucgagaagaugaacacccaguucaccgccgucggcaaggaguucaaccaccucgagaagcgcaucgagaaccucaacaagaaggucgacgacggcuuccucgacaucuggaccuacaacgccgagcuccucguccuccucgagaacgagcgcacccucgacuaccacgacuccaacgucaagaaccucuacgagaagguccgcucccagcucaagaacaacgccaaggagaucggcaacggcugcuucgaguucuaccacaagugcgacaacaccugcauggaguccgucaagaacggcaccuacgacuaccccaaguacuccgaggaggccaagcucaaccgcgaggagaucgacggcgucaagcucgaguccacccgcaucuaccagauccucgccaucuacuccaccgucgccuccucccucguccucgucgucucccucggcgccaucuccuucuggaugugcuccaacggcucccuccagugccgcaucugcaucuga

SEQ ID NO: 100263 - RNA, 1701 nt, Artificial Sequence; identical to SEQ ID NO: 100257
  derived and/or modified CDS sequence (opt2) from hemagglutinin__InfluenzaA__ADD23375

SEQ ID NO: 100264 - RNA, 1701 nt, Artificial Sequence; identical to SEQ ID NO: 99869
  derived and/or modified CDS sequence (opt2) from hemagglutinin__InfluenzaA__ADD23385

SEQ ID NO: 100265 - RNA, 1701 nt, Artificial Sequence
  derived and/or modified CDS sequence (opt2) from hemagglutinin__InfluenzaA__ADD23405
augaaggccauccucgucguccuccucuacaccuucgccaccgccaacgccgacacccucugcaucggcuaccacgccaacaacuccaccgacaccgucgacaccguccucgagaagaacgucaccgucacccacuccgucaaccuccucgaggacaagcacaacggcaagcucugcaagcuccgcggcgucgccccccuccaccucggcaagugcaacaucgccggcuggauccucggcaaccccgagugcgagucccucuccaccgccuccuccugguccuacaucgucgagaccuccuccuccgacaacggcaccugcuaccccggcgacuucaucaacuacgaggagcuccgcgagcagcucuccuccgucuccuccuucgagcgcuucgagaucuuccccaagaccuccuccuggcccaaccacgacuccaacaagggcgucaccgccgccugcccccacgccggcgccaaguccuucuacaagaaccucaucuggcucgucaagaagggcaacuccuaccccaagcucuccaaguccuacaucaacgacaagggcaaggagguccucguccucuggggcauccaccaccccuccaccuccgccgaccagcagucccucuaccagaacgccgacgccuacgucuucgucggcaccucccgcuacuccaagaaguucaagcccgagaucgccauccgccccaagguccgcgaccaggagggccgcaugaacuacuacuggacccucgucgagcccggcgacaagaucaccuucgaggccaccggcaaccucgucgucccccgcuacgccuucgccauggagcgcaacgccggcuccggcaucaucaucuccgacacccccguccacgacugcaacaccaccugccagacccccaagggcgccaucaacaccucccuccccuuccagaacauccaccccaucaccgucggcaagugccccaaguacgucaaguccaccaagcuccgccucgccaccggccuccgcaacguccccuccauccagucccgcggccucuucggcgccaucgccggcuucaucgagggcggcuggaccggcauggucgacggcugguacggcuaccaccaccagaacgagcagggcuccggcuacgccgccgaccucaaguccacccagaacgccaucgacaagaucaccaacaaggucaacuccgucaucgagaagaugaacacccaguucaccgccgucggcaaggaguucaaccaccucgagaagcgcaucgagaaccucaacaagaaggucgacgacggcuuccucgacaucuggaccuacaacgccgagcuccucguccuccucgagaacgagcgcacccucgacuaccacgacuccaacgucaagaaccucuacgagaagguccgcucccagcucaagaacaacgccaaggagaucggcaacggcugcuucgaguucuaccacaagugcgacaacaccugcauggaguccgucaagaacggcaccuacgacuaccccaaguacuccgaggaggccaagcucaaccgcgaggagaucgacggcgucaagcucgaguccacccgcaucuaccagauccucgccaucuacuccaccgucgccuccucccucguccucgucgucucccucggcgccaucuccuucuggaugugcuccaacggcucccuccagugccgcaucugcaucuga

SEQ ID NO: 100266 - RNA, 1701 nt, Artificial Sequence
  derived and/or modified CDS sequence (opt2) from hemagglutinin__InfluenzaA__ADD23415
augaaggccauccucgucguccuccucuacaccuucgccaccgccaacgccgacacccucugcaucggcuaccacgccaacaacuccaccgacaccgucgacaccguccucgagaagaacgucaccgucacccacuccgucaaccuccucgaggacaagcacaacggcaagcucugcaagcuccgcggcgucgccccccuccaccucggcaagugcaacaucgccggcuggauccucggcaaccccgagugcgagucccucuccaccgccuccuccugguccuacaucgucgagaccuccuccuccgacaacggcaccugcuaccccggcgacuucaucaacuacgaggagcuccgcgagcagcucuccuccgucuccuccuucgagcgcuucgagaucuuccccaagaccuccuccuggcccaaccacgacuccaacaagggcgucaccgccgccugcccccacgccggcgccaaguccuucuacaagaaccucaucuggcucgucaagaagggcaacuccuaccccaagcucuccaaguccuacaucaacgacaagggcaaggagguccucguccucuggggcauccaccaccccuccaccuccgccgaccagcagucccucuaccagaacgccgacgccuacgucuucgucggcaccucccgcuacuccaagaaguucaagcccgagaucgccauccgccccaagguccgcgaccaggagggccgcaugaacuacuacuggacccucgucgagcccggcgacaagaucaccuucgaggccaccggcaaccucgucgucccccgcuacgccuucgccauggagcgcaacgccgaguccggcaucaucaucuccgacacccccguccacgacugcaacaccaccugccagacccccaagggcgccaucaacaccucccuccccuuccagaacauccaccccaucaccaucggcaagugccccaaguacgucaaguccaccaagcuccgccucgccaccggccuccgcaacguccccuccauccagucccgcggccucuucggcgccaucgccggcuucaucgagggcggcuggaccggcauggucgacggcugguacggcuaccaccaccagaacgagcagggcuccggcuacgccgccgaccucaaguccacccagaacgccaucgacaagaucaccaacaaggucaacuccgucaucgagaagaugaacacccaguucaccgccgucggcaaggaguucaaccaccucgagaagcgcaucgagaaccucaacaagaaggucgacgacggcuuccucgacaucuggaccuacaacgccgagcuccucguccuccucgagaacgagcgcacccucgacuaccacgacuccaacgucaagaaccucuacgagaagguccgcucccagcucaagaacaacgccaaggagaucggcaacggcugcuucgaguucuaccacaagugcgacaacaccugcauggaguccgucaagaacggcaccuacgacuaccccaaguacuccgaggaggccaagcucaaccgcgaggagaucgacggcgucaagcucgaguccacccgcaucuaccagauccucgccaucuacuccaccgucgccuccucccucguccucgucgucucccucggcgccaucuccuucuggaugugcuccaacggcucccuccagugccgcaucugcaucuga

SEQ ID NO: 100267 - RNA, 1701 nt, Artificial Sequence; identical to SEQ ID NO: 99869
  derived and/or modified CDS sequence (opt2) from hemagglutinin__InfluenzaA__ADD23435

SEQ ID NO: 100268 - RNA, 1701 nt, Artificial Sequence
  derived and/or modified CDS sequence (opt2) from hemagglutinin__InfluenzaA__ADD23465
augaaggccauccucgccguccuccucuacaccuucgccaccgccaacgccgacacccucugcaucggcuaccacgccaacaacuccaccgacaccgucgacaccguccucgagaagaacgucaccgucacccacuccgucaaccuccucgaggacaagcacaacggcaagcucugcaagcuccgcggcgucgccccccuccaccucggcaagugcaacaucgccggcuggauccucggcaaccccgagugcgagucccucuccaccgccuccuccugguccuacaucgucgagaccuccuccuccgacaacggcaccugcuaccccggcgacuucaucgacuacgaggagcuccgcgagcagcucuccuccgucuccuccuucgagcgcuucgagaucuuccccaagaccuccuccuggcccaaccacgacuccaacaagggcgucaccgccgccugcccccacgccggcgccaaguccuucuacaagaaccucaucuggcucgucaagaagggcaacuccuaccccaagcucuccaaguccuacaucaacgacaagggcaaggagguccucguccucuggggcauccaccaccccuccaccuccgccgaccagcagucccucuaccagaacgccgacgccuacgucuucgucggcaccucccgcuacuccaagaaguucaagcccgagaucgccauccgccccaagguccgcgaccaggagggccgcaugaacuacuacuggacccucgucgagcccggcgacaagaucaccuucgaggccaccggcaaccucgucgucccccgcuacgccuucgccauggagcgcaacgccggcuccggcaucaucaucuccgacacccccguccacgacugcaacaccaccugccagacccccaagggcgccaucaacaccucccuccccuuccagaacauccaccccaucaccaucggcaagugccccaaguacgucaaguccaccaagcuccgccucgccaccggccuccgcaacguccccuccauccagucccgcggccucuucggcgccaucgccggcuucaucgagggcggcuggaccggcauggucgacggcugguacggcuaccaccaccagaacgagcagggcuccggcuacgccgccgaccucaaguccacccagaacgccaucgacaagaucaccaacaaggucaacuccgucaucgagaagaugaacacccaguucaccgccgucggcaaggaguucaaccaccucgagaagcgcaucgagaaccucaacaagaaggucgacgacggcuuccucgacaucuggaccuacaacgccgagcuccucguccuccucgagaacgagcgcacccucgacuaccacgacuccaacgucaagaaccucuacgagaagguccgcucccagcucaagaacaacgccaaggagaucggcaacggcugcuucgaguucuaccacaagugcgacaacaccugcauggaguccgucaagaacggcaccuacgacuaccccaaguacuccgaggaggccaagcucaaccgcgaggagaucgacggcgucaagcucgaguccacccgcaucuaccagauccucgccaucuacuccaccgucgccuccucccucguccucgucgucucccucggcgccaucuccuucuggaugugcuccaacggcucccuccagugccgcaucugcaucuga

SEQ ID NO: 100269 - RNA, 1701 nt, Artificial Sequence; identical to SEQ ID NO: 99869
  derived and/or modified CDS sequence (opt2) from hemagglutinin__InfluenzaA__ADD23475

SEQ ID NO: 100270 - RNA, 1701 nt, Artificial Sequence; identical to SEQ ID NO: 99869
  derived and/or modified CDS sequence (opt2) from hemagglutinin__InfluenzaA__ADD23485

SEQ ID NO: 100271 - RNA, 1701 nt, Artificial Sequence
  derived and/or modified CDS sequence (opt2) from hemagglutinin__InfluenzaA__ADD23495
augaaggccauccucgucguccuccucuacaccuucgccaccgccaacgccgacacccucugcaucggcuaccacgccaacaacuccaccgacaccgucgacaccguccucgagaagaacgucaccgucacccacuccgucaaccuccucgaggacaagcacaacggcaagcucugcaagcuccgcggcgucgccccccuccaccucggcaagugcaacaucgccggcuggauccucggcaaccccgagugcgagucccucuccaccgccuccuccugguccuacaucgucgagaccuccuccuccgacaacggcaccugcuaccccggcgacuucaucgacuacgaggagcuccgcgagcagcucuccuccgucuccuccuucgagcgcuucgagaucuuccccaagaccuccuccuggcccaaccacgacuccaacaagggcgucaccgccgccugcccccacgccggcgcccgcuccuucuacaagaaccucaucuggcucgucaagaagggcaacuccuaccccaagcucuccaaguccuacaucaacgacaagggcaaggagguccucguccucuggggcauccaccaccccuccaccuccgccgaccagcagucccucuaccagaacgccgacgccuacgucuucgucggcaccucccgcuacuccaagaaguucaagcccgagaucgccauccgccccaagguccgcgaccaggagggccgcaugaacuacuacuggacccucgucgagcccggcgacaagaucaccuucgaggccaccggcaaccucgucgucccccgcuacgccuucgccauggagcgcaacgccggcuccggcaucaucaucuccgacacccccguccacgacugcaacaccaccugccagacccccaagggcgccaucaacaccucccuccccuuccagaacauccaccccaucaccaucggcaagugccccaaguacgucaaguccaccaagcuccgccucgccaccggccuccgcaacguccccuccauccagucccgcggccucuucggcgccaucgccggcuucaucgagggcggcuggaccggcauggucgacggcugguacggcuaccaccaccagaacgagcagggcuccggcuacgccgccgaccucaaguccacccagaacgccaucgacgagaucaccaacaaggucaacuccgucaucgagaagaugaacacccaguucaccgccgucggcaaggaguucaaccaccucgagaagcgcaucgagaaccucaacaagaaggucgacgacggcuuccucgacaucuggaccuacaacgccgagcuccucguccuccucgagaacgagcgcacccucgacuaccacgacuccaacgucaagaaccucuacgagaagguccgcucccagcucaagaacaacgccaaggagaucggcaacggcugcuucgaguucuaccacaagugcgacaacaccugcauggaguccgucaagaacggcaccuacgacuaccccaaguacuccgaggaggccaagcucaaccgcgaggagaucgacggcgucaagcucgaguccacccgcaucuaccagauccucgccaucuacuccaccgucgccuccucccucguccucgucgucucccucggcgccaucuccuucuggaugugcuccaacggcucccuccagugccgcaucugcaucuga

SEQ ID NO: 100272 - RNA, 1701 nt, Artificial Sequence
  derived and/or modified CDS sequence (opt2) from hemagglutinin__InfluenzaA__ADD23505
augaaggccauccucgucguccuccucuacaccuucgccaccgccaacgccgacacccucugcaucggcuaccacgccaacaacuccaccgacaccgucgacaccguccucgagaagaacgucaccgucacccacuccgucaaccuccucgaggacaagcacaacggcaagcucugcaagcuccgcggcgucgccccccuccaccucggcaagugcaacaucgccggcuggauccucggcaaccccgagugcgagucccucuccaccgccuccuccugguccuacaucgucgagaccuccuccuccgacaacggcaccugcuaccccggcgacuucaucgacuacgaggagcuccgcgagcagcucuccuccgucuccuccuucgagcgcuucgagaucuuccccaagaccuccuccuggcccaaccacgacuccaacaagggcgucaccgccgccugcccccacgccggcgccaaguccuucuacaagaaccucaucuggcucgucaagaagggcaacuccuaccccaagcucuccaaguccuacaucaacgacaagggcaaggagguccucguccucuggggcauccaccaccccuccaccuccgccgaccagcagucccucuaccagaacgccgacgccuacgucuucgucggcaccucccgcuacuccaagaaguucaagcccgagaucgccauccgccccaagguccgcgaccaggagggccgcaugaacuacuacuggacccucaucgagcccggcgacaagaucaccuucgaggccaccggcaaccucgucgucccccgcuacgccuucgccauggagcgcaacgccggcuccggcaucaucaucuccgacacccccgcccacgacugcaacaccaccugccagacccccaagggcgccaucaacaccucccuccccuuccagaacauccaccccaucaccaucggcaagugccccaaguacgucaaguccaccaagcuccgccucgccaccggccuccgcaacguccccuccauccagucccgcggccucuucggcgccaucgccggcuucaucgagggcggcuggaccggcauggucgacggcugguacggcuaccaccaccagaacgagcagggcuccggcuacgccgccgaccucaaguccacccagaacgccaucgacaagaucaccaacaaggucaacuccgucaucgagaagaugaacacccaguucaccgccgucggcaaggaguucaaccaccucgagaagcgcaucgagaaccucaacaagaaggucgacgacggcuuccucgacaucuggaccuacaacgccgagcuccucguccuccucgagaacgagcgcacccucgacuaccacgacuccaacgucaagaaccucuacgagaagguccgcucccagcucaagaacaacgccaaggagaucggcaacggcugcuucgaguucuaccacaagugcgacaacaccugcauggaguccgucaagaacggcaccuacgacuaccccaaguacuccgaggaggccaagcucaaccgcgaggagaucgacggcgucaagcucgaguccacccgcaucuaccagauccucgccaucuacuccaccgucgccuccucccucguccucgucgucucccucggcgccaucuccuucuggaugugcuccaacggcucccuccagugccgcaucugcaucuga

SEQ ID NO: 100273 - RNA, 1701 nt, Artificial Sequence; identical to SEQ ID NO: 99869
  derived and/or modified CDS sequence (opt2) from hemagglutinin__InfluenzaA__ADD23515

SEQ ID NO: 100274 - RNA, 1701 nt, Artificial Sequence; identical to SEQ ID NO: 99869
  derived and/or modified CDS sequence (opt2) from hemagglutinin__InfluenzaA__ADD23994

SEQ ID NO: 100275 - RNA, 1701 nt, Artificial Sequence
  derived and/or modified CDS sequence (opt2) from hemagglutinin__InfluenzaA__ADD24004
augaaggccauccucgucguccuccucuacaccuucgccaccgccaacgccgacacccucugcaucggcuaccacgccaacaacuccaccgacaccgucgacaccguccucgagaagaacgucaccgucacccacuccgucaaccuccucgaggacaagcacaacggcaagcucugcaagcuccgcggcgucgccccccuccaccucggcaagugcaacaucgccggcuggauccucggcaaccccgagugcgagucccucuccaccgccuccuccugguccuacaucgucgagaccuccuccuccgacaacggcaccugcuaccccggcgacuucaucgacuacgaggagcuccgcgagcagcucuccuccgucuccuccuucgagcgcuucgagaucuuccccaagaccuccuccuggcccaaccacgacuccaacaagggcgucaccgccgccugcccccacgccggcgccaaguccuucuacaagaaccucaucuggcucgucaagaagggcaacuccuaccccaagcucuccaaguccuacaucaacgacaagggcaaggagguccucguccucuggggcauccaccaccccuccaccuccgccgaccagcagucccucuaccagaacgccgacgccuacgucuucgucggcaccucccgcuacuccaagaaguucaagcccgagaucgccauccgccccaagguccgcgaccaggagggccgcaugaacuacuacuggacccucgucgagcccggcgacaagaucaccuucgaggccaccggcaaccucgucgucccccgcuacgccuucgccauggagcgcaacgccggcuccggcaucaucaucuccgacacccccguccacgacugcaacaccaccugccagacccccaacggcgccaucaacaccucccuccccuuccagaacauccaccccaucaccaucggcaagugccccaaguacgucaaguccaccaagcuccgccucgccaccggccuccgcaacguccccuccauccagucccgcggccucuucggcgccaucgccggcuucaucgagggcggcuggaccggcauggucgacggcugguacggcuaccaccaccagaacgagcagggcuccggcuacgccgccgaccucaaguccacccagaacgccaucgacgagaucaccaacaaggucaacuccgucaucgagaagaugaacacccaguucaccgccgucggcaaggaguucaaccaccucgagaagcgcaucgagaaccucaacaagaagaucgacgacggcuuccucgacaucuggaccuacaacgccgagcuccucguccuccucgagaacgagcgcacccucgacuaccacgacuccaacgucaagaaccucuacgagaagguccgcucccagcucaagaacaacgccaaggagaucggcaacggcugcuucgaguucuaccacaagugcgacaacaccugcauggaguccgucaagaacggcaccuacgacuaccccaaguacuccgaggaggccaagcucaaccgcgaggagaucgacggcgucaagcucgaguccacccgcaucuaccagauccucgccaucuacuccaccgucgccuccucccucguccucgucgucucccucggcgccaucuccuucuggaugugcuccaacggcucccuccagugccgcaucugcaucuga

SEQ ID NO: 100276 - RNA, 1701 nt, Artificial Sequence; identical to SEQ ID NO: 99807
  derived and/or modified CDS sequence (opt2) from hemagglutinin__InfluenzaA__ADD24014

SEQ ID NO: 100277 - RNA, 1701 nt, Artificial Sequence
  derived and/or modified CDS sequence (opt2) from hemagglutinin__InfluenzaA__ADD52537
augaaggccauccucgucguccuccucuacaccuucgccaccgccaacgccgacacccucugcaucggcuaccacgccaacaacuccaccgacaccgucgacaccguccucgagaagaacgucaccgucacccacuccgucaaccuccucgaggacaagcacaacggcaagcucugcaagcuccgcggcgucgccccccuccaccucggcaagugcaacaucgccggcuggauccucggcaaccccgagugcgagucccucuccaccgccuccuccugguccuacaucgucgagaccuccuccuccgacaacggcaccugcuaccccggcgacuucaucgacuacgaggagcuccgcgagcagcucuccuccgucuccuccuucgagcgcuucgagaucuuccccaagaccuccuccuggcccaaccacgacuccaacaagggcgucaccgccgccugcccccacgccggcgccaaguccuucuacaagaaccucaucuggcucgucaagaagggcaacuccuaccccaagcucuccaaguccuacaucaacgacaagggcaaggagguccucguccucuggggcauccaccaccccuccaccuccgccgaccagcagucccucuaccagaacgccgacgccuacgucuucgucggcuccucccgcuacuccaagaaguucaagcccgagaucgccauccgccccaagguccgcgaccaggagggccgcaugaacuacuacuggacccucgucgagcccggcgacaagaucaccuucgaggccaccggcaaccucgucgucccccgcuacgccuucgccauggagcgcaacgccggcuccggcaucaucaucuccgacacccccguccacgacugcaacaccaccugccagacccccaagggcgccaucaacaccucccuccccuuccagaacauccaccccaucaccaucggcaagugccccaaguacgucaaguccaccaagcuccgccucgccaccggccuccgcaacguccccuccauccagucccgcggccucuucggcgccaucgccggcuucaucgagggcggcuggaccggcauggucgacggcugguacggcuaccaccaccagaacgagcagggcuccggcuacgccgccgaccucaaguccacccagaacgccaucgacggcaucaccaacaaggucaacuccgucaucgagaagaugaacacccaguucaccgccgucggcaaggaguucaaccaccucgagaagcgcaucgagaaccucaacaagaaggucgacgacggcuuccucgacaucuggaccuacaacgccgagcuccucguccuccucgagaacgagcgcacccucgacuaccacgacuccaacgucaagaaccucuacgagaagguccgcucccagcucaagaacaacgccaaggagaucggcaacggcugcuucgaguucuaccacaagugcgacaacaccugcauggaguccgucaagaacggcaccuacgacuaccccaaguacuccgaggaggccaagcucaaccgcgaggagaucgacggcgucaagcucgaguccacccgcaucuaccagauccucgccaucuacuccaccgucgccuccucccucguccucgucgucucccucggcgccaucuccuucuggaugugcuccaacggcucccuccagugccgcaucugcaucuga

SEQ ID NO: 100278 - RNA, 1701 nt, Artificial Sequence; identical to SEQ ID NO: 99869
  derived and/or modified CDS sequence (opt2) from hemagglutinin__InfluenzaA__ADD64203

SEQ ID NO: 100279 - RNA, 1701 nt, Artificial Sequence
  derived and/or modified CDS sequence (opt2) from hemagglutinin__InfluenzaA__ADD64204
augaaggccauccucgucguccuccucuacaccuucgccaccgccaacgccgacacccucugcaucggcuaccacgccaacaacuccaccgacaccgucgacaccguccucgagaagaacgucaccgucacccacuccgucaaccuccucgaggacaagcacaacggcaagcucugcaagcuccgcggcgucgccccccuccaccucggcaagugcaacaucgccggcuggauccucggcaaccccgagugcgagucccucuccaccgccuccuccugguccuacaucgucgagaccuccuccuccgacaacggcaccugcuaccccggcgacuucaucgacuacgaggagcuccgcgagcagcucuccuccgucuccuccuucgagcgcuucgagaucuuccccaagaccuccuccuggcccaaccacgaccccaacaagggcgucaccgccgccugcccccacgccggcgccaaguccuucuacaagaaccucaucuggcucgucaagaagggcaacuccuaccccaagcucuccaaguccuacaucaacgacaagggcaaggagguccucguccucuggggcauccaccaccccuccaccuccgccgaccagcagucccucuaccagaacgccgacgccuacgucuucgucggcaccucccgcuacuccaagaaguucaagcccgagaucgccauccgccccaagguccgcgaccaggagggccgcaugaacuacuacuggacccucaucgagcccggcgagaagaucaccuucgaggccaccggcaaccucgucgucccccgcuacgccuucgccauggagcgcaacgccggcuccggcaucaucaucuccgacacccccguccacgacugcaacaccaccugccagacccccaagggcgccaucaacaccucccuccccuuccagaacauccaccccaucaccaucggcaagugccccaaguacgucaaguccaccaagcuccgccucgccaccggccuccgcaacguccccuccauccagucccgcggccucuucggcgccaucgccggcuucaucgagggcggcuggaccggcauggucgacggcugguacggcuaccaccaccagaacgagcagggcuccggcuacgccgccgaccucaaguccacccagaacgccaucgacgagaucaccaacaaggucaacuccgucaucgagaagaugaacacccaguucaccgccgucggcaaggaguucaaccaccucgagaagcgcaucgagaaccucaacaagaaggucgacgacggcuuccucgacaucuggaccuacaacgccgagcuccucguccuccucgagaacgagcgcacccucgacuaccacgacuccaacgucaagaaccucuacgagaagguccgcucccagcucaagaacaacgcccgcgagaucggcaacggcugcuucgaguucuaccacaagugcgacaacaccugcauggaguccgucaagaacggcaccuacgacuaccccaaguacuccgaggaggccaagcucaaccgcgaggagaucgacggcgucaagcucgaguccacccgcaucuaccagauccucgccaucuacuccaccgucgccuccucccucguccucgucgucucccucggcgccaucuccuucuggaugugcuccaacggcucccuccagugccgcaucugcaucuga

SEQ ID NO: 100280 - RNA, 1701 nt, Artificial Sequence; identical to SEQ ID NO: 98705
  derived and/or modified CDS sequence (opt2) from hemagglutinin__InfluenzaA__ADD64205

SEQ ID NO: 100281 - RNA, 1701 nt, Artificial Sequence; identical to SEQ ID NO: 98705
  derived and/or modified CDS sequence (opt2) from hemagglutinin__InfluenzaA__ADD64206

SEQ ID NO: 100282 - RNA, 1701 nt, Artificial Sequence; identical to SEQ ID NO: 99503
  derived and/or modified CDS sequence (opt2) from hemagglutinin__InfluenzaA__ADD64207

SEQ ID NO: 100283 - RNA, 1701 nt, Artificial Sequence
  derived and/or modified CDS sequence (opt2) from hemagglutinin__InfluenzaA__ADD64208
augaaggccauccucgucguccuccucuacaccuucgccaccgccaacgccgacacccucugcaucggcuaccacgccaacaacuccaccgacaccgucgacaccguccucgagaagaacgucaccgucacccacuccgucaaccuccucgaggacaagcacaacggcaagcucugcaagcuccgcggcgucgccccccuccaccucggcaagugcaacaucgccggcuggauccucggcaaccccgagugcgagucccucuccaccgccuccuccugguccuacaucgucgagaccuccuccuccgacaacggcaccugcuaccccggcgacuucaucgacuacgaggagcuccgcgagcagcucuccuccgucuccuccuucgagcgcuucgagaucuuccccaagaccuccuccuggcccaaccacgaccccaacaagggcgucaccgccgccugcccccacgccggcgccaaguccuucuacaagaaccucaucuggcucgucaagaagggcaacuccuaccccaagcucuccaaguccuacaucaacgacaagggcaaggagguccucguccucuggggcauccaccaccccuccaccuccgccgaccagcagucccucuaccagaacgccgacgccuacgucuucgucggcaccucccgcuacuccaagaaguucaagcccgagaucgccauccgccccaagguccgcgaccaggagggccgcaugaacuacuacuggacccucgucgagcccggcgacaagaucaccuucgaggccaccggcaaccucgucgucccccgcuacgccuucgccauggagcgcaacgccggcuccggcaucaucaucuccgacacccccguccacgacugcaacaccaccugccagacccccaagggcgccaucaacaccucccuccccuuccagaacauccaccccaucaccaucggcaagugccccaaguacgucaaguccaccaagcuccgccucgccaccggccuccgcaacguccccuccauccagucccgcggccucuucggcgccaucgccggcuucaucgagggcggcuggaccggcauggucgacggcugguacggcuaccaccaccagaacgagcagggcuccggcuacgccgccgaccucaaguccacccagaacgccaucgacgagaucaccaacaaggucaacuccgucaucgagaagaugaacacccaguucaccgccgucggcaaggaguucaaccaccucgagaagcgcaucgagaaccucaacaagaaggucgacgacggcuuccucgacaucuggaccuacaacgccgagcuccucguccuccucgagaacgagcgcacccucgacuaccacgaccccaacgucaagaaccucuacgagaagguccgcucccagcucaagaacaacgccaaggagaucggcaacggcugcuucgaguucuaccacaagugcgacaacaccugcauggaguccgucaagaacggcaccuacgacuaccccaaguacuccgaggaggccaagcucaaccgcgaggagaucgacggcgucaagcucgaguccacccgcaucuaccagauccucgccaucuacuccaccgucgccuccucccucguccucgucgucucccucggcgccaucuccuucuggaugugcuccaacggcucccuccagugccgcaucugcaucuga

SEQ ID NO: 100284 - RNA, 1701 nt, Artificial Sequence; identical to SEQ ID NO: 99503
  derived and/or modified CDS sequence (opt2) from hemagglutinin__InfluenzaA__ADD64209

SEQ ID NO: 100285 - RNA, 1701 nt, Artificial Sequence; identical to SEQ ID NO: 98705
  derived and/or modified CDS sequence (opt2) from hemagglutinin__InfluenzaA__ADD64210

SEQ ID NO: 100286 - RNA, 1701 nt, Artificial Sequence; identical to SEQ ID NO: 99503
  derived and/or modified CDS sequence (opt2) from hemagglutinin__InfluenzaA__ADD64211

SEQ ID NO: 100287 - RNA, 1701 nt, Artificial Sequence; identical to SEQ ID NO: 98705
  derived and/or modified CDS sequence (opt2) from hemagglutinin__InfluenzaA__ADD64212

SEQ ID NO: 100288 - RNA, 1701 nt, Artificial Sequence; identical to SEQ ID NO: 99503
  derived and/or modified CDS sequence (opt2) from hemagglutinin__InfluenzaA__ADD64213

SEQ ID NO: 100289 - RNA, 1701 nt, Artificial Sequence
  derived and/or modified CDS sequence (opt2) from hemagglutinin__InfluenzaA__ADD64214
augaaggccauccucgucguccuccucuacaccuucgccaccgccaacgccgacacccucugcaucggcuaccacgccaacaacuccaccgacaccgucgacaccguccucgagaagaacgucaccgucacccacuccgucaaccuccucgagaacaagcacaacggcaagcucugcaagcuccgcggcgucgccccccuccaccucggcaagugcaacaucgccggcuggauccucggcaaccccgagugcgaguccuucuccaccuccuccuccugguccuacaucgucgagaccuccuccuccgacaacggcaccugcuaccccggcgacuucaucgacuacgaggagcuccgcgagcagcucuccuccgucuccuccuucgagcgcuucgagaucuuccccaagaccuccuccuggcccaaccacgacuccaacaagggcgucaccgccgccugcccccacgccggcgccaaguccuucuacaagaaccucaucuggcucgucaagaagggcaacuccuaccccaagcucaacaaguccuacaucaacgacaagggcaaggagguccucguccucuggggcauccaccaccccuccaccuccgccgaccagcagucccucuaccagaacgccgacgccuacgucuucgucggcaccucccgcuacuccaagaaguucaagcccgagaucgccauccgccccaagguccgcgaccaggagggccgcaugaacuacuacuggacccucgucgagcccggcgacaagaucaccuucgaggccaccggcaaccucgucgucccccgcuacgccuucgccauggagcgcaacgccggcuccggcaucaucaucuccgacacccccguccacgacugcaacaccaccugccagacccccaagggcgccaucaacaccucccuccccuuccagaacauccaccccaucaccaucggcaagugccccaaguacgucaaguccaccaagcuccgccucgccaccggccuccgcaacguccccuccauccagucccgcggccucuucggcgccaucgccggcuucaucgagggcggcuggaccggcauggucgacggcugguacggcuaccaccaccagaacgagcagggcuccggcuacgccgccgaccucaaguccacccagaacgccaucgacggcaucaccaacaaggucaacuccgucaucgagaagaugaacacccaguucaccgccgucggcaaggaguucaaccaccucgagaagcgcaucgagaaccucaacaagaaggucgacgacggcuuccucgacaucuggaccuacaacgccgagcuccucguccuccucgagaacgagcgcacccucgacuaccacgacuccaacgucaagaaccucuacgagaagguccgcucccagcucaagaacaacgccaaggagaucggcaacggcugcuucgaguucuaccacaagugcgacaacaccugcauggaguccgucaagaacggcaccuacgacuaccccaaguacuccgaggaggccaagcucaaccgcgaggagaucgacggcgucaagcucgaguccacccgcaucuaccagauccucgccaucuacuccaccgucgccuccucccucguccucgucgucucccucggcgccaucuccuucuggaugugcuccaacggcucccuccagugccgcaucugcaucuga

SEQ ID NO: 100290 - RNA, 1701 nt, Artificial Sequence; identical to SEQ ID NO: 98705
  derived and/or modified CDS sequence (opt2) from hemagglutinin__InfluenzaA__ADD64215

SEQ ID NO: 100291 - RNA, 1701 nt, Artificial Sequence; identical to SEQ ID NO: 99503
  derived and/or modified CDS sequence (opt2) from hemagglutinin__InfluenzaA__ADD64216

SEQ ID NO: 100292 - RNA, 1701 nt, Artificial Sequence; identical to SEQ ID NO: 99503
  derived and/or modified CDS sequence (opt2) from hemagglutinin__InfluenzaA__ADD64217

SEQ ID NO: 100293 - RNA, 1701 nt, Artificial Sequence
  derived and/or modified CDS sequence (opt2) from hemagglutinin__InfluenzaA__ADD74350
augaaggccauccucgucguccuccucuacaccuucgccaccgccaacgccgacacccucugcaucggcuaccacgccaacaacuccaccgacaccgucgacaccguccucgagaagaacgucaccgucacccacuccgucaacauccucgaggacaagcacaacggcaagcucugcaagcuccgcggcgucgccccccuccaccucggcaagugcaacaucgccggcuggauccucggcaaccccgagugcgagucccucuccaccgccuccuccugguccuacaucgucgagaccuccuccuccgacaacggcaccugcuaccccggcgacuucaucgacuacgaggagcuccgcgagcagcucuccuccgucuccuccuucgagcgcuucgagaucuuccccaagaccuccuccuggcccaaccacgacuccaacaagggcgucaccgccgccugcucccacgccggcgccaaguccuucuacaagaaccucaucuggcucgucaagaagggcaacuccuaccccaagcucuccaaguccuacaucaacgacaagggcaaggagguccucguccucuggggcauccaccaccccuccaccuccgccgaccagcagucccucuaccagaacgccgacgccuacgucuucgucggcuccucccgcuacuccaagaaguucaagcccgagaucgccauccgccccaagguccgcgaccaggagggccgcaugaacuacuacuggacccucgucgagcccggcgacaagaucaccuucgaggccaccggcaaccucgucgucccccgcuacgccuucgccauggagcgcaacgccggcuccggcaucaucaucuccgacacccccguccacgacugcaacaccaccugccagacccccaagggcgccaucaacaccucccuccccuuccagaacauccaccccaucaccaucggcaagugccccaaguacgucaaguccaccaagcuccgccucgccaccggccuccgcaacguccccuccauccagucccgcggccucuucggcgccaucgccggcuucaucgagggcggcuggaccggcauggucgacggcugguacggcuaccaccaccagaacgagcagggcuccggcuacgccgccgaccucaaguccacccagaacgccaucgacgagaucaccaacaaggucaacuccgucaucgagaagaugaacacccaguucaccgccgucggcaaggaguucaaccaccucgagaagcgcaucgagaaccucaacaagaaggucgacgacggcuuccucgacaucuggaccuacaacgccgagcuccucguccuccucgagaacgagcgcacccucgacuaccacgacuccaacgucaagaaccucuacgagaagguccgcucccagcucaagaacaacgccaaggagaucggcaacggcugcuucgaguucuaccacaagugcgacaacaccugcauggaguccgucaagaacggcaccuacgacuaccccaaguacuccgaggaggccaagcucaaccgcgaggagaucgacggcgucaagcucgaguccacccgcaucuaccagauccucgccaucuacuccaccgucgccuccucccucguccucgucgucucccucggcgccaucuccuucuggaugugcuccaacggcucccuccagugccgcaucugcaucuga

SEQ ID NO: 100294 - RNA, 1701 nt, Artificial Sequence
  derived and/or modified CDS sequence (opt2) from hemagglutinin__InfluenzaA__ADD74360
augaaggccauccucgucguccuccucuacaccuucgccaccgccaacgccgacacccucugcaucggcuaccacgccaacaacuccaccgacaccgucgacaccguccucgagaagaacgucaccgucacccacuccgucaaccuccucgaggacaagcacaacggcaagcucugcaagcuccgcggcgucgccccccuccaccucggcaagugcaacaucgccggcuggauccucggcaaccccgagugcgagucccucuccaccgccuccuccugguccuacaucgucgagaccuccuccuccgacaacggcaccugcuaccccggcgacuucaucgacuacgaggagcuccgcgagcagcucuccuccgucuccuccuucgagcgcuucgagaucuuccccaagaccuccuccuggcccaaccacgacuccaacaagggcgucaccgccgccugcccccacgccggcgccaaguccuucuacaagaaccucaucuggcucgucaagaagggcaacuccuaccccaagcucuccaaguccuacaucaacgacaagcgcaaggagguccucguccucuggggcauccaccaccccuccaccuccgccgaccagcagucccucuaccagaacgccgacgccuacgucuucgucggcaccucccgcuacuccaagaaguucaagcccgagaucgccauccgccccaagguccgcgaccaggagggccgcaugaacuacuacuggacccucgucgagcccggcgacaagaucaccuucgaggccaccggcaaccucgucgucccccgcuacgccuucgccauggagcgcaacgccggcuccggcaucaucaucuccgacacccccguccacgacugcaacaccaccugccagacccccaagggcgccaucaacaccucccuccccuuccagaacauccaccccaucaccaucggcaagugccccaaguacgucaaguccaccaagcuccgccucgccaccggccuccgcaacguccccuccauccagucccgcggccucuucggcgccaucgccggcuucaucgagggcggcuggaccggcauggucgacggcugguacggcuaccaccaccagaacgagcagggcuccggcuacgccgccgaccucaaguccacccagaacgccaucgacgagaucaccaacaaggucaacuccgucaucgagaagaugaacacccaguucaccgccgucggcaaggaguucaaccaccucgagaagcgcaucgagaaccucaacaagaaggucgacgacggcuuccucgacaucuggaccuacaacgccgagcuccucguccuccucgagaacgagcgcacccucgacuaccacgacuccaacgucaagaaccucuacgagaagguccgcucccagcucaagaacaacgccaaggagaucggcaacggcugcuucgaguucuaccacaagugcgacaacaccugcauggaguccgucaagaacggcaccuacgacuaccccaaguacuccgaggaggccaagcucaaccgcgaggagaucgacggcgucaagcucgaguccacccgcaucuaccagauccucgccaucuacuccaccgucgccuccucccucguccucgucgucucccucggcgccaucuccuucuggaugugcuccaacggcucccuccagugccgcaucugcaucuga

SEQ ID NO: 100295 - RNA, 1701 nt, Artificial Sequence; identical to SEQ ID NO: 98705
  derived and/or modified CDS sequence (opt2) from hemagglutinin__InfluenzaA__ADD74370

SEQ ID NO: 100296 - RNA, 1701 nt, Artificial Sequence; identical to SEQ ID NO: 98705
  derived and/or modified CDS sequence (opt2) from hemagglutinin__InfluenzaA__ADD74398

SEQ ID NO: 100297 - RNA, 1701 nt, Artificial Sequence
  derived and/or modified CDS sequence (opt2) from hemagglutinin__InfluenzaA__ADD74428
augaaggccauccucgucguccuccucuacaccuucgccaccgccaacgccgacacccucugcaucggcuaccacgccaacaacuccaccgacaccgucgacaccguccucgagaagaacgucaccgucacccacuccgucaaccuccucgaggacaagcacaacggcaagcucugcaagcuccgcggcgucgccccccuccaccucggcaagugcaacaucgccggcuggauccucggcaaccccgagugcgagucccucuccaccgccuccuccugguccuacaucgucgagaccuccuccuccgacaacggcaccugcuaccccggcgacuucaucaacuacgaggagcuccgcgagcagcucuccuccgucuccuccuucgagcgcuucgagaucuuccccaagaccuccuccuggcccaaccacgacuccaacaagggcgucaccgccgccugcccccacgccggcgccaaguccuucuacaagaaccucaucuggcucgucaagaagggcaacuccuaccccaagcucuccaaguccuacaucaacgacaagggcaaggagguccucguccucuggggcauccaccaccccuccaccuccgccgaccagcagucccucuaccagaacgccgacgccuacgucuucgucggcaccucccgcuacuccaagaaguucaagcccgagaucgccauccgccccaagguccgcgaccaggagggccgcaugaacuacuacuggacccucgucaagcccggcgacaagaucaccuucgaggccaccggcaaccucgucgucccccgcuacgccuucgccauggagcgcaacgccggcuccggcaucaucaucuccgacacccccguccacgacugcaacaccaccugccagacccccaagggcgccaucaacaccucccuccccuuccagaacauccaccccaucaccaucggcaagugccccaaguacgucaaguccaccaagcuccgccucgccaccggccuccgcaacguccccuccauccagucccgcggccucuucggcgccaucgccggcuucaucgagggcggcuggaccggcauggucgacggcugguacggcuaccaccaccagaacgagcagggcuccggcuacgccgccgaccucaaguccacccagaacgccaucgacaagaucaccaacaaggucaacuccgucaucgagaagaugaacacccaguucaccgccgucggcaaggaguucaaccaccucgagaagcgcaucgagaaccucaacaagaaggucgacgacggcuuccucgacaucuggaccuacaacgccgagcuccucguccuccucgagaacgagcgcacccucgacuaccacgacuccaacgucaagaaccucuacgagaagguccgcucccagcucaagaacaacgccaaggagaucggcaacggcugcuucgaguucuaccacaagugcgacaacaccugcauggaguccgucaagaacggcaccuacgacuaccccaaguacuccgaggaggccaagcucaaccgcgaggagaucgacggcgucaagcucgaguccacccgcaucuaccagauccucgccaucuacuccaccgucgccuccucccucguccucgucgucucccucggcgccaucuccuucuggaugugcuccaacggcucccuccagugccgcaucugcaucuga

SEQ ID NO: 100298 - RNA, 1701 nt, Artificial Sequence
  derived and/or modified CDS sequence (opt2) from hemagglutinin__InfluenzaA__ADD74438
augaaggccauccucgucguccuccucuacaccuucgccaccgccaacgccgacacccucugcaucggcuaccacgccaacaacuccaccgacaccgucgacaccguccucgagaagaacgucaccgucacccacuccgucaaccuccucgaggacaagcacaacggcaagcucugcaagcuccgcggcgucgccccccuccaccucggcaagugcaacaucgccggcuggauccucggcaaccccgagugcgagucccucuccaccgccuccuccugguccuacaucgucgagaccuccuccuccgacaacggcaccugcuaccccggcgacuucaucgacuacgaggagcuccgcgagcagcucuccuccgucuccuccuucgagcgcuucgagaucuuccccaagaccuccuccuggcccaaccacgacuccaacaagggcgucaccgccgccugcccccacgccggcgccaaguccuucuacaagaaccucaucuggcucgucaagaagggcaacuccuaccccaagcucuccaaguccuacaucaacgacaagggcaaggagguccucguccucuggggcauccaccaccccuccaccuccgccgaccagcagucccucuaccagaacgccgacgccuacgucuucgucggcaccucccgcuacuccaagaaguucaagcccgagaucgccauccgccccaagguccgcgaccaggagggccgcaugaacuacuacuggacccucgucgagcccggcgacaagaucaccuucgaggccaccggcaaccucgucgucccccgcuacgccuucgccauggagcgcaacgccggcuccggcaucaucaucuccgacacccccguccacgacugcaacaccaccugccagacccccaagggcgccaucaacaccucccuccccuuccagaacauccaccccaucaccaucggcaagugccccaaguacgucaaguccaccaagcuccgccucgccaccggccuccgcaacguccccuccauccagucccgcggccucuucggcgccaucgccggcuucaucgagggcggcuggaccggcauggucgacggcugguacggcuaccaccaccagaacgagcagggcuccggcuacgccgccgaccucaaguccacccagaacgccaucgacgagaucaccaacaaggucaacuccgucaucgagaagaugaacacccaguucaccgccgucggcaaggaguucaaccaccucgagaagcgcaucgagaaccucaacaagaaggucgacgacggcuuccucgacaucuggaccuacaacgccgagcuccucguccuccucgagaacgagcgcacccucgacuaccacgacuccaacgucaagaaccucuacgagaagguccgcucccagcucaagaacaacgccaaggagaucggcaacggcugcuucgaguucuaccacaagugcgacaacaccugcauggaguccgucaagaacggcaccuacgacuaccccaaguacuccgaggaggccaagcucaaccgcgaggagaucgacggcgucaagcucgagcccacccgcaucuaccagauccucgccaucuacuccaccgucgccuccucccucguccucgucgucucccucggcgccaucuccuucuggaugugcuccaacggcucccuccagugccgcaucugcaucuga

SEQ ID NO: 100299 - RNA, 1701 nt, Artificial Sequence; identical to SEQ ID NO: 98705
  derived and/or modified CDS sequence (opt2) from hemagglutinin__InfluenzaA__ADD74448

SEQ ID NO: 100300 - RNA, 1701 nt, Artificial Sequence; identical to SEQ ID NO: 98705
  derived and/or modified CDS sequence (opt2) from hemagglutinin__InfluenzaA__ADD74458

SEQ ID NO: 100301 - RNA, 1701 nt, Artificial Sequence
  derived and/or modified CDS sequence (opt2) from hemagglutinin__InfluenzaA__ADD74468
augaaggccauccucgucguccuccucuacaccuucgccaccgccaacgccgacacccucugcaucggcuaccacgccaacaacuccaccgacaccgucgacaccguccucgagaagaacgucaccgucacccacuccgucgaccuccucgaggacaagcacaacggcaagcucugcaagcuccgcggcgucgccccccuccaccucggcaagugcaacaucgccggcuggauccucggcaaccccgagugcgagucccucuccaccgccuccuccugguccuacaucgucgagaccuccuccuccgacaacggcaccugcuaccccggcgacuucaucgacuacgaggagcuccgcgagcagcucuccuccgucuccuccuucgagcgcuucgagaucuuccccaagaccuccuccuggcccaaccacgacuccaacaagggcgucaccgccgccugcccccacgccggcgccaaguccuucuacaagaaccucaucuggcucgucaagaagggcaacuccuaccccaagcucuccaaguccuacaucaacgacaagggcaaggagguccucguccucuggggcauccaccaccccuccaccuccgccgaccagcagucccucuaccagaacgccgacgccuacgucuucgucggcaccucccgcuacuccaagaaguucaagcccgagaucaccauccgccccaagguccgcgaccaggagggccgcaugaacuacuacuggacccucgucgagcccggcgacaagaucaccuucgaggccaccggcaaccucgucgucccccgcuacgccuucgccauggagcgcaacgccggcuccggcaucaucaucuccgacacccccguccacgacugcaacaccaccugccagacccccaagggcgccaucaacaccucccuccccuuccagaacauccaccccaucaccaucggcaagugccccaaguacgucaaguccaccaagcuccgccucgccaccggccuccgcaacguccccuccauccagucccgcggccucuucggcgccaucgccggcuucaucgagggcggcuggaccggcauggucgacggcugguacggcuaccaccaccagaacgagcagggcuccggcuacgccgccgaccucaaguccacccagaacgccaucgacgagaucaccaacaaggucaacuccgucaucgagaagaugaacacccaguucaccgccgucggcaaggaguucaaccaccucgagaagcgcaucgagaaccucaacaagaaggucgacgacggcuuccucgacaucuggaccuacaacgccgagcuccucguccuccucgagaacgagcgcacccucgacuaccacgacuccaacgucaagaaccucuacgagaagguccgcucccagcucaagaacaacgccaaggagaucggcaacggcugcuucgaguucuaccacaagugcgacaacaccugcauggaguccgucaagaacggcaccuacgacuaccccaaguacuccgaggaggccaagcucaaccgcgaggagaucgacggcgucaagcucgaguccacccgcaucuaccagauccucgccaucuacuccaccgucgccuccucccucguccucgucgucucccucggcgccaucuccuucuggaugugcuccaacggcucccuccagugccgcaucugcaucuga

SEQ ID NO: 100302 - RNA, 1701 nt, Artificial Sequence
  derived and/or modified CDS sequence (opt2) from hemagglutinin__InfluenzaA__ADD74488
augaaggccauccucgucguccuccucuacaccuucgccaccgccaacgccgacacccucugcaucggcuaccacgccaacaacuccaccgacaccgucgacaccguccucgagaagaacgucaccgucacccacuccgucaacauccucgaggacaagcacaacggcaagcucugcaagcuccgcggcgucgccccccuccaccucggcaagugcaacaucgccggcuggauccucggcaaccccgagugcgagucccucuccaccgccuccuccugguccuacaucgucgagaccuccuccuccgacaacggcaccugcuaccccggcgacuucaucgacuacgaggagcuccgcgagcagcucuccuccgucuccuccuucgagcgcuucgagaucuuccccaagaccuccuccuggcccaaccacgacuccaacaagggcgucaccgccgccugcccccacgccggcgccaaguccuucuacaagaaccucaucuggcucgucaagaagggcaacuccuaccccaagcucuccaaguccuacaucaacgacaagggcaaggagguccucguccucuggggcauccaccaccccuccaccuccgccgaccagcagucccucuaccagaacgccgacgccuacgucuucgucggcaccucccgcuacuccaagaaguucaagcccgagaucgccauccgccccaagguccgcgaccaggagggccgcaugaacuacuacuggacccucgucgagcccggcgacaagaucaccuucgaggccaccggcaaccucgucgucccccgcuacgccuucgccauggagcgcaacgccggcuccggcaucaucaucuccgacacccccguccacgacugcaacaccaccugccagacccccaagggcgccaucaacaccucccuccccuuccagaacauccaccccaucaccaucggcaagugccccaaguacgucaaguccaccaagcuccgccucgccaccggccuccgcaacguccccuccauccagucccgcggccucuucggcgccaucgccggcuucaucgagggcggcuggaccggcauggucgacggcugguacggcuaccaccaccagaacgagcagggcuccggcuacgccgccgaccucaaguccacccagaacgccaucgacgagaucaccaacaaggucaacuccgucaucgagaagaugaacacccaguucaccgccgucggcaaggaguucaaccaccucgagaagcgcaucgagaaccucaacaagaaggucgacgacggcuuccucgacaucuggaccuacaacgccgagcuccucguccuccucgagaacgagcgcacccucgacuaccacgacuccaacgucaagaaccucuacgagaagguccgcucccagcucaagaacaacgccaaggagaucggcaacggcugcuucgaguucuaccacaagugcgacaacaccugcauggaguccgucaagaacggcaccuacgacuaccccaaguacuccgaggaggccaagcucaaccgcgaggagaucgacggcgucaagcucgaguccacccgcaucuaccagauccucgccaucuacuccaccgucgccuccucccucguccucgucgucucccucggcgccaucuccuucuggaugugcuccaacggcucccuccagugccgcaucugcaucuga

SEQ ID NO: 100303 - RNA, 1701 nt, Artificial Sequence; identical to SEQ ID NO: 98705
  derived and/or modified CDS sequence (opt2) from hemagglutinin__InfluenzaA__ADD74498

SEQ ID NO: 100304 - RNA, 1701 nt, Artificial Sequence
  derived and/or modified CDS sequence (opt2) from hemagglutinin__InfluenzaA__ADD74508
augaaggccauccucgucguccuccucuacaccuucgccaccgccaacgccgacacccucugcaucggcuaccacgccaacaacuccaccgacaccgucgacaccguccucgagaagaacgucaccgucacccacuccgucgaccuccucgaggacaagcacaacggcaagcucugcaagcuccgcggcgucgccccccuccaccucggcaagugcaacaucgccggcuggauccucggcaaccccgagugcgagucccucuccaccgccuccuccugguccuacaucgucgagaccuccuccuccgacaacggcaccugcuaccccggcgacuucaucgacuacgaggagcuccgcgagcagcucuccuccgucuccuccuucgagcgcuucgagaucuuccccaagaccuccuccuggcccaaccacgacuccaacaagggcgucaccgccgccugcccccacgccgaggccaaguccuucuacaagaaccucaucuggcucgucaagaagggcaacuccuaccccaagcucuccaaguccuacaucaacgacaagggcaaggagguccucguccucuggggcauccaccaccccuccaccuccgccgaccagcagucccucuaccagaacgccgacgccuacgucuucgucggcaccucccgcuacuccaagaaguucaagcccgagaucgccauccgccccaagguccgcgaccaggagggccgcaugaacuacuacuggacccucgucgagcccggcgacaagaucaccuucgaggccaccggcaaccucgucgucccccgcuacgccuucgccauggagcgcaacgccggcuccggcaucaucaucuccgacacccccguccacgacugcaacaccaccugccagacccccaagggcgccaucaacaccucccuccccuuccagaacauccaccccaucaccaucggcaagugccccaaguacgucaaguccaccaagcuccgccucgccaccggccuccgcaacguccccuccauccagucccgcggccucuucggcgccaucgccggcuucaucgagggcggcuggaccggcauggucgacggcugguacggcuaccaccaccagaacgagcagggcuccggcuacgccgccgaccucaaguccacccagaacgccaucgacgagaucaccaacaaggucaacuccgucaucgagaagaugaacacccaguucaccgccgucggcaaggaguucaaccaccucgagaagcgcaucgagaaccucaacaagaaggucgacgacggcuuccucgacaucuggaccuacaacgccgagcuccucguccuccucgagaacgagcgcacccucgacuaccacgacuccaacgucaagaaccucuacgagaagguccgcucccagcucaagaacaacgccaaggagaucggcaacggcugcuucgaguucuaccacaagugcgacaacaccugcauggaguccgucaagaacggcaccuacgacuaccccaaguacuccgaggaggccaagcucaaccgcgaggagaucgacggcgucaagcucgaguccacccgcaucuaccagauccucgccaucuacuccaccgucgccuccucccucguccucgucgucucccucggcgccaucuccuucuggaugugcuccaacggcucccuccagugccgcaucugcaucuga

SEQ ID NO: 100305 - RNA, 1701 nt, Artificial Sequence
  derived and/or modified CDS sequence (opt2) from hemagglutinin__InfluenzaA__ADD74518
augaaggccauccucgucguccuccucuacaccuucgccaccgccaacgccgacacccucugcaucggcuaccacgccaacaacuccaccgacaccgucgacaccauccucgagaagaacgucaccgucacccacuccgucaaccuccucgaggacaagcacaacggcaagcucugcaagcuccgcggcgucgccccccuccaccucggcaagugcaacaucgccggcuggauccucggcaaccccgagugcgagucccucuccaccgccuccuccugguccuacaucgucgagaccuccuccuccgacaacggcaccugcuaccccggcgacuucaucgacuacgaggagcuccgcgagcagcucuccuccgucuccuccuucgagcgcuucgagaucuuccccaagaccuccuccuggcccaaccacgacuccaacaagggcgucaccgccgccugcccccacgccggcgccaaguccuucuacaagaaccucaucuggcucgucaagaagggcaacuccuaccccaagcucuccaaguccuacaucaacgacaagggcaaggagauccucguccucuggggcauccaccaccccuccaccuccgccgaccagcagucccucuaccagaacgccgacgccuacgucuucgucggcaccucccgcuacuccaagaaguucaagcccgagaucgccauccgccccaagguccgcgaccaggagggccgcaugaacuacuacuggacccucgucgagcccggcgacaagaucaccuucgaggccaccggcaaccucgucgucccccgcuacgccuucgccauggagcgcaacaccggcuccggcaucaucaucuccgacacccccguccacgacugcaacaccaccugccagacccccaagggcgccaucaacaccucccuccccuuccagaacauccaccccaucaccaucggcaagugccccaaguacgucaaguccaccaagcuccgccucgccaccggccuccgcaacguccccuccauccagucccgcggccucuucggcgccaucgccggcuucaucgagggcggcuggaccggcauggucgacggcugguacggcuaccaccaccagaacgagcagggcuccggcuacgccgccgaccucaaguccacccagaacgccaucgacgagaucaccaacaaggucaacuccgucaucgagaagaugaacacccaguucaccgccgucggcaaggaguucaaccaccucgagaagcgcaucgagaaccucaacaagaaggucgacgacggcuuccucgacaucuggaccuacaacgccgagcuccucguccuccucgagaacgagcgcacccucgacuaccacgacuccaacgucaagaaccucuacgagaagguccgcucccagcucaagaacaacgccaaggagaucggcaacggcugcuucgaguucuaccacaagugcgacaacaccugcauggaguccgucaagaacggcaccuacgacuaccccaaguacuccgaggaggccaagcucaaccgcgaggagaucgacggcgucaagcucgaguccacccgcaucuaccagauccucgccaucuacuccaccgucgccuccucccucguccucgucgucucccucggcgccaucuccuucuggaugugcuccaacggcucccuccagugccgcaucugcaucuga

SEQ ID NO: 100306 - RNA, 1701 nt, Artificial Sequence
  derived and/or modified CDS sequence (opt2) from hemagglutinin__InfluenzaA__ADD74528
augaaggccauccucgucguccuccucuacaccuucgccaccgccaacgccgacacccucugcaucggcuaccacgccaacaacuccaccgacaccgucgacaccguccucgagaagaacgucaccgucacccacuccgucaaccuccucgaggacaagcacaacggcaagcucugcaagcuccgcggcgucgccccccuccaccucggcaagugcaacaucgccggcuggauccucggcaaccccgagugcgagucccucuccaccgccuccuccugguccuacaucgucgagaccuccuccuccgacaacggcaccugcuaccccggcgacuucaucaacuacgaggagcuccgcgagcagcucuccuccgucuccuccuucgagcgcuucgagaucuuccccaagaccuccuccuggcccaaccacgacuccaacaagggcgucaccgccgccugcccccacgccggcgccaaguccuucuacaagaaccucaucuggcucgucaagaagggcaacuccuaccccaagcucuccaaguccuacaucaacgacaagggcaaggagguccucguccucuggggcauccaccaccccuccaccuccgccgaccagcagucccucuaccagaacgccgacgccuacgucuucgucggcaccucccgcuacuccaagaaguuccagcccgagaucgccauccgccccaagguccgcgaccaggagggccgcaugaacuacuacuggacccucgucgagcccggcgacaagaucaccuucgaggccaccggcaaccucgucgucccccgcuacgccuucgccauggagcgcaacgccggcuccggcaucaucaucuccgacacccccguccacgacugcaacaccaccugccagacccccaagggcgccaucaacaccucccuccccuuccagaacauccaccccaucaccaucggcaagugccccaaguacgucaaguccaccaagcuccgccucgccaccggccuccgcaacguccccuccauccagucccgcggccucuucggcgccaucgccggcuucaucgagggcggcuggaccggcauggucgacggcugguacggcuaccaccaccagaacgagcagggcuccggcuacgccgccgaccucaaguccacccagaacgccaucgacaagaucaccaacaaggucaacuccgucaucgagaagaugaacacccaguucaccgccgucggcaaggaguucaaccaccucgagaagcgcaucgagaaccucaacaagaaggucgacgacggcuuccucgacaucuggaccuacaacgccgagcuccucguccuccucgagaacgagcgcacccucgacuaccacgacuccaacgucaagaaccucuacgagaagguccgcucccagcucaagaacaacgccaaggagaucggcaacggcugcuucgaguucuaccacaagugcgacaacaccugcauggaguccgucaagaacggcaccuacgacuaccccaaguacuccgaggaggccaagcucaaccgcgaggagaucgacggcgucaagcucgaguccacccgcaucuaccagauccucgccaucuacuccaccgucgccuccucccucguccucgucgucucccucggcgccaucuccuucuggaugugcuccaacggcucccuccagugccgcaucugcaucuga

SEQ ID NO: 100307 - RNA, 1701 nt, Artificial Sequence
  derived and/or modified CDS sequence (opt2) from hemagglutinin__InfluenzaA__ADD74538
augaaggccauccucgucguccuccucuacaccuucgccaccgccaacgccgacacccucugcaucggcuaccacgccaacaacuccaccgacaccgucgacaccguccucgagaagaacgucaccgucacccacuccgucaaccuccucgaggacaagcacaacggcaagcucugccgccuccgcggcgucgccccccuccaccucggcaagugcaacaucgccggcuggauccucggcaaccccgagugcgagucccucuccaccgccuccuccugguccuacaucgucgagaccuccuccuccgacaacggcaccugcuaccccggcgacuucaucgacuacgaggagcuccgcgagcagcucuccuccgucuccuccuucgagcgcuucgagaucuuccccaagaccuccuccuggcccaaccacgacuccaacaagggcgucaccgccgccugcccccacgccggcgccaaguccuucuacaagaaccucaucuggcucgucaagaagggcaacuccuaccccaagcucuccaaguccuacaucaacgacaagggcaaggagguccucguccucuggggcauccaccaccccuccaccuccgccgaccagcagucccucuaccagaacgccgacgccuacgucuucgucggcaccucccgcuacuccaagaaguucaagcccgagaucgccauccgccccaagguccgcgaccaggagggccgcaugaacuacuacuggacccucgucgagcccggcgacaagaucaccuucgaggccaccggcaaccucgucgucccccgcuacgccuucgccauggagcgcaacgccggcuccggcaucaucaucuccgacacccccgucuacgacugcaacaccaccugccagacccccaagggcgccaucaacaccucccuccccuuccagaacauccaccccaucaccaucggcaagugccccaaguacgucaaguccaccaagcuccgccucgccaccggccuccgcaacguccccuccauccagucccgcggccucuucggcgccaucgccggcuucaucgagggcggcuggaccggcauggucgacggcugguacggcuaccaccaccagaacgagcagggcuccggcuacgccgccgaccucaaguccacccagaacgccaucgacgagaucaccaacaaggucaacuccgucaucgagaagaugaacacccaguucaccgccgucggcaaggaguucaaccaccucgagaagcgcaucgagaaccucaacaagaaggucgacgacggcuuccucgacaucuggaccuacaacgccgagcuccucguccuccucgagaacgagcgcacccucgacuaccacgacuccaacgucaagaaccucuacgagaagguccgcucccagcucaagaacaacgccaaggagaucggcaacggcugcuucgaguucuaccacaagugcgacaacaccugcauggaguccgucaagaacggcaccuacgacuaccccaaguacuccgaggaggccaagcucaaccgcgaggagaucgacggcgucaagcucgaguccacccgcaucuaccagauccucgccaucuacuccaccgucgccuccucccucguccucgucgucucccucggcgccaucuccuucuggaugugcuccaacggcucccuccagugccgcaucugcaucuga

SEQ ID NO: 100308 - RNA, 1701 nt, Artificial Sequence; identical to SEQ ID NO: 100302
  derived and/or modified CDS sequence (opt2) from hemagglutinin__InfluenzaA__ADD74548

SEQ ID NO: 100309 - RNA, 1701 nt, Artificial Sequence; identical to SEQ ID NO: 99869
  derived and/or modified CDS sequence (opt2) from hemagglutinin__InfluenzaA__ADD74558

SEQ ID NO: 100310 - RNA, 1701 nt, Artificial Sequence; identical to SEQ ID NO: 100257
  derived and/or modified CDS sequence (opt2) from hemagglutinin__InfluenzaA__ADD74568

SEQ ID NO: 100311 - RNA, 1701 nt, Artificial Sequence
  derived and/or modified CDS sequence (opt2) from hemagglutinin__InfluenzaA__ADD74578
augaaggccauccucgucguccuccucuacaccuucgccaccgccaacgccgacacccucugcaucggcuaccacgccaacaacuccaccgacaccgucgacaccguccucgagaagaacgucaccgucacccacuccgucaaccuccucgaggacaagcacaacggcaagcucugcaagcuccgcggcgucgccccccuccaccucggcaagugcaacaucgccggcuggauccucggcaaccccgagugcgagucccucuccaccuccuccuccugguccuacaucgucgagaccuccuccuccgacaacggcaccugcuaccccggcgacuucaucgacuacgaggagcuccgcgagcagcucuccuccgucuccuccuucgagcgcuucgagaucuuccccaagaccuccuccuggcccaaccacgacuccaacaagggcgucaccgccgccugcccccacgccggcgccaaguccuucuacaagaaccucaucuggcucgucaagaagggcaacuccuaccccaagcucuccaaguccuacaucaacgacaagggcaaggagguccucguccucuggggcauccaccaccccuccaccuccaccgaccagcagucccucuaccagaacgccgacgccuacgucuucgucggcaccucccgcuacuccaagaaguucaagcccgagaucgccauccgccccaagguccgcgaccaggagggccgcaugaacuacuacuggacccucgucgagcccggcgacaagaucaccuucgaggccaccggcaaccucgucgucccccgcuacgccuucgccauggagcgcaacgccggcuccggcaucaucaucuccgacacccccguccacgacugcaacaccaccugccagacccccaagggcgccaucaacaccucccuccccuuccagaacauccaccccaucaccaucggcaagugccccaaguacgucaaguccaccaagcuccgccucgccaccggccuccgcaacguccccuccauccagucccgcggccucuucggcgccaucgccggcuucaucgagggcggcuggaccggcauggucgacggcugguacggcuaccaccaccagaacgagcagggcuccggcuacgccgccgaccucaaguccacccagaacgccaucgacgagaucaccaacaaggucaacuccgucaucgagaagaugaacacccaguucaccgccgucggcaaggaguucaaccaccucgagaagcgcaucgagaaccucaacaagaaggucgacgacggcuuccucgacaucuggaccuacaacgccgagcuccucguccuccucgagaacgagcgcacccucgacuaccacgacuccaacgucaagaaccucuacgagaagguccgcucccagcucaagaacaacgccaaggagaucggcaacggcugcuucgaguucuaccacaagugcgacaacaccugcauggaguccgucaagaacggcaccuacgacuaccccaaguacuccgaggaggccaagcucaaccgcgaggagaucgacggcgucaagcucgaguccacccgcaucuaccagauccucgccaucuacuccaccgucgccuccucccucguccucgucgucucccucggcgccaucuccuucuggaugugcuccaacggcucccuccagugccgcaucugcaucuga

SEQ ID NO: 100312 - RNA, 1701 nt, Artificial Sequence
  derived and/or modified CDS sequence (opt2) from hemagglutinin__InfluenzaA__ADD74588
augaaggccauccucgucguccuccucuacaccuucgccaccgccaacgccgacacccucugcaucggcuaccacgccaacaacuccaccgacaccgucgacaccguccucgagaagaacgucaccgucacccacuccgucaaccuccucgaggacaagcacaacggcaagcucugcaagcuccgcggcgucgccccccuccaccucggcaagugcaacaucgccggcuggauccucggcaaccccgagugcgagucccucuccaccgccuccuccugguccuacaucgucgagaccuccuccuccgacaacggcaccugcuaccccggcgacuucaucgacuacgaggagcuccgcgagcagcucuccuccgucuccuccuucgagcgcuucgagaucuuccccaagaccuccuccuggcccaaccacgacuccaacaagggcgucaccgccgccugcccccacgccggcgccaaguccuucuacaagaaccucaucuggcucgucaagaagggcaacuccuaccccaagcucuccaaguccuacaucaacgacaagggcaaggagguccucguccucuggggcauccaccaccccuccaccuccgacggccagcagucccucuaccagaacgccgacgccuacgucuucgucggcaccucccgcuacuccaagaaguucaagcccgagaucgccauccgccccaagguccgcgaccaggagggccgcaugaacuacuacuggacccucgucgagcccggcgacaagaucaccuucgaggccaccggcaaccucgucgucccccgcuacgccuucgccauggagcgcaacgccggcuccggcaucaucaucuccgacacccccguccacgacugcaacaccaccugccagacccccaagggcgccaucaacaccucccuccccuuccagaacauccaccccaucaccaucggcaagugccccaaguacgucaaguccaccaagcuccgccucgccaccggccuccgcaacguccccuccauccagucccgcggccucuucggcgccaucgccggcuucaucgagggcggcuggaccggcauggucgacggcugguacggcuaccaccaccagaacgagcagggcuccggcuacgccgccgaccucaaguccacccagaacgccaucgacgagaucaccaacaaggucaacuccgucaucgagaagaugaacacccaguucaccgccgucggcaaggaguucaaccaccucgagaagcgcaucgagaaccucaacaagaaggucgacgacggcuuccucgacaucuggaccuacaacgccgagcuccucguccuccucgagaacgagcgcacccucgacuaccacgacuccaacgucaagaaccucuacgagaagguccgcucccagcucaagaacaacgccaaggagaucggcaacggcugcuucgaguucuaccacaagugcgacaacaccugcauggaguccgucaagaacggcaccuacgacuaccccaaguacuccaaggaggccaagcucaaccgcgaggagaucgacggcgucaagcucgaguccacccgcaucuaccagauccucgccaucuacuccaccgucgccuccucccucguccucgucgucucccucggcgccaucuccuucuggaugugcuccaacggcucccuccagugccgcaucugcaucuga

SEQ ID NO: 100313 - RNA, 1701 nt, Artificial Sequence; identical to SEQ ID NO: 100257
  derived and/or modified CDS sequence (opt2) from hemagglutinin__InfluenzaA__ADD74598

SEQ ID NO: 100314 - RNA, 1701 nt, Artificial Sequence; identical to SEQ ID NO: 100257
  derived and/or modified CDS sequence (opt2) from hemagglutinin__InfluenzaA__ADD74608

SEQ ID NO: 100315 - RNA, 1701 nt, Artificial Sequence; identical to SEQ ID NO: 99869
  derived and/or modified CDS sequence (opt2) from hemagglutinin__InfluenzaA__ADD74618

SEQ ID NO: 100316 - RNA, 1701 nt, Artificial Sequence
  derived and/or modified CDS sequence (opt2) from hemagglutinin__InfluenzaA__ADD74628
augaaggccauccucgucguccuccucuacaccuucgccaccgccaacgccgacacccucugcaucggcuaccacgccaacaacuccaccgacaccgucgacaccauccucgagaagaacgucaccgucacccacuccgucaaccuccucgaggacaagcacaacggcaagcucugcaagcuccgcggcgucgccccccuccaccucggcaagugcaacaucgccggcuggauccucggcaaccccgagugcgagucccucuccaccgccuccuccugguccuacaucgucgagaccuccuccuccgacaacggcaccugcuaccccggcgacuucaucgacuacgaggagcuccgcgagcagcucuccuccgucuccuccuucgagcgcuucgagaucuuccccaagaccuccuccuggcccaaccacgacuccaacaagggcgucaccgccgccugcccccacgccggcgccaaguccuucuacaagaaccucaucuggcucgucaagaagggcaacuccuaccccaagcucuccaaguccuacaucaacgacaagggcaaggagauccucguccucuggggcauccaccaccccuccaccuccgccgaccagcagucccucuaccagaacgccgacgccuacgucuucgucggcaccucccgcuacuccaagaaguucaagcccgagaucgccauccgccccaagguccgcgaccaggagggccgcaugaacuacuacuggacccucgucgagcccggcgacaagaucaccuucgaggccaccggcaaccucgucgucccccgcuacgccuucgccauggagaagaacgccggcuccggcaucaucaucuccgacacccccguccacgacugcaacaccaccugccagacccccaagggcgccaucaacaccucccuccccuuccagaacauccaccccaucaccaucggcaagugccccaaguacgucaaguccaccaagcuccgccucgccaccggccuccgcaacguccccuccauccagucccgcggccucuucggcgccaucgccggcuucaucgagggcggcuggaccggcauggucgacggcugguacggcuaccaccaccagaacgagcagggcuccggcuacgccgccgaccucaaguccacccagaacgccaucgacgagaucaccaacaaggucaacuccgucaucgagaagaugaacacccaguucaccgccgucggcaaggaguucaaccaccucgagaagcgcaucgagaaccucaacaagaaggucgacgacggcuuccucgacaucuggaccuacaacgccgagcuccucguccuccucgagaacgagcgcacccucgacuaccacgacuccaacgucaagaaccucuacgagaagguccgcucccagcucaagaacaacgccaaggagaucggcaacggcugcuucgaguucuaccacaagugcgacaacaccugcauggaguccgucaagaacggcaccuacgacuaccccaaguacuccgaggaggccaagcucaaccgcgaggagaucgacggcgucaagcucgaguccacccgcaucuaccagauccucgccaucuacuccaccgucgccuccucccucguccucgucgucucccucggcgccaucuccuucuggaugugcuccaacggcucccuccagugccgcaucugcaucuga

SEQ ID NO: 100317 - RNA, 1701 nt, Artificial Sequence; identical to SEQ ID NO: 99806
  derived and/or modified CDS sequence (opt2) from hemagglutinin__InfluenzaA__ADD74648

SEQ ID NO: 100318 - RNA, 1701 nt, Artificial Sequence
  derived and/or modified CDS sequence (opt2) from hemagglutinin__InfluenzaA__ADD74658
augaaggccauccucgucguccuccucuacaccuucgccaccgccaacgccgacacccucugcaucggcuaccacgccaacaacuccaccgacaccgucgacaccguccucgagaagaacgucaccgucacccacuccgucaaccuccucgaggacaagcacaacggcaagcucugcaagcuccgcggcgucgccccccuccaccucggcaagugcaacaucgccggcuggauccucggcaaccccgagugcgagucccucuccaccgccuccuccugguccuacaucgucgagaccuccuccuccgacaacggcaccugcuaccccggcgacuucaucgacuacgaggagcuccgcgagcagcucuccuccgucuccuccuucgagcgcuucgagaucuuccccaagaccuccuccuggcccaaccacgacuccaacaagggcgucaccgccgccugcccccacgccggcgccaaguccuucuacaagaaccucaucuggcucgucaagaagggcaacuccuaccccaagcucuccaaguccuacaucaacgacaagggcaaggagguccucguccucuggggcauccaccaccccuccaccuccgccgaccagcagucccucuaccagaacgccgacuccuacgucuucgucggcaccucccgcuacuccaagaaguucaagcccgagaucgccauccgccccaagguccgcgaccaggagggccgcaugaacuacuacuggacccucgucgagcccggcgacaagaucaccuucgaggccaccggcaaccucgucgucccccgcuacgccuucgccauggagcgcaacgccggcuccggcaucaucaucuccgacacccccguccacgacugcaacaccaccugccagacccccgagggcgccaucaacaccucccuccccuuccagaacauccaccccaucaccaucggcaagugccccaaguacgucaaguccaccaagcuccgccucgccaccggccuccgcaacguccccuccauccagucccgcggccucuucggcgccaucgccggcuucaucgagggcggcuggaccggcauggucgacggcugguacggcuaccaccaccagaacgagcagggcuccggcuacgccgccgaccucaaguccacccagaacgccaucgacgagaucaccaacaaggucaacuccgucaucgagaagaugaacacccaguucaccgccgucggcaaggaguucaaccaccucgagaagcgcaucgagaaccucaacaagaaggucgacgacggcuuccucgacaucuggaccuacaacgccgagcuccucguccuccucgagaacgagcgcacccucgacuaccacgacuccaacgucaagaaccucuacgagaagguccgcucccagcucaagaacaacgccaaggagaucggcaacggcugcuucgaguucuaccacaagugcgacaacaccugcauggaguccgucaagaacggcaccuacgacuaccccaaguacuccgaggaggccaagcucaaccgcgaggagaucgacggcgucaagcucgaguccacccgcaucuaccagauccucgccaucuacuccaccgucgccuccucccucguccucgucgucucccucggcgccaucuccuucuggaugugcuccaacggcucccuccagugccgcaucugcaucuga

SEQ ID NO: 100319 - RNA, 1701 nt, Artificial Sequence; identical to SEQ ID NO: 100257
  derived and/or modified CDS sequence (opt2) from hemagglutinin__InfluenzaA__ADD74668

SEQ ID NO: 100320 - RNA, 1701 nt, Artificial Sequence; identical to SEQ ID NO: 100297
  derived and/or modified CDS sequence (opt2) from hemagglutinin__InfluenzaA__ADD74678

SEQ ID NO: 100321 - RNA, 1701 nt, Artificial Sequence; identical to SEQ ID NO: 100257
  derived and/or modified CDS sequence (opt2) from hemagglutinin__InfluenzaA__ADD74688

SEQ ID NO: 100322 - RNA, 1701 nt, Artificial Sequence
  derived and/or modified CDS sequence (opt2) from hemagglutinin__InfluenzaA__ADD74698
augaaggccauccucgucguccuccucuacaccuucgccaccgccaacgccgacacccucugcaucggcuaccacgccaacaacuccaccgacaccgucgacaccguccucgagaagaacgucaccgucacccacuccgucaaccuccucgaggacaagcacaacggcaagcucugcaagcuccgcggcgucgccccccuccaccucggcaagugcaacaucgccggcuggauccucggcaaccccgagugcgagucccucuccaccgccuccuccugguccuacaucgucgagaccuccuccuccgacaacggcaccugcuaccccggcgacuucaucaacuacgaggagcuccgcgagcagcucuccuccgucuccuccuucgagcgcuucgagaucuuccccaagaccuccuccuggcccaaccacgacuccaacaagggcgucaccgccgccugcccccacgccggcgccaaguccuucuacaagaaccucaucuggcucgucaagaagggcaacuccuaccccaagcucuccaaguccuacaucaacgacaagggcaaggagguccucguccucuggggcauccaccaccccuccaccuccgccgaccagcagucccucuaccagaacgccgacgccuacgucuucgucggcaccucccgcuacuccaagaaguucaagcccgagaucgccauccgccccaagguccgcgaccaggagggccgcaugaacuacuacuggacccucgucgagcccggcgacaagaucaccuucgaggccaccggcaaccucgucgucccccgcuacgccuucgccauggagcgcaacgccggcuccggcaucaucaucuccgacacccccguccacgacugcaacaccaccugccagacccccaagggcgccaucaacaccucccuccccuuccagaacauccaccccaucaccaucggcaagugccccaaguacgucaaguccaccaagcuccgccucgccaccggccuccgcaacguccccuccauccagucccgcggccucuucggcgccaucgccggcuucaucgagggcggcuggaccggcauggucgacggcugguacggcuaccaccaccagaacgagcagggcuccggcuacgccgccgaccucaaguccacccagaacgccaucgacaagaucaccaacaaggucaacuccgucaucgagaagaugaacacccaguucaccgccgucggcaaggaguucaaccaccucgagaagcgcaucgagaaccucaacaagaaggucgacgacggcuuccucgacaucuggaccuacaacgccgagcuccucguccuccucgagaacgagcgcacccucgacuaccacgacuccaacgucaagaaccucuacgagaagguccgcaaccagcucaagaacaacgccaaggagaucggcaacggcugcuucgaguucuaccacaagugcgacaacaccugcauggaguccgucaagaacggcaccuacgacuaccccaaguacuccgaggaggccaagcucaaccgcgaggagaucgacggcgucaagcucgaguccacccgcaucuaccagauccucgccaucuacuccaccgucgccuccucccucguccucgucgucucccucggcgccaucuccuucuggaugugcuccaacggcucccuccagugccgcaucugcaucuga

SEQ ID NO: 100323 - RNA, 1701 nt, Artificial Sequence; identical to SEQ ID NO: 100257
  derived and/or modified CDS sequence (opt2) from hemagglutinin__InfluenzaA__ADD74708

SEQ ID NO: 100324 - RNA, 1701 nt, Artificial Sequence
  derived and/or modified CDS sequence (opt2) from hemagglutinin__InfluenzaA__ADD74728
augaaggccauccucgucguccuccucuacaccuucgccaccgccaacgccgacacccucugcaucggcuaccacgccaacaacuccaccgacaccgucgacaccguccucgagaagaacgucaccgucacccacuccgucaaccuccucgaggacaagcacaacggcaagcucugcaagcuccgcggcgucgccccccuccaccucggcaagugcaacaucgccggcuggauccucggcaaccccgagugcgagucccucuccaccgccuccuccugguccuacaucgucgagaccuccuccuccgacaacggcaccugcuaccccggcgacuucaucgacuacgaggagcuccgcgagcagcucuccuccgucuccuccuucgagcgcuucgagaucuuccccaagaccuccuccuggcccgaccacgacuccaacaagggcgucaccgccgccugcccccacgccggcgccaaguccuucuacaagaaccucaucuggcucgucaagaagggcaacuccuaccccaagcucuccaaguccuacaucaacgacaagggcaaggagguccucguccucuggggcauccaccaccccuccaccuccgccgaccagcagucccucuaccagaacgccgacgccuacgucuucgucggcaccucccgcuacuccaagaaguucaagcccgagaucgccauccgccccaagguccgcgaccaggagggccgcaugaacuacuacuggacccucgucgagcccggcgacaagaucaccuucgaggccaccggcaaccucgucgucccccgcuacgccuucgccauggagcgcaacgccggcuccggcaucaucaucuccgacacccccguccacgacugcaacaccaccugccagacccccaagggcgccaucaacaccucccuccccuuccagaacauccaccccaucaccaucggcaagugccccaaguacgucaaguccaccaagcuccgccucgccaccggccuccgcaacguccccuccauccagucccgcggccucuucggcgccaucgccggcuucaucgagggcggcuggaccggcauggucgacggcugguacggcuaccaccaccagaacgagcagggcuccggcuacgccgccgaccucaaguccacccagaacgccaucgacaagaucaccaacaaggucaacuccgucaucgagaagaugaacacccaguucaccgccgucggcaaggaguucaaccaccucgagaagcgcaucgagaaccucaacaagaaggucgacgacggcuuccucgacaucuggaccuacaacgccgagcuccucguccuccucgagaacgagcgcacccucgacuaccacgacuccaacgucaagaaccucuacgagaagguccgcucccagcucaagaacaacgccaaggagaucggcaacggcugcuucgaguucuaccacaagugcgacaacaccugcauggaguccgucaagaacggcaccuacgacuaccccaaguacuccgaggaggccaagcucaaccgcgaggagaucgacggcgucaagcucgaguccacccgcaucuaccagauccucgccaucuacuccaccgucgccuccuccgucguccucgucgucucccucggcgccaucuccuucuggaugugcuccaacggcucccuccagugccgcaucugcaucuga

SEQ ID NO: 100325 - RNA, 1701 nt, Artificial Sequence
  derived and/or modified CDS sequence (opt2) from hemagglutinin__InfluenzaA__ADD74738
augaaggccauccucgucguccuccucuacaccuucgccaccgccaacgccgacacccucugcaucggcuaccacgccaacaacuccaccgacaccgucgacaccguccucgagaagaacgucaccgucacccacuccgucaaccuccucgaggacaagcacaacggcaagcucugcaagcuccgcggcgucgccccccuccaccucggcaagugcaacaucgccggcuggauccucggcaaccccgagugcgagucccucuccaccgcccgcuccugguccuacaucgucgagaccuccuccuccgacaacggcaccugcuaccccggcgacuucaucgacuacgaggagcuccgcgagcagcucuccuccgucuccuccuucgagcgcuucgagaucuuccccaagaccuccuccuggcccaaccacgacuccaacaagggcgucaccgccgccugcccccacgccggcgccaaguccuucuacaagaaccucaucuggcucgucaagaagggcaacuccuaccccaagcucuccaaguccuacaucaacgacaagggcaaggagguccucguccucuggggcauccaccaccccuccaccuccgccgaccagcagucccucuaccagaacgccgacgccuacgucuucgucggcaccuccggcuacuccaagaaguucaagcccgagaucgccauccgccccaagguccgcgaccaggagggccgcaugaacuacuacuggacccucgucgagcccggcgacaagaucaccuucgaggccaccggcaaccucgucgucccccgcuacgccuucgccauggagcgcaacgccggcuccggcaucaucaucuccgacacccccguccacgacugcaacaccaccugccagacccccaagggcgccaucaacaccucccuccccuuccagaacauccaccccaucaccaucggcaagugccccaaguacgucaaguccaccaagcuccgccucgccaccggccuccgcaacguccccuccauccagucccgcggccucuucggcgccaucgccggcuucaucgagggcggcuggaccggcauggucgacggcugguacggcuaccaccaccagaacgagcagggcuccggcuacgccgccgaccucaaguccacccagaacgccaucgacaagaucaccaacaaggucaacuccgucaucgagaagaugaacacccaguucaccgccgucggcaaggaguucaaccaccucgagaagcgcaucgagaaccucaacaagaaggucgacgacggcuuccucgacaucuggaccuacaacgccgagcuccucguccuccucgagaacgagcgcacccucgacuaccacgacuccaacgucaagaaccucuacgagaagguccgcucccagcucaagaacaacgccaaggagaucggcaacggcugcuucgaguucuaccacaagugcgacaacaccugcauggaguccgucaagaacggcaccuacgacuaccccaaguacuccgaggaggccaagcucaaccgcgaggagaucgacggcgucaagcucgaguccacccgcaucuaccagauccucgccaucuacuccaccgucgccuccucccucguccucgucgucucccucggcgccaucuccuucuggaugugcuccaacggcucccuccagugccgcaucugcaucuga

SEQ ID NO: 100326 - RNA, 1701 nt, Artificial Sequence; identical to SEQ ID NO: 99869
  derived and/or modified CDS sequence (opt2) from hemagglutinin__InfluenzaA__ADD74748

SEQ ID NO: 100327 - RNA, 1701 nt, Artificial Sequence; identical to SEQ ID NO: 99869
  derived and/or modified CDS sequence (opt2) from hemagglutinin__InfluenzaA__ADD74758

SEQ ID NO: 100328 - RNA, 1701 nt, Artificial Sequence
  derived and/or modified CDS sequence (opt2) from hemagglutinin__InfluenzaA__ADD74768
augaaggccauccucgucguccuccucuacaccuucgccaccgccaacgccgacacccucugcaucggcuaccacgccaacaacuccaccgacaccgucgacaccguccucgagaagaacgucaccgucacccacuccgucaaccuccucgaggacaagcacaacggcaagcucugcaagcuccgcggcgucgccccccuccaccucggcaagugcaacaucgccggcuggauccucggcaaccccgagugcgagucccucuccaccgccuccuccugguccuacaucgucgagaccuccuccuccgacaacggcaccugcuaccccggcgacuucaucgacuacgaggagcuccgcgagcagcucuccuccgucuccuccuucgagcgcuucgagaucuuccccaagaccuccuccuggcccaaccacgacuccaacaagggcgucaccgccgccugcccccacgccggcgccaaguccuucuacaagaaccucaucuggcucgucaagaagggcaacuccuaccccaagcucuccaaguccuacaucaacgacaagggcaaggagguccucguccucuggggcauccaccaccccuccaccuccgccgaccagcagucccucuaccagaacgccgacgccuacgucuucgucggcaccucccgcuacuccaagaaguucaagcccgagaucgccauccgccccaagguccgcgaccaggagggccgcauguccuacuacuggacccucgucgagcccggcgacaagaucaccuucgaggccaccggcaaccucgucgucccccgcuacgccuucgccauggagcgcaacgccggcuccggcaucaucaucuccgacacccccguccacgacugcaacaccaccugccagacccccaagggcgccaucaacaccucccuccccuuccagaacauccaccccaucaccaucggcaagugccccaaguacgucaaguccaccaagcuccgccucgccaccggccuccgcaacguccccuccauccagucccgcggccucuucggcgccaucgccggcuucaucgagggcggcuggaccggcauggucgacggcugguacggcuaccaccaccagaacgagcagggcuccggcuacgccgccgaccucaaguccacccagaacgccaucgacaagaucaccaacaaggucaacuccgucaucgagaagaugaacacccaguucaccgccgucggcaaggaguucaaccaccucgagaagcgcaucgagaaccucaacaagaaggucgacgacggcuuccucgacaucuggaccuacaacgccgagcuccucguccuccucgagaacgagcgcacccucgacuaccacgacuccaacgucaagaaccucuacgagaagguccgcucccagcucaagaacaacgccaaggagaucggcaacggcugcuucgaguucuaccacaagugcgacaacaccugcauggaguccgucaagaacggcaccuacgacuaccccaaguacuccgaggaggccaagcucaaccgcgaggagaucgacggcgucaagcucgaguccacccgcaucuaccagauccucgccaucuacuccaccgucgccuccucccucguccucgucgucucccucggcgccaucuccuucuggaugugcuccaacggcucccuccagugccgcaucugcaucuga

SEQ ID NO: 100329 - RNA, 1701 nt, Artificial Sequence; identical to SEQ ID NO: 99869
  derived and/or modified CDS sequence (opt2) from hemagglutinin__InfluenzaA__ADD74778

SEQ ID NO: 100330 - RNA, 1701 nt, Artificial Sequence; identical to SEQ ID NO: 100257
  derived and/or modified CDS sequence (opt2) from hemagglutinin__InfluenzaA__ADD74788

SEQ ID NO: 100331 - RNA, 1701 nt, Artificial Sequence; identical to SEQ ID NO: 100257
  derived and/or modified CDS sequence (opt2) from hemagglutinin__InfluenzaA__ADD74798

SEQ ID NO: 100332 - RNA, 1701 nt, Artificial Sequence
  derived and/or modified CDS sequence (opt2) from hemagglutinin__InfluenzaA__ADD74808
augaaggccauccucgucguccuccucuacaccuucgccaccgccaacgccgacacccucugcaucggcuaccacgccaacaacuccaccgacaccgucgacaccguccucgagaagaacgucaccgucacccacuccgucaacauccucgaggacaagcacaacggcaagcucugcaagcuccgcggcgucgccccccuccaccucggcaagugcaacaucgccggcuggauccucggcaaccccgagugcgagucccucuccaccgccuccuccugguccuacaucgucgagaccuccuccuccgacaacggcaccugcuaccccggcgacuucaucgacuacgaggagcuccgcgagcagcucuccuccgucuccuccuucgagcgcuucgagaucuuccccaagaccuccuccuggcccaaccacgacuccaacaagggcgucaccgccgccugcccccacgccggcgccaaguccuucuacaagaaccucaucuggcucgucaagaagggcaacuccuaccccaagcucuccaaguccuacaucaacgacaagggcaaggagguccucguccucuggggcauccaccaccccuccaccuccgccgaccagcagucccucuaccagaacgccgacgccuacgucuucgucggcuccucccgcuacuccaagaaguucaagcccgagaucgccauccgccccaagguccgcgaccaggagggccgcaugaacuacuacuggacccucgucgagcccggcgacaagaucaccuucgaggccaccggcaaccucgucgucccccgcuacgccuucgccauggagcgcaacgccggcuccggcaucaucaucuccgacacccccguccacgacugcaacaccaccugccagacccccaagggcgccaucaacaccucccuccccuuccagaacauccaccccaucaccaucggcaagugccccaaguacgucaaguccaccaagcuccgccucgccaccggccuccgcaacguccccuccauccagucccgcggccucuucggcgccaucgccggcuucaucgagggcggcuggaccggcauggucgacggcugguacggcuaccaccaccagaacgagcagggcuccggcuacgccgccgaccucaaguccacccagaacgccaucgacgagaucaccaacaaggucaacuccgucaucgagaagaugaacacccaguucaccgccgucggcaaggaguucaaccaccucgagaagcgcaucgagaaccucaacaagaaggucgacgacggcuuccucgacaucuggaccuacaacgccgagcuccucguccuccucgagaacgagcgcacccucgacuaccacgacuccaacgucaagaaccucuacgagaagguccgcucccagcucaagaacaacgccaaggaggucggcaacggcugcuucgaguucuaccacaagugcgacaacaccugcauggaguccgucaagaacggcaccuacgacuaccccaaguacuccgaggaggccaagcucaaccgcgaggagaucgacggcgucaagcucgaguccacccgcaucuaccagauccucgccaucuacuccaccgccgccuccucccucguccucgucgucucccucggcgccaucuccuucuggaugugcuccaacggcucccuccagugccgcaucugcaucuga

SEQ ID NO: 100333 - RNA, 1701 nt, Artificial Sequence
  derived and/or modified CDS sequence (opt2) from hemagglutinin__InfluenzaA__ADD74818
augaaggccauccucgucguccuccucuacaccuucgccaccgccaacgccgacacccucugcaucggcuaccacgccaacaacuccaccgacaccgucgacaccguccucgagaagaacgucaccgucacccacuccgucaacauccucgaggacaagcacaacggcaagcucugcaagcuccgcggcgucgccccccuccaccucggcaagugcaacaucgccggcuggauccucggcaaccccgagugcgagucccucuccaccgccuccuccugguccuacaucgucgagaccuccuccuccgacaacggcaccugcuaccccggcgacuucaucgacuacgaggagcuccgcgagcagcucuccuccgucuccuccuucgagcgcuucgagaucuuccccaagaccuccuccuggcccaaccacgacuccaacaagggcgucaccgccgccugcccccacgccggcgccaaguccuucuacaagaaccucaucuggcucgucaagaagggcaacuccuaccccaagcucuccaaguccuacaucaacgacaagggcaaggagguccucguccucuggggcauccaccaccccuccaccuccgccgaccagcagucccucuaccagaacgccgacgccuacgucuucgucggcaccucccgcuacuccaagaaguucaagcccgagaucgccauccgccccaagguccgcgaccaggagggccgcaugaacuaccacuggacccucgucgagcccggcgacaagaucaccuucgaggccaccggcaaccucgucgucccccgcuacgccuucgccauggagcgcaacgccggcuccggcaucaucaucuccgacacccccguccacgacugcaacaccaccugccagacccccaagggcgccaucaacaccucccuccccuuccagaacauccaccccaucaccaucggcaagugccccaaguacgucaaguccaccaagcuccgccucgccaccggccuccgcaacguccccuccauccagucccgcggccucuucggcgccaucgccggcuucaucgagggcggcuggaccggcauggucgacggcugguacggcuaccaccaccagaacgagcagggcuccggcuacgccgccgaccucaaguccacccagaacgccaucgacgagaucaccaacaaggucaacuccgucaucgagaagaugaacacccaguucaccgccgucggcaaggaguucaaccaccucgagaagcgcaucgagaaccucaacaagaaggucgacgacggcuuccucgacaucuggaccuacaacgccgagcuccucguccuccucgagaacgagcgcacccucgacuaccacgacuccaacgucaagaaccucuacgagaagguccgcucccagcucaagaacaacgccaaggagaucggcaacggcugcuucgaguucuaccacaagugcgacaacaccugcauggaguccgucaagaacggcaccuacgacuaccccaaguacuccgaggaggccaagcucaaccgcgaggagaucgacggcgucaagcucgaguccacccgcaucuaccagauccucgccaucuacuccaccgucgccuccucccucguccucgucgucucccucggcgccaucuccuucuggaugugcuccaacggcucccuccagugccgcaucugcaucuga

SEQ ID NO: 100334 - RNA, 1701 nt, Artificial Sequence
  derived and/or modified CDS sequence (opt2) from hemagglutinin__InfluenzaA__ADD74838
augaaggccauccucgucguccuccucuacaccuucgccaccgccaacgccgacacccucugcaucggcuaccacgccaacaacuccaccgacaccgucgacaccguccucgagaagaacgucaccgucacccacuccgucaaccuccucgaggacaagcacaacggcaagcucugcaagcuccgcggcgucgccccccuccaccucggcaagugcaacaucgccggcuggauccucggcaaccccgagugcgagucccucuccaccgccuccuccugguccuacaucgucgagaccuccuccuccgacaacggcaccugcuaccccggcgacuucaucaacuacgaggagcuccgcgagcagcucuccuccgucuccuccuucgagcgcuucgagaucuuccccaagaccuccuccuggcccaaccacgacuccaacaagggcgucaccgccgccugcccccacgccggcgccaaguccuucuacaagaaccucaucuggcucgucaagaagggcaacuccuaccccaagcucuccaaguccuacaucaacgacaagggcaaggagguccucguccucuggggcauccaccaccccuccaccuccgccgaccagcagucccucuaccagaacgccgacgccuacgucuucgucggcaccucccgcuacuccaagaaguucaagcccgagaucgccauccgccccaagguccgcgaccaggagggccgcaugaacuacuacuggacccucgucgagcccggcgacaagaucaccuucgaggccaccggcaaccucgucgucccccgcuacgccuucgccauggagcgcaacgccggcuccggcaucaucaucuccgacacccccguccacgacugcaacaccaccugccagacccccaagggcgccaucaacaccucccuccccuuccagaacguccaccccaucaccaucggcaagugccccaaguacgucaaguccaccaagcuccgccucgccaccggccuccgcaacguccccuccauccagucccgcggccucuucggcgccaucgccggcuucaucgagggcggcuggaccggcauggucgacggcugguacggcuaccaccaccagaacgagcagggcuccggcuacgccgccgaccucaaguccacccagaacgccaucgacaagaucaccaacaaggucaacuccgucaucgagaagaugaacacccaguucaccgccgucggcaaggaguucaaccaccucgagaagcgcaucgagaaccucaacaagaaggucgacgacggcuuccucgacaucuggaccuacaacgccgagcuccucguccuccucgagaacgagcgcacccucgacuaccacgacuccaacgucaagaaccucuacgagaagguccgcucccagcucaagaacaacgccaaggagaucggcaacggcugcuucgaguucuaccacaagugcgacaacaccugcauggaguccgucaagaacggcaccuacgacuaccccaaguacuccgaggaggccaagcucaaccgcgaggagaucgacggcgucaagcucgaguccacccgcaucuaccagauccucgccaucuacuccaccgucgccuccucccucguccucgucgucucccucggcgccaucuccuucuggaugugcuccaacggcucccuccagugccgcaucugcaucuga

SEQ ID NO: 100335 - RNA, 1701 nt, Artificial Sequence
  derived and/or modified CDS sequence (opt2) from hemagglutinin__InfluenzaA__ADD74848
augaaggccauccucgucguccuccucuacaccuucgccaccgccaacgccgacacccucugcaucggcuaccacgccaacaacuccaccgacaccgucgacaccguccucgagaagaacgucaccgucacccacuccgucaaccuccucgaggacaagcacaacggcaagcucugcaagcuccgcggcgucgccccccuccaccucggcaagugcaacaucgccggcuggauccucggcaaccccgagugcgagucccucuccaccgccuccuccugguccuacaucgucgagaccuccuccuccgacaacggcaccugcuaccccggcgacuucaucgacuacgaggagcuccgcgagcagcucuccuccgucuccuccuucgagcgcuucgagaucuuccccaagaccuccuccuggcccaaccacgacuccaacaagggcgucaccgccgccugcccccacgccggcgccaaguccuucuacaagaaccucaucuggcucgucaagaagggcaacuccuaccccaagcucuccaaguccuacaucaacgacaagggcaaggagguccucguccucuggggcauccaccaccccuccaccuccgccgaccagcagucccucuaccagaacgccgacgccuacgucuucgucggcaccucccgcuacuccaagaaguucaagcccgagaucgccauccgccccaagguccgcgaccaggagggccgcaugaacuacuacuggacccucgucgagcccggcgacaagaucaccuucgaggccaccggcaaccucgucgucccccgcuacgccuucgccauggagcgcaacgccggcuccggcaucaucaucuccgacacccccguccacgacugcaacaccaccugccagacccccaagggcgccaucaacaccucccuccccuuccagaacauccaccccaucaccaucggcaagugccccaaguacgucaaguccaccaagcuccgccucgccaccggccuccgcaacguccccuccauccagucccgcggccucuucggcgccaucgccggcuucaucgagggcggcuggaccggcauggucgacggcugguacggcuaccaccaccagaacgagcagggcuccggcuacgccgccgaccucaaguccacccagaacgccaucgacaagaucaccaacaaggucaacuccgucaucgagaagaugaacacccaguucaccgccgucggcaaggaguucaaccaccucgagaagcgcaucgagaaccucaacaagaaggucgacgacggcuuccucgacaucuggaccuacaacgccgagcuccucguccuccucgagaacgagcgcacccucgacuaccacgacuccaacgucaagaaccucuacgagaagguccgcucccagcucaagaacaacgccaaggagaucggcaacggcugcuucgaguucuaccacaagugcgacaacaccugcauggaguccgucaagaacggcaccuacgacuaccccaaguacuccgaggaggccaagcucaaccgcgaggagaucgacggcgucaagcucgaguccacccgcaucuaccagauccucgccaucuacuccaccgucgccuccucccucguccucaucgucucccucggcgccaucuccuucuggaugugcuccaacggcucccuccagugccgcaucugcaucuga

SEQ ID NO: 100336 - RNA, 1701 nt, Artificial Sequence
  derived and/or modified CDS sequence (opt2) from hemagglutinin__InfluenzaA__ADD74858
augaaggccauccucgucguccuccucuacaccuucgccaccgccaacgccgacacccucugcaucggcuaccacgccaacaacuccaccgacaccgucgacaccguccucgagaagaacgucaccgucacccacuccgucaaccuccucgaggacaagcacaacggcaagcucugcaagcuccgcggcgucgccccccuccaccucggcaagugcaacaucgccggcuggauccucggcaaccccgagugcgagucccucuccaccgccuccuccugguccuacaucgucgagaccuccuccuccgacaacggcaccugcuaccccggcgacuucaucaacuacgaggagcuccgcgagcagcucuccuccgucuccuccuucgagcgcuucgagaucuuccccaagaccuccuccuggcccaaccacgacuccaacaagggcgucaccgccgccugcccccacgccggcaccaaguccuucuacaagaaccucaucuggcucgucaagaagggcaacuccuaccccaagcucuccaaguccuacaucaacgacaagggcaaggagguccucguccucuggggcauccaccaccccuccaccuccgccgaccagcagucccucuaccagaacgccgacgccuacgucuucgucggcaccucccgcuacuccaagaaguucaagcccgagaucgccauccgccccaagguccgcgaccaggagggccgcaugaacuacuacuggacccucgucgagcccggcgacaagaucaccuucgaggccaccggcaaccucgucgucccccgcuacgccuucgccauggagcgcaacgccggcuccggcaucaucaucuccgacacccccguccacgacugcaacaccaccugccagacccccaagggcgccaucaacaccucccuccccuuccagaacauccaccccaucaccaucggcaagugccccaaguacgucaaguccaccaagcuccgccucgccaccggccuccgcaacguccccuccauccagucccgcggccucuucggcgccaucgccggcuucaucgagggcggcuggaccggcauggucgacggcugguacggcuaccaccaccagaacgagcagggcuccggcuacgccgccgaccucaaguccacccagaacgccaucgacaagaucaccaacaaggucaacuccgucaucgagaagaugaacacccaguucaccgccgucggcaaggaguucaaccaccucgagaagcgcaucgagaaccucaacaagaaggucgacgacggcuuccucgacaucuggaccuacaacgccgagcuccucguccuccucgagaacgagcgcacccucgacuaccacgacuccaacgucaagaaccucuacgagaagguccgcucccagcucaagaacaacgccaaggagaucggcaacggcugcuucgaguucuaccacaagugcgacaacaccugcauggaguccgucaagaacggcaccuacgacuaccccaaguacuccgaggaggccaagcucaaccgcgaggagaucgacggcgucaagcucgaguccacccgcaucuaccagauccucgccaucuacuccaccgucgccuccucccucguccucgucgucucccucggcgccaucuccuucuggaugugcuccaacggcucccuccagugccgcaucugcaucuga

SEQ ID NO: 100337 - RNA, 1701 nt, Artificial Sequence; identical to SEQ ID NO: 100257
  derived and/or modified CDS sequence (opt2) from hemagglutinin__InfluenzaA__ADD74868

SEQ ID NO: 100338 - RNA, 1701 nt, Artificial Sequence; identical to SEQ ID NO: 100257
  derived and/or modified CDS sequence (opt2) from hemagglutinin__InfluenzaA__ADD74878

SEQ ID NO: 100339 - RNA, 1701 nt, Artificial Sequence
  derived and/or modified CDS sequence (opt2) from hemagglutinin__InfluenzaA__ADD74888
augaaggccauccucgucguccuccucuacaccuucgccaccgccaacgccgacacccucugcaucggcuaccacgccaacaacuccaccgacaccgucgacaccguccucgagaagaacgucaccgucacccacuccgucgaccuccucgaggacaagcacaacggcaagcucugcaagcuccgcggcgucgccccccuccaccucggcaagugcaacaucgccggcuggauccucggcaaccccgagugcgagucccucuccaccgccuccuccugguccuacaucgucgagaccuccuccuccgacaacggcaccugcuaccccggcgacuucaucgacuacgaggagcuccgcgagcagcucuccuccgucuccuccuucgagcgcuucgagaucuuccccaagaccaacuccuggcccaaccacgacuccaacaagggcgucaccgccgccugcccccacgccggcgccaaguccuucuacaagaaccucaucuggcucgucaagaagggcaacuccuaccccaagcucuccaaguccuacaucaacgacaagggcaaggagguccucguccucuggggcauccaccaccccuccaccuccgccgaccagcagucccucuaccagaacgccgacgccuacgucuucgucggcaccucccgcuacuccaagaaguucaagcccgagaucgccauccgccccaagguccgcgaccaggagggccgcaugaacuacuacuggacccucgucgagcccggcgacaagaucaccuucgaggccaccggcaaccucgucgucccccgcuacgccuucgccauggagcgcaacgccggcuccggcaucaucaucuccgacacccccguccacgacugcaacaccaccugccagacccccaagggcgccaucaacaccucccuccccuuccagaacauccaccccaucaccaucggcaagugccccaaguacgucaaguccaccaagcuccgccucgccaccggccuccgcaacguccccuccauccagucccgcggccucuucggcgccaucgccggcuucaucgagggcggcuggaccggcauggucgacggcugguacggcuaccaccaccagaacgagcagggcuccggcuacgccgccgaccucaaguccacccagaacgccaucgacgagaucaccaacaaggucaacuccgucaucgagaagaugaacacccaguucaccgccgucggcaaggaguucaaccaccucgagaagcgcaucgagaaccucaacaagaaggucgacgacggcuuccucgacaucuggaccuacaacgccgagcuccucguccuccucgagaacgagcgcacccucgacuaccacgacuccaacgucaagaaccucuacgagaagguccgcucccagcucaagaacaacgccaaggagaucggcaacggcugcuucgaguucuaccacaagugcgacaacaccugcauggaguccgucaagaacggcaccuacgacuaccccaaguacuccgaggaggccaagcucaaccgcgaggagaucgacggcgucaagcucgaguccacccgcaucuaccagauccucgccaucuacuccaccgucgccuccucccucguccucgucgucucccucggcgccaucuccuucuggaugugcuccaacggcucccuccagugccgcaucugcaucuga

SEQ ID NO: 100340 - RNA, 1701 nt, Artificial Sequence
  derived and/or modified CDS sequence (opt2) from hemagglutinin__InfluenzaA__ADD74898
augaaggccauccucgucguccuccucuacaccuucaccaccgccaacgccgacacccucugcaucggcuaccacgccaacaacuccaccgacaccgucgacaccguccucgagaagaacgucaccgucacccacuccgucaaccuccucgaggacaagcacaacggcaagcucugcaagcuccgcggcgucgccccccuccaccucggcaagugcaacaucgccggcuggauccucggcaaccccgagugcgagucccucuccaccgccuccuccugguccuacaucgucgagaccuccuccuccgacaacggcaccugcuaccccggcgacuucaucaacuacgaggagcuccgcgagcagcucuccuccgucuccuccuucgagcgcuucgagaucuuccccaagaccuccuccuggcccaaccacgacuccaacaagggcgucaccgccgccugcccccacgccggcgccaaguccuucuacaagaaccucaucuggcucgucaagaagggcaacuccuaccccaagcucuccaaguccuacaucaacgacaagggcaaggagguccucguccucuggggcauccaccaccccuccaccuccgccgaccagcagucccucuaccagaacgccgacgccuacgucuucgucggcaccucccgcuacuccaagaaguucaagcccgagaucgccauccgccccaagguccgcgaccaggagggccgcaugaacuacuacuggacccucgucgagcccggcgacaagaucaccuucgaggccaccggcaaccucgucgucccccgcuacgccuucgccauggagcgcaacgccggcuccggcaucaucaucuccgacacccccguccacgacugcaacaccaccugccagacccccaagggcgccaucaacaccucccuccccuuccagaacauccaccccaucaccaucggcaagugccccaaguacgucaaguccaccaagcuccgccucgccaccggccuccgcaacguccccuccauccagucccgcggccucuucggcgccaucgccggcuucaucgagggcggcuggaccggcauggucgacggcugguacggcuaccaccaccagaacgagcagggcuccggcuacgccgccgaccucaaguccacccagaacgccaucgacaagaucaccaacaaggucaacuccgucaucgagaagaugaacacccaguucaccgccgucggcaaggaguucaaccaccucgagaagcgcaucgagaaccucaacaagaaggucgacgacggcuuccucgacaucuggaccuacaacgccgagcuccucguccuccucgagaacgagcgcacccucgacuaccacgacuccaacgucaagaaccucuacgagaagguccgcucccagcucaagaacaacgccaaggagaucggcaacggcugcuucgaguucuaccacaagugcgacaacaccugcauggaguccgucaagaacggcaccuacgacuaccccaaguacuccgaggaggccaagcucaaccgcgaggagaucgacggcgucaagcucgaguccacccgcaucuaccagauccucgccaucuacuccaccgucgccuccucccucguccucgucgucucccucggcgccaucuccuucuggaugugcuccaacggcucccuccagugccgcaucugcaucuga

SEQ ID NO: 100341 - RNA, 1701 nt, Artificial Sequence
  derived and/or modified CDS sequence (opt2) from hemagglutinin__InfluenzaA__ADD74908
augaaggccauccucgucguccuccucuacaccuucgccaccgccaacgccgacacccucugcaucggcuaccacgccaacaacuccaccgacaccgucgacaccguccucgagaagaacgucaccgucacccacuccgucaaccuccucgaggacaagcacaacggcaagcucugcaagcuccgcggcgucgccccccuccaccucggcaagugcaacaucgccggcuggauccucggcaaccccgagugcgagucccucuccaccgccuccuccugguccuacaucgucgagaccuccuccuccgacaacggcaccugcuaccccggcgacuucaucgacuacgaggagcuccgcgagcagcucuccuccgucuccuccuucgagcgcuucgagaucuuccccaagaccuccuccuggcccaaccacgacuccaacaagggcgucaccgccgccugcccccacgccggcgccaaguccuucuacaagaaccucaucuggcucgucaagaagggcaacuccuaccccaagcucuccaaguccuacaucaacgacaagggcaaggagguccucguccucuggggcauccaccaccccuccaccuccgccgaccagcagucccucuaccagaacgccgacgccuacgucuucgucggcaccucccgcuacuccaagaaguucaagcccgagaucgccauccgccccaagguccgcgaccaggagggccgcaugaacuacuacuggacccucgucgagcccggcgacaagaucaccuucgaggccaccggcaaccucgucgucccccgcuacgccuucaccauggagcgcaacgccggcuccggcaucaucaucuccgacacccccguccacgacugcaacaccaccugccagacccccaagggcgccaucaacaccucccuccccuuccagaacauccaccccaucaccaucggcaagugccccaaguacgucaaguccaccaagcuccgccucgccaccggccuccgcaacguccccuccauccagucccgcggccucuucggcgccaucgccggcuucaucgagggcggcuggaccggcauggucgacggcugguacggcuaccaccaccagaacgagcagggcuccggcuacgccgccgaccucaaguccacccagaacgccaucgacgagaucaccaacaaggucaacuccgucaucgagaagaugaacacccaguucaccgccgucggcaaggaguucaaccaccucgagaagcgcaucgagaaccucaacaagaaggucgacgacggcuuccucgacaucuggaccuacaacgccgagcuccucguccuccucgagaacgagcgcacccucgacuaccacgacuccaacgucaagaaccucuacgagaagguccgcucccagcucaagaacaacgccaaggagaucggcaacggcugcuucgaguucuaccacaagugcgacaacaccugcauggaguccgucaagaacggcaccuacgacuaccccaaguacuccgaggaggccaagcucaaccgcgaggagaucgacggcgucaagcucgaguccacccgcaucuaccagauccucgccaucuacuccaccgucgccuccucccucguccucgucgucucccucggcgccaucuccuucuggaugugcuccaacggcucccuccagugccgcaucugcaucuga

SEQ ID NO: 100342 - RNA, 1701 nt, Artificial Sequence; identical to SEQ ID NO: 100335
  derived and/or modified CDS sequence (opt2) from hemagglutinin__InfluenzaA__ADD74918

SEQ ID NO: 100343 - RNA, 1701 nt, Artificial Sequence; identical to SEQ ID NO: 100257
  derived and/or modified CDS sequence (opt2) from hemagglutinin__InfluenzaA__ADD74928

SEQ ID NO: 100344 - RNA, 1701 nt, Artificial Sequence; identical to SEQ ID NO: 100335
  derived and/or modified CDS sequence (opt2) from hemagglutinin__InfluenzaA__ADD74938

SEQ ID NO: 100345 - RNA, 1701 nt, Artificial Sequence
  derived and/or modified CDS sequence (opt2) from hemagglutinin__InfluenzaA__ADD74958
augaaggccauccucgucguccuccucuacaccuucgccaccgccaacgccgacacccucugcaucggcuaccacgccaacaacuccaccgacaccgucgacaccguccucgagaagaacgucaccgucacccacuccgucaaccuccucgagaacaagcacaacggcaagcucugcaagcuccgcggcgucgccccccuccaccucggcaagugcaacaucgccggcuggauccucggcaaccccgagugcgagucccucuccaccgccuccuccugguccuacaucgucgagaccuccuccuccgacaacggcaccugcuaccccggcgacuucaucaacuacgaggagcuccgcgagcagcucuccuccgucuccuccuucgagcgcuucgagaucuuccccaagaccuccuccuggcccaaccacgacuccaacaagggcgucaccgccgccugcccccacgccggcgccaaguccuucuacaagaaccucaucuggcucgucaagaagggcaacuccuaccccaagcucuccaaguccuacaucaacgacaagggcaaggagguccucguccucuggggcauccaccaccccuccaccuccgccgaccagcagucccucuaccagaacgccgacgccuacgucuucgucggcaccucccgcuacuccaagaaguucaagcccgagaucgccauccgccccaagguccgcgaccaggagggccgcaugaacuacuacuggacccucgucgagcccggcgacaagaucaccuucgaggccaccggcaaccucgucgucccccgcuacgccuucgccauggagcgcaacgccggcuccggcaucaucaucuccgacacccccguccacgacugcaacaccaccugccagacccccaagggcgccaucaacaccucccuccccuuccagaacauccaccccaucaccaucggcaagugccccaaguacgucaaguccaccaagcuccgccucgccaccggccuccgcaacguccccuccauccagucccgcggccucuucggcgccaucgccggcuucaucgagggcggcuggaccggcauggucgacggcugguacggcuaccaccaccagaacgagcagggcuccggcuacgccgccgaccucaaguccacccagaacgccaucgacaagaucaccaacaaggucaacuccgucaucgagaagaugaacacccaguucaccgccgucggcaaggaguucaaccaccucgagaagcgcaucgagaaccucaacaagaaggucgacgacggcuuccucgacaucuggaccuacaacgccgagcuccucguccuccucgagaacgagcgcacccucgacuaccacgacuccaacgucaagaaccucuacgagaagguccgcucccagcucaagaacaacgccaaggagaucggcaacggcugcuucgaguucuaccacaagugcgacaacaccugcauggaguccgucaagaacggcaccuacgacuaccccaaguacuccgaggaggccaagcucaaccgcgaggagaucgacggcgucaagcucgaguccacccgcaucuaccagauccucgccaucuacuccaccgucgccuccucccucguccucgucgucucccucggcgccaucuccuucuggaugugcuccaacggcucccuccagugccgcaucugcaucuga

SEQ ID NO: 100346 - RNA, 1701 nt, Artificial Sequence; identical to SEQ ID NO: 99869
  derived and/or modified CDS sequence (opt2) from hemagglutinin__InfluenzaA__ADD74968

SEQ ID NO: 100347 - RNA, 1701 nt, Artificial Sequence
  derived and/or modified CDS sequence (opt2) from hemagglutinin__InfluenzaA__ADD74998
augaaggccauccucgucguccuccucuacaccuucgccaccgccaacgccgacacccucugcaucggcuaccacgccaacaacuccaccgacaccgucgacaccguccucgagaagaacgucaccgucacccacuccgucaaccuccucgaggacaagcacaacggcaagcucugcaagcuccgcggcgucgccccccuccaccucggcaagugcaacaucgccggcuggauccucggcaaccccgagugcgagucccucuccaccgccuccuccugguccuacaucgucgagaccuccuccuccgacaacggcaccugcuaccccggcgacuucaucgacuacgaggagcuccgcgagcagcucuccuccgucuccuccuucgagcgcuucgagaucuuccccaagaccuccuccuggcccaaccacgacuccaacaagggcgucaccgccgccugcccccacgccggcgccaaguccuucuacaagaaccucaucuggcucgucaagaagggcaacuccuaccccaagcucuccaaguccuacaucaacgacaagggcaaggagguccucguccucuggggcauccaccaccccuccaccuccgccgaccagcagucccucuaccagaacgccgacgccuacgucuucgucggcaccucccgcuacuccaagaaguucaagcccgagaucgccauccgccccaagguccgcgaccaggagggccgcaugaacuacuacuggacccucgucgagcccggcgacaagaucaccuucgaggccaccggcaaccucgucgucccccgcuacgccuucgccauggagcgcaacgccggcuccggcaucaucaucuccgacacccccguccacgacugcaacaccaccugccagacccccaagggcgccaucaacaccucccuccccuuccagaacauccaccccaucaccaucggcaagugccccaaguacgucaaguccaccaagcuccgccucgccaccggccuccgcaacguccccuccauccagucccgcggccucuucggcgccaucgccggcuucaucgagggcggcuggaccggcauggucgacggcugguacggcuaccaccaccagaacgagcgcggcuccggcuacgccgccgaccucaaguccacccagaacgccaucgacaagaucaccaacaaggucaacuccgucaucgagaagaugaacacccaguucaccgccgucggcaaggaguucaaccaccucgagaagcgcaucgagaaccucaacaagaaggucgacgacggcuuccucgacaucuggaccuacaacgccgagcuccucguccuccucgagaacgagcgcacccucgacuaccacgacuccaacgucaagaaccucuacgagaagguccgcucccagcucaagaacaacgccaaggagaucggcaacggcugcuucgaguucuaccacaagugcgacaacaccugcauggaguccgucaagaacggcaccuacgacuaccccaaguacuccgaggaggccaagcucaaccgcgaggagaucgacggcgucaagcucgaguccacccgcaucuaccagauccucgccaucuacuccaccgucgccuccucccucguccucgucgucucccucggcgccaucuccuucuggaugugcuccaacggcucccuccagugccgcaucugcaucuga

SEQ ID NO: 100348 - RNA, 1701 nt, Artificial Sequence; identical to SEQ ID NO: 99869
  derived and/or modified CDS sequence (opt2) from hemagglutinin__InfluenzaA__ADD75008

SEQ ID NO: 100349 - RNA, 1701 nt, Artificial Sequence; identical to SEQ ID NO: 99869
  derived and/or modified CDS sequence (opt2) from hemagglutinin__InfluenzaA__ADD75018

SEQ ID NO: 100350 - RNA, 1701 nt, Artificial Sequence; identical to SEQ ID NO: 99869
  derived and/or modified CDS sequence (opt2) from hemagglutinin__InfluenzaA__ADD75028

SEQ ID NO: 100351 - RNA, 1701 nt, Artificial Sequence; identical to SEQ ID NO: 99806
  derived and/or modified CDS sequence (opt2) from hemagglutinin__InfluenzaA__ADD75058

SEQ ID NO: 100352 - RNA, 1701 nt, Artificial Sequence; identical to SEQ ID NO: 100125
  derived and/or modified CDS sequence (opt2) from hemagglutinin__InfluenzaA__ADD75088

SEQ ID NO: 100353 - RNA, 1701 nt, Artificial Sequence; identical to SEQ ID NO: 98705
  derived and/or modified CDS sequence (opt2) from hemagglutinin__InfluenzaA__ADD75098

SEQ ID NO: 100354 - RNA, 1701 nt, Artificial Sequence
  derived and/or modified CDS sequence (opt2) from hemagglutinin__InfluenzaA__ADD75108
augaaggccauccucgucguccuccucuacaccuucgccaccgccaacgccgacacccucugcaucggcuaccacgccaacaacuccaccgacaccgucgacaccguccucgagaagaacgucaccgucacccacuccgucaaccuccucgaggacaagcacaacggcaagcucugcaagcuccgcggcgucgccccccuccaccucggcaagugcaacaucgccggcuggauccucggcaaccccgagugcgagucccucuccaccgccuccuccugguccuacaucgucgagaccuccuccuccgacaacggcaccugcuaccccggcgacuucaucgacuacgaggagcuccgcgagcagcucuccuccgucuccuccuucgagcgcuucgagaucuuccccaagaccuccuccuggcccaaccacgacuccaacaagggcgucaccgccgccugcccccacgccggcgccaaguccuucuacaagaaccucaucuggcucgucaagaagggcaacuccuaccccaagcucuccaaguccuacaucaacgacaagggcaaggagguccucguccucuggggcauccaccaccccuccaccuccgccgaccagcagucccucuaccagaacgccgacgccuacgucuucgucggcaccucccgcuacuccaagaaguucaagcccgagaucgccauccgccccaagguccgcgaccaggagggccgcaugaacuacuacuggacccucgucgagcccggcgacaagaucaccuucgaggccaccggcaaccucgucgucccccgcuacgccuucgccauggagcgcaacgccggcuccggcaucaucaucuccgacacccccguccacgacugcaacaccaccugccagacccccaagggcgccaucaacaccucccuccccuuccagaacauccaccccaucaccaucggcaagugccccaaguacgucaaguccaccaagcuccgccucgccaccggccuccgcaacauccccuccauccagucccgcggccucuucggcgccaucgccggcuucaucgagggcggcuggaccggcauggucgacggcugguacggcuaccaccaccagaacgagcagggcuccggcuacgccgccgaccucaaguccacccagaacgccaucgacaagaucaccaacaaggucaacuccgucaucgagaagaugaacacccaguucaccgccgucggcaaggaguucaaccaccucgagaagcgcaucgagaaccucaacaagaaggucgacgacggcuuccucgacaucuggaccuacaacgccgagcuccucguccuccucgagaacgagcgcacccucgacuaccacgacuccaacgucaagaaccucuacgagaagguccgcucccagcucaagaacaacgccaaggagaucggcaacggcugcuucgaguucuaccacaagugcgacaacaccugcauggaguccgucaagaacggcaccuacgacuaccccaaguacuccgaggaggccaagcucaaccgcgaggagaucgacggcgucaagcucgaguccacccgcaucuaccagauccucgccaucuacuccaccgucgccuccucccucguccucgucgucucccucggcgccaucuccuucuggaugugcuccaacggcucccuccagugccgcaucugcaucuga

SEQ ID NO: 100355 - RNA, 1701 nt, Artificial Sequence; identical to SEQ ID NO: 98705
  derived and/or modified CDS sequence (opt2) from hemagglutinin__InfluenzaA__ADD75118

SEQ ID NO: 100356 - RNA, 1701 nt, Artificial Sequence; identical to SEQ ID NO: 99152
  derived and/or modified CDS sequence (opt2) from hemagglutinin__InfluenzaA__ADD75128

SEQ ID NO: 100357 - RNA, 1701 nt, Artificial Sequence; identical to SEQ ID NO: 98705
  derived and/or modified CDS sequence (opt2) from hemagglutinin__InfluenzaA__ADD75138

SEQ ID NO: 100358 - RNA, 1701 nt, Artificial Sequence; identical to SEQ ID NO: 99869
  derived and/or modified CDS sequence (opt2) from hemagglutinin__InfluenzaA__ADD75148

SEQ ID NO: 100359 - RNA, 1701 nt, Artificial Sequence; identical to SEQ ID NO: 98705
  derived and/or modified CDS sequence (opt2) from hemagglutinin__InfluenzaA__ADD75158

SEQ ID NO: 100360 - RNA, 1701 nt, Artificial Sequence
  derived and/or modified CDS sequence (opt2) from hemagglutinin__InfluenzaA__ADD84494
augaaggccauccucgucguccuccucuacaccuucgccaccgccaacgccgacacccucugcaucggcuaccacgccaacaacuccaccgacaccgucgacaccguccucgagaagaacgucaccgucacccacuccgucaaccuccucgaggacaagcacaacggcaagcucugcaagcuccgcggcgucgccccccuccaccucggcaagugcaacaucgccggcuggauccucggcaaccccgagugcgagucccucuccaccgccuccuccugguccuacaucgucgagaccuccuccuccgacaacggcaccugcuaccccggcgacuucaucgacuacgaggagcuccgcgagcagcucuccuccgucuccuccuucgagcgcuucgagaucuuccccaagaucuccuccuggcccaaccacgaccccaacaagggcgucaccgccgccugcccccacgccggcgccaaguccuucuacaagaaccucaucuggcucgucaagaagggcaacuccuaccccaagcucuccaaguccuacaucaacgacaagggcaaggagguccucguccucuggggcauccaccaccccuccaccuccgccgaccagcagucccucuaccagaacgccgacgccuacgucuucgucggcaccucccgcuacuccaagaaguucaagcccgagaucgccauccgccccaagguccgcgaccaggagggccgcaugaacuacuacuggacccucgucgagcccggcgacaagaucaccuucgaggccaccggcaaccucgucgucccccgcuacgccuucgccauggagcgcaacgccggcuccggcaucaucaucuccgacacccccguccacggcugcaacaccaccugccagacccccaagggcgccaucaacaccucccuccccuuccagaacauccaccccaucaccaucggcaagugccccaaguacgucaaguccaccaagcuccgccucgccaccggccuccgcaacguccccuccauccagucccgcggccucuucggcgccaucgccggcuucaucgagggcggcuggaccggcauggucgacggcugguacggcuaccaccaccagaacgagcagggcuccggcuacgccgccgaccucaaguccacccagaacgccaucgacgagaucaccaacaaggucaacuccgucaucgagaagaugaacacccaguucaccgccgucggcaaggaguucaaccaccucgagaagcgcaucgagaaccucaacaagaaggucgacgacggcuuccucgacaucuggaccuacaacgccgagcuccucguccuccucgagaacgagcgcacccucgacuaccacgacuccaacgucaagaaccucuacgagaagguccgcucccagcucaagaacaacgccaaggagaucggcaacggcugcuucgaguucuaccacaagugcgacaacaccugcauggaguccgucaagaacggcaccuacgacuaccccaaguacuccgaggaggccaagcucaaccgcgaggagaucgacggcgucaagcucgaguccacccgcaucuaccagauccucgccaucuacuccaccgucgccuccucccucguccucgucgucucccucggcgccaucuccuucuggaugugcuccaacggcucccuccagugccgcaucugcaucuga

SEQ ID NO: 100361 - RNA, 1701 nt, Artificial Sequence
  derived and/or modified CDS sequence (opt2) from hemagglutinin__InfluenzaA__ADD84495
augaaggccauccucgucguccuccucuacaccuucgccaccgccaacgccgacacccucugcaucggcuaccacgccaacaacuccaccgacaccgucgacaccguccucgagaagaacgucaccgucacccacuccgucaaccuccucgaggacaagcacaacggcaagcucugcaagcuccgcggcgucgccccccuccaccucggcaagugcaacaucgccggcuggauccucggcaaccccgagugcgagucccucuccaccgccuccuccugguccuacaucgucgagaccuccuccuccgacaacggcaccugcuaccccggcgacuucaucgacuacgaggagcuccgcgagcagcucuccuccgucuccuccuucgagcgcuucgagaucuuccccaagaucuccuccuggcccaaccacgaccccaacaagggcgucaccgccgccugcccccacgccggcgccaaguccuucuacaagaaccucaucuggcucgucaagaagggcaacuccuaccccaagcucuccaaguccuacaucaacgacaagggcaaggagguccucguccucuggggcauccaccaccccuccaccuccgccgaccagcagucccucuaccagaacgccgacgccuacgucuucgucggcaccucccgcuacuccaagaaguucaagcccgagaucgccauccgccccaagguccgcgaccaggagggccgcaugaacuacuacuggacccucgucgagcccggcgacaagaucaccuucgaggccaccggcaaccucgucgucccccgcuacgccuucgccauggagcgcaacgccggcuccggcaucaucaucuccgacacccccguccacgacugcaacaccaccugccagacccccaagggcgccaucaacaccucccuccccuuccagaacauccaccccaucaccaucggcaagugccccaaguacgucaaguccaccaagcuccgccucgccaccggccuccgcaacguccccuccauccagucccgcggccucuucggcgccaucgccggcuucaucgagggcggcuggaccggcauggucgacggcugguacggcuaccaccaccagaacgagcagggcuccggcuacgccgccgaccucaaguccacccagaacgccaucgacgagaucaccaacaaggucaacuccgucaucgagaagaugaacacccaguucaccgccgucggcaaggaguucaaccaccucgagaagcgcaucgagaaccucaacaagaaggucgacgacggcuuccucgacaucuggaccuacaacgccgagcuccucguccuccucgagaacgagcgcacccucgacuaccacgacuccaacgucaagaaccucuacgagaagguccgcucccagcucaagaacaacgccaaggagaucggcaacggcugcuucgaguucuaccacaagugcgacaacaccugcauggaguccgucaagaacggcaccuacgacuaccccaaguacuccgaggaggccaagcucaaccgcgaggagaucgacggcgucaagcucgaguccacccgcaucuaccagauccucgccaucuacuccaccgucgccuccucccucguccucgucgucucccucggcgccaucuccuucuggaugugcuccaacggcucccuccagugccgcaucugcaucuga

SEQ ID NO: 100362 - RNA, 1701 nt, Artificial Sequence
  derived and/or modified CDS sequence (opt2) from hemagglutinin__InfluenzaA__ADD84496
augaaggccauccucgucguccuccucuacaccuucgccaccgccaacgccgacacccucugcaucggcuaccacgccaacaacuccaccgacaccgucgacaccguccucgagaagaacgucaccgucacccacuccgucaaccuccucgaggacaagcacaacggcaagcucugcaagcuccgcggcgucgccccccuccaccucggcaagugcaacaucgccggcuggauccucggcaaccccgagugcgagucccucuccaccgccuccuccugguccuacaucgucgagaccuccuccuccgacaacggcaccugcuaccccggcgacuucaucgacuacgaggagcuccgcgagcagcucuccuccgucuccuccuucgagcgcuucgagaucuuccccaagaucuccuccuggcccaaccacgaccccaacaagggcgucaccgccgccugcccccacgccggcgccaaguccuucuacaagaaccucaucuggcucgucaagaagggcaacuccuaccccaagcucuccaaguccuacaucaacgacaagggcaaggagguccucguccucuggggcauccaccaccccuccaccuccgccgaccagcagucccucuaccagaacgccgacgccuacgucuucgucggcuccucccgcuacuccaagaaguucaagcccgagaucgccauccgccccaagguccgcgaccaggagggccgcaugaacuacuacuggacccucgucgagcccggcgacaagaucaccuucgaggccaccggcaaccucgucgucccccgcuacgccuucgccauggagcgcaacgccggcuccggcaucaucaucuccgacacccccguccacgacugcaacaccaccugccagacccccaagggcgccaucaacaccucccuccccuuccagaacauccaccccaucaccaucggcaagugccccaaguacgucaaguccaccaagcuccgccucgccaccggccuccgcaacguccccuccauccagucccgcggccucuucggcgccaucgccggcuucaucgagggcggcuggaccggcauggucgacggcugguacggcuaccaccaccagaacgagcagggcuccggcuacgccgccgaccucaaguccacccagaacgccaucgacgagaucaccaacaaggucaacuccgucaucgagaagaugaacacccaguucaccgccgucggcaaggaguucaaccaccucgagaagcgcaucgagaaccucaacaagaaggucgacgacggcuuccucgacaucuggaccuacaacgccgagcuccucguccuccucgagaacgagcgcacccucgacuaccacgacuccaacgucaagaaccucuacgagaagguccgcucccagcucaagaacaacgccaaggagaucggcaacggcugcuucgaguucuaccacaagugcgacaacaccugcauggaguccgucaagaacggcaccuacgacuaccccaaguacuccgaggaggccaagcucaaccgcgaggagaucgacggcgucaagcucgaguccacccgcaucuaccagauccucgccaucuacuccaccgucgccuccucccucguccucgucgucucccucggcgccaucuccuucuggaugugcuccaacggcucccuccagugccgcaucugcaucuga

SEQ ID NO: 100363 - RNA, 1701 nt, Artificial Sequence; identical to SEQ ID NO: 100361
  derived and/or modified CDS sequence (opt2) from hemagglutinin__InfluenzaA__ADD84497

SEQ ID NO: 100364 - RNA, 1701 nt, Artificial Sequence
  derived and/or modified CDS sequence (opt2) from hemagglutinin__InfluenzaA__ADD84498
augaaggccauccucgucguccuccucuacaccuucgccaccgccaacgccgacacccucugcaucggcuaccacgccaacaacuccaccgacaccgucgucaccguccucgagaagaacgucaccgucacccacuccgucaaccuccucgaggacaagcacaacggcaagcucugcaagcuccgcggcgucgccccccuccaccucggcaagugcaacaucgccggcuggauccucggcaaccccgagugcgagucccucuccaccgccuccuccugguccuacaucgucgagaccuccuccuccgacaacggcaccugcuaccccggcgacuucaucgacuacgaggagcuccgcgagcagcucuccuccgucuccuccuucgagcgcuucgagaucuuccccaagaucuccuccuggcccaaccacgaccccaacaagggcgucaccgccgccugcccccacgccggcgccaaguccuucuacaagaaccucaucuggcucgucaagaagggcaacuccuaccccaagcucuccaaguccuacaucaacgacaagggcaaggagguccucguccucuggggcauccaccaccccuccaccuccgccgaccagcagucccucuaccagaacgccgacgccuacgucuucgucggcuccucccgcuacuccaagaaguucaagcccgagaucgccauccgccccaagguccgcgaccaggagggccgcaugaacuacuacuggacccucgucgagcccggcgacaagaucaccuucgaggccaccggcaaccucgucgucccccgcuacgccuucgccauggagcgcaacgccggcuccggcaucaucaucuccgacacccccguccacgacugcaacaccaccugccagacccccaagggcgccaucaacaccucccuccccuuccagaacauccaccccaucaccaucggcaagugccccaaguacgucaaguccaccaagcuccgccucgccaccggccuccgcaacguccccuccauccagucccgcggccucuucggcgccaucgccggcuucaucgagggcggcuggaccggcauggucgacggcugguacggcuaccaccaccagaacgagcagggcuccggcuacgccgccgaccucaaguccacccagaacgccaucgacgagaucaccaacaaggucaacuccgucaucgagaagaugaacacccaguucaccgccgucggcaaggaguucaaccaccucgagaagcgcaucgagaaccucaacaagaaggucgacgacggcuuccucgacaucuggaccuacaacgccgagcuccucguccuccucgagaacgagcgcacccucgacuaccacgacuccaacgucaagaaccucuacgagaagguccgcucccagcucaagaacaacgccaaggagaucggcaacggcugcuucgaguucuaccacaagugcgacaacaccugcauggaguccgucaagaacggcaccuacgacuaccccaaguacuccgaggaggccaagcucaaccgcgaggagaucgacggcgucaagcucgaguccacccgcaucuaccagauccucgccaucuacuccaccgucgccuccucccucguccucgucgucucccucggcgccaucuccuucuggaugugcuccaacggcucccuccagugccgcaucugcaucuga

SEQ ID NO: 100365 - RNA, 1701 nt, Artificial Sequence; identical to SEQ ID NO: 100361
  derived and/or modified CDS sequence (opt2) from hemagglutinin__InfluenzaA__ADD84499

SEQ ID NO: 100366 - RNA, 1701 nt, Artificial Sequence
  derived and/or modified CDS sequence (opt2) from hemagglutinin__InfluenzaA__ADD92535
augaaggccauccucgucguccuccucuacaccuucgccaccgccaacgccgacacccucugcaucggcuaccacgccaacaacuccaccgacaccgucgacaccguccucgagaagaacgucaccgucacccacuccgucaaccuccucgaggacaagcacaacggcaagcucugcaagcuccgcggcgucgccccccuccaccucggcaagugcaacaucgccggcuggauccucggcaaccccgagugcgagucccucuccaccgccuccuccugguccuacaucgucgagaccuccuccuccgacaacggcaccugcuaccccggcgacuucaucgacuacgaggagcuccgcgagcagcucuccuccgucuccuccuucgagcgcuucgagaucuuccccaagaccuccuccuggcccaaccacgacuccaacaagggcgucaccgccgccugcccccacgccggcgccaaguccuucuacaagaaccucaucuggcucgucaagaagggcaacuccuaccccaagcucuccaaguccuacaucaacgacaagggcaaggagguccucguccucuggggcauccaccaccccuccaccuccgccgaccagcagucccucuaccagaacgccgacgccuacgucuucgucggcaccucccgcuacuccaagaaguucaagcccgagaucgccauccgccccaagguccgcgaccgcgagggccgcaugaacuacuacuggacccucgucgagcccggcgacaagaucaccuucgaggccaccggcaaccucgucgucccccgcuacgccuucgccauggagcgcaacgccggcuccggcaucaucaucuccgacacccccguccacgacugcaacaccaccugccagacccccaagggcgccaucaacaccucccuccccuuccagaacauccaccccaucaccaucggcaagugccccaaguacgucaaguccaccaagcuccgccucgccaccggccuccgcaacguccccuccauccagucccgcggccucuucggcgccaucgccggcuucaucgagggcggcuggaccggcauggucgacggcugguacggcuaccaccaccagaacgagcagggcuccggcuacgccgccgaccucaaguccacccagaacgccaucgacgagaucaccaaccgcgucaacuccgucaucgagaagaugaacacccaguucaccgccgucggcaaggaguucaaccaccucgagaagcgcaucgagaaccucaacaagaaggucgacggcggcuuccucgacaucuggaccuacaacgccgagcuccucguccuccucgagaacgagcgcacccucgacuaccacgacuccaacgucaagaaccucuacgagaagguccgcucccagcucaagaacaacgccaaggagaucggcaacggcugcuucgaguucuaccacaagugcgacaacaccugcauggaguccgucaagaacggcaccuacgacuaccccaaguacuccgaggaggccaagcucaaccgcgaggagaucgacggcgucaagcucgaguccacccgcaucuaccagauccucgccaucuacuccaccgucgccuccucccucguccucgucgucucccucggcgccaucuccuucuggaugugcuccaacggcucccuccagugccgcaucugcaucuga

SEQ ID NO: 100367 - RNA, 1701 nt, Artificial Sequence; identical to SEQ ID NO: 100293
  derived and/or modified CDS sequence (opt2) from hemagglutinin__InfluenzaA__ADD96766

SEQ ID NO: 100368 - RNA, 1701 nt, Artificial Sequence; identical to SEQ ID NO: 98885
  derived and/or modified CDS sequence (opt2) from hemagglutinin__InfluenzaA__ADD96776

SEQ ID NO: 100369 - RNA, 1701 nt, Artificial Sequence; identical to SEQ ID NO: 98885
  derived and/or modified CDS sequence (opt2) from hemagglutinin__InfluenzaA__ADD96786

SEQ ID NO: 100370 - RNA, 1701 nt, Artificial Sequence; identical to SEQ ID NO: 100190
  derived and/or modified CDS sequence (opt2) from hemagglutinin__InfluenzaA__ADD96796

SEQ ID NO: 100371 - RNA, 1701 nt, Artificial Sequence
  derived and/or modified CDS sequence (opt2) from hemagglutinin__InfluenzaA__ADD96806
augaaggccauccucgucguccuccucuacacccucgccaccgccaacgccgacacccucugcaucggcuaccacgccaacaacuccaccgacaccgucgacaccguccucgagaagaacgucaccgucacccacuccgucaaccuccucgaggacaagcacaacggcaagcucugcaagcuccgcggcgucgccccccuccaccucggcaagugcaacaucgccggcuggauccucggcaaccccgagugcgagucccucuccaccgccuccuccugguccuacaucgucgagaccuccuccuccgacaacggcaccugcuaccccggcgacuucaucgacuacgaggagcuccgcgagcagcucuccuccgucuccuccuucgagcgcuucgagaucuuccccaagaccuccuccuggcccaaccacgacuccaacaagggcgucaccgccgccugcccccacgccggcgccaaguccuucuacaagaaccucaucuggcucgucaagaagggcaacuccuaccccaagcucuccaaguccuacaucaacgacaagggcaaggagguccucguccucuggggcauccaccaccccuccaccuccgccgaccagcagucccucuaccagaacgccgacgccuacgucuucgucggcaccucccgcuacuccaagaaguucaagcccgagaucgccauccgccccaagguccgcgaccaggagggccgcaugaacuacuacuggacccucgucgagcccggcgacaagaucaccuucgaggccaccggcaaccucgucgucccccgcuacgccuucgccauggagcgcaacgccggcuccggcaucaucaucuccgacacccccguccacgacugcaacaccaccugccagacccccaagggcgccaucaacaccucccuccccuuccagaacauccaccccaucaccaucggcaagugccccaaguacgucaaguccaccaagcuccgccucgccaccggccuccgcaacguccccuccauccagucccgcggccucuucggcgccaucgccggcuucaucgagggcggcuggaccggcauggucgacggcugguacggcuaccaccaccagaacgagcagggcuccggcuacgccgccgaccucaaguccacccagaacgccaucgacgagaucaccaacaaggucaacuccgucaucgagaagaugaacacccaguucaccgccgucggcaaggaguucaaccaccucgagaagcgcaucgagaaccucaacaagaaggucgacgacggcuuccucgacaucuggaccuacaacgccgagcuccucguccuccucgagaacgagcgcacccucgacuaccacgacuccaacgucaagaaccucuacgagaagguccgcucccagcucaagaacaacgccaaggagaucggcaacggcugcuucgaguucuaccacaagugcgacaacaccugcauggaguccgucaagaacggcaccuacgacuaccccaaguacuccgaggaggccaagcucaaccgcgaggagaucgacggcgucaagcucgaguccacccgcaucuaccagauccucgccaucuacuccaccgucgccuccucccucguccucgucgucucccucggcgccaucuccuucuggaugugcuccaacggcucccuccagugccgcaucugcaucuga

SEQ ID NO: 100372 - RNA, 1701 nt, Artificial Sequence; identical to SEQ ID NO: 99869
  derived and/or modified CDS sequence (opt2) from hemagglutinin__InfluenzaA__ADD96816

SEQ ID NO: 100373 - RNA, 1701 nt, Artificial Sequence
  derived and/or modified CDS sequence (opt2) from hemagglutinin__InfluenzaA__ADD96826
augaaggccauccucgucguccuccucuacaccuucgccaccgccaacgccgacacccucugcaucggcuaccacgccaacaacuccaccgacaccgucgacaccguccucgagaagaacgucaccgucacccacuccgucaaccuccucgaggacaagcacaacggcaagcucugcaagcuccgcggcgucgccccccuccaccucggcaagugcaacaucgccggcuggauccucggcaaccccgagugcgagucccucuccaccgccuccuccugguccuacaucgucgagaccuccuccuccgacaacggcaccugcuaccccggcgacuucaucgacuacgaggagcuccgcgagcagcucuccuccgucuccuccuucgagcgcuucgagaucuuccccaagaccuccuccuggcccaaccacgacuccaacaagggcgucaccgccgccugcccccacgccggcgccaaguccuucuacaagaaccucaucuggcucgucaagaagggcaacuccuaccccaagcucuccaaguccuacaucaacgacaagggcaaggagguccucguccucuggggcauccaccaccccuccaccuccgccgaccagcagucccucuaccagaacgccgacgccuacgucuucgucggcaccucccgcuacuccaagaaguucaagcccgagaucgccauccgccccaaggucauggaccaggagggccgcaugaacuacuacuggacccucgucgagcccggcgacaagaucaccuucgaggccaccggcaaccucgucgucccccgcuacgccuucgccauggagcgcaacgccggcuccggcaucaucaucuccgacacccccguccacgacugcaacaccaccugccagacccccaagggcgccaucaacaccucccuccccuuccagaacauccaccccaucaccaucggcaagugccccaaguacgucaaguccaccaagcuccgccucgccaccggccuccgcaacguccccuccauccagucccgcggccucuucggcgccaucgccggcuucaucgagggcggcuggaccggcauggucgacggcugguacggcuaccaccaccagaacgagcagggcuccggcuacgccgccgaccucaaguccacccagaacgccaucgacgagaucaccaacaaggucaacuccgucaucgagaagaugaacacccaguucgccgccgucggcaaggaguucaaccaccucgagaagcgcaucgagaaccucaacaagaaggucgacgacggcuuccucgacaucuggaccuacaacgccgagcuccucguccuccucgagaacgagcgcacccucgacuaccacgacuccaacgucaagaaccucuacgagaagguccgcucccagcucaagaacaacgccaaggagaucggcaacggcugcuucgaguucuaccacaagugcgacaacaccugcauggaguccgucaagaacggcaccuacgacuaccccaaguacuccgaggaggccaagcucaaccgcgaggagaucgacggcgucaagcucgaguccacccgcaucuaccagauccucgccaucuacuccaccgucgccuccucccucguccucgucgucucccucggcgccaucuccuucuggaugugcuccaacggcucccuccagugccgcaucugcaucuga

SEQ ID NO: 100374 - RNA, 1701 nt, Artificial Sequence; identical to SEQ ID NO: 98705
  derived and/or modified CDS sequence (opt2) from hemagglutinin__InfluenzaA__ADD96836

SEQ ID NO: 100375 - RNA, 1701 nt, Artificial Sequence; identical to SEQ ID NO: 98705
  derived and/or modified CDS sequence (opt2) from hemagglutinin__InfluenzaA__ADD96846

SEQ ID NO: 100376 - RNA, 1701 nt, Artificial Sequence; identical to SEQ ID NO: 100257
  derived and/or modified CDS sequence (opt2) from hemagglutinin__InfluenzaA__ADD96856

SEQ ID NO: 100377 - RNA, 1701 nt, Artificial Sequence; identical to SEQ ID NO: 99058
  derived and/or modified CDS sequence (opt2) from hemagglutinin__InfluenzaA__ADD96886

SEQ ID NO: 100378 - RNA, 1701 nt, Artificial Sequence; identical to SEQ ID NO: 100332
  derived and/or modified CDS sequence (opt2) from hemagglutinin__InfluenzaA__ADD96896

SEQ ID NO: 100379 - RNA, 1701 nt, Artificial Sequence; identical to SEQ ID NO: 99869
  derived and/or modified CDS sequence (opt2) from hemagglutinin__InfluenzaA__ADD96906

SEQ ID NO: 100380 - RNA, 1701 nt, Artificial Sequence; identical to SEQ ID NO: 99869
  derived and/or modified CDS sequence (opt2) from hemagglutinin__InfluenzaA__ADD96916

SEQ ID NO: 100381 - RNA, 1701 nt, Artificial Sequence; identical to SEQ ID NO: 99869
  derived and/or modified CDS sequence (opt2) from hemagglutinin__InfluenzaA__ADD96926

SEQ ID NO: 100382 - RNA, 1701 nt, Artificial Sequence
  derived and/or modified CDS sequence (opt2) from hemagglutinin__InfluenzaA__ADD96936
augaaggccauccucgucguccuccucuacaccuucgccaccgccaacgccgacacccucugcaucggcuaccacgccaacaacuccaccgacaccgucgacaccguccucgagaagaacgucaccgucacccacuccgucaacauccucgaggacaagcacaacggcaagcucugcaagcuccgcggcgucgccccccuccaccucggcaagugcaacaucgccggcuggauccucggcaaccccgagugcgagucccucuccaccgccuccuccugguccuacaucgucgagaccuccuccuccgacaacggcaccugcuaccccggcgacuucaucgacuacgaggagcuccgcgagcagcucuccuccgucuccuccuucgagcgcuucgagaucuuccccaagaccuccuccuggcccaaccacgacuccaacaagggcgucaccgccgccugcccccacgccggcgccaaguccuucuacaagaaccucaucuggcucaucaagaagggcaacuccuaccccaagcucuccaaguccuacaucaacgacaagggcaaggagguccucguccucuggggcauccaccaccccuccaccuccgccgaccagcagucccucuaccagaacgccgacgccuacgucuucgucggcaccucccgcuacuccaagaaguucaagcccgagaucgccauccgccccaagguccgcgaccaggagggccgcaugaacuacuacuggacccucgucgagcccggcgacaagaucaccuucgaggccaccggcaaccucgucgucccccgcuacgccuucgccauggagcgcaacgccggcuccggcaucaucaucuccgacacccccguccacgacugcaacaccaccugccagacccccaagggcgccaucaacaccucccuccccuuccagaacauccaccccaucaccaucggcaagugccccaaguacgucaaguccaccaagcuccgccucgccaccggccuccgcaacguccccuccauccagucccgcggccucuucggcgccaucgccggcuucaucgagggcggcuggaccggcauggucgacggcugguacggcuaccaccaccagaacgagcagggcuccggcuacgccgccgaccucaaguccacccagaacgccaucgacgagaucaccaacaaggucaacuccgucaucgagaagaugaacacccaguucaccgccgucggcaaggaguucaaccaccucgagaagcgcaucgagaaccucaacaagaaggucgacgacggcuuccucgacaucuggaccuacaacgccgagcuccucguccuccucgagaacgagcgcacccucgacuaccacgacuccaacgucaagaaccucuacgagaagguccgcucccagcucaagaacaacgccaaggagaucggcaacggcugcuucgaguucuaccacaagugcgacaacaccugcauggaguccgucaagaacggcaccuacgacuaccccaaguacuccgaggaggccaagcucaaccgcgaggagaucgacggcgucaagcucgaguccacccgcaucuaccagauccucgccaucuacuccaccgucgccuccucccucguccucgucgucucccucggcgccaucuccuucuggaugugcuccaacggcucccuccagugccgcaucugcaucuga

SEQ ID NO: 100383 - RNA, 1701 nt, Artificial Sequence
  derived and/or modified CDS sequence (opt2) from hemagglutinin__InfluenzaA__ADD96946
augaaggccauccucgucguccuccucuacaccuucgccaccgccaacgccgacacccucugcaucggcuaccacgccaacaacuccaccgacaccgucgacaccguccucgagaagaacgucaccgucacccacuccgucaaccuccucgaggacaagcacaacggcaagcucugcaagcuccgcggcgucgccccccuccaccucggcaagugcaacaucgccggcuggauccucggcaaccccgagugcgagucccucuccaccgccuccuccugguccuacaucgucgagaccuccuccuccgacaacggcaccugcuaccccggcgacuucaucgacuacgaggagcuccgcgagcagcucuccuccgucuccuccuucaagcgcuucgagaucuuccccaagaccuccuccuggcccaaccacgacuccaacaagggcgucaccgccgccugcccccacgccggcgccaaguccuucuacaagaaccucaucuggcucgucaagaagggcaacuccuaccccaagcucuccaaguccuacaucaacgacaagggcaaggagguccucguccucuggggcauccaccaccccuccaccuccgccgaccagcagucccucuaccagaacgccgacgccuacgucuucgucggcaccucccgcuacuccaagaaguucaagcccgagaucgccauccgccccaagguccgcgaccaggagggccgcaugaacuacuacuggacccucgucgagcccggcgacaagaucaccuucgaggccaccggcaaccucgucgucccccgcuacgccuucgccauggagcgcaacgccggcuccggcaucaucaucuccgacacccccguccacgacugcaacaccaccugccagacccccaagggcgccaucaacaccucccuccccuuccagaacauccaccccaucaccaucggcgagugccccaaguacgucaaguccaccaagcuccgccucgccaccggccuccgcaacguccccuccauccagucccgcggccucuucggcgccaucgccggcuucaucgagggcggcuggaccggcauggucgacggcugguacggcuaccaccaccagaacgagcagggcuccggcuacgccgccgaccucaaguccacccagaacgccaucgacaagaucaccaacaaggucaacuccgucaucgagaagaugaacacccaguucaccgccgucggcaaggaguucaaccaccucgagaagcgcaucgagaaccucaacaagaaggucgacgacggcuuccucgacaucuggaccuacaacgccgagcuccucguccuccucgagaacgagcgcacccucgacuaccacgacuccaacgucaagaaccucuacgagaagguccgcucccagcucaagaacaacgccaaggagaucggcaacggcugcuucgaguucuaccacaagugcgacaacaccugcauggaguccgucaagaacggcaccuacgacuaccccaaguacuccgaggaggccaagcucaaccgcgaggagaucgacggcgucaagcucgaguccacccgcaucuaccagauccucgccaucuacuccaccgucgccuccucccucguccucgucgucucccucggcgccaucuccuucuggaugugcuccaacggcucccuccagugccgcaucugcaucuga

SEQ ID NO: 100384 - RNA, 1701 nt, Artificial Sequence
  derived and/or modified CDS sequence (opt2) from hemagglutinin__InfluenzaA__ADD96956
augaaggccauccucgucguccuccucuacaccuucgccaccgccaacgccgacacccucugcaucggcuaccacgccaacaacuccaccgacaccgucgacaccguccucgagaagaacgucaccgucacccacuccgucaaccuccucgaggacaagcacaacggcaagcucugcaagcuccgcggcgucgccccccuccaccucggcaagugcaacaucgccggcuggauccucggcaaccccgagugcgagucccucuccaccgccuccuccugguccuacaucgucgagaccuccuccuccgacaacggcaccugcuaccccggcgacuucaucgacuacgaggagcuccgcgagcagcucuccuccgucuccuccuucgagcgcuucgagaucuuccccaagaccuccuccuggcccaaccacgacuccaacaagggcgucaccgccgccugcccccacgccggcgccaaguccuucuacaagaaccucaucuggcucgucaagaagggcaacuccuaccccaagcucuccaaguccuacaucaacgacaagggcaaggagguccucguccucuggggcauccaccaccccuccaccuccgccgaccagcagucccucuaccagaacgccgacgccuacgucuucgucggcaccucccgcuacuccaagaaguucaagcccgagaucgccauccgccccaagguccgcgagcaggagggccgcaugaacuacuacuggacccucgucaagcccggcgacaagaucaccuucgaggccaccggcaaccucgucgucccccgcuacgccuucgccauggagcgcaacgccggcuccggcaucaucaucuccgacacccccguccacgacugcaacaccaccugccagacccccaagggcgccaucaacaccucccuccccuuccagaacauccacuccaucaccaucggcaagugccccaaguacgucaaguccaccaagcuccgccucgccaccggccuccgcaacguccccuccauccagucccgcggccucuucggcgccaucgccggcuucaucgagggcggcuggaccggcauggucgacggcugguacggcuaccaccaccagaacgagcagggcuccggcuacgccgccgaccucaaguccacccagaacgccaucgacgagaucaccaacaaggucaacuccgucaucgagaagaugaacacccaguucaccgccgucggcaaggaguucaaccaccucgagaagcgcaucgagaaccucaacaagaaggucgacgacggcuuccucgacaucuggaccuacaacgccgagcuccucguccuccucgagaacgagcgcacccucgacuaccacgacuccaacgucaagaaccucuacgagaagguccgcucccagcucaagaacaacgccaaggagaucggcaacggcugcuucgaguucuaccacaagugcgacaacaccugcauggaguccgucaagaacggcaccuacgacuaccccaaguacuccgaggaggccaagcucaaccgcgaggagaucgacggcgucaagcucgaguccacccgcaucuaccagauccucgccaucuacuccaccgucgccuccucccucguccucgucgucucccucggcgccaucuccuucuggaugugcuccaacggcucccuccagugccgcaucugcaucuga

SEQ ID NO: 100385 - RNA, 1701 nt, Artificial Sequence; identical to SEQ ID NO: 98705
  derived and/or modified CDS sequence (opt2) from hemagglutinin__InfluenzaA__ADD96976

SEQ ID NO: 100386 - RNA, 1701 nt, Artificial Sequence; identical to SEQ ID NO: 98705
  derived and/or modified CDS sequence (opt2) from hemagglutinin__InfluenzaA__ADD96986

SEQ ID NO: 100387 - RNA, 1701 nt, Artificial Sequence
  derived and/or modified CDS sequence (opt2) from hemagglutinin__InfluenzaA__ADD97035
augaaggccauccucgucguccuccucuacaccuucgccaccgccaacgccgacacccucugcaucggcuaccacgccaacaacuccaccgacaccgucgacaccguccucgagaagaacgucaccgucacccacuccgucaaccuccucgaggacaagcacaacggcaagcucugcaagcuccgcggcgucgccccccuccaccucggcaagugcaacaucgccggcuggauccucggcaaccccgagugcgagucccucuccaccgccuccuccugguccuacaucgucgagaccuccuccuccgacaacggcaccugcuaccccggcgacuucaucgacuacgaggagcuccgcgagcagcucuccuccgucuccuccuucgagcgcuucgagaucuuccccaagaccuccuccuggcccaaccacgacuccaacaagggcgucaccgccgccugcccccacgccggcgccaaguccuucuacaagaaccucaucuggcucgucaagaagggcaacuccuaccccaagcucuccaaguccuacaucaacgacaagggcaaggagguccucguccucuggggcauccaccaccccuccaccuccgccgaccagcagucccucuaccagaacgccgacgccuacgucuucgucggcaccucccgcuacuccaagaaguucaagcccgagaucgccauccgccccaagguccgcgaccaggagggccgcaugaacuacuacuggacccucgucgagcccggcgacaagaucaccuucgaggccaccggcaaccucgucgucccccgcuacgccuucgccauggagcgcaacgccggcuccggcaucaucaucuccgacacccccguccacgacugcaacaccaccugccagacccccaagggcgccaucaacaccucccuccccuuccagaacauccaccccaucaccaucggcaagugccccaaguacgucaaguccaccaagcuccgcauggccaccggccuccgcaacguccccuccauccagucccgcggccucuucggcgccaucgccggcuucaucgagggcggcuggaccggcauggucgacggcugguacggcuaccaccaccagaacgagcagggcuccggcuacgccgccgaccucaaguccacccagaacgccaucgacgagaucaccaacaaggucaacuccgucaucgagaagaugaacacccaguucaccgccgucggcaaggaguucaaccaccucgagaagcgcaucgagaaccucaacaagaaggucgacgacggcuuccucgacaucuggaccuacaacgccgagcuccucguccuccucgagaacgagcgcacccucgacuaccacgacuccaacgucaagaaccucuacgagaagguccgcucccagcucaagaacaacgccaaggagaucggcaacggcugcuucgaguucuaccacaagugcgacaacaccugcauggaguccgucaagaacggcaccuacgacuaccccaaguacuccgaggaggccaagcucaaccgcgaggagaucgacggcgucaagcucgaguccacccgcaucuaccagauccucgccaucuacuccaccgucgccuccucccucguccucgucgucucccucggcgccaucuccuucuggaugugcuccaacggcucccuccagugccgcaucugcaucuga

SEQ ID NO: 100388 - RNA, 1701 nt, Artificial Sequence
  derived and/or modified CDS sequence (opt2) from hemagglutinin__InfluenzaA__ADD97045
augaaggccauccucgucguccuccucuacaccuucgccaccgccaacgccgacacccucugcaucggcuaccacgccaacaacuccaccgacaccgucgacaccguccucgagaagaacgucaccgucacccacuccgucaaccuccucgaggacaagcacaacggcaagcucugcaagcuccgcggcgucgccccccuccaccucggcaagugcaacaucgccggcuggauccucggcaaccccgagugcgagucccucuccaccgccuccuccugguccuacaucgucgagaccuccuccuccgacaacggcaccugcuaccccggcgacuucaccgacuacgaggagcuccgcgagcagcucuccuccgucuccuccuucgagcgcuucgagaucuuccccaagaccuccuccuggcccaaccacgacuccaacaagggcgucaccgccgccugcccccacgccggcgccaaguccuucuacaagaaccucaucuggcucgucaagaagggcaacuccuaccccaagcucuccaaguccuacaucaacgacaagggcaaggagguccucguccucuggggcauccaccaccccuccaccuccgccgaccagcagucccucuaccagaacgccgacgccuacgucuucgucggcaccucccgcuacuccaagaaguucaagcccgagaucgccauccgccccaagguccgcgaccaggagggccgcaugaacuacuacuggacccucgucgagcccggcgacaagaucaccuucgaggccaccggcaaccucgucgucccccgcuacgccuucgccauggagcgcaacgccggcuccggcaucaucaucuccgacacccccguccacgacugcaacaccaccugccagacccccaagggcgccaucaacaccucccuccccuuccagaacauccaccccaucaccaucggcaagugccccaaguacgucaaguccaccaagcuccgccucgccaccggccuccgcaacguccccuccauccagucccgcggccucuucggcgccaucgccggcuucaucgagggcggcuggaccggcauggucgacggcugguacggcuaccaccaccagaacgagcagggcuccggcuacgccgccgaccucaaguccacccagaacgccaucgacgagaucaccaacaaggucaacuccgucaucgagaagaugaacacccaguucaccgccgucggcaaggaguucaaccaccucgagaagcgcaucgagaaccucaacaagaaggucgacgacggcuuccucgacaucuggaccuacaacgccgagcuccucguccuccucgagaacgagcgcacccucgacuaccacgacuccaacgucaagaaccucuacgagaagguccgcucccagcucaagaacaacgccaaggagaucggcaacggcugcuucgaguucuaccacaagugcgacaacaccugcauggaguccgucaagaacggcaccuacgacuaccccaaguacuccgaggaggccaagcucaaccgcgaggagaucgacggcgucaagcucgaguccacccgcaucuaccagauccucgccaucuacuccaccgucgccuccucccucguccucgucgucucccucggcgccaucuccuucuggaugugcuccaacggcucccuccagugccgcaucugcaucuga

SEQ ID NO: 100389 - RNA, 1701 nt, Artificial Sequence; identical to SEQ ID NO: 100388
  derived and/or modified CDS sequence (opt2) from hemagglutinin__InfluenzaA__ADD97055

SEQ ID NO: 100390 - RNA, 1701 nt, Artificial Sequence; identical to SEQ ID NO: 100388
  derived and/or modified CDS sequence (opt2) from hemagglutinin__InfluenzaA__ADD97123

SEQ ID NO: 100391 - RNA, 1701 nt, Artificial Sequence
  derived and/or modified CDS sequence (opt2) from hemagglutinin__InfluenzaA__ADD97161
augaaggccauccucgucguccuccucuacaccuucgccaccgccaacgccgacacccucugcaucggcuaccacgccaacaacuccaccgacaccgucgacaccguccucgagaagaacgucaccgucacccacuccgucaaccuccucgaggacaagcacaacggcaagcucugcaagcuccgcggcgucgccccccuccaccucggcaagugcaacaucgccggcuggauccucggcaaccccgagugcgagucccucuccaccgccuccuccugguccuacaucgucgagaccuccuccuccgacaacggcaccugcuaccccggcgacuucaucgacuacgaggagcuccgcgagcagcucuccuccgucuccuccuucgagcgcuucgagaucuuccccaagaccuccuccuggcccaaccacgacuccaacaagggcgucaccgccgccugcccccacgccggcgccaaguccuucuacaagaaccucaucuggcucgucaagaagggcaaguccuaccccaagcucuccaaguccuacaucaacgacaagggcaagaagguccucguccucuggggcauccaccaccccuccaccuccgccgaccagcagucccucuaccagaacgccgacgccuacgucuucgucggcaccucccgcuacuccaagaaguucaagcccgagaucgccauccgccccaagguccgcgaccaggagggccgcaugaacuacuacuggacccucgucgagcccggcgacaagaucaccuucgaggccaccggcaaccucgucgucccccgcuacgccuucgccauggagcgcaacgccggcuccggcaucaucaucuccgacacccccguccacgacugcaacaccaccugccagacccccaagggcgccaucaacaccucccuccccuuccagaacauccaccccaucaccaucggcaagugccccaaguacgucaaguccaccaagcuccgccucgccaccggccuccgcaacguccccuccauccagucccgcggccucuucggcgccaucgccggcuucaucgagggcggcuggaccggcauggucgacggcugguacggcuaccaccaccagaacgagcagggcuccggcuacgccgccgaccucaaguccacccagaacgccaucgacgagaucaccaacaaggucaacuccgucaucgagaagaugaacacccaguucaccgccgucggcaaggaguucaaccaccucgagaagcgcaucgagaaccucaacaagaaggucgacgacggcuuccucgacaucuggaccuacaacgccgagcuccucguccuccucgagaacgagcgcacccucgacuaccacgacuccaacgucaagaaccucuacgagaagguccgcucccagcucaagaacaacgccaaggagaucggcaacggcugcuucgaguucuaccacaagugcgacaacaccugcauggaguccgucaagaacggcaccuacgacuaccccaaguacuccgaggaggccaagcucaaccgcgaggagaucgacggcgucaagcucgaguccacccgcaucuaccagauccucgccaucuacuccaccgucgccuccucccucguccucgucgucucccucggcgccaucuccuucuggaugugcuccaacggcucccuccagugccgcaucugcaucuga

SEQ ID NO: 100392 - RNA, 1701 nt, Artificial Sequence
  derived and/or modified CDS sequence (opt2) from hemagglutinin__InfluenzaA__ADD97171
augaaggccauccucgucguccuccucuacaccuucgccaccgccaacgccgacacccucugcaucggcuaccacgccaacaacuccaccgacaccgucgacaccguccucgagaagaacgucaccgucacccacuccgucaaccuccucgaggacaagcacaacggcaagcucugcaagcuccgcggcgucgccccccuccaccucggcaagugcaacaucgccggcuggauccucggcaaccccgagugcgagucccucuccaccgccuccuccugguccuacaucgucgagaccuccuccuccgacaacggcaccugcuaccccggcgacuucaucgacuacgaggagcuccgcgagcagcucuccuccgucuccuccuucgagcgcuucgagaucuuccccaagaccuccuccuggcccaaccacgacuccaacaagggcgucaccgccgccugcccccacgccggcgccaaguccuucuacaagaaccucaucuggcucgucaagaagggcaacuccuaccccaagcucuccaaguccuacaucaacgacaagggcaaggagguccucguccucuggggcauccaccaccccuccaccuccgccgaccagcagucccucuaccagaacgccgacgccuacgucuucgucggcaccucccgcuacuccaagaaguucaagcccgagaucgccauccgccccaagguccgcgaccaggagggccgcaugaacuacuacuggacccucgucgagcccggcgacaagaucaccuucgaggccaccggcaaccucgucgucccccgcuacgccuucgccauggagcgcaacgccggcuccggcaucaucaucuccgacacccccguccacgacugcaacaccaccugccagacccccaagggcgccaucaacaccucccuccccuuccagaacauccaccccaucaccaucggcaagugccccaaguacgucaaguccaccaagcuccgccucgccaccggccuccgcaacguccccuccauccagucccgcggccucuucggcgccaucgccggcuucaucgagggcggcuggaccggcauggucgacggcugguacggcuaccaccaccagaacgagcagggcuccggcuacgccgccgaccucaaguccacccagaacgccaucgacgagaucaccaacaaggucaacuccgucaucgagaagaugaacacccaguucaccgccgucggcaaggaguucaaccaccucgagaagcgcaucgagaaccucaacaagaaggucgacgacggcuuccucgacaucuggaccuacaacgccgagcuccucguccuccucgagaacgagcgcacccucgacuaccacgacuccaacgucaagaaccucuacgagaagguccgcucccagcucaagaacaacgccaaggagaucggcaacggcugcuucgaguucuaccacaagugcgacaacaccugcauggaguccgucaagaacggcaccuacgacuaccccaaguacuccgaggaggccaagcucaaccgcgaggagaucgacggcgucaagcucgaguccacccgcaucuaccagauccucgccaucuacuccaccgucgccuccucccucguccucgucgucucccucggcgccgucuccuucuggaugugcuccaacggcucccuccagugccgcaucugcaucuga

SEQ ID NO: 100393 - RNA, 1701 nt, Artificial Sequence; identical to SEQ ID NO: 98705
  derived and/or modified CDS sequence (opt2) from hemagglutinin__InfluenzaA__ADD97181

SEQ ID NO: 100394 - RNA, 1701 nt, Artificial Sequence; identical to SEQ ID NO: 98705
  derived and/or modified CDS sequence (opt2) from hemagglutinin__InfluenzaA__ADD97201

SEQ ID NO: 100395 - RNA, 1701 nt, Artificial Sequence; identical to SEQ ID NO: 100388
  derived and/or modified CDS sequence (opt2) from hemagglutinin__InfluenzaA__ADD97211

SEQ ID NO: 100396 - RNA, 1701 nt, Artificial Sequence; identical to SEQ ID NO: 98705
  derived and/or modified CDS sequence (opt2) from hemagglutinin__InfluenzaA__ADD97231

SEQ ID NO: 100397 - RNA, 1701 nt, Artificial Sequence
  derived and/or modified CDS sequence (opt2) from hemagglutinin__InfluenzaA__ADD97241
augaaggccauccucgucguccuccucuacaccuucgccaccgccaacgccgacacccucugcaucggcuaccacgccaacaacuccaccgacaccgucgacaccguccucgagaagaacgucaccgucacccacuccgucaaccuccucgaggacaagcacaacggcaagcucugcaagcuccgcggcgucgccccccuccaccucggcaagugcaacaucgccggcuggauccucggcaaccccgagugcgagucccucuccaccgccuccuccugguccuacaucgucgagaccuccuccuccgacaacggcaccugcuaccccggcgacuucaccgacuacgaggagcuccgcgagcagcucuccuccgucuccuccuucgagcgcuucgagaucuuccccaagaccuccuccuggcccaaccacgacuccaacaagggcgucaccgccgccugcccccacgccggcgccaaguccuucuacaagaaccucaucuggcucgucaagaagggcaacuccuaccccaagcucuccaaguccuacaucaacgacaagggcaaggagguccucguccucuggggcauccaccaccccuccaccuccgccgaccagcagucccucuaccagaacgccgacgccuacgucuucgucggcaccucccgcuacuccaagaaguucaagcccgagaucgccauccgccccaagguccgcgaccaggagggccgcaugaacuacuacuggacccucgucgagcccggcgacaagaucaccuucgaggccaccggcaaccucgucgucccccgcuacgccuucgccauggagcgcaacgccggcuccggcaucaucaucuccgacacccccguccacaacugcaacaccaccugccagacccccaagggcgccaucaacaccucccuccccuuccagaacauccaccccaucaccaucggcaagugccccaaguacgucaaguccaccaagcuccgccucgccaccggccuccgcaacguccccuccauccagucccgcggccucuucggcgccaucgccggcuucaucgagggcggcuggaccggcauggucgacggcugguacggcuaccaccaccagaacgagcagggcuccggcuacgccgccgaccucaaguccacccagaacgccaucgacgagaucaccaacaaggucaacuccgucaucgagaagaugaacacccaguucaccgccgucggcaaggaguucaaccaccucgagaagcgcaucgagaaccucaacaagaaggucgacgacggcuuccucgacaucuggaccuacaacgccgagcuccucguccuccucgagaacgagcgcacccucgacuaccacgacuccaacgucaagaaccucuacgagaagguccgcucccagcucaagaacaacgccaaggagaucggcaacggcugcuucgaguucuaccacaagugcgacaacaccugcauggaguccgucaagaacggcaccuacgacuaccccaaguacuccgaggaggccaagcucaaccgcgaggagaucgacggcgucaagcucgaguccacccgcaucuaccagauccucgccaucuacuccaccgucgccuccucccucguccucgucgucucccucggcgccaucuccuucuggaugugcuccaacggcucccuccagugccgcaucugcaucuga

SEQ ID NO: 100398 - RNA, 1701 nt, Artificial Sequence; identical to SEQ ID NO: 100388
  derived and/or modified CDS sequence (opt2) from hemagglutinin__InfluenzaA__ADD97251

SEQ ID NO: 100399 - RNA, 1701 nt, Artificial Sequence; identical to SEQ ID NO: 98705
  derived and/or modified CDS sequence (opt2) from hemagglutinin__InfluenzaA__ADD97261

SEQ ID NO: 100400 - RNA, 1701 nt, Artificial Sequence
  derived and/or modified CDS sequence (opt2) from hemagglutinin__InfluenzaA__ADD97271
augaaggccauccucgucguccuccucuacaccuucgccaccgccaacgccgacacccucugcaucggcuaccacgccaacaacuccaccgacaccgucgacaccguccucgagaagaacgucaccgucacccacuccgucaaccuccucgaggacaagcacaacggcaagcucugcaagcuccgcggcgucaccccccuccaccucggcaagugcaacaucgccggcuggauccucggcaaccccgagugcgagucccucuccaccgccuccuccugguccuacaucgucgagaccuccuccuccgacaacggcaccugcuaccccggcgacuucaucgacuacgaggagcuccgcgagcagcucuccuccgucuccuccuucgagcgcuucgagaucuuccccaagaccuccuccuggcccaaccacgacuccaacaagggcgucaccgccgccugcccccacgccggcgccaaguccuucuacaagaaccucaucuggcucgucaagaagggcaacuccuaccccaagcucuccaaguccuacaucaacgacaagggcaaggagguccucguccucuggggcauccaccaccccuccaccuccgccgaccagcagucccucuaccagaacgccgacgccuacgucuucgucggcaccucccgcuacuccaagaaguucaagcccgagaucgccauccgccccaagguccgcgaccaggagggccgcaugaacuacuacuggacccucgucgagcccggcgacaagaucaccuucgaggccaccggcaaccucgucgucccccgcuacgccuucgccauggagcgcaacgccggcuccggcaucaucaucuccgacacccccguccacgacugcaacaccaccugccagacccccaagggcgccaucaacaccucccuccccuuccagaacauccaccccaucaccaucggcaagugccccaaguacgucaaguccaccaagcuccgccucgccaccggccuccgcaacauccccuccauccagucccgcggccucuucggcgccaucgccggcuucaucgagggcggcuggaccggcauggucgacggcugguacggcuaccaccaccagaacgagcagggcuccggcuacgccgccgaccucaaguccacccagaacgccaucgacgagaucaccaacaaggucaacuccgucaucgagaagaugaacacccaguucaccgccgucggcaaggaguucaaccaccucgagaagcgcaucgagaaccucaacaagaaggucgacgacggcuuccucgacaucuggaccuacaacgccgagcuccucguccuccucgagaacgagcgcacccucgacuaccacgacuccaacgucaagaaccucuacgagaagguccgcucccagcucaagaacaacgccaaggagaucggcaacggcugcuucgaguucuaccacaagugcgacaacaccugcauggaguccgucaagaacggcaccuacgacuaccccaaguacuccgaggaggccaagcucaaccgcgaggagaucgacggcgucaagcucgaguccacccgcaucuaccagauccucgccaucuacuccaccgucgccuccucccucguccucgucgucucccucggcgccaucuccuucuggaugugcuccaacggcucccuccagugccgcaucugcaucuga

SEQ ID NO: 100401 - RNA, 1701 nt, Artificial Sequence; identical to SEQ ID NO: 100392
  derived and/or modified CDS sequence (opt2) from hemagglutinin__InfluenzaA__ADD97281

SEQ ID NO: 100402 - RNA, 1701 nt, Artificial Sequence; identical to SEQ ID NO: 98705
  derived and/or modified CDS sequence (opt2) from hemagglutinin__InfluenzaA__ADD97291

SEQ ID NO: 100403 - RNA, 1701 nt, Artificial Sequence
  derived and/or modified CDS sequence (opt2) from hemagglutinin__InfluenzaA__ADD97311
augaaggccauccucgucguccuccucuacaccuucgccaccgccaacgccgacacccucugcaucggcuaccacgccaacaacuccaccgacaccgucgacaccauccucgagaagaacgucaccgucacccacuccgucaaccuccucgaggacaagcacaacggcaagcucugcaagcuccgcggcgucgccccccuccaccucggcaagugcaacaucgccggcuggauccucggcaaccccgagugcgagucccucuccaccgccuccuccugguccuacaucgucgagaccuccuccuccgacaacggcaccugcuaccccggcgacuucaucgacuacgaggagcuccgcgagcagcucuccuccgucuccuccuucgagcgcuucgagaucuuccccaagaccuccuccuggcccaaccacgacuccaacaagggcgucaccgccgccugcccccacgccggcgccaaguccuucuacaagaaccucaucuggcucgucaagaagggcaacuccuaccccaagcucuccaaguccuacaucaacgacaagggcaaggagauccucguccucuggggcauccaccaccccuccaccaucgccgaccagcagucccucuaccagaacgccgacgccuacgucuucgucggcaccucccgcuacuccaagaaguucaagcccgagaucgccauccgccccaagguccgcgaccaggagggccgcaugaaguacuacuggacccucgucgagcccggcgacaagaucaccuucgaggccaccggcaaccucgucgucccccgcuacgccuucgccauggagcgcaacgccggcuccggcaucaucaucuccgacacccccguccacaacugcaacaccaccugccagaccuccaagggcgccaucaacaccucccuccccuuccagaacauccaccccaucaccaucggcaagugccccaaguacgucaaguccaccaagcuccgccucgccaccggccuccgcaacguccccuccauccagucccgcggccucuucggcgccaucgccggcuucaucgagggcggcuggaccggcauggucgacggcugguacggcuaccaccaccagaacgagcagggcuccggcuacgccgccgaccucaaguccacccagaacgccaucgacgagaucaccaacaaggucaacuccgucaucgagaagaugaacacccaguucaccgccgucggcaaggaguucaaccaccucgagaagcgcaucgagaaccucaacaagaaggucgacgacggcuuccucgacaucuggaccuacaacgccgagcuccucguccuccucgagaacgagcgcacccucgacuaccacgacuccaacgucaagaaccucuacgagaagguccgcucccagcucaagaacaacgccaaggagaucggcaacggcugcuucgaguucuaccacaagugcgacaacaccugcauggaguccgucaagaacggcaccuacgacuaccccaaguacuccgaggaggccaagcucaaccgcgaggagaucgacggcgucaagcucgaguccacccgcaucuaccagauccucgccaucuacuccaccgucgccuccucccucguccucgucgucucccucggcgccaucuccuucuggaugugcuccaacggcucccuccagugccgcaucugcaucuga

SEQ ID NO: 100404 - RNA, 1701 nt, Artificial Sequence; identical to SEQ ID NO: 100388
  derived and/or modified CDS sequence (opt2) from hemagglutinin__InfluenzaA__ADD97321

SEQ ID NO: 100405 - RNA, 1701 nt, Artificial Sequence; identical to SEQ ID NO: 99869
  derived and/or modified CDS sequence (opt2) from hemagglutinin__InfluenzaA__ADD97331

SEQ ID NO: 100406 - RNA, 1701 nt, Artificial Sequence
  derived and/or modified CDS sequence (opt2) from hemagglutinin__InfluenzaA__ADD97341
augaaggccauccucgucguccuccucuacaccuucgccaccgucaacgccgacacccucugcaucggcuaccacgccaacaacuccaccgacaccgucgacaccguccucgagaagaacgucaccgucacccacuccgucaaccuccucgaggacaagcacaacggcaagcucugcaagcuccgcggcgucgccccccuccaccucggcaagugcaacaucgccggcuggauccucggcaaccccgagugcgagucccucuccaccgccuccuccugguccuacaucgucgagaccuccuccuccgacaacggcaccugcuaccccggcgacuucaucgacuacgaggagcuccgcgagcagcucuccuccgucuccuccuucgagcgcuucgagaucuuccccaagaccuccuccuggcccaaccacgacuccaacaagggcgucaccgccgccugcccccacgccggcgccaaguccuucuacaagaaccucaucuggcucgucaagaagggcaacuccuaccccaagcucuccaaguccuacaucaacgacaagggcaaggagguccucguccucuggggcauccaccaccccuccaccuccaccgaccagcagucccucuaccagaacgccgacgccuacgucuucgucggcaccucccgcuacuccaagaaguucaagcccgagaucgccauccgccccaagguccgcgaccaggagggccgcaugaacuacuacuggacccucgucgagcccggcgacaagaucaccuucgaggccaccggcaaccucgucgucccccgcuacgccuucgccauggagcgcaacgccggcuccggcaucaucaucuccgacacccccguccacgacugcaacaccaccugccagacccccaagggcgccaucaacaccucccuccccuuccagaacauccaccccaucaccaucggcaagugccccaaguacgucaaguccaccaagcuccgccucgccaccggccuccgcaacauccccuccauccagucccgcggccucuucggcgccaucgccggcuucaucgagggcggcuggaccggcauggucgacggcugguacggcuaccaccaccagaacgagcagggcuccggcuacgccgccgaccucaaguccacccagaacgccaucgacgagaucaccaacaaggucaacuccgucaucgagaagaugaacacccaguucaccgccgucggcaaggaguucaaccaccucgagaagcgcaucgagaaccucaacaagaaggucgacgacggcuuccucgacaucuggaccuacaacgccgagcuccucguccuccucgagaacgagcgcacccucgacuaccacgacuccaacgucaagaaccucuacgagaagguccgcucccagcucaagaacaacgccaaggagaucggcaacggcugcuucgaguucuaccacaagugcgacaacaccugcauggaguccgucaagaacggcaccuacgacuaccccaaguacuccgaggaggccaagcucaaccgcgaggagaucgacggcgucaagcucgaguccacccgcaucuaccagauccucgccaucuacuccaccgucgccuccucccucguccucgucgucucccucggcgccaucuccuucuggaugugcuccaacggcucccuccagugccgcaucugcaucuga

SEQ ID NO: 100407 - RNA, 1701 nt, Artificial Sequence; identical to SEQ ID NO: 99869
  derived and/or modified CDS sequence (opt2) from hemagglutinin__InfluenzaA__ADD97351

SEQ ID NO: 100408 - RNA, 1701 nt, Artificial Sequence; identical to SEQ ID NO: 99869
  derived and/or modified CDS sequence (opt2) from hemagglutinin__InfluenzaA__ADD97361

SEQ ID NO: 100409 - RNA, 1701 nt, Artificial Sequence
  derived and/or modified CDS sequence (opt2) from hemagglutinin__InfluenzaA__ADD97371
augaaggccauccucgucguccuccucuacaccuucgccaccgccaacgccgacacccucugcaucggcuaccacgccaacaacuccaccgacaccgucgacaccguccucgagaagaacgucaccgucacccacuccgucaaccuccucgaggacaagcacaacggcaagcucugcaagcuccgcggcgucgccccccuccaccucggcaagugcaacaucgccggcuggauccucggcaaccccgagugcgagucccucuccaccgccuccuccugguccuacaucgucgagaccuccuccuccgacaacggcaccugcuaccccggcgacuucaucgacuacgaggagcuccgcgagcagcucuccuccgucuccuccuucgagcgcuucgagaucuuccccaagaccuccuccuggcccaaccacgacuccaacaagggcgucaccgccgccugcccccacgccggcgccaaguccuucuacaagaaccucaucuggcucgucaagaagggcaacuccuaccccaagcucuccaaguccuacaucaacgacaagggcaaggagguccucguccucuggggcauccaccaccccuccaccuccgccgaccagcagucccucuaccagaacgccgacgccuacgucuucgucggcaccucccgcuacuccaagaaguucaagcccgagaucgccauccgccccaagguccgcgagcaggagggccgcaugaacuacuacuggacccucgucgagcccggcgacaagaucaccuucgaggccaccggcaaccucgucgucccccgcuacgccuucgccauggagcgcaacgccggcuccggcaucaucaucuccgacacccccguccacgacugcaacaccaccugccagacccccaagggcgccaucaacaccucccuccccuuccagaacauccaccccaucaccaucggcaagugccccaaguacgucaaguccaccaagcuccgccucgccaccggccuccgcaacguccccuccauccagucccgcggccucuucggcgccaucgccggcuucaucgagggcggcuggaccggcauggucgacggcugguacggcuaccaccaccagaacgagcagggcuccggcuacgccgccgaccucaaguccacccagaacgccaucgacgagaucaccaacaaggucaacuccgucaucgagaagaugaacacccaguucaccgccgucggcaaggaguucaaccaccucgagaagcgcaucgagaaccucaacaagaaggucgacgacggcuuccucgacaucuggaccuacaacgccgagcuccucguccuccucgagaacgagcgcacccucgacuaccacgacuccaacgucaagaaccucuacgagaagguccgcucccagcucaagaacaacgccaaggagaucggcaacggcugcuucgaguucuaccacaagugcgacaacaccugcauggaguccgucaagaacggcaccuacgacuaccccaaguacuccgaggaggccaagcucaaccgcgaggagaucgacggcgucaagcucgaguccacccgcaucuaccagauccucgccaucuacuccaccgucgccuccucccucguccucgucgucucccucggcgccaucuccuucuggaugugcuccaacggcucccuccagugccgcgucugcaucuga

SEQ ID NO: 100410 - RNA, 1701 nt, Artificial Sequence; identical to SEQ ID NO: 99869
  derived and/or modified CDS sequence (opt2) from hemagglutinin__InfluenzaA__ADD97381

SEQ ID NO: 100411 - RNA, 1701 nt, Artificial Sequence; identical to SEQ ID NO: 98705
  derived and/or modified CDS sequence (opt2) from hemagglutinin__InfluenzaA__ADD97391

SEQ ID NO: 100412 - RNA, 1701 nt, Artificial Sequence; identical to SEQ ID NO: 99869
  derived and/or modified CDS sequence (opt2) from hemagglutinin__InfluenzaA__ADD97411

SEQ ID NO: 100413 - RNA, 1701 nt, Artificial Sequence; identical to SEQ ID NO: 99869
  derived and/or modified CDS sequence (opt2) from hemagglutinin__InfluenzaA__ADD97421

SEQ ID NO: 100414 - RNA, 1701 nt, Artificial Sequence; identical to SEQ ID NO: 98705
  derived and/or modified CDS sequence (opt2) from hemagglutinin__InfluenzaA__ADD97431

SEQ ID NO: 100415 - RNA, 1701 nt, Artificial Sequence
  derived and/or modified CDS sequence (opt2) from hemagglutinin__InfluenzaA__ADD97441
augaaggccauccucgucguccuccucuacaccuucgccaccgccaacgccgacacccucugcaucggcuaccacgccaacaacuccaccgacaccgucgacaccauccucgagaagaacgucaccgucacccacuccgucaaccuccucgaggacaagcacaacggcaagcucugcaagcuccgcggcgucgccccccuccaccucggcaagugcaacaucgccggcuggauccucggcaaccccgagugcgagucccucuccaccgccuccuccugguccuacaucgucgagaccuccuccuccgacaacggcaccugcuaccccggcgacuucaucgacuacgaggagcuccgcgagcagcucuccuccgucuccuccuucgagcgcuucgagaucuuccccaagaccuccuccuggcccaaccacgacuccaacaagggcgucaccgccgccugcccccacgccggcgccaaguccuucuacaagaaccucaucuggcucgucaagaagggcaacuccuaccccaagcucuccaaguccuacaucaacgacaagggcaaggagauccucguccucuggggcauccaccaccccuccaccuccgccgaccagcagucccucuaccagaacgccgacgccuacgucuucgucggcaccucccgcuacuccaagaaguucaagcccgagaucgccauccgccccaagguccgcgaccaggagggccgcaugaacuacuacuggacccucgucgagcccggcgacaagaucaccuucgaggccaccggcaaccucgucgucccccgcuacgccuucgccauggagcgcaacgccggcuccggcaucaucaucuccgacacccccguccacgacugcaacaccaccugccagacccccaagggcgccaucaacaccucccuccccuuccagaacauccaccccaucaccaucggcaagugccccaaguacgucaaguccaccaagcuccgccucgccaccggccuccgcaacguccccuccauccagucccgcggccucuucggcgccaucgccggcuucaucgagggcggcuggaccggcauggucgacggcugguacggcuaccaccaccagaacgagcagggcuccggcuacgccgccgaccucaaguccacccagaacgccaucgacgagaucaccaacaaggucaacuccgucaucgagaagaugaacacccaguucaccgccgucggcaaggaguucaaccaccucgagaagcgcaucgagaaccucaacaagaaggucgacgacggcuuccucgacaucuggaccuacaacgccgagcuccucguccuccucgagaacgagcgcacccucgacuaccacgacuccaacgucaagaaccucuacgagaagguccgcucccagcucaagaacaacgccaaggagaucggcaacggcugcuucgaguucuaccacaagugcgacaacaccugcauggaguccgucaagaacggcaccuacgacuaccccaaguacuccgaggaggccaagcucaaccgcgaggagaucgacggcgucaagcucgaguccacccgcaucuaccagauccucgccaucuacuccaccgucgccuccucccucguccucgucgucucccucggcgccaucuccuucuggaugugcuccaacggcucccuccagugccgcaucugcaucuga

SEQ ID NO: 100416 - RNA, 1701 nt, Artificial Sequence; identical to SEQ ID NO: 100409
  derived and/or modified CDS sequence (opt2) from hemagglutinin__InfluenzaA__ADD97451

SEQ ID NO: 100417 - RNA, 1701 nt, Artificial Sequence; identical to SEQ ID NO: 100409
  derived and/or modified CDS sequence (opt2) from hemagglutinin__InfluenzaA__ADD97461

SEQ ID NO: 100418 - RNA, 1701 nt, Artificial Sequence; identical to SEQ ID NO: 100257
  derived and/or modified CDS sequence (opt2) from hemagglutinin__InfluenzaA__ADD97471

SEQ ID NO: 100419 - RNA, 1701 nt, Artificial Sequence; identical to SEQ ID NO: 100257
  derived and/or modified CDS sequence (opt2) from hemagglutinin__InfluenzaA__ADD97481

SEQ ID NO: 100420 - RNA, 1701 nt, Artificial Sequence
  derived and/or modified CDS sequence (opt2) from hemagglutinin__InfluenzaA__ADD97491
augaaggccauccucgucguccuccucuacaccuucgccaccgccaacgccgacacccucugcaucggcuaccacgccaacaacuccaccgacaccgucgacaccguccucgagaagaacgucaccgucacccacuccgucaaccuccucgaggacaagcacaacggcaagcucugcaagcuccgcggcgaggccccccuccaccucggcaagugcaacaucgccggcuggauccucggcaaccccgagugcgagucccucuccaccgccuccuccugguccuacaucgucgagaccuccuccuccgacaacggcaccugcuaccccggcgacuucaucaacuacgaggagcuccgcgagcagcucuccuccgucuccuccuucgagcgcuucgagaucuuccccaagaccuccuccuggcccaaccacgacuccaacaagggcgucaccgccgccugcccccacgccggcgccaaguccuucuacaagaaccucaucuggcucgucaagaagggcaacuccuaccccaagcucuccaaguccuacaucaacgacaagggcaaggagguccucguccucuggggcauccaccaccccuccaccuccgccgaccagcagucccucuaccagaacgccgacgccuacgucuucgucggcaccucccgcuacuccaagaaguucaagcccgagaucgccauccgccccaagguccgcgaccaggagggccgcaugaacuacuacuggacccucgucgagcccggcgacaagaucaccuucgaggccaccggcaaccucgucgucccccgcuacgccuucgccauggagcgcaacgccggcuccggcaucaucaucuccgacacccccguccacgacugcaacaccaccugccagacccccaagggcgccaucaacaccucccuccccuuccagaacauccaccccaucaccaucggcaagugccccaaguacgucaaguccaccaagcuccgccucgccaccggccuccgcaacguccccuccauccagucccgcggccucuucggcgccaucgccggcuucaucgagggcggcuggaccggcauggucgacggcugguacggcuaccaccaccagaacgagcagggcuccggcuacgccgccgaccucaaguccacccagaacgccaucgacaagaucaccaacaaggucaacuccgucaucgagaagaugaacacccaguucaccgccgucggcaaggaguucaaccaccucgagaagcgcaucgagaaccucaacaagaaggucgacgacggcuuccucgacaucuggaccuacaacgccgagcuccucguccuccucgagaacgagcgcacccucgacuaccacgacuccaacgucaagaaccucuacgagaagguccgcucccagcucaagaacaacgccaaggagaucggcaacggcugcuucgaguucuaccacaagugcgacaacaccugcauggaguccgucaagaacggcaccuacgacuaccccaaguacuccgaggaggccaagcucaaccgcgaggagaucgacggcgucaagcucgaguccacccgcaucuaccagauccucgccaucuacuccaccgucgccuccucccucguccucgucgucucccucggcgccaucuccuucuggaugugcuccaacggcucccuccagugccgcaucugcaucuga

SEQ ID NO: 100421 - RNA, 1701 nt, Artificial Sequence; identical to SEQ ID NO: 100420
  derived and/or modified CDS sequence (opt2) from hemagglutinin__InfluenzaA__ADD97501

SEQ ID NO: 100422 - RNA, 1701 nt, Artificial Sequence; identical to SEQ ID NO: 99058
  derived and/or modified CDS sequence (opt2) from hemagglutinin__InfluenzaA__ADD97511

SEQ ID NO: 100423 - RNA, 1701 nt, Artificial Sequence
  derived and/or modified CDS sequence (opt2) from hemagglutinin__InfluenzaA__ADD97531
augaaggccauccucgucguccuccucuacaccuucgccaccgccaacgccgacacccucugcaucggcuaccacgccaacaacuccaccgacaccgucgacaccauccucgagaagaacgucaccgucacccacuccgucaaccuccucgaggacaagcacaacggcaagcucugcaagcuccgcggcgucgccccccuccaccucggcaagugcaacaucgccggcuggauccucggcaaccccgagugcgagucccucuccaccgccuccuccugguccuacaucgucgagaccuccuccuccgacaacggcaccugcuaccccggcgacuucaucgacuacgaggagcuccgcgagcagcucuccuccgucuccuccuucgagcgcuucgagaucuuccccaagaccuccuccuggcccaaccacgacuccaacaagggcgucaccgccgccugcccccacgccggcgccaaguccuucuacaagaaccucaucuggcucgucaagaagggcaacuccuaccccaagcucuccaaguccuacaucaacgacaagggcaaggagauccucguccucuggggcauccaccaccccuccaccaucgccgaccagcagucccucuaccagaacgccgacgccuacgucuucgucggcaccucccgcuacuccaagaaguucaagcccgagaucgccauccgccccaagguccgcgaccaggagggccgcaugaaguacuacuggacccucgucgagcccggcgacaagaucaccuucgaggccaccggcaaccucgucgucccccgcuacgccuucgccauggagcgcaacgccggcuccggcaucaucaucuccgacacccccguccacaacugcaacaccaccugccagacccccaagggcgccaucaacaccucccuccccuuccagaacauccaccccaucaccaucggcaagugccccaaguacgucaaguccaccaagcuccgccucgccaccggccuccgcaacguccccuccauccagucccgcggccucuucggcgccaucgccggcuucaucgagggcggcuggaccggcauggucgacggcugguacggcuaccaccaccagaacgagcagggcuccggcuacgccgccgaccucaaguccacccagaacgccaucgacgagaucaccaacaaggucaacuccgucaucgagaagaugaacacccaguucaccgccgucggcaaggaguucaaccaccucgagaagcgcaucgagaaccucaacaagaaggucgacgacggcuuccucgacaucuggaccuacaacgccgagcuccucguccuccucgagaacgagcgcacccucgacuaccacgacuccaacgucaagaaccucuacgagaagguccgcucccagcucaagaacaacgccaaggagaucggcaacggcugcuucgaguucuaccacaagugcgacaacaccugcauggaguccgucaagaacggcaccuacgacuaccccaaguacuccgaggaggccaagcucaaccgcgaggagaucgacggcgucaagcucgaguccacccgcaucuaccagauccucgccaucuacuccaccgucgccuccucccucguccucgucgucucccucggcgccaucuccuucuggaugugcuccaacggcucccuccagugccgcaucugcaucuga

SEQ ID NO: 100424 - RNA, 1701 nt, Artificial Sequence
  derived and/or modified CDS sequence (opt2) from hemagglutinin__InfluenzaA__ADD97541
augaaggccauccucgucguccuccucuacaccuucgccaccgccaacgccgacacccucugcaucggcuaccacgccaacaacuccaccgacaccgucgacaccguccucgagaagaacgucaccgucacccacuccgucaaccuccucgaggacaagcacaacggcaagcucugcaagcuccgcggcgucgccccccuccaccucggcaagugcaacaucgccggcuggauccucggcaaccccgagugcgagucccucuccaccgccuccuccugguccuacaucgucgagaccuccuccuccgacaacggcaccugcuaccccggcgacuucaucgacuacgaggagcuccgcgagcagcucuccuccgucuccuccuucgagcgcuucgagaucuuccccaagaccuccuccuggcccaaccacgacuccaacaagggcgucaccgccgccugcccccacaccggcgccaaguccuucuacaagaaccucaucuggcucgucaagaagggcaacuccuaccccaagcucuccaaguccuacaucaacgacaagggcaaggagguccucguccucuggggcauccaccaccccuccaccuccaccgaccagcagucccucuaccagaacgccgacgcccacgucuucgucggcaccucccgcuacuccaagaaguucaagcccgagaucgccauccgccccaagguccgcgaccaggagggccgcaugaacuacuacuggacccucgucgagcccggcgacaagaucaccuucgaggccaccggcaaccucgucgucccccgcuacgccuucgccauggagcgcaacgccggcuccggcaucaucaucuccgacacccccguccacgacugcaacaccaccugccagacccccaagggcgccaucaacaccucccuccccuuccagaacauccaccccaucaccaucggcaagugccccaaguacgucaaguccaccaagcuccgccucgccaccggccuccgcaacauccccuccauccagucccgcggccucuucggcgccaucgccggcuucaucgagggcggcuggaccggcauggucgacggcugguacggcuaccaccaccagaacgagcagggcuccggcuacgccgccgaccucaaguccacccagaacgccaucgacgagaucaccaacaaggucaacuccgucaucgagaagaugaacacccaguucaccgccgucggcaaggaguucaaccaccucgagaagcgcaucgagaaccucaacaagaaggucgacgacggcuuccucgacaucuggaccuacaacgccgagcuccucguccuccucgagaacgagcgcacccucgacuaccacgacuccaacgucaagaaccucuacgagaagguccgcucccagcucaagaacaacgccaaggagaucggcaacggcugcuucgaguucuaccacaagugcgacaacaccugcauggaguccgucaagaacggcaccuacgacuaccccaaguacuccgaggaggccaagcucaaccgcgaggagaucgacggcgucaagcucgaguccacccgcaucuaccagauccucgccaucuacuccaccgucgccuccucccucguccucgucgucucccucggcgccaucuccuucuggaugugcuccaacggcucccuccagugccgcaucugcaucuga

SEQ ID NO: 100425 - RNA, 1701 nt, Artificial Sequence; identical to SEQ ID NO: 100257
  derived and/or modified CDS sequence (opt2) from hemagglutinin__InfluenzaA__ADD97551

SEQ ID NO: 100426 - RNA, 1701 nt, Artificial Sequence; identical to SEQ ID NO: 99869
  derived and/or modified CDS sequence (opt2) from hemagglutinin__InfluenzaA__ADD97561

SEQ ID NO: 100427 - RNA, 1701 nt, Artificial Sequence
  derived and/or modified CDS sequence (opt2) from hemagglutinin__InfluenzaA__ADD97571
augaaggccauccucgucguccuccucuacaccuucgccaccgccaacgccgacacccucugcaucggcuaccacgccaacaacuccaccgacaccgucgacaccguccucgagaagaacgucaccgucacccacuccgucaaccuccucgaggacaagcacaacggcaagcucugcaagcuccgcggcgucgccccccuccaccucggcaagugcaacaucgccggcuggauccucggcaaccccgagugcgagucccucuccaccgccuccuccugguccuacaucgucgagaccuccuccuccgacaacggcaccugcuaccccggcgacuucaucaacuacgaggagcuccgcgagcagcucuccuccgucucccucuucgagcgcuucgagaucuuccccaagaccuccuccuggcccaaccacgacuccaacaagggcgucaccgccgccugcccccacgccggcgccaaguccuucuacaagaaccucaucuggcucgucaagaagggcaacuccuaccccaagcucuccaaguccuacaucaacgacaagggcaaggagguccucguccucuggggcauccaccaccccuccaccuccgccgaccagcagucccucuaccagaacgccgacgccuacgucuucgucggcaccucccgcuacuccaagaaguucaagcccgagaucgccauccgccccaagguccgcgaccaggagggccgcaugaacuacuacuggacccucgucgagcccggcgacaagaucaccuucgaggccaccggcaaccucgucgucccccgcuacgccuucgccauggagcgcaacgccggcuccggcaucaucaucuccgacacccccguccacgacugcaacaccaccugccagacccccaagggcgccaucaacaccucccuccccuuccagaacauccaccccaucaccaucggcaagugccccaaguacgucaaguccaccaagcuccgccucgccaccggccuccgcaacguccccuccauccagucccgcggccucuucggcgccaucgccggcuucaucgagggcggcuggaccggcauggucgacggcugguacggcuaccaccaccagaacgagcagggcuccggcuacgccgccgaccucaaguccacccagaacgccaucgacaagaucaccaacaaggucaacuccgucaucgagaagaugaacacccaguucaccgccgucggcaaggaguucaaccaccucgagaagcgcaucgagaaccucaacaagaaggucgacgacggcuuccucgacaucuggaccuacaacgccgagcuccucguccuccucgagaacgagcgcacccucgacuaccacgacuccaacgucaagaaccucuacgagaagguccgcucccagcucaagaacaacgccaaggagaucggcaacggcugcuucgaguucuaccacaagugcgacaacaccugcauggaguccgucaagaacggcaccuacgacuaccccaaguacuccgaggaggccaagcucaaccgcgaggagaucgacggcgucaagcucgaguccacccgcaucuaccagauccucgccaucuacuccaccgucgccuccucccucguccucgucgucucccucggcgccaucuccuucuggaugugcuccaacggcucccuccagugccgcaucugcaucuga

SEQ ID NO: 100428 - RNA, 1701 nt, Artificial Sequence; identical to SEQ ID NO: 98705
  derived and/or modified CDS sequence (opt2) from hemagglutinin__InfluenzaA__ADD97581

SEQ ID NO: 100429 - RNA, 1701 nt, Artificial Sequence; identical to SEQ ID NO: 98705
  derived and/or modified CDS sequence (opt2) from hemagglutinin__InfluenzaA__ADD97591

SEQ ID NO: 100430 - RNA, 1701 nt, Artificial Sequence; identical to SEQ ID NO: 98705
  derived and/or modified CDS sequence (opt2) from hemagglutinin__InfluenzaA__ADD97688

SEQ ID NO: 100431 - RNA, 1701 nt, Artificial Sequence; identical to SEQ ID NO: 100257
  derived and/or modified CDS sequence (opt2) from hemagglutinin__InfluenzaA__ADD97698

SEQ ID NO: 100432 - RNA, 1701 nt, Artificial Sequence; identical to SEQ ID NO: 100257
  derived and/or modified CDS sequence (opt2) from hemagglutinin__InfluenzaA__ADD97888

SEQ ID NO: 100433 - RNA, 1701 nt, Artificial Sequence
  derived and/or modified CDS sequence (opt2) from hemagglutinin__InfluenzaA__ADD97898
augaaggccauccucgucguccuccucuacaccuucgccaccgccaacgccgacacccucugcaucggcuaccacgccaacaacuccaccgacaccgucgacaccguccucgagaagaacgucaccgucacccacuccgucaaccuccucgaggacaagcacaacggcaagcucugcaagcuccgcggcgucgccccccuccaccucggcaagugcaacaucgccggcuggauccucggcaaccccgagugcgagucccucuccaccgccuccuccugguccuacaucgucgagaccuccuccuccgacaacggcaccugcuaccccggcgacuucaucgacuacgaggagcuccgcgagcagcucuccuccgucuccuccuucgagcgcuucgagaucuuccccaagaccuccuccuggcccaaccacgacuccaacaagggcgucaccgccgccugcccccacgccggcgccaaguccuucuacaagaaccucaucuggcucgucaagaagggcaacuccuaccccaagcucuccaaguccuacaucaacgacaagggcaaggagguccucguccucuggggcauccaccaccccuccaccuccaccgaccagcagucccucuaccagaacgccgacgccuacgucuucgucggcaccucccgcuacuccaagaaguucaagcccgagaucgccauccgccccaagguccgcgaccaggagggccgcaugaacuacuacuggacccucgucgagcccggcgacaagaucaccuucgaggccaccggcaaccucgucgucccccgcuacgccuucgccauggagcgcaacgccggcuccggcaucaucaucuccgacacccccguccacgacugcaacaccaccugccagacccccaagggcgccaucaacaccucccuccccuuccagaacauccaccccaucaccaucggcaagugccccaaguacgucaaguccaccaagcuccgccucgccaccggccuccgcaacauccccuccauccagucccgcggccucuucggcgccaucgccggcuucaucgagggcggcuggaccggcauggucgacggcugguacggcuaccaccaccagaacgagcagggcuccggcuacgccgccgaccucaaguccacccagaacgccaucgacgagaucaccaacaaggucaacuccgucaucgagaagaugaacacccaguucaccgccgucggcaaggaguucaaccaccucgagaagcgcaucgagaaccucaacaagaaggucgacgacggcuuccucgacaucuggaccuacaacgccgagcuccucguccuccucgagaacgagcgcacccucgacuaccacgacuccaacgucaagaaccucuacgagaagguccgcucccagcucaagaacaacgccaaggagaucggcaacggcugcuucgaguucuaccacaagugcgacaacaccugcauggaguccgucaagaacggcaccuacgacuaccccaaguacuccgaggaggccaagcucaaccgcgaggagaucgacggcgucaagcucgaguccacccgcaucuaccagauccucgccaucuacuccaccgucgccuccucccucguccucgucgucucccucggcgccaucuccuucuggaugugcuccaacggcucccuccagugccgcaucugcaucuga

SEQ ID NO: 100434 - RNA, 1701 nt, Artificial Sequence; identical to SEQ ID NO: 99058
  derived and/or modified CDS sequence (opt2) from hemagglutinin__InfluenzaA__ADD97908

SEQ ID NO: 100435 - RNA, 1701 nt, Artificial Sequence; identical to SEQ ID NO: 99869
  derived and/or modified CDS sequence (opt2) from hemagglutinin__InfluenzaA__ADD97918

SEQ ID NO: 100436 - RNA, 1701 nt, Artificial Sequence
  derived and/or modified CDS sequence (opt2) from hemagglutinin__InfluenzaA__ADD97928
augaaggccauccucgucguccuccucuacaccuucgccaccgccaacgccgacacccucugcaucggcuaccacgccaacaacuccaccgacaccgucgacaccguccucgagaagaacgucaccgucacccacuccgucaaccuccucgaggacaagcacaacggcaagcucugcaagcuccgcggcgucgccccccuccaccucggcaagugcaacaucgccggcuggauccucggcaaccccgagugcgagucccucuccaccgccuccuccugguccuacaucgucgagaccuccuccuccggcaacggcaccugcuaccccggcgacuucaucgacuacgaggagcuccgcgagcagcucuccuccgucuccuccuucgagcgcuucgagaucuuccccaagaccuccuccuggcccaaccacgacuccaacaagggcgucaccgccgccugcccccacgccggcgccaaguccuucuacaagaaccucaucuggcucgucaagaagggcaacuccuaccccaagcucuccaaguccuacaucaacgacaagggcaaggagguccucguccucuggggcauccaccaccccuccaccuccgccgaccagcagucccucuaccagaacgccgacgccuacgucuucgucggcaccucccgcuacuccaagaaguucaagcccgagaucgccauccgccccaagguccgcgaccaggagggccgcaugaacuacuacuggacccucgucgagcccggcgacaagaucaccuucgaggccaccggcaaccucgucgucccccgcuacgccuucgccauggagcgcaacgccggcuccggcaucaucaucuccgacacccccguccacgacugcaacaccaccugccagacccccaagggcgccaucaacaccucccuccccuuccagaacauccaccccaucaccaucggcaagugccccaaguacgucaaguccaccaagcuccgccucgccaccggccuccgcaacguccccuccauccagucccgcggccucuucggcgccaucgccggcuucaucgagggcggcuggaccggcauggucgacggcugguacggcuaccaccaccagaacgagcagggcuccggcuacgccgccgaccucaaguccacccagaacgccaucgacggcaucaccaacaaggucaacuccgucaucgagaagaugaacacccaguucaccgccgucggcaaggaguucaaccaccucgagaagcgcaucgagaaccucaacaagaaggucgacgacggcuuccucgacaucuggaccuacaacgccgagcuccucguccuccucgagaacgagcgcacccucgacuaccacgacuccaacgucaagaaccucuacgagaagguccgcucccagcucaagaacaacgccaaggagaucggcaacggcugcuucgaguuccaccacaagugcgacaacaccugcauggaguccgucaagaacggcaccuacgacuaccccaaguacuccgaggaggccaagcucaaccgcgaggagaucgacggcgucaagcucgaguccacccgcaucuaccagauccucgccaucuacuccaccgucgccuccucccucguccucgucgucucccucggcgccaucuccuucuggaugugcuccaacggcucccuccagugccgcaucugcaucuga

SEQ ID NO: 100437 - RNA, 1701 nt, Artificial Sequence
  derived and/or modified CDS sequence (opt2) from hemagglutinin__InfluenzaA__ADD97938
augaaggccauccucgucguccuccucuacaccuucgccaccgccaacgccgacacccucugcaucggcuaccacgccaacaacuccaccgacaccgucgacaccauccucgagaagaacgucaccgucacccacuccgucaaccuccucgaggacaagcacaacggcaagcucugcaagcuccgcggcgucgccccccuccaccucggcaagugcaacaucgccggcuggauccucggcaaccccgagugcgagucccucuccaccgccuccuccugguccuacaucgucgagaccuccuccuccgacaacggcaccugcuaccccggcgacuucaucgacuacgaggagcuccgcgagcagcucuccuccgucuccuccuucgagcgcuucgagaucuuccccaugaccuccuccuggcccaaccacgacuccaacaagggcgucaccgccgccugcccccacgccggcgccaaguccuucuacaagaaccucaucuggcucgucaagaagggcaacuccuaccccaagcucuccaaguccuacaucaacgacaagggcaaggagauccucguccucuggggcauccaccaccccuccaccuccgccgaccagcagucccucuaccagaacgccgacgccuacgucuucgucggcaccucccgcuacuccaagaaguucaagcccgagaucgccauccgccccaagguccgcgaccaggagggccgcaugaacuacuacuggacccucgucgagcccggcgacaagaucaccuucgaggccaccggcaaccucgucgucccccgcuacgccuucgccauggagcgcaacgccggcuccggcaucaucaucuccgacacccccguccacgacugcaacaccaccugccagacccccaagggcgccaucaacaccucccuccccuuccagaacauccaccccaucaccaucggcaagugccccaaguacgucaaguccaccaagcuccgccucgccaccggccuccgcaacguccccuccauccagucccgcggccucuucggcgccaucgccggcuucaucgagggcggcuggaccggcauggucgacggcugguacggcuaccaccaccagaacgagcagggcuccggcuacgccgccgaccucaaguccacccagaacgccaucgacgagaucaccaacaaggucaacuccgucaucgagaagaugaacacccaguucaccgccgucggcaaggaguucaaccaccucgagaagcgcaucgagaaccucaacaagaaggucgacgacggcuuccucgacaucuggaccuacaacgccgagcuccucguccuccucgagaacgagcgcacccucgacuaccacgacuccaacgucaagaaccucuacgagaagguccgcucccagcucaagaacaacgccaaggagaucggcaacggcugcuucgaguucuaccacaagugcgacaacaccugcauggaguccgucaagaacggcaccuacgacuaccccaaguacuccgaggaggccaagcucaaccgcgaggagaucgacggcgucaagcucgaguccacccgcaucuaccagauccucgccaucuacuccaccgucgccuccucccucguccucgucgucucccucggcgccaucuccuucuggaugugcuccaacggcucccuccagugccgcaucugcaucuga

SEQ ID NO: 100438 - RNA, 1701 nt, Artificial Sequence
  derived and/or modified CDS sequence (opt2) from hemagglutinin__InfluenzaA__ADD97948
augaaggccauccuccucguccuccucuacaccuucgccaccgccaacgccgacacccucugcaucggcuaccacgccaacaacuccaccgacaccgucgacaccguccucgagaagaacgucaccgucacccacuccgucaaccuccucgaggacaagcacaacggcaagcucugcaagcuccgcggcgucgccccccuccaccucggcaagugcaacaucgccggcuggauccucggcaaccccgagugcgagucccucuccaccgccuccuccugguccuacaucgucgagaccuccuccuccgacaacggcaccugcuaccccggcgacuucaucgacuacgaggagcuccgcgagcagcucuccuccgucuccuccuucgagcgcuucgagauguuccccaagaccuccuccuggcccaaccacgacuccaacaagggcgucaccgccgccugcccccacgccggcgccaaguccuucuacaagaaccucaucuggcucgucaagaagggcaacuccuaccccaagcucuccaaguccuacaucaacgacaagggcaaggagguccucguccucuggggcauccaccaccccuccaccuccgccgaccagcagucccucuaccagaacgccgacgccuacgucuucgucggcaccucccgcuacuccaagaaguucaagcccgagaucgccauccgccccaagguccgcgaccaggagggccgcaugaacuacuacuggacccucgucgagcccggcgacaagaucaccuucgaggccaccggcaaccucgucgucccccgcuacgccuucgccauggagcgcaacgccggcuccggcaucaucaucuccgacacccccguccacgacugcaacaccaccugccagacccccaagggcgccaucaacaccucccuccccuuccagaacauccaccccaucaccaucggcaagugccccaaguacgucaaguccaccaagcuccgccucgccaccggccuccgcaacguccccuccauccagucccgcggccucuucggcgccaucgccggcuucaucgagggcggcuggaccggcauggucgacggcugguacggcuaccaccaccagaacgagcagggcuccggcuacgccgccgaccucaaguccacccagaacgccaucgacgagaucaccaacaaggucaacuccgucaucgagaagaugaacacccaguucaccgccgucggcaaggaguucaaccaccucgagaagcgcaucgagaaccucaacaagaaggucgacgacggcuuccucgacaucuggaccuacaacgccgagcuccucguccuccucgagaacgagcgcacccucgacuaccacgacuccaacgucaagaaccucuacgagaagguccgcucccagcucaagaacaacgccaaggagaucggcaacggcugcuucgaguucuaccacaagugcgacaacaccugcauggaguccgucaagaacggcaccuacgacuaccccaaguacuccgaggaggccaagcucaaccgcgaggagaucgacggcgucaagcucgaguccacccgcaucuaccagauccucgccaucuacuccaccgucgccuccucccucguccucgucgucucccucggcgccaucuccuucuggaugugcuccaacggcucccuccagugccgcaucugcaucuga

SEQ ID NO: 100439 - RNA, 1701 nt, Artificial Sequence
  derived and/or modified CDS sequence (opt2) from hemagglutinin__InfluenzaA__ADD97958
augaaggccauccucgucguccuccucuacaccuucgccaccgccaacgccgacacccucugcaucggcuaccacgccaacaacuccaccgacaccgucgacaccguccucgagaagaacgucaccgucacccacuccgucaaccuccucgaggacaagcacaacggcaagcucugcaagcuccgcggcgucgccccccuccaccucggcaagugcaacaucgccggcuggauccucggcaaccccgagugcgagucccucuccaccgccuccuccugguccuacaucgucgagaccuccuccuccgacaacggcaccugcuaccccggcgacuucaucgacuacgaggagcuccgcgagcagcucuccuccgucuccuccuucgagcgcuucgagaucuuccccaagaccuccuccuggcccaaccacgacuccaacaagggcgucaccgccgccugcccccacgccggcgccaaguccuucuacaagaaccucaucuggcucgucaagaagggcaacuccuaccccaagcucuccaaguccuacaucaacgacaagggcaaggagguccucguccucuggggcauccaccaccccuccaccuccgccgaccagcagucccucuaccagaacgccgacgccuacgucuucgucggcaccucccgcuacuccaagaaguuccagcccgagaucgccauccgccccaagguccgcgaccaggagggccgcaugaacuacuacuggacccuccucgagcccggcgacaagaucaccuucgaggccaccggcaaccucgucgucccccgcuacgccuucgccauggagcgcaacgccggcuccggcaucaucaucuccgacacccccguccacgacugcaacaccaccugccagacccccaagggcgccaucaacaccucccuccccuuccagaacauccaccccaucaccaucggcaagugccccaaguacgucaaguccaccaagcuccgccucgccaccggccuccgcaacguccccuccauccagucccgcggccucuucggcgccaucgccggcuucaucgagggcggcuggaccggcauggucgacggcugguacggcuaccaccaccagaacgagcagggcuccggcuacgccgccgaccucaaguccacccagaacgccaucgacgagaucaccaacaaggucaacuccgucaucgagaagaugaacacccaguucaccgccgucggcaaggaguucaaccaccucgagaagcgcaucgagaaccucaacaagaaggucgacgacggcuuccucgacaucuggaccuacaacgccgagcuccucguccuccucgagaacgagcgcacccucgacuaccacgacuccaacgucaagaaccucuacgagaagguccgcucccagcucaagaacaacgccaaggagaucggcaacggcugcuucgaguucuaccacaagugcgacaacaccugcauggaguccgucaagaacggcaccuacgacuaccccaaguacuccgaggaggccaagcucaaccgcgaggagaucgacggcgucaagcucgaguccacccgcaucuaccagauccucgccaucuacuccaccgucgccuccucccucguccucgucgucucccucggcgccaucuccuucuggaugugcuccaacggcucccuccagugccgcaucugcaucuga

SEQ ID NO: 100440 - RNA, 1701 nt, Artificial Sequence; identical to SEQ ID NO: 98705
  derived and/or modified CDS sequence (opt2) from hemagglutinin__InfluenzaA__ADD97968

SEQ ID NO: 100441 - RNA, 1701 nt, Artificial Sequence; identical to SEQ ID NO: 100433
  derived and/or modified CDS sequence (opt2) from hemagglutinin__InfluenzaA__ADD97978

SEQ ID NO: 100442 - RNA, 1701 nt, Artificial Sequence; identical to SEQ ID NO: 100387
  derived and/or modified CDS sequence (opt2) from hemagglutinin__InfluenzaA__ADD97988

SEQ ID NO: 100443 - RNA, 1701 nt, Artificial Sequence
  derived and/or modified CDS sequence (opt2) from hemagglutinin__InfluenzaA__ADD97998
augaaggccauccucgucguccuccucuacaccuucgccaccgccaacgccgacacccucugcaucggcuaccacgccaacaacuccaccgacaccgucgacaccguccucgagaagaacgucaccgucacccacuccgucaaccuccucgaggacaagcacaacggcaagcucugcaagcuccgcggcgucgccccccuccaccucggcaagugcaacaucgccggcuggauccucggcaaccccgagugcgagucccucuccaccgccuccuccugguccuacaucgucgagaccuccuccuccgacaacggcaccugcuaccccggcgacuucaucgacuacgaggagcuccgcgagcagcucuccuccgucuccuccuucgagcgcuucgagaucuuccccaaggccuccuccuggcccaaccacgacuccaacaagggcgucaccgccgccugcccccacgccggcgccaaguccuucuacaagaaccucaucuggcucgucaagaagggcaacuccuaccccaagcucuccaaguccuacaucaacgacaagggcaaggagguccucguccucuggggcauccaccaccccuccaccuccgccgaccagcagucccucuaccagaacgccgacgccuacgucuucgucggcaccucccgcuacuccaagaaguucaagcccgagaucgccauccgccccaagguccgcgaccaggagggccgcaugaacuacuacuggacccucgucgagcccggcgacaagaucaccuucgaggccaccggcaaccucgucgucccccgcuacgccuucgagauggagcgcaacgccggcuccggcaucaucaucuccgacacccccguccacgacugcaacaccaccugccagacccccaagggcgccaucaacaccucccuccccuuccagaacauccaccccaucaccaucggcaagugccccaaguacgucaaguccaccaagcuccgccucgccaccggccuccgcaacguccccuccauccagucccgcggccucuucggcgccaucgccggcuucaucgagggcggcuggaccggcauggucgacggcugguacggcuaccaccaccagaacgagcagggcuccggcuacgccgccgaccucaaguccacccagaacgccaucgacgagaucaccaacaaggucaacuccgucaucgagaagaugaacacccaguucaccgccgucggcaaggaguucaaccaccucgagaagcgcaucgagaaccucaacaagaaggucgacgacggcuuccucgacaucuggaccuacaacgccgagcuccucguccuccucgagaacgagcgcacccucgacuaccacgacuccaacgucaagaaccucuacgagaagguccgcucccagcucaagaacaacgccaaggagaucggcaacggcugcuucgaguucuaccacaagugcgacaacaccugcauggaguccgucaagaacggcaccuacgacuaccccaaguacuccgaggaggccaagcucaaccgcgaggagaucgacggcgucaagcucgaguccacccgcaucuaccagauccucgccaucuacuccaccgucgccuccucccucguccucgucgucucccucggcgccaucuccuucuggaugugcuccaacggcucccuccagugccgcaucugcaucuga

SEQ ID NO: 100444 - RNA, 1701 nt, Artificial Sequence; identical to SEQ ID NO: 100257
  derived and/or modified CDS sequence (opt2) from hemagglutinin__InfluenzaA__ADD98008

SEQ ID NO: 100445 - RNA, 1701 nt, Artificial Sequence
  derived and/or modified CDS sequence (opt2) from hemagglutinin__InfluenzaA__ADD98018
augaaggccauccucgucguccuccucuacaccuucgccaccgccaacgccgacacccucugcaucggcuaccacgccaacaacuccaccgacaccgucgacaccguccucgagaagaacgucaccgucacccacuccgucaaccuccucgaggacaagcacaacggcaagcucugcaagcuccgcggcgucgccccccuccaccucggcaagugcaacaucgccggcuggauccucggcaaccccgagugcgagucccucuccaccgccuccuccugguccuacaucgucgagaccuccuccuccgacaacggcaccugcuaccccggcgacuucaucgacuacgaggagcuccgcgagcagcucuccuccgucuccuccuucgagcgcuucgagaucuuccccaagaccuccuccuggcccaaccacgacuccaacaagggcgucaccgccgccugcccccacgccggcgccaaguccuucuacaagaaccucaucuggcucgucaagaagggcaacuccuaccccaagcucuccaaguccuacaucaacgacaagggcaaggagauccucguccucuggggcauccaccaccccuccaccuccgccgaccagcagucccucuaccagaacgccgacgccuacgucuucgucggcaccucccgcuacuccaagaaguucaagcccgagaucgccacccgccccaagguccgcgagcaggagggccgcaugaacuacuacuggacccucgucgagcccggcgacaagaucaccuucgaggccaccggcaaccucgucgucccccgcuacgccuucgccauggagcgcaacgccggcuccggcaucaucaucuccgacacccccguccacgacugcaacaccaccugccagacccccaagggcgccaucaacaccucccuccccuuccagaacauccacuccaucaccaucggcaagugccccaaguacgucaaguccaccaagcuccgccucgccaccggccuccgcaacguccccuccauccagucccgcggccucuucggcgccaucgccggcuucaucgagggcggcuggaccggcauggucgacggcugguacggcuaccaccaccagaacgagcagggcuccggcuacgccgccgaccucaaguccacccagaacgccaucgacgagaucaccaacaaggucaacuccgucaucgagaagaugaacacccaguucaccgccgucggcaaggaguucaaccaccucgagaagcgcaucgagaaccucaacaagaaggucgacgacggcuuccucgacaucuggaccuacaacgccgagcuccucguccuccucgagaacgagcgcacccucgacuaccacgacuccaacgucaagaaccucuacgagaagguccgcucccagcucaagaacaacgccaaggagaucggcaacggcugcuucgaguucuaccacaagugcgacaacaccugcauggaguccgucaagaacggcaccuacgacuaccccaaguacuccgaggaggccaagcucaaccgcgaggagaucgacggcgucaagcucgaguccacccgcaucuaccagauccucgccaucuacuccaccgucgccuccucccucguccucgucgucucccucggcgccaucuccuucuggaugugcuccaacggcucccuccagugccgcaucugcaucuga

SEQ ID NO: 100446 - RNA, 1701 nt, Artificial Sequence; identical to SEQ ID NO: 100409
  derived and/or modified CDS sequence (opt2) from hemagglutinin__InfluenzaA__ADD98028

SEQ ID NO: 100447 - RNA, 1701 nt, Artificial Sequence
  derived and/or modified CDS sequence (opt2) from hemagglutinin__InfluenzaA__ADD98038
augaaggccauccucgucguccuccucuacaccuucgccaccgccaacgccgacacccucugcaucggcuaccacgccaacaacuccaccgacaccgucgacaccguccucgagaagaacgucaccgucacccacuccgucaaccuccucgaggacaagcacaacggcaagcucugcaagcuccgcggcgucgccccccuccaccucggcaagugcaacaucgccggcuggauccucggcaaccccgagugcgaguccaucuccaccgccuccuccugguccuacaucgucgagaccuccuccuccgacaacggcaccugcuaccccggcgacuucaucgacuacgaggagcuccgcgagcagcucuccuccgucuccuccuucgagcgcuucgagaucuuccccaaggccuccuccuggcccaaccacgacuccaacaagggcgucaccgccgccugcccccacgccggcgccaaguccuucuacaagaaccucaucuggcucgucaagaagggcaacuccuaccccaagcucuccaaguccuacaucaacgacaagggcaaggagguccucguccucuggggcauccaccaccccuccaccuccgccgaccagcagucccucuaccagaacgccgacgccuacgucuucgucggcaccucccgcuacuccaagaaguucaagcccgagaucgccauccgccccaagguccgcgaccaggagggccgcaugaacuacuacuggacccucgucgagcccggcgacaagaucaccuucgaggccaccggcaaccucgucgucccccgcuacgccuucgagauggagcgcaacgccggcuccggcaucaucaucuccgacacccccguccacgacugcaacaccaccugccagacccccaagggcgccaucaacaccucccuccccuuccagaacauccaccccaucaccaucggcaagugccccaaguacgucaaguccaccaagcuccgccucgccaccggccuccgcaacguccccuccauccagucccgcggccucuucggcgccaucgccggcuucaucgagggcggcuggaccggcauggucgacggcugguacggcuaccaccaccagaacgagcagggcuccggcuacgccgccgaccucaaguccacccagaacgccaucgacgagaucaccaacaaggucaacuccgucaucgagaagaugaacacccaguucaccgccgucggcaaggaguucaaccaccucgagaagcgcaucgagaaccucaacaagaaggucgacgacggcuuccucgacaucuggaccuacaacgccgagcuccucguccuccucgagaacgagcgcacccucgacuaccacgacuccaacgucaagaaccucuacgagaagguccgcucccagcucaagaacaacgccaaggagaucggcaacggcugcuucgaguucuaccacaagugcgacaacaccugcauggaguccgucaagaacggcaccuacgacuaccccaaguacuccgaggaggccaagcucaaccgcgaggagaucgacggcgucaagcucgaguccacccgcaucuaccagauccucgccaucuacuccaccgucgccuccucccucguccucgucgucucccucggcgccaucuccuucuggaugugcuccaacggcucccuccagugccgcaucugcaucuga

SEQ ID NO: 100448 - RNA, 1701 nt, Artificial Sequence; identical to SEQ ID NO: 100433
  derived and/or modified CDS sequence (opt2) from hemagglutinin__InfluenzaA__ADD98048

SEQ ID NO: 100449 - RNA, 1701 nt, Artificial Sequence; identical to SEQ ID NO: 98705
  derived and/or modified CDS sequence (opt2) from hemagglutinin__InfluenzaA__ADD98058

SEQ ID NO: 100450 - RNA, 1701 nt, Artificial Sequence; identical to SEQ ID NO: 98705
  derived and/or modified CDS sequence (opt2) from hemagglutinin__InfluenzaA__ADD98068

SEQ ID NO: 100451 - RNA, 1701 nt, Artificial Sequence; identical to SEQ ID NO: 98947
  derived and/or modified CDS sequence (opt2) from hemagglutinin__InfluenzaA__ADD98078

SEQ ID NO: 100452 - RNA, 1701 nt, Artificial Sequence
  derived and/or modified CDS sequence (opt2) from hemagglutinin__InfluenzaA__ADD98098
augaaggccauccucgucguccuccucuacaccuucgccaccgccaacgccgacacccucugcaucggcuaccacgccaacaacuccaccgacaccgucgacaccauccucgagaagaacgucaccgucacccacuccgucaaccuccucgaggacaagcacaacggcaagcucugcaagcuccgcggcgucgccccccuccaccucggcaagugcaacaucgccggcuggauccucggcaaccccgagugcgagucccucuccaccgccuccuccugguccuacaucgucgagaccuccuccuccgacaacggcaccugcuaccccggcgacuucaucgacuacgaggagcuccgcgagcagcucuccuccgucuccuccuucgagcgcuucgagaucuuccccaagaccuccuccuggcccaaccacgacuccaacaagggcgucaccgccgccugcccccacgccggcgccaaguccuucuacaagaaccucaucuggcucgucaagaagggcaacuccuaccccaagcucuccaaguccuacaucaacgacaagggcaaggagguccucguccucuggggcauccaccaccccuccaccuccuccgaccagcagucccucuaccagaacgccgacgccuacgucuucgucggcaccucccgcuacuccaagaaguucaagcccgagaucgccauccgccccaagguccgcgaccaggagggccgcaugaacuacuacuggacccucgucgagcccggcgacaagaucaccuucgaggccaccggcaaccucgucgucccccgcuacgccuucgccgucgagcgcaacgccggcuccggcaucaucaucuccgacacccccguccacgacugcaacaccaccugccagacccccaagggcgccaucaacaccucccuccccuuccagaacauccaccccaucaccaucggcaagugccccaaguacgucaaguccaccaagcuccgccucgccaccggccuccgcaacguccccuccauccagucccgcggccucuucggcgccaucgccggcuucaucgagggcggcuggaccggcauggucgacggcugguacggcuaccaccaccagaacgagcagggcuccggcuacgccgccgaccucaaguccacccagaacgccaucgacgagaucaccaacaaggucaacuccgucaucgagaagaugaacacccaguucaccgccgucggcaaggaguucaaccaccucgagaagcgcaucgagaaccucaacaagaaggucgacgacggcuuccucgacaucuggaccuacaacgccgagcuccucguccuccucgagaacgagcgcacccucgacuaccacgacuccaacgucaagaaccucuacgagaagguccgcucccagcucaagaacaacgccaaggagaucggcaacggcugcuucgaguucuaccacaagugcgacaacaccugcauggaguccgucaagaacggcaccuacgacuaccccaaguacuccgaggaggccaagcucaaccgcgaggagaucgacggcgucaagcucgaguccacccgcaucuaccagauccucgccaucuacuccaccgucgccuccucccucguccucgucgucucccucggcgccaucuccuucuggaugugcuccaacggcucccuccagugccgcaucugcaucuga

SEQ ID NO: 100453 - RNA, 1701 nt, Artificial Sequence; identical to SEQ ID NO: 100420
  derived and/or modified CDS sequence (opt2) from hemagglutinin__InfluenzaA__ADD98118

SEQ ID NO: 100454 - RNA, 1701 nt, Artificial Sequence; identical to SEQ ID NO: 100420
  derived and/or modified CDS sequence (opt2) from hemagglutinin__InfluenzaA__ADD98128

SEQ ID NO: 100455 - RNA, 1701 nt, Artificial Sequence
  derived and/or modified CDS sequence (opt2) from hemagglutinin__InfluenzaA__ADD98138
augaaggccauccucgucguccuccucuacaccuucgccaccgccaacgccgacacccucugcaucggcuaccacgccaacaacuccaccgacaccgucgacaccguccucgagaagaacgucaccgucacccacuccgucaaccuccucgaggacaagcacaacggcaagcucugcaagcuccgcggcgucgccccccuccaccucggcaagugcaacaucgccggcuggauccucggcaaccccgagugcgagucccucuccaccgccuccuccugguccuacaucgucgagaccuccuccuccgacaacggcaccugcuaccccggcgacuucaucaacuacgaggagcuccgcgagcagcucuccuccgucuccuccuucgagcgcuucgagaucuuccccaagaccuccuccuggcccaaccacgacuccaacaagggcgucaccgccgccugcccccacgccggcgccaaguccuucuacaagaaccucaucuggcucgucaagaagggcaacuccuaccccaagcucuccaaguccuacaucaacgacaagggcaaggagguccucguccucuggggcauccaccaccccuccaccuccaccgaccagcagucccucuaccagaacgccgacgccuacgucuucgucggcaccucccgcuacuccaagaaguucaagcccgagaucgccauccgccccaagguccgcgaccaggagggccgcaugaacuacuacuggacccucgucgagcccggcgacaagaucaccuucgaggccaccggcaaccucgucgucccccgcuacgccuucgccauggagcgcaacaccggcuccggcaucaucaucuccgacacccccguccacgacugcaacaccaccugccagacccccaacggcgccaucaacaccucccuccccuuccagaacauccaccccaucaccaucggcaagugccccaaguacgucaaguccaccaagcuccgccucgccaccggccuccgcaacguccccuccauccagucccgcggccucuucggcgccaucgccggcuucaucgagggcggcuggaccggcauggucgacggcugguacggcuaccaccaccagaacgagcagggcuccggcuacgccgccgaccucaaguccacccagaacgccaucgacaagaucaccaacaaggucaacuccgucaucgagaagaugaacacccaguucaccgccgucggcaaggaguucaaccaccucgagaagcgcaucgagaaccucaacaagaaggucgacgacggcuuccucgacaucuggaccuacaacgccgagcuccucguccuccucgagaacgagcgcacccucgacuaccacgacuccaacgucaagaaccucuacgagaagguccgcucccagcucaagaacaacgccaaggagaucggcaacggcugcuucgaguucuaccacaagugcgacaacaccugcauggaguccgucaagaacggcaccuacgacuaccccaaguacuccgaggaggccaagcucaaccgcgaggagaucgacggcgucaagcucgaguccacccgcaucuaccagauccucgccaucuacuccaccgucgccuccucccucguccucgucgucucccucggcgccaucuccuucuggaugugcuccaacggcucccuccagugccgcaucugcaucuga

SEQ ID NO: 100456 - RNA, 1701 nt, Artificial Sequence
  derived and/or modified CDS sequence (opt2) from hemagglutinin__InfluenzaA__ADD98148
augaaggccauccucgucguccuccucuacaccuucgccaccgccaacgccgacacccucugcaucggcuaccacgccaacaacuccaccgacaccgucgacaccguccucgagaagaacgucaccgucacccacuccgucaaccuccucgaggacaagcacaacggcaagcucugcaagcuccgcggcgucgccccccuccaccucggcaagugcaacaucgccggcuggauccucggcaaccccgagugcgagucccucuccaccgccuccuccugguccuacaucgucgagaccuccuccuccgacaacggcaccugcuaccccggcgacuucaucgacuacgaggagcuccgcgagcagcucuccuccgucuccuccuucgagcgcuucgagaucuuccccaagaccuccuccuggcccaaccacgacuccaacaagggcgucaccgccgccugcccccacgccggcgccaaguccuucuacaagaaccucaucuggcucgucaagaagggcaacuccuaccccaagcucuccaaguccuacaucaacgacaagggcaaggagguccucguccucuggggcauccaccaccccuccaccuccgccgaccagcagucccucuaccagaacgccgacgccuacgucuucgucggcaccucccgcuacuccaagaaguucaagcccgagaucgccauccgccccaagguccgcgaccaggagggccgcaugaacuacuacuggacccucgucgagcccggcgacaagaucaccuucgaggccaccggcaaccucgucgucccccgcuacgccuucgccauggagcgcaacgccggcuccggcaucuucaucuccgacacccccguccacgacugcaacaccaccugccagacccccaagggcgccaucaacaccucccuccccuuccagaacauccaccccaucaccaucggcaagugccccaaguacgucaaguccaccaagcuccgccucgccaccggccuccgcaacguccccuccauccagucccgcggccucuucggcgccaucgccggcuucaucgagggcggcuggaccggcauggucgacggcugguacggcuaccaccaccagaacgagcagggcuccggcuacgccgccgaccucaaguccacccagaacgccaucgacaagaucaccaacaaggucaacuccgucaucgagaagaugaacacccaguucaccgccgucggcaaggaguucaaccaccucgagaagcgcaucgagaaccucaacaagaaggucgacgacggcuuccucgacaucuggaccuacaacgccgagcuccucguccuccucgagaacgagcgcacccucgacuaccacgacuccaacgucaagaaccucuacgagaagguccgcucccagcucaagaacaacgccaaggagaucggcaacggcugcuucgaguucuaccacaagugcgacaacaccugcauggaguccgucaagaacggcaccuacgacuaccccaaguacuccgaggaggccaagcucaaccgcgaggagaucgacggcgucaagcucgaguccacccgcaucuaccagauccucgccaucuacuccaccgucgccuccucccucguccucgucgucucccucggcgccaucuccuucuggaugugcuccaacggcucccuccagugccgcaucugcaucuga

SEQ ID NO: 100457 - RNA, 1701 nt, Artificial Sequence
  derived and/or modified CDS sequence (opt2) from hemagglutinin__InfluenzaA__ADD98158
augaaggccauccucgucguccuccucuacaccuucgccaccgccaacgccgacacccucugcaucggcuaccacgccaacaacuccaccgacaccgucgacaccguccucgagaagaacgucaccgucacccacuccgucaaccuccucgaggacaagcacaacggcaagcucugcgagcuccgcggcgucgccccccuccaccucggcaagugcaacaucgccggcuggauccucggcaaccccgagugcgagucccucuccaccgccuccuccugguccuacaucgucgagaccuccuccuccgacaacggcaccugcuaccccggcgacuucaucgacuacgaggagcuccgcgagcagcucuccuccgucuccuccuucgagcgcuucgagaucuuccccaagaccuccuccuggcccaaccacgacuccaacaagggcgucaccgccgccugcccccacgccggcgccaaguccuucuacaagaaccucaucuggcucgucaagaagggcaacuccuaccccaagcucuccaaguccuacaucaacgacaagggcaaggagguccucguccucuggggcauccaccaccccuccaccuccgccgaccagcagucccucuaccagaacgccgacgccuacgucuucgucggcaccucccgcuacuccaagaaguucaagcccgagaucgccauccgccccaagguccgcgaccaggagggccgcaugaacuacuacuggacccucgucgagcccggcgacaagaucaccuucgaggccaccggcaaccucgucaucccccgcuacgccuucgccauggagcgcaacgccggcuccggcaucaucaucuccgacacccccguccacgacugcaacaccaccugccagacccccaagggcgccaucaacaccucccuccccuuccagaacauccaccccaucaccaucggcaagugccccaaguacgucaaguccaccaagcuccgccucgccaccggccuccgcaacguccccuccauccagucccgcggccucuucggcgccaucgccggcuucaucgagggcggcuggaccggcauggucgacggcugguacggcuaccaccaccagaacgagcagggcuccggcuacgccgccgaccucaaguccacccagaacgccaucgacaagaucaccaacaaggucaacuccgucaucgagaagaugaacacccaguucaccgccgucggcaaggaguucaaccaccucgagaagcgcaucgagaaccucaacaagaaggucgacgacggcuuccucgacaucuggaccuacaacgccgagcuccucguccuccucgagaacgagcgcacccucgacuaccacgacuccaacgucaagaaccucuacgagaagguccgcucccagcucaagaacaacgccaaggagaucggcaacggcugcuucgaguucuaccacaagugcgacaacaccugcauggaguccgucaagaacggcaccuacgacuaccccaaguacuccgaggaggccaagcucaaccgcgaggagaucgacggcgucaagcucgaguccacccgcaucuaccagauccucgccaucuacuccaccgucgccuccucccucguccucgucgucucccucggcgccaucuccuucuggaugugcuccaacggcucccuccagugccgcaucugcaucuga

SEQ ID NO: 100458 - RNA, 1701 nt, Artificial Sequence
  derived and/or modified CDS sequence (opt2) from hemagglutinin__InfluenzaA__ADD98168
augaaggccauccucgucguccuccucuacaccuucgccaccgccaacgccgacacccucugcaucggcuaccacgccaacaacuccaccgacaccgucgacaccguccucgagaagaacgucaccgucacccacuccaucaacauccucgaggacaagcacaacggcaagcucugcaagcuccgcggcgucgccccccuccaccucggcaagugcaacaucgccggcuggauccucggcaaccccgagugcgagucccucuccaccgccuccuccugguccuacaucgucgagaccuccuccuccgacaacggcaccugcuaccccggcgacuucaucgacuacgaggagcuccgcgagcagcucuccuccgucuccuccuucgagcgcuucgagaucuuccccaagaccuccuccuggcccaaccacgacuccaacaagggcgucaccgccgccugcccccacgccggcgccaaguccuucuacaagaaccucaucuggcucgucaagaagggcaacuccuaccccaagcucuccaaguccuacaucaacgacaagggcaaggagguccucguccucuggggcauccaccaccccuccaccuccgccgaccagcagucccucuaccagaacgccgacgccuacgucuucgucggcaccucccgcuacuccaagaaguucaagcccgagaucgccauccgccccaagguccgcgaccaggagggccgcaugaacuacuacuggacccucgucgagcccggcgacaagaucaccuucgaggccaccggcaaccucgucguccccaaguacgccuucgccauggagcgcaacgccggcuccggcaucaucaucuccgacacccccguccacgacugcaacaccaccugccagacccccaagggcgccaucaacaccucccuccccuuccagaacauccaccccaucaccaucggcaagugccccaaguacgucaaguccaccaagcuccgccucgccaccggccuccgcaacguccccuccauccagucccgcggccucuucggcgccaucgccggcuucaucgagggcggcuggaccggcauggucgacggcugguacggcuaccaccaccagaacgagcagggcuccggcuacgccgccgaccucaaguccacccagaacgccaucgacgagaucaccaacaaggucaacuccgucaucgagaagaugaacacccaguucaccgccgucggcaaggaguucaaccaccucgagaagcgcaucgagaaccucaacaagaaggucgacgacggcuuccucgacaucuggaccuacaacgccgagcuccucguccuccucgagaacgagcgcacccucgacuaccacgacuccaacgucaagaaccucuacgagaagguccgcucccagcucaagaacaacgccaaggagaucggcaacggcugcuucgaguucuaccacaagugcgacaacaccugcauggaguccgucaagaacggcaccuacgacuaccccaaguacuccgaggaggccaagcucaaccgcgaggagaucgacggcgucaagcucgaguccacccgcaucuaccagauccucgccaucuacuccaccgucgccuccucccucguccucgucgucucccucggcgccaucuccuucuggaugugcuccaacggcucccuccagugccgcaucugcaucuga

SEQ ID NO: 100459 - RNA, 1701 nt, Artificial Sequence; identical to SEQ ID NO: 99877
  derived and/or modified CDS sequence (opt2) from hemagglutinin__InfluenzaA__ADD98188

SEQ ID NO: 100460 - RNA, 1701 nt, Artificial Sequence
  derived and/or modified CDS sequence (opt2) from hemagglutinin__InfluenzaA__ADD98198
augaaggccauccucgucguccuccucuacaccuucgccaccgccaacgccgacacccucugcaucggcuaccacgccaacaacuccaccgacaccgucgacaccguccucgagaagaacgucaccgucacccacuccgucaaccuccucgaggacaagcacaacggcaagcucugcaagcuccgcggcgucgccccccuccaccucggcaagugcaacaucgccggcuggauccucggcaaccccgagugcgagucccucuccaccgccuccuccugguccuacaucgucgagaccuccuccuccgacaacggcaccugcuaccccggcgacuucaucgacuacgaggagcuccgcgagcagcucuccuccgucuccuccuucgagcgcuucgagaucuuccccaagaccuccuccuggcccaaccacgacuccaacaagggcgucaccgccgccugcccccacgccggcgccaaguccuucuacaagaaccucaucuggcucgucaagaagggcaacuccuaccccaagcucuccaaguccuacaucaacgacaagggcaaggagguccucguccucuggggcauccaccaccccuccaccuccgccgaccagcagucccucuaccagaacgccgacgccuacgucuucgucggcaccucccgcuacuccaagaaguucaagcccgagaucgccauccgccccaagguccgcgaccaggagggccgcaugaacuacuacuggacccucgucgagcccggcgacaagaucaccuucgaggccaccggcaaccucgucgucccccgcuacgccuucgccauggagcgcaacgccggcuccggcaucaucaucuccgacacccccguccacgacugcaacaccaccugccagacccccaagggcgccaucaacaccucccuccccuuccagaacauccaccccaucaccaucggcaagugccccaaguacgucaaguccaccaagaugcgccucgccaccggccuccgcaacguccccuccauccagucccgcggccucuucggcgccaucgccggcuucaucgagggcggcuggaccggcauggucgacggcugguacggcuaccaccaccagaacgagcagggcuccggcuacgccgccgaccucaaguccacccagaacgccaucgacgagaucaccaacaaggucaacuccgucaucgagaagaugaacacccaguucaccgccgucggcaaggaguucaaccaccucgagaagcgcaucgagaaccucaacaagaaggucgacgacggcuuccucgacaucuggaccuacaacgccgagcuccucguccuccucgagaacgagcgcacccucgacuaccacgacuccaacgucaagaaccucuacgagaagguccgcucccagcucaagaacaacgccaaggagaucggcaacggcugcuucgaguucuaccacaagugcgacaacaccugcauggaguccgucaagaacggcaccuacgacuaccccaaguacuccgaggaggccaagcucaaccgcgaggagaucgacggcgucaagcucgaguccacccgcaucuaccagauccucgccaucuacuccaccgucgccuccucccucguccucgucgucucccucggcgccaucuccuucuggaugugcuccaacggcucccuccagugccgcaucugcaucuga

SEQ ID NO: 100461 - RNA, 1701 nt, Artificial Sequence; identical to SEQ ID NO: 98705
  derived and/or modified CDS sequence (opt2) from hemagglutinin__InfluenzaA__ADD98208

SEQ ID NO: 100462 - RNA, 1701 nt, Artificial Sequence; identical to SEQ ID NO: 98885
  derived and/or modified CDS sequence (opt2) from hemagglutinin__InfluenzaA__ADE20321

SEQ ID NO: 100463 - RNA, 1701 nt, Artificial Sequence; identical to SEQ ID NO: 98885
  derived and/or modified CDS sequence (opt2) from hemagglutinin__InfluenzaA__ADE20331

SEQ ID NO: 100464 - RNA, 1701 nt, Artificial Sequence; identical to SEQ ID NO: 98885
  derived and/or modified CDS sequence (opt2) from hemagglutinin__InfluenzaA__ADE20341

SEQ ID NO: 100465 - RNA, 1701 nt, Artificial Sequence; identical to SEQ ID NO: 100293
  derived and/or modified CDS sequence (opt2) from hemagglutinin__InfluenzaA__ADE20351

SEQ ID NO: 100466 - RNA, 1701 nt, Artificial Sequence; identical to SEQ ID NO: 98885
  derived and/or modified CDS sequence (opt2) from hemagglutinin__InfluenzaA__ADE20375

SEQ ID NO: 100467 - RNA, 1701 nt, Artificial Sequence; identical to SEQ ID NO: 100293
  derived and/or modified CDS sequence (opt2) from hemagglutinin__InfluenzaA__ADE20388

SEQ ID NO: 100468 - RNA, 1701 nt, Artificial Sequence; identical to SEQ ID NO: 98885
  derived and/or modified CDS sequence (opt2) from hemagglutinin__InfluenzaA__ADE20628

SEQ ID NO: 100469 - RNA, 1701 nt, Artificial Sequence; identical to SEQ ID NO: 100293
  derived and/or modified CDS sequence (opt2) from hemagglutinin__InfluenzaA__ADE20638

SEQ ID NO: 100470 - RNA, 1701 nt, Artificial Sequence; identical to SEQ ID NO: 98885
  derived and/or modified CDS sequence (opt2) from hemagglutinin__InfluenzaA__ADE20648

SEQ ID NO: 100471 - RNA, 1701 nt, Artificial Sequence; identical to SEQ ID NO: 98885
  derived and/or modified CDS sequence (opt2) from hemagglutinin__InfluenzaA__ADE20658

SEQ ID NO: 100472 - RNA, 1701 nt, Artificial Sequence; identical to SEQ ID NO: 100293
  derived and/or modified CDS sequence (opt2) from hemagglutinin__InfluenzaA__ADE20668

SEQ ID NO: 100473 - RNA, 1701 nt, Artificial Sequence; identical to SEQ ID NO: 100293
  derived and/or modified CDS sequence (opt2) from hemagglutinin__InfluenzaA__ADE20678

SEQ ID NO: 100474 - RNA, 1701 nt, Artificial Sequence; identical to SEQ ID NO: 98885
  derived and/or modified CDS sequence (opt2) from hemagglutinin__InfluenzaA__ADE20688

SEQ ID NO: 100475 - RNA, 1701 nt, Artificial Sequence; identical to SEQ ID NO: 98885
  derived and/or modified CDS sequence (opt2) from hemagglutinin__InfluenzaA__ADE20708

SEQ ID NO: 100476 - RNA, 1701 nt, Artificial Sequence; identical to SEQ ID NO: 98885
  derived and/or modified CDS sequence (opt2) from hemagglutinin__InfluenzaA__ADE20718

SEQ ID NO: 100477 - RNA, 1701 nt, Artificial Sequence
  derived and/or modified CDS sequence (opt2) from hemagglutinin__InfluenzaA__ADE20728
augaaggccauccucgucguccuccucuacaccuucgccaccgccaacgccgacacccucugcaucggcuaccacgccaacaacuccaccgacaccgucgacaccguccucgagaagaacgucaccgucacccacuccgucaacauccucgaggacaagcacaacggcaagcucugcaagcucaagggcgucgccccccuccaccucggcaagugcaacaucgccggcuggauccucggcaaccccgagugcgagucccucuccaccgccuccuccugguccuacaucgucgagaccuccuccuccgacaacggcaccugcuaccccggcgacuucaucgacuacgaggagcuccgcgagcagcucuccuccgucuccuccuucgagcgcuucgagaucuuccccaagaccuccuccuggcccaaccacgacuccaacaagggcgucaccgccgccugcccccacgccggcgccaaguccuucuacaagaaccucaucuggcucgucaagaagggcaacuccuaccccaagcucuccaaguccuacaucaacgacaagggcaaggagguccucguccucuggggcauccaccaccccuccaccuccgccgaccagcagucccucuaccagaacgccgacgccuacgucuucgucggcuccuccaaguacuccaagaaguucaagcccgagaucgccauccgccccaagguccgcgaccaggagggccgcaugaacuacuacuggacccucgucgagcccggcgacaagaucaccuucgaggccaccggcaaccucgucgucccccgcuacgccuucgccauggagcgcaacgccggcuccggcaucaucaucuccgacacccccguccacgacugcaacaccaccugccagacccccaagggcgccaucaacaccucccuccccuuccagaacauccaccccaucaccaucggcaagugccccaaguacgucaaguccaccaagcuccgccucgccaccggccuccgcaacguccccuccauccagucccgcggccucuucggcgccaucgccggcuucaucgagggcggcuggaccggcauggucgacggcugguacggcuaccaccaccagaacgagcagggcuccggcuacgccgccgaccucaaguccacccagaacgccaucgacgagaucaccaacaaggucaacuccgucaucgagaagaugaacacccaguucaccgccgucggcaaggaguucaaccaccucgagaagcgcaucgagaaccucaacaagaaggucgacgacggcuuccucgacaucuggaccuacaacgccgagcuccucguccuccucgagaacgagcgcacccucgacuaccacgacuccaacgucaagaaccucuacgagaagguccgcucccagcucaagaacaacgccaaggagaucggcaacggcugcuucgaguucuaccacaagugcgacaacaccugcauggaguccgucaagaacggcaccuacgacuaccccaaguacuccgaggaggccaagcucaaccgcgaggagaucgacggcgucaagcucgaguccacccgcaucuaccagauccucgccaucuacuccaccgucgccuccucccucguccucgucgucucccucggcgccaucuccuucuggaugugcuccaacggcucccuccagugccgcaucugcaucuga

SEQ ID NO: 100478 - RNA, 1701 nt, Artificial Sequence; identical to SEQ ID NO: 98885
  derived and/or modified CDS sequence (opt2) from hemagglutinin__InfluenzaA__ADE20738

SEQ ID NO: 100479 - RNA, 1701 nt, Artificial Sequence; identical to SEQ ID NO: 98885
  derived and/or modified CDS sequence (opt2) from hemagglutinin__InfluenzaA__ADE20748

SEQ ID NO: 100480 - RNA, 1701 nt, Artificial Sequence; identical to SEQ ID NO: 100477
  derived and/or modified CDS sequence (opt2) from hemagglutinin__InfluenzaA__ADE20758

SEQ ID NO: 100481 - RNA, 1701 nt, Artificial Sequence; identical to SEQ ID NO: 98885
  derived and/or modified CDS sequence (opt2) from hemagglutinin__InfluenzaA__ADE20768

SEQ ID NO: 100482 - RNA, 1701 nt, Artificial Sequence
  derived and/or modified CDS sequence (opt2) from hemagglutinin__InfluenzaA__ADE20778
augaaggccauccucgucguccuccucuacaccuucgccaccgccaacgccgacacccucugcaucggcuaccacgccaacaacuccaccgacaccgucgacaccguccucgagaagaacgucaccgucacccacuccgucaacauccucgaggacaagcacaacggcaagcucugcaagcucaagggcgucgccccccuccaccucggcaagugcaacaucgccggcuggauccucggcaaccccgagugcgagucccucuccaccgccuccuccugguccuacaucgucgagaccuccuccuccgacaacggcaccugcuaccccggcgacuucaucgacuacgaggagcuccgcgagcagcucuccuccgucuccuccuucgagcgcuucgagaucuuccccaagaccuccuccuggcccaaccacgacuccaacaagggcgucaccgccgccugcccccacgccggcgccaaguccuucuacaagaaccucaucuggcucgucaagaagggcaacuccuaccccaagcucuccaaguccuacaucaacgacaagggcaagaagguccucguccucuggggcauccaccaccccuccaccuccgccgaccagcagucccucuaccagaacgccgacgccuacgucuucgucggcuccuccaaguacuccaagaaguucaagcccgagaucgccauccgccccaagguccgcgaccaggagggccgcaugaacuacuacuggacccucgucgagcccggcgacaagaucaccuucgaggccaccggcaaccucgucgucccccgcuacgccuucgccauggagcgcaacgccggcuccggcaucaucaucuccgacacccccguccacgacugcaacaccaccugccagacccccaagggcgccaucaacaccucccuccccuuccagaacauccaccccaucaccaucggcaagugccccaaguacgucaaguccaccaagcuccgccucgccaccggccuccgcaacguccccuccauccagucccgcggccucuucggcgccaucgccggcuucaucgagggcggcuggaccggcauggucgacggcugguacggcuaccaccaccagaacgagcagggcuccggcuacgccgccgaccucaaguccacccagaacgccaucgacgagaucaccaacaaggucaacuccgucaucgagaagaugaacacccaguucaccgccgucggcaaggaguucaaccaccucgagaagcgcaucgagaaccucaacaagaaggucgacgacggcuuccucgacaucuggaccuacaacgccgagcuccucguccuccucgagaacgagcgcacccucgacuaccacgacuccaacgucaagaaccucuacgagaagguccgcucccagcucaagaacaacgccaaggagaucggcaacggcugcuucgaguucuaccacaagugcgacaacaccugcauggaguccgucaagaacggcaccuacgacuaccccaaguacuccgaggaggccaagcucaaccgcgaggagaucgacggcgucaagcucgaguccacccgcaucuaccagauccucgccaucuacuccaccgucgccuccucccucguccucgucgucucccucggcgccaucuccuucuggaugugcuccaacggcucccuccagugccgcaucugcaucuga

SEQ ID NO: 100483 - RNA, 1701 nt, Artificial Sequence; identical to SEQ ID NO: 99869
  derived and/or modified CDS sequence (opt2) from hemagglutinin__InfluenzaA__ADE20788

SEQ ID NO: 100484 - RNA, 1701 nt, Artificial Sequence
  derived and/or modified CDS sequence (opt2) from hemagglutinin__InfluenzaA__ADE20808
augaaggccauccucgucguccuccucuacaccuucgccaccgccaacgccgacacccucugcaucggcuaccacgccaacaacuccaccgacaccgucgacaccguccucgagaagaacgucaccgucacccacuccgucaaccuccucgaggacaagcacaacggcaagcucugcaagcuccgcggcgucgccccccuccaccucggcaagugcaacaucgccggcuggauccucggcaaccccgagugcgagucccucuccaccgccuccuccugguccuacaucgucgagaccuccuccuccgacaacggcaccugcuaccccggcgacuucaucgacuacgaggagcuccgcgagcagcucuccuccgucuccuccuucgagcgcuucgagaucuuccccaagaccuccuccuggcccaaccacgacuccaacaagggcgucaccgccgccugcccccacgccggcgccaaguccuucuacaagaaccucaucuggcucgucaagaagggcaacuccuaccccaagcucuccaaguccuacaucaacgacaaggagaaggagguccucguccucuggggcauccaccaccccuccaccuccgccgaccagcagucccucuaccagaacgccgacgccuacgucuucgucggcaccucccgcuacuccaagaaguucaagcccgagaucgccauccgccccaagguccgcgaccaggagggccgcaugaacuacuacuggacccucgucgagcccggcgacaagaucaccuucgaggccaccggcaaccucgucgucccccgcuacgccuucgccauggagcgcaacgccggcuccggcaucaucaucuccgacacccccguccacgacugcaacaccaccugccagacccccaagggcgccaucaacaccucccuccccuuccagaacauccaccccaucaccaucggcaagugccccaaguacgucaaguccaccaagcuccgccucgccaccggccuccgcaacguccccuccauccagucccgcggccucuucggcgccaucgccggcuucaucgagggcggcuggaccggcauggucgacggcugguacggcuaccaccaccagaacgagcagggcuccggcuacgccgccgaccucaaguccacccagaacgccaucgacaagaucaccaacaaggucaacuccgucaucgagaagaugaacacccaguucaccgccgucggcaaggaguucaaccaccucgagaagcgcaucgagaaccucaacaagaaggucgacgacggcuuccucgacaucuggaccuacaacgccgagcuccucguccuccucgagaacgagcgcacccucgacuaccacgacuccaacgucaagaaccucuacgagaagguccgcucccagcucaagaacaacgccaaggagaucggcaacggcugcuucgaguucuaccacaagugcgacaacaccugcauggaguccgucaagaacggcaccuacgacuaccccaaguacuccgaggaggccaagcucaaccgcgaggagaucgacggcgucaagcucgaguccacccgcaucuaccagauccucgccaucuacuccaccgucgccuccucccucguccucgucgucucccucggcgccaucuccuucuggaugugcuccaacggcucccuccagugccgcaucugcaucuga

SEQ ID NO: 100485 - RNA, 1701 nt, Artificial Sequence; identical to SEQ ID NO: 99869
  derived and/or modified CDS sequence (opt2) from hemagglutinin__InfluenzaA__ADE20818

SEQ ID NO: 100486 - RNA, 1701 nt, Artificial Sequence; identical to SEQ ID NO: 100427
  derived and/or modified CDS sequence (opt2) from hemagglutinin__InfluenzaA__ADE20828

SEQ ID NO: 100487 - RNA, 1701 nt, Artificial Sequence
  derived and/or modified CDS sequence (opt2) from hemagglutinin__InfluenzaA__ADE20848
augaaggccauccucgucguccuccucuacaccuucgccaccgccaacgccgacacccucugcaucggcuaccacgccaacaacuccaccgacaccgucgacaccguccucgagaagaacgucaccgucacccacuccgucaaccuccucgaggacaagcacaacggcaagcucugcaagcuccgcggcgucgccccccuccaccucggcaagugcaacaucgccggcuggauccucggcaaccccgagugcgagucccucuccaccgccuccuccugguccuacaucgucgagaccuccuccuccgacaacggcaccugcuaccccggcgacuucaucaacuacgaggagcuccgcgagcagcucuccuccgucuccuccuucgagcgcuucgagaucuuccccaagaccuccuccuggcccaaccacgacuccaacaagggcgucaccgccgccugcccccacgccggcgccaaguccuucuacaagaaccucaucuggcucgucaagaagggcaacuccuaccccaagcucuccaaguccuacaucaacgacaagggcaaggagguccucguccucuggggcauccaccaccccuccaccuccgccgaccagcagucccucuaccagaacgccgacgccuacgucuucgucggcaccucccgcuacuccaagaaguucaagcccgagaucgccauccgccccaagguccgcgaccaggagggccgcaugaacuacuacuggacccucgucgagcccggcgacaagaucaccuucgaggccaccggcaaccucgucgucccccgcuacgccuucgccauggagcgcaacgccggcuccggcaucaucaucuccgacacccccguccacgacugcaacaccaccugccagacccccaagggcgccaucaacaccucccuccccuuccagaacauccaccccaucaccaucggcaagugccccaaguacgucaaguccaccaagcuccgccucgccaccggccuccgcaacguccccuccauccagucccgcggccucuucggcgccaucgccggcuucaucgagggcggcuggaccggcaugaucgacggcugguacggcuaccaccaccagaacgagcagggcuccggcuacgccgccgaccucaaguccacccagaacgccaucgacaagaucaccaacaaggucaacuccgucaucgagaagaugaacacccaguucaccgccgucggcaaggaguucaaccaccucgagaagcgcaucgagaaccucaacaagaaggucgacgacggcuuccucgacaucuggaccuacaacgccgagcuccucguccuccucgagaacgagcgcacccucgacuaccacgacuccaacgucaagaaccucuacgagaagguccgcucccagcucaagaacaacgccaaggagaucggcaacggcugcuucgaguucuaccacaagugcgacaacaccugcauggaguccgucaagaacggcaccuacgacuaccccaaguacuccgaggaggccaagcucaaccgcgaggagaucgacggcgucaagcucgaguccacccgcaucuaccagauccucgccaucuacuccaccgucgccuccucccucguccucgucgucucccucggcgccaucuccuucuggaugugcuccaacggcucccuccagugccgcaucugcaucuga

SEQ ID NO: 100488 - RNA, 1701 nt, Artificial Sequence; identical to SEQ ID NO: 99869
  derived and/or modified CDS sequence (opt2) from hemagglutinin__InfluenzaA__ADE20858

SEQ ID NO: 100489 - RNA, 1701 nt, Artificial Sequence
  derived and/or modified CDS sequence (opt2) from hemagglutinin__InfluenzaA__ADE20868
augaaggccauccucgucguccuccucuacaccuucgccaccgccaacgccgacacccucugcaucggcuaccacgccaacaacuccaccgacaccgucgacaccguccucgagaagaacgucaccgucacccacuccgucaaccuccucgagggcaagcacaacggcaagcucugcaagcuccgcggcgucgccccccuccaccucggcaagugcaacaucgccggcuggauccucggcaaccccgagugcgagucccucaccaccgccuccuccugguccuacaucgucgagaccuccuccuccgacaacggcaccugcuaccccggcgacuucaucgacuacgaggagcuccgcgagcagcucuccuccgucuccuccuucgagcgcuucgagauguuccccaagaccuccuccuggcccaaccacgacuccaacaagggcgucaccgccgccugcccccacgccggcgccaaguccuucuacaagaaccucaucuggcucgucaagaagggcaacuccuaccccaagcucuccaaguccuacaucaacgacaagggcaaggagguccucguccucuggggcauccaccaccccuccaccuccgccgaccagcagucccucuaccagaacgccgacgccuacgucuucgucggcaccucccgcuacuccaagaaguucaagcccgagaucgccauccgccccaagguccgcgaccaggagggccgcaugaacuacuacuggacccucgucgagcccggcgacaagaucaccuucgaggccaccggcaaccucgucgucccccgcuacgccuucgccauggagcgcaacgccggcuccggcaucaucaucuccgacacccccguccacgacugcaacaccaccugccagacccccaagggcgccaucaacaccucccuccccuuccagaacauccaccccaucaccaucggcaagugccccaaguacgucaaguccaccaagcuccgccucgccaccggccuccgcaacguccccuccauccagucccgcggccucuucggcgccaucgccggcuucaucgagggcggcuggaccggcauggucgacggcugguacggcuaccaccaccagaacgagcagggcuccggcuacgccgccgaccucaaguccacccagaacgccaucgacgagaucaccaacaaggucaacuccgucaucgagaagaugaacacccaguucaccgccgucggcaaggaguucaaccaccucgagaagcgcaucgagaaccucaacaagaaggucgacgacggcuuccucgacaucuggaccuacaacgccgagcuccucguccuccucgagaacgagcgcacccucgacuaccacgacuccaacgucaagaaccucuacgagaagguccgcucccagcucaagaacaacgccaaggagaucggcaacggcugcuucgaguucuaccacaagugcgacaacaccugcauggaguccgucaagaacggcaccuacgacuaccccaaguacuccgaggaggccaagcucaaccgcgaggagaucgacggcgucaagcucgaguccacccgcaucuaccagauccucgccaucuacuccaccgucgccuccucccucguccucgucgucucccucggcgccaucuccuucuggaugugcuccaacggcucccuccagugccgcaucugcaucuga

SEQ ID NO: 100490 - RNA, 1701 nt, Artificial Sequence; identical to SEQ ID NO: 100423
  derived and/or modified CDS sequence (opt2) from hemagglutinin__InfluenzaA__ADE20878

SEQ ID NO: 100491 - RNA, 1701 nt, Artificial Sequence; identical to SEQ ID NO: 99807
  derived and/or modified CDS sequence (opt2) from hemagglutinin__InfluenzaA__ADE20888

SEQ ID NO: 100492 - RNA, 1701 nt, Artificial Sequence
  derived and/or modified CDS sequence (opt2) from hemagglutinin__InfluenzaA__ADE20898
augaaggccauccucgucguccuccucuacaccuucgccaccgccaacgccgacacccucugcaucggcuaccacgccaacaacuccaccgacaccgucgacaccauccucgagaagaacgucaccgucacccacuccgucaaccuccucgaggacaagcacaacggcaagcucugcaagcuccgcggcgucgccccccuccaccucggcaagugcaacaucgccggcuggauccucggcaaccccgagugcgagucccucuccaccgccuccuccugguccuacaucgucgagaccuccuccuccgacaacggcaccugcuaccccggcgacuucaucgacuacgaggagcuccgcgagcagcucuccuccgucuccuccuucgagcgcuucgagaucuuccccaagaccuccuccuggcccaaccacgacuccaacaagggcgucaccgccgccugcccccacgccggcgccaaguccuucuacaagaaccucaucuggcucgucaagaagggcaacuccuaccccaagcucuccaaguccuacaucaacgacaagggcaaggagauccucguccucuggggcauccaccaccccuccaccuccgccgaccagcagucccucuaccagaacgccgacgccuacgucuucgucggcaccucccgcuacuccaagaaguucaagcccgagaucgccauccgccccaagguccgcgaccaggagggccgcaugaacuacuacuggacccucgucgagcccggcgacaagaucaccuucgaggccaccggcaaccucgucgucccccgcuacgccuucgccauggagcgcaacgccggcuccggcaucaucaucuccgacacccccguccacgacugcaacaccaccugccagacccccaagggcgccaucaacaccucccuccccuuccagaacauccaccccaucaccaucggcaagugccccaaguacgucaaguccaccaagcuccgccucgccaccggccuccgcaacguccccuccauccagucccgcggccucuucggcgccaucgccggcuucaucgagggcggcuggaccggcauggucgacggcugguacggcuaccaccaccagaacgagcagggcuccggcuacgccgccgaccucaaguccacccagaacgccaucgacgagaucaccaacaaggucaacuccgucaucgagaagaugaacacccaguucaccgccgucggcaaggaguucaaccaccucgagaagcgcaucgagaaccucaacaagaaggucgacgacggcuuccucgacaucuggaccuacaacgccgagcuccucguccuccucgagaacgagcgcacccucgacuaccacgacuccaacgucaagaaccucuacgagaagguccgcucccagcucaagaacaacgccaaggagaucggcaacggcugcuucgaguucuaccacaagugcgacaacaccugcauggagggcgucaagaacggcaccuacgacuaccccaaguacuccgaggaggccaagcucaaccgcgaggagaucgacggcgucaagcucgaguccacccgcaucuaccagauccucgccaucuacuccaccgucgccuccucccucguccucgucgucucccucggcgccaucuccuucuggaugugcuccaacggcucccuccagugccgcaucugcaucuga

SEQ ID NO: 100493 - RNA, 1701 nt, Artificial Sequence; identical to SEQ ID NO: 100456
  derived and/or modified CDS sequence (opt2) from hemagglutinin__InfluenzaA__ADE20908

SEQ ID NO: 100494 - RNA, 1701 nt, Artificial Sequence
  derived and/or modified CDS sequence (opt2) from hemagglutinin__InfluenzaA__ADE20918
augaaggccauccucgucguccuccucuacaccuucgccaccgccaacgccgacacccucugcaucggcuaccacgccaacaacuccaccgacaccgucgacaccguccucgagaagaacgucaccgucacccacuccgucaacauccucgaggacaagcacaacggcaagcucugcaagcuccgcggcgucgccccccuccaccucggcaagugcaacaucgccggcuggauccucggcaaccccgagugcgagucccucuccaccgccuccuccugguccuacaucgucgagaccuccuccuccgacaacggcaccugcuaccccggcgacuucaucgacuacgaggagcuccgcgagcagcucuccuccgucuccuccuucgagcgcuucgagaucuuccccaagaccuccuccuggcccaaccacgacuccaacaagggcgucaccgccgccugcccccacgccggcgccaaguccuucuacaagaaccucaucuggcucgucaagaagggcaacuccuaccccaagcucuccaaguccuacaucaacgacaagggcaaggagguccucguccucuggggcauccaccaccccuccaccuccgccgaccagcagucccucuaccagaacgccgacgccuacgucuucgucggcaccucccgcuacuccaagaaguucaagcccgagaucgccauccgccccaagguccgcgaccaggagggccgcaugaacuacuacuggauccucgucgagcccggcgacaagaucaccuucgaggccaccggcaaccucgucgucccccgcuacgccuucgccauggagcgcaacgccggcuccggcaucaucaucuccgacacccccguccacgacugcaacaccaccugccagacccccaagggcgccaucaacaccucccuccccuuccagaacauccaccccaucaccaucggcaagugccccaaguacgucaaguccaccaagcuccgccucgccaccggccuccgcaacguccccuccauccagucccgcggccucuucggcgccaucgccggcuucaucgagggcggcuggaccggcauggucgacggcugguacggcuaccaccaccagaacgagcagggcuccggcuacgccgccgaccucaaguccacccagaacgccaucgacgagaucaccaacaaggucaacuccgucaucgagaagaugaacacccaguucaccgccgucggcaaggaguucaaccaccucgagaagcgcaucgagaaccucaacaagaaggucgacgacggcuuccucgacaucuggaccuacaacgccgagcuccucguccuccucgagaacgagcgcacccucgacuaccacgacuccaacgucaagaaccucuacgagaagguccgcucccagcucaagaacaacgccaaggagaucggcaacggcugcuucgaguucuaccacaagugcgacaacaccugcauggaguccgucaagaacggcaccuacgacuaccccaaguacuccgaggaggccaagcucaaccgcgaggagaucgacggcgucaagcucgaguccacccgcaucuaccagauccucgccaucuacuccaccgucgccuccucccucguccucgucgucucccucggcgccaucuccuucuggaugugcuccaacggcucccuccagugccgcaucugcaucuga

SEQ ID NO: 100495 - RNA, 1701 nt, Artificial Sequence; identical to SEQ ID NO: 99058
  derived and/or modified CDS sequence (opt2) from hemagglutinin__InfluenzaA__ADE20928

SEQ ID NO: 100496 - RNA, 1701 nt, Artificial Sequence
  derived and/or modified CDS sequence (opt2) from hemagglutinin__InfluenzaA__ADE20948
augaaggccauccucgucguccuccucuacaccuucgccaccgccaacgccgacacccucugcaucggcuaccacgccaacaacuccaccgacaccgucgacaccguccucgagaagaacgucaccgucacccacuccgucaaccuccucgaggacaagcacaacggcaagcucugcaagcuccgcggcgucgccccccuccaccucggcaagugcaacaucgccggcuggauccucggcaaccccgagugcgagucccucuccaccgccuccuccugguccuacaucgucgagaccuccuccuccgacaacggcaccugcuaccccggcgacuucaucaacuacgaggagcuccgcgagcagcucuccuccgucuccuccuucgagcgcuucgagaucuuccccaagaccuccuccuggcccaaccacgacuccaacaagggcgucaccgccgccugcccccacgccggcgccaaguccuucuacaagaaccucaucuggcucgucaagaagggcaacuccuaccccaagcucuccaaguccuacaucaacgacaagggcaaggagguccucguccucuggggcauccaccaccccuccaccuccgccgaccagcagucccucuaccagaacgccgacuccuacgucuucgucggcaccucccgcuacuccaagaaguucaagcccgagaucgccauccgccccaagguccgcgaccaggagggccgcaugaacuacuacuggacccucgucgagcccggcgacaagaucaccuucgaggccaccggcaaccucgucgucccccgcuacgccuucgccauggagcgcaacgccggcuccggcaucaucaucuccgacacccccguccacgacugcaacaccaccugccagacccccaagggcgccaucaacaccucccuccccuuccagaacauccaccccaucaccaucggcaagugccccaaguacgucaaguccaccaagcuccgccucgccaccggccuccgcaacguccccuccauccagucccgcggccucuucggcgccaucgccggcuucaucgagggcggcuggaccggcauggucgacggcugguacggcuaccaccaccagaacgagcagggcuccggcuacgccgccgaccucaaguccacccagaacgccaucgacaagaucaccaacaaggucaacuccgucaucgagaagaugaacacccaguucaccgccgucggcaaggaguucaaccaccucgagaagcgcaucgagaaccucaacaagaaggucgacgacggcuuccucgacaucuggaccuacaacgccgagcuccucguccuccucgagaacgagcgcacccucgacuaccacgacuccaacgucaagaaccucuacgagaagguccgcucccagcucaagaacaacgccaaggagaucggcaacggcugcuucgaguucuaccacaagugcgacaacaccugcauggaguccgucaagaacggcaccuacgacuaccccaaguacuccgaggaggccaagcucaaccgcgaggagaucgacggcgucaagcucgaguccacccgcaucuaccagauccucgccaucuacuccaccgucgccuccucccucguccucgucgucucccucggcgccaucuccuucuggaugugcuccaacggcucccuccagugccgcaucugcaucuga

SEQ ID NO: 100497 - RNA, 1701 nt, Artificial Sequence
  derived and/or modified CDS sequence (opt2) from hemagglutinin__InfluenzaA__ADE20968
augaaggccauccucgucguccuccucuacaccuucgccaccgccaacgccgacacccucugcaucggcuaccacgccaacaacuccaccgacaccgucgacaccguccucgagaagaacgucaccgucacccacuccgucaaccuccucgaggacaagcacaacggcaagcucugcaagcuccgcggcgaggccccccuccaccucggcaagugcaacaucgccggcuggauccucggcaaccccgagugcgagucccucuccaccgccuccuccugguccuacaucgucgagaccuccuccuccgacaacggcaccugcuaccccggcgacuucaucaacuacgaggagcuccgcgagcagcucuccuccgucuccuccuucgagcgcuucgagaucuuccccaagaccuccuccuggcccaaccacgacuccaacaagggcgucaccgccgccugcccccacuccggcgccaaguccuucuacaagaaccucaucuggcucgucaagaagggcaacuccuaccccaagcucuccaaguccuacaucaacgacaagggcaaggagguccucguccucuggggcauccaccaccccuccaccuccgccgaccagcagucccucuaccagaacgccgacgccuacgucuucgucggcaccucccgcuacuccaagaaguucaagcccgagaucgccauccgccccaagguccgcgaccaggagggccgcaugaacuacuacuggacccucgucgagcccggcgacaagaucaccuucgaggccaccggcaaccucgucgucccccgcuacgccuucgccauggagcgcaacgccggcuccggcaucaucaucuccgacacccccguccacgacugcaacaccaccugccagacccccaagggcgccaucaacaccucccuccccuuccagaacauccaccccaucaccaucggcaagugccccaaguacgucaaguccaccaagcuccgccucgccaccggccuccgcaacguccccuccauccagucccgcggccucuucggcgccaucgccggcuucaucgagggcggcuggaccggcauggucgacggcugguacggcuaccaccaccagaacgagcagggcuccggcuacgccgccgaccucaaguccacccagaacgccaucgacaagaucaccaacaaggucaacuccgucaucgagaagaugaacacccaguucaccgccgucggcaaggaguucaaccaccucgagaagcgcaucgagaaccucaacaagaaggucgacgacggcuuccucgacaucuggaccuacaacgccgagcuccucguccuccucgagaacgagcgcacccucgacuaccacgacuccaacgucaagaaccucuacgagaagguccgcucccagcucaagaacaacgccaaggagaucggcaacggcugcuucgaguucuaccacaagugcgacaacaccugcauggaguccgucaagaacggcaccuacgacuaccccaaguacuccgaggaggccaagcucaaccgcgaggagaucgacggcgucaagcucgaguccacccgcaucuaccagauccucgccaucuacuccaccgucgccuccucccucguccucgucgucucccucggcgccaucuccuucuggaugugcuccaacggcucccuccagugccgcaucugcaucuga

SEQ ID NO: 100498 - RNA, 1701 nt, Artificial Sequence; identical to SEQ ID NO: 99869
  derived and/or modified CDS sequence (opt2) from hemagglutinin__InfluenzaA__ADE20978

SEQ ID NO: 100499 - RNA, 1701 nt, Artificial Sequence
  derived and/or modified CDS sequence (opt2) from hemagglutinin__InfluenzaA__ADE20988
augaaggccauccucgucguccuccucuacaccuucgccaccgccaacgccgacacccucugcaucggcuaccacgccaacaacuccaccgacaccgucgacaccguccucgagaagaacgucaccgucacccacuccgucaaccuccucgaggacaagcacaacggcaagcucugcaagcuccgcggcgucgccccccuccaccucggcaagugcaacaucgccggcuggauccucggcaaccccgagugcgagucccucuccaccgccuccuccugguccuacaucgucgagaccuccuccuccgacaacggcaccugcuaccccggcgacuucaucgacuacgaggagcuccgcgagcagcucuccuccgucuccuccuucgagcgcuucgagaucuuccccaagaccuccuccuggcccaaccacgacuccaacaagggcgucaccgccgccugcccccacgccggcgccaaguccuucuacaagaaccucaucuggcucgucaagaagggcaacuccuaccccaagcucuccaaguccuacaucaacgacaagggcaaggagguccucguccucuggggcauccaccaccccuccaccuccaccgaccagcagucccucuaccagaacgccgacgccuacgucuucgucggcaccucccgcuacuccaagaaguucaagcccgagaucgccauccgccccaagguccgcgaccaggagggccgcaugaacuacuacuggacccucgucgagcccggcgacaagaucaccuucgaggccaccggcaaccucgucgucccccgcuacgccuucgccauggagcgcaacgccggcuccggcaucaucaucuccgacacccccguccacgacugcaacaccaccugccagacccccaagggcgccaucaacaccucccuccccuuccagaacauccaccccaucaccaucggcaagugccccaaguacgucaaguccaccaagcuccgccucgccaccggccuccgcaacauccccuccauccagucccgcggccucuucggcgccaucgccggcuucaucgagggcggcuggaccggcauggucgacggcugguacggcuaccaccaccagaacgagcagggcuccggcuacgccgccgaccucaaguccacccagaacgccaucgacgagaucaccaacaaggucaacuccgucaucgagaagaugaacacccaguucaccgccgucggcaaggaguucaaccaccucgagaagcgcaucgagaaccucaacaagaaggucgacgacggcuuccucgacaucuggaccuacaacgccgagcuccucguccuccucgagaacgagcgcacccucgacuaccacgacuccaacgucaagaaccucuacgagaagguccgcucccagcucaagaacaacgccaaggagaucggcaacggcugcuucgaguucuaccacaagugcgacaacaccugcauggaguccgucaagaacggcaccuacgacuaccccaaguacuccgaggaggccaagcucaagcgcgaggagaucgacggcgucaagcucgaguccacccgcaucuaccagauccucgccaucuacuccaccgucgccuccucccucguccucgucgucucccucggcgccaucuccuucuggaugugcuccaacggcucccuccagugccgcaucugcaucuga

SEQ ID NO: 100500 - RNA, 1701 nt, Artificial Sequence; identical to SEQ ID NO: 99869
  derived and/or modified CDS sequence (opt2) from hemagglutinin__InfluenzaA__ADE20998

SEQ ID NO: 100501 - RNA, 1701 nt, Artificial Sequence; identical to SEQ ID NO: 100033
  derived and/or modified CDS sequence (opt2) from hemagglutinin__InfluenzaA__ADE21008

SEQ ID NO: 100502 - RNA, 1701 nt, Artificial Sequence
  derived and/or modified CDS sequence (opt2) from hemagglutinin__InfluenzaA__ADE21018
augaaggccauccucgucguccuccucuacaccuucgccaccgccaacgccgacacccucugcaucggcuaccacgccaacaacuccaccgacaccgucgacaccguccucgagaagaacgucaccgucacccacuccgucaaccuccucgaggacaagcacaacggcaagcucugcaagcuccgcggcgucgccccccuccaccucggcaagugcaacaucgccggcuggauccucggcaaccccgagugcgagucccucuccaccgccuccuccugguccuacaucgucgagaccuccuccuccgacaacggcaccugcuaccccggcgacuucaucgacuacgaggagcuccgcgagcagcucuccuccgucuccuccuucgagcgcuucgagaucuuccccaagaccuccuccuggcccaaccacgacuccaacaagggcgucaccaccgccugcccccacgccggcgccaaguccuucuacaagaaccucaucuggcucgucaagaagggcaacuccuaccccaagcucuccaaguccuacaucaacgacaagggcaaggagguccucguccucuggggcauccaccaccccuccaccuccaccgaccagcagucccucuaccagaacgccgacgccuacgucuucgucggcaccucccgcuacuccaagaaguucaagcccgagaucgccauccgccccaagguccgcgaccaggagggccgcaugaacuacuacuggacccucgucgagcccggcgacaagaucaccuucgaggccaccggcaaccucgucgucccccgcuacgccuucgccauggagcgcaacgccggcuccggcaucaucaucuccgacacccccguccacgacugcaacaccaccugccagacccccaagggcgccaucaacaccucccuccccuuccagaacauccaccccaucaccaucggcaagugccccaaguacgucaaguccaccaagcuccgccucgccaccggccuccgcaacauccccuccauccagucccgcggccucuucggcgccaucgccggcuucaucgagggcggcuggaccggcauggucgacggcugguacggcuaccaccaccagaacgagcagggcuccggcuacgccgccgaccucaaguccacccagaacgccaucgacgagaucaccaacaaggucaacuccgucaucgagaagaugaacacccaguucaccgccgucggcaaggaguucaaccaccucgagaagcgcaucgagaaccucaacaagaaggucgacgacggcuuccucgacaucuggaccuacaacgccgagcuccucguccuccucgagaacgagcgcacccucgacuaccacgacuccaacgucaagaaccucuacgagaagguccgcucccagcucaagaacaacgccaaggagaucggcaacggcugcuucgaguucuaccacaagugcgacaacaccugcauggaguccgucaagaacggcaccuacgacuaccccaaguacuccgaggaggccaagcucaaccgcgaggagaucgacggcgucaagcucgaguccacccgcaucuaccagauccucgccaucuacuccaccgucgccuccucccucguccucgucgucucccucggcgccaucuccuucuggaugugcuccaacggcucccuccagugccgcaucugcaucuga

SEQ ID NO: 100503 - RNA, 1701 nt, Artificial Sequence; identical to SEQ ID NO: 100443
  derived and/or modified CDS sequence (opt2) from hemagglutinin__InfluenzaA__ADE21028

SEQ ID NO: 100504 - RNA, 1701 nt, Artificial Sequence; identical to SEQ ID NO: 100433
  derived and/or modified CDS sequence (opt2) from hemagglutinin__InfluenzaA__ADE21038

SEQ ID NO: 100505 - RNA, 1701 nt, Artificial Sequence; identical to SEQ ID NO: 100456
  derived and/or modified CDS sequence (opt2) from hemagglutinin__InfluenzaA__ADE21048

SEQ ID NO: 100506 - RNA, 1701 nt, Artificial Sequence
  derived and/or modified CDS sequence (opt2) from hemagglutinin__InfluenzaA__ADE21058
augaaggccauccucgucguccuccucuacaccuucgccaccgccaacgccgacacccucugcaucggcuaccacgccaacaacuccaccgacaccgucgacaccguccucgagaagaacgucaccgucacccacuccgucaaccuccucgaggacaagcacaacggcaagcucugcaagcuccgcggcgucgccccccuccaccucggcaagugcaacaucgccggcuggauccucggcaaccccgagugcgagucccucuccaccgccuccuccugguccuacaucgucgagaccuccuccuccgacaacggcaccugcuaccccggcgacuucaucgacuacgaggagcuccgcgagcagcucuccuccgucuccuccuucgagcgcuucgagaucuuccccaagaccuccuccuggcccaaccacgacuccaacaagggcgucaccgccgccugcccccacgccggcgccaaguccuucuacaagaaccucaucuggcucgucaagaagggcaacuccuaccccaagcucuccaaguccuacaucaacgacaagggcaaggagguccucguccucuggggcauccaccaccccuccaccuccgccgaccagcagucccucuaccagaacgccgacgccuacgucuucgucggcaccucccgcuacuccaagaaguucaagcccgagaucgccauccgccccaagguccgcgaccaggagggccgcaucaacuacuacuggacccucgucgagcccggcgacaagaucaccuucgaggccaccggcaaccucgucgucccccgcuacgccuucgccauggagcgcaacgccggcuccggcaucaucaucuccgacacccccgcccacgacugcaacaccaccugccagacccccaagggcgccaucaacaccucccuccccuuccagaacauccaccccaucaccaucggcaagugccccaaguacgucaaguccaccaagcuccgccucgccaccggccuccgcaacguccccuccauccagucccgcggccucuucggcgccaucgccggcuucaucgagggcggcuggaccggcauggucgacggcugguacggcuaccaccaccagaacgagcagggcuccggcuacgccgccgaccucaaguccacccagaacgccaucgacaagaucaccaacaaggucaacuccgucaucgagaagaugaacacccaguucaccgccgucggcaaggaguucaaccaccucgagaagcgcaucgagaaccucaacaagaaggucgacgacggcuuccucgacaucuggaccuacaacgccgagcuccucguccuccucgagaacgagcgcacccucgacuaccacgacuccaacgucaagaaccucuacgagaagguccgcucccagcucaagaacaacgccaaggagaucggcaacggcugcuucgaguucuaccacaagugcgacaacaccugcauggaguccgucaagaacggcaccuacgacuaccccaaguacuccgaggaggccaagcucaaccgcgaggagaucgacggcgucaagcucgaguccacccgcaucuaccagauccucgccaucuacuccaccgucgccuccucccucguccucgucgucucccucggcgccaucuccuucuggaugugcuccaacggcucccuccagugccgcaucugcaucuga

SEQ ID NO: 100507 - RNA, 1701 nt, Artificial Sequence
  derived and/or modified CDS sequence (opt2) from hemagglutinin__InfluenzaA__ADE21068
augaaggccauccucgucguccuccucuacaccuucgccaccgccaacgccgacacccucugcaucggcuaccacgccaacaacuccaccgacaccgucgacaccguccucgagaagaacgucaccgucacccacuccgucaaccuccucgaggacaagcacaacggcaagcucugcaagcuccgcggcgucgccccccuccaccucggcaagugcaacaucgccggcuggauccucggcaaccccgagugcgagucccucuccaccgccuccuccugguccuacaucgucgagaccuccuccuccgacaacggcaccugcuaccccggcgacuucaucgacuacgaggagcuccgcgagcagcucuccuccgucuccuccuucgagcgcuucgagaucuuccccaagaccuccuccuggcccaaccacgacuccaacaagggcgucaccgccgccugcccccacgccggcgccaaguccuucuacaagaaccucaucuggcucgucaagaagggcaacuccuaccccaagcucuccaaguccuacaucaacgacaagggcaaggagguccucguccucuggggcauccaccaccccuccaccuccgccgaccagcagucccucuaccagaacgccgacgccuacgucuucgucggcaccucccgcuacuccaagaaguucaagcccgagaucgccauccgccccaagguccgcgagcaggagggccgcaugaacuacuacuggacccucgucgagcccggcgacaagaucaccuucgaggccaccggcaaccucgucgucccccgcuacgccuucgccauggagcgcaacgccggcuccggcaucaucaucuccgacacccccguccacgacugcaacaccaccugccagacccccaagggcgccaucaacaccucccuccccuuccagaacauccacuccaucaccaucggcaagugccccaaguacgucaaguccaccaagcuccgccucgccaccggccuccgcaacguccccuccauccagucccgcggccucuucggcgccaucgccggcuucaucgagggcggcuggaccggcauggucgacggcugguacggcuaccaccaccagaacgagcagggcuccggcuacgccgccgaccucaaguccacccagaacgccaucgacgagaucaccaacaaggucaacuccgucaucgagaagaugaacacccaguucaccgccgucggcaaggaguucaaccaccucgagaagcgcaucgagaaccucaacaagaaggucgacgacggcuuccucgacaucuggaccuacaacgccgagcuccucguccuccucgagaacgagcgcacccucgacuaccacgacuccaacgucaagaaccucuacgagaagguccgcucccagcucaagaacaacgccaaggagaccggcaacggcugcuucgaguucuaccacaagugcgacaacaccugcauggaguccgucaagaacggcaccuacgacuaccccaaguacuccgaggaggccaagcucaaccgcgaggagaucgacggcgucaagcucgaguccacccgcaucuaccagauccucgccaucuacuccaccgucgccuccucccucguccucgucgucucccucggcgccaucuccuucuggaugugcuccaacggcucccuccagugccgcaucugcaucuga

SEQ ID NO: 100508 - RNA, 1698 nt, Artificial Sequence
  derived and/or modified CDS sequence (opt2) from hemagglutinin__InfluenzaA__ADE28761
augaaggucaagcuccucguccuccucugcaccuucaccgccaccuacgccgacaccaucugcaucggcuaccacgccaacaacuccaccgacaccgucgacaccguccucgagaagaacgucaccgucacccacuccgucaaccuccucgagaacucccacaacggcaagcucugccuccucaagggcaucgccccccuccagcucggcaacugcuccgucgccggcuggauccucggcaaccccgagugcgagcuccucaucuccaaggaguccugguccuacaucgucgagaagcccaaccccgagaacggcaccugcuaccccggccacuucgccgacuacgaggagcuccgcgagcagcucuccuccgucuccuccuucgagcgcuucgagaucuuccccaaggaguccuccuggcccaaccacaccgucaccggcgucuccgccuccugcucccacaacggcgaguccuccuucuaccgcaaccuccucuggcucaccggcaagaacggccucuaccccaaccucuccaaguccuacgccaacaacaaggagaaggagguccucguccucuggggcguccaccacccccccaacaucggcaaccagaagacccucuaccacaccgagaacgccuacgucuccgucgucuccucccacuacucccgcaaguucacccccgagaucgccaagcgccccaagguccgcgaccaggagggccgcaucaacuacuacuggacccuccucgagcccggcgacaccaucaucuucgaggccaacggcaaccucaucgccccccgcuacgccuucgcccucucccgcggcuucggcuccggcaucaucaacuccaacgcccccauggacaagugcgacgccaagugccagaccccccagggcgccaucaacuccucccuccccuuccagaacguccaccccgucaccaucggcgagugccccaaguacguccgcuccgccaagcuccgcauggucaccggccuccgcaacauccccuccauccagucccgcggccucuucggcgccaucgccggcuucaucgagggcggcuggaccggcauggucgacggcugguacggcuaccaccaccagaacgagcagggcuccggcuacgccgccgaccagaaguccacccagaacgccaucaacggcaucaccaacaaggucaacuccgucaucgagaagaugaacacccaguucaccgccgucggcaaggaguucaacaagcucgagcgccgcauggagaaccucaacaagaaggucgacgacggcuucaucgacaucuggaccuacaacgccgagcuccucguccuccucgagaacgagcgcacccucgacuuccacgaguccaacgucaagaaccucuacgagaaggucaagucccagcucaagaacaacgccaaggagaucggcaacggcugcuucgaguucuaccacaagugcaacgacgagugcauggaguccgucaagaacggcaccuacgacuaccccaaguacuccgaggaguccaagcucaaccgcgagaagaucgacggcgucaagcucgaguccauggaggucuaccagauccucgccaucuacuccaccgucgccuccucccucguccuccucgucucccucggcgccaucuccuucuggaugugcuccaacggcucccuccagugccgcaucugcaucuga

SEQ ID NO: 100509 - RNA, 1701 nt, Artificial Sequence; identical to SEQ ID NO: 98885
  derived and/or modified CDS sequence (opt2) from hemagglutinin__InfluenzaA__ADE28780

SEQ ID NO: 100510 - RNA, 1701 nt, Artificial Sequence; identical to SEQ ID NO: 100293
  derived and/or modified CDS sequence (opt2) from hemagglutinin__InfluenzaA__ADE28790

SEQ ID NO: 100511 - RNA, 1701 nt, Artificial Sequence; identical to SEQ ID NO: 100477
  derived and/or modified CDS sequence (opt2) from hemagglutinin__InfluenzaA__ADE28800

SEQ ID NO: 100512 - RNA, 1701 nt, Artificial Sequence; identical to SEQ ID NO: 99869
  derived and/or modified CDS sequence (opt2) from hemagglutinin__InfluenzaA__ADE28810

SEQ ID NO: 100513 - RNA, 1701 nt, Artificial Sequence
  derived and/or modified CDS sequence (opt2) from hemagglutinin__InfluenzaA__ADE28820
augaaggccauccucgucguccuccucuacaccuucgccaccgccaacgccgacacccucugcaucggcuaccacgccaacaacuccaccgacaccgucgacaccguccucgagaagaacgucaccgucacccacuccgucaaccuccucgaggacaagcacaacggcaagcucugcaagcuccgcggcgucgccccccuccaccucggcaagugcaacaucgccggcuggauccucggcucccccgagugcgagucccucuccaccgccuccuccugguccuacaucgucgagaccuccuccuccgacaacggcaccugcuaccccggcgacuucaucgacuacgaggagcuccgcgagcagcucuccuccgucuccuccuucgagcgcuucgagaucuuccccaagaccuccuccuggcccaaccacgacuccaacaagggcgucaccgccgccugcccccacgccggcgccaaguccuucuacaagaaccucaucuggcucgucaagaagggcaacuccuaccccaagcucuccaaguccuacaucaacgacaagggcaaggagguccucguccucuggggcauccaccaccccuccaccuccgccgaccagcagucccucuaccagaacgccgacgccuacgucuucgucggcaccucccgcuacuccaagaaguucaagcccgagaucgccauccgccccaagguccgcgaccaggagggccgcaugaacuacuacuggacccucgucgagcccggcgacaagaucaccuucgaggccaccggcaaccucgucgucccccgcuacgccuucgccauggagcgcaacgccggcuccggcaucaucaucuccgacacccccguccacgacugcaacaccaccugccagacccccaagggcgccaucaacaccucccuccccuuccagaacauccaccccaucaccaucggcaagugccccaaguacgucaaguccaccaagcuccgccucgccaccggccuccgcaacguccccuccauccagucccgcggccucuucggcgccaucgccggcuucaucgagggcggcuggaccggcauggucgacggcugguacggcuaccaccaccagaacgagcagggcuccggcuacgccgccgaccucaaguccacccagaacgccaucgacaagaucaccaacaaggucaacuccgucaucgagaagaugaacacccaguucaccgccgucggcaaggaguucaaccaccucgagaagcgcaucgagaaccucaacaagaaggucgacgacggcuuccucgacaucuggaccuacaacgccgagcuccucguccuccucgagaacgagcgcacccucgacuaccacgacuccaacgucaagaaccucuacgagaagguccgcucccagcucaagaacaacgccaaggagaucggcaacggcugcuucgaguucuaccacaagugcgacaacaccugcauggaguccgucaagaacggcaccuacgacuaccccaaguacuccgaggaggccaagcucaaccgcgaggagaucgacggcgucaagcucgaguccacccgcaucuaccagauccucgccaucuacuccaccgucgccuccucccucguccucgucgucucccucggcgccaucuccuucuggaugugcuccaacggcucccuccagugccgcaucugcaucuga

SEQ ID NO: 100514 - RNA, 1701 nt, Artificial Sequence; identical to SEQ ID NO: 98885
  derived and/or modified CDS sequence (opt2) from hemagglutinin__InfluenzaA__ADE28830

SEQ ID NO: 100515 - RNA, 1701 nt, Artificial Sequence; identical to SEQ ID NO: 98885
  derived and/or modified CDS sequence (opt2) from hemagglutinin__InfluenzaA__ADE28840

SEQ ID NO: 100516 - RNA, 1701 nt, Artificial Sequence; identical to SEQ ID NO: 98885
  derived and/or modified CDS sequence (opt2) from hemagglutinin__InfluenzaA__ADE28850

SEQ ID NO: 100517 - RNA, 1701 nt, Artificial Sequence; identical to SEQ ID NO: 98885
  derived and/or modified CDS sequence (opt2) from hemagglutinin__InfluenzaA__ADE28881

SEQ ID NO: 100518 - RNA, 1701 nt, Artificial Sequence; identical to SEQ ID NO: 98885
  derived and/or modified CDS sequence (opt2) from hemagglutinin__InfluenzaA__ADE28891

SEQ ID NO: 100519 - RNA, 1701 nt, Artificial Sequence; identical to SEQ ID NO: 100388
  derived and/or modified CDS sequence (opt2) from hemagglutinin__InfluenzaA__ADE28911

SEQ ID NO: 100520 - RNA, 1701 nt, Artificial Sequence; identical to SEQ ID NO: 99869
  derived and/or modified CDS sequence (opt2) from hemagglutinin__InfluenzaA__ADE28921

SEQ ID NO: 100521 - RNA, 1701 nt, Artificial Sequence; identical to SEQ ID NO: 99869
  derived and/or modified CDS sequence (opt2) from hemagglutinin__InfluenzaA__ADE28931

SEQ ID NO: 100522 - RNA, 1701 nt, Artificial Sequence; identical to SEQ ID NO: 99058
  derived and/or modified CDS sequence (opt2) from hemagglutinin__InfluenzaA__ADE28951

SEQ ID NO: 100523 - RNA, 1701 nt, Artificial Sequence
  derived and/or modified CDS sequence (opt2) from hemagglutinin__InfluenzaA__ADE28961
augaaggccauccucgucguccuccucuacaccuucgccaccgccaacgccgacacccucugcaucggcuaccacgccaacaacuccaccgacaccgucgacaccguccucgagaagaacgucaccgucacccacuccgucaaccuccucgaggacaagcacaacggcaagcucugcaagcuccgcggcgucgccccccuccaccucggcaagugcaacgucgccggcuggauccucggcaaccccgagugcgagucccucuccaccgccuccuccugguccuacaucgucgagaccuccuccuccgacaacggcaccugcuaccccggcgacuucaucgacuacgaggagcuccgcgagcagcucuccuccgucuccuccuucgagcgcuucgagaucuuccccaagaccuccuccuggcccaaccacgacuccaacaagggcgucaccgccgccugcccccacgccggcgccaaguccuucuacaagaaccucaucuggcucgucaagaagggcaacuccuaccccaagcucuccaaguccuacaucaacgacaagggcaaggagguccucguccucuggggcauccaccaccccuccaccuccgccgaccagcagucccucuaccagaacgccgacgccuacgucuucgucggcaccucccgcuacuccaagaaguucaagcccgagaucgccauccgccccaagguccgcgaccaggagggccgcaugaacuacuacuggacccucgucgagcccggcgacaagaucaccuucgaggccaccggcaaccucgucgucccccgcuacgccuucgccauggagcgcaacgccggcuccggcaucaucaucuccgacacccccguccacgacugcaacaccaccugccagacccccaagggcgccaucaacaccucccuccccuuccagaacauccaccccaucaccaucggcaagugccccaaguacgucaaguccaccaagcuccgccucgccaccggccuccgcaacguccccuccauccagucccgcggccucuucggcgccaucgccggcuucaucgagggcggcuggaccggcauggucgacggcugguacggcuaccaccaccagaacgagcagggcuccggcuacgccgccgaccucaaguccacccagaacgccaucgacgagaucaccaacaaggucaacuccgucaucgagaagaugaacacccaguucaccgccgucggcaaggaguucaaccaccucgagaagcgcaucgagaaccucaacaagaaggucgacgacggcuuccucgacaucuggaccuacaacgccgagcuccucguccuccucgagaacgagcgcacccucgacuaccacgacuccaacgucaagaaccucuacgagaagguccgcucccagcucaagaacaacgccaaggagaucggcaacggcugcuucgaguucuaccacaagugcgacaacaccugcauggaguccgucaagaacggcaccuacgacuaccccaaguacuccgaggaggccaagcucaaccgcgaggagaucgacggcgucaagcucgaguccacccgcaucuaccagauccucgccaucuacuccaccgucgccuccucccucguccucgucgucucccucggcgccaucuccuucuggaugugcuccaacggcucccuccagugccgcaucugcaucuga

SEQ ID NO: 100524 - RNA, 1701 nt, Artificial Sequence; identical to SEQ ID NO: 100409
  derived and/or modified CDS sequence (opt2) from hemagglutinin__InfluenzaA__ADE28971

SEQ ID NO: 100525 - RNA, 1701 nt, Artificial Sequence
  derived and/or modified CDS sequence (opt2) from hemagglutinin__InfluenzaA__ADE28981
augaaggccauccucgucguccuccucuacaccuucgccaccgccaacgccgacacccucugcaucggcuaccacgccaacaacuccaccgagaccgucgacaccguccucgagaagaacgucaccgucacccacuccgucaaccuccucgaggacaagcacaacggcaagcucugcaagcuccgcggcgucgccccccuccaccucggcaagugcaacaucgccggcuggauccucggcaaccccgagugcgagucccucuccaccgccuccuccugguccuacaucgucgagaccuccuccuccgacaacggcaccugcuaccccggcgacuucaucgacuacgaggagcuccgcgagcagcucuccuccgucuccuccuucgagcgcuucgagaucuuccccaagaccuccuccuggcccaaccacgacuccaacaagggcgucaccgccgccugcccccacgccggcgccaaguccuucuacaagaaccucaucuggcucgucaagaagggcaacuccuaccccaagcucuccaaguccuacaucaacgacaagggcaaggagguccucguccucuggggcauccaccaccccuccaccuccgccgaccagcagucccucuaccagaacgccgacgccuacgucuucgucggcaccucccgcuacuccaagaaguucaagcccgagaucgccauccgccccaagguccgcgaccaggagggccgcaugaacuacuacuggacccucgucgagcccggcgacaagaucaccuucgaggccaccggcaaccucgucgucccccgcuacgccuucgccauggagcgcaacgccggcuccggcaucaucaucuccgacacccccguccacgacugcaacaccaccugccagacccccaagggcgccaucaacaccucccuccccuuccagaacauccaccccaucaccaucggcaagugccccaaguacgucaaguccaccaagcuccgccucgccaccggccuccgcaacguccccuccauccagucccgcggccucuucggcgccaucgccggcuucaucgagggcggcuggaccggcauggucgacggcugguacggcuaccaccaccagaacgagcagggcuccggcuacgccgccgaccucaaguccacccagaacgccaucgacaagaucaccaacaaggucaacuccgucaucgagaagaugaacacccaguucaccgccgucggcaaggaguucaaccaccucgagaagcgcaucgagaaccucaacaagaaggucgacgacggcuuccucgacaucuggaccuacaacgccgagcuccucguccuccucgagaacgagcgcacccucgacuaccacgacuccaacgucaagaaccucuacgagaagguccgcucccagcucaagaacaacgccaaggagaucggcaacggcugcuucgaguucuaccacaagugcgacaacaccugcauggaguccgucaagaacggcaccuacgacuaccccaaguacuccgaggaggccaagcucaaccgcgaggagaucgacggcgucaagcucgaguccacccgcaucuaccagauccucgccaucuacuccaccgucgccuccucccucguccucgucgucucccucggcgccaucuccuucuggaugugcuccaacggcucccuccagugccgcaucugcaucuga

SEQ ID NO: 100526 - RNA, 1701 nt, Artificial Sequence; identical to SEQ ID NO: 99869
  derived and/or modified CDS sequence (opt2) from hemagglutinin__InfluenzaA__ADE28991

SEQ ID NO: 100527 - RNA, 1701 nt, Artificial Sequence
  derived and/or modified CDS sequence (opt2) from hemagglutinin__InfluenzaA__ADE29001
augaaggccauccucgucguccuccucuacaccuucgccaccgccaacgccgacacccucugcaucggcuaccacgccaacaacuccaccgacaccgucgacaccguccucgagcgcaacgucaccgucacccacuccgucaaccuccucgaggacaagcacaacggcaagcucugcaagcucaagggcgucgccccccuccaccucggcaagugcaacaucgccggcuggauccucggcaaccccgagugcgagucccucuccaccgccuccuccugguccuacaucgucgagaccuccuccuccgacaacggcaccugcuaccccggcgacuucaucgacuacgaggagcuccgcgagcagcucuccuccgucuccuccuucgagcgcuucgagaucuuccccaagaccuccuccuggcccaaccacgacuccaacaagggcgucaccgccgccugcccccacgccggcgccaaguccuucuacaagaaccucaucuggcucgucaagaagggcaacuccuaccccaagcucuccaaguccuacaucaacgacaagggcaaggagguccucguccucuggggcauccaccaccccuccaccuccgccgaccagcagucccucuaccagaacgccgacgccuacgucuucgucggcaccucccgcuacuccaagaaguucaagcccgagaucgccauccgccccaagguccgcgaccaggagggccgcaugaacuacuacuggacccucgucgagcccggcgacaagaucaccuucgaggccaccggcaaccucgucgucccccgcuacgccuucgccauggagcgcaacgccggcuccggcaucaucaucuccgacacccccguccacgacugcaacaccaccugccagacccccaagggcgccaucaacaccucccuccccuuccagaacauccaccccaucaccaucggcaagugccccaaguacgucaaguccaccaagcuccgccucgccaccggccuccgcaacguccccuccauccagucccgcggccucuucggcgccaucgccggcuucaucgagggcggcuggaccggcauggucgacggcugguacggcuaccaccaccagaacgagcagggcuccggcuacgccgccgaccucaaguccacccagaacgccaucgacgagaucaccaacaaggucaacuccgucaucgagaagaugaacacccaguucaccgccgucggcaaggaguucaaccaccucgagaagcgcaucgagaaccucaacaagaaggucgacgacggcuuccucgacaucuggaccuacaacgccgagcuccucguccuccucgagaacgagcgcacccucgacuaccacgacuccaacgucaagaaccucuacgagaagguccgcucccagcucaagaacaacgccaaggagaucggcaacggcugcuucgaguucuaccacaagugcgacaacaccugcauggaguccgucaagaacggcaccuacgacuaccccaaguacuccgaggaggccaagcucaaccgcgaggagaucgacggcgucaagcucgaguccacccgcaucuaccagauccucgccaucuacuccaccgucgccuccucccucguccucgucgucucccucggcgccaucuccuucuggaugugcuccaacggcucccuccagugccgcaucugcaucuga

SEQ ID NO: 100528 - RNA, 1701 nt, Artificial Sequence; identical to SEQ ID NO: 98947
  derived and/or modified CDS sequence (opt2) from hemagglutinin__InfluenzaA__ADE29011

SEQ ID NO: 100529 - RNA, 1701 nt, Artificial Sequence
  derived and/or modified CDS sequence (opt2) from hemagglutinin__InfluenzaA__ADE29021
augaaggccauccucgucguccuccucuacaccuucgccaccgccaacgccgacacccucugcaucggcuaccacgccaacaacuccaccgacaccgucgacaccguccucgagaagaacgucaccgucacccacuccgucaaccuccucgaggacaagcacaacggcaagcucugcaagcuccgcggcgucgccccccuccaccucggcaagugcaacaucgccggcuggauccucggcaaccccgagugcgagucccucuccaccgccuccuccugguccuacaucgucgagaccuccggcuccgacaacggcaccugcuaccccggcgacuucaucgacuacgaggagcuccgcgagcagcucuccuccgucuccuccuucgagcgcuucgagaucuuccccaagaccuccuccuggcccaaccacgacuccaacaagggcgucaccgccgccugcccccacgccggcgccaaguccuucuacaagaaccucaucuggcucgucaagaagggcaacuccuaccccaagcucuccaaguccuacaucaacgacaagggcaaggagguccucguccucuggggcauccaccaccccuccaccuccaccgaccagcagucccucuaccagaacgccgacgccuacgucuccgucggcaccucccgcuacuccaagaaguucaagcccgagaucgccauccgccccaagguccgcgaccaggagggccgcaugaacuacuacuggacccucgucgagcccggcgacaagaucaccuucgaggccaccggcaaccucgucgucccccgcuacgccuucgccauggagcgcaacgccggcuccggcaucaucaucuccgacacccccguccacgacugcaacaccaccugccagacccccaagggcgccaucaacaccucccuccccuuccagaacauccaccccaucaccaucggcaagugccccaaguacgucaaguccaccaagcuccgccucgccaccggccuccgcaacguccccuccauccagucccgcggccucuucggcgccaucgccggcuucaucgagggcggcuggaccggcauggucgacggcugguacggcuaccaccaccagaacgagcagggcuccggcuacgccgccgaccucaaguccacccagaacgccaucgacaagaucaccaacaaggucaacuccgucaucgagaagaugaacacccaguucaccgccgucggcaaggaguucaaccaccucgagaagcgcaucgagaaccucaacaagaaggucgacgacggcuuccucgacaucuggaccuacaacgccgagcuccucguccuccucgagaacgagcgcacccucgacuaccacgacuccaacgucaagaaccucuacgagaagguccgcucccagcucaagaacaacgccaaggagaucggcaacggcugcuucgaguucuaccacaagugcgacaacaccugcauggaguccgucaagaacggcaccuacgacuaccccaaguacuccgaggaggccaagcucaaccgcgaggagaucgacggcgucaagcucgaguccacccgcaucuaccagauccucgccaucuacuccaccgucgccuccucccucguccucgucgucucccucggcgccaucuccuucuggaugugcuccaacggcucccuccagugccgcaucugcaucuga

SEQ ID NO: 100530 - RNA, 1701 nt, Artificial Sequence; identical to SEQ ID NO: 100354
  derived and/or modified CDS sequence (opt2) from hemagglutinin__InfluenzaA__ADE29031

SEQ ID NO: 100531 - RNA, 1701 nt, Artificial Sequence
  derived and/or modified CDS sequence (opt2) from hemagglutinin__InfluenzaA__ADE29041
augaaggccauccucgucguccuccucuacaccuucgccaccgccaacgccgacacccucugcaucggcuaccacgccaacaacuccaccgacaccgucgacaccguccucgagaagaacgucaccgucacccacuccgucaaccuccucgaggacaagcacaacggcaagcucugcaagcuccgcggcgucgccccccuccaccucggcaagugcaacaucgccggcuggauccucggcaaccccgagugcgagucccucuccaccgccuccuccugguccuacaucgucgagaccuccuccuccgacaacggcaccugcuaccccggcgacuucaucgacuacgaggagcuccgcgagcagcucuccuccgucuccuccuucgagcgcuucgagaucuuccccaagaccuccuccuggcccaaccacgacuccaacaagggcgucaccgccgccugcccccacgccggcgccaaguccuucuacaagaaccucaucuggcucgucaagaagggcaacuccuaccccaagcucuccaaguccuacaucaacgacaagggcaaggagguccucguccucuggggcauccaccaccccuccaccuccgccgaccagcagucccucuaccagaacgccgacgccuacgucuucgucggcaccucccgcuacuccaagaaguucaagcccgagaucgccauccgccccaagguccgcgaccaggagggccgcaugaacuacuacuggacccucgucgagcccggcgacaagaucaccuucgaggccaccggcaaccucgucgucccccgcuacgccuucgccauggagaagaacgccggcuccggcaucaucaucuccgacacccccguccacgacugcaacaccaccugccagacccccaagggcgccaucaacaccucccuccccuuccagaacauccaccccaucaccaucggcaagugccccaaguacgucaaguccaccaagcuccgccucgccaccggccuccgcaacguccccuccauccagucccgcggccucuucggcgccaucgccggcuucaucgagggcggcuggaccggcauggucgacggcugguacggcuaccaccaccagaacgagcagggcuccggcuacgccgccgaccucaaguccacccagaacgccaucgacgagaucaccaacaaggucaacuccgucaucgagaagaugaacacccaguucaccgccgucggcaaggaguucaaccaccucgagaagcgcaucgagaaccucaacaagaaggucgacgacggcuuccucgacaucuggaccuacaacgccgagcuccucguccuccucgagaacgagcgcacccucgacuaccacgacuccaacgucaagaaccucuacgagaagguccgcucccagcucaagaacaacgccaaggagaucggcaacggcugcuucgaguucuaccacaagugcgacaacaccugcauggaguccgucaagaacggcaccuacgacuaccccaaguacuccgaggaggccaagcucaaccgcgaggagaucgacggcgucaagcucgaguccacccgcaucuaccagauccucgccaucuacuccaccgucgccuccucccucguccucgucgucucccucggcgccaucuccuucuggaugugcuccaacggcucccuccagugccgcaucugcaucuga

SEQ ID NO: 100532 - RNA, 1701 nt, Artificial Sequence; identical to SEQ ID NO: 100354
  derived and/or modified CDS sequence (opt2) from hemagglutinin__InfluenzaA__ADE29051

SEQ ID NO: 100533 - RNA, 1701 nt, Artificial Sequence
  derived and/or modified CDS sequence (opt2) from hemagglutinin__InfluenzaA__ADE29085
augaaggccauccucgucguccuccucuacaccuucgccaccgccaacgccgacacccucugcaucggcuaccacgccaacaacuccaccgacaccgucgacaccguccucgagaagaacgucaccgucacccacuccgucaaccuccucgaggacaagcacaacggcaagcucugcaagcuccgcggcgucgccccccuccaccucggcaagugcaacaucgccggcuggauccucggcaaccccgagugcgagucccucuccaccgccuccuccugguccuacaucgucgagacccccuccuccgacaacggcaccugcuaccccggcgacuucaucgacuacgaggagcuccgcgagcagcucuccuccgucuccuccuucgagcgcuucgagaucuuccccaagaccuccuccuggcccaaccacgacuccaacaagggcgucaccgccgccugcccccacgccgaggccaaguccuucuacaagaaccucaucuggcucgucaagaagggcaacuccuaccccaagcucuccaaguccuacaucaacgacaagggcaaggagguccucguccucuggggcauccaccaccccuccaccuccgccgaccagcagucccucuaccagaacgccgacgccuacgucuucgucggcuccucccgcuacuccaagaccuucaagcccgagaucgccauccgccccaagguccgcgaccgcgagggccgcaugaacuacuacuggacccucgucgagcccggcgacaagaucaccuucgaggccaccggcaaccucgucgucccccgcuacgccuucgccauggagcgcaacgccggcuccggcaucaucaucuccgacacccccguccacgacugcaacaccaccugccagacccccaagggcgccaucaacaccucccuccccuuccagaacauccaccccaucaccaucggcaagugccccaaguacgucaaguccaccaagcuccgccucgccaccggccuccgcaacauccccuccauccagucccgcggccucuucggcgccaucgccggcuucaucgagggcggcuggaccggcauggucgacggcugguacggcuaccaccaccagaacgagcagggcuccggcuacgccgccgaccucaaguccacccagaacgccaucgacgagaucaccaacaaggucaacuccgucaucgagaagaugaacacccaguucaccgccgucggcaaggaguucaaccaccucgagaagcgcaucgagaaccucaacaagaaggucgacgacggcuuccucgacaucuggaccuacaacgccgagcuccucguccuccucgagaacgagcgcacccucgacuaccacgacuccaacgucaagaaccucuacgagaagguccgcucccagcucaagaacaacgccaaggagaucggcaacggcugcuucgaguucuaccacaagugcgacaacaccugcauggaguccgucaagaacggcaccuacgacuaccccaaguacuccgaggaggccaagcucaaccgcgaggagaucgacggcgucaagcucgaguccacccgcaucuaccagauccucgccaucuacuccaccgucgccuccucccucguccucgucgucucccucggcgccaucuccuucuggaugugcuccaacggcucccuccagugccgcaucugcaucuga

SEQ ID NO: 100534 - RNA, 1701 nt, Artificial Sequence
  derived and/or modified CDS sequence (opt2) from hemagglutinin__InfluenzaA__ADE29095
augaaggccauccucgucguccuccucuacaccuucgccaccgccaacgccgacacccucugcaucggcuaccacgccaacaacuccaccgacaccgucgacaccguccucgagaagaacgucaccgucacccacuccgucaaccuccucgaggacaagcacaacggcaagcucugcaagcuccgcggcgucgccccccuccaccucggcaagugcaacaucgccggcuggauccucggcaaccccgagugcgagucccucuccaccgccuccuccugguccuacaucgucgagacccccuccuccgacaacggcaccugcuaccccggcgacuucaucgacuacgaggagcuccgcgagcagcucuccuccgucuccuccuucgagcgcuucgagaucuuccccaagaccuccuccuggcccaaccacgacuccaacaagggcgucaccgccgccugcccccacgccggcgccaaguccuucuacaagaaccucaucuggcucgucaagaagggcaacuccuaccccaagcucuccaaguccuacaucaacgacaagggcaaggagguccucguccucuggggcauccaccaccccuccaccuccgccgaccagcagucccucuaccagaacgccgacgccuacgucuucgucggcuccucccgcuacuccaagaccuucaagcccgagaucgccauccgccccaagguccgcgaccgcgagggccgcaugaacuacuacuggacccucgucgagcccggcgacaagaucaccuucgaggccaccggcaaccucgucgucccccgcuacgccuucgccauggagcgcaacgccggcuccggcaucaucaucuccgacacccccguccacgacugcaacaccaccugccagacccccaagggcgccaucaacaccucccuccccuuccagaacauccaccccaucaccaucggcaagugccccaaguacgucaaguccaccaagcuccgccucgccaccggccuccgcaacauccccuccauccagucccgcggccucuucggcgccaucgccggcuucaucgagggcggcuggaccggcauggucgacggcugguacggcuaccaccaccagaacgagcagggcuccggcuacgccgccgaccucaaguccacccagaacgccaucgacgagaucaccaacaaggucaacuccgucaucgagaagaugaacacccaguucaccgccgucggcaaggaguucaaccaccucgagaagcgcaucgagaaccucaacaagaaggucgacgacggcuuccucgacaucuggaccuacaacgccgagcuccucguccuccucgagaacgagcgcacccucgacuaccacgacuccaacgucaagaaccucuacgagaagguccgcucccagcucaagaacaacgccaaggagaucggcaacggcugcuucgaguucuaccacaagugcgacaacaccugcauggaguccgucaagaacggcaccuacgacuaccccaaguacuccgaggaggccaagcucaaccgcgaggagaucgacggcgucaagcucgaguccacccgcaucuaccagauccucgccaucuacuccaccgucgccuccucccucguccucgucgucucccucggcgccaucuccuucuggaugugcuccaacggcucccuccagugccgcaucugcaucuga

SEQ ID NO: 100535 - RNA, 1701 nt, Artificial Sequence; identical to SEQ ID NO: 99624
  derived and/or modified CDS sequence (opt2) from hemagglutinin__InfluenzaA__ADE34191

SEQ ID NO: 100536 - RNA, 1701 nt, Artificial Sequence; identical to SEQ ID NO: 99624
  derived and/or modified CDS sequence (opt2) from hemagglutinin__InfluenzaA__ADE34202

SEQ ID NO: 100537 - RNA, 1701 nt, Artificial Sequence
  derived and/or modified CDS sequence (opt2) from hemagglutinin__InfluenzaA__ADE34213
augaagaccaucaucgcccucuccuacauccucugccucgucuucgcccagaagcuccccggcaacgacaacuccaccgccacccucugccucggccaccacgccguccccaacggcaccaucgucaagaccaucaccaacgaccagaucgaggucaccaacgccaccgagcucguccaguccuccuccaccggcgagaucugcgacuccccccaccagauccucgacggcgagaacugcacccucaucgacgcccuccucggcgacccccagugcgacggcuuccagaacaagaagugggaccucuucgucgagcgccgcaaggccuacuccaacugcuaccccuacgacguccccgacuacgccucccuccgcucccucgucgccuccuccggcacccucgaguucaacaacgaguccuucaacuggaccggcgucacccagaacggcaccuccuccgccugcauccgccgcuccaacaacuccuucuucucccgccucaacuggcucacccaccucaaguucaaguaccccgcccucaacgucaccaugcccaacaacgagcaguucgacaagcucuacaucuggggcguccaccaccccggcaccgacaacgaccagaucuuccucuacgcccaggccuccggccgcaucaccgucuccaccaagcgcucccagcagaccgucauccccaacaucggcucccgcccccgcguccgcaacauccccucccgcaucuccaucuacuggaccaucgucaagcccggcgacauccuccucaucaacuccaccggcaaccucaucgccccccgcggcuacuucaagauccgcuccggcaaguccuccaucaugcgcuccgacgcccccaucggcaagugcaacuccgagugcaucacccccaacggcuccauccccaacgacaagcccuuccagaacgucaaccgcaucaccuacggcgccugcccccgcuacgucaagcagaacacccucaagcucgccaccggcaugcgcaacguccccgagaagcagacccgcggcaucuucggcgccaucgccggcuucaucgagaacggcugggagggcauggucgacggcugguacggcuuccgccaccagaacuccgagggccgcggccaggccgccgaccucaaguccacccaggccgccaucgaccagaucaacggcaagcucaaccgccucaucggcaagaccaacgagaaguuccaccagaucgagaaggaguucuccgaggucgagggccgcauccaggaccucgagaaguacgucgaggacaccaagaucgaccucugguccuacaacgccgagcuccucgucgcccucgagaaccagcacaccaucgaccucaccgacuccgagaugaacaagcucuucgagaagaccaagaagcagcuccgcgagaacgccgaggacaugggcaacggcugcuucaagaucuaccacaagugcgacaacgccugcaucggcuccauccgcaacggcaccuacgaccacgacgucuaccgcgacgaggcccucaacaaccgcuuccagaucaagggcgucgagcucaaguccggcuacaaggacuggauccucuggaucuccuucgccaucuccugcuuccuccucugcgucgcccuccucggcuucaucaugugggccugccagaagggcaacauccgcugcaacaucugcaucuga

SEQ ID NO: 100538 - RNA, 1701 nt, Artificial Sequence; identical to SEQ ID NO: 99624
  derived and/or modified CDS sequence (opt2) from hemagglutinin__InfluenzaA__ADE34224

SEQ ID NO: 100539 - RNA, 1701 nt, Artificial Sequence
  derived and/or modified CDS sequence (opt2) from hemagglutinin__InfluenzaA__ADE34235
augaagaccaucaucgcccucuccuacauccucugccucgucuucgcccagaagcuccccggcaacgacaacuccaccgccacccucugccucggccaccacgccguccccaacggcaccaucgucaagaccaucaccaacgaccagaucgaggucaccaacgccaccgagcucguccaguccuccuccaccggcgagaucugcgacuccccccaccagauccucgacggcaagaacugcacccucaucgacgcccuccucggcgacccccagugcgacggcuuccagaacaagaagugggaccucuucgucgagcgcuccaaggccuacuccaacugcuaccccuacgacguccccgacuacgccucccuccgcucccucgucgccuccuccggcacccucgaguucaacaacgaguccuucaacuggaccggcgucacccaggacggcaccuccuccgccugcauccgccgcuccaagaacuccuucuucucccgccucaacuggcucacccaccucaacuucaaguaccccgcccucaacgucaccaugcccaacaacgagcaguucgacaagcucuacaucuggggcguccaccaccccggcaccgacaaggaccagaucuuccucuacgcccaggccuccggccgcaccaccgucuccaccaagcgcucccagcagaccgccauccccaacaucggcucccgcccccgcguccgcaacauccccucccgcaucuccaucuacuggaccaucgucaagcccggcgacauccuccucaucaacuccaccggcaaccucaucgccccccgcggcuacuucaagauccgcuccggcaaguccuccaucaugcgcuccgacgcccccaucggcaagugcaacuccgagugcaucacccccaacggcuccauccccaacgacaagcccuuccagaacgucaaccgcaucaccuacggcgccugcccccgcuacgucaagcagaacacccucaagcucgccaccggcaugcgcaacguccccgagaagcagacccgcggcaucuucggcgccaucgccggcuucaucgagaacggcugggagggcauggucgacggcugguacggcuuccgccaccagaacuccgagggccgcggccaggccgccgaccucaaguccacccaggccgccaucgaccagaucaacggcaagcucaaccgccucaucggcaagaccaacgagaaguuccaccagaucgagaaggaguucuccgaggucgagggccgcauccaggaccucgagaaguacgucgaggacaccaagaucgaccucugguccuacaacgccgagcuccucgucgcccucgagaaccagcacaccaucgaccucaccgacuccgagaugaacaagcucuucgagaagaccaagaagcagcuccgcgagaacgccgaggacaugggcaacggcugcuucaagaucuaccacaagugcgacaacgccugcaucggcuccauccgcaacggcaccuacgaccacgacgucuaccgcgacgaggcccucaacaaccgcuuccagaucaagggcgucgagcucaaguccggcuacaaggacuggauccucuggaucuccuucgccaucuccugcuuccuccucugcgucgcccuccucggcuucaucaugugggccugccagaagggcaacauccgcugcaacaucugcaucuga

SEQ ID NO: 100540 - RNA, 1701 nt, Artificial Sequence; identical to SEQ ID NO: 99624
  derived and/or modified CDS sequence (opt2) from hemagglutinin__InfluenzaA__ADE34246

SEQ ID NO: 100541 - RNA, 1701 nt, Artificial Sequence; identical to SEQ ID NO: 99649
  derived and/or modified CDS sequence (opt2) from hemagglutinin__InfluenzaA__ADE34257

SEQ ID NO: 100542 - RNA, 1701 nt, Artificial Sequence
  derived and/or modified CDS sequence (opt2) from hemagglutinin__InfluenzaA__ADE34268
augaagaccaucaucgcccucuccuacauccucugccucgucuucgcccagaagcuccccggcaacgacaacuccaccgccacccucugccucggccaccacgccguccccaacggcaccaucgucaagaccaucaccaacgaccagaucgaggucaccaacgccaccgagcucguccaguccuccuccaccggcgagaucugcgacuccccccaccagauccucgacggcaagaacugcacccucaucgacgcccuccucggcgacccccagugcgacggcuuccagaacaagaagugggaccucuucgucgagcgcuccaaggccuacuccaacugcuaccccuacgagguccccgacuacgccucccuccgcucccucgucgccuccuccggcacccucgaguucaacaacgaguccuucaacuggaccggcgucacccaggacggcaccuccuccgccugcauccgccgcuccaagaacuccuucuucucccgccucaacuggcucacccaccucaacuucaaguaccccgcccucaacgucaccaugcccaacaacgagcaguucgacaagcucuacaucuggggcguccaccaccccggcaccgacaaggaccagaucuuccucuacgcccaggccuccggccgcaucaccgucuccaccaagcgcucccagcagaccgccauccccaacaucggcucccgcccccgcguccgcaacauccccucccgcaucuccaucuacuggaccaucgucaagcccggcgacauccuccucaucaacuccaccggcaaccucaucgccccccgcggcuacuucaagauccgcuccggcaaguccuccaucaugcgcuccgacgcccccaucggcaagugcaacuccgagugcaucacccccaacggcuccauccccaacgacaagcccuuccagaacgucaaccgcaucaccuacggcgccugcccccgcuacgucaagcagaacacccucaagcucgccaccggcaugcgcaacguccccgagaagcagacccgcggcaucuucggcgccaucgccggcuucaucgagaacggcugggagggcauggucgacggcugguacggcuuccgccaccagaacuccgagggccgcggccaggccgccgaccucaaguccacccaggccgccaucgaccagaucaacggcaagcucaaccgccucaucggcaagaccaacgagaaguuccaccagaucgagaaggaguucuccgaggucgagggccgcauccaggaccucgagaaguacgucgaggacaccaagaucgaccucugguccuacaacgccgagcuccucgucgcccucgagaaccagcacaccaucgaccucaccgacuccgagaugaacaagcucuucgagaagaccaagaagcagcuccgcgagaacgccgaggacaugggcaacggcugcuucaagaucuaccacaagugcgacaacgccugcaucggcuccauccgcaacggcaccuacgaccacgacgucuaccgcgacgaggcccucaacaaccgcuuccagaucaagggcgucgagcucaaguccggcuacaaggacuggauccucuggaucuccuucgccaucuccugcuuccuccucugcgucgcccuccucggcuucaucaugugggccugccagaagggcaacauccgcugcaacaucugcaucuga

SEQ ID NO: 100543 - RNA, 1701 nt, Artificial Sequence
  derived and/or modified CDS sequence (opt2) from hemagglutinin__InfluenzaA__ADE45499
augaaggccauccucgucguccuccucuacaccuucgccaccgccaacgccgacacccucugcaucggcuaccacgccaacaacuccaccgacaccgucgacaccguccucgagaagaacgucaccgucacccacuccgucaaccuccucgaggacaagcacaacggcaagcucugcaagcuccgcggcgucgccccccuccaccucggcaagugcaacaucgccggcuggauccucggcaaccccgagugcgagucccucuccaccgccuccuccugguccuacaucgucgagaccuccuccuccgacaacggcaccugcuaccccggcgacuucaucgacuacgaggagcuccgcgagcagcucuccuccgucuccuccuucaagcgcuucgagaucuuccccaagaccuccuccuggcccaaccacgaccccaacaagggcgucaccgccgccugcccccacgccggcgccaaguccuucuacaagaaccucaucuggcucgucaagaagggcaacuccuaccccaagcucuccaaguccuacaucaacgacaagggcaaggagguccucguccucuggggcauccaccaccccuccaccuccgccgaccagcagucccucuaccagaacgccgacgccuacgucuucgucggcaccucccgcuacuccaagaaguucaagcccgagaucgccauccgccccaagguccgcgaccaggagggccgcaugaacuacuacuggacccucgucgagcccggcgacaagaucaccuucgaggccaccggcaaccucgucgucccccgcuacgccuucgccauggagcgcaacgccggcuccggcaucaucaucuccgacacccccguccacgacugcaacaccaccugccagacccccaagggcgccaucaacaccucccuccccuuccagaacauccaccccaucaccaucggcaagugccccaaguacgucaaguccaccaagcuccgccucgccaccggccuccgcaacguccccuccauccagucccgcggccucuucggcgccaucgccggcuucaucgagggcggcuggaccggcauggucgacggcugguacggcuaccaccaccagaacgagcagggcuccggcuacgccgccgaccucaaguccacccagaacgccaucgacgagaucaccaacaaggucaacuccgucaucgagaagaugaacacccaguucaccgccgucggcaaggaguucaaccaccucgagaagcgcaucgagaaccucaacaagaaggucgacgacggcuuccucgacaucuggaccuacaacgccgagcuccucguccuccucgagaacgagcgcacccucgacuaccacgacuccaacgucaagaaccucuacgagaagguccgcucccagcucaagaacaacgccaaggagaucggcaacggcugcuucgaguucuaccacaagugcgacaacaccugcauggaguccgucaagaacggcaccuacgacuaccccaaguacuccgaggaggccaagcucaaccgcgaggagaucgacggcgucaagcucgaguccacccgcaucuaccagauccucgccaucuacuccaccgucgccuccucccucguccucgucgucucccucggcgccaucuccuucuggaugugcuccaacggcucccuccagugccgcaucugcaucuga

SEQ ID NO: 100544 - RNA, 1701 nt, Artificial Sequence; identical to SEQ ID NO: 99503
  derived and/or modified CDS sequence (opt2) from hemagglutinin__InfluenzaA__ADE45501

SEQ ID NO: 100545 - RNA, 1701 nt, Artificial Sequence
  derived and/or modified CDS sequence (opt2) from hemagglutinin__InfluenzaA__ADE45503
augaaggccauccucgucguccuccucuacaccuucgccaccgccaacgccgacacccucugcaucggcuaccacgccaacaacuccaccgacaccgucgacaccguccucgagaagaacgucaccgucacccacuccgucaaccuccucgaggacaagcacaacggcaagcucugcaagcuccgcggcgucgccccccuccaccucggcaagugcaacaucgccggcuggauccucggcaaccccgagugcgagucccucuccaccgccuccuccugguccuacaucgucgagaccuccuccuccgacaacggcaccugcuaccccggcgacuucaucgacuacgaggagcuccgcgagcagcucuccuccgucuccuccuucgagcgcuucgagaucuuccccaagaccuccuccuggcccaaccacgaccccaacaagggcgucaccgccgccugcccccacgccggcgccaaguccuucuacaagaaccucaucuggcucgucaagaagggcaacuccuaccccaagcucuccaaguccuacaucaacgacaagggcaaggagguccucguccucuggggcauccaccaccccuccaccuccgccgaccagcagucccucuaccagaacgccgacgccuacgucuucgucggcaccucccgcuacuccaagaaguucaagcccgagaucgccauccgccccaagguccgcgaccaggagggccgcaugaacuacuacuggacccucgucgagcccggcgacaagaucaccuucgaggccaccggcaaccucgucgucccccgcuacgccuucgccauggagcgcaacgccggcuccggcaucaucaucuccgacacccccguccacgacugcaacaccaccugccagacccccaagggcgccaucaacaccucccuccccuuccagaacauccaccccaucaccaucggcaagugccccaaguacgucaaguccaccaagcuccgccucgccaccggccuccgcaacguccccuccauccagucccgcggccucuucggcgccaucgccggcuucaucgagggcggcuggaccggcauggucgacggcugguacggcuaccaccaccagaacgagcagggcuccggcuacgccgccgaccucaaguccacccagaacgccaucgacgagaucaccaacaaggucaacuccgucaucgagaagaugaacacccaguucaccgccgucggcaaggaguucaaccaccucgagaagcgcaucgagaaccucaacaagaaggucgacgacggcuuccucgacaucuggaccuacaacgccgagcuccucguccuccucgagaacgagcgcacccucgacuaccacgacuccaacgucaagaaccucuacgagaagguccgcucccagcucaagaacaacgccaaggagaucggcaacggcugcuucgaguucuaccacaagugcgacaacaccugcauggaguccgucaagaacggcaccuacgacuaccccaaguacuccgaggaggccaagcucaaccgcgaggagaucgacggcgucaagcucgaguccacccgcgucuaccagauccucgccaucuacuccaccgucgccuccucccucguccucgucgucucccucggcgccaucuccuucuggaugugcuccaacggcucccuccagugccgcaucugcaucuga

SEQ ID NO: 100546 - RNA, 1701 nt, Artificial Sequence; identical to SEQ ID NO: 98705
  derived and/or modified CDS sequence (opt2) from hemagglutinin__InfluenzaA__ADE45505

SEQ ID NO: 100547 - RNA, 1701 nt, Artificial Sequence; identical to SEQ ID NO: 99058
  derived and/or modified CDS sequence (opt2) from hemagglutinin__InfluenzaA__ADE45507

SEQ ID NO: 100548 - RNA, 1701 nt, Artificial Sequence; identical to SEQ ID NO: 99058
  derived and/or modified CDS sequence (opt2) from hemagglutinin__InfluenzaA__ADE45509

SEQ ID NO: 100549 - RNA, 1701 nt, Artificial Sequence; identical to SEQ ID NO: 99503
  derived and/or modified CDS sequence (opt2) from hemagglutinin__InfluenzaA__ADE45511

SEQ ID NO: 100550 - RNA, 1701 nt, Artificial Sequence
  derived and/or modified CDS sequence (opt2) from hemagglutinin__InfluenzaA__ADE45513
augaaggccauccucgucguccuccucuacaccuucgccaccgccaacgccgacacccucugcaucggcuaccacgccaacaacuccaccgacaccgucgacaccguccucgagaagaacgucaccgucacccacuccgucaaccuccucgaggacaagcacaacggcaagcucugcaagcuccgcggcgucgccccccuccaccucggcaagugcaacaucgccggcuggauccucggcaaccccgagugcgagucccucuccaccgccuccuccugguccuacaucgucgagaccuccuccuccgacaacggcaccugcuaccccggcgacuucaucgacuacgaggagcuccgcgagcagcucuccuccgucuccuccuucgagcgcuucgagaucuuccccaagaccuccuccuggcccaaccacgaccccaacaagggcgucaccgccgccugcccccacgccggcgccaaguccuucuacaagaaccucaucuggcucgucaagaagggcaacuccuaccccaagcucuccaaguccuacaucaacgacaagggcaaggagguccucguccucuggggcauccaccaccccuccaccuccgccgaccagcagucccucuaccagaacgccgacgccuacgccuucgucggcaccucccgcuacuccaagaaguucaagcccgagaucgccauccgccccaagguccgcgaccaggagggccgcaucaacuacuacuggacccucgucgagcccggcgacaagaucaucuucgaggccaccggcaaccucgucgucccccgcuacgccuucgccauggagcgcaacgccggcuccggcaucaucaucuccgacacccccgcccacgacugcaacaccaccugccagacccccaagggcgccaucaacaccucccuccccuuccagaacauccaccccaucaccaucggcaagugccccaaguacgucaaguccaccaagcuccgccucgccaccggccuccgcaacguccccuccauccagucccgcggccucuucggcgccaucgccggcuucaucgagggcggcuggaccggcauggucgacggcugguacggcuaccaccaccagaacgagcagggcuccggcuacgccgccgaccucaaguccacccagaacgccaucgacgagaucaccaacaaggucaacuccgucaucgagaagaugaacacccaguucaccgccgucggcaaggaguucaaccaccucgagaagcgcaucgagaaccucaacaagaaggucgacgacggcuuccucgacaucuggaccuacaacgccgagcuccucguccuccucgagaacgagcgcacccucgacuaccacgacuccaacgucaagaaccucuacgagaagguccgcucccagcucaagaacaacgccaaggagaucggcaacggcugcuucgaguucuaccacaagugcgacaacaccugcauggaguccgucaagaacggcaccuacgacuaccccaaguacuccgaggaggccaagcucaaccgcgaggagaucgacggcgucaagcucgaguccacccgcaucuaccagauccucgccaucuacuccaccgucgccuccucccucguccucgucgucucccucggcgccaucuccuucuggaugugcuccaacggcucccuccagugccgcaucugcaucuga

SEQ ID NO: 100551 - RNA, 1701 nt, Artificial Sequence
  derived and/or modified CDS sequence (opt2) from hemagglutinin__InfluenzaA__ADE75388
augaaggccauccucgucguccuccucuacaccuucgccaccgccaacgccgacacccucugcaucggcuaccacgccaacaacuccaccgacaccgucgacaccguccucgagaagaacgucaccgucacccacuccgucaaccuccucgaggacaagcacaacggcaagcucugcaagcuccgcggcgucgccccccuccaccucggcaagugcaacaucgccggcuggauccucggcaaccccgagugcgagucccucuccaccgccuccuccugguccuacaucgucgagaccuccuccuccgagaacggcaccugcuaccccggcgacuucaucgacuacgaggagcuccgcgagcagcucuccuccgucuccuccuucgagcgcuucgagaucuuccccaagaccuccuccuggcccaaccacgacuccaacaagggcgucaccgccgccugcccccacgccggcgccaaguccuucuacaagaaccucaucuggcucgucaagaagggcaacuccuaccccaagcucuccaaguccuacaucaacgacaagggcaaggagguccucguccucuggggcauccaccaccccuccaccuccgccgaccagcagucccucuaccagaacgccgacgccuacgucuucgucggcaccucccgcuacuccaagaaguucaagcccgagaucgccauccgccccaagguccgcgaccaggagggccgcaugaacuacuacuggacccucgucgagcccggcgacaagaucaccuucgaggccaccggcaaccucgucgucccccgcuacgccuucgccauggagcgcaacgccggcuccggcaucaucaucuccgacacccccguccacgacugcaacaccaccugccagacccccaagggcgccaucaacaccucccuccccuuccagaacauccaccccaucaccaucggcaagugccccaaguacgucaaguccaccaagcuccgccucgccaccggccuccgcaacguccccuccauccagucccgcggccucuucggcgccaucgccggcuucaucgagggcggcuggaccggcauggucgacggcugguacggcuaccaccaccagaacgagcagggcuccggcuacgccgccgaccucaaguccacccagaacgccaucgacgagaucaccaacaaggucaacuccgucaucgagaagaugaacacccaguucaccgccgucggcaaggaguucaaccaccucgagaagcgcaucgagaaccucaacaagaaggucgacgacggcuuccucgacaucuggaccuacaacgccgagcuccucguccuccucgagaacgagcgcacccucgacuaccacgacuccaacgucaagaaccucuacgagaagguccgcucccagcucaagaacaacgccaaggagaucggcaacggcugcuucgaguucuaccacaagugcgacaacaccugcauggaguccgucaagaacggcaccuacgacuaccccaaguacuccgaggaggccaagcucaaccgcgaggagaucgacggcgucaagcucgaguccacccgcaucuaccagauccucgccaucuacuccaccgucgccuccucccucguccucgucgucucccucggcgccaucuccuucuggaugugcuccaacggcucccuccagugccgcaucugcaucuga

SEQ ID NO: 100552 - RNA, 1701 nt, Artificial Sequence; identical to SEQ ID NO: 98705
  derived and/or modified CDS sequence (opt2) from hemagglutinin__InfluenzaA__ADE75390

SEQ ID NO: 100553 - RNA, 1701 nt, Artificial Sequence; identical to SEQ ID NO: 98705
  derived and/or modified CDS sequence (opt2) from hemagglutinin__InfluenzaA__ADF10067

SEQ ID NO: 100554 - RNA, 1701 nt, Artificial Sequence; identical to SEQ ID NO: 98705
  derived and/or modified CDS sequence (opt2) from hemagglutinin__InfluenzaA__ADF10077

SEQ ID NO: 100555 - RNA, 1701 nt, Artificial Sequence
  derived and/or modified CDS sequence (opt2) from hemagglutinin__InfluenzaA__ADF10087
augaaggccauccucgucguccuccucuacaccuucgccaccgccaacgccgacacccucugcaucggcuaccacgccaacaacuccaccgacaccgucgacaccguccucgagaagaacgucaccgucacccacuccgucaaccuccucgaggacaagcacaacggcaagcucugcaagcuccgcggcgucgccccccuccaccucggcaagugcaacaucgccggcuggauccucggcaaccccgagugcgagucccucuccaccgccuccuccugguccuacaucgucgagaccuccuccuccgacaacggcaccugcuaccccggcgacuucaucgacuacgaggagcuccgcgagcagcucuccuccgucuccuccuucgagcgcuucgagaucuuccccaagaccuccuccuggcccaaccacgacuccaacaagggcgucaccgccgccugcccccacgccggcgccaaguccuucuacaagaaccucaucuggcucgucaagaagggcaacuccuaccccaagcucuccaaguccuacaucaacgacaagggcaaggagguccucguccucuggggcauccaccaccccuccaccuccgccgaccagcagucccucuaccagaacgccgacgccuacgucuucgucggcaccucccgcuacuccaagaaguucaagcccgagaucgccauccgccccaagguccgcgaccaggagggccgcaugaacuacuacuggacccucgucgagcccggcgacaagaucaccuucgaggccaccggcaaccucgucgucccccgcuacgccuucgccaugaagcgcaacgccggcuccggcaucaucaucuccgacacccccguccacgacugcaacaccaccugccagacccccaagggcgccaucaacaccucccuccccuuccagaacauccaccccaucaccaucggcaagugccccaaguacgucaaguccaccaagcuccgccucgccaccggccuccgcaacguccccuccauccagucccgcggccucuucggcgccaucgccggcuucaucgagggcggcuggaccggcauggucgacggcugguacggcuaccaccaccagaacgagcagggcuccggcuacgccgccgaccucaaguccacccagaacgccaucgacgagaucaccaacaaggucaacuccgucaucgagaagaugaacacccaguucaccgccgucggcaaggaguucaaccaccucgagaagcgcaucgagaaccucaacaagaaggucgacgacggcuuccucgacaucuggaccuacaacgccgagcuccucguccuccucgagaacgagcgcacccucgacuaccacgacuccaacgucaagaaccucuacgagaagguccgcaaccagcucaagaacaacgccaaggagaucggcaacggcugcuucgaguucuaccacaagugcgacaacaccugcauggaguccgucaagaacggcaccuacgacuaccccaaguacuccgaggaggccaagcucaaccgcgaggagaucgacggcgucaagcucgaguccacccgcaucuaccagauccucgccaucuacuccaccgucgccuccucccucguccucgucgucucccucggcgccaucuccuucuggaugugcuccaacggcucccuccagugccgcaucugcaucuga

SEQ ID NO: 100556 - RNA, 1701 nt, Artificial Sequence
  derived and/or modified CDS sequence (opt2) from hemagglutinin__InfluenzaA__ADF10097
auggaggccauccucgucguccuccucuacaccuucgccaccgccaacgccgacacccucugcaucggcuaccacgccaacaacuccaccgacaccgucgacaccguccucgagaagaacgucaccgucacccacuccgucaaccuccucgaggacaagcacaacggcaagcucugcaagcuccgcggcgucgccccccuccaccucggcaagugcaacaucgccggcuggauccucggcaaccccgagugcgagucccucuccaccgccuccuccugguccuacaucgucgagaccuccuccuccgacaacggcaccugcuaccccggcgacuucaucgacuacgaggagcuccgcgagcagcucuccuccgucuccuccuucgagcgcuucgagaucuuccccaagaccuccuccuggcccaaccacgacuccaacaagggcgucaccgccgccugcccccacgccggcgccaaguccuucuacaagaaccucaucuggcucgucaagaagggcaacuccuaccccaagcucuccaaguccuacaucaacgacaagggcaaggagguccucguccucuggggcauccaccaccccuccaccuccgccgaccagcagucccucuaccagaacgccgacgccuacgucuucgucggcuccuccaaguacuccaagaaguucaagcccgagaucgccauccgccccaagguccgcgaccaggagggccgcaugaacuacuacuggacccucgucgagcccggcgacaagaucaccuucgaggccaccggcaaccucgucgucccccgcuacgccuucgccauggagcgcaacgccggcuccggcaucaucaucuccgacacccccguccacgacugcaacaccaccugccagacccccaagggcgccaucaacaccucccuccccuuccacaacauccaccccaucaccaucggcaagugccccaaguacgucaaguccaccaagcuccgccucgccaccggccuccgcaacguccccuccauccagucccgcggccucuucggcgccaucgccggcuucaucgagggcggcuggaccggcauggucgacggcugguacggcuaccaccaccagaacgagcagggcuccggcuacgccgccgaccucaaguccacccagaacgccaucgacgagaucaccaacaaggucaacuccgucaucgagaagaugaacacccaguucaccgccgucggcaaggaguucaaccaccucgagaagcgcaucgagaaccucaacaagaaggucgacgacggcuuccucgacaucuggaccuacaacgccgagcuccucguccuccucgagaacgagcgcacccucgacuaccacgacuccaacgucaagaaccucuacgagaagguccgcucccagcucaagaacaacgccaaggagaucggcaacggcugcuucgaguucuaccacaagugcgacaacaccugcauggaguccgucaagaacggcaccuacgacuaccccaaguacuccgaggaggccaagcucaaccgcgaggagaucgacggcgucaagcucgaguccaccaagaucuaccagauccucgccaucuacuccaccgucgccuccucccucguccucgucgucucccucggcgccaucuccuucuggaugugcuccaacggcucccuccagugccgcaucugcaucuga

SEQ ID NO: 100557 - RNA, 1701 nt, Artificial Sequence
  derived and/or modified CDS sequence (opt2) from hemagglutinin__InfluenzaA__ADF10107
auggaggccauccucgucguccuccucuacaccuucgccaccgccaacgccgacacccucugcaucggcuaccacgccaacaacuccaccgacaccgucgacaccguccucgagaagaacgucaccgucacccacuccgucaaccuccucgaggacaagcacaacggcaagcucugcaagcuccgcggcgucgccccccuccaccucggcaagugcaacaucgccggcuggauccucggcaaccccgagugcgagucccucuccaccgccuccuccugguccuacaucgucgagaccuccuccuccgacaacggcaccugcuaccccggcgacuucaucgacuacgaggagcuccgcgagcagcucuccuccgucuccuccuucgagcgcuucgagaucuuccccaagaccuccuccuggcccaaccacgacuccaacaagggcgucaccgccgccugcccccacgccggcgccaaguccuucuacaagaaccucaucuggcucgucaagaagggcaacuccuaccccaagcucuccaaguccuacaucaacgacaagggcaaggagguccucguccucuggggcauccaccacccccccaccuccgccgaccagcagucccucuaccagaacgccgacgccuacgucuucgucggcuccuccaaguacuccaagaaguucaagcccgagaucgccauccgccccaagguccgcgaccaggagggccgcaugaacuacuacuggacccucgucgagcccggcgacaagaucaccuucgaggccaccggcaaccucgucgucccccgcuacgccuucgccauggagcgcaacgccggcuccggcaucaucaucuccgacacccccgcccacgacugcaacaccaccugccagacccccaagggcgccaucaacaccucccuccccuuccacaacauccaccccaucaccaucggcaagugccccaaguacgucaaguccaccaagcuccgccucgccaccggccuccgcaacguccccuccauccagucccgcggccucuucggcgccaucgccggcuucaucgagggcggcuggaccggcauggucgacggcugguacggcuaccaccaccagaacgagcagggcuccggcuacgccgccgaccucaaguccacccagaacgccaucgacgagaucaccaacaaggucaacuccgucaucgagaagaugaacacccaguucaccgccgucggcaaggaguucaaccaccucgagaagcgcaucgagaaccucaacaagaaggucgacgacggcuuccucgacaucuggaccuacaacgccgagcuccucguccuccucgagaacgagcgcacccucgacuaccacgacuccaacgucaagaaccucuacgagaagguccgcucccagcucaagaacaacgccaaggagaucggcaacggcugcuucgaguucuaccacaagugcgacaacaccugcauggaguccgucaagaacggcaccuacgacuaccccaaguacuccgaggaggccaagcucaaccgcgaggagaucgacggcgucaagcucgaguccaccaagaucuaccagauccucgccaucuacuccaccgucgccuccucccucguccucgucgucucccucggcgccaucuccuucuggaugugcuccaacggcucccuccagugccgcaucugcaucuga

SEQ ID NO: 100558 - RNA, 1701 nt, Artificial Sequence; identical to SEQ ID NO: 98705
  derived and/or modified CDS sequence (opt2) from hemagglutinin__InfluenzaA__ADF10117

SEQ ID NO: 100559 - RNA, 1701 nt, Artificial Sequence; identical to SEQ ID NO: 100409
  derived and/or modified CDS sequence (opt2) from hemagglutinin__InfluenzaA__ADF10127

SEQ ID NO: 100560 - RNA, 1701 nt, Artificial Sequence; identical to SEQ ID NO: 98705
  derived and/or modified CDS sequence (opt2) from hemagglutinin__InfluenzaA__ADF10137

SEQ ID NO: 100561 - RNA, 1701 nt, Artificial Sequence
  derived and/or modified CDS sequence (opt2) from hemagglutinin__InfluenzaA__ADF10154
augaaggccauccucgucguccuccucuacaccuucgccaccgccaacgccgacacccucugcaucggcuaccacgccaacaacuccaccgacaccgucgacaccguccucgagaagaacgucaccgucacccacuccgucaaccuccucgaggacaagcacaacggcaagcucugcaagcuccgcggcgucgccccccuccaccucggcaagugcaacaucgccggcuggauccucggcaaccccgagugcgagucccucuccaccgccuccuccugguccuacaucgucgagaccuccuccuccgacaacggcaccugcuaccccggcgacuucaucgacuacgaggagcuccgcgagcagcucuccuccgucuccuccuucgagcgcuucgagaucuuccccaagaccuccuccuggcccgaccacgacuccaacaagggcgucaccgccgccugcccccacgccggcgccaaguccuucuacaagaaccucaucuggcucgucaagaagggcaacuccuaccccaagcucuccaaguccuacaucaacgacaagggcaaggagguccucguccucuggggcauccaccaccccuccaccuccgccgaccagcagucccucuaccagaacgccgacgccuacgucuucgucggcaccucccgcuacuccaagaaguucaagcccgagaucgccauccgccccaagguccgcgagcaggagggccgcaugaacuacuacuggacccucgucgagcccggcgacaagaucaccuucgaggccaccggcaaccucgucgucccccgcuacgccuucgccauggagcgcaacgccggcuccggcaucaucaucuccgacacccccguccacgacugcaacaccaccugccagacccccaagggcgccaucaacaccucccuccccuuccagaacauccaccccaucaccaucggcaagugccccaaguacgucaaguccaccaagcuccgccucgccaccggccuccgcaacguccccuccauccagucccgcggccucuucggcgccaucgccggcuucaucgagggcggcuggaccggcauggucgacggcugguacggcuaccaccaccagaacgagcagggcuccggcuacgccgccgaccucaaguccacccagaacgccaucgacgagaucaccaacaaggucaacuccgucaucgagaagaugaacacccaguucaccgccgucggcaaggaguucaaccaccucgagaagcgcaucgagaaccucaacaagaaggucgacgacggcuuccucgacaucuggaccuacaacgccgagcuccucguccuccucgagaacgagcgcacccucgacuaccacgacuccaacgucaagaaccucuacgagcgcguccgcucccagcucaagaacaacgccaaggagaucggcaacggcugcuucgaguucuaccacaagugcgacaacaccugcauggaguccgucaagaacggcaccuacgacuaccccaaguacuccgaggaggccaagcucaaccgcgaggagaucgacggcgucaagcucgaguccacccgcaucuaccagauccucgccaucuacuccaccgucgccuccucccucguccucgucgucucccucggcgccaucuccuucuggaugugcuccaacggcucccuccagugccgcaucugcaucuga

SEQ ID NO: 100562 - RNA, 1701 nt, Artificial Sequence
  derived and/or modified CDS sequence (opt2) from hemagglutinin__InfluenzaA__ADF10174
augaaggccauccucgucguccuccucuacaccuucgccaccgccaacgccgacacccucugcaucggcuaccacgccaacaacuccaccgacaccgucgacaccguccucgagaagaacgucaccgucacccacuccgucaaccuccucgaggacaagcacaacggcaagcucugcaagcuccgcggcgucgccccccuccaccucggcaagugcaacaucgccggcuggauccucggcaaccccgagugcgagucccucuccaccgccuccuccugguccuacaucgucgagaccuccuccuccgacaacggcaccugcuaccccggcgacuucaucgacuacgaggagcuccgcgagcagcucuccuccgucuccuccuucgagcgcuucgagaucuuccccaagaccuccuccuggcccaaccacgacuccaacaagggcgucaccgccgccugcccccacgccggcgccaaguccuucuacaagaaccucaucuggcucgucaagaagggcaacuccuaccccaagcucuccaaguccuacaucaacgacaagggcaaggagguccucguccucuggggcauccaccaccccuccaccuccgccgaccagcagucccucuaccagaacgccgacgccuacgucuucgucggcaccucccgcuacuccaagaaguucaagcccgagaucgccauccgccccaagguccgcgagcaggagggccgcaugaacuacuacuggacccucgucgagcccggcgacaagaucaccuucgaggccaccggcaaccucgucgucccccgcuacgccuucgccauggagcgcaacgccggcuccggcaucaucaucuccgacacccccguccacgacugcaacaccaccugccagacccccaagggcgccaucaacaccucccuccccuuccagaacauccaccccaucaccaucggcaagugccccaaguacgucaaguccaccaagcuccgccucgccaccggccuccgcaacguccccuccauccagucccgcggccucuucggcgccaucgccggcuucaucgagggcggcuggaccggcauggucgacggcugguacggcuaccaccaccagaacgagcagggcuccggcuacgccgccgaccucaaguccacccagaacgccaucgacgagaucaccaacaaggucaacuccgucaucgagaagaugaacacccaguucaccgccgucggcaaggaguucaaccaccucgagaagcgcaucgagaaccucaacaagaaggucgacgacggcuuccucgacaucuggaccuacaacgccgagcuccucguccuccucgagaacgagcgcacccucgacuaccacgacuccaacgucaagaaccucuacgagcgcguccgcucccagcucaagaacaacgccaaggagaucggcaacggcugcuucgaguucuaccacaagugcgacaacaccugcauggaguccgucaagaacggcaccuacgacuaccccaaguacuccgaggaggccaagcucaaccgcgaggagaucgacggcgucaagcucgaguccacccgcaucuaccagauccucgccaucuacuccaccgucgccuccucccucguccucgucgucucccucggcgccaucuccuucuggaugugcuccaacggcucccuccagugccgcaucugcaucuga

SEQ ID NO: 100563 - RNA, 1701 nt, Artificial Sequence; identical to SEQ ID NO: 100562
  derived and/or modified CDS sequence (opt2) from hemagglutinin__InfluenzaA__ADF10190

SEQ ID NO: 100564 - RNA, 1701 nt, Artificial Sequence; identical to SEQ ID NO: 100409
  derived and/or modified CDS sequence (opt2) from hemagglutinin__InfluenzaA__ADF10237

SEQ ID NO: 100565 - RNA, 1701 nt, Artificial Sequence; identical to SEQ ID NO: 100562
  derived and/or modified CDS sequence (opt2) from hemagglutinin__InfluenzaA__ADF10262

SEQ ID NO: 100566 - RNA, 1701 nt, Artificial Sequence
  derived and/or modified CDS sequence (opt2) from hemagglutinin__InfluenzaA__ADF10288
augaaggccauccucgucguccuccucuacaccuucgccaccgccaacgccgacacccucugcaucggcuaccacgccaacaacuccaccgacaccgucgacaccguccucgagaagaacgucaccgucacccacuccgucaaccuccucgaggacaagcacaacggcaagcucugcaagcuccgcggcgucgccccccuccaccucggcaagugcaacaucgccggcuggauccucggcaaccccgagugcgagucccucuccaccgccuccuccugguccuacaucgucgagaccuccuccuccgacaacggcaccugcuaccccggcgacuucaucgacuacgaggagcuccgcgagcagcucuccuccgucuccuccuucgagcgcuucgagaucuuccccaagaccuccuccuggcccaaccacgacuccaacaagggcgucaccgccgccugcccccacgccggcgccaaguccuucuacaagaaccucaucuggcucgucaagaagggcaacuccuaccccaagcucuccaaguccuacaucaacgacaagggcaaggagguccucguccucuggggcauccaccaccccuccaccuccgccgaccagcagucccucuaccagaacgccgacgccuacgucuucgucggcaccucccgcuacuccaagaaguucaagcccgagaucgccauccgccccaagguccgcgagcaggagggccgcaugaacuacuacuggacccucgucgagcccggcgacaagaucaccuucgaggccaccggcaaccucgucgucccccgcuacgccuucgccauggagcgcaacgccggcuccggcaucaucaucuccgacacccccguccacgacugcaacaccaccugccagacccccaagggcgccaucaacaccucccuccccuuccagaacauccaccccaucaccaucggcaagugccccaaguacgucaaguccaccaagcuccgccucgccaccggccuccgcaacguccccuccauccagucccgcggccucuucggcgccaucgccggcuucaucgagggcggcuggaccggcauggucgacggcugguacggcuaccaccaccagaacgagcagggcuccggcuacgccgccgaccucaaguccacccagaacgccaucgacgagaucaccaacaaggucaacuccgucaucgagaagaugaacacccaguucaccgccgucggcaaggaguucaaccaccucgagaagcgcaucgagaaccucaacaagaaggucgacgacggcuuccucgacaucuggaccuacaacgccgagcuccucguccuccucgagaacgagcgcacccucgacuaccacgacuccaacgucaagaaccucuacgagcgcguccgcucccagcucaagaacaacgccaaggagaucggcaacggcugcuucgaguucuaccacaagugcgacaacaccugcauggaguccgucaagaacggcaccuacgacuaccccaaguacuccgaggaggccaagcucaaccgcgaggagaucgacggcgucaagcucgaguccacccgcaucuaccagauccucgccaucuacuccaccgucgccuccucccucguccucgucgucucccucggcgccaucuccuucuggaugugcuccaacggcucccuccagugccgcgucugcaucuga

SEQ ID NO: 100567 - RNA, 1701 nt, Artificial Sequence; identical to SEQ ID NO: 100409
  derived and/or modified CDS sequence (opt2) from hemagglutinin__InfluenzaA__ADF10302

SEQ ID NO: 100568 - RNA, 1701 nt, Artificial Sequence; identical to SEQ ID NO: 100409
  derived and/or modified CDS sequence (opt2) from hemagglutinin__InfluenzaA__ADF10335

SEQ ID NO: 100569 - RNA, 1701 nt, Artificial Sequence; identical to SEQ ID NO: 100409
  derived and/or modified CDS sequence (opt2) from hemagglutinin__InfluenzaA__ADF10359

SEQ ID NO: 100570 - RNA, 1701 nt, Artificial Sequence; identical to SEQ ID NO: 100562
  derived and/or modified CDS sequence (opt2) from hemagglutinin__InfluenzaA__ADF10369

SEQ ID NO: 100571 - RNA, 1701 nt, Artificial Sequence; identical to SEQ ID NO: 100562
  derived and/or modified CDS sequence (opt2) from hemagglutinin__InfluenzaA__ADF10390

SEQ ID NO: 100572 - RNA, 1701 nt, Artificial Sequence; identical to SEQ ID NO: 100409
  derived and/or modified CDS sequence (opt2) from hemagglutinin__InfluenzaA__ADF10528

SEQ ID NO: 100573 - RNA, 1701 nt, Artificial Sequence; identical to SEQ ID NO: 100562
  derived and/or modified CDS sequence (opt2) from hemagglutinin__InfluenzaA__ADF10598

SEQ ID NO: 100574 - RNA, 1701 nt, Artificial Sequence; identical to SEQ ID NO: 100562
  derived and/or modified CDS sequence (opt2) from hemagglutinin__InfluenzaA__ADF10670

SEQ ID NO: 100575 - RNA, 1701 nt, Artificial Sequence; identical to SEQ ID NO: 100562
  derived and/or modified CDS sequence (opt2) from hemagglutinin__InfluenzaA__ADF10724

SEQ ID NO: 100576 - RNA, 1701 nt, Artificial Sequence; identical to SEQ ID NO: 100409
  derived and/or modified CDS sequence (opt2) from hemagglutinin__InfluenzaA__ADF10757

SEQ ID NO: 100577 - RNA, 1701 nt, Artificial Sequence
  derived and/or modified CDS sequence (opt2) from hemagglutinin__InfluenzaA__ADF10828
augaaggccauccucgucguccuccucuacaccuucgccaccgccaacgccgacacccucugcaucggcuaccacgccaacaacuccaccgacaccgucgacaccguccucgagaagaacgucaccgucacccacuccgucaaccuccucgaggacaagcacaacggcaagcucugcaagcuccgcggcgucgccccccuccaccucggcaagugcaacaucgccggcuggauccucggcaaccccgagugcgagucccucuccaccgccuccuccugguccuacaucgucgagaccuccuccuccgacaacggcaccugcuaccccggcgacuucaucgacuacgaggagcuccgcgagcagcucuccuccgucuccuccuucgagcgcuucgagaucuuccccaagaccuccuccuggcccaaccacgacuccaacaagggcgucaccgccgccugcccccacgccggcgccaaguccuucuacaagaaccucaucuggcucgucaagaagggcaacuccuaccccaagcucuccaaguccuacaucaacgacaagggcaaggagguccucguccucuggggcauccaccaccccuccaccuccaccgaccagcagucccucuaccagaacgccgacgccuacgucuucgucggcaccucccgcuacuccaagaaguucaagcccgagaucgccauccgccccaagguccgcgaccaggagggccgcaugaacuacuacuggacccucgucgagcccggcgacaagaucaccuucgaggccaccggcaaccucgucgucccccgcuacgccuucgccauggagcgcaacgccggcuccggcaucaucaucuccgacacccccguccacgacugcaacaccaccugccagacccccaagggcgccaucaacaccucccuccccuuccagaacauccaccccaucaccaucggcaagugccccaaguacgucaaguccaccaagcuccgccucgccaccggccuccgcaacguccccuccauccagucccgcggccucuucggcgccaucgccggcuucaucgagggcggcuggaccggcauggucgacggcugguacggcuaccaccaccagaacgagcagggcuccggcuacgccgccgaccucaaguccacccagaacgccaucgacaagaucaccaacaaggucaacuccgucaucgagaagaugaacacccaguucaccgccgucggcaaggaguucaaccaccucgagaagcgcaucgagaaccucaacaagaaggucgacgacggcuuccucgacaucuggaccuacaacgccgagcuccucguccuccucgagaacgagcgcacccucgacuaccacgacuccaacgucaagaaccucuacgagaagguccgcucccagcucaagaacaacgccaaggagaucggcaacggcugcuucgaguucuaccacaagugcgacaacaccugcauggaguccgucaagaacggcaccuacgacuaccccaaguacuccgaggaggccaagcucaaccgcgaggagaucgacggcgucaagcucgaguccacccgcaucuaccagauccucgccaucuacuccaccgucgccuccucccucguccucgucgucucccucggcgccaucuccuucuggaugugcuccaacggcucccuccagugccgcaucugcaucuga

SEQ ID NO: 100578 - RNA, 1701 nt, Artificial Sequence; identical to SEQ ID NO: 98705
  derived and/or modified CDS sequence (opt2) from hemagglutinin__InfluenzaA__ADF10874

SEQ ID NO: 100579 - RNA, 1701 nt, Artificial Sequence; identical to SEQ ID NO: 99328
  derived and/or modified CDS sequence (opt2) from hemagglutinin__InfluenzaA__ADF10929

SEQ ID NO: 100580 - RNA, 1701 nt, Artificial Sequence; identical to SEQ ID NO: 99328
  derived and/or modified CDS sequence (opt2) from hemagglutinin__InfluenzaA__ADF10996

SEQ ID NO: 100581 - RNA, 1701 nt, Artificial Sequence; identical to SEQ ID NO: 98705
  derived and/or modified CDS sequence (opt2) from hemagglutinin__InfluenzaA__ADF27367

SEQ ID NO: 100582 - RNA, 1701 nt, Artificial Sequence; identical to SEQ ID NO: 98705
  derived and/or modified CDS sequence (opt2) from hemagglutinin__InfluenzaA__ADF27369

SEQ ID NO: 100583 - RNA, 1701 nt, Artificial Sequence
  derived and/or modified CDS sequence (opt2) from hemagglutinin__InfluenzaA__ADF27370
augaaggccauccucgucauccuccucuacaccuucgccaccgccaacgccgacacccucugcaucggcuaccacgccaacaacuccaccgacaccgucgacaccguccucgagaagaacgucaccgucacccacuccgucaaccuccucgaggacaagcacaacggcaagcucugcaagcuccgcggcgucgccccccuccaccucggcaagugcaacaucgccggcuggauccucggcaaccccgagugcgagucccucuccaccgccuccuccugguccuacaucgucgagaccuccuccuccgacaacggcaccugcuaccccggcgacuucaucgacuacgaggagcuccgcgagcagcucuccuccgucuccuccuucgagcgcuucgagaucuuccccaagaccuccuccuggcccaaccacgacuccaacaagggcgucaccgccgccugcccccacgccggcgccaaguccuucuacaagaaccucaucuggcucgucaagaagggcaacuccuaccccaagcucuccaaguccuacaucaacgacaagggcaaggagguccucguccucuggggcauccaccaccccuccaccuccgccgaccagcagucccucuaccagaacgccgacgccuacguccucgucggcaccucccgcuacuccaagaaguucaagcccgagaucgccauccgccccaagguccgcgaccaggagggccgcaugaacuacuacuggacccucgucgagcccggcgacaagaucaccuucgaggccaccggcaaccucgucgucccccgcuacgccuucgccauggagcgcaacgccggcuccggcaucaucaucuccgacacccccguccacgacugcaacaccaccugccagacccccaagggcgccaucaacaccucccuccccuuccagaacauccaccccaucaccaucggcaagugccccaaguacgucaaguccaccaagcuccgccucgccaccggccuccgcaacguccccuccauccagucccgcggccucuucggcgccaucgccggcuucaucgagggcggcuggaccggcauggucgacggcugguacggcuaccaccaccagaacgagcagggcuccggcuacgccgccgaccucaaguccacccagaacgccaucgacaagaucaccaacaaggucaacuccgucaucgagaagaugaacacccaguucaccgccgucggcaaggaguucaaccaccucgagaagcgcaucgagaaccucaacaagaaggucgacgacggcuuccucgacaucuggaccuacaacgccgagcuccucguccuccucgagaacgagcgcacccucgacuaccacgacuccaacgucaagaaccucuacgagaagguccgcucccagcucaagaacaacgccaaggagaucggcaacggcugcuucgaguucuaccacaagugcgacaacaccugcauggaguccgucaagaacggcaccuacgacuaccccaaguacuccgaggaggccaagcucaaccgcgaggagaucgacggcgucaagcucgaguccacccgcaucuaccagauccucgccaucuacuccaccgucgccuccucccucguccucgucgucucccucggcgccaucuccuucuggaugugcuccaacggcucccuccagugccgcaucugcaucuga

SEQ ID NO: 100584 - RNA, 1701 nt, Artificial Sequence; identical to SEQ ID NO: 99877
  derived and/or modified CDS sequence (opt2) from hemagglutinin__InfluenzaA__ADF27371

SEQ ID NO: 100585 - RNA, 1701 nt, Artificial Sequence
  derived and/or modified CDS sequence (opt2) from hemagglutinin__InfluenzaA__ADF27372
augaaggccauccucgucguccuccucuacaccuucgccaccgccaacgccgacacccucugcaucggcuaccacaccaacaacuccaccgacaccgucgacaccguccucgagaagaacgucaccgucacccacuccgucaaccuccucgaggacaagcacaacggcaagcucugcaagcuccgcggcgucgccccccuccaccucggcaagugcaacaucgccggcuggauccucggcaaccccgagugcgagucccucuccaccgccuccuccugguccuacaucgucgagaccuccuccuccgacaacggcaccugcuaccccggcgacuucaucgacuacgaggagcuccgcgagcagcucuccuccgucuccuccuucgagcgcuucgagaucuuccccaagaccuccuccuggcccaaccacgacuccaacaagggcgucaccgccgccugcccccacgccggcgccaaguccuucuacaagaaccucaucuggcucgucaagaagggcaacuccuaccccaagcucuccaaguccuacaucaacgacaagggcaaggagguccucguccucuggggcauccaccaccccuccaccuccgccgaccagcagucccucuaccagaacgccgacgccuacgucuucgucggcaccucccgcuacuccaagaaguucaagcccgagaucgccauccgccccaagguccgcgaccaggagggccgcaugaacuacuacuggacccucgucgagcccggcgacaagaucaccuucgaggccaccggcaaccucgucgucccccgcuacgccuucgccauggagcgcaacgccggcuccggcaucaucaucuccgacacccccguccacgacugcaacaccaccugccagacccccaagggcgccaucaacaccucccuccccuuccagaacauccaccccaucaccaucggcaagugccccaaguacgucaaguccaccaagcuccgccucgccaccggccuccgcaacguccccuccauccagucccgcggccucuucggcgccaucgccggcuucaucgagggcggcuggaccggcauggucgacggcugguacggcuaccaccaccagaacgagcagggcuccggcuacgccgccgaccucaaguccacccagaacgccaucgacaagaucaccaacaaggucaacuccgucaucgagaagaugaacacccaguucaccgccgucggcaaggaguucaaccaccucgagaagcgcaucgagaaccucaacaagaaggucgacgacggcuuccucgacaucuggaccuacaacgccgagcuccucguccuccucgagaacgagcgcacccucgacuaccacgacuccaacgucaagaaccucuacgagaagguccgcucccagcucaagaacaacgccaaggagaucggcaacggcugcuucgaguucuaccacaagugcgacaacaccugcauggaguccgucaagaacggcaccuacgacuaccccaaguacuccgaggaggccaagcucaaccgcgaggagaucgacggcgucaagcucgaguccacccgcaucuaccagauccucgccaucuacuccaccgucgccuccucccucguccucgucgucucccucggcgccaucuccuucuggaugugcuccaacggcucccuccagugccgcaucugcaucuga

SEQ ID NO: 100586 - RNA, 1701 nt, Artificial Sequence
  derived and/or modified CDS sequence (opt2) from hemagglutinin__InfluenzaA__ADF27373
auggaggccauccucgucguccuccucuacaccuucgccaccgccaacgccgacacccucugcaucggcuaccacgccaacaacuccaccgacaccgucgacaccguccucgagaagaacgucaccgucacccacuccgucaaccuccucgaggacaagcacaacggcaagcucugcaagcuccgcggcgucgccccccuccaccucggcaagugcaacaucgccggcuggauccucggcaaccccgagugcgagucccucuccaccgccuccuccugguccuacaucgucgagaccuccuccuccgacaacggcaccugcuaccccggcgacuucaucgacuacgaggagcucaucgagcagcucuccuccgucuccuccuucgagcgcuucgagaucuuccccaagaccuccuccuggcccaaccacgacuccaacaagggcgucaccgccgccugcccccacgccggcgccaaguccuucuacaagaaccucaucuggcucgucaagaagggcaacuccuaccccaagcucuccaaguccuacaucaacgacaagggcaaggagguccucguccucuggggcauccaccaccccuccaccuccgccgaccagcagucccucuaccagaacgccgacgccuacgucuucgucggcuccucccgcuacuccaagaaguucaagcccgagaucgccauccgccccaagguccgcgaccaggagggccgcaugaacuacuacuggacccucgucgagcccggcgacaagaucaccuucgaggccaccggcaaccucgucgucccccgcuacgccuucgccauggagcgcaacgccggcuccggcaucaucaucuccgacacccccguccacgacugcaacaccaccugccagacccccaagggcgccaucaacaccucccuccccuuccacaacauccaccccaucaccaucggcaagugccccaaguacgucaaguccaccaagcuccgccucgccaccggccuccgcaacguccccuccauccagacccgcggccucuucggcgccaucgccggcuucaucgagggcggcuggaccggcauggucgacggcugguacggcuaccaccaccagaacgagcagggcuccggcuacgccgccgaccucaaguccacccagaacgccaucgacgagaucaccaacaaggucaacuccgucaucgagaagaugaacacccaguucaccgccgucggcaaggaguucaaccaccucgagaagcgcaucgagaaccucaacaagaaggucgacgacggcuuccucgacaucuggaccuacaacgccgagcuccucguccuccucgagaacgagcgcacccucgacuaccacgacuccaacgucaagaaccucuacgagaagguccgcucccagcucaagaacaacgccaaggagaucggcaacggcugcuucgaguucuaccacaagugcgacaacaccugcauggaguccgucaagaacggcaccuacgacuaccccaaguacuccgaggaggccaagcucaaccgcgaggagaucgacggcgucaagcucgaguccacccgcaucuaccagauccucgccaucuacuccaccgucgccuccucccucguccucgucgucucccucggcgccaucuccuucuggaugugcuccaacggcucccuccagugccgcaucugcaucuga

SEQ ID NO: 100587 - RNA, 1701 nt, Artificial Sequence; identical to SEQ ID NO: 98947
  derived and/or modified CDS sequence (opt2) from hemagglutinin__InfluenzaA__ADF27374

SEQ ID NO: 100588 - RNA, 1701 nt, Artificial Sequence
  derived and/or modified CDS sequence (opt2) from hemagglutinin__InfluenzaA__ADF27375
auggaggccauccucgucguccuccucuacaccuucgccaccgccaacgccgacacccucugcaucggcuaccacgccaacaacuccaccgacaccgucgacaccguccucgagaagaacgucaccgucacccacuccgucaaccuccucgaggacaagcacaacggcaagcucugcaagcuccgcggcgucgccccccuccaccucggcaagugcaacaucgccggcuggauccucggcaaccccgagugcgagucccucuccaccgccuccuccugguccuacaucgucgagaccuccuccuccgacaacggcaccugcuaccccggcgacuucaucgacuacgaggagcuccgcgagcagcucuccuccgucuccuccuucgagcgcuucgagaucuuccccaagaccuccuccuggcccaaccacgacuccaacaagggcgucaccgccgccugcccccacgccggcgccaaguccuucuacaagaaccucaucuggcucgucaagaagggcaacuccuaccccaagcucuccaaguccuacaucaacgacaagggcaaggagguccucguccucuggggcauccaccaccccuccaccuccgccgaccagcagucccucuaccagaacgccgacgccuacgucuucgucggcuccucccgcuacuccaagaaguucaagcccgagaucgccauccgccccaagguccgcgaccaggagggccgcaugaacuacuacuggacccucgucgagcccggcgacaagaucaccuucgaggccaccggcaaccucgucgucccccgcuacgccuucgccauggagcgcaacgccggcuccggcaucaucaucuccgacacccccguccacgacugcaacaccaccugccagacccccaagggcgccaucaacaccucccuccccuuccacaacauccaccccaucaccaucggcaagugccccaaguacgucaaguccaccaagcuccgccucgccaccggccuccgcaacguccccuccauccagucccgcggccucuucggcgccaucgccggcuucaucgagggcggcuggaccggcauggucgacggcugguacggcuaccaccaccagaacgagcagggcuccggcuacgccgccgaccagaaguccacccagaacgccaucgacgagaucaccaacaagaucaacuccgucaucgagaagaugaacacccaguucaccgccgucggcaaggaguucaaccaccucgagaagcgcaucgagaaccucaacaagaaggucgacgacggcuuccucgacaucuggaccuacaacgccgagcuccucguccuccucgagaacgagcgcacccucgacuaccacgacuccaacgucaagaaccucuacgagaagguccgcucccagcucaagaacaacgccaaggagaucggcaacggcugcuucgaguucuaccacaagugcgacaacaccugcauggaguccgucaagaacggcaccuacgacuaccccaaguacuccgaggaggccaagcucaaccgcgaggagaucgacggcgucaagcucgaguccacccgcaucuaccagauccucgccaucuacuccaccgucgccuccucccucguccucgucgucucccucggcgccaucuccuucuggaugugcuccaacggcucccuccagugccgcaucugcaucuga

SEQ ID NO: 100589 - RNA, 1701 nt, Artificial Sequence
  derived and/or modified CDS sequence (opt2) from hemagglutinin__InfluenzaA__ADF27376
augaaggccauccucgucguccuccucuacaccuucgucaccgccaacgccgacacccucugcaucggcuaccacgccaacaacuccaccgacaccgucgacaccguccucgagaagaacgucaccgucacccacuccgucaaccuccucgaggacaagcacaacggcaagcucugcaagcuccgcggcgucgccccccuccaccucggcaagugcaacaucgccggcuggauccucggcaaccccgagugcgagucccucuccaccgccuccuccugguccuacaucgucgagaccuccaacuccgacaacggcaccugcuaccccggcgacuucaucgacuacgaggagcuccgcgagcagcucuccuccgucuccuccuucgagcgcuucgagaucuuccccaagaccuccuccuggcccaaccacgacuccaacaagggcgucaccgccgccugcccccacgccggcgccaaguccuucuacaagaaccucaucuggcucgucaagaagggcaacuccuaccccaagcucuccaaguccuacaucaacgacaagggcaaggagguccucguccucuggggcauccaccaccccuccaccuccgccgaccagcagucccucuaccagaacgccgacgccuacgucuucgucggcaccucccgcuacuccaagaaguucaagcccgagaucgagauccgccccaagguccgcgaccaggagggccgcaugaacuacuacuggacccucgucgagcccggcgacaagaucaccuucgaggccaccggcaaccucgucgucccccgcuacgccuucgccauggagcgcaacgccggcuccggcaucaucaucuccgacacccccguccacgacugcaacaccaccugccagacccccaagggcgccaucaacaccucccuccccuuccagaacauccaccccaucaccaucggcaagugccccaaguacgucaaguccaccaagcuccgccucgccaccggccuccgcaacguccccuccauccagucccgcggccucuucggcgccaucgccggcuucaucgagggcggcuggaccggcauggucgacggcugguacggcuaccaccaccagaacgagcagggcuccggcuacgccgccgaccucaaguccacccagaacgccaucgacaagaucaccaacaaggucaacuccgucaucgagaagaugaacacccaguucaccgccgucggcaaggaguucaaccaccucgagaagcgcaucgagaaccucaacaagaaggucgacgacggcuuccucgacaucuggaccuacaacgccgagcuccucguccuccucgagaacgagcgcacccucgacuaccacgacuccaacgucaagaaccucuacgagaagguccgcucccagcucaagaacaacgccaaggagaucggcaacggcugcuucgaguucuaccacaagugcgacaacaccugcauggaguccgucaagaacggcaccuacgacuaccccaaguacuccgaggaggccaagcucaaccgcgaggagaucgacggcgucaagcucgaguccacccgcaucuaccagauccucgccaucuacuccaccgucgccuccucccucguccucgucgucucccucggcgccaucuccuucuggaugugcuccaacggcucccuccagugccgcaucugcaucuga

SEQ ID NO: 100590 - RNA, 1701 nt, Artificial Sequence
  derived and/or modified CDS sequence (opt2) from hemagglutinin__InfluenzaA__ADF27378
augaaggccauccucgucguccuccucuacaccuucgucaccgccaacgccgacacccucugcaucggcuaccacgccaacaacuccaccgacaccgucgacaccguccucgagaagaacgucaccgucacccacuccgucaaccuccucgaggacaagcacaacggcaagcucugcaagcuccgcggcgucgccccccuccaccucggcaagugcaacaucgccggcuggauccucggcaaccccgagugcgagucccucuccaccgccuccuccugguccuacaucgucgagaccuccaacuccgacaacggcaccugcuaccccggcgacuucaucgacuacgaggagcuccgcgagcagcucuccuccgucuccuccuucgagcgcuucgagaucuuccccaagaccuccuccuggcccaaccacgacuccaacaagggcgucaccgccgccugcccccacgccggcgccaaguccuucuacaagaaccucaucuggcucgucaagaagggcaacuccuaccccaagcucuccaaguccuacaucaacgacaagggcaaggagguccucguccucuggggcauccaccaccccuccaccuccgccgaccagcagucccucuaccagaacgccgacgccuacgucuucgucggcaccucccgcuacuccaagaaguucaagcccgagaucgccauccgccccaagguccgcgaccaggagggccgcaugaacuacuacuggacccucgucgagcccggcgacaagaucaccuucgaggccaccggcaaccucgucgucccccgcuacgccuucgccauggagcgcaacgccggcuccggcaucaucaucuccgacacccccguccacgacugcaacaccaccugccagacccccaagggcgccaucaacaccucccuccccuuccagaacauccaccccaucaccaucggcaagugccccaaguacgucaaguccaccaagcuccgccucgccaccggccuccgcaacguccccuccauccagucccgcggccucuucggcgccaucgccggcuucaucgagggcggcuggaccggcauggucgacggcugguacggcuaccaccaccagaacgagcagggcuccggcuacgccgccgaccucaaguccacccagaacgccaucgacaagaucaccaacaaggucaacuccgucaucgagaagaugaacacccaguucaccgccgucggcaaggaguucaaccaccucgagaagcgcaucgagaaccucaacaagaaggucgacgacggcuuccucgacaucuggaccuacaacgccgagcuccucguccuccucgagaacgagcgcacccucgacuaccacgacuccaacgucaagaaccucuacgagaagguccgcucccagcucaagaacaacgccaaggagaucggcaacggcugcuucgaguucuaccacaagugcgacaacaccugcauggaguccgucaagaacggcaccuacgacuaccccaaguacuccgaggaggccaagcucaaccgcgaggagaucgacggcgucaagcucgaguccacccgcaucuaccagauccucgccaucuacuccaccgucgccuccucccucguccucgucgucucccucggcgccaucuccuucuggaugugcuccaacggcucccuccagugccgcaucugcaucuga

SEQ ID NO: 100591 - RNA, 1701 nt, Artificial Sequence
  derived and/or modified CDS sequence (opt2) from hemagglutinin__InfluenzaA__ADF27389
augaaggccauccucgucguccuccucuacaccuucgccaccgccaacgccgacacccucugcaucggcuaccacgccaacaacuccaccgacaccgucgacaccguccucgagaagaacgucaccgucacccacuccgucaaccuccucgaggacaagcacaacggcaagcucugcaagcuccgcggcgucgccccccuccaccucggcaagugcaacaucgccggcuggauccucggcaaccccgagugcgagucccucuccaccgccuccuccugguccuacaucgucgagaccuccuccuccgacaacggcaccugcuaccccggcgacuucaucgacuacgaggagcuccgcgagcagcucuccuccgucuccuccuucgagcgcuucgagaucuuccccaagaccuccuccuggcccaaccacgacuccaacaagggcgucaccgccgccugcccccacgccggcgccaaguccuucuacaagaaccucaucuggcucgucaagaagggcaacuccuaccccaagcucuccaaguccuacaucaacgacaagggcaaggagguccucguccucuggggcauccaccaccccuccaccuccgccgaccagcagucccucuaccagaacgccgacgccuacgucuucgucggcaccucccgcuacuccaagaaguucaagcccgagaucgccauccgccccaagguccgcgaccaggagggccgcaugaacuacuacuggacccucgucgagcccggcgacaagaucaccuucgaggccaccggcaaccucgucgucccccgcuacgccuucgccauggagcgcaacgccggcuccggcaucaucaccuccgacacccccguccacgacugcaacaccaccugccagacccccaagggcgccaucaacaccucccuccccuuccagaacauccaccccaucaccaucggcaagugccccaaguacgucaaguccaccaagcuccgccucgccaccggccuccgcaacguccccuccauccagucccgcggccucuucggcgccaucgccggcuucaucgagggcggcuggaccggcauggucgacggcugguacggcuaccaccaccagaacgagcagggcuccggcuacgccgccgaccucaaguccacccagaacgccaucgacgagaucaccaacaaggucaacuccgucaucgagaagaugaacacccaguucaccgccgucggcaaggaguucaaccaccucgagaagcgcaucgagaaccucaacaagaaggucgacgacggcuuccucgacaucuggaccuacaacgccgagcuccucguccuccucgagaacgagcgcacccucgacuaccacgacuccaacgucaagaaccucuacgagaagguccgcucccagcucaagaacaacgccaaggagaucggcaacggcugcuucgaguucuaccacaagugcgacaacaccugcauggaguccgucaagaacggcaccuacgacuaccccaaguacuccgaggaggccaagcucaaccgcgaggagaucgacggcgucaagcucgaguccacccgcaucuaccagauccucgccaucuacuccaccgucgccuccucccucguccucgucgucucccucggcgccaucuccuucuggaugugcuccaacggcucccuccagugccgcaucugcaucuga

SEQ ID NO: 100592 - RNA, 1701 nt, Artificial Sequence
  derived and/or modified CDS sequence (opt2) from hemagglutinin__InfluenzaA__ADF27399
augaaggccauccucgucguccuccucuacaccuucgccaccgccaacgccgacacccucugcaucggcuaccacgccaacaacuccaccgacaccgucgacaccguccucgagaagaacgucaccgucacccacuccgucaaccuccucgaggacaagcacaacggcaagcucugcaagcuccgcggcgucgccccccuccaccucggcaagugcaacaucgccggcuggauccucggcaaccccgagugcgagucccucuccaccgccuccuccugguccuacaucgucgagaccuccuccuccgacaacggcaccugcuaccccggcgacuucaucgacuacgaggagcuccgcgagcagcucuccuccgucuccuccuucgagcgcuucgagaucuuccccaagaccuccuccuggcccaaccacgacuccaacaagggcgucaccgccgccugcccccacgccggcgccaaguccuucuacaagaaccucaucuggcucgucaagaagggcaacuccuaccccaagcucuccaaguccuacaucaacgacaagggcaaggagguccucguccucuggggcauccaccaccccuccaccuccgccgaccagcagucccucuaccagaacgccgacgccuacgucuucgucggcaccucccgcuacuccaagaaguucaagcccgagaucgccauccgccccaagguccgcgaccaggagggccgcaugaacuacuacuggacccucgucgagcccggcgacaagaucaccuucgaggccaccggcaaccucgucgucccccgcuacgccuucgccauggagcgcaacgccggcuccggcaucaucaucuccgacacccccguccacgacugcaacaccaccugccagacccccaagggcgccaucaacaccucccuccccuuccagaacauccaccccaucaccaucggcgagugccccaaguacgucaaguccaccaagcuccgccucgccaccggccuccgcaacguccccuccauccagucccgcggccucuucggcgccaucgccggcuucaucgagggcggcuggaccggcauggucgacggcugguacggcuaccaccaccagaacgagcagggcuccggcuacgccgccgaccucaaguccacccagaacgccaucgacgagaucaccaacaaggucaacuccgucaucgagaagaugaacacccaguucaccgccgucggcaaggaguucaaccaccucgagaagcgcaucgagaaccucaacaagaaggucgacgacggcuuccucgacaucuggaccuacaacgccgagcuccucguccuccucgagaacgagcgcacccucgacuaccacgacuccaacgucaagaaccucuacgagaagguccgcucccagcucaagaacaacgccaaggagaucggcaacggcugcuucgaguucuaccacaagugcgacaacaccugcauggaguccgucaagaacggcaccuacgacuaccccaaguacuccgaggaggccaagcucaaccgcgaggagaucgacggcgucaagcucgaguccacccgcaucuaccagauccucgccaucuacuccaccgucgccuccucccucguccucgucgucucccucggcgccaucuccuucuggaugugcuccaacggcucccuccagugccgcaucugcaucuga

SEQ ID NO: 100593 - RNA, 1701 nt, Artificial Sequence; identical to SEQ ID NO: 99869
  derived and/or modified CDS sequence (opt2) from hemagglutinin__InfluenzaA__ADF27409

SEQ ID NO: 100594 - RNA, 1701 nt, Artificial Sequence; identical to SEQ ID NO: 100577
  derived and/or modified CDS sequence (opt2) from hemagglutinin__InfluenzaA__ADF27419

SEQ ID NO: 100595 - RNA, 1701 nt, Artificial Sequence
  derived and/or modified CDS sequence (opt2) from hemagglutinin__InfluenzaA__ADF27429
augaaggccauccucgucguccuccucuacaccuucgccaccgccaacgccgacacccucugcaucggcuaccacgccaacaacuccaccgacaccgucgacaccguccucgagaagaacgucaccgucacccacuccgucaaccuccucgaggacaagcacaacggcaagcucugcaagcuccgcggcgucgccccccuccaccucggcaagugcaacaucgccggcuggauccucggcaaccccgagugcgagucccucuccaccgccuccuccugguccuacaucgucgagaccuccuccuccgacaacggcaccugcuaccccggcgacuucaucgacuacgaggagcuccgcgagcagcucuccuccgucuccuccuucgagcgcuucgagaucuuccccaagaccuccuccuggcccaaccacgacuccaacaagggcgucaccgccgccugcccccacgccggcgccaaguccuucuacaagaaccucaucuggcucgucaagaagggcaacuccuaccccaagcucuccaaguucuacaucaacgacaagggcaaggagguccucguccucuggggcauccaccaccccuccaccuccgccgaccagcagucccucuaccagaacgccgacgccuacgucuucgucggcaccucccgcuacuccaagaaguucaagcccgagaucgccauccgccccaagguccgcgaccaggagggccgcaugaacuacuacuggacccucgucgagcccggcgacaagaucaccuucgaggccaccggcaaccucgucgucccccgcuacgccuucgccauggagcgcaacgccggcuccggcaucaucaucuccgacacccccguccacgacugcaacaccaccugccagacccccaagggcgccaucaacaccucccuccccuuccagaacauccaccccaucaccaucggcaagugccccaaguacgucaaguccaccaagcuccgccucgccaccggccuccgcaacguccccuccauccagucccgcggccucuucggcgccaucgccggcuucaucgagggcggcuggaccggcauggucgacggcugguacggcuaccaccaccagaacgagcagggcuccggcuacgccgccgaccucaaguccacccagaacgccaucgacaagaucaccaacaaggucaacuccgucaucgagaagaugaacacccaguucaccgccgucggcaaggaguucaaccaccucgagaagcgcaucgagaaccucaacaagaaggucgacgacggcuuccucgacaucuggaccuacaacgccgagcuccucguccuccucgagaacgagcgcacccucgacuaccacgacuccaacgucaagaaccucuacgagaagguccgcucccagcucaagaacaacgccaaggagaucggcaacggcugcuucgaguucuaccacaagugcgacaacaccugcaugaaguccgucaagaacggcaccuacgacuaccccaaguacuccgaggaggccaagcucaaccgcgaggagaucgacggcgucaagcucgaguccacccgcaucuaccagauccucgccaucuacuccaccgucgccuccucccucguccucgucgucucccucggcgccaucuccuucuggaugugcuccaacggcucccuccagugccgcaucugcaucuga

SEQ ID NO: 100596 - RNA, 1701 nt, Artificial Sequence; identical to SEQ ID NO: 98705
  derived and/or modified CDS sequence (opt2) from hemagglutinin__InfluenzaA__ADF27439

SEQ ID NO: 100597 - RNA, 1701 nt, Artificial Sequence
  derived and/or modified CDS sequence (opt2) from hemagglutinin__InfluenzaA__ADF27449
augaaggccauccucgucguccuccucuacaccuucgccaccgucaacgccgacacccucugcaucggcuaccacgccaacaacuccaccgacaccgucgacaccguccucgagaagaacgucaccgucacccacuccgucaaccuccucgaggacaagcacaacggcaagcucugcaagcuccgcggcgucgccccccuccaccucggcaagugcaacaucgccggcuggauccucggcaaccccgagugcgagucccucuccaccgccuccuccugguccuacaucgucgagaccuccuccuccgacaacggcaccugcuaccccggcgacuucaucgacuacgaggagcuccgcgagcagcucuccuccgucuccuccuucgagcgcuucgagaucuuccccaagaccuccuccuggcccaaccacgacuccaacaagggcgucaccgccgccugcccccacgccggcgccaaguccuucuacaagaaccucaucuggcucgucaagaagggcaacuccuaccccaagcucuccaaguccuacaucaacgacaagggcaaggagguccucguccucuggggcauccaccaccccuccaccuccgccgaccagcagucccucuaccagaacgccgacgccuacgucuucgucggcaccucccgcuacuccaagaaguucaagcccgagaucgccauccgccccaagguccgcgaccaggagggccgcaugaacuacuacuggacccucgucgagcccggcgacaagaucaccuucgaggccaccggcaaccucgucgucccccgcuacgccuucgccauggagcgcaacgccggcuccggcaucaucaucuccgacacccccguccacgacugcaacaccaccugccagacccccaagggcgccaucaacaccucccuccccuuccagaacauccaccccaucaccaucggcaagugccccaaguacgucaaguccaccaagcuccgccucgccaccggccuccgcaacauccccuccauccagucccgcggccucuucggcgccaucgccggcuucaucgagggcggcuggaccggcauggucgacggcugguacggcuaccaccaccagaacgagcagggcuccggcuacgccgccgaccucaaguccacccagaacgccaucgacgagaucaccaacaaggucaacuccgucaucgagaagaugaacacccaguucaccgccgucggcaaggaguucaaccaccucgagaagcgcaucgagaaccucaacaagaaggucgacgacggcuuccucgacaucuggaccuacaacgccgagcuccucguccuccucgagaacgagcgcacccucgacuaccacgacuccaacgucaagaaccucuacgagaagguccgcucccagcucaagaacaacgccaaggagaucggcaacggcugcuucgaguucuaccacaagugcgacaacaccugcauggaguccgucaagaacggcaccuacgacuaccccaaguacuccgaggaggccaagcucaaccgcgaggagaucgacggcgucaagcucgaguccacccgcaucuaccagauccucgccaucuacuccaccgucgccuccucccucguccucgucgucucccucggcgccaucuccuucuggaugugcuccaacggcucccuccagugccgcaucugcaucuga

SEQ ID NO: 100598 - RNA, 1701 nt, Artificial Sequence; identical to SEQ ID NO: 99865
  derived and/or modified CDS sequence (opt2) from hemagglutinin__InfluenzaA__ADF27459

SEQ ID NO: 100599 - RNA, 1701 nt, Artificial Sequence; identical to SEQ ID NO: 98705
  derived and/or modified CDS sequence (opt2) from hemagglutinin__InfluenzaA__ADF27469

SEQ ID NO: 100600 - RNA, 1701 nt, Artificial Sequence
  derived and/or modified CDS sequence (opt2) from hemagglutinin__InfluenzaA__ADF27479
augaaggccauccucgucguccuccucuacaccuucgccaccgccaacgccgacacccucugcaucggcuaccacgccaacaacuccaccgacaccgucgacaccguccucgagaagaacgucaccgucacccacuccgucaaccuccucgaggacaagcacaacggcaagcucugcaagcuccgcggcgucgccccccuccaccucggcaagugcaacaucgccggcuggauccucggcaaccccgagugcgagucccucuccaccgccuccuccugguccuacaucgucgagaccuccuccuccgacaacggcaccugcuaccccggcgacuucaucgacuacgaggagcuccgcgagcagcucuccuccgucuccuccuucgagcgcuucgagaucuuccccaagaccuccuccuggcccaaccacgacuccaacaagggcgucaccgccgccugcccccacgccggcgccaaguccuucuacaagaaccucaucuggcucgucaagaagggcaacuccuaccccaagcucuccaaguccuacaucaacgacaagggcaaggagguccucguccucuggggcauccaccaccccuccaccuccgccgaccagcagucccucuaccagaacgccgacgccuacgucuucgucggcaccucccgcuacuccaagaaguucaagcccgagaucgccauccgccccaagguccgcgaccaggagggccgcaugaacuacuacuggacccucgucgagcccggcgacaagaucaccuucgaggccaccggcaaccucgucgucccccgcuacgccuucgccauggagcgcaacgccggcuccggcaucaucaucuccgacacccccguccacgacugcaacaccaccugccagacccccaagggcgccaucaacaccucccuccccuuccagaacauccaccccaucaccaucggcaagugccccaaguacgucaaguccaccaagcuccgccucgccaccggccuccgcaacguccccuccauccacucccgcggccucuucggcgccaucgccggcuucaucgagggcggcuggaccggcauggucgacggcugguacggcuaccaccaccagaacgagcagggcuccggcuacgccgccgaccucaaguccacccagaacgccaucgacaagaucaccaacaaggucaacuccgucaucgagaagaugaacacccaguucaccgccgucggcaaggaguucaaccaccucgagaagcgcaucgagaaccucaacaagaaggucgacgacggcuuccucgacaucuggaccuacaacgccgagcuccucguccuccucgagaacgagcgcacccucgacuaccacgacuccaacgucaagaaccucuacgagaagguccgcucccagcucaagaacaacgccaaggagaucggcaacggcugcuucgaguucuaccacaagugcgacaacaccugcauggaguccgucaagaacggcaccuacgacuaccccaaguacuccgaggaggccaagcucaaccgcgaggagaucgacggcgucaagcucgaguccacccgcaucuaccagauccucgccaucuacuccaccgucgccuccucccucguccucgucgucucccucggcgccaucuccuucuggaugugcuccaacggcucccuccagugccgcaucugcaucuga

SEQ ID NO: 100601 - RNA, 1701 nt, Artificial Sequence
  derived and/or modified CDS sequence (opt2) from hemagglutinin__InfluenzaA__ADF27489
augaaggccauccucgucguccuccucuacaccuucgccaccgccaacgccgacacccucugcaucggcuaccacgccaacaacuccaccgacaccgucgacaccguccucgagaagaacgucaccgucacccacuccgucaaccuccucgaguacaagcacaacggcaagcucugcaagcuccgcggcgucgccccccuccaccucggcaagugcaacaucgccggcuggauccucggcaaccccgagugcgagucccucuccaccgccuccuccugguccuacaucgucgagaccuccuccuccgacaacggcaccugcuaccccggcgacuucaucgacuacgaggagcuccgcgagcagcucuccuccgucuccuccuucgagcgcuucgagaucuuccccaagaccuccuccuggcccaaccacgacuccaacaagggcgucaccgccgccugcccccacgccggcgccaaguccuucuacaagaaccucaucuggcucgucaagaagggcaacuccuaccccaagcucuccaaguccuacaucaacgacaagggcaaggagguccucguccucuggggcauccaccaccccuccaccuccgccgaccagcagucccucuaccagaacgccgacgccuacgucuucgucggcaccucccgcuacuccaagaaguucaagcccgagaucgccauccgccccaagguccgcgaccaggagggccgcaugaacuacuacuggacccucgucgagcccggcgacaagaucaccuucgaggccaccggcaaccucgucgucccccgcuacgccuucgccauggagcgcaacgccggcuccggcaucaucaucuccgacacccccguccacgacugcaacaccaccugccagacccccaagggcgccaucaacaccucccuccccuuccagaacauccaccccaucaccaucggcgagugccccaaguacgucaaguccaccaagcuccgccucgccaccggccuccgcaacguccccuccauccagucccgcggccucuucggcgccaucgccggcuucaucgagggcggcuggaccggcauggucgacggcugguacggcuaccaccaccagaacgagcagggcuccggcuacgccgccgaccucaaguccacccagaacgccaucgacgagaucaccaacaaggucaacuccgucaucgagaagaugaacacccaguucaccgccgucggcaaggaguucaaccaccucgagaagcgcaucgagaaccucaacaagaaggucgacgacggcuuccucgacaucuggaccuacaacgccgagcuccucguccuccucgagaacgagcgcacccucgacuaccacgacuccaacgucaagaaccucuacgagaagguccgcucccagcucaagaacaacgccaaggagaucggcaacggcugcuucgaguucuaccacaagugcgacaacaccugcauggaguccgucaagaacggcaccuacgacuaccccaaguacuccgaggaggccaagcucaaccgcgaggagaucgacggcgucaagcucgaguccacccgcaucuaccagauccucgccaucuacuccaccgucgccuccucccucguccucgucgucucccucggcgccaucuccuucuggaugugcuccaacggcucccuccagugccgcaucugcaucuga

SEQ ID NO: 100602 - RNA, 1701 nt, Artificial Sequence; identical to SEQ ID NO: 99869
  derived and/or modified CDS sequence (opt2) from hemagglutinin__InfluenzaA__ADF27499

SEQ ID NO: 100603 - RNA, 1701 nt, Artificial Sequence; identical to SEQ ID NO: 98705
  derived and/or modified CDS sequence (opt2) from hemagglutinin__InfluenzaA__ADF27509

SEQ ID NO: 100604 - RNA, 1701 nt, Artificial Sequence; identical to SEQ ID NO: 100302
  derived and/or modified CDS sequence (opt2) from hemagglutinin__InfluenzaA__ADF27529

SEQ ID NO: 100605 - RNA, 1701 nt, Artificial Sequence; identical to SEQ ID NO: 99877
  derived and/or modified CDS sequence (opt2) from hemagglutinin__InfluenzaA__ADF27539

SEQ ID NO: 100606 - RNA, 1701 nt, Artificial Sequence; identical to SEQ ID NO: 99877
  derived and/or modified CDS sequence (opt2) from hemagglutinin__InfluenzaA__ADF27549

SEQ ID NO: 100607 - RNA, 1701 nt, Artificial Sequence; identical to SEQ ID NO: 98705
  derived and/or modified CDS sequence (opt2) from hemagglutinin__InfluenzaA__ADF27559

SEQ ID NO: 100608 - RNA, 1701 nt, Artificial Sequence
  derived and/or modified CDS sequence (opt2) from hemagglutinin__InfluenzaA__ADF27569
augaaggccauccucgucguccuccucuacaccuucgccaccgccaacgccgacacccucugcaucggcuaccacgccaacaacuccaccgacaccgucgacaccguccucgagaagaacgucaccgucacccacuccgucaaccuccucgaggacaagcacaacggcaagcucugcaagcuccgcggcgucgccccccuccaccucggcaagugcaacaucgccggcuggauccucggcaaccccgagugcgagucccucuccaccgccuccuccugguccuacaucgucgagaccuccuccuccgacaacggcaccugcuaccccggcgacuucaucgacuacgaggagcuccgcgagcagcucuccuccgucuccuccuucgagcgcuucgagaucuuccccaagaccuccuccuggcccaaccacgacuccaacaagggcgucaccgccgccugcccccacgccggcgccaaguccuucuacaagaaccucaucuggcucgucaagaagggcaacuccuaccccaagcucuccaaguccuacaucaacgacaagggcaaggagguccucguccucuggggcauccaccaccccuccaccuccgccgaccagcagucccucuaccagaacgccgacgccuacgucuucgucggcaccucccgcuacuccaagaaguucaagcccgagaucgccauccgccccaagguccgcgaccaggagggccgcgucaacuacuacuggacccucgucgagcccggcgacaagaucaccuucgaggccaccggcaaccucgucgucccccgcuacgccuucgccauggagcgcaacgccggcuccggcaucaucaucuccgacacccccguccacgacugcaacaccaccugccagacccccaagggcgccaucaacaccucccuccccuuccagaacauccaccccaucaccaucggcaagugccccaaguacgucaaguccaccaagcuccgccucgccaccggccuccgcaacguccccuccauccagucccgcggccucuucggcgccaucgccggcuucaucgagggcggcuggaccggcauggucgacggcugguacggcuaccaccaccagaacgagcagggcuccggcuacgccgccgaccucaaguccacccagaacgccaucgacaagaucaccaacaaggucaacuccgucaucgagaagaugaacacccaguucaccgccgucggcaaggaguucaaccaccucgagaagcgcaucgagaaccucaacaagaaggucgacgacggcuuccucgacaucuggaccuacaacgccgagcuccucguccuccucgagaacgagcgcacccucgacuaccacgacuccaacgucaagaaccucuacgagaagguccgcucccagcucaagaacaacgccaaggagaucggcaacggcugcuucgaguucuaccacaagugcgacaacaccugcauggaguccgucaagaacggcaccuacgacuaccccaaguacuccgaggaggccaagcucaaccgcgaggagaucgacggcgucaagcucgaguccacccgcaucuaccagauccucgccaucuacuccaccgucgccuccucccucguccucgucgucucccucggcgccaucuccuucuggaugugcuccaacggcucccuccagugccgcaucugcaucuga

SEQ ID NO: 100609 - RNA, 1701 nt, Artificial Sequence; identical to SEQ ID NO: 99877
  derived and/or modified CDS sequence (opt2) from hemagglutinin__InfluenzaA__ADF27579

SEQ ID NO: 100610 - RNA, 1701 nt, Artificial Sequence
  derived and/or modified CDS sequence (opt2) from hemagglutinin__InfluenzaA__ADF27589
augaaggccauccucgucguccuccucuacaccuucgccaccgccaacgccgacacccucugcaucggcuaccacgccaacaacuccaccgacaccgucgacaccguccucgagaagaacgucaccgucacccacuccgucaaccuccucgaggacaagcacaacggcaagcucugcaagcuccgcggcgucgccccccuccaccucggcaagugcaacaucgccggcuggauccucggcaaccccgagugcgagucccucuccaccgccuccuccugguccuacaucgucgagaccuccuccuccgacaacggcaccugcuaccccggcgacuucaucgacuacgaggagcuccgcgagcagcucuccuccgucuccuccuucgagcgcuucgagaucuuccccaagaccuccuccuggcccaaccacgacuccaacaagggcgucaccgccgccugcccccacgccggcgccaaguccuucuacaagaaccucaucuggcucgucaagaagggcaacuccuaccccaagcucuccaaguccuacaucaacgacaagggcaaggagguccucguccucuggggcauccaccaccccuccaccuccgccgaccagcagucccucuaccagaacgccgacgccuacgucuucgucggcaccucccgcuacuccaagaaguucaagcccgagaucgccauccgccccaagguccgcgaccaggagggccgcaugaacuacuacuggacccucgucgagcccggcgacaagaucaccuucgaggccaccggcaaccucgucgucccccgcuacgccuucgccauggagcgcaacgccggcuccggcaucaucaucuccgacaccuccguccacgacugcaacaccaccugccagacccccaagggcgccaucaacaccucccuccccuuccagaacauccaccccaucaccaucggcaagugccccaaguacgucaaguccaccaagcuccgccucgccaccggccuccgcaacguccccuccauccagucccgcggccucuucggcgccaucgccggcuucaucgagggcggcuggaccggcauggucgacggcugguacggcuaccaccaccagaacgagcagggcuccggcuacgccgccgaccucaaguccacccagaacgccaucgacgagaucaccaacaaggucaacuccgucaucgagaagaugaacacccaguucaccgccgucggcaaggaguucaaccaccucgagaagcgcaucgagaaccucaacaagaaggucgacgacggcuuccucgacaucuggaccuacaacgccgagcuccucguccuccucgagaacgagcgcacccucgacuaccacgacuccaacgucaagaaccucuacgagaagguccgcucccagcucaagaacaacgccaaggagaucggcaacggcugcuucgaguucuaccacaagugcgacaacaccugcauggaguccgucaagaacggcaccuacgacuaccccaaguacuccgaggaggccaagcucaaccgcgaggagaucgacggcgucaagcucgaguccacccgcaucuaccagauccucgccaucuacuccaccgucgccuccucccucguccucgucgucucccucggcgccaucuccuucuggaugugcuccaacggcucccuccagugccgcaucugcaucuga

SEQ ID NO: 100611 - RNA, 1701 nt, Artificial Sequence
  derived and/or modified CDS sequence (opt2) from hemagglutinin__InfluenzaA__ADF27599
augaaggccauccucgucguccuccucuacaccuucgccaccgccaacgccgacacccucugcaucggcuaccacgccaacaacuccaccgacaccgucgacaccguccucgagaagaacgucaccgucacccacuccgucaaccuccucgaggacaagcacaacggcaagcucugcaagcuccgcggcgucgccccccuccaccucggcaagugcaacaucgccggcuggauccucggcaaccccgagugcgagucccucuccaccgccuccuccugguccuacaucgucgagaccuccuccuccgacaacggcaccugcuaccccggcgacuucaucgacuacgaggagcuccgcgagcagcucuccuccgucuccuccuucgagcgcuucgagaucuuccccaagaccuccuccuggcccaaccacgacuccaacaagggcgucaccgccgccugcccccacgccggcgccaaguccuucuacaagaaccucaucuggcucgucaagaagggcaacuccuaccccaagcucuccaaguccuacaucaacgacaagggcaaggagguccucguccucuggggcauccaccaccccuccaccuccgccgaccagcagucccucuaccagaacgccgacgccuacgucuucgucggcaccucccgcuacuccaagaaguucaagcccgagaucgccauccgccccaagguccgcgaccaggagggccgcaugaacuacuacuggacccucgucgagcccggcgacaagaucaccuucgaggccaccggcaaccucgucgucccccgcuacgccuucaccauggagcgcaacgccggcuccggcaucaucaucuccgacacccccguccacgacugcaacaccaccugccagacccccaagggcgccaucaacaccucccuccccuuccagaacauccaccccaucaccaucggcaagugccccaaguacgucaaguccaccaagcuccgccucgccaccggccuccgcaacguccccuccauccagucccgcggccucuucggcgccaucgccggcuucaucgagggcggcuggaccggcauggucgacggcugguacggcuaccaccaccagaacgagcagggcuccggcuacgccgccgaccucaaguccacccagaacgccaucgacgagaucaccaacaaggucaacuccgucaucgagaagaugaacacccaguucaccgccgucggcaaggaguucaaccaccucgagaagcgcaucgagaaccucaacaagaaggucgacgacggcuuccucgacaucuggaccuacaacgccgagcuccucguccuccucgagaacgagcgcacccucgacuaccacgacuccaacgucaagaaccucuacgagaagguccgcucccagcucaaguccaacgccaaggagaucggcaacggcugcuucgaguucuaccacaagugcgacaacaccugcauggaguccgucaagaacggcaccuacgacuaccccaaguacuccgaggaggccaagcucaaccgcgaggagaucgacggcgucaagcucgaguccacccgcaucuaccagauccucgccaucuacuccaccgucgccuccucccucguccucgucgucucccucggcgccaucuccuucuggaugugcuccaacggcucccuccagugccgcaucugcaucuga

SEQ ID NO: 100612 - RNA, 1701 nt, Artificial Sequence
  derived and/or modified CDS sequence (opt2) from hemagglutinin__InfluenzaA__ADF27609
augaaggccauccucgucguccuccucuacaccuucgccaccgccaacgccgacacccucugcaucggcuaccacgccaacaacuccaccgacaccgucgacaccguccucgagaagaacgucaccgucacccacuccgucaaccuccucgaggacaagcacaacggcaagcucugcaagcuccgcggcgucgccccccuccaccucggcaagugcaacaucgccggcuggauccucggcaaccccgagugcgagucccucuccaccgccuccuccugguccuacaucgucgagaccuccuccuccgacaacggcaccugcuaccccggcgacuucaucgacuacgaggagcuccgcgagcagcucuccuccgucuccuccuucgagcgcuucgagaucuuccccaagaccuccuccuggcccaaccacgacuccaacaagggcgucaccgccgccugcccccaggccggcgccaaguccuucuacaagaaccucaucuggcucgucaagaagggcaacuccuaccccaagcucuccaaguccuacaucaacgacaagggcaaggagguccucguccucuggggcauccaccaccccuccaccuccgccgaccagcagucccucuaccagaacgccgacgccuacgucuucgucggcaccucccgcuacuccaagaaguucaagcccgagaucgccauccgccccaagguccgcgaccaggagggccgcaugaacuacuacuggacccucgucgagcccggcgacaagaucaccuucgaggccaccggcaaccucgucgucccccgcuacgccuucgccauggagcgcaacgccggcuccggcaucaucaucuccgacacccccguccacgacugcaacaccaccugccagacccccaagggcgccaucaacaccucccuccccuuccagaacauccaccccaucaccaucggcaagugccccaaguacgucaaguccaccaagcuccgccucgccaccggccuccgcaacguccccuccauccagucccgcggccucuucggcgccaucgccggcuucaucgagggcggcuggaccggcauggucgacggcugguacggcuaccaccaccagaacgagcagggcuccggcuacgccgccgaccucaaguccacccagaacgccaucgacgagaucaccaacaaggucaacuccgucaucgagaagaugaacacccaguucaccgccgucggcaaggaguucaaccaccucgagaagcgcaucgagaaccucaacaagaaggucgacgacggcuuccucgacaucuggaccuacaacgccgagcuccucguccuccucgagaacgagcgcacccucgacuaccacgacuccaacgucaagaaccucuacgagaagguccgcucccagcucaagaacaacgccaaggagaucggcaacggcugcuucgaguucuaccacaagugcgacaacaccugcauggaguccgucaagaacggcaccuacgacuaccccaaguacuccgaggaggccaagcucaaccgcgaggagaucgacggcgucaagcucgaguccacccgcaucuaccagauccucgccaucuacuccaccgucgccuccucccucguccucgucgucucccucggcgccaucuccuucuggaugugcuccaacggcucccuccagugccgcaucugcaucuga

SEQ ID NO: 100613 - RNA, 1701 nt, Artificial Sequence
  derived and/or modified CDS sequence (opt2) from hemagglutinin__InfluenzaA__ADF27619
augaaggccauccucgucguccuccucuacaccuucgccaccgccaacgccgacacccucugcaucggcuaccacgccaacaacuccaccgacaccgucgacaccguccucgagaagaacgucaccgucacccacuccgucaaccuccucgaggacaagcacaacggcaagcucugcaagcuccgcggcgucgucccccuccaccucggcaagugcaacaucgccggcuggauccucggcaaccccgagugcgagucccucuccaccgccuccuccugguccuacaucgucgagaccuccuccuccgacaacggcaccugcuaccccggcgacuucaucgacuacgaggagcuccgcgagcagcucuccuccgucuccuccuucgagcgcuucgagaucuuccccaagaccuccuccuggcccaaccacgacuccaacaagggcgucaccgccgccugcccccacgccggcgccaaguccuucuacaagaaccucaucuggcucgucaagaagggcaacuccuaccccaagcucuccaaguccuacaucaacgacaagggcaaggagguccucguccucuggggcauccaccaccccuccaccuccgccgaccagcagucccucuaccagaacgccgacgccuacgucuucgucggcaccucccgcuacuccaagaaguucaagcccgagaucgccauccgccccaagguccgcgaccaggagggccgcaugaacuacuacuggacccucgucgagcccggcgacaagaucaccuucgaggccaccggcaaccucgucgucccccgcuacgccuucgccauggagcgcaacgccggcuccggcaucaucaucuccgacacccccguccacgacugcaacaccaccugccagacccccaagggcgccaucaacaccucccuccccuuccagaacauccaccccaucaccaucggcaagugccccaaguacgucaaguccaccaagcuccgccucgccaccggccuccgcaacguccccuccauccagucccgcggccucuucggcgccaucgccggcuucaucgagggcggcuggaccggcauggucgacggcugguacggcuaccaccaccagaacgagcagggcuccggcuacgccgccgaccucaaguccacccagaacgccaucgacaagaucaccaacaaggucaacuccgucaucgagaagaugaacacccaguucaccgccgucggcaaggaguucaaccaccucgagaagcgcaucgagaaccucaacaagaaggucgacgacggcuuccucgacaucuggaccuacaacgccgagcuccucguccuccucgagaacgagcgcacccucgacuaccacgacuccaacgucaagaaccucuacgagaagguccgcucccagcucaagaacaacgccaaggagaucggcaacggcugcuucgaguucuaccacaagugcgacaacaccugcauggaguccgucaagaacggcaccuacgacuaccccaaguacuccgaggaggccaagcucaaccgcgaggagaucgacggcgucaagcucgaguccacccgcaucuaccagauccucgccaucuacuccaccgucgccuccucccucguccucgucgucucccucggcgccaucuccuucuggaugugcuccaacggcucccuccagugccgcaucugcaucuga

SEQ ID NO: 100614 - RNA, 1701 nt, Artificial Sequence; identical to SEQ ID NO: 99877
  derived and/or modified CDS sequence (opt2) from hemagglutinin__InfluenzaA__ADF27629

SEQ ID NO: 100615 - RNA, 1701 nt, Artificial Sequence
  derived and/or modified CDS sequence (opt2) from hemagglutinin__InfluenzaA__ADF27649
augaaggccauccucgucguccuccucuacaccuucgccaccgccaacgccgacacccucugcaucggcuaccacgccaacaacuccaccgacaccgucgacaccguccucgagaagaacgucaccgucacccacuccgucaaccuccucgaggacaagcacaacggcaagcucugcaagcuccgcggcgucgccccccuccaccucggcaagugcaacaucgccggcuggauccucggcaaccccgagugcgagucccucuccaccgccuccuccugguccuacaucgucgagaccuccuccuccgacaacggcaccugcuaccccggcgacuucaucgacuacgaggagcuccgcgagcagcucuccuccgucuccuccuucgagcgcuucgagaucuuccccaagaccuccuccuggcccaaccacgacuccaacaagggcgucaccgccgccugcccccacgccggcgccaaguccuucuacaagaaccucaucuggcucgucaagaagggcaacuccuaccccaagcucuccaaguccuacaucaacgacaagggcaaggagguccucguccucuggggcauccaccaccccuccaccuccgccgaccagcagucccucuaccagaacgccgacgccuacgucuucgucggcaccucccgcuacuccaagaaguucaagcccgagaucgccauccgccccaagguccgcgaccaggagggccgcaugaacuacuacuggacccucgucgagcccggcgacaagaucaccuucgaggccaccggcaaccucgucgucccccgcuacgccuucgccauggagcgcaacgccggcuccggcaucaucaucuccgacacccccguccacgacugcaacaccaccugccagacccccaagggcgccaucaacaccucccuccccuuccagaacauccaccccaucaccaucggcaagugccccaaguacgucaaguccaccaagcuccgccucgccaccggccuccgcaacguccccuccauccagccccgcggccucuucggcgccaucgccggcuucaucgagggcggcuggaccggcauggucgacggcugguacggcuaccaccaccagaacgagcagggcuccggcuacgccgccgaccucaaguccacccagaacgccaucgacaagaucaccaacaaggucaacuccgucaucgagaagaugaacacccaguucaccgccgucggcaaggaguucaaccaccucgagaagcgcaucgagaaccucaacaagaaggucgacgacggcuuccucgacaucuggaccuacaacgccgagcuccucguccuccucgagaacgagcgcacccucgacuaccacgacuccaacgucaagaaccucuacgagaagguccgcucccagcucaagaacaacgccaaggagaucggcaacggcugcuucgaguucuaccacaagugcgacaacaccugcauggaguccgucaagaacggcaccuacgacuaccccaaguacuccgaggaggccaagcucaaccgcgaggagaucgacggcgucaagcucgaguccacccgcaucuaccagauccucgccaucuacuccaccgucgccuccucccucguccucgucgucucccucggcgccaucuccuucuggaugugcuccaacggcucccuccagugccgcaucugcaucuga

SEQ ID NO: 100616 - RNA, 1701 nt, Artificial Sequence; identical to SEQ ID NO: 99877
  derived and/or modified CDS sequence (opt2) from hemagglutinin__InfluenzaA__ADF27659

SEQ ID NO: 100617 - RNA, 1701 nt, Artificial Sequence; identical to SEQ ID NO: 100354
  derived and/or modified CDS sequence (opt2) from hemagglutinin__InfluenzaA__ADF27669

SEQ ID NO: 100618 - RNA, 1701 nt, Artificial Sequence; identical to SEQ ID NO: 99806
  derived and/or modified CDS sequence (opt2) from hemagglutinin__InfluenzaA__ADF27679

SEQ ID NO: 100619 - RNA, 1701 nt, Artificial Sequence; identical to SEQ ID NO: 100415
  derived and/or modified CDS sequence (opt2) from hemagglutinin__InfluenzaA__ADF27689

SEQ ID NO: 100620 - RNA, 1701 nt, Artificial Sequence
  derived and/or modified CDS sequence (opt2) from hemagglutinin__InfluenzaA__ADF27699
augaaggccauccucgucguccuccucuacaccuucgccaccgccaacgccgacacccucugcaucggcuaccacgccaacaacuccaccgacaccgucgacaccguccucgagaagaacgucaccgucacccacuccgucaaccuccucgaggacaagcacaacggcaagcucugcaagcuccgcggcgucgccccccuccaccucggcaagugcaacaucgccggcuggauccucggcaaccccgagugcgagucccucuccaccgccuccuccugguccuacaucgucgagaccuccuccuccgacaacggcaccugcuaccccggcgacuucaucgacuacgaggagcuccgcgagcagcucuccuccgucuccuccuucgagcgcuucgagauguuccccaagaccuccuccuggcccaaccacgacuccaacaagggcgucaccgccgccugcccccacgccggcgccaaguccuucuacaagaaccucaucuggcucgucaagaagggcaacuccuaccccaagcucuccaaguccuacaucaacgacaagggcaaggagguccucguccucuggggcauccaccaccccuccaccuccgccgaccagcagucccucuaccagaacgccgacgccuacgucuucgucggcaccucccgcuacuccaagaaguucaagcccgagaucgccauccgccccaagguccgcgaccaggagggccgcaugaacuacuacuggacccucgucgagcccggcgacaagaucaccuucgaggccaccggcaaccucgucgucccccgcuacgccuucgccauggagcgcaacgccggcuccggcaucaucaucuccgacacccccguccacaacugcaacaccaccugccagacccccaagggcgccaucaacaccucccuccccuuccagaacauccaccccaucaccaucggcaagugccccaaguacgucaaguccaccaagcuccgccucgccaccggccuccgcaacguccccuccauccagucccgcggccucuucggcgccaucgccggcuucaucgagggcggcuggaccggcauggucgacggcugguacggcuaccaccaccagaacgagcagggcuccggcuacgccgccgaccucaaguccacccagaacgccaucgacgagaucaccaacaaggucaacuccgucaucgagaagaugaacacccaguucaccgccgucggcaaggaguucaaccaccucgagaagcgcaucgagaaccucaacaagaaggucgacgacggcuuccucgacaucuggaccuacaacgccgagcuccucguccuccucgagaacgagcgcacccucgacuaccacgacuccaacgucaagaaccucuacgagaagguccgcucccagcucaagaacaacgccaaggaggucggcaacggcugcuucgaguucuaccacaagugcgacaacaccugcauggaguccgucaagaacggcaccuacgacuaccccaaguacuccgaggaggccaagcucaaccgcgaggagaucgacggcgucaagcucgaguccacccgcaucuaccagauccucgccaucuacuccaccgucgccuccucccucguccucgucgucucccucggcgccaucuccuucuggaugugcuccaacggcucccuccagugccgcaucugcaucuga

SEQ ID NO: 100621 - RNA, 1701 nt, Artificial Sequence
  derived and/or modified CDS sequence (opt2) from hemagglutinin__InfluenzaA__ADF27709
augaaggccauccucgucguccuccucuacaccuucgccaccgccaacgccgacacccucugcaucggcuaccacgccaacaacuccaccgacaccgucgacaccguccucgagaagaacgucaccgucacccacuccgucaaccuccucgaggacaagcacaacggcaagcucugcaagcuccgcggcgucgccccccuccaccucggcaagugcaacaucgccggcuggauccucggcaaccccgagugcgagucccucuccaccgccuccuccugguccuacaucgucgagaucuccuccuccgacaacggcaccugcuaccccggcgacuucaucaacuacgaggagcuccgcgagcagcucuccuccgucuccuccuucgagcgcuucgagaucuuccccaagaccuccuccuggcccaaccacgacuccaacaagggcgucaccgccgccugcccccacgccggcgccaaguccuucuacaagaaccucaucuggcucgucaagaagggcaacuccuaccccaagcucuccaaguccuacaucaacgacaagggcaaggagguccucguccucuggggcauccaccaccccuccaccuccgccgaccagcagucccucuaccagaacgccgacgccuacgucuucgucggcaccucccgcuacuccaagaaguucaagcccgagaucgccauccgccccaagguccgcgaccaggagggccgcaugaacuacuacuggacccucgucgagcccggcgacaagaucaccuucgaggccaccggcaaccucgucgucccccgcuacgccuucgccauggagcgcaacgccggcuccggcaucaucaucuccgacacccccguccacgacugcaacaccaccugccagacccccaagggcgccaucaacaccucccuccccuuccagaacauccaccccaucaccaucggcaagugccccaaguacgucaaguccaccaagcuccgccucgccaccggccuccgcaacguccccuccauccagucccgcggccucuucggcgccaucgccggcuucaucgagggcggcuggaccggcauggucgacggcugguacggcuaccaccaccagaacgagcagggcuccggcuacgccgccgaccucaaguccacccagaacgccaucgacaagaucaccaacaaggucaacuccgucaucgagaagaugaacacccaguucaccgccgucggcaaggaguucaaccaccucgagaagcgcaucgagaaccucaacaagaaggucgacgacggcuuccucgacaucuggaccuacaacgccgagcuccucguccuccucgagaacgagcgcacccucgacuaccacgacuccaacgucaagaaccucuacgagaagguccgcucccagcucaagaacaacgccaaggagaucggcaacggcugcuucgaguucuaccacaagugcgacaacaccugcauggaguccgucaagaacggcaccuacgacuaccccaaguacuccgaggaggccaagcucaaccgcgaggagaucgacggcgucaagcucgaguccacccgcaucuaccagauccucgccaucuacuccaccgucgccuccucccucguccucgucgucucccucggcgccaucuccuucuggaugugcuccaacggcucccuccagugccgcaucugcaucuga

SEQ ID NO: 100622 - RNA, 1701 nt, Artificial Sequence; identical to SEQ ID NO: 99869
  derived and/or modified CDS sequence (opt2) from hemagglutinin__InfluenzaA__ADF27785

SEQ ID NO: 100623 - RNA, 1701 nt, Artificial Sequence
  derived and/or modified CDS sequence (opt2) from hemagglutinin__InfluenzaA__ADF27795
augaaggccauccucgucguccuccucuacaccuucgccaccgccaacgccgacacccucugcaucggcuaccacgccaacaacuccaccgacaccgucgacaccguccucgagaagaacgucaccgucacccacuccgucaaccuccucgaggacaagcacaacggcaagcucugcaagcuccgcggcgucgccccccuccaccucggcaagugcaacaucgccggcuggauccucggcaaccccgagugcgagucccucuccaccgccuccuccugguccuacaucgucgagaccuccuccuccgacaacggcaccugcuaccccggcgacuucaucgacuacgaggagcuccgcgagcagcucuccuccgucuccuccuucgagcgcuucgagaucuuccccaagaccuccuccuggcccaaccacgacuccaacaagggcgucaccgccgccugcccccacgccggcgccaaguccuucuacaagaaccucaucuggcucgucaagaagggcaacuccuaccccaagcucuccaaguccuacaucaacgacaagggcaaggagguccucguccucuggggcauccaccaccccuccaccuccgccgaccagcagucccucuaccagaacgccgacgccuacgucuucgucggcaccucccgcuacuccaagaaguucaagcccgagaucgccauccgccccaagguccgcgaccaggagggccgcaugaacuacuacuggacccucgucaagcccggcgacaagaucaccuucgaggccaccggcaaccucgucgucccccgcuacgccuucgccauggagcgcaacgccggcuccggcaucaucaucuccgacacccccguccacgacugcaacaccaccugccagacccccaagggcgccaucaacaccucccuccccuuccagaacauccaccccaucaccaucggcaagugccccaaguacgucaaguccaccaagcuccgccucgccaccggccuccgcaacguccccuccauccagucccgcggccucuucggcgccaucgccggcuucaucgagggcggcuggaccggcauggucgacggcugguacggcuaccaccaccagaacgagcagggcuccggcuacgccgccgaccucaaguccacccagaacgccaucgacgagaucaccaacaaggucaacuccgucaucgagaagaugaacacccaguucaccgccgucggcaaggaguucaaccaccucgagaagcgcaucgagaaccucaacaagaaggucgacgacggcuuccucgacaucuggaccuacaacgccgagcuccucguccuccucgagaacgagcgcacccucgacuaccacgacuccaacgucaagaaccucuacgagaagguccgcucccagcucaagaacaacgccaaggagaucggcaacggcugcuucgaguucuaccacaagugcgacaacaccugcauggaguccgucaagaacggcaccuacgacuaccccaaguacuccgaggaggccaagcucaaccgcgaggagaucgacggcgucaagcucgaguccacccgcaucuaccagauccucgccaucuacuccaccgucgccuccucccucguccucgucgucucccucggcgccaucuccuucuggaugugcuccaacggcucccuccagugccgcaucugcaucuga

SEQ ID NO: 100624 - RNA, 1701 nt, Artificial Sequence; identical to SEQ ID NO: 99877
  derived and/or modified CDS sequence (opt2) from hemagglutinin__InfluenzaA__ADF27805

SEQ ID NO: 100625 - RNA, 1701 nt, Artificial Sequence
  derived and/or modified CDS sequence (opt2) from hemagglutinin__InfluenzaA__ADF27815
augaaggccauccucgucguccuccucuacaccuucgccaccgccaacgccgacacccucugcaucggcuaccacgccaacaacuccaccgacaccgucgacaccguccucgagaagaacgucaccgucacccacuccgucaaccuccucgaggacaagcacaacggcaagcucugcaagcuccgcggcgucgccccccuccaccucggcaagugcaacaucgccggcuggauccucggcaaccccgagugcgagucccucuccaccgccuccuccugguccuacaucgucgagaccuccuccuccgacaacggcaccugcuaccccggcgacuucaucgacuacgaggagcuccgcgagcagcucuccuccgucuccuccuucgagcgcuucgagaucuuccccaagaccuccuccuggcccaaccacgacuccaacaagggcgucaccgccgccugcccccacgacggcgccaaguccuucuacaagaaccucaucuggcucgucaagaagggcaacuccuaccccaagcucuccaaguccuacaucaacgacaagggcaaggagguccucguccucuggggcauccaccaccccuccaccuccgccgaccagcagucccucuaccagaacgccgacgccuacgucuucgucggcaccucccgcuacuccaagaaguucaagcccgagaucgccauccgccccaagguccgcgaccaggagggccgcaugaacuacuacuggacccucgucgagcccggcgacaagaucaccuucgaggccaccggcaaccucgucgucccccgcuacgccuucgccauggagcgcaacgccggcuccggcaucaucaucuccgacacccccguccacgacugcaacaccaccugccagacccccaagggcgccaucaacaccucccuccccuuccagaacauccaccccaucaccaucggcaagugccccaaguacgucaaguccaccaagcuccgccucgccaccggccuccgcaacguccccuccauccagucccgcggccucuucggcgccaucgccggcuucaucgagggcggcuggaccggcauggucgacggcugguacggcuaccaccaccagaacgagcagggcuccggcuacgccgccgaccucaaguccacccagaacgccaucgacaagaucaccaacaaggucaacuccgucaucgagaagaugaacacccaguucaccgccgucggcaaggaguucaaccaccucgagaagcgcaucgagaaccucaacaagaaggucgacgacggcuuccucgacaucuggaccuacaacgccgagcuccucguccuccucgagaacgagcgcacccucgacuaccacgacuccaacgucaagaaccucuacgagaagguccgcucccagcucaagaacaacgccaaggagaucggcaacggcugcuucgaguucuaccacaagugcgacaacaccugcauggaguccgucaagaacggcaccuacgacuaccccaaguacuccgaggaggccaagcucaaccgcgaggagaucgacggcgucaagcucgaguccacccgcaucuaccagauccucgccaucuacuccaccgucgccuccucccucguccucgucgucucccucggcgccaucuccuucuggaugugcuccaacggcucccuccagugccgcaucugcaucuga

SEQ ID NO: 100626 - RNA, 1701 nt, Artificial Sequence
  derived and/or modified CDS sequence (opt2) from hemagglutinin__InfluenzaA__ADF27825
augaaggccauccucgucguccuccucuacaccuucgccaccgccaacgccgacacccucugcaucggcuaccacgccaacaacuccaccgacaccgucgacaccguccucgagcgcaacgucaccgucacccacuccgucaaccuccucgaggacaagcacaacggcaagcucugcaagcuccgcggcgucgccccccuccaccucggcaagugcaacaucgccggcuggauccucggcaaccccgagugcgagucccucuccaccgccuccuccugguccuacaucgucgagaccuccuccuccgacaacggcaccugcuaccccggcgacuucaucgacuccgaggagcuccgcgagcagcucuccuccgucuccuccuucgagcgcuucgagaucuuccccaagaccuccuccuggcccaaccacgacuccaacaagggcgucaccgccgccugcccccacgccggcgccaaguccuucuacaagaaccucaucuggcucgucaagaagggcaacuccuaccccaagcucuccaaguccuacaucaacgacaagggcaaggagguccucguccucuggggcauccaccaccccuccaccuccgccgaccagcagucccucuaccagaacgccgacgccuacgucuucgucggcaccucccgcuacuccaagaaguucaagcccgagaucgccauccgccccaagguccgcgaccaggagggccgcaugaacuacuacuggacccucgucgagcccggcgacaagaucaccuucgaggccaccggcaaccucgucgucccccgcuacgccuucgccauggagcgcaacgccggcuccggcaucaucaucuccgacacccccguccacgacugcaacaccaccugccagacccccaagggcgccaucaacaccucccuccccuuccagaacauccaccccaucaccaucggcaagugccccaaguacgucaaguccaccaagcuccgccucgccaccggccuccgcaacguccccuccauccagucccgcggccucuucggcgccaucgccggcuucaucgagggcggcuggaccggcauggucgacggcugguacggcuaccaccaccagaacgagcagggcuccggcuacgccgccgaccucaaguccacccagaacgccaucgacgagaucaccaacaaggucaacuccgucaucgagaagaugaacacccaguucaccgccgucggcaaggaguucaaccaccucgagaagcgcaucgagaaccucaacaagaaggucgacgacggcuuccucgacaucuggaccuacaacgccgagcuccucguccuccucgagaacgagcgcacccucgacuaccacgacuccaacgucaagaaccucuacgagaagguccgcucccagcucaagaacaacgccaaggagaucggcaacggcugcuucgaguucuaccacaagugcgacaacaccugcauggaguccgucaagaacggcaccuacgacuaccccaaguacuccgaggaggccaagcucaaccgcgaggagaucgacggcgucaagcucgaguccacccgcaucuaccagauccucgccaucuacuccaccgucgccuccucccucguccucgucgucucccucggcgccaucuccuucuggaugugcuccaacggcucccuccagugccgcaucugcaucuga

SEQ ID NO: 100627 - RNA, 1701 nt, Artificial Sequence
  derived and/or modified CDS sequence (opt2) from hemagglutinin__InfluenzaA__ADF27845
augaaggccauccucgucguccuccucuacaccuucgccaccgccaacgccgacacccucugcaucggcuaccacgccaacaacuccaccgacaccgucgacaccguccucgagaagaacgucaccgucacccacuccgccaaccuccucgaggacaagcacaacggcaagcucugcaagcuccgcggcgucgccccccuccaccucggcaagugcaacaucgccggcuggauccucggcaaccccgagugcgagucccucuccaccgccuccuccugguccuacaucgucgagaccuccuccuccgacaacggcaccugcuaccccggcgacuucaucgacuacgaggagcuccgcgagcagcucuccuccgucuccuccuucgagcgcuucgagaucuuccccaagaccuccuccuggcccaaccacgacuccaacaagggcgucaccgccgccugcccccacgccggcgccaaguccuucuacaagaaccucaucuggcucgucaagaagggcaacuccuaccccaagcucuccaaguccuacaucaacgacaagggcaaggagguccucguccucuggggcauccaccaccccuccaccaacgccgaccagcagucccucuaccagaacgccgacgccuacgucuucgucggcaccucccgcuacuccaagaaguucaagcccgagaucgccauccgccccaagguccgcgaccaggagggccgcaugaacuacuacuggacccucgucgagcccggcgacaagaucaccuucgaggccaccggcaaccucgucgucccccgcuacgccuucgccauggagcgcaacgccggcuccggcaucaucaucuccgacacccccguccacgacugcaacaccaccugccagacccccaagggcgccaucaacaccucccuccccuuccagaacauccaccccaucaccaucggcaagugccccaaguacgucaaguccaccaagcuccgccucgccaccggccuccgcaacguccccuccauccagucccgcggccucuucggcgccaucgccggcuucaucgagggcggcuggaccggcauggucgacggcugguacggcuaccaccaccagaacgagcagggcuccggcuacgccgccgaccucaaguccacccagaacgccaucgacgagaucaccaacaaggucaacuccgucaucgagaagaugaacacccaguucaccgccgucggcaaggaguucaaccaccucgagaagcgcaucgagaaccucaacaagaaggucgacgacggcuuccucgacaucuggaccuacaacgccgagcuccucguccuccucgagaacgagcgcacccucgacuaccacgacuccaacgucaagaaccucuacgagaagguccgcucccagcucaagaacaacgccaaggagaucggcaacggcugcuucgaguucuaccacaagugcgacaacaccugcauggaguccgucaagaacggcaccuacgacuaccccaaguacuccgaggaggccaagcucaaccgcgaggagaucgacggcgucaagcucgaguccacccgcaucuaccagauccucgccaucuacuccaccgucgccuccucccucguccucgucgucucccucggcgccaucuccuucuggaugugcuccaacggcucccuccagugccgcaucugcaucuga

SEQ ID NO: 100628 - RNA, 1701 nt, Artificial Sequence; identical to SEQ ID NO: 99869
  derived and/or modified CDS sequence (opt2) from hemagglutinin__InfluenzaA__ADF27855

SEQ ID NO: 100629 - RNA, 1701 nt, Artificial Sequence; identical to SEQ ID NO: 99869
  derived and/or modified CDS sequence (opt2) from hemagglutinin__InfluenzaA__ADF27865

SEQ ID NO: 100630 - RNA, 1701 nt, Artificial Sequence; identical to SEQ ID NO: 99869
  derived and/or modified CDS sequence (opt2) from hemagglutinin__InfluenzaA__ADF27875

SEQ ID NO: 100631 - RNA, 1701 nt, Artificial Sequence; identical to SEQ ID NO: 99869
  derived and/or modified CDS sequence (opt2) from hemagglutinin__InfluenzaA__ADF27885

SEQ ID NO: 100632 - RNA, 1701 nt, Artificial Sequence; identical to SEQ ID NO: 98705
  derived and/or modified CDS sequence (opt2) from hemagglutinin__InfluenzaA__ADF27895

SEQ ID NO: 100633 - RNA, 1701 nt, Artificial Sequence
  derived and/or modified CDS sequence (opt2) from hemagglutinin__InfluenzaA__ADF27915
augaaggccauccucgucguccuccucuacaccuucgccaccgccaacgccgacacccucugcaucggcuaccacgccaacaacuccaccgacaccgucgacaccguccucgagaagaacgucaccgucacccacuccgucaaccuccucgaggacaagcacaacggcaagcucugcaagcuccgcggcgucgccccccuccaccucggcaagugcaacaucgccggcuggauccucggcaaccccgagugcgagucccucuccaccgccuccuccugguccuacaucgucgagaccuccuccuccgacaacggcaccugcuaccccggcgacuucaucgacuacgaggagcuccgcgagcagcucuccuccgucuccuccuucgagcgcuucgagaucuuccccaagaccuccuccuggcccaaccacgacuccaacaagggcgucaccgccgccugcccccacgccggcgccaaguccuucuacaagaaccucaucuggcucgucaagaagggcaacuccuaccccaagcucuccaaguccuacaucaacgacaagggcaaggagguccucguccucuggggcauccaccaccccuccgccuccgccgaccagcagucccucuaccagaacgccgacgccuacgucuucgucggcaccucccgcuacuccaagaaguucaagcccgagaucgccauccgccccaagguccgcgaccaggagggccgcaugaacuacuacuggacccucgucgagcccggcgacaagaucaccuucgaggccaccggcaaccucgucgucccccgcuacgccuucgccauggagcgcaacgccggcuccggcaucaucaucuccgacacccccguccacgacugcaacaccaccugccagacccccaagggcgccaucaacaccucccuccccuuccagaacauccaccccaucaccaucggcaagugccccaaguacgucaaguccaccaagcuccgccucgccaccggccuccgcaacguccccuccauccagucccgcggccucuucggcgccaucgccggcuucaucgagggcggcuggaccggcauggucgacggcugguacggcuaccaccaccagaacgagcagggcuccggcuacgccgccgaccucaaguccacccagaacgccaucgacaagaucaccaacaaggucaacuccgucaucgagaagaugaacacccaguucaccgccgucggcaaggaguucaaccaccucgagaagcgcaucgagaaccucaacaagaaggucgacgacggcuuccucgacaucuggaccuacaacgccgagcuccucguccuccucgagaacgagcgcacccucgacuaccacgacuccaacgucaagaaccucuacgagaagguccgcucccagcucaagaacaacgccaaggagaucggcaacggcugcuucgaguucuaccacaagugcgacaacaccugcauggaguccgucaagaacggcaccuacgacuaccccaaguacuccgaggaggccaagcucaaccgcgaggagaucgacggcgucaagcucgaguccacccgcaucuaccagauccucgccaucuacuccaccgucgccuccucccucguccucgucgucucccucggcgccaucuccuucuggaugugcuccaacggcucccuccagugccgcaucugcaucuga

SEQ ID NO: 100634 - RNA, 1701 nt, Artificial Sequence
  derived and/or modified CDS sequence (opt2) from hemagglutinin__InfluenzaA__ADF27925
augaaggccauccucgucguccuccucuacaccuucgccaccgccaacgccgacacccucugcaucggcuaccacgccaacaacuccaccgacaccgucgacaccguccucgagaagaacgucaccgucacccacuccgucaaccuccucgaggacaagcacaacggcaagcucugcaagcuccgcggcgucgccccccuccaccucggcaagugcaacaucgccggcuggauccucggcaaccccgagugcgagucccucuccaccgccuccuccugguccuacaucgucgagaccuccuccuccgacaacggcaccugcuaccccggcgacuucaucgacuacgaggagcuccgcgagcagcucuccuccgucuccuccuucgagcgcuucgagaucuuccccaagaccuccuccuggcccaaccacgacuccaacaagggcgucaccgccgccugcccccacgccggcgccaaguccuucuacaagaaccucaucuggcucgucaagaagggcaacuccuaccccaagcucuccaacuccuacaucaacgacaagggcaaggagguccucguccucuggggcauccaccaccccuccaccuccgccgaccagcagucccucuaccagaacgccgacgccuacgucuucgucggcaccucccgcuacuccaagaaguucaagcccgagaucgccauccgccccaagguccgcgaccaggagggccgcaugaacuacuacuggacccucgucgagcccggcgacaagaucaccuucgaggccaccggcaaccucgucgucccccgcuacgccuucgccauggagcgcaacgccggcuccggcaucaucaucuccgacacccccgcccacgacugcaacaccaccugccagacccccaagggcgccaucaacaccucccuccccuuccagaacauccaccccaucaccaucggcaagugccccaaguacgucaaguccaccaagcuccgcauggccaccggccuccgcaacguccccuccauccagucccgcggccucuucggcgccaucgccggcuucaucgagggcggcuggaccggcauggucgacggcugguacggcuaccaccaccagaacgagcagggcuccggcuacgccgccgaccucaaguccacccagaacgccaucgacgagaucaccaacaaggucaacuccgucaucgagaagaugaacacccaguucaccgccgucggcaaggaguucaaccaccucgagaagcgcaucgagaaccucaacaagaaggucgacgacggcuuccucgacaucuggaccuacaacgccgagcuccucguccuccucgagaacgagcgcacccucgacuaccacgacuccaacgucaagaaccucuacgagaagguccgcucccagcucaagaacaacgccaaggagaucggcaacggcugcuucgaguucuaccacaagugcgacaacaccugcauggaguccgucaagaacggcaccuacgacuaccccaaguacuccgaggaggccaagcucaaccgcgaggagaucgacggcgucaagcucgaguccacccgcaucuaccagauccucgccaucuacuccaccgucgccuccucccucguccucgucgucucccucggcgccaucuccuucuggaugugcuccaacggcucccuccagugccgcaucugcaucuga

SEQ ID NO: 100635 - RNA, 1701 nt, Artificial Sequence
  derived and/or modified CDS sequence (opt2) from hemagglutinin__InfluenzaA__ADF27935
augaaggccauccucgucguccuccucuacaccuucgccaccgccaacgccgacacccucugcaucggcuaccacgccaacaacuccaccgacaccgucgacaccguccucgagaagaacgucaccgucacccacuccgucaaccuccucgaggacaagcacaacggcaagcucugcaagcuccgcggcgucgccccccuccaccucggcaagugcaacaucgccggcuggauccucggcaaccccaagugcgagucccucuccaccgaguccuccugguccuacaucgucgagaccuccuccuccgacaacggcaccugcuaccccggcgacuucaucaacuacgaggagcuccgcgagcagcucuccuccgucuccuccuucgagcgcuucgagaucuuccccaagaccuccuccuggcccaaccacgacuccaacaagggcgucaccgccgccugcccccacgccggcgccaaguccuucuacaagaaccucaucuggcucgucaagaagggcaacuccuaccccaagcucuccaaguccuacaucaacgacaagggcaaggagguccucguccucuggggcauccaccaccccuccaccuccgccgaccagcagucccucuaccagaacgccgacgccuacgucuucgucggcaccucccgcuacuccaagaaguucaagcccgagaucgccauccgccccaagguccgcgaccaggagggccgcaugaacuacuacuggacccucgucgagcccggcgacaagaucaccuucgaggccaccggcaaccucgucgucccccgcuacgccuucgccauggagcgcaacgccggcuccggcaucaucaucuccgacacccccguccacgacugcaacaccaccugccagacccccaagggcgccaucaacaccucccuccccuuccagaacauccaccccaucaccaucggcaagugccccaaguacgucaaguccaccaagcuccgccucgccaccggccuccgcaacguccccuccauccagucccgcggccucuucggcgccaucgccggcuucaucgagggcggcuggaccggcauggucgacggcugguacggcuaccaccaccagaacgagcagggcuccggcuacgccgccgaccucaaguccacccagaacgccaucgacaagaucaccaacaaggucaacuccgucaucgagaagaugaacacccaguucaccgccgucggcaaggaguucaaccaccucgagaagcgcaucgagaaccucaacaagaaggucgacgacggcuuccucgacaucuggaccuacaacgccgagcuccucguccuccucgagaacgagcgcacccucgacuaccacgacuccaacgucaagaaccucuacgagaagguccgcucccagcucaagaacaacgccaaggagaucggcaacggcugcuucgaguucuaccacaagugcgacaacaccugcauggaguccgucaagaacggcaccuacgacuaccccaaguacuccgaggaggccaagcucaaccgcgaggagaucgacggcgucaagcucgaguccacccgcaucuaccagauccucgccaucuacuccaccgucgccuccucccucguccucgucgucucccucggcgccaucuccuucuggaugugcuccaacggcucccuccagugccgcaucugcaucuga

SEQ ID NO: 100636 - RNA, 1701 nt, Artificial Sequence
  derived and/or modified CDS sequence (opt2) from hemagglutinin__InfluenzaA__ADF27955
augaaggccauccucgucguccuccucuacaccuucgccaccgccaacgccgacacccucugcaucggcuaccacgccaacaacuccaccgacaccgucgacaccguccucgagaagaacgucaccgucacccacuccgucaaccuccucgaggacaagcacaacggcaagcucugcaagcuccgcggcgucgccccccuccaccucggcaagugcaacaucgccggcuggauccucggcaaccccgagugcgagucccucuccaccgccuccuccugguccuacaucgucgagaccuccuccuccgacaacggcaccugcuaccccggcgacuucaucgacuacgaggagcuccgcgagcagcucuccuccgucuccuccuucgagcgcuucgagaucuuccccaagaccuccuccuggcccaaccacgacuccaacaagggcgucaccgccgccugcccccacgccggcgccaaguccuucuacaagaaccucaucuggcucgucaagaagggcaacuccuaccccaagcucuccaacuccuacaucaacgacaagggcaaggagguccucguccucuggggcauccaccaccccuccaccuccgccgaccagcagucccucuaccagaacgccgacgccuacgucuucgucggcaccucccgcuacuccaagaaguucaagcccgagaucgccauccgccccaagguccgcgaccaggagggccgcaugaacuacuacuggacccucgucgagcccggcgacaagaucaccuucgaggccaccggcaaccucgucgucccccgcuacgccuucgccauggagcgcaacgccggcuccggcaucaucaucuccgacacccccguccacgacugcaacaccaccugccagacccccaagggcgccaucaacaccucccuccccuuccagaacauccaccccaucaccaucggcaagugccccaaguacgucaaguccaccaagcuccgccucgccaccggccuccgcaacguccccuccauccagucccgcggccucuucggcgccaucgccggcuucaucgagggcggcuggaccggcauggucgacggcugguacggcuaccaccaccagaacgagcagggcuccggcuacgccgccgaccucaaguccacccagaacgccaucgacaagaucaccaacaaggucaacuccgucaucgagaagaugaacacccaguucaccgccgucggcaaggaguucaaccaccucgagaagcgcaucgagaaccucaacaagaaggucgacgacggcuuccucgacaucuggaccuacaacgccgagcuccucguccuccucgagaacgagcgcacccucgacuaccacgacuccaacgucaagaaccucuacgagaagguccgcucccagcucaagaacaacgccaaggagaucggcaacggcugcuucgaguucuaccacaagugcgacaacaccugcauggaguccgucaagaacggcaccuacgacuaccccaaguacuccgaggaggccaagcucaaccgcgaggagaucgacggcgucaagcucgaguccacccgcaucuaccagauccucgccaucuacuccaccgucgccuccucccucguccucgucgucucccucggcgccaucuccuucuggaugugcuccaacggcucccuccagugccgcaucugcaucuga

SEQ ID NO: 100637 - RNA, 1701 nt, Artificial Sequence
  derived and/or modified CDS sequence (opt2) from hemagglutinin__InfluenzaA__ADF27965
augaaggccauccucgucguccuccucuacaccuucgccaccgccaacgccgacacccucugcaucggcuaccacgccaacaacuccaccgacaccgucgacaccguccucgagaagaacgucaccgucacccacuccgucaaccuccucgaggacaagcacaacggcaagcucugcaagcuccgcggcgucgccccccuccaccucggcaagugcaacaucgccggcuggauccucggcaaccccgagugcgagucccucuccaccgccuccuccugguccuacaucgucgagaccuccuccuccgacaacggcaccugcuaccccggcgacuucaucgacuacgaggagcuccgcgagcagcucuccuccgucuccuccuucgagcgcuucgagaucuuccccaagaccuccuccuggcccaaccacgacuccaacaagggcgucaccgccgccugcccccacgccggcgccaaguccuucuacaagaaccucaucuggcucgucaagaagggcaacuccuaccccaagcucuccaaguccuacaucaacgacaagggcaagaagguccucguccucuggggcauccaccaccccuccaccuccgccgaccagcagucccucuaccagaacgccgacgccuacgucuucgucggcaccucccgcuacuccaagaaguucaagcccgagaucgccauccgccccaagguccgcgaccaggagggccgcaugaacuacuacuggacccucgucgagcccggcgacaagaucaccuucgaggccaccggcaaccucgucgucccccgcuacgccuucgccauggagcgcaacgccggcuccggcaucaucaucuccgacacccccgucaacgacugcaacaccaccugccagacccccaagggcgccaucaacaccucccuccccuuccagaacauccaccccaucaccaucggcaagugccccaaguacgucaaguccaccaagcuccgccucgccaccggccuccgcaacguccccuccauccagucccgcggccucuucggcgccaucgccggcuucaucgagggcggcuggaccggcauggucgacggcugguacggcuaccaccaccagaacgagcagggcuccggcuacgccgccgaccucaaguccacccagaacgccaucgacaagaucaccaacaaggucaacuccgucaucgagaagaugaacacccaguucaccgccgucggcaaggaguucaaccaccucgagaagcgcaucgagaaccucaacaagaaggucgacgacggcuuccucgacaucuggaccuacaacgccgagcuccucguccuccucgagaacgagcgcacccucgacuaccacgacuccaacgucaagaaccucuacgagaagguccgcucccagcucaagaacaacgccaaggagaucggcaacggcugcuucgaguucuaccacaagugcgacaacaccugcauggaguccgucaagaacggcaccuacgacuaccccaaguacuccgaggaggccaagcucaaccgcgaggagaucgacggcgucaagcucgaguccacccgcaucuaccagauccucgccaucuacuccaccgucgccuccucccucguccucgucgucucccucggcgccaucuccuucuggaugugcuccaacggcucccuccagugccgcaucugcaucuga

SEQ ID NO: 100638 - RNA, 1701 nt, Artificial Sequence; identical to SEQ ID NO: 99869
  derived and/or modified CDS sequence (opt2) from hemagglutinin__InfluenzaA__ADF27975

SEQ ID NO: 100639 - RNA, 1701 nt, Artificial Sequence; identical to SEQ ID NO: 99877
  derived and/or modified CDS sequence (opt2) from hemagglutinin__InfluenzaA__ADF27985

SEQ ID NO: 100640 - RNA, 1701 nt, Artificial Sequence
  derived and/or modified CDS sequence (opt2) from hemagglutinin__InfluenzaA__ADF27995
augaaggccauccucgucguccuccucuacaccuucgccaccgccaacgccgacacccucugcaucggcuaccacgccaacaacuccaccgacaccgucgacaccguccucgagaagaacgucaccgucacccacuccgccaaccuccucgaggacaagcacaacggcaagcucugcaagcuccgcggcgucgccccccuccaccucggcaagugcaacaucgccggcuggauccucggcaaccccgagugcgagucccucuccaccgccuccuccugguccuacaucgucgagaccuccuccuccgacaacggcaccugcuaccccggcgacuucaucgacuacgaggagcuccgcgagcagcucuccuccgucuccuccuucgagcgcuucgagaucuuccccaagaccuccuccuggcccaaccacgacuccaacaagggcgucaccgccgccugcccccacgccggcgccaaguccuucuacaagaaccucaucuggcucgucaagaagggcaacuccuaccccaagcucuccaaguccuacaucaacgacaagggcaaggagguccucguccucuggggcauccaccaccccuccaccaacgccgaccagcagucccucuaccagaacgccgacgccuacgucuucgucggcaccucccgcuacuccaagaaguucaagcccgagaucgccauccgccccaagguccgcgaccaggagggccgcaugaacuacuacuggacccucgucgagcccggcgacaagaucaccuucgaggccaccggcaaccucgucgucccccgcuacgccuucgccauggagcgcaacgccggcuccggcaucaucaucuccgacacccccgcccacgacugcaacaccaccugccagacccccaagggcgccaucaacaccucccuccccuuccagaacauccaccccaucaccaucggcaagugccccaaguacgucaaguccaccaagcuccgccucgccaccggccuccgcaacauccccuccauccagucccgcggccucuucggcgccaucgccggcuucaucgagggcggcuggaccggcauggucgacggcugguacggcuaccaccaccagaacgagcagggcuccggcuacgccgccgaccucaaguccacccagaacgccaucgacgagaucaccaacaaggucaacuccgucaucgagaagaugaacacccaguucaccgccgucggcaaggaguucaaccaccucgagaagcgcaucgagaaccucaacaagaaggucgacgacggcuuccucgacaucuggaccuacaacgccgagcuccucguccuccucgagaacgagcgcacccucgacuaccacgacuccaacgucaagaaccucuacgagaagguccgcucccagcucaagaacaacgccaaggagaucggcaacggcugcuucgaguucuaccacaagugcgacaacaccugcauggaguccgucaagaacggcaccuacgacuaccccaaguacuccgaggaggccaagcucaaccgcgaggagaucgacggcgucaagcucgaguccacccgcaucuaccagauccucgccaucuacuccaccgucgccuccucccucguccucgucgucucccucggcgccaucuccuucuggaugugcuccaacggcucccuccagugccgcaucugcaucuga

SEQ ID NO: 100641 - RNA, 1701 nt, Artificial Sequence; identical to SEQ ID NO: 100257
  derived and/or modified CDS sequence (opt2) from hemagglutinin__InfluenzaA__ADF28005

SEQ ID NO: 100642 - RNA, 1701 nt, Artificial Sequence; identical to SEQ ID NO: 100257
  derived and/or modified CDS sequence (opt2) from hemagglutinin__InfluenzaA__ADF28015

SEQ ID NO: 100643 - RNA, 1701 nt, Artificial Sequence; identical to SEQ ID NO: 99869
  derived and/or modified CDS sequence (opt2) from hemagglutinin__InfluenzaA__ADF28025

SEQ ID NO: 100644 - RNA, 1701 nt, Artificial Sequence; identical to SEQ ID NO: 99869
  derived and/or modified CDS sequence (opt2) from hemagglutinin__InfluenzaA__ADF28045

SEQ ID NO: 100645 - RNA, 1701 nt, Artificial Sequence
  derived and/or modified CDS sequence (opt2) from hemagglutinin__InfluenzaA__ADF28055
augaaggccauccucgucguccuccucuacaccuucgccaccgccaacgccgacacccucugcaucggcuaccacgccaacaacuccaccgacaccgucgacaccguccucgagaagaacgucaccgucacccacuccgucaaccuccucgaggacaagcacaacggcaagcucugcaagcuccgcggcgucgccccccuccaccucggcaagugcaacaucgccggcuggauccucggcaaccccgagugcgagucccucuccaccgccuccuccugguccuacaucgucgagaccuccuccuccgacaacggcaccugcuaccccggcgacuucaucgacuacgaggagcuccgcgagcagcucuccuccgucuccuccuucgagcgcuucgagaucuuccccaagaccuccuccuggcccaacuacgacuccaacaagggcgucaccgccgccugcccccacgccggcgccaaguccuucuacaagaaccucaucuggcucgucaagaagggcaacuccuaccccaagcucuccaaguccuacaucaacgacaagggcaaggagguccucguccucuggggcauccaccaccccuccaccuccgccgaccagcagucccucuaccagaacgccgacgccuacgucuucgucggcaccucccgcuacuccaagaaguucaagcccgagaucgccauccgccccaagguccgcgaccaggagggccgcaugaacuacuacuggacccucgucgagcccggcgacaagaucaccuucgaggccaccggcaaccucgucgucccccgcuacgccuucgccauggagcgcaacgccggcuccggcaucaucaucuccgacacccccguccacgacugcaacaccaccugccagacccccaagggcgccaucaacaccucccuccccuuccagaacauccaccccaucaccaucggcaagugccccaaguacgucaaguccaccaagcuccgccucgccaccggccuccgcaacguccccuccauccagucccgcggccucuucggcgccaucgccggcuucaucgagggcggcuggaccggcauggucgacggcugguacggcuaccaccaccagaacgagcagggcuccggcuacgccgccgaccucaaguccacccagaacgccaucgacaagaucaccaacaaggucaacuccgucaucgagaagaugaacacccaguucaccgccgucggcaaggaguucaaccaccucgagaagcgcaucgagaaccucaacaagaaggucgacgacggcuuccucgacaucuggaccuacaacgccgagcuccucguccuccucgagaacgagcgcacccucgacuaccacgacuccaacgucaagaaccucuacgagaagguccgcucccagcucaagaacaacgccaaggagaucggcaacggcugcuucgaguucuaccacaagugcgacaacaccugcauggaguccgucaagaacggcaccuacgacuaccccaaguacuccgaggaggccaagcucaaccgcgaggagaucgacggcgucaagcucgaguccacccgcaucuaccagauccucgccaucuacuccaccgucgccuccucccucguccucgucgucucccucggcgccaucuccuucuggaugugcuccaacggcucccuccagugccgcaucugcaucuga

SEQ ID NO: 100646 - RNA, 1701 nt, Artificial Sequence; identical to SEQ ID NO: 99869
  derived and/or modified CDS sequence (opt2) from hemagglutinin__InfluenzaA__ADF28065

SEQ ID NO: 100647 - RNA, 1701 nt, Artificial Sequence; identical to SEQ ID NO: 98887
  derived and/or modified CDS sequence (opt2) from hemagglutinin__InfluenzaA__ADF28075

SEQ ID NO: 100648 - RNA, 1701 nt, Artificial Sequence; identical to SEQ ID NO: 99806
  derived and/or modified CDS sequence (opt2) from hemagglutinin__InfluenzaA__ADF28085

SEQ ID NO: 100649 - RNA, 1701 nt, Artificial Sequence; identical to SEQ ID NO: 98885
  derived and/or modified CDS sequence (opt2) from hemagglutinin__InfluenzaA__ADF28107

SEQ ID NO: 100650 - RNA, 1701 nt, Artificial Sequence; identical to SEQ ID NO: 100257
  derived and/or modified CDS sequence (opt2) from hemagglutinin__InfluenzaA__ADF28117

SEQ ID NO: 100651 - RNA, 1701 nt, Artificial Sequence
  derived and/or modified CDS sequence (opt2) from hemagglutinin__InfluenzaA__ADF29918
augaaggccauccucgucguccuccucuacaccuucgccaccgccaacgccgacacccucugcaucggcuaccacgccaacaacuccaccgacaccgucgacaccguccucgagaagaacgucaccgucacccacuccgucaaccuccucgaggacaagcacaacggcaagcucugcaagcuccgcggcgucgccccccuccaccucggcaagugcaacaucgccggcuggauccucggcaaccccgagugcgagucccucuccaccgccuccuccugguccuacaucgucgagaccuccuccuccgacaacggcaccugcuaccccggcgacuucaucgacuacgaggagcuccgcgagcagcucuccuccgucuccuccuucgagcgcuucgagaucuuccccaagaccuccuccuggcccaaccacgacuccaacaagggcgucaccgccgccugcccccacgccggcgccaaguccuucuacaagaaccucaucuggcucgucaagaagggcaacuccuaccccaagcucucccgcuccuacaucaacgacaagggcaaggagguccucguccucuggggcauccaccaccccuccaccuccgccgaccagcagucccucuaccagaacgccgacgccuacgucuucgucggcaccucccgcuacuccaagaaguucaagcccgagaucgccauccgccccaagguccgcaaccaggagggccgcaugaacuacuacuggacccucgucgagcccggcgacaagaucaccuucgaggccaccggcaaccucgucgucccccgcuacgccuucgccauggagcgcaacgccggcuccggcaucaucaucuccgacacccccguccacgacugcaacaccaccugccagacccccaagggcgccaucaacaccucccuccccuuccagaacauccaccccaucaccaucggcaagugccccaaguacgucaaguccaccaagcuccgccucgccaccggccuccgcaacguccccuccauccagucccgcggccucuucggcgccaucgccggcuucaucgagggcggcuggaccggcauggucgacggcugguacggcuaccaccaccagaacgagcagggcuccggcuacgccgccgaccucaaguccacccagaacgccaucgacgagaucaccaacaaggucaacuccgucaucgagaagaugaacacccaguucaccgccgucggcaaggaguucaaccaccucgagaagcgcaucgagaaccucaacaagaaggucgacgacggcuuccucgacaucuggaccuacaacgccgagcuccucguccuccucgagaacgagcgcacccucgacuaccacgacuccaacgucaagaaccucuacgagaagguccgcucccagcucaagaacaacgccaaggagaucggcaacggcugcuucgaguucuaccacaagugcgacaacaccugcauggaguccgucaagaacggcaccuacgacuaccccaaguacuccgaggaggccaagcucaaccgcgaggagaucgacggcgucaagcucgaguccacccgcaucuaccagauccucgccaucuacuccaccgucgccuccucccucguccucgucgucucccucggcgccaucuccuucuggaugugcuccaacggcucccuccagugccgcaucugcaucuga

SEQ ID NO: 100652 - RNA, 1701 nt, Artificial Sequence
  derived and/or modified CDS sequence (opt2) from hemagglutinin__InfluenzaA__ADF42689
augaaggccauccucgucguccuccucuacaccuucgccaccgccaacgccgacacccucugcaucggcuaccacgccaacaacuccaccgacaccgucgacaccguccucgagaagaacgucaccgucacccacuccgucaaccuccucgaggacaagcacaacggcaagcucugcaagcuccgcggcgucgccccccuccaccucggcaagugcaacaucgccggcuggauccucggcaaccccgagugcgagucccucuccaccgccuccuccugguccuacaucgucgagaccuccuccuccgacaacggcaccugcuaccccggcgacuucaucgacuacgaggagcuccgcgagcagcucuccuccgucuccuccuucgagcgcuucgagaucuuccccaagaccuccuccuggcccaaccacgacuccaacaagggcgucaccgccgccugcccccacgccggcgccaaguccuucuacaagaaccucaucuggcucgucaagaagggcaacuccuaccccaagcucuccaaguccuacaucaacgacaagggcaaggagguccucguccucuggggcauccaccaccccuccaccuccgccgaccagcagucccucuaccagaacgccgacgccuacgucuucgucggcaccucccgcuacuccaagaaguucaagcccgagaucgccauccgccccaagguccgcgaccaggagggccgcaugaacuacuacuggacccucgucgagcccggcgacaagaucaccuucgaggccaccggcaaccucgucgucccccgcuacgccuucgccauggagcgcaacgccggcuccggcaucaucaucuccgacacccccguccacgacugcaacaccaccugccagacccccaagggcgccaucaacaccucccuccccuuccagaacauccaccccaucaccaucggcaagugccccaaguacgucaaguccaccaagcuccgccucgccaccggccuccgcaacguccccuccauccagucccgcggccucuucggcgccaucgccggcuucaucgagggcggcuggaccggcauggucgacggcugguacggcuaccaccaccagaacgagcagggcuccggcuacgccgccgaccucaaguccacccagaacgccaucgacgagaucaccaacaaggucaacuccgucaucgagaagaugaacacccaguucaccgccgucggcaaggaguucaaccaccucgagaagcgcaucgagaaccucaacaagaaggucgacgacggcuuccucgacaucuggaccuacaacgccgagcuccucguccuccucgagaacgagcgcacccucgacuaccacgacuccaacgucaagaaccucuacgagaagguccgcucccagcucaagaacaacgccaaggagaucggcaacggcugcuucgaguucuaccacaagugcgacaacaccugcauggaguccgucaagaacggcaccuacgacuaccccaaguacuccgaggaggccaagcucaaccgcgaggagaucgacggcgucaagcucgaguccacccgcaucuaccagauccucgccaucuacuccaccgucgccuccucccucguccucgccgucucccucggcgccaucggcuucuggaugugcuccaacggcucccuccagugccgcaucugcaucuga

SEQ ID NO: 100653 - RNA, 1701 nt, Artificial Sequence
  derived and/or modified CDS sequence (opt2) from hemagglutinin__InfluenzaA__ADF42699
augaaggccauccucgucguccuccucuacaccuucgccaccgccaacgccgacacccucugcaucggcuaccacgccaacaacuccaccgacaccgucgacaccguccucgagaagaacgucaccgucacccacuccgucaaccuccucgaggacaagcacaacggcacccucugcaagcuccgcggcgucgccccccuccaccucggcaagugcaacaucgccggcuggauccucggcaaccccgagugcgagucccucuccaccgccuccuccugguccuacaucgucgagaccuccuccuccgacaacggcaccugcuaccccggcgacuucaucgacuacgaggagcuccgcgagcagcucuccuccgucuccuccuucgagcgcuucgagauguuccccaagaccuccuccuggcccaaccacgacuccaacaagggcgucaccgccgccugcccccacgccggcgccaaguccuucuacaagaaccucaucuggcucgucaagaagggcaacuccuaccccaagcucuccaaguccuacaucaacgacaagggcaaggagguccucguccucuggggcauccaccaccccuccaccuccgccgaccagcagucccucuaccagaacgccgacgccuacgucuucgucggcaccucccgcuacuccaagaaguucaagcccgagaucgccauccgccccaagguccgcgaccaggagggccgcaugaacuacuacuggacccucgucgagcccggcgacaagaucaccuucgaggccaccggcaaccucgucgucccccgcuacgccuucgccauggagcgcaacgccggcuccggcaucaucaucuccgacacccccguccacgacugcaacaccaccugccagacccccaagggcgccaucaacaccucccuccccuuccagaacauccaccccaucaccaucggcaagugccccaaguacgucaaguccaccaagcuccgccucgccaccggccuccgcaacguccccuccauccagucccgcggccucuucggcgccaucgccggcuucaucgagggcggcuggaccggcauggucgacggcugguacggcuaccaccaccagaacgagcagggcuccggcuacgccgccgaccucaaguccacccagaacgccaucgacgagaucaccaacaaggucaacuccgucaucgagaagaugaacacccaguucaccgccgucggcaaggaguucaaccaccucgagaagcgcaucgagaaccucaacaagaaggucgacgacggcuuccucgacaucuggaccuacaacgccgagcuccucguccuccucgagaacgagcgcacccucgacuaccacgacuccaacgucaagaaccucuacgagaagguccgcucccagcucaagaacaacgccaaggagaucggcaacggcugcuucgaguucuaccacaagugcgacaacaccugcauggaguccgucaagaacggcaccuacgacuaccccaaguacuccgaggaggccaagcucaaccgcgaggagaucgacggcgucaagcucgaguccacccgcaucuaccagauccucgccaucuacuccaccgucgccuccucccucguccucgucgucucccucggcgccaucuccuucuggaugugcuccaacggcucccuccagugccgcaucugcaucuga

SEQ ID NO: 100654 - RNA, 1701 nt, Artificial Sequence; identical to SEQ ID NO: 99869
  derived and/or modified CDS sequence (opt2) from hemagglutinin__InfluenzaA__ADF42709

SEQ ID NO: 100655 - RNA, 1701 nt, Artificial Sequence; identical to SEQ ID NO: 99869
  derived and/or modified CDS sequence (opt2) from hemagglutinin__InfluenzaA__ADF42719

SEQ ID NO: 100656 - RNA, 1701 nt, Artificial Sequence; identical to SEQ ID NO: 99869
  derived and/or modified CDS sequence (opt2) from hemagglutinin__InfluenzaA__ADF42729

SEQ ID NO: 100657 - RNA, 1701 nt, Artificial Sequence; identical to SEQ ID NO: 99869
  derived and/or modified CDS sequence (opt2) from hemagglutinin__InfluenzaA__ADF42739

SEQ ID NO: 100658 - RNA, 1701 nt, Artificial Sequence
  derived and/or modified CDS sequence (opt2) from hemagglutinin__InfluenzaA__ADF58349
augaaggccauccucgucguccuccucuacaccuucgccaccgccaacgccgacacccucugcaucggcuaccacgccaacaacuccaccgacaccgucgacaccguccucgagaagaacgucaccgucacccacuccgucaaccuccucgaggacaagcacaacggcaagcucugcaagcuccgcggcgucgccccccuccaccucggcaagugcaacaucgccggcuggauccucggcaaccccgagugcgagucccucuccaccgccuccuccugguccuacaucgucgagaccuccuccuccgacaacggcaccugcuaccccggcgacuucaucgacuacgaggagcuccgcgagcagcucuccuccgucuccuccuucgagcgcuucgagaucuuccccaagaccuccuccuggcccgaccacgacuccaacaagggcgucaccgccgccugcccccacgccggcgccaaguccuucuacaagaaccucaucuggcucgucaagaagggcaacuccuaccccaagcucuccaaguccuacaucaacgacaagggcaaggagguccucguccucuggggcauccaccaccccuccaccuccgccgaccagcagucccucuaccagaacgccgacgccuacgucuucgucggcaccucccgcuacuccaagaaguucaagcccgagaucgccauccgccccaagguccgcgagcgcgagggccgcaugaacuacuacuggacccucgucgagcccggcgacaagaucaccuucgaggccaccggcaaccucgucgucccccgcuacgccuucgccauggagcgcaacgccggcuccggcaucaucaucuccgacacccccguccacgacugcaacaccaccugccagacccccaagggcgccaucaacaccucccuccccuuccagaacauccaccccaucaccaucggcaagugccccaaguacgucaaguccaccaagcuccgccucgccaccggccuccgcaacguccccuccauccagucccgcggccucuucggcgccaucgccggcuucaucgagggcggcuggaccggcauggucgacggcugguacggcuaccaccaccagaacgagcagggcuccggcuacgccgccgaccucaaguccacccagaacgccaucgacgagaucaccaacaaggucaacuccgucaucgagaagaugaacacccaguucaccgccgucggcaaggaguucaaccaccucgagaagcgcaucgagaaccucaacaagaaggucgacgacggcuuccucgacaucuggaccuacaacgccgagcuccucguccuccucgagaacgagcgcacccucgacuaccacgacuccaacgucaagaaccucuacgagaagguccgcucccagcucaagaacaacgccaaggagaucggcaacggcugcuucgaguucuaccacaagugcgacaacaccugcauggaguccgucaagaacggcaccuacgacuaccccaaguacuccgaggaggccaagcucaaccgcgaggagaucgacggcgucaagcucgaguccacccgcaucuaccagauccucgccaucuacuccaccgucgccuccucccucguccucgucgucucccucggcgccaucuccuucuggaugugcuccaacggcucccuccagugccgcaucugcaucuga

SEQ ID NO: 100659 - RNA, 1701 nt, Artificial Sequence; identical to SEQ ID NO: 100302
  derived and/or modified CDS sequence (opt2) from hemagglutinin__InfluenzaA__ADF58351

SEQ ID NO: 100660 - RNA, 1701 nt, Artificial Sequence
  derived and/or modified CDS sequence (opt2) from hemagglutinin__InfluenzaA__ADF80454
augaaggccauccucgucguccuccucuacaccuucgccaccgccaacgccgacacccucugcaucggcuaccacgccaacaacuccaccgacaccgucgacaccguccucgagaagaacgucaccgucacccacuccgucaaccuccucgaggacaagcacaacggcaagcucugcaagcuccgcggcgucgccccccuccaccucggcaagugcaacaucgccggcuggauccucggcaaccccgagugcgagucccucuccaccgccuccuccugguccuacaucgucgagaccuccuccuccgacaacggcaccugcuaccccggcgacuucaucgacuacgaggagcuccgcgagcagcucuccuccgucuccuccuucgagcgcuucgagaucuuccccaagaccuccuccuggcccaaccacgacuccaacaagggcgucaccgccgccugcccccacgccggcgccaaguccuucuacaagaaccucaucuggcucgucaagaagggcaacuccuaccccaagcucuccaaguccuacaucaacgacaagggcaaggagguccucguccucuggggcauccaccaccccuccaccuccgccgaccagcagucccucuaccagaacgccgacgccuacgucuucgucggcaccucccgcuacuccaagaaguucaagcccgagaucgccauccgccccaagguccgcgaccaggagggccgcaugaacuacuacuggacccucgucgagcccggcgacaagaucaccuucgaggccaccggcaaccucgucgucccccgcuacgccuucgccauggagcgcaacgccggcuccggcaucaucaucuccgacacccccguccacgacugcaacaccaccugccagacccccgagggcgccaucaacaccucccuccccuuccagaacauccaccccaucaccaucggcaagugccccaaguacgucaaguccaccaagcuccgccucgccaccggccuccgcaacguccccuccauccagucccgcggccucuucggcgccaucgccggcuucaucgagggcggcuggaccggcauggucgacggcugguacggcuaccaccaccagaacgagcagggcuccggcuacgccgccgaccucaaguccacccagaacgccaucgacgagaucaccaacaaggucaacuccaucaucgagaagaugaacacccaguucaccgccgucggcaaggaguucaaccaccucgagaagcgcaucgagaaccucaacaagaaggucgacgacggcuuccucgacaucuggaccuacaacgccgagcuccucguccuccucgagaacgagcgcacccucgacuaccacgacuccaacgucaagaaccucuacgagaagguccgcucccagcucaagaacaacgccaaggagaucggcaacggcugcuucgaguucuaccacaagugcgacgacaccugcauggaguccgucaagaacggcaccuacgacuaccccaaguacuccgaggaggccaagcucaaccgcgaggagaucgacggcgucaagcucgaguccacccgcaucuaccagauccucgccaucuacuccaccgucgccuccucccucguccucgucgucucccucggcgccaucuccuucuggaugugcuccaacggcucccuccagugccgcaucugcaucuga

SEQ ID NO: 100661 - RNA, 1701 nt, Artificial Sequence
  derived and/or modified CDS sequence (opt2) from hemagglutinin__InfluenzaA__ADF80462
augaaggccauccucgucguccuccucuacaccuucgccaccgccaacgccgacacccucugcaucggcuaccacgccaacaacuccaccgacaccgucgacaccguccucgagaagaacgucaccgucacccacuccgucaaccuccucgaggacaagcacaacggcaagcucugcaagcuccgcggcgucgccccccuccaccucggcaagugcaacaucgccggcuggauccucggcaaccccgagugcgagucccucuccaccgccuccuccugguccuacaucgucgagaccuccaacuccgacaacggcaccugcuaccccggcgacuucaucgacuacgaggagcuccgcgagcagcucuccuccgucuccuccuucgagcgcuucgagaucuuccccaagaucuccuccuggcccaaccacgacuccaacaagggcgucaccgccgccugcccccacgccggcgccaaguccuucuacaagaaccucaucuggcucgucaagaagggcaacuccuaccccaagcucuccaaguccuacaucaacgacaagggcaaggagguccucguccucuggggcauccaccaccccuccaccuccgccgaccagcagucccucuaccagaacgccgacgccuacgucuucgucggcaccucccgcuacuccaagaaguucaagcccgagaucgccauccgccccaagguccgcgaccaggagggccgcaugaacuacuacuggacccucgucgagcccggcgacaagaucaccuucgaggccaccggcaaccucgucgucccccgcuacgccuucgccauggagcgcaacgccggcuccggcaucaucaucuccgacacccccguccacgacugcaacaccaccugccagacccccaagggcgccaucaacaccucccuccccuuccagaacauccaccccaucaccaucggcaagugccccaaguacgucaaguccaccaagcuccgccucgccaccggccuccgcaacguccccuccauccagucccgcggccucuucggcgccaucgccggcuucaucgagggcggcuggaccggcauggucgacggcugguacggcuaccaccaccagaacgagcagggcuccggcuacgccgccgaccucaaguccacccagaacgccaucgacgagaucaccaacaaggucaacuccgucaucgagaagaugaacacccaguucaccgccgucggcaaggaguucaaccaccucgagaagcgcaucgagaaccucaacaagaaggucgacgacggcuuccucgacaucuggaccuacaacgccgagcuccucguccuccucgagaacgagcgcacccucgacuaccacgacuccaacgucaagaaccucuacgagaagguccgcucccagcucaagaacaacgccaaggagaucggcaacggcugcuucgaguucuaccacaagugcgacaacaccugcauggaguccgucaagaacggcaccuacgacuaccccaaguacuccgaggaggccaagcucaaccgcgaggagaucgacggcgucaagcucgaguccacccgcaucuaccagauccucgccaucuacuccaccgucgccuccucccucguccucgucgucucccucggcgccaucuccuucuggaugugcuccaacggcucccuccagugccgcaucugcaucuga

SEQ ID NO: 100662 - RNA, 1701 nt, Artificial Sequence; identical to SEQ ID NO: 98705
  derived and/or modified CDS sequence (opt2) from hemagglutinin__InfluenzaA__ADF80470

SEQ ID NO: 100663 - RNA, 1701 nt, Artificial Sequence
  derived and/or modified CDS sequence (opt2) from hemagglutinin__InfluenzaA__ADF80478
augaaggccauccucgucguccuccucuacaccuucgccaccgccaacgccgacacccucugcaucggcuaccacgccaacaacuccaccgacaccgucgacaccguccucgagaagaacgucaccgucacccacuccgucaaccuccucgaggacaagcacaacggcaagcucugcaagcuccgcggcgucgccccccuccaccucggcaagugcaacaucgccggcuggauccucggcaaccccgagugcgagucccucuccaccgccuccuccugguccuacaucgucgagaccuccuccuccgacaacggcaccugcuaccccggcgacuucaucgacuacgaggagcuccgcgagcagcucuccuccgucuccuccuucgagcgcuucgagaucuuccccaagaccuccuccuggcccaaccacgaccccaacaagggcgucaccgccgccugcccccacgccggcgccaaguccuucuacaagaaccucaucuggcucgucaagaagggcaacuccuaccccaagcucuccaaguccuacaucaacgacaagggcaaggagguccucguccucuggggcauccaccaccccuccaccuccgccgaccagcagucccucuaccagaacgccgacgccuacgucuucgucggcaccucccgcuacuccaagaaguucaagcccgagaucgccauccgccccaagguccgcgaccaggagggccgcaugaacuacuacuggacccucgucgagcccggcgacaagaucaccuucgaggccaccggcaaccucauggucccccgcuacgccuucgccauggagcgcaacgccggcuccggcaucaucaucuccgacacccccguccacgacugcaacaccaccugccagacccccaagggcgccaucaacaccucccuccccuuccagaacauccaccccaucaccaucggcaagugccccaaguacgucaaguccaccaagcuccgccucgccaccggccuccgcaacguccccuccauccagucccgcggccucuucggcgccaucgccggcuucaucgagggcggcuggaccggcauggucgacggcugguacggcuaccaccaccagaacgagcagggcuccggcuacgccgccgaccucaaguccacccagaacgccaucgacgagaucaccaacaaggucaacuccgucaucgagaagaugaacacccaguucaccgccgucggcaaggaguucaaccaccucgagaagcgcaucgagaaccucaacaagaaggucgacgacggcuuccucgacaucuggaccuacaacgccgagcuccucguccuccucgagaacgagcgcacccucgacuaccacgacuccaacgucaagaaccucuacgagaagguccgcucccagcucaagaacaacgccaaggagaucggcaacggcugcuucgaguucuaccacaagugcgacaacaccugcauggaguccgucaagaacggcaccuacgacuaccccaaguacuccgaggaggccaagcucaaccgcgaggagaucgacggcgucaagcucgaguccacccgcaucuaccagauccucgccaucuacuccaccgucgccuccucccucguccucgucgucucccucggcgccaucuccuucuggaugugcuccaacggcucccuccagugccgcaucugcaucuga

SEQ ID NO: 100664 - RNA, 1701 nt, Artificial Sequence
  derived and/or modified CDS sequence (opt2) from hemagglutinin__InfluenzaA__ADF80494
augaaggccauccucgucguccuccucuacaccuucgccaccgccaacgccgacacccucugcaucggcuaccacgccaacaacuccaccgacaccgucgacaccguccucgagaagaacgucaccgucacccacuccgucaaccuccucgaggacaagcacaacggcaagcucugcaagcuccgcggcgucgccccccuccaccucggcaagugcaacaucgccggcuggauccucggcaaccccgagugcgagucccucuccaccgccuccuccugguccuacaucgucgagaccuccuccuccgacaacggcaccugcuaccccggcgacuucaucgacuacgaggagcuccgcgagcagcucuccuccgucuccuccuucgagcgcuucgagaucuuccccaagaccuccuccuggcccaaccacgacuccaacaagggcgucaccgccgccugcccccacgccggcgccaaguccuucuacaagaaccucaucuggcucgucaagaagggcaacuccuaccccaagcucuccaaguccuacaucaacgacaagggcaaggagguccucguccucuggggcauccaccaccccuccaccuccgccgaccagcagucccucuaccagaacgccgacgccuacgucuucgucggcaccucccgcuacuccaagaaguucaagcccgagaucgccauccgccccaagguccgcgaccaggagggccgcaugaacuacuacuggacccucgucgagcccggcgacaagaucaccuucgaggccaccggcaaccuccucgucccccgcuacgccuucgccauggagcgcaacgccggcuccggcaucaucaucuccgacacccccguccacgacugcaacaccaccugccagacccccaagggcgccaucaacaccucccuccccuuccagaacauccaccccaucaccaucggcaagugccccaaguacgucaaguccaccaagcuccgccucgccaccggccuccgcaacguccccuccauccagucccgcggccucuucggcgccaucgccggcuucaucgagggcggcuggaccggcauggucgacggcugguacggcuaccaccaccagaacgagcagggcuccggcuacgccgccgaccucaaguccacccagaacgccaucgacgagaucaccaacaaggucaacuccgucaucgagaagaugaacacccaguucaccgccgucggcaaggaguucaaccaccucgagaagcgcaucgagaaccucaacaagaaggucgacgacggcuuccucgacaucuggaccuacaacgccgagcuccucguccuccucgagaacgagcgcacccucgacuaccacgacuccaacgucaagaaccucuacgagaagguccgcucccagcucaagaccaacgccaaggagaucggcaacggcugcuucgaguucuaccacaagugcgacaacaccugcauggaguccgucaagaacggcaccuacgacuaccccaaguacuccgaggaggccaagcucaaccgcgaggagaucgacggcgucaagcucgaguccacccgcaucuaccagauccucgccaucuacuccaccgucgccuccucccucguccucgucgucucccucggcgccaucuccuucuggaugugcuccaacggcucccuccagugccgcaucugcaucuga

SEQ ID NO: 100665 - RNA, 1701 nt, Artificial Sequence; identical to SEQ ID NO: 100664
  derived and/or modified CDS sequence (opt2) from hemagglutinin__InfluenzaA__ADF80498

SEQ ID NO: 100666 - RNA, 1701 nt, Artificial Sequence; identical to SEQ ID NO: 99329
  derived and/or modified CDS sequence (opt2) from hemagglutinin__InfluenzaA__ADF80502

SEQ ID NO: 100667 - RNA, 1701 nt, Artificial Sequence
  derived and/or modified CDS sequence (opt2) from hemagglutinin__InfluenzaA__ADF80506
augaaggccauccucgucguccuccucuacaccuucgccaccgccaacgccgacacccucugcaucggcuaccacgccaacaacuccaccgacaccgucgacaccguccucgagcgcaacgucaccgucacccacuccgucaaccuccucgaggacaagcacaacggcaagcucugcaagcuccgcggcgucgccccccuccaccucggcaagugcuccaucgccggcuggauccucggcaaccccgagugcgagucccucuccaccgccuccuccugguccuacaucgucgagaccuccuccuccgacaacggcaccugcuaccccggcgacuucaucgacuacgaggagcuccgcgagcagcucuccuccgucuccuccuucgagcgcuucgagaucuuccccaagaccuccuccuggcccaaccacgaccccaacaagggcgucaccgccgccugcccccacgccggcgccaaguccuucuacaagaaccucaucuggcucgucaagaaggagaacuccuaccccaagcucuccaaguccuacaucaacgacaagggcaaggagguccucguccucuggggcauccaccaccccuccaccuccgccgaccagcagucccucuaccagaacgccgacgccuacgucuucgucggcaccucccgcuacuccaagaaguucaagcccgagaucgccauccgccccaagguccgcgaccaggagggccgcaugaacuacuacuggacccucgucgagcccggcgacaagaucaccuucgaggccaccggcaaccucgucgucccccgcuacgccuucgccauggagcgcaacgccggcuccggcaucaucaucuccgacacccccguccacgacugcaacaccaccugccagacccccaagggcgccaucaacaccucccuccccuuccagaacauccaccccaucaccaucggcaagugccccaaguacgucaaguccaccaagcuccgccucgccaccggccuccgcaacguccccuccauccagucccgcggccucuucggcgccaucgccggcuucaucgagggcggcuggaccggcauggucgacggcugguacggcuaccaccaccagaacgagcagggcuccggcuacgccgccgaccucaaguccacccagaacgccaucgacgagaucaccaacaaggucaacuccgucaucgagaagaugaacacccaguucaccgccgucggcaaggaguucaaccaccucgagaagcgcaucgagaaccucaacaagaaggucgacgacggcuuccucgacaucuggaccuacaacgccgagcuccucguccuccucgagaacgagcgcacccucgacuaccacgacuccaacgucaagaaccucuacgagaagguccgcucccagcucaagaacaacgccaaggagaucggcaacggcugcuucgaguucuaccacaagugcgacaacaccugcauggaguccgucaagaacggcaccuacgacuaccccaaguacuccgaggaggccaagcucaaccgcgaggagaucgacggcgucaagcucgaguccacccgcaucuaccagauccucgccaucuacuccaccgucgccuccucccucguccucgucgucucccucggcgccaucuccuucuggaugugcuccaacggcucccuccagugccgcaucugcaucuga

SEQ ID NO: 100668 - RNA, 1701 nt, Artificial Sequence
  derived and/or modified CDS sequence (opt2) from hemagglutinin__InfluenzaA__ADF83741
augaagaccaucaucgcccucuccuacauccucugccucgucuucgcccagaagcuccccggcaacgacaacuccaccgccacccucugccucggccaccacgccguccccaacggcaccaucgucaagaccaucaccaacgaccagaucgaggucaccaacgccaccgagcucguccaguccuccuccaccggcgagaucugcgacuccccccaccagauccucgacggcaagaacugcacccucaucgacgcccuccucggcgacccccagugcgacggcuuccagaacaagaagugggaccucuucgucgagcgcuccaaggccuacuccaacugcuaccccuacgacguccccgacuacgccucccuccgcucccucgucgccuccuccggcacccucgaguucaacaacgaguccuucaacuggaccggcgucacccagaacggcaccuccuccgccugcauccgccgcuccaagaacuccuucuucucccgccucaacuggcucacccaccucaacuucaaguaccccgcccucaacgucaccaugcccaacaacgagcaguucgacaagcucuacaucuggggcguccaccaccccggcaccgacaaggaccagaucuuccucuacgcccaggccuccggccgcaucaccgucuccaccaagcgcucccagcagaccgccauccccaacaucggcucccgcccccgcguccgcaacauccccucccgcaucuccaucuacuggaccaucgucaagcccggcgacauccuccucaucaacuccaccggcaaccucaucgccccccgcggcuacuucaagauccgcuccggcaaguccuccgucaugcgcuccgacgcccccaucggcaagugcaacuccgacugcaucacccccaacggcuccauccccaacgacaagcccuuccagaacgucaaccgcaucaccuacggcgccugcccccgcuacgucaagcagaacacccucaagcucgccaccggcaugcgcaacguccccgagaagcagacccgcggcaucuucggcgccaucgccggcuucaucgagaacggcugggagggcauggucgacggcugguacggcuuccgccaccagaacuccgagggccgcggccaggccgccgaccucaaguccacccaggccgccaucgaccagaucaacggcaagcucaaccgccucaucggcaagaccaacgagaaguuccaccagaucgagaaggaguucuccgaggucgagggccgcauccaggaccucgagaaguacgucgaggacaccaagaucgaccucugguccuacaacgccgagcuccucgucgcccucgagaaccagcacaccaucgaccucaccgacuccgagaugaacaagcucuucgagaagaccaagaagcagcuccgcgagaacgccgaggacaugggcaacggcugcuucaagaucuaccacaagugcgacaacgccugcaucggcuccauccgcaacggcaccuacgaccacgacgucuaccgcgacgaggcccucaacaaccgcuuccagaucaagggcgucgagcucaaguccggcuacaaggacuggauccucuggaucuccuucgccaucuccugcuuccuccucugcgucgcccuccucggcuucaucaugugggccugccagaagggcaacauccgcugcaacaucugcaucuga

SEQ ID NO: 100669 - RNA, 1701 nt, Artificial Sequence; identical to SEQ ID NO: 99447
  derived and/or modified CDS sequence (opt2) from hemagglutinin__InfluenzaA__ADF83752

SEQ ID NO: 100670 - RNA, 1701 nt, Artificial Sequence; identical to SEQ ID NO: 100257
  derived and/or modified CDS sequence (opt2) from hemagglutinin__InfluenzaA__ADF83763

SEQ ID NO: 100671 - RNA, 1701 nt, Artificial Sequence; identical to SEQ ID NO: 100257
  derived and/or modified CDS sequence (opt2) from hemagglutinin__InfluenzaA__ADF83773

SEQ ID NO: 100672 - RNA, 1701 nt, Artificial Sequence
  derived and/or modified CDS sequence (opt2) from hemagglutinin__InfluenzaA__ADF83783
augaaggccauccucgucguccuccucuacaccuucgccaccgccaacgccgacacccucugcaucggcuaccacgccaacaacuccaccgacaccgucgacaccguccucgagaagaacgucaccgucacccacuccgucaaccuccucgaggacaagcacaacggcaagcucugcaagcuccgcggcgucgccccccuccaccucggcaagugcaacaucgccggcuggauccucggcaaccccgagugcgagucccucuccaccgccuccuccugguccuacaucgucgagaccuccuccuccgacaacggcaccugcuaccccggcgacuucaucgacuacgaggagcuccgcgagcagcucuccuccgucuccuccuucgagcgcuucgagaucuuccccaagaccuccuccuggcccaaccacgacuccaacaagggcgucaccgccgccugcccccacgccggcgccaaguccuucuacaagaaccucaucuggcucgucaagaagggcaacuccuaccccaagcucuccaaguccuacaucaacgacaagggcaaggagguccucguccucuggggcauccaccaccccuccaccuccgccgaccagcagucccucuaccagaacgccgacgccuacgucuucgucggcaccucccgcuacuccaagaaguucaagcccgagaucgccauccgccccaagguccgcgaccaggagggccgcaugaacuacuacuggacccucgucgagcccggcgacaagaucaccuucgaggccaccggcaaccucgucgucccccgcuacgccuucgccauggagcgcaacgccggcuccggcaucaucaucuccgacacccccguccacgacugcaacaccaccugccagacccccaagggcgccaucaacaccucccuccccuuccagaacauccaccccaccaccaucggcaagugccccaaguacgucaaguccaccaagcuccgccucgccaccggccuccgcaacguccccuccauccagucccgcggccucuucggcgccaucgccggcuucaucgagggcggcuggaccggcauggucgacggcugguacggcuaccaccaccagaacgagcagggcuccggcuacgccgccgaccucaaguccacccagaacgccaucgacgagaucaccaacaaggucaacuccgucaucgagaagaugaacacccaguucaccgccgucggcaaggaguucaaccaccucgagaagcgcaucgagaaccucaacaagaaggucgacgacggcuuccucgacaucuggaccuacaacgccgagcuccucguccuccucgagaacgagcgcacccucgacuaccacgacuccaacgucaagaaccucuacgagaagguccgcucccagcucaagaacaacgccaaggagaucggcaacggcugcuucgaguucuaccacaagugcgacaacaccugcauggaguccgucaagaacggcaccuacgacuaccccaaguacuccgaggaggccaagcucaaccgcgaggagaucgacggcgucaagcucgaguccacccgcaucuaccagauccucgccaucuacuccaccgucgccuccucccucguccucgucgucucccucggcgccaucuccuucuggaugugcuccaacggcucccuccagugccgcaucugcaucuga

SEQ ID NO: 100673 - RNA, 1701 nt, Artificial Sequence; identical to SEQ ID NO: 100332
  derived and/or modified CDS sequence (opt2) from hemagglutinin__InfluenzaA__ADF83793

SEQ ID NO: 100674 - RNA, 1701 nt, Artificial Sequence
  derived and/or modified CDS sequence (opt2) from hemagglutinin__InfluenzaA__ADF83803
augaaggccauccucgucguccuccucuacaccuucgccaccgccaacgccgacacccucugcaucggcuaccacgccaacaacuccaccgacaccgucgacaccguccucgagaagaacgucaccgucacccacuccgucaaccuccucgaggacaagcacaacggcaagcucugcaagcuccgcggcgucgccccccuccaccucggcaagugcaacaucgccggcuggauccucggcaaccccgagugcgagacccucuccaccgccuccuccugguccuacaucgucgagaccuccuccuccgacaacggcaccugcuaccccggcgacuucaucgacuacgaggagcuccgcgagcagcucuccuccgucuccuccuucgagcgcuucgagaucuuccccaagaccuccuccuggcccaaccacgacuccaacaagggcgucaccgccgccugcccccacgccggcgccaaguccuucuacaagaaccucaucuggcucgucaagaagggcaacuccuaccccaagcucuccaaguccuacaucaacgacaagggcaaggagguccucguccucuggggcauccaccaccccuccaccuccgccgaccagcagucccucuaccagaacgccgacgccuacgucuucgucggcaccucccgcuacuccaagaaguucaagcccgagaucgccauccgccccaagguccgcgaccaggagggccgcaugaacuacuacuggacccucgucgagcccggcgacaagaucaccuucgaggccaccggcaaccucgucgucccccgcuacgccuucgccauggagcgcaacgccggcuccggcaucaucaucuccgacacccccguccacgacugcaacaccaccugccagacccccaagggcgccaucaacaccucccuccccuuccagaacguccaccccaucaccaucggcaagugccccaaguacgucaaguccaccaagcuccgccucgccaccggccuccgcaacguccccuccauccagucccgcggccucuucggcgccaucgccggcuucaucgagggcggcuggaccggcauggucgacggcugguacggcuaccaccaccagaacgagcagggcuccggcuacgccgccgaccucaaguccacccagaacgccaucgacgagaucaccaacaaggucaacuccgucaucgagaagaugaacacccaguucaccgccgucggcaaggaguucaaccaccucgagaagcgcaucgagaaccucaacaagaaggucgacgacggcuuccucgacaucuggaccuacaacgccgagcuccucguccuccucgagaacgagcgcacccucgacuaccacgacuccaacgucaagaaccucuacgagaagguccgcucccagcucaagaacaacgccaaggagaccggcaacggcugcuucgaguucuaccacaagugcgacaacaccugcauggaguccgucaagaacggcaccuacgacuaccccaaguacuccgaggaggccaagcucaaccgcgaggagaucgacggcgucaagcucgaguccacccgcaucuaccagauccucgccaucuacuccaccgucgccuccucccucguccucgucgucucccucggcgccaucuccuucuggaugugcuccaacggcucccuccagugccgcaucugcaucuga

SEQ ID NO: 100675 - RNA, 1701 nt, Artificial Sequence
  derived and/or modified CDS sequence (opt2) from hemagglutinin__InfluenzaA__ADF83813
augaaggccauccucgucguccuccucuacaccuucgccaccgccaacgccgacacccucugcaucggcuaccacgccaacaacuccaccgacaccgucgacaccguccucgagaagaacgucaccgucacccacuccgucaaccuccucgaggacaagcacaacggcaagcucugcaagcuccgcggcgucgccccccuccaccucggcaagugcaacaucgccggcuggauccucggcaaccccgagugcgagucccucuccaccgccuccuccugguccuacaucgucgagaccuccuccuccgacaacggcaccugcuaccccggcgacuucaucgacuacgaggagcuccgcgagcagcucuccuccgucuccuccuucgagcgcuucgagaucuuccccaagaccuccuccuggcccaaccacgacuccaacaagggcgucaccgccgccugcccccacgccggcgccaaguccuucuacaagaaccucaucuggcucgucaagaagggcaacuccuaccccaagcucuccaaguccuacaucaacgacaagggcaaggagguccucguccucuggggcauccaccaccccuccaccuccaccgaccagcagucccucuaccagaacgccgacgccuacgucuucgucggcaccucccgcuacuccaagaaguucaagcccgagaucgccauccgccccaagguccgcgaccaggagggccgcaugaacuacuacuggacccucgucgagcccggcgacaagaucaccuucgaggccaccggcaaccucgucgucccccgcuacgccuucgccauggagcgcaacgccggcuccggcaucaucaucuccgacacccccguccacgacugcaacaccaccugccagacccccaagggcgccaucaacaccucccuccccuuccagaacauccaccccaucaccaucggcaagugccccaaguacgucaaguccaccaagcuccgccucgccaccggccuccgcaacguccccuccauccagucccgcggccucuucggcgccaucgccggcuucaucgagggcggcuggaccggcauggucgacggcugguacggcuaccaccaccagaacgagcagggcuccggcuacgccgccgaccucaaguccacccagaacgccaucgacgagaucaccaacaaggucaacuccgucaucgagaagaugaacacccaguucaccgccgucggcaaggaguucaaccaccucgagaagcgcaucgagaaccucaacaagaaggucgacgacggcuuccucgacaucuggaccuacaacgccgagcuccucguccuccucgagaacgagcgcacccucgacuaccacgacuccaacgucaagaaccucuacgagaagguccgcucccagcucaagaacaacgccaaggagaucggcaacggcugcuucgaguucuaccacaagugcgacaacaccugcauggaguccgucaagaacggcaccuacgacuaccccaaguacuccgaggaggccaagcucaaccgcgaggagaucgacggcgucaagcucgaguccacccgcaucuaccagauccucgccaucuacuccaccgucgccuccucccucguccucgucgucucccucggcgccaucuccuucuggaugugcuccaacggcucccuccagugccgcaucugcaucuga

SEQ ID NO: 100676 - RNA, 1701 nt, Artificial Sequence
  derived and/or modified CDS sequence (opt2) from hemagglutinin__InfluenzaA__ADF83823
augaaggccauccucgucguccuccucuacaccuucgccaccgccaacgccgacacccucugcaucggcuaccacgccaacaacuccaccgacaccgucgacaccguccucgagaagaacgucaccgucacccacuccgucaaccuccucgaggacaagcacaacggcaagcucugcaagcuccgcggcgucgccccccuccaccucggcaagugcaacaucgccggcuggauccucggcaaccccgagugcgagucccucuccaccgccuccuccugguccuacaucgucgagaccuccuccuccgacaacggcaccugcuaccccggcgacuucaucgacuacgaggagcuccgcgagcagcucuccuccgucuccuccuucgagcgcuucgagaucuuccccaagaccuccuccuggcccaaccacgacuccaacaagggcgucaccgccgccugcccccacgccggcgccaaguccuucuacaagaaccucaucuggcucgucaagaagggcaacuccuaccccaagcucuccaaguccuacaucaacgacaagggcaaggagguccucguccucuggggcauccaccaccccuccaccuccgccgaccagcagucccucuaccagaacgccgacuccuacgucuucgucggcaccucccgcuacuccaagaaguucaagcccgagaucgccauccgccccaagguccgcgaccaggagggccgcaugaacuacuacuggacccucgucgagcccggcgacaagaucaccuucgaggccaccggcaaccucgucgucccccgcuacgccuucgccauggagcgcaacgccggcuccggcaucaucaucuccgacacccccguccacgacugcaacaccaccugccagacccccaagggcgccaucaacaccucccuccccuuccagaacauccaccccaucaccaucggcaagugccccaaguacgucaaguccaccaagcuccgccucgccaccggccuccgcaacauccccuccauccagucccgcggccucuucggcgccaucgccggcuucaucgagggcggcuggaccggcauggucgacggcugguacggcuaccaccaccagaacgagcagggcuccggcuacgccgccgaccucaaguccacccagaacgccaucgacgagaucaccaacaaggucaacuccgucaucgagaagaugaacacccaguucaccgccgucggcaaggaguucaaccaccucgagaagcgcaucgagaaccucaacaagaaggucgacgacggcuuccucgacaucuggaccuacaacgccgagcuccucguccuccucgagaacgagcgcacccucgacuaccacgacuccaacgucaagaaccucuacgagaagguccgcucccagcucaagaacaacgccaaggagaucggcaacggcugcuucgaguucuaccacaagugcgacaacaccugcauggaguccgucaagaacggcaccuacgacuaccccaaguacuccgaggaggccaagcucaaccgcgaggagaucgacggcgucaagcucgaguccacccgcaucuaccagauccucgccaucuacuccaccgucgccuccucccucguccucgucgucucccucggcgccaucuccuucuggaugugcuccaacggcucccuccagugccgcaucugcaucuga

SEQ ID NO: 100677 - RNA, 1701 nt, Artificial Sequence; identical to SEQ ID NO: 100257
  derived and/or modified CDS sequence (opt2) from hemagglutinin__InfluenzaA__ADF83833

SEQ ID NO: 100678 - RNA, 1701 nt, Artificial Sequence; identical to SEQ ID NO: 100257
  derived and/or modified CDS sequence (opt2) from hemagglutinin__InfluenzaA__ADF83843

SEQ ID NO: 100679 - RNA, 1701 nt, Artificial Sequence; identical to SEQ ID NO: 100257
  derived and/or modified CDS sequence (opt2) from hemagglutinin__InfluenzaA__ADF83853

SEQ ID NO: 100680 - RNA, 1701 nt, Artificial Sequence
  derived and/or modified CDS sequence (opt2) from hemagglutinin__InfluenzaA__ADF83873
augaaggccauccucgucguccuccucuacaccuucgccaccgccaacgccgacacccucugcaucggcuaccacgccaacaacuccaccgacaccgucgacaccguccucgagaagaacgucaccgucacccacuccgucaaccuccucgaggacaagcacaacggcaagcucugcaagcuccgcggcgucgccccccuccaccucggcaagugcaacaucgccggcuggauccucggcaaccccgagugcgagucccucuccaccgccaacuccugguccuacaucgucgagaccuccuccuccgacaacggcaccugcuaccccggcgacuucaucgacuacgaggagcuccgcgagcagcucuccuccgucuccuccuucgagcgcuucgagaucuuccccaagaccuccuccuggcccaaccacgacuccaacaagggcgucaccgccgccugcccccacgccggcgccaaguccuucuacaagaaccucaucuggcucgucaagaagggcaacuccuaccccaagcucuccaaguccuacaucaacgacaagggcaaggagguccucguccucuggggcauccaccaccccuccaccuccaccgaccagcagucccucuaccagaacgccgacgccuacgucuucgucggcaccucccgcuacuccaagaaguucaagcccgagaucgccauccgccccaagguccgcgaccaggagggccgcaugaacuacuacuggacccucgucgagcccggcgacaagaucaccuucgaggccaccggcaaccucgucgucccccgcuacgccuucgccauggagcgcaacgccggcuccggcaucaucaucuccgacacccccguccacgacugcaacaccaccugccagacccccaagggcgccaucaacaccucccuccccuuccagaacauccaccccaucaccaucggcaagugccccaaguacgucaaguccaccaagcuccgccucgccaccggccuccgcaacguccccuccauccagucccgcggccucuucggcgccaucgccggcuucaucgagggcggcuggaccggcauggucgacggcugguacggcuaccaccaccagaacgagcagggcuccggcuacgccgccgaccucaaguccacccagaacgccaucgacaagaucaccaacaaggucaacuccgucaucgagaagaugaacacccaguucaccgccgucggcaaggaguucaaccaccucgagaagcgcaucgagaaccucaacaagaaggucgacgacggcuuccucgacaucuggaccuacaacgccgagcuccucguccuccucgagaacgagcgcacccucgacuaccacgacuccaacgucaagaaccucuacgagaagguccgcucccagcucaagaacaacgccaaggagaucggcaacggcugcuucgaguucuaccacaagugcgacaacaccugcauggaguccgucaagaacggcaccuacgacuaccccaaguacuccgaggaggccaagcucaaccgcgaggagaucgacggcgucaagcucgaguccacccgcaucuaccagauccucgccaucuacuccaccgucgccuccucccucguccucgucgucucccucggcgccaucuccuucuggaugugcuccaacggcucccuccagugccgcaucugcaucuga

SEQ ID NO: 100681 - RNA, 1701 nt, Artificial Sequence; identical to SEQ ID NO: 99869
  derived and/or modified CDS sequence (opt2) from hemagglutinin__InfluenzaA__ADF83885

SEQ ID NO: 100682 - RNA, 1701 nt, Artificial Sequence
  derived and/or modified CDS sequence (opt2) from hemagglutinin__InfluenzaA__ADF83895
augaaggccauccucgucguccuccucuacaccuucgccaccgucaacgccgacacccucugcaucggcuaccacgccaacaacuccaccgacaccgucgacaccguccucgagaagaacgucaccgucacccacuccgucaaccuccucgaggacaagcacaacggcaagcucugcaagcuccgcggcgucgccccccuccaccucggcaagugcaacaucgccggcuggauccucggcaaccccgagugcgagucccucuccaccgccuccuccugguccuacaucgucgagaccuccuccuccgacaacggcaccugcuaccccggcgacuucaucgacuacgaggagcuccgcgagcagcucuccuccgucuccuccuucgagcgcuucgagaucuuccccaagaccuccuccuggcccaaccacgacuccaacaagggcgucaccgccgccugcccccacgccggcgccaaguccuucuacaagaaccucaucuggcucgucaagaagggcaacuccuaccccaagcucuccaaguccuacaucaacgacaagggcaaggagguccucguccucuggggcauccaccaccccuccaccuccgccgaccagcagucccucuaccagaacgccgacgccuacgucuucgucggcaccucccgcuacuccaagaaguucaagcccgagaucgccauccgccccaagguccgcgaccaggagggccgcaugaacuacuacuggacccucgucgagcccggcgacaagaucaccuucgaggccaccggcaaccucgucgucccccgcuacgccuucgccauggagcgcaacgccggcuccggcaucaucaucuccgacacccccguccacgacugcaacaccaccugccagacccccaagggcgccaucaacaccucccuccccuuccagaacauccaccccaucaccaucggcaagugccccaaguacgucaaguccaccaagcuccgccucgccaccggccuccgcaacguccccuccauccagucccgcggccucuucggcgccaucgccggcuucaucgagggcggcuggaccggcauggucgacggcugguacggcuaccaccaccagaacgagcagggcuccggcuacgccgccgaccucaaguccacccagaacgccaucgacaagaucaccaacaaggucaacuccgucaucgagaagaugaacacccaguucaccgccgucggcaaggaguucaaccaccucgagaagcgcaucgagaaccucaacaagaaggucgacgacggcuuccucgacaucuggaccuacaacgccgagcuccucguccuccucgagaacgagcgcacccucgacuaccacgacuccaacgucaagaaccucuacgagaagauccgcucccagcucaagaacaacgccaaggagaucggcaacggcugcuucgaguucuaccacaagugcgacaacaccugcauggaguccgucaagaacggcaccuacgacuaccccaaguacuccgaggaggccaagcucaaccgcgaggagaucgacggcgucaagcucgaguccacccgcaucuaccagauccucgccaucuacuccaccgucgccuccucccucguccucgucgucucccucggcgccaucuccuucuggaugugcuccaacggcucccuccagugccgcaucugcaucuga

SEQ ID NO: 100683 - RNA, 1701 nt, Artificial Sequence; identical to SEQ ID NO: 100257
  derived and/or modified CDS sequence (opt2) from hemagglutinin__InfluenzaA__ADF83915

SEQ ID NO: 100684 - RNA, 1701 nt, Artificial Sequence
  derived and/or modified CDS sequence (opt2) from hemagglutinin__InfluenzaA__ADF84441
augaaggccauccucgucguccuccucuacaccuucgccaccgccaacgccgacacccucugcaucggcuaccacgccaacaacuccaccgacaccgucgacaccguccucgagaagaacgucaccgucacccacuccgucaaccuccucgaggacaagcacaacggcaagcucugcaagcuccgcggcgucgccccccuccaccucggcaagugcaacaucgccggcuggauccucggcaaccccgagugcgagucccucuccaccgccuccuccugguccuacaucgucgagaccuccuccuccgacaacggcaccugcuaccccggcgacuucaucaacuacgaggagcuccgcgagcagcucuccuccgucuccuccuucgagcgcuucgagaucuuccccaagaccuccuccuggcccucccacgacuccaacaagggcgucaccgccgccugcccccacgccggcgccaaguccuucuacaagaaccucaucuggcucgucaagaagggcaacuccuaccccaagcucuccaaguccuacaucaacgacaagggcaaggagguccucguccucuggggcauccaccaccccuccaccuccgccgaccagcagucccucuaccagaacgccgacgccuacgucuucgucggcaccucccgcuacuccaagaaguucaagcccgagaucgccauccgccccaagguccgcgaccaggagggccgcaugaacuacuacuggacccucgucgagcccggcgacaagaucaccuucgaggccaccggcaaccucgucgucccccgcuacgccuucgccauggagcgcaacgccggcuccggcaucaucaucuccgacacccccguccacgacugcaacaccaccugccagacccccaagggcgccaucaacaccucccuccccuuccagaacauccaccccaucaccaucggcaagugccccaaguacgucaaguccaccaagcuccgccucgccaccggccuccgcaacguccccuccauccagucccgcggccucuucggcgccaucgccggcuucaucgagggcggcuggaccggcauggucgacggcugguacggcuaccaccaccagaacgagcagggcuccggcuacgccgccgaccucaaguccacccagaacgccaucgacaagaucaccaacaaggucaacuccgucaucgagaagaugaacauccaguucaccgccgucggcaaggaguucaaccaccucgagaagcgcaucgagaaccucaacaagaaggucgacgacggcuuccucgacaucuggaccuacaacgccgagcuccucguccuccucgagaacgagcgcacccucgacuaccacgacuccaacgucaagaaccucuacgagaagguccgcucccagcucaagaacaacgccaaggagaucggcaacggcugcuucgaguucuaccacaagugcgacaacaccugcauggaguccgucaagaacggcaccuacgacuaccccaaguacuccgaggaggccaagcucaaccgcgaggagaucgacggcgucaagcucgaguccacccgcaucuaccagauccucgccaucuacuccaccgucgccuccucccucguccucgucgucucccucggcgccaucuccuucuggaugugcuccaacggcucccuccagugccgcaucugcaucuga

SEQ ID NO: 100685 - RNA, 1701 nt, Artificial Sequence; identical to SEQ ID NO: 99869
  derived and/or modified CDS sequence (opt2) from hemagglutinin__InfluenzaA__ADF84459

SEQ ID NO: 100686 - RNA, 1701 nt, Artificial Sequence; identical to SEQ ID NO: 100257
  derived and/or modified CDS sequence (opt2) from hemagglutinin__InfluenzaA__ADF84469

SEQ ID NO: 100687 - RNA, 1701 nt, Artificial Sequence; identical to SEQ ID NO: 100318
  derived and/or modified CDS sequence (opt2) from hemagglutinin__InfluenzaA__ADF84479

SEQ ID NO: 100688 - RNA, 1701 nt, Artificial Sequence; identical to SEQ ID NO: 100257
  derived and/or modified CDS sequence (opt2) from hemagglutinin__InfluenzaA__ADF84489

SEQ ID NO: 100689 - RNA, 1701 nt, Artificial Sequence; identical to SEQ ID NO: 100257
  derived and/or modified CDS sequence (opt2) from hemagglutinin__InfluenzaA__ADF85017

SEQ ID NO: 100690 - RNA, 1701 nt, Artificial Sequence; identical to SEQ ID NO: 100257
  derived and/or modified CDS sequence (opt2) from hemagglutinin__InfluenzaA__ADF87152

SEQ ID NO: 100691 - RNA, 1701 nt, Artificial Sequence
  derived and/or modified CDS sequence (opt2) from hemagglutinin__InfluenzaA__ADF87162
augaaggccauccucgucguccuccucuacaccuucgccaccgccaacgccgacacccucugcaucggcuaccacgccaacaacuccaccgacaccgucgacaccguccucgagaagaacgucaccgucacccacuccgucaaccuccucgaggacaagcacaacggcaagcucugcaagcuccgcggcgucgccccccuccaccucggcaagugcaacaucgccggcuggauccucggcaaccccgagugcgagucccucuccaccgccuccuccugguccuacaucgucgagaccuccuccuccgacaacggcaccugcuaccccggcgacuucaucgacuacgaggagcuccgcgagcagcucuccuccgucuccuccuucgagcgcuucgagaucuuccccaagaccuccuccuggcccaaccacgacuccaacaagggcgucaccgccgccugcccccacgccggcgccaaguccuucuacaagaaccucaucuggcucgucaagaagggcaacuccuaccccaagcucuccaaguccuacaucaacgacaagggcaaggagguccucguccucuggggcauccaccaccccuccaccuccgccgaccagcagucccucuaccagaacgccgacuccuacgucuucgucggcaccuccaaguacuccaagaaguucaagcccgagaucgccauccgccccaagguccgcgaccaggagggccgcaugaacuacuacuggacccucgucgagcccggcgacaagaucaccuucgaggccaccggcaaccucgucgucccccgcuacgccuucgccauggagcgcaacgccggcuccggcaucaucaucuccgacacccccguccacgacugcaacaccaccugccagacccccgagggcgccaucaacaccucccuccccuuccagaacauccaccccaucaccaucggcaagugccccaaguacgucaaguccaccaagcuccgccucgccaccggccuccgcaacguccccuccauccagucccgcggccucuucggcgccaucgccggcuucaucgagggcggcuggaccggcauggucgacggcugguacggcuaccaccaccagaacgagcagggcuccggcuacgccgccgaccucaaguccacccagaacgccaucgacgagaucaccaacaaggucaacuccgucaucgagaagaugaacacccaguucaccgccgucggcaaggaguucaaccaccucgagaagcgcaucgagaaccucaacaagaaggucgacgacggcuuccucgacaucuggaccuacaacgccgagcuccucguccuccucgagaacgagcgcacccucgacuaccacgacuccaacgucaagaaccucuacgagaagguccgcucccagcucaagaacaacgccaaggagaucggcaacggcugcuucgaguucuaccacaagugcgacaacaccugcauggaguccgucaagaacggcaccuacgacuaccccaaguacuccgaggaggccaagcucaaccgcgaggagaucgacggcgucaagcucgaguccacccgcaucuaccagauccucgccaucuacuccaccgucgccuccucccucguccucgucgucucccucggcgccaucuccuucuggaugugcuccaacggcucccuccagugccgcaucugcaucuga

SEQ ID NO: 100692 - RNA, 1701 nt, Artificial Sequence; identical to SEQ ID NO: 100257
  derived and/or modified CDS sequence (opt2) from hemagglutinin__InfluenzaA__ADF87172

SEQ ID NO: 100693 - RNA, 1701 nt, Artificial Sequence
  derived and/or modified CDS sequence (opt2) from hemagglutinin__InfluenzaA__ADF87182
augaacgccauccucgucguccuccucuacaccuucgccaccgccaacgccgacacccucugcaucggcuaccacgccaacaacuccaccgacaccgucgacacccuccucgagaagaacgucaccgucacccacuccgucaaccuccucgaggacaagcacaacggcaagcucugcaagcuccgcggcgucgccccccuccaccucggcaagugcaacaucgccggcuggauccucggcaaccccgagugcgagucccucuccaccgccuccuccugguccuacaucgucgagaccuccuccuccgacaacggcaccugcuaccccggcgacuucaucgacuacgaggagcuccgcgagcagcucuccuccgucuccuccuucgagcgcuucgagaucuuccccaagaccuccuccuggcccaaccacgacuccaacaagggcgucaccgccgccugcccccacgccggcgccaaguccuucuacaagaaccucaucuggcucgucaagaagggcaacuccuaccccaagcucuccaaguccuacaucaacgacaagggcaaggagguccucguccucuggggcauccaccaccccuccaccuccgccgaccagcagucccucuaccagaacgccgacgccuacgucuucgucggcaccucccgcuacuccaagaaguucaagcccgagaucgccauccgccccaagguccgcgaccaggagggccgcaugaacuaccacuggacccucgucgagcccggcgacaagaucaccuucgaggccaccggcaaccucgucgucccccgcuacgccuucgccauggagcgcaacgccggcuccggcaucaucaucuccgacgcccccguccacgacugcaacaccaccugccagacccccaagggcgccaucaacaccucccuccccuuccagaacauccaccccaucaccaucggcaagugccccaaguacgucaaguccaccaagcuccgccucgccaccggccuccgcaacguccccuccauccagucccgcggccucuucggcgccaucgccggcuucaucgagggcggcuggaccggcauggucgacggcugguacggcuaccaccaccagaacgagcagggcuccggcuacgccgccgaccucaaguccacccagaacgccaucgacgagaucaccaacaagaucaacuccgucaucgagaagaugaacacccaguucaccgccgucggcaaggaguucaaccaccucgagaagcgcaucgagaaccucaacaagaaggucgacgacggcuuccucgacaucuggaccuacaacgccgagcuccucguccuccucgagaacgagcgcacccucgacuaccacgacuccaacgucaagaaccucuacgagaagguccgcucccagcucaagaacaacgccaaggagaucggcaacggcugcuucgaguucuaccacaagugcgacaacaccugcauggaguccgucaagaacggcaccuacgacuaccccaaguacuccgaggaggccaagcucaaccgcgaggagaucgacggcgucaagcucgaguccacccgcaucuaccagauccucgccaucuacuccaccgucgccuccucccucguccucgucgucucccucggcgccaucuccuucuggaugugcuccaacggcucccuccagugccgcaucugcaucuga

SEQ ID NO: 100694 - RNA, 1701 nt, Artificial Sequence; identical to SEQ ID NO: 100257
  derived and/or modified CDS sequence (opt2) from hemagglutinin__InfluenzaA__ADF87192

SEQ ID NO: 100695 - RNA, 1701 nt, Artificial Sequence
  derived and/or modified CDS sequence (opt2) from hemagglutinin__InfluenzaA__ADF87202
augaaggccauccucgucguccuccucuacaccuucgccaccgccaacgccgacacccucugcaucggcuaccacgccaacaacuccaccgacaccgucgacaccguccucgagaagaacgucaccgucacccacuccgucaaccuccucgaggacaagcacaacggcaagcucugcaagcuccgcggcgucgccccccuccaccucggcaagugcaacaucgccggcuggauccucggcaaccccgagugcgagucccucuccaccgccuccuccugguccuacaucgucgagaccuccuccuccgacaacggcaccugcuaccccggcgacuucaucgacuacgaggagcuccgcgagcagcucuccuccgucuccuccuucgagcgcuucgagaucuuccccaagaccuccuccuggcccaaccacgacuccaacaagggcgucaccgccgccugcccccacgccggcgccaaguccuucuacaagaaccucaucuggcucgucaagaagggcaacuccuaccccaagcucuccaaguccuacaucaacgacaagggcaaggagguccucguccucuggggcauccaccaccccuccaccuccgccgaccagcagucccucuaccagaacgccgacgccuacgucuucgucggcaccucccgcuacuccaagaaguucaagcccgagaucgccauccgccccaagguccgcgaccaggagggccgcaugaacuacuacuggacccucgucgagcccggcgacaagaucaccuucgaggccaccggcaaccucgucgucccccgcuacgccuucgccauggagcgcaacgccggcuccggcaucaucaucuccgacacccccguccacgacugcaacaccaccugccagacccccaagggcgccaucaacaccucccuccccuuccagaacauccaccccaucaccaucggcaagugccccaaguacgucaaguccaccaagcuccgccucgccaccggccuccgcaacguccccuccauccagucccgcggccucuucggcgccaucgccggcuucaucgagggcggcuggaccggcauggucgacggcugguacggcuaccaccaccagaacgagcagggcuccggcuucgccgccgaccucaaguccacccagaacgccaucgacaagaucaccaacaaggucaacuccgucaucgagaagaugaacacccaguucaccgccgucggcaaggaguucaaccaccucgagaagcgcaucgagaaccucaacaagaaggucgacgacggcuuccucgacaucuggaccuacaacgccgagcuccucguccuccucgagaacgagcgcacccucgacuaccacgacuccaacgucaagaaccucuacgagaagguccgcucccagcucaagaacaacgccaaggagaucggcaacggcugcuucgaguucuaccacaagugcgacaacaccugcauggaguccgucaagaacggcaccuacgacuaccccaaguacuccgaggaggccaagcucaaccgcgaggagaucgacggcgucaagcucgaguccacccgcaucuaccagauccucgccaucuacuccaccgucgccuccucccucguccucgucgucucccucggcgccaucuccuucuggaugugcuccaacggcucccuccagugccgcaucugcaucuga

SEQ ID NO: 100696 - RNA, 1701 nt, Artificial Sequence; identical to SEQ ID NO: 100257
  derived and/or modified CDS sequence (opt2) from hemagglutinin__InfluenzaA__ADF87212

SEQ ID NO: 100697 - RNA, 1701 nt, Artificial Sequence; identical to SEQ ID NO: 100420
  derived and/or modified CDS sequence (opt2) from hemagglutinin__InfluenzaA__ADF87232

SEQ ID NO: 100698 - RNA, 1701 nt, Artificial Sequence; identical to SEQ ID NO: 100257
  derived and/or modified CDS sequence (opt2) from hemagglutinin__InfluenzaA__ADF87242

SEQ ID NO: 100699 - RNA, 1701 nt, Artificial Sequence
  derived and/or modified CDS sequence (opt2) from hemagglutinin__InfluenzaA__ADF87252
augaaggccauccucgucguccuccucuacaccuucgccaccgccaacgccgacacccucugcaucggcuaccacgccaacaacuccaccgacaccgucgacaccguccucgagaagaacgucaccgucacccacuccgucaaccuccucgaggacaagcacaacggcaagcucugcaagcuccgcggcgucgccccccuccaccucggcaagugcaacaucgccggcuggauccucggcaaccccgagugcgagucccucuccaccgccuccuccugguccuacaucgucgagaccuccuccuccgacaacggcaccugcuaccccggcgacuucaucaacuacgaggagcuccgcgagcagcucuccuccgucuccuccuucgagcgcuucgagaucuuccccaagaccuccuccuggcccaaccacgacuccaacaagggcgucaccgccgccugcccccacgccggcgccaaguccuucuacaagaaccucaucuggcucgucaagaagggcaaguccuaccccaagcucuccaaguccuacaucaacgacaagggcaaggagguccucguccucuggggcauccaccaccccuccaccuccgccgaccagcagucccucuaccagaacgccgacgccuacgucuucgucggcaccucccgcuacuccaagaaguucaagcccgagaucgccauccgccccaagguccgcgaccaggagggccgcaugaacuacuacuggacccucgucgagcccggcgacaagaucaccuucgaggccaccggcaaccucgucgucccccgcuacgccuucgccauggagcgcaacgccggcuccggcaucaucaucuccgacacccccguccacgacugcaacaccaccugccagacccccaagggcgccaucaacaccucccuccccuuccagaacauccaccccaucaccaucggcaagugccccaaguacgucaaguccaccaagcuccgccucgccaccggccuccgcaacguccccuccauccagucccgcggccucuucggcgccaucgccggcuucaucgagggcggcuggaccggcauggucgacggcugguacggcuaccaccaccagaacgagcagggcuccggcuacgccgccgaccucaaguccacccagaacgccaucgacaagaucaccaacaaggucaacuccgucaucgagaagaugaacacccaguucaccgccgucggcaaggaguucaaccaccucgagaagcgcaucgagaaccucaacaagaaggucgacgacggcuuccucgacaucuggaccuacaacgccgagcuccucguccuccucgagaacgagcgcacccucgacuaccacgacuccaacgucaagaaccucuacgagaagguccgcucccagcucaagaacaacgccaaggagaucggcaacggcugcuucgaguucuaccacaagugcgacaacaccugcauggaguccgucaagaacggcaccuacgacuaccccaaguacuccgaggaggccaagcucaaccgcgaggagaucgacggcgucaagcucgaguccacccgcaucuaccagauccucgccaucuacuccaccgucgccuccucccucguccucgucgucucccucggcgccaucuccuucuggaugugcuccaacggcucccuccagugccgcaucugcaucuga

SEQ ID NO: 100700 - RNA, 1701 nt, Artificial Sequence; identical to SEQ ID NO: 100257
  derived and/or modified CDS sequence (opt2) from hemagglutinin__InfluenzaA__ADF87262

SEQ ID NO: 100701 - RNA, 1701 nt, Artificial Sequence; identical to SEQ ID NO: 99869
  derived and/or modified CDS sequence (opt2) from hemagglutinin__InfluenzaA__ADF87272

SEQ ID NO: 100702 - RNA, 1701 nt, Artificial Sequence; identical to SEQ ID NO: 99869
  derived and/or modified CDS sequence (opt2) from hemagglutinin__InfluenzaA__ADF87282

SEQ ID NO: 100703 - RNA, 1701 nt, Artificial Sequence
  derived and/or modified CDS sequence (opt2) from hemagglutinin__InfluenzaA__ADF87292
augaaggccauccucgucguccuccucuacaccuucgccaccgccaacgccgacacccucugcaucggcuaccacgccaacaacuccaccgacaccgucgacaccguccucaagaagaacgucaccgucacccacuccgucaaccuccucgaggacaagcacaacggcaagcucugcaagcuccgcggcgucgccccccuccaccucggcaagugcaacaucgccggcuggauccucggcaaccccgagugcgagucccucuccaccgccggcuccugguccuacaucgucgagaccuccuccuccgacaacggcaccugcuaccccggcgacuucaucgacuacgaggagcuccgcgagcagcucuccuccgucuccuccuucgagcgcuucgagaucuuccccaagaccuccuccuggcccaaccacgacuccaacaagggcgucaccgccgccugcccccacgccggcgccaaguccuucuacaagaaccucaucuggcucgucaagaagggcaacuccuaccccaagcucuccaaguccuacaucaacgacaagggcaaggagguccucguccucuggggcauccaccaccccuccaccuccgccgaccagcagucccucuaccagaacgccgacgccuacgucuucgucggcaccucccgcuacuccaagaaguucaagcccgagaucgccauccgccccaagguccgcgaccaggagggccgcaugaacuacuacuggacccucgucgagcccggcgacaagaucaccuucgaggccaccggcaaccucgucgucccccgcuacgccuucgccauggagcgcaacgccggcuccggcaucaucaucuccgacacccccguccacgacugcaacaccaccugccagacccccaagggcgccaucaacaccucccuccccuuccagaacauccaccccaucaccaucggcaagugccccaaguacgucaaguccaccaagcuccgccucgccaccggccuccgcaacguccccuccauccagucccgcggccucuucggcgccaucgccggcuucaucgagggcggcuggaccggcauggucgacggcugguacggcuaccaccaccagaacgagcagggcuccggcuacgccgccgaccucaaguccacccagaacgccaucgacgagaucaccaacaaggucaacuccgucaucgagaagaugaacacccaguucaccgccgucggcaaggaguucaaccaccucgagaagcgcaucgagaaccucaacaagaaggucgacgacggcuuccucgacaucuggaccuacaacgccgagcuccucguccuccucgagaacgagcgcacccucgacuaccacgacuccaacgucaagaaccucuacgagaagguccgcucccagcucaagaacaacgccaaggagaucggcaacggcugcuucgaguucuaccacaagugcgacaacaugugcauggaguccgucaagaacggcaccuacgacuaccccaaguacuccgaggaggccaagcucaaccgcgaggagaucgacggcgucaagcucgaguccacccgcaucuaccagauccucgccaucuacuccaccgucgccuccucccucguccucgucgucucccucggcgccaucuccuucuggaugugcuccaacggcucccuccagugccgcaucugcaucuga

SEQ ID NO: 100704 - RNA, 1701 nt, Artificial Sequence; identical to SEQ ID NO: 99869
  derived and/or modified CDS sequence (opt2) from hemagglutinin__InfluenzaA__ADF87302

SEQ ID NO: 100705 - RNA, 1701 nt, Artificial Sequence
  derived and/or modified CDS sequence (opt2) from hemagglutinin__InfluenzaA__ADF87331
augaaggccauccucgucguccuccucuacaccuucgccaccgccaacgccgacacccucugcaucggcuaccacgccaacaacuccaccgacaccgucgacaccguccucgagaagaacgucaccgucacccacuccgucaaccuccucgaggacaagcacaacggcaagcucugcaagcuccgcggcgucgccccccuccaccucggcaagugcaacaucgccggcuggauccucggcaaccccgagugcgagucccucuccaccgccuccuccugguccuacaucgucgagaccuccaacuccgacaacggcaccugcuaccccggcgacuucaucaacuacgaggagcuccgcgagcagcucuccuccgucuccuccuucgagcgcuucgagaucuuccccaagaccuccuccuggcccaaccacgacuccaacaagggcaucaccgccgccugcccccacgccggcgccaaguccuucuacaagaaccucaucuggcucgucaagaagggcaacuccuaccccaagcucuccaaguccuacaucaacgacaagggcaaggagguccucguccucuggggcauccaccaccccuccaccuccgccgaccagcagucccucuaccagaacgccgacgccuacgucuucgucggcuccucccgcuacuccaagaaguucaagcccgagaucgccauccgccccaagguccgcgaccaggagggccgcaugaacuacuacuggacccucgucgagcccggcgacaagaucaccuucgaggccaccggcaaccucgucgucccccgcuacgccuucgccauggagcgcaacgccggcuccggcaucaucaucuccgacacccccguccacgacugcaacaccaccugccagacccccaagggcgccaucaacaccucccuccccuuccagaacauccaccccaucaccaucggcaagugccccaaguacgucaaguccaccaagcuccgccucgccaccggccuccgcaacguccccuccauccagucccgcggccucuucggcgccaucgccggcuucaucgagggcggcuggaccggcauggucgacggcugguacggcuaccaccaccagaacgagcagggcuccggcuacgccgccgaccucaaguccacccagaacgccaucgacaagaucaccaacaaggucaacuccgucaucgagaagaugaacacccaguucaccgccgucggcaaggaguucaaccaccucgagaagcgcaucgagaaccucaacaagaaggucgacgacggcuuccucgacaucuggaccuacaacgccgagcuccucguccuccucgagaacgagcgcacccucgacuaccacgacuccaacgucaagaaccucuacgagaagguccgcucccagcucaagaacaacgccaaggagaucggcaacggcugcuucgaguucuaccacaagugcgacaacaccugcauggaguccgucaagaacggcaccuacgacuaccccaaguacuccgaggaggccaagcucaaccgcgaggagaucgacggcgucaagcucgaguccacccgcaucuaccagauccucgccaucuacuccaccgucgccuccucccucguccucgucgucucccucggcgccaucuccuucuggaugugcuccaacggcucccuccagugccgcaucugcaucuga

SEQ ID NO: 100706 - RNA, 1701 nt, Artificial Sequence; identical to SEQ ID NO: 98705
  derived and/or modified CDS sequence (opt2) from hemagglutinin__InfluenzaA__ADF87341

SEQ ID NO: 100707 - RNA, 1701 nt, Artificial Sequence
  derived and/or modified CDS sequence (opt2) from hemagglutinin__InfluenzaA__ADF87351
augaaggccauccucgucguccuccucuacaccuucgccaccgccaacgccgacacccucugcaucggcuaccacgccaacaacuccaccgacaccgucgacaccguccucgagaagaacgucaccgucacccacuccgucaaccuccucgaggacaagcacaacggcaagcucugcaagcuccgcggcgucgccccccuccaccucggcaagugcaacaucgccggcuggauccucggcaaccccgagugcgacucccucuccaccgccuccuccugguccuacaucgucgagaccuccuccuccgacaacggcaccugcuaccccggcgacuucaucgacuacgaggagcuccgcgagcagcucuccuccgucuccuccuucgagcgcuucgagauguuccccaagaccuccuccuggcccaaccacgacuccaacaagggcgucaccgccgccugcccccacgccggcgccaaguccuucuacaagaaccucaucuggcucgucaagaagggcaacuccuaccccaagcucuccaaguccuacaucaacgacaagggcaaggagguccucguccucuggggcauccaccaccccuccaccuccgccgaccagcagucccucuaccagaacgccgacgccuacgucuucgucggcaccucccgcuacuccaagaaguucaagcccgagaucgccauccgccccaagguccgcgaccaggagggccgcaugaacuacuacuggacccucgucgagcccggcgacaagaucaccuucgaggccaccggcaaccucgucgucccccgcuacgccuucgccauggagcgcaacgccggcuccggcaucaucaucuccgacacccccguccacgacugcaacaccaccugccagacccccaagggcgccaucaacaccucccuccccuuccagaacauccaccccaucaccaucggcaagugccccaaguacgucaaguccaccaagcuccgccucgccaccggccuccgcaacguccccuccauccagucccgcggccucuucggcgccaucgccggcuucaucgagggcggcuggaccggcauggucgacggcugguacggcuaccaccaccagaacgagcagggcuccggcuacgccgccgaccucaaguccacccagaacgccaucgacgagaucaccaacaaggucaacuccgucaucgagaagaugaacacccaguucaccgccgucggcaaggaguucaaccaccucgagaagcgcaucgagaaccucaacaagaaggucgacgacggcuuccucgacaucuggaccuacaacgccgagcuccucguccuccucgagaacgagcgcacccucgacuaccacgacuccaacgucaagaaccucuacgagaagguccgcucccagcucaagaacaacgccaaggagaucggcaacggcugcuucgaguucuaccacaagugcgacaacaccugcauggaguccgucaagaacggcaccuacgacuaccccaaguacuccgaggaggccaagcucaaccgcgaggagaucgacggcgucaagcucgaguccacccgcaucuaccagauccucgccaucuacuccaccgucgccuccucccucguccucgucgucucccucggcgccaucuccuucuggaugugcuccaacggcucccuccagugccgcaucugcaucuga

SEQ ID NO: 100708 - RNA, 1701 nt, Artificial Sequence; identical to SEQ ID NO: 100332
  derived and/or modified CDS sequence (opt2) from hemagglutinin__InfluenzaA__ADF87361

SEQ ID NO: 100709 - RNA, 1701 nt, Artificial Sequence; identical to SEQ ID NO: 99869
  derived and/or modified CDS sequence (opt2) from hemagglutinin__InfluenzaA__ADF87371

SEQ ID NO: 100710 - RNA, 1701 nt, Artificial Sequence
  derived and/or modified CDS sequence (opt2) from hemagglutinin__InfluenzaA__ADG08115
augaaggccauccucgucguccuccucuacaccuucgccaccgccaacgccgacacccucugcaucggcuaccacgccaacaacuccaccgacaccgucgacaccguccucgagaagaacgucaccgucacccacuccgucaaccuccucgaggacaagcacaacggcaagcucugcaagcuccgcggcgucgccccccuccaccucggcaagugcaacaucgccggcuggauccucggcaaccccgagugcgagucccucuccaccgccuccuccugguccuacaucgucgagaccuccuccuccggcaacggcaccugcuaccccggcgacuucaucgacuacgaggagcuccgcgagcagcucuccuccgucuccuccuucgagcgcuucgagaucuuccccaagaccuccuccuggcccaaccacgacuccaacaagggcgucaccgccgccugcccccacgccggcgccaaguccuucuacaagaaccucaucuggcucgucaagaagggcaacuccuaccccaagcucuccaaguccuacaucaacgacaagggcaaggagguccucguccucuggggcauccaccaccccuccaccuccgccgaccagcagucccucuaccagaacgccgacgccuacgucuucgucggcaccucccgcuacuccaagaaguucaagcccgagaucgccauccgccccaagguccgcggccaggagggccgcaugaacuacuacuggacccucgucgagcccggcgacaagaucaccuucgaggccaccggcaaccucgucgucccccgcuacgccuucgccauggagcgcaacgccggcuccggcaucaucaucuccgacacccccguccacgacugcaacaccaccugccagacccccaagggcgccaucaacaccucccuccccuuccagaacauccaccccaucaccaucggcaagugccccaaguacgucaaguccaccaagcuccgccucgccaccggccuccgcaacguccccuccauccagucccgcggccucuucggcgccaucgccggcuucaucgagggcggcuggaccggcauggucgacggcugguacggcuaccaccaccagaacgagcagggcuccggcuacgccgccgaccucaaguccacccagaacgccaucgacgagaucaccaacaaggucaacuccgucaucgagaagaugaacacccaguucaccgccgucggcaaggaguucaaccaccucgagaagcgcaucgagaaccucaacaagaaggucgacgacggcuuccucgacaucuggaccuacaacgccgagcuccucguccuccucgagaacgagcgcacccucgacuaccacgacuccaacgucaagaaccucuacgagaagguccgcucccagcucaagaacaacgccaaggagaucggcaacggcugcuucgaguucuaccacaagugcgacaacaccugcauggaguccgucaagaacggcaccuacgacuaccccaaguacuccgaggaggccaagcucaaccgcgaggagaucgacggcgucaagcucgaguccacccgcaucuaccagauccucgccaucuacuccaccgucgccuccucccucguccucgucgucucccucggcgccaucuccuucuggaugugcuccaacggcucccuccagugccgcaucugcaucuga

SEQ ID NO: 100711 - RNA, 1701 nt, Artificial Sequence; identical to SEQ ID NO: 99447
  derived and/or modified CDS sequence (opt2) from hemagglutinin__InfluenzaA__ADG21004

SEQ ID NO: 100712 - RNA, 1701 nt, Artificial Sequence; identical to SEQ ID NO: 99447
  derived and/or modified CDS sequence (opt2) from hemagglutinin__InfluenzaA__ADG21006

SEQ ID NO: 100713 - RNA, 1701 nt, Artificial Sequence
  derived and/or modified CDS sequence (opt2) from hemagglutinin__InfluenzaA__ADG21008
augaagaccaucaucgcccucuccuacauccucugccucgucuucgcccagaagauccccggcaacgacaacuccaccgccacccucugccucggccaccacgccguccccaacggcaccaucgucaagaccaucaccaacgaccagaucgaggucaccaacgccaccgagcucguccaguccuccuccaccggcgagaucugcgacuccccccaccagauccucgacggcgagaacugcacccucaucgacgcccuccucggcgacccccagugcgacggcuuccagaacaagaagugggaccucuucgucgagcgcuccaaguccuacuccaacugcuaccccuacgacguccccgacuacgccucccuccgcucccucgucgccuccuccggcacccucgaguucaacaacgaguccuucaacuggaccggcgucacccagaacggcaccuccuccgccugcauccgcaaguccaacaacuccuucuucucccgccucaacuggcucacccaccucaaguucaaguaccccgcccucaacgucaccaugcccaacaacgagcaguucgacaagcucuacaucuggggcguccaccaccccggcaccgacaacgaccagaucuuccucuacgcccaggccuccggccgcaucaccgucuccaccaagcgcucccagcagaccgucauccccaacaucggcucccgcccccgcguccgcaacauccccucccgcaucuccaucuacuggaccaucgucaagcccggcgacauccuccucaucaacuccaccggcaaccucaucgccccccgcggcuacuucaagauccgcuccggcaaguccuccaucaugcgcuccgacgcccccaucggcaagugcaacuccgagugcaucacccccaacggcuccauccccaacgacaagcccuuccagaacgucaaccgcaucaccuacggcgccugcccccgcuacgucaagcagaacacccucaagcucgccaccggcaugcgcaacguccccgagaagcagacccgcggcaucuucggcgccaucgccggcuucaucgagaacggcugggagggcauggucgacggcugguacggcuuccgccaccagaacuccgagggccgcggccaggccgccgaccucaaguccacccaggccgccaucgaccagaucaacggcaagcucaaccgccucaucggcaagaccaacgagaaguuccaccagaucgagaaggaguucuccgaggucgagggccgcauccaggaccucgagaaguacgucgaggacaccaagaucgaccucugguccuacaacgccgagcuccucgucgcccucgagaaccagcacaccaucgaccucaccgacuccgagaugaacaagcucuucgagaagaccaagaagcagcuccgcgagaacgccgaggacaugggcaacggcugcuucaagaucuaccacaagugcgacaacgccugcaucggcuccauccgcaacggcaccuacgaccacgacgucuaccgcgacgaggcccucaacaaccgcuuccagaucaagggcgucgagcucaaguccggcuacaaggacuggauccucuggaucuccuucgccaucuccugcuuccuccucugcgucgcccuccucggcuucaucaugugggccugccagaagggcaacauccgcugcaacaucugcaucuga

SEQ ID NO: 100714 - RNA, 1701 nt, Artificial Sequence
  derived and/or modified CDS sequence (opt2) from hemagglutinin__InfluenzaA__ADG21009
augaagaccaucaucgcccucuccuacauccucugccucgucuucgcccagaagcuccccggcaacgacaacuccaccgccacccucugccucggccaccacgccguccccaacggcaccaucgucaagaccaucaccaacgaccagaucgaggucaccaacgccaccgagcucguccaguccuccuccaccggcgagaucugcaacuccccccaccagauccucgacggcgagaacugcacccucaucgacgcccuccucggcgacccccagugcgacggcuuccagaacaagaagugggaccucuucgucgagcgcuccaaggccuacuccaacugcuaccccuacgacguccccgacuacgccucccuccgcucccucgucgccuccuccggcacccucgaguucaacaacgaguccuucaacuggaccggcgucacccagaacggcaccuccuccgccugcauccgccgcuccaacaacuccuucuucucccgccucaacuggcucacccaccuccgcuucaaguaccccgcccucaacgucaccaugcccaacaacgagcaguucgacaagcucuacaucuggggcguccaccaccccggcaccgacaacgaccagaucuuccucuacgcccaggccuccggccgcaucaccgucuccaccaagcgcucccagcagaccgucauccccaacaucggcucccgcccccgcguccgcaacauccccucccgcaucuccaucuacuggaccaucgucaagcccggcgacauccuccucaucaacuccaccggcaaccucaucgccccccgcggcuacuucaagauccgcuccggcaaguccuccaucaugcgcuccgacgcccccaucggcaagugcaacuccgagugcaucacccccaacggcuccauccccaacgacaagcccuuccagaacgucaaccgcaucaccuacggcgccugcccccgcuacgucaagcagaacacccucaagcucgccaccggcaugcgcaacguccccgagaagcagacccgcggcaucuucggcgccaucgccggcuucaucgagaacggcugggagggcauggucgacggcugguacggcuuccgccaccagaacuccgagggccgcggccaggccgccgaccucaaguccacccaggccgccaucgaccagaucaacggcaagcucaaccgccucaucggcaagaccaacgagaaguuccaccagaucgagaaggaguucuccgaggucgagggccgcauccaggaccucgagaaguacgucgaggacaccaagaucgaccucugguccuacaacgccgagcuccucgucgcccucgagaaccagcacaccaucgaccucaccgacuccgagaugaacaagcucuucgagaagaccaagaagcagcuccgcgagaacgccgaggacaugggcaacggcugcuucaagaucuaccacaagugcgacaacgccugcaucggcuccauccgcaacggcaccuacgaccacgacgucuaccgcgacgaggcccucaacaaccgcuuccagaucaagggcgucgagcucaaguccggcuacaaggacuggauccucuggaucuccuucgccaucuccugcuuccuccucugcgucgcccuccucggcuucaucaugugggccugccagaagggcaacauccgcugcaacaucugcaucuga

SEQ ID NO: 100715 - RNA, 1701 nt, Artificial Sequence; identical to SEQ ID NO: 99447
  derived and/or modified CDS sequence (opt2) from hemagglutinin__InfluenzaA__ADG21010

SEQ ID NO: 100716 - RNA, 1701 nt, Artificial Sequence
  derived and/or modified CDS sequence (opt2) from hemagglutinin__InfluenzaA__ADG21011
augaagaccaucaucgcccucuccuacauccucugccucgucuucgcccagaagcuccccggcaacgacaacuccaccgccacccucugccucggccaccacgccguccccaacggcaccaucgucaagaccaucaccaacgaccagaucgaggucaccaacgccaccgagcucguccaguccuccuccaccggcgagaucugcgacuccccccaccagauccucgacggcgagaacugcacccucaucgacgcccuccucggcgacccccagugcgacggcuuccagaacaagaagugggaccucuucgucgagcgcuccaaggccuacuccaacugcuaccccuacgacguccccgacuacgccucccuccgcucccucgucgccuccuccggcacccucgaguucaacaacgaguccuucaacuggaccggcgucacccagaacggcaccuccuccgccugcauccgccgcuccaacaacuccuucuucucccgccucaacuggcucacccaccucaacuucaaguaccccgcccucaacgucaccaugcccaacaacgagcaguucgacaagcucuacaucuggggcguccaccaccccggcaccgacaaggaccagaucuuccucuacgcccaggccuccggccgcaucaccgucuccaccaagcgcucccagcaggccgucauccccaacaucggcucccgcccccgcguccgcgacauccccucccgcaucuccaucuacuggaccaucgucaagcccggcgacauccuccucaucaacuccaccggcaaccucaucgccccccgcggcuacuucaagauccgcuccggcaaguccuccaucaugcgcuccgacgcccccaucggcaagugcaacuccgagugcaucacccccaacggcuccauccccaacgacaagcccuuccagaacgucaaccgcaucaccuacggcgccugcccccgcuacgucaagcagaacacccucaagcucgccaccggcaugcgcaacguccccgagaagcagacccgcggcaucuucggcgccaucgccggcuucaucgagaacggcugggagggcauggucgacggcugguacggcuuccgccaccagaacuccgagggccgcggccaggccgccgaccucaaguccacccaggccgccaucgaccagaucaacggcaagcucaaccgccucaucggcaagaccaacgagaaguuccaccagaucgagaaggaguucuccgaggucgagggccgcauccaggaccucgagaaguacgucgaggacaccaagaucgaccucugguccuacaacgccgagcuccucgucgcccucgagaaccagcacaccaucgaccucaccgacuccgagaugaacaagcucuucgagaagaccaagaagcagcuccgcgagaacgccgaggacaugggcaacggcugcuucaagaucuaccacaagugcgacaacgccugcaucggcuccauccgcaacggcaccuacgaccacgacgucuaccgcgacgaggcccucaacaaccgcuuccagaucaagggcgucgagcucaaguccggcuacaaggacuggauccucuggaucuccuucgccaucuccugcuuccuccucugcgucgcccuccucggcuucaucaugugggccugccagaagggcaacauccgcugcaacaucugcaucuga

SEQ ID NO: 100717 - RNA, 1701 nt, Artificial Sequence; identical to SEQ ID NO: 99447
  derived and/or modified CDS sequence (opt2) from hemagglutinin__InfluenzaA__ADG21012

SEQ ID NO: 100718 - RNA, 1701 nt, Artificial Sequence; identical to SEQ ID NO: 99447
  derived and/or modified CDS sequence (opt2) from hemagglutinin__InfluenzaA__ADG21013

SEQ ID NO: 100719 - RNA, 1701 nt, Artificial Sequence
  derived and/or modified CDS sequence (opt2) from hemagglutinin__InfluenzaA__ADG21014
augaagaccaucaucgcccucuccuacauccucugccucgucuucgcccagaagauccccggcaacgacaacuccaccgccacccucugccucggccaccacgccguccccaacggcaccaucgucaagaccaucaccaacgaccagaucgaggucaccaacgccaccgagcucguccaguccuccuccaccggcgagaucugcgacuccccccaccagauccucgacggcgagaacugcacccucaucgacgcccuccucggcgacccccagugcgacggcuuccagaacaagaagugggaccucuucgucgagcgcuccaaggccuacuccaacugcuaccccuacgacguccccgacuacgccucccuccgcucccucgucgccuccuccggcacccucgaguucaacaacgaguccuucaacuggaccggcgucacccagaacggcaccuccuccgccugcauccgccgcuccaacaacuccuucuucucccgccucaacuggcucacccaccucaacuucaaguaccccgcccucaacgucaccaugcccaacaacgagcaguucgacaagcucuacaucuggggcguccaccaccccggcaccgacaaggaccagaucuuccucuacgcccaggccuccggccgcaucaccgucuccaccaagcgcucccagcaggccgucauccccaacaucggcucccgcccccgcguccgcaacauccccucccgcaucuccaucuacuggaccaucgucaagcccggcgacauccuccucaucaacuccaccggcaaccucaucgccccccgcggcuacuucaagauccgcuccggcaaguccuccaucaugcgcuccgacgcccccaucggcaagugcaacuccgagugcaucacccccaacggcuccauccccaacgacaagcccuuccagaacgucaaccgcaucaccuacggcgccugcccccgcuacgucaagcagaacacccucaagcucgccaccggcaugcgcaacguccccgagaagcagacccgcggcaucuucggcgccaucgccggcuucaucgagaacggcugggagggcauggucgacggcugguacggcuuccgccaccagaacuccgagggccgcggccaggccgccgaccucaaguccacccaggccgccaucgaccagaucaacggcaagcucaaccgccucaucggcaagaccaacgagaaguuccaccagaucgagaaggaguucuccgaggucgagggccgcauccaggaccucgagaaguacgucgaggacaccaagaucgaccucugguccuacaacgccgagcuccucgucgcccucgagaaccagcacaccaucgaccucaccgacuccgagaugaacaagcucuucgagaagaccaagaagcagcuccgcgagaacgccgaggacaugggcaacggcugcuucaagaucuaccacaagugcgacaacgccugcaucggcuccauccgcaacggcaccuacgaccacgacgucuaccgcgacgaggcccucaacaaccgcuuccagaucaagggcgucgagcucaaguccggcuacaaggacuggauccucuggaucuccuucgccaucuccugcuuccuccucugcgucgcccuccucggcuucaucaugugggccugccagaagggcaacauccgcugcaacaucugcaucuga

SEQ ID NO: 100720 - RNA, 1701 nt, Artificial Sequence
  derived and/or modified CDS sequence (opt2) from hemagglutinin__InfluenzaA__ADG21017
augaagaccaucaucgcccucuccuacauccucuaccucgucuucgcccagaagcuccccggcaacgacaacuccaccgccacccucugccucggccaccacgccguccccaacggcaccaucgucaagaccaucaccaacgaccagaucgaggucaccaacgccaccgagcucguccaguccuccuccaccggcgagaucugcgacuccccccaccagauccucgacggcgagaacugcacccucaucgacgcccuccucggcgacccccagugcgacggcuuccagaacaagaagugggaccucuucaucgagcgcuccaaggccuacuccaacugcuaccccuacgacguccccgacuacgccucccuccgcucccucgucgccuccuccggcacccucgaguucaacaacgaguccuucaacuggaccggcgucacccagaacggcaccuccuccgccugcauccgccgcuccaacaacuccuucuucucccgccucaacuggcucacccaccucaacuucaaguaccccgcccucaacgucaccaugcccaacaacgagcaguucgacaagcucuacaucuggggcguccaccaccccggcaccgacaaggaccagaucuuccucuacgcccaggccuccggccgcaucaccgucuccaccaagcgcucccagcaggccgucauccccaacaucggcucccgcccccgcguccgcaacauccccucccgcaucuccaucuacuggaccaucgucaagcccggcgacauccuccucaucaacuccaccggcaaccucaucgccccccgcggcuacuucaagauccgcuccggcaaguccuccaucaugcgcuccgacgcccccaucggcaagugcaacuccgagugcaucacccccaacggcuccauccccaacgacaagcccuuccagaacgucaaccgcaucaccuacggcgccugcccccgcuacgucaagcagaacacccucaagcucgccaccggcaugcgcaacguccccgagaagcagacccgcggcaucuucggcgccaucgccggcuucaucgagaacggcugggagggcauggucgacggcugguacggcuuccgccaccagaacuccgagggccgcggccaggccgccgaccucaaguccacccaggccgccaucgaccagaucaacggcaagcucaaccgccucaucggcaagaccaacgagaaguuccaccagaucgagaaggaguucuccgaggucgagggccgcauccaggaccucgagaaguacgucgaggacaccaagaucgaccucugguccuacaacgccgagcuccucgucgcccucgagaaccagcacaccaucgaccucaccgacuccgagaugaacaagcucuucgagaagaccaagaagcagcuccgcgagaacgccgaggacaugggcaacggcugcuucaagaucuaccacaagugcgacaacgccugcaucggcuccauccgcaacggcaccuacgaccacgacgucuaccgcgacgaggcccucaacaaccgcuuccagaucaagggcgucgagcucaaguccggcuacaaggacuggauccucuggaucuccuucgccaucuccugcuuccuccucugcgucgcccuccucggcuucaucaugugggccugccagaagggcaacauccgcugcaacaucugcaucuga

SEQ ID NO: 100721 - RNA, 1701 nt, Artificial Sequence
  derived and/or modified CDS sequence (opt2) from hemagglutinin__InfluenzaA__ADG21018
augaagaccaucaucgcccucuccuacauccucugccucgucuucgcccagaagcuccccggcaacgacaacuccaccgccacccucugccucggccaccacgccguccccaacggcaccaucgucaagaccaucaccaacgaccagaucgaggucaccaacgccaccgagcucguccaguccuccuccaccggcgagaucugcgacuccccccaccagauccucgacggcgagaacugcacccucaucgacgcccuccucggcgacccccagugcgacggcuuccagaacaagaagugggaccucuucgucgagcgcuccaaggccuacuccaacugcuaccccuacgacguccccgacuacgccucccuccgcucccucgucgccuccuccggcacccucgaguucaacaacgaguccuucaacuggaccggcgucacccagaacggcaccuccuccgccugcauccgccgcuccaacaacuccuucuucucccgccucaacuggcucacccacuccaacuucaaguaccccgcccucaacgucaccaugcccaacaacgagcaguucgacaagcucuacaucuggggcguccaccaccccggcaccgacaaggaccagaucuuccucuacgcccaggccuccggccgcaucaccgucuccaccaagcgcucccagcaggccgucauccccaacaucggcucccgccaccgcguccgcaacauccccucccgcaucuccaucuacuggaccaucgucaagcccggcgacauccuccucaucaacuccaccggcaaccucaucgccccccgcggcuacuucaagauccgcuccggcaaguccuccaucaugcgcuccgacgcccccaucggcaagugcaacuccgagugcaucacccccaacggcuccauccccaacgacaagcccuuccagaacgucaaccgcaucaccuacggcgccugcccccgcuacgucaagcagaacacccucaagcucgccaccggcaugcgcaacguccccgagaagcagacccgcggcaucuucggcgccaucgccggcuucaucgagaacggcugggagggcauggucgacggcugguacggcuuccgccaccagaacuccgagggccgcggccaggccgccgaccucaaguccacccaggccgccaucgaccagaucaacggcaagcucaaccgccucaucggcaagaccaacgagaaguuccaccagaucgagaaggaguucuccgaggucgagggccgcauccaggaccucgagaaguacgucgaggacaccaagaucgaccucugguccuacaacgccgagcuccucgucgcccucgagaaccagcacaccaucgaccucaccgacuccgagaugaacaagcucuucgagaagaccaagaagcagcuccgcgagaacgccgaggacaugggcaacggcugcuucaagaucuaccacaagugcgacaacgccugcaucggcuccauccgcaacggcaccuacgaccacgacgucuaccgcgacgaggcccucaacaaccgcuuccagaucaagggcgucgagcucaaguccggcuacaaggacuggauccucuggaucuccuucgccaucuccugcuuccuccucugcgucgcccuccucggcuucaucaugugggccugccagaagggcaacauccgcugcaacaucugcaucuga

SEQ ID NO: 100722 - RNA, 1701 nt, Artificial Sequence
  derived and/or modified CDS sequence (opt2) from hemagglutinin__InfluenzaA__ADG21019
augaagaccaucaucgcccucuccuacauccucugccucgucuucgcccagaagcuccccggcaacgacaacuccaccgccacccucugccucggccaccacgccguccccaacggcaccaucgucaagaccaucaccaacgaccagaucgaggucaccaacgccaccgagcucguccaguccuccuccaccggcgagaucugcgacuccccccaccagauccucgacggcaagaacugcacccucaucgacacccuccucggcgacccccagugcgacggcuuccagaacaagaagugggaccucuucgucgagcgcuccaaggccuacuccaacugcuaccccuacgacguccccgacuacgccucccuccgcucccucgucgccuccuccggcacccucgaguucaacaacgaguccuucaacuggaccggcgucacccagaacggcaccuccuccgccugcauccgccgcuccaagaacuccuucuucucccgccucaacuggcucacccaccucaacuucaaguaccccgcccucaacgucaccaugcccaacaacgagcaguucgacaagcucuacaucuggggcguccaccaccccggcaccgacaaggaccagaucuuccucuacgcccaggccuccggcaagaucaucgucuccaccaagcgcucccagcagaccgucauccccaacaucggcucccgcccccgcguccgcaacauccccuccaucaucuccaucuacuggaccaucgucaagcccggcgacauccuccucaucaacuccaccggcaaccucaucgccccccgcggcuacuucaagauccgcuccggcaaguccuccaucaugcgcuccgacgcccccaucggcaagugcaacuccgagugcaucacccccaacggcuccauccccaacgacaagcccuuccagaacgucaaccgcaucaccuacggcgccugcccccgcuacgucaagcagaacacccucaagcucgccaccggcaugcgcaacguccccgagaagcagacccgcggcaucuucggcgccaucgccggcuucaucgagaacggcugggagggcauggucgacggcugguacggcuuccgccaccagaacuccgagggccgcggccaggccgccgaccucaaguccacccaggccgccaucgaccagaucaacggcaagcucaaccgccucaucggcaagaccaacgagaaguuccaccagaucgagaaggaguucuccgaggucgagggccgcauccaggaccucgagaaguacgucgaggacaccaagaucgaccucugguccuacaacgccgagcuccucgucgcccucgagaaccagcacaccaucgaccucaccgacuccgagaugaacaagcucuucgagaagaccaagaagcagcuccgcgagaacgccgaggacaucggcaacggcugcuucaagaucuaccacaagugcgacaacgccugcaucggcuccauccgcaacggcaccuacgaccacgacgucuaccgcgacgaggcccucaacaaccgcuuccagaucaagggcgucgagcucaaguccggcuacaaggacuggauccucuggaucuccuucgccaucuccugcuuccuccucugcgucgcccuccucggcuucaucaugugggccugccagaagggcaacauccgcugcaacaucugcaucuga

SEQ ID NO: 100723 - RNA, 1701 nt, Artificial Sequence
  derived and/or modified CDS sequence (opt2) from hemagglutinin__InfluenzaA__ADG21020
augaagaccaucaucgcccucuccuacauccucugccucgucuucgcccagaagcuccccggcaacgacaacuccaccgccacccucugccucggccaccacgccguccccaacggcaccaucgucaagaccaucaccaacgaccagaucgaggucaccaacgccaccgagcucguccaguccuccuccaccggcgagaucugcgacuccccccaccagauccucgacggcaagaacugcacccucaucgacgcccuccucggcgacccccagugcgacggcuuccagaacaagaagugggaccucuucgucgagcgcuccaaggccuacuccaacugcuaccccuacgacguccccgacuacgccucccuccgcucccucgucgccuccuccggcacccucgaguucaacaacgaguccuucaacuggaccggcgucacccaguccggcaccuccuccgccugcauccgccgcuccaagaacuccuucuucucccgccucaacuggcucacccaccucaacuucaaguaccccgcccucaacgucaccaugcccaacaacgagcaguucgacaagcucuacaucuggggcguccaccaccccggcaccgacaaggaccagaucuuccucuacgcccaggccuccggccgcaucaucgucuccaccaagcgcucccagcagaccgucacccccaacaucggcucccgcccccgcguccgcaacauccccucccgcaucuccaucuacuggaccaucgucaagcccggcgacauccuccucaucaacuccaccggcaaccucaucgccccccgcggcuacuucaagauccgcuccggcaaguccuccaucaugcgcuccgacgcccccaucggcaagugcaacuccgagugcaucacccccaacggcuccauccccaacgacaagcccuuccagaacgucaaccgcaucaccuacggcgccugcccccgcuacgucaagcagaacacccucaagcucgccaccggcaugcgcaacguccccgagaagcagacccgcggcaucuucggcgccaucgccggcuucaucgagaacggcugggagggcauggucgacggcugguacggcuuccgccaccagaacuccgagggccgcggccaggccgccgaccucaaguccacccaggccgccaucgaccagaucaacggcaagcucaaccgccucaucggcaagaccaacgagaaguuccaccagaucgagaaggaguucuccgaggucgagggccgcauccaggaccucgagaaguacgucgaggacaccaagaucgaccucugguccuacaacgccgagcuccucgucgcccucgagaaccagcacaccaucgaccucaccgacuccgagaugaacaagcucuucgagaagaccaagaagcagcuccgcgagaacgccgaggacaugggcaacggcugcuucaagaucuaccacaagugcgacaacgccugcaucggcuccauccgcaacggcaccuacgaccacgacgucuaccgcgacgaggcccucaacaaccgcuuccagaucaagggcgucgagcucaaguccggcuacaaggacuggauccucuggaucuccuucgccaucuccugcuuccuccucugcgucgcccuccucggcuucaucaugugggccugccagaagggcaacauccgcugcaacaucugcaucuga

SEQ ID NO: 100724 - RNA, 1701 nt, Artificial Sequence; identical to SEQ ID NO: 98470
  derived and/or modified CDS sequence (opt2) from hemagglutinin__InfluenzaA__ADG21022

SEQ ID NO: 100725 - RNA, 1701 nt, Artificial Sequence; identical to SEQ ID NO: 98470
  derived and/or modified CDS sequence (opt2) from hemagglutinin__InfluenzaA__ADG21023

SEQ ID NO: 100726 - RNA, 1701 nt, Artificial Sequence
  derived and/or modified CDS sequence (opt2) from hemagglutinin__InfluenzaA__ADG21024
augaagaccaucaucgcccucuccuacauccucugccucgucuucacccagaagcuccccggcaacgacaacuccaccgccacccucugccucggccaccacgccguccccaacggcaccaucgucaagaccaucaccaacgaccagaucgaggucaccaacgccaccgagcucguccaguccuccuccaccggcgagaucugcgacuccccccaccagauccucgacggcgagaacugcacccucaucgacgcccuccucggcgacccccagugcgacggcuuccagaacaagaagugggaccucuucgucgagcgcuccaaggccuacuccaacugcuaccccuacgacguccccgacuacgccucccuccgcucccucgucgccuccuccggcgcccucgaguucaacaacgaguccuucaacuggaccggcgucacccagaacggcaccuccuccgccugcauccgccgcuccaacaacuccuucuucucccgccucaacuggcucacccaccucaacuucaaguaccccgcccucaacgucaccaugcccaacaacgagcaguucgacaagcucuacaucuggggcguccaccaccccggcaccgacaaggaccagaucuuccucuacgcccaggccuccggccgcaucaccgucuccaccaagcgcucccagcaggccgucauccccaacaucggcucccgcccccgcguccgcaacauccccucccgcaucuccaucuacuggaccaucgucaagcccggcgacauccuccucaucaacuccaccggcaaccucaucgccccccgcggcuacuucaagauccaguccggcaaguccuccaucaugcgcuccgacgcccccaucggcaagugcaacuccgagugcaucacccccaacggcuccauccccaacgacaagcccuuccagaacgucaaccgcaucaccuacggcgccugcccccgcuacgucaagcaguccacccucaagcucgccaccggcaugcgcaacguccccgagaagcagacccgcggcaucuucggcgccaucgccggcuucaucgagaacggcugggagggcauggucgacggcugguacggcuuccgccaccagaacuccgagggccgcggccaggccgccgaccucaaguccacccaggccgccaucgaccagaucaacggcaagcucaaccgccucaucggcaagaccaacgagaaguuccaccagaucgagaaggaguucuccgaggucgagggccgcauccaggaccucgagaaguacgucgaggacaccaagaucgaccucugguccuacaacgccgagcuccucgucgcccucgagaaccagcacaccaucgaccucaccgacuccgagaugaacaagcucuucgagaagaccaagaagcagcuccgcgagaacgccgaggacaugggcaacggcugcuucaagaucuaccacaagugcgacaacgccugcaucggcuccauccgcaacggcaccuacgaccacgacgucuaccgcgacgaggcccucaacaaccgcuuccagaucaagggcgucgagcucaaguccggcuacaaggacuggauccucuggaucuccuucgccaucuccugcuuccuccucugcgucgcccuccucggcuucaucaugugggccugccagaagggcaacauccgcugcaacaucugcaucuga

SEQ ID NO: 100727 - RNA, 1701 nt, Artificial Sequence
  derived and/or modified CDS sequence (opt2) from hemagglutinin__InfluenzaA__ADG21026
augaagaccaucaucgcccucuccuacauccucugccucgucuucgcccagaagcuccccggcaacgacaacuccaccgccacccucugccucggccaccacgccguccccaacggcaccaucgucaagaccaucaccaacgaccagaucgaggucaccaacgccaccgagcucguccaguccuccuccaccggcgagaucugcgacuccccccaccagauccucgacggcgagaacugcacccucaucgacgcccuccucggcgacccccagugcgacggcuuccagaacaagaagugggaccucuucgucgagcgcuccaaggccuacuccaacugcuaccccuacgacguccccgacuacgccucccuccgcucccucgucgccuccuccggcacccucgaguucaacaacgaguccuucaacuggaccggcgucacccagaacggcaccuccuccgccugcauccgccgcuccaacaacuccuucuucucccgccucaacuggcucacccaccucaacuucaaguaccccgcccucaacgucaccaugcccaacaacgagcaguucgacaagcucuacaucuggggcguccaccaccccggcaccgacaaggaccagaucuuccucuacgcccaggccuccggccgcaucaccgucuccaccaagcgcucccagcaggccgucauccccaacaucggcucccgccuccgcguccgcaacauccccucccgcaucuccaucuacuggaccaucgucaagcccggcgacauccuccucaucaacuccaccggcaaccucaucgccccccgcggcuacuucaagauccgcuccggcaaguccuccaucaugcgcuccgacgcccccaucggcaagugcaacuccgagugcaucacccccaacggcuccauccccaacgacaagcccuuccagaacgucaaccgcaucaccuacggcgccugcccccgcuacgucaagcaguccacccucaagcucgccaccggcaugcgcaacguccccgagaagcagacccgcggcaucuucggcgccaucgccggcuucaucgagaacggcugggagggcauggucgacggcugguacggcuuccgccaccagaacuccgagggccgcggccaggccgccgaccucaaguccacccaggccgccaucgaccagaucaacggcaagcucaaccgccucaucggcaagaccaacgagaaguuccaccagaucgagaaggaguucuccgaggucgagggccgcauccaggaccucgagaaguacgucgaggacaccaagaucgaccucugguccuacaacgccgagcuccucgucgcccucgagaaccagcacaccaucgaccucaccgacuccgagaugaacaagcucuucgagaagaccaagaagcagcuccgcgagaacgccgaggacaugggcaacggcugcuucaccaucuaccacaagugcgacaacgccugcaucggcuccauccgcaacggcaccuacgaccacaacgucuaccgcgacgaggcccucaacaaccgcuuccagaucaagggcgucgagcucaaguccggcuacaaggacuggauccucuggaucuccuucgccaucuccugcuuccuccucugcgucgcccuccucggcuucaucaugugggccugccagaagggcaacauccgcugcaacaucugcaucuga

SEQ ID NO: 100728 - RNA, 1701 nt, Artificial Sequence; identical to SEQ ID NO: 98705
  derived and/or modified CDS sequence (opt2) from hemagglutinin__InfluenzaA__ADG21037

SEQ ID NO: 100729 - RNA, 1701 nt, Artificial Sequence
  derived and/or modified CDS sequence (opt2) from hemagglutinin__InfluenzaA__ADG21038
augaaggccauccucgucguccuccucuacaccuucgccaccgccgacgccgacacccucugcaucggcuaccacgccaacaacuccaccgacaccgucgacaccguccucgagaagaacgucaccgucacccacuccgucaaccuccucgaggacaagcacaacggcaagcucugcaagcuccgcggcgucgccccccuccaccucggcaagugcaacaucgccggcuggauccucggcaaccccgagugcgagucccucuccaccgccuccuccugguccuacaucgucgagaccuccuccuccgacaacggcaccugcuaccccggcgacuucaucgacuacgaggagcuccgcgagcagcucuccuccgucuccuccuucgagcgcuucgagaucuuccccaagaccuccuccuggcccaaccacgacuccaacaagggcgucaccgccgccugcccccacgccggcgccaaguccuucuacaagaaccucaucuggcucgucaagaagggcaacuccuaccccaagcucuccaaguccuacaucaacgacaagggcaaggagguccucguccucuggggcauccaccaccccuccaccuccgccgaccagcagucccucuaccagaacgccgacgccuacgucuucgucggcaccucccgcuacuccaagaaguucaagcccgagaucgccauccgccccaagguccgcgaccaggagggccgcaugaacuacuacuggacccucgucgagcccggcgacaagaucaccuucgaggccaccggcaaccucgucgucccccgcuacgccuucgccauggagcgcaacgccggcuccggcaucaucaucuccgacacccccguccacgacugcaacaccaccugccagacccccaagggcgccaucaacaccucccuccccuuccagaacauccaccccaucaccaucggcaagugccccaaguacgucaaguccaccaagcuccgccucgccaccggccuccgcaacguccccuccauccagucccgcggccucuucggcgccaucgccggcuucaucgagggcggcuggaccggcauggucgacggcugguacggcuaccaccaccagaacgagcagggcuccggcuacgccgccgaccucaaguccacccagaacgccaucgacgagaucaccaacaaggucaacuccgucaucgagaagaugaacacccaguucaccgccgucggcaaggaguucaaccaccucgagaagcgcaucgagaaccucaacaagaaggucgacgacggcuuccucgacaucuggaccuacaacgccgagcuccucguccuccucgagaacgagcgcacccucgacuaccacgacuccaacgucaagaaccucuacgagaagguccgcucccagcucaagaacaacgccaaggagaucggcaacggcugcuucgaguucuaccacaagugcgacaacaccugcauggaguccgucaagaacggcaccuacgacuaccccaaguacuccgaggaggccaagcucaaccgcgaggagaucgacggcgucaagcucgaguccacccgcaucuaccagauccucgccaucuacuccaccgucgccuccucccucguccucgucgucucccucggcgccaucuccuucuggaugugcuccaacggcucccuccagugccgcaucugcaucuga

SEQ ID NO: 100730 - RNA, 1701 nt, Artificial Sequence
  derived and/or modified CDS sequence (opt2) from hemagglutinin__InfluenzaA__ADG21040
augaaggccauccucgucguccuccucuacaccuucgccaccgccaacgccgacacccucugcaucggcuaccacgccaacaacuccaccgacaccgucgacaccguccucgagaagaacgucaccgucacccacuccgucaaccuccucgaggacaagcacaacggcaagcucugcaagcuccgcggcgucgccccccuccaccucggcaagugcaacaucgccggcuggauccucggcaaccccgagugcgagucccucuccaccgccuccuccugguccuacaucgucgagaccuccuccuccgacaacggcaccugcuaccccggcgacuucaucgacuacgaggagcuccgcgagcagcucuccuccgucuccuccuucgagcgcuucgagaucuuccccaagaccuccuccuggcccaaccacgacuccaacaagggcgucaccgccgccugcccccacgccggcgccaaguccuucuacaagaaccucaucuggcucgucaagaagggcaacuccuaccccaagcucuccaaguccuacaucaacgacaagggcaaggagguccucguccucuggggcauccaccaccccuccaccuccgccgaccagcagucccucuaccagaacgccgacgccuacgucuucgucggcaccucccgcuacuccaagaaguucaagcccgagaucgccauccgccccaagguccgcgaccaggagggccgcaugaacuacuacuggacccucgucgagcccggcgacaagaucaccuucgaggccaccggcaaccucgucgucccccgcuacgccuucgccauggagcgcaacgccggcuccggcaucaucaucuccgacacccccguccacgacugcaacaccaccugccagacccccaagggcgccaucaacaccucccuccccuuccagaacguccaccccaucaccaucggcaagugccccaaguacgucaaguccaccaagcuccgccucgccaccggccuccgcaacguccccuccauccagucccgcggccucuucggcgccaucgccggcuucaucgagggcggcuggaccggcauggucgacggcugguacggcuaccaccaccagaacgagcagggcuccggcuacgccgccgaccucaaguccacccagaacgccaucgacgagaucaccaacaaggucaacuccgucaucgagaagaugaacacccaguucaccgccgucggcaaggaguucaaccaccucgagaagcgcaucgagaaccucaacaagaaggucgacgacggcuuccucgacaucuggaccuacaacgccgagcuccucguccuccucgagaacgagcgcacccucgacuaccacgacuccaacgucaagaaccucuacgagaagguccgcucccagcucaagaacaacgccaaggagaucggcaacggcugcuucgaguucuaccacaagugcgacaacaccugcauggaguccgucaagaacggcaccuacgacuaccccaaguacuccgaggaggccaagcucaaccgcgaggagaucgacggcgucaagcucgaguccacccgcgucuaccagauccucgccaucuacuccaccgucgccuccucccucguccucgucgucucccucggcgccaucuccuucuggaugugcuccaacggcucccuccagugccgcaucugcaucuga

SEQ ID NO: 100731 - RNA, 1701 nt, Artificial Sequence
  derived and/or modified CDS sequence (opt2) from hemagglutinin__InfluenzaA__ADG21041
augaaggccauccucgucguccuccucuacaccuucaccaccgccaacgccgacacccucugcaucggcuaccacgccaacaacuccaccgacaccgucgacaccguccucgagaagaacgucaccgucacccacuccgucaaccuccucgaggacaagcacaacggcaagcucugcaagcuccgcggcgucgccccccuccaccucggcaagugcaacaucgccggcuggauccucggcaaccccgagugcgagucccucuccaccgccuccuccugguccuacaucgucgagaccuccuccuccgacaacggcaccugcuaccccggcgacuucaucgacuacgaggagcuccgcgagcagcucuccuccgucuccuccuucgagcgcuucgagaucuuccccaagaccuccuccuggcccaaccacgacuccaacaagggcgucaccgccgccugcccccacgccggcgccaaguccuucuacaagaaccucaucuggcucgucaagaagggcaacuccuaccccaagcucuccaaguccuacaucaacgacaagggcaaggagguccucguccucuggggcauccaccaccccuccaccuccgccgaccagcagucccucuaccagaacgccgacgccuacgucuucgucggcaccucccgcuacuccaagaaguucaagcccgagaucgccauccgccccaagguccgcgagcaggagggccgcaugaacuacuacuggacccucgucgagcccggcgacaagaucaccuucgaggccaccggcaaccucgucgucccccgcuacgccuucgccauggagcgcaacgccggcuccggcaucaucaucuccgacacccccguccacgacugcaacaccaccugccagacccccaagggcgccaucaacaccucccuccccuuccagaacauccacuccaucaccaucggcaagugccccaaguacgucaaguccaccaagcuccgccucgccaccggccuccgcaacguccccuccauccagucccgcggccucuucggcgccaucgccggcuucaucgagggcggcuggaccggcauggucgacggcugguacggcuaccaccaccagaacgagcagggcuccggcuacgccgccgaccucaaguccacccagaacgccaucgacgagaucaccaacaaggucaacuccgucaucgagaagaugaacacccaguucaccgccgucggcaaggaguucaaccaccucgagaagcgcaucgagaaccucaacaagaaggucgacgacggcuuccucgacaucuggaccuacaacgccgagcuccucguccuccucgagaacgagcgcacccucgacuaccacgacuccaacgucaagaaccucuacgagaagguccgcucccagcucaagaacaacgccaaggagaucggcaacggcugcuucgaguucuaccacaagugcgacaacaccugcauggaguccgucaagaacggcaccuacgacuaccccaaguacuccgaggaggccaagcucaaccgcgaggagaucgacggcgucaagcucgaguccacccgcaucuaccagauccucgccaucuacuccaccgucgccuccucccucguccucgucgucucccucggcgccgucuccuucuggaugugcuccaacggcucccuccagugccgcaucugcaucuga

SEQ ID NO: 100732 - RNA, 1701 nt, Artificial Sequence; identical to SEQ ID NO: 99806
  derived and/or modified CDS sequence (opt2) from hemagglutinin__InfluenzaA__ADG21042

SEQ ID NO: 100733 - RNA, 1701 nt, Artificial Sequence
  derived and/or modified CDS sequence (opt2) from hemagglutinin__InfluenzaA__ADG21043
augaaggccauccucgucguccuccucuacaccuucaccaccgccaacgccgacacccucugcgucggcuaccacgccaacaacuccaccgacaccgucgacaccguccucgagaagaacgucaccgucacccacuccgucaaccuccucgaggacaagcacaacggcaagcucugcaagcuccgcggcgucgccccccuccaccucggcaagugcaacaucgccggcuggauccucggcaaccccgagugcgagucccucuccaccgccuccuccugguccuacaucgucgagaccuccuccuccgacaacggcaccugcuaccccggcgacuucaucgacuacgaggagcuccgcgagcagcucuccuccgucuccuccuucgagcgcuucgagaucuuccccaagaccuccuccuggcccaaccacgacuccaacaagggcgucaccgccgccugcccccacgccggcgccaaguccuucuacaagaaccucaucuggcucgucaagaagggcaacuccuaccccaagcucuccaaguccuacaucaacgacaagggcaaggagguccucguccucuggggcauccaccaccccuccaccuccgccgaccagcagucccucuaccagaacgccgacgccuacgucuucgucggcaccucccgcuacuccaagaaguucaagcccgagaucgccauccgccccaagguccgcgagcaggagggccgcaugaacuacuacuggacccucgucgagcccggcgacaagaucaccuucgaggccaccggcaaccucgucgucccccgcuacgccuucgccauggagcgcaacgccggcuccggcaucaucaucuccgacacccccguccacgacugcaacaccaccugccagacccccaagggcgccaucaacaccucccuccccuuccagaacauccacuccaucaccaucggcaagugccccaaguacgucaaguccaccaagcuccgccucgccaccggccuccgcaacguccccuccauccagucccgcggccucuucggcgccaucgccggcuucaucgagggcggcuggaccggcauggucgacggcugguacggcuaccaccaccagaacgagcagggcuccggcuacgccgccgaccucaaguccacccagaacgccaucgacgagaucaccaacaaggucaacuccgucaucgagaagaugaacacccaguucaccgccgucggcaaggaguucaaccaccucgagaagcgcaucgagaaccucaacaagaaggucgacgacggcuuccucgacaucuggaccuacaacgccgagcuccucguccuccucgagaacgagcgcacccucgacuaccacgacuccaacgucaagaaccucuacgagaagguccgcucccagcucaagaacaacgccaaggagaucggcaacggcugcuucgaguucuaccacaagugcgacaacaccugcauggaguccgucaagaacggcaccuacgacuaccccaaguacuccgaggaggccaagcucaaccgcgaggagaucgacggcgucaagcucgaguccacccgcaucuaccagauccucgccaucuacuccaccgucgccuccucccucguccucgucgucucccucggcgccaucuccuucuggaugugcuccaacggcucccuccagugccgcaucugcaucuga

SEQ ID NO: 100734 - RNA, 1701 nt, Artificial Sequence
  derived and/or modified CDS sequence (opt2) from hemagglutinin__InfluenzaA__ADG21045
augaaggccauccucgucguccuccucuacaccuucaccaccgccaacgccgacacccucugcaucggcuaccacgccaacaacuccaccgacaccgucgacaccguccucgagaagaacgucaccgucacccacuccgucaaccuccucgaggacaagcacaacggcaagcucugcaagcuccgcggcgucgccccccuccaccucggcaagugcaacaucgccggcuggauccucggcaaccccgagugcgagucccucuccaccgccuccuccugguccuacaucgucgagaccuccuccuccgacaacggcaccugcuaccccggcgacuucaucgacuacgaggagcuccgcgagcagcucuccuccgucuccuccuucgagcgcuucgagaucuuccccaagaccuccuccuggcccaaccacgacuccaacaagggcgucaccgccgccugcccccacgccggcgccaaguccuucuacaagaaccucaucuggcucgucaagaagggcaacuccuaccccaagcucuccaaguccuacaucaacgacaagggcaaggagguccucguccucuggggcauccaccaccccuccaccuccgccgaccagcagucccucuaccagaacgccgacgccuacgucuucgucggcaccucccgcuacuccaagaaguucaagcccgagaucgccauccgccccaagguccgcgagcaggagggccgcaugaacuacuacuggacccucgucgagcccggcgacaagaucaccuucgaggccaccggcaaccucgucgucccccgcuacgccuucgccauggagcgcaacgccggcuccggcaucaucaucuccgacacccccguccacgacugcaacaccaccugccagacccccaagggcgccaucaacaccucccuccccuuccagaacauccacuccaucaccaucggcaagugccccaaguacgucaaguccaccaagcuccgccucgccaccggccuccgcaacguccccuccauccagucccgcggccucuucggcgccaucgccggcuucaucgagggcggcuggaccggcauggucgacggcugguacggcuaccaccaccagaacgagcagggcuccggcuacgccgccgaccucaaguccacccagaacgccaucgacgagaucaccaacaaggucaacuccgucaucgagaagaugaacacccaguucaccgccgucggcaaggaguucaaccaccucgagaagcgcaucgagaaccucaacaagaaggucgacgacggcuuccucgacaucuggaccuacaacgccgagcuccucguccuccucgagaacgagcgcacccucgacuaccacgacuccaacgucaagaaccucuacgagaagguccgcucccagcucaagaacaacgccaaggagaucggcaacggcugcuucgaguucuaccacaagugcgacaacaccugcauggaguccgucaagaacggcaccuacgacuaccccaaguacuccgaggaggccaagcucaaccgcgaggagaucgacggcgucaagcucgaguccacccgcaucuaccagauccucgccaucuacuccaccgucgccuccucccucguccucgucgucucccucggcgccaucuccuucuggaugugcuccaacggcucccuccagugccgcaucugcaucuga

SEQ ID NO: 100735 - RNA, 1701 nt, Artificial Sequence; identical to SEQ ID NO: 100734
  derived and/or modified CDS sequence (opt2) from hemagglutinin__InfluenzaA__ADG21046

SEQ ID NO: 100736 - RNA, 1701 nt, Artificial Sequence; identical to SEQ ID NO: 99869
  derived and/or modified CDS sequence (opt2) from hemagglutinin__InfluenzaA__ADG21048

SEQ ID NO: 100737 - RNA, 1701 nt, Artificial Sequence
  derived and/or modified CDS sequence (opt2) from hemagglutinin__InfluenzaA__ADG21049
augaaggccauccucgucguccuccucuacaccuucgccaccgccaacgccgacacccucugcaucggcuaccacgccaacaacuccaccgacaccgucgacaccguccucgagaagaacgucaccgucacccacuccgucaaccuccucgaggacaagcacaacggcaagcucugcaagcuccgcggcgucgccccccuccaccucggcaagugcaacaucgccggcuggauccucggcaaccccgagugcgagucccucuccaccgccuccuccugguccuacaucgucgagaccuccuccuccgacaacggcaccugcuaccccggcgacuucaucgacuacgaggagcuccgcgagcagcucuccuccgucuccuccuucgagcgcuucgagaucuuccccaagaccuccuccuggcccaaccacgacuccaacaagggcgucaccgccgccugcccccacgccggcgccaaguccuucuacaagaaccucaucuggcucgucaagaagggcaacuccuaccccaagcucuccaaguccuacaucaacgacaagggcaaggagguccucguccucuggggcauccaccaccccuccaccuccgccgaccagcagucccucuaccagaacgccgacgccuacgucuucgucggcaccucccgcuacuccaagaaguucaagcccgagaucgccauccgccccaagguccgcaaccaggagggccgcaugaacuacuacuggacccucgucgagcccggcgacaagaucaccuucgaggccaccggcaaccucgucgucccccgcuacgccuucgccauggagcgcaacgccggcuccggcaucaucaucuccgacacccccguccacgacugcaacaccaccugccagaccuccaagggcgccaucaacaccucccuccccuuccagaacauccaccccaucaccaucggcaagugccccaaguacgucaaguccaccaagcuccgccucgccaccggccuccgcaacauccccuccauccagucccgcggccucuucggcgccaucgccggcuucaucgagggcggcuggaccggcauggucgacggcugguacggcuaccaccaccagaacgagcagggcuccggcuacgccgccgaccucaaguccacccagaacgccaucgacgagaucaccaacaaggucaacuccgucaucgagaagaugaacacccaguucaccgccgucggcaaggaguucaaccaccucgagaagcgcaucgagaaccucaacaagaaggucgacgacggcuuccucgacaucuggaccuacaacgccgagcuccucguccuccucgagaacgagcgcacccucgacuaccacgacuccaacgucaagaaccucuacgagaagguccgcucccagcucaagaacaacgccaaggagaucggcaacggcugcuucgaguucuaccacaagugcgacaacaccugcauggaguccgucaagaacggcaccuacgacuaccccaaguacuccgaggaggccaagcucaaccgcgaggagaucgacggcgucaagcucgaguccacccgcaucuaccagauccucgccaucuacuccaccgucgccuccucccucguccucgucgucucccucggcgccaucuccuucuggaugugcuccaacggcucccuccagugccgcaucugcaucuga

SEQ ID NO: 100738 - RNA, 1701 nt, Artificial Sequence; identical to SEQ ID NO: 99058
  derived and/or modified CDS sequence (opt2) from hemagglutinin__InfluenzaA__ADG21122

SEQ ID NO: 100739 - RNA, 1701 nt, Artificial Sequence; identical to SEQ ID NO: 99869
  derived and/or modified CDS sequence (opt2) from hemagglutinin__InfluenzaA__ADG21123

SEQ ID NO: 100740 - RNA, 1701 nt, Artificial Sequence; identical to SEQ ID NO: 98705
  derived and/or modified CDS sequence (opt2) from hemagglutinin__InfluenzaA__ADG21124

SEQ ID NO: 100741 - RNA, 1701 nt, Artificial Sequence
  derived and/or modified CDS sequence (opt2) from hemagglutinin__InfluenzaA__ADG21125
augaaggccauccucgucguccuccucuacaccuucgccaccgccaacgccgacacccucugcaucggcuaccacgccaacaacuccaccgacaccgucgacaccguccucgagaagaacgucaccgucacccacuccgucaaccuccucgaggacaagcacaacggcaagcucugcaagcuccgcggcgucgccccccuccaccucggcaagugcaacaucgccggcuggauccucggcaaccccgagugcgagucccucuccaccgccuccuccugguccuacaucgucgagaccuccuccuccgacaacggcaccugcuaccccggcgacuucaucgacuacgaggagcuccgcgagcagcucuccuccgucuccuccuucaagcgcuucgagaucuuccccaagaccuccuccuggcccaaccacgacuccaacaagggcgucaccgccgccugcccccacgccggcgccaaguccuucuacaagaaccucaucuggcucgucaagaagggcaacuccuaccccaagcucuccaaguccuacaucaacgacaagggcaaggagguccucguccucuggggcauccaccaccccuccaccuccgccgaccagcagucccucuaccagaacgccgacgccuacgucuucgucggcaccucccgcuacuccaagaaguucaagcccgagaucgccauccgccccaagguccgcgaccaggagggccgcaugaacuacuacuggacccucgucgagcccggcgacaagaucaccuucgaggccaccggcaaccucgucgucccccgcuacgccuucgccauggagcgcaacgccggcuccggcaucaucaucuccgacacccccguccacgacugcaacaccaccugccagacccccaagggcgccaucaacaccucccuccccuuccagaacauccaccccaucaccaucggcaagugccccaaguacgucaaguccaccaagcuccgccucgccaccggccuccgcaacguccccuccauccagucccgcggccucuucggcgccaucgccggcuucaucgagggcggcuggaccggcauggucgacggcugguacggcuaccaccaccagaacgagcagggcuccggcuacgccgccgaccucaaguccacccagaacgccaucgacgagaucaccaacaaggucaacuccgucaucgagaagaugaacacccaguucaccgccgucggcaaggaguucaaccaccucgagaagcgcaucgagaaccucaacaagaaggucgacgacggcuuccucgacaucuggaccuacaacgccgagcuccucguccuccucgagaacgagcgcacccucgacuaccacgacuccaacgucaagaaccucuacgagaagguccgcucccagcucaagaacaacgccaaggagaucggcaacggcugcuucgaguucuaccacaagugcgacaacaccugcauggaguccgucaagaacggcaccuacgacuaccccaaguacuccgaggaggccaagcucaaccgcgaggagaucgacggcgucaagcucgaguccacccgcaucuaccagauccucgccaucuacuccaccgucgccuccucccucguccucgucgucucccucggcgccaucuccuucuggaugugcuccaacggcucccuccagugccgcaucugcaucuga

SEQ ID NO: 100742 - RNA, 1701 nt, Artificial Sequence; identical to SEQ ID NO: 98692
  derived and/or modified CDS sequence (opt2) from hemagglutinin__InfluenzaA__ADG21126

SEQ ID NO: 100743 - RNA, 1701 nt, Artificial Sequence; identical to SEQ ID NO: 98692
  derived and/or modified CDS sequence (opt2) from hemagglutinin__InfluenzaA__ADG21127

SEQ ID NO: 100744 - RNA, 1701 nt, Artificial Sequence; identical to SEQ ID NO: 98692
  derived and/or modified CDS sequence (opt2) from hemagglutinin__InfluenzaA__ADG21128

SEQ ID NO: 100745 - RNA, 1701 nt, Artificial Sequence; identical to SEQ ID NO: 98692
  derived and/or modified CDS sequence (opt2) from hemagglutinin__InfluenzaA__ADG21129

SEQ ID NO: 100746 - RNA, 1701 nt, Artificial Sequence; identical to SEQ ID NO: 98705
  derived and/or modified CDS sequence (opt2) from hemagglutinin__InfluenzaA__ADG21130

SEQ ID NO: 100747 - RNA, 1701 nt, Artificial Sequence; identical to SEQ ID NO: 98692
  derived and/or modified CDS sequence (opt2) from hemagglutinin__InfluenzaA__ADG21131

SEQ ID NO: 100748 - RNA, 1701 nt, Artificial Sequence; identical to SEQ ID NO: 98692
  derived and/or modified CDS sequence (opt2) from hemagglutinin__InfluenzaA__ADG21132

SEQ ID NO: 100749 - RNA, 1701 nt, Artificial Sequence; identical to SEQ ID NO: 98692
  derived and/or modified CDS sequence (opt2) from hemagglutinin__InfluenzaA__ADG21133

SEQ ID NO: 100750 - RNA, 1701 nt, Artificial Sequence; identical to SEQ ID NO: 98692
  derived and/or modified CDS sequence (opt2) from hemagglutinin__InfluenzaA__ADG21134

SEQ ID NO: 100751 - RNA, 1701 nt, Artificial Sequence; identical to SEQ ID NO: 98692
  derived and/or modified CDS sequence (opt2) from hemagglutinin__InfluenzaA__ADG21135

SEQ ID NO: 100752 - RNA, 1701 nt, Artificial Sequence; identical to SEQ ID NO: 98692
  derived and/or modified CDS sequence (opt2) from hemagglutinin__InfluenzaA__ADG21136

SEQ ID NO: 100753 - RNA, 1701 nt, Artificial Sequence; identical to SEQ ID NO: 98692
  derived and/or modified CDS sequence (opt2) from hemagglutinin__InfluenzaA__ADG21137

SEQ ID NO: 100754 - RNA, 1701 nt, Artificial Sequence; identical to SEQ ID NO: 98692
  derived and/or modified CDS sequence (opt2) from hemagglutinin__InfluenzaA__ADG21138

SEQ ID NO: 100755 - RNA, 1701 nt, Artificial Sequence; identical to SEQ ID NO: 98692
  derived and/or modified CDS sequence (opt2) from hemagglutinin__InfluenzaA__ADG21139

SEQ ID NO: 100756 - RNA, 1701 nt, Artificial Sequence
  derived and/or modified CDS sequence (opt2) from hemagglutinin__InfluenzaA__ADG21140
augaaggccauccucgucguccuccucuacaccuucgccaccgccaacgccgacacccucugcaucggcuaccacgccaacaacuccaccgacaccgucgacaccguccucgagaagaacgucaccgucacccacuccgucaaccuccucgaggacaagcacaacggcaagcucugcaagcuccgcggcgucgccccccuccaccucggcaagugcaacaucgccggcuggauccucggcaaccccgagugcgagucccucuccaccgccuccuccugguccuacaucgucgagaccuccuccuccgacaacggcaccugcuaccccggcgacuucaucgacuacgaggagcuccgcgagcagcucuccuccgucuccuccuucgagcgcuucgagaucuuccccaagaccuccuccuggcccaaccacgacuccaacaagggcgucaccgccgccugcccccacgccggcgccaaguccuucuacaagaaccucaucuggcucgucaagaagggcaacuccuaccccaagcucuccaaguccuacaucaacgacaagggcaaggagguccucaugcucuggggcauccaccaccccuccaccuccgccgaccagcagucccucuaccagaacgccgacgccuacgucuucgucggcuccucccgcuacuccaagaaguucaagcccgagaucgccauccgccccaagguccgcgaccaggagggccgcaugaacuacuacuggacccucgucgagcccggcgacaagaucaccuucgaggccaccggcaaccucgucgucccccgcuacgccuucgccauggagcgcaacgccggcuccggcaucaucaucuccgacacccccguccacgacugcaacaccaccugccagacccccaagggcgccaucaacaccucccuccccuuccagaacauccaccccaucaccaucggcaagugccccaaguacgucaaguccaccaagcuccgccucgccaccggccuccgcaacguccccuccauccagucccgcggccucuucggcgccaucgccggcuucaucgagggcggcuggaccggcauggucgacggcugguacggcuaccaccaccagaacgagcagggcuccggcuacgccgccgaccucaaguccacccagaacgccaucgacgagaucaccaacaaggucaacuccgucaucgagaagaugaacacccaguucaccgccgucggcaaggaguucaaccaccucgagaagcgcaucgagaaccucaacaagaaggucgacgacggcuuccucgacaucuggaccuacaacgccgagcuccucguccuccucgagaacgagcgcacccucgacuaccacgacuccaacgucaagaaccucuacgagaagguccgcucccagcucaagaacaacgccaaggagaucggcaacggcugcuucgaguucuaccacaagugcgacaacaccugcauggaguccgucaagaacggcaccuacgacuaccccaaguacuccgaggaggccaagcucaaccgcgaggagaucgacggcgucaagcucgaguccacccgcaucuaccagauccucgccaucuacuccaccgucgccuccucccucguccucgucgucucccucggcgccaucuccuucuggaugugcuccaacggcucccuccagugccgcaucugcaucuga

SEQ ID NO: 100757 - RNA, 1701 nt, Artificial Sequence; identical to SEQ ID NO: 98692
  derived and/or modified CDS sequence (opt2) from hemagglutinin__InfluenzaA__ADG21141

SEQ ID NO: 100758 - RNA, 1701 nt, Artificial Sequence
  derived and/or modified CDS sequence (opt2) from hemagglutinin__InfluenzaA__ADG21142
augaaggccauccucgucguccuccucuacaccuucgccaccgccaacgccgacacccucugcaucggcuaccacgccaacaacuccaccgacaccgucgacaccguccucgagaagaacgucaccgucacccacuccgucaaccuccucgaggacaagcacaacggcaagcucugcaagcuccgcggcgucgccccccuccaccucggcaagugcaacaucgccggcuggauccucggcaaccccgagugcgagucccucuccaccgccuccuccugguccuacaucgucgagaccuccuccuccgacaacggcaccugcuaccccggcgacuucaucgacuacgaggagcuccgcgagcagcucuccuccgucuccuccuucgagcgcuucgagaucuuccccaagaccuccuccuggcccaaccacgacuccaacaagggcgucaccgccgccugcccccacgccggcgagaaguccuucuacaagaaccucaucuggcucgucaagaagggcaacuccuaccccaagcucuccaaguccuacaucaacgacaagggcaaggagguccucguccucuggggcauccaccaccccuccaccuccgccgaccagcagucccucuaccagaacgccgacgccuacgucuucgucggcuccucccgcuacuccaagaaguucaagcccgagaucgccauccgccccaagguccgcgaccaggagggccgcaugaacuacuacuggacccucgucgagcccggcgacaagaucaccuucgaggccaccggcaaccucgucgucccccgcuacgccuucgccauggagcgcaacgccggcuccggcaucaucaucuccgacacccccguccacgacugcaacaccaccugccagacccccaagggcgccaucaacaccucccuccccuuccagaacauccaccccaucaccaucggcaagugccccaaguacgucaaguccaccaagcuccgccucgccaccggccuccgcaacguccccuccauccagucccgcggccucuucggcgccaucgccggcuucaucgagggcggcuggaccggcauggucgacggcugguacggcuaccaccaccagaacgagcagggcuccggcuacgccgccgaccucaaguccacccagaacgccaucgacgagaucaccaacaaggucaacuccgucaucgagaagaugaacacccaguucaccgccgucggcaaggaguucaaccaccucgagaagcgcaucgagaaccucaacaagaaggucgacgacggcuuccucgacaucuggaccuacaacgccgagcuccucguccuccucgagaacgagcgcacccucgacuaccacgacuccaacgucaagaaccucuacgagaagguccgcucccagcucaagaacaacgccaaggagaucggcaacggcugcuucgaguucuaccacaagugcgacaacaccugcauggaguccgucaagaacggcaccuacgacuaccccaaguacuccgaggaggccaagcucaaccgcgaggagaucgacggcgucaagcucgaguccacccgcaucuaccagauccucgccaucuacuccaccgucgccuccucccucguccucgucgucucccucggcgccaucuccuucuggaugugcuccaacggcucccuccagugccgcaucugcaucuga

SEQ ID NO: 100759 - RNA, 1701 nt, Artificial Sequence; identical to SEQ ID NO: 98692
  derived and/or modified CDS sequence (opt2) from hemagglutinin__InfluenzaA__ADG21143

SEQ ID NO: 100760 - RNA, 1701 nt, Artificial Sequence; identical to SEQ ID NO: 98692
  derived and/or modified CDS sequence (opt2) from hemagglutinin__InfluenzaA__ADG21144

SEQ ID NO: 100761 - RNA, 1701 nt, Artificial Sequence
  derived and/or modified CDS sequence (opt2) from hemagglutinin__InfluenzaA__ADG21145
augaaggccauccucgucguccuccucuacaccuucgccaccgccaacgccgacacccucugcaucggcuaccacgccaacaacuccaccgacaccgucgacaccguccucgagaagaacgucaccgucacccacuccgucaaccuccucgaggacaagcacaacggcaagcucugcaagcuccgcggcgucgccccccuccaccucggcaagugcaacaucgccggcuggauccucggcaaccccgagugcgagucccucuccaccgccuccuccugguccuacaucgucgagaccuccuccuccgacaacggcaccugcuaccccggcgacuucaucgacuacgaggagcuccgcgagcagcucuccuccgucuccuccuucgagcgcuucgagaucuuccccaagaccuccuccuggcccaaccacgacuccaacaagggcgucaccgccgccugcccccacgccggcgccaaguccuucuacaagaaccucaucuggcucgucaagaagggcaacuccuaccccaagcucuccaucuccuacaucaacgacaagggcaaggagguccucguccucuggggcauccaccaccccuccaccuccgccgaccagcagucccucuaccagaacgccgacgccuacgucuucgucggcuccucccgcuacuccaagaaguucaagcccgagaucgccauccgccccaagguccgcgaccaggagggccgcaugaacuacuacuggacccucgucgagcccggcgacaagaucaccuucgaggccaccggcaaccucgucgucccccgcuacgccuucgccauggagcgcaacgccggcuccggcaucaucaucuccgacacccccguccacgacugcaacaccaccugccagacccccaagggcgccaucaacaccucccuccccuuccagaacauccaccccaucaccaucggcaagugccccaaguacgucaaguccaccaagcuccgccucgccaccggccuccgcaacguccccuccauccagucccgcggccucuucggcgccaucgccggcuucaucgagggcggcuggaccggcauggucgacggcugguacggcuaccaccaccagaacgagcagggcuccggcuacgccgccgaccucaaguccacccagaacgccaucgacgagaucaccaacaaggucaacuccgucaucgagaagaugaacacccaguucaccgccgucggcaaggaguucaaccaccucgagaagcgcaucgagaaccucaacaagaaggucgacgacggcuuccucgacaucuggaccuacaacgccgagcuccucguccuccucgagaacgagcgcacccucgacuaccacgacuccaacgucaagaaccucuacgagaagguccgcucccagcucaagaacaacgccaaggagaucggcaacggcugcuucgaguucuaccacaagugcgacaacaccugcauggaguccgucaagaacggcaccuacgacuaccccaaguacuccgaggaggccaagcucaaccgcgaggagaucgacggcgucaagcucgaguccacccgcaucuaccagauccucgccaucuacuccaccgucgccuccucccucguccucgucgucucccucggcgccaucuccuucuggaugugcuccaacggcucccuccagugccgcaucugcaucuga

SEQ ID NO: 100762 - RNA, 1701 nt, Artificial Sequence; identical to SEQ ID NO: 98692
  derived and/or modified CDS sequence (opt2) from hemagglutinin__InfluenzaA__ADG21146

SEQ ID NO: 100763 - RNA, 1701 nt, Artificial Sequence; identical to SEQ ID NO: 98692
  derived and/or modified CDS sequence (opt2) from hemagglutinin__InfluenzaA__ADG21147

SEQ ID NO: 100764 - RNA, 1701 nt, Artificial Sequence; identical to SEQ ID NO: 98705
  derived and/or modified CDS sequence (opt2) from hemagglutinin__InfluenzaA__ADG21148

SEQ ID NO: 100765 - RNA, 1701 nt, Artificial Sequence; identical to SEQ ID NO: 99806
  derived and/or modified CDS sequence (opt2) from hemagglutinin__InfluenzaA__ADG21149

SEQ ID NO: 100766 - RNA, 1701 nt, Artificial Sequence; identical to SEQ ID NO: 99869
  derived and/or modified CDS sequence (opt2) from hemagglutinin__InfluenzaA__ADG21150

SEQ ID NO: 100767 - RNA, 1701 nt, Artificial Sequence; identical to SEQ ID NO: 98692
  derived and/or modified CDS sequence (opt2) from hemagglutinin__InfluenzaA__ADG21151

SEQ ID NO: 100768 - RNA, 1701 nt, Artificial Sequence; identical to SEQ ID NO: 98692
  derived and/or modified CDS sequence (opt2) from hemagglutinin__InfluenzaA__ADG21152

SEQ ID NO: 100769 - RNA, 1701 nt, Artificial Sequence; identical to SEQ ID NO: 98705
  derived and/or modified CDS sequence (opt2) from hemagglutinin__InfluenzaA__ADG21153

SEQ ID NO: 100770 - RNA, 1701 nt, Artificial Sequence; identical to SEQ ID NO: 98692
  derived and/or modified CDS sequence (opt2) from hemagglutinin__InfluenzaA__ADG21154

SEQ ID NO: 100771 - RNA, 1701 nt, Artificial Sequence; identical to SEQ ID NO: 98692
  derived and/or modified CDS sequence (opt2) from hemagglutinin__InfluenzaA__ADG21155

SEQ ID NO: 100772 - RNA, 1701 nt, Artificial Sequence; identical to SEQ ID NO: 99869
  derived and/or modified CDS sequence (opt2) from hemagglutinin__InfluenzaA__ADG21156

SEQ ID NO: 100773 - RNA, 1701 nt, Artificial Sequence; identical to SEQ ID NO: 99877
  derived and/or modified CDS sequence (opt2) from hemagglutinin__InfluenzaA__ADG21158

SEQ ID NO: 100774 - RNA, 1701 nt, Artificial Sequence
  derived and/or modified CDS sequence (opt2) from hemagglutinin__InfluenzaA__ADG21159
augaaggccauccucgucguccuccucuacaccuucgccaccgccaacgccgacacccucugcaucggcuaccacgccaacaacuccaccgacaccgucgacaccguccucgagaagaacgucaccgucacccacuccgucaaccuccucgaggacaagcacaacggcaagcucugcaagcuccgcggcgucgccccccuccaccucggcaagugcaacaucgccggcuggauccucggcaaccccgagugcgagucccucuccaccgccuccuccugguccuacaucgucgagaccuccuccuccgacaacggcaccugcuaccccggcgacuucaucgacuacgaggagcuccgcgagcagcucuccuccgucuccuccuucgagcgcuucgagaucuuccccaagaccuccuccuggcccaaccacgacuccaacaagggcgucaccgccgccugcccccacgccggcgccaaguccuucuacaagaaccucaucuggcucgucaagaagggcaacuccuaccccaagcucuccaaguccuacaucaacgacaagggcaaggagguccucguccucuggggcauccaccaccccuccaccuccgccgaccagcagucccucuaccagaacgccgacgccuacgucuucgucggcaccucccgcuacuccaagaaguucaagcccgagaucgccauccgccccaagguccgcgaccaggagggccgcaugaacuacuacuggacccucgucgagcccggcgacaagaucaccuucgaggccaccggcaaccucgucgucccccgcuacgccuucgccauggagcgcaacgccggcuccggcaucaucaucuccgacacccccguccacgacugcaacaccaccugccagacccccaagggcgccaucaacaccucccuccccuuccagaacauccaccccaucaccaucggcaagugccccaaguacgucaaguccaccaagcuccgccucgccaccggccuccgcaacguccccuccauccagucccgcggccucuucggcgccaucgccggcuucaucgagggcggcuggaccggcauggucgacggcugguacggcuaccaccaccagaacgagcagggcuccggcuacgccgccgaccucaaguccacccagaacgccaucgacgagaucaccaacaaggucaacuccgucaucgagaagaugaacacccaguucaccgccgucggcaaggaguucaaccaccucgagaagcgcaucgagaaccucaacaagaaggucgacgacggcuuccucgacaucuggaccuacaacgccgagcuccucguccuccucgagaacgagcgcacccucgacuaccacgacuccaacgucaagaaccucuacgagaagguccgcucccagcucaagaacaacgccaaggagaucggcaacggcugcuucgaguucuaccacaagugcgacaacaccugcauggaguccgucaagaacggcaccuacgacuaccccaaguacuccgaggaggccaagcucaaccgcgaggagaucgacggcgucaagcucgaguccacccgcaucuaccagauccucgccaucuacuccaccgucgccuccucccucguccuccucgucucccucggcgccaucuccuucuggaugugcuccaacggcucccuccagugccgcaucugcaucuga

SEQ ID NO: 100775 - RNA, 1701 nt, Artificial Sequence; identical to SEQ ID NO: 99877
  derived and/or modified CDS sequence (opt2) from hemagglutinin__InfluenzaA__ADG21160

SEQ ID NO: 100776 - RNA, 1701 nt, Artificial Sequence
  derived and/or modified CDS sequence (opt2) from hemagglutinin__InfluenzaA__ADG21161
augaaggccauccucgucguccuccucuacaccuucgccaccgccaacgccgacacccucugcaucggcuaccacgccaacaacuccaccgacaccgucgacaccguccucgagaagaacgucaccgucacccacuccgucaaccuccucgaggacaagcacaacggcaagcucugcaagcuccgcggcgucgccccccuccaccucggcaagugcaacaucgccggcuggauccucggcaaccccgagugcgagucccucuccaccgccuccuccugguccuacaucgucgagaccuccuccuccgacaacggcaccugcuaccccggcgacuucaucgacuacgaggagcuccgcgagcagcucuccuccgucuccuccuucgagcgcuucgagaucuuccccaagaccuccuccuggcccaaccacgacuccaacaagggcgucaccgccgccugcccccacgccggcgccaaguccuucuacaagaaccucaucuggcucgucaagaaggagaacuccuaccccaagcucuccaaguccuacaucaacgacaagggcaaggagguccucguccucuggggcauccaccaccccuccaccuccgccgaccagcagucccucuaccagaacgccgacgccuacgucuucgucggcaccucccgcuacuccaagaaguucaagcccgagaucgccauccgccccaagguccgcgaccaggagggccgcaugaacuacuacuggacccucgucgagcccggcgacaagaucaccuucgaggccaccggcaaccucgucgucccccgcuacgccuucgccauggagcgcaacgccggcuccggcaucaucaucuccgacacccccguccacgacugcaacaccaccugccagacccccaagggcgccaucaacaccucccuccccuuccagaacauccaccccaucaccaucggcaagugccccaaguacgucaaguccaccaagcuccgccucgccaccggccuccgcaacguccccuccauccagucccgcggccucuucggcgccaucgccggcuucaucgagggcggcuggaccggcauggucgacggcugguacggcuaccaccaccagaacgagcagggcuccggcuacgccgccgaccucaaguccacccagaacgccaucgacgagaucaccaacaaggucaacuccgucaucgagaagaugaacacccaguucaccgccgucggcaaggaguucaaccaccucgagaagcgcaucgagaaccucaacaagaaggucgacgacggcuuccucgacaucuggaccuacaacgccgagcuccucguccuccucgagaacgagcgcacccucgacuaccacaacuccaacgucaagaaccucuacgagaagguccgcucccagcucaagaacaacgccaaggagaucggcaacggcugcuucgaguucuaccacaagugcgacaacaccugcauggaguccgucaagaacggcaccuacgacuaccccaaguacuccgaggaggccaagcucaaccgcgaggagaucgacggcgucaagcucgaguccacccgcaucuaccagauccucgccaucuacuccaccgucgccuccucccucguccucgucgucucccucggcgccaucuccuucuggaugugcuccaacggcucccuccagugccgcaucugcaucuga

SEQ ID NO: 100777 - RNA, 1701 nt, Artificial Sequence
  derived and/or modified CDS sequence (opt2) from hemagglutinin__InfluenzaA__ADG21163
augaaggccauccucgucguccuccucuacaccuucgccaccgccaacgccgacacccucugcaucggcuaccacgccaacaacuccaccgacaccgucgacaccguccucgagaagaacgucaccgucacccacuccgucaaccuccucgaggacaagcacaacggcaagcucugcaagcuccgcggcgucgccccccuccaccucggcaagugcaacaucgccggcuggauccucggcaaccccgagugcgagucccucuccaccgccuccuccugguccuacaucgucgagaccuccuccuccgacaacggcaccugcuaccccggcgacuucaucgacuacgaggagcuccgcgagcagcucuccuccgucuccuccuucgagcgcuucgagaucuuccccaagaccuccuccuggcccaaccacgacuccaacaagggcgucaccgccgccugcccccacgccggcgccaaguccuucuacaagaaccucaucuggcucgucaagaagggcaacuccuaccccaagcucuccaaguccuacaucaacgacaagggcaaggagguccucguccucuggggcauccaccaccccuccaccuccgccgaccagcagucccucuaccagaacgccgacgccuacgucuucgucggcaccucccgcuacuccaagaaguucaagcccgagaucgccauccgccccaagguccgcgaccaggagggccgcaugaacuacuacuggacccucgucgagcccggcgacaagaucaccuucgaggccaccggcaaccucgucgucccccgcuacgccuucgccauggagcgcaacgccggcuccggcaucaucaucuccgacacccccguccacgacugcaacaccaccugccagacccccaagggcgccaucaacaccucccuccccuuccagaacguccaccccaucaccaucggcaagugccccaaguacgucaaguccaccaagcuccgccucgccaccggccuccgcaacguccccuccauccagucccgcggccucuucggcgccaucgccggcuucaucgagggcggcuggaccggcauggucgacggcugguacggcuaccaccaccagaacgagcagggcuccggcuacgccgccgaccucaaguccacccagaacgccaucgacgagaucaccaacaaggucaacuccgucaucgagaagaugaacacccaguucaccgccgucggcaaggaguucaaccaccucgagaagcgcaucgagaaccucaacaagaaggucgacgacggcuuccucgacgucuggaccuacaacgccgagcuccucguccuccucgagaacgagcgcacccucgacuaccacgacuccaacgucaagaaccucuacgagaagguccgcucccagcucaagaacaacgccaaggagaucggcaacggcugcuucgaguucuaccacaagugcgacaacaccugcauggaguccgucaagaacggcaccuacgacuaccccaaguacuccgaggaggccaagcucaaccgcgaggagaucgacggcgucaagcucgaguccacccgcaucuaccagauccucgccaucuacuccaccgucgccuccucccucguccucgucgucucccucggcgccaucuccuucuggaugugcuccaacggcucccuccagugccgcaucugcaucuga

SEQ ID NO: 100778 - RNA, 1701 nt, Artificial Sequence
  derived and/or modified CDS sequence (opt2) from hemagglutinin__InfluenzaA__ADG21165
augaaggccauccucgucguccuccucuacaccuucgccaccgccaacgccgacacccucugcaucggcuaccacgccaacaacuccaccgacaccgucgacaccguccucgagaagaacgucaccgucacccacuccgucaaccuccucgaggacaagcacaacggcaagcucugcaagcuccgcggcaucgccccccuccaccucggcaagugcaacaucgccggcuggauccucggcaaccccgagugcgagucccucuccaccgccuccuccugguccuacaucgucgagaccuccuccuccgacaacggcaccugcuaccccggcgacuucaucgacuacgaggagcuccgcgagcagcucuccuccgucuccuccuucaagcgcuucgagaucuuccccaagaccaacuccuggcccaaccacgacuccaacaagggcgucaccgccgccugcccccacgccggcgccaaguccuucuacaagaaccucaucuggcucgucaagaagggcaacuccuaccccaagcucuccaaguccuacaucaacgacaagggcaaggagguccucguccucuggggcauccaccaccccuccaccuccgccgaccagcagucccucuaccagaacgccgacgccuacgucuucgucggcaccuccaaguacuccaagaaguucaagcccgagaucgccauccgccccaagguccgcgaccaggagggccgcaugaacuacuacuggacccucgucgagcccggcgacaagaucaccuucgaggccaccggcaaccucgucgucccccgcuacgccuucgccauggagcgcaacgccggcuccggcaucaucaucuccgacacccccguccacgacugcaacaccaccugccagacccccaagggcgccaucaacaccucccuccccuuccagaacauccaccccaucaccaucggcaagugccccaaguacgucaaguccaccaagcuccgccucgccaccggccuccgcaacguccccuccauccagucccgcggccucuucggcgccaucgccggcuucaucgagggcggcuggaccggcauggucgacggcugguacggcuaccaccaccagaacgagcagggcuccggcuacgccgccgaccucaaguccacccagaacgccaucgacggcaucaccaacaaggucaacuccgucaucgagaagaugaacacccaguucaccgccgucggcaaggaguucaaccaccucgagaagcgcaucgagaaccucaacaagaaggucgacgacggcuuccucgacaucuggaccuacaacgccgagcuccucguccuccucgagaacgagcgcacccucgacuaccacgacuccaacgucaagaaccucuacgagaagguccgcucccagcucaagaacaacgccaaggagaucggcaacggcugcuucgaguucuaccacaagugcgacaacaccugcauggaguccgucaagaacggcaccuacgacuaccccaaguacuccgaggaggccaagcucaaccgcgaggagaucgacggcgucaagcucgaguccacccgcaucuaccagauccucgccaucuacuccaccgucgccuccucccucguccucgucgucucccucggcgccaucuccuucuggaugugcuccaacggcucccuccagugccgcaucugcaucuga

SEQ ID NO: 100779 - RNA, 1701 nt, Artificial Sequence; identical to SEQ ID NO: 98692
  derived and/or modified CDS sequence (opt2) from hemagglutinin__InfluenzaA__ADG21166

SEQ ID NO: 100780 - RNA, 1701 nt, Artificial Sequence
  derived and/or modified CDS sequence (opt2) from hemagglutinin__InfluenzaA__ADG21168
augaaggccauccucgucguccuccucuacaccuucgccaccgccaacgccgacacccucugcaucggcuaccacgccaacaacuccaccgacaccgucgacaccguccucgagaagaacgucaccgucacccacuccgucaaccuccucgaggacaagcacaacggcaagcucugcaagcuccgcggcgucgccccccuccaccucggcaagugcaacaucgccggcuggauccucggcaaccccgagugcgagucccucuccaccgccuccuccugguccuacaucgucgagaccuccuccuccgacaacggcaccugcuaccccggcgacuucaucgacuacgaggagcuccgcgagcagcucuccuccgucuccuccuucgagcgcuucgagaucuuccccaagaccuccuccuggcccaaccacgacuccaacaagggcgucaccgccgccugcccccacgccggcgccaaguccuucuacaagaaccucaucuggcucgucaagaagggcaacuccuaccccaagcucuccaaguucuacaucaacgacaagggcaaggagguccucguccucuggggcauccaccaccccuccaccuccgccgaccagcagucccucuaccagaacgccgacgccuacgucuucgucggcuccucccgcuacuccaagaaguucaagcccgagaucgccauccgccccaagguccgcgaccaggagggccgcaugaacuacuacuggacccucgucgagcccggcgacaagaucaccuucgaggccaccggcaaccucgucgucccccgcuacgccuucgccauggagcgcaacgccggcuccggcaucaucaucuccgacacccccguccacgacugcaacaccaccugccagacccccaagggcgccaucaacaccucccuccccuuccagaacauccaccccaucaccaucggcaagugccccaaguacgucaaguccaccaagcuccgccucgccaccggccuccgcaacguccccuccauccagucccgcggccucuucggcgccaucgccggcuucaucgagggcggcuggaccggcauggucgacggcugguacggcuaccaccaccagaacgagcagggcuccggcuacgccgccgaccucaaguccacccagaacgccaucgacgagaucaccaacaaggucaacuccgucaucgagaagaugaacacccaguucaccgccgucggcaaggaguucaaccaccucgagaagcgcaucgagaaccucaacaagaaggucgacgacggcuuccucgacaucuggaccuacaacgccgagcuccucguccuccucgagaacgagcgcacccucgacuaccacgacuccaacgucaagaaccucuacgagaagguccgcucccagcucaagaacaacgccaaggagaucggcaacggcugcuucgaguucuaccacaagugcgacaacaccugcauggaguccgucaagaacggcaccuacgacuaccccaaguacuccgaggaggccaagcucaaccgcgaggagaucgacggcgucaagcucgaguccacccgcaucuaccagauccucgccaucuacuccaccgucgccuccucccucguccucgucgucucccucggcgccaucuccuucuggaugugcuccaacggcucccuccagugccgcaucugcaucuga

SEQ ID NO: 100781 - RNA, 1701 nt, Artificial Sequence; identical to SEQ ID NO: 100734
  derived and/or modified CDS sequence (opt2) from hemagglutinin__InfluenzaA__ADG21169

SEQ ID NO: 100782 - RNA, 1701 nt, Artificial Sequence; identical to SEQ ID NO: 98692
  derived and/or modified CDS sequence (opt2) from hemagglutinin__InfluenzaA__ADG21170

SEQ ID NO: 100783 - RNA, 1701 nt, Artificial Sequence; identical to SEQ ID NO: 98692
  derived and/or modified CDS sequence (opt2) from hemagglutinin__InfluenzaA__ADG21173

SEQ ID NO: 100784 - RNA, 1701 nt, Artificial Sequence; identical to SEQ ID NO: 98705
  derived and/or modified CDS sequence (opt2) from hemagglutinin__InfluenzaA__ADG21174

SEQ ID NO: 100785 - RNA, 1701 nt, Artificial Sequence; identical to SEQ ID NO: 98705
  derived and/or modified CDS sequence (opt2) from hemagglutinin__InfluenzaA__ADG21175

SEQ ID NO: 100786 - RNA, 1701 nt, Artificial Sequence; identical to SEQ ID NO: 98692
  derived and/or modified CDS sequence (opt2) from hemagglutinin__InfluenzaA__ADG21176

SEQ ID NO: 100787 - RNA, 1701 nt, Artificial Sequence; identical to SEQ ID NO: 98692
  derived and/or modified CDS sequence (opt2) from hemagglutinin__InfluenzaA__ADG21177

SEQ ID NO: 100788 - RNA, 1701 nt, Artificial Sequence; identical to SEQ ID NO: 98692
  derived and/or modified CDS sequence (opt2) from hemagglutinin__InfluenzaA__ADG21178

SEQ ID NO: 100789 - RNA, 1701 nt, Artificial Sequence; identical to SEQ ID NO: 99058
  derived and/or modified CDS sequence (opt2) from hemagglutinin__InfluenzaA__ADG21179

SEQ ID NO: 100790 - RNA, 1701 nt, Artificial Sequence; identical to SEQ ID NO: 98692
  derived and/or modified CDS sequence (opt2) from hemagglutinin__InfluenzaA__ADG21180

SEQ ID NO: 100791 - RNA, 1701 nt, Artificial Sequence; identical to SEQ ID NO: 98692
  derived and/or modified CDS sequence (opt2) from hemagglutinin__InfluenzaA__ADG21181

SEQ ID NO: 100792 - RNA, 1701 nt, Artificial Sequence; identical to SEQ ID NO: 98692
  derived and/or modified CDS sequence (opt2) from hemagglutinin__InfluenzaA__ADG21182

SEQ ID NO: 100793 - RNA, 1701 nt, Artificial Sequence; identical to SEQ ID NO: 98692
  derived and/or modified CDS sequence (opt2) from hemagglutinin__InfluenzaA__ADG21183

SEQ ID NO: 100794 - RNA, 1701 nt, Artificial Sequence; identical to SEQ ID NO: 99869
  derived and/or modified CDS sequence (opt2) from hemagglutinin__InfluenzaA__ADG21184

SEQ ID NO: 100795 - RNA, 1701 nt, Artificial Sequence
  derived and/or modified CDS sequence (opt2) from hemagglutinin__InfluenzaA__ADG21185
augaaggccauccucgucguccuccucuacaccuucgccaccgccaacgccgacacccucugcaucggcuaccacgccaacaacuccaccgacaccgucgacaccguccucgagaagaacgucaccgucacccacuccgucaaccuccucgaggacaagcacaacggcaagcucugcaagcuccgcggcgucgccccccuccaccucggcaagugcaacaucgccggcuggauccucggcaaccccgagugcgagucccucuccaccgccuccuccugguccuacaucgucgagaccuccuccuccgacaacggcaccugcuaccccggcgacuucaucgacuacgaggagcuccgcgagcagcucuccuccgucuccuccuucgagcgcuucgagaucuuccccaagaccuccuccuggcccaaccacgacuccaacaagggcgucaccgccgccugcccccacgccggcgccaaguccuucuacaagaaccucaucuggcucgucaagaagggcaacuccuaccccaagcucuccaaguccuacaucaacgacaagggcaaggagguccucguccucuggggcauccaccaccccuccaccuccgccgaccagcagucccucuaccagaacgccgacgccuacgucuucgucggcaccucccgcuacuccaagaaguucaagcccgagaucgccauccgccccaagguccgcgaccaggagggccgcaugaacuacuacuggacccucgucaagcccggcgacaagaucaccuucgaggccaccggcaaccucgucgucccccgcuacgccuucgccauggagcgcaacgccggcuccggcaucaucaucuccgacacccccguccacgacugcaacaccaccugccagacccccaagggcgccaucaacaccucccuccccuuccagaacauccaccccaucaccaucggccgcugccccaaguacgucaaguccaccaagcuccgccucgccaccggccuccgcaacguccccuccauccagucccgcggccucuucggcgccaucgccggcuucaucgagggcggcuggaccggcauggucgacggcugguacggcuaccaccaccagaacgagcagggcuccggcuacgccgccgaccucaaguccacccagaacgccaucgacgagaucaccaacaaggucaacuccgucaucgagaagaugaacacccaguucaccgccgucggcaaggaguucaaccaccucgagaagcgcaucgagaaccucaacaagaaggucgacgacggcuuccucgacaucuggaccuacaacgccgagcuccucguccuccucgagaacgagcgcacccucgacuaccacgacuccaacgucaagaaccucuacgagaagguccgcucccagcucaagaacaacgccaaggagaucggcaacggcugcuucgaguucuaccacaagugcgacaacaccugcauggaguccgucaagaacggcaccuacgacuaccccaaguacuccgaggaggccaagcucaaccgcgaggagaucgacggcgucaagcucgaguccacccgcaucuaccagauccucgccaucuacuccaccgucgccuccucccucguccucgucgucucccucggcgccaucuccuucuggaugugcuccaacggcucccuccagugccgcaucugcaucuga

SEQ ID NO: 100796 - RNA, 1701 nt, Artificial Sequence; identical to SEQ ID NO: 100051
  derived and/or modified CDS sequence (opt2) from hemagglutinin__InfluenzaA__ADG21188

SEQ ID NO: 100797 - RNA, 1707 nt, Artificial Sequence
  derived and/or modified CDS sequence (opt2) from hemagglutinin__InfluenzaA__ADG21402
auggagaagaucguccuccuccucgccaucgucucccucgucaaguccgaccagaucugcaucggcuaccacgccaacaacuccaccgagcaggucgacaccaucauggagaagaacgucaccgucacccacgcccaggacauccucgagaagacccacaacggcaagcucugcgaccucgacggcgucaagccccucauccuccgcgacugcuccgucgccggcuggcuccucggcaaccccaugugcgacgaguuccucaacguccccgagugguccuacaucgucgagaagaucaaccccgccaacgaccucugcuaccccggcaacuucaacgacuacgaggagcucaagcaccuccucucccgcaucaaccacuucgagaagauccagaucauccccaaguccuccugguccgaccacgaggccuccuccggcgucuccuccgccugccccuaccagggccgcuccuccuucuuccgcaacgucgucuggcucaucaagaaggacaacgccuaccccaccaucaagcgcuccuacaacaacaccaaccaggaggaccuccucguccucuggggcauccaccaccccaacgacgccgccgagcagacccgccucuaccagaaccccaccaccuacaucuccgucggcaccuccacccucaaccagcgccucguccccaagaucgccacccgcuccaaggucaacggccaguccggccgcauggaguucuucuggaccauccucaaguccaacgacgccaucaacuucgaguccaacggcaacuucaucgcccccgagaacgccuacaagaucgucaagaagggcgacuccaccaucaugaaguccgagcucgaguacggcaacugcaacaccaagugccagacccccaucggcgccaucaacuccuccaugcccuuccacaacauccacccccucaccaucggcgagugccccaaguacgucaaguccaaccgccucauccucgccaccggccuccgcaacuccccccagggcgagcgccgccgcaagaagcgcggccucuucggcgccaucgccggcuucaucgagggcggcuggcagggcauggucgacggcugguacggcuaccaccacuccaacgagcagggcuccggcuacgccgccgacaaggaguccacccagaaggccaucgacggcgucaccaacaaggucaacuccaucaucgacaagaugaacacccaguucgaggccgucggccgcgaguucaacaaccucgagcgccgcaucgagaaccucaacaagaagauggaggacggcuuccucgacgucuggaccuacaacgccgagcuccucguccucauggagaacgagcgcacccucgacuuccacgacuccaacgucaagaaccucuacgacaagguccgccuccagcuccgcgacaacgccaaggagcucggcaacggcugcuucgaguucuaccaccgcugcgacaacgagugcauggaguccguccgcaacggcaccuacgacuacccccaguacuccgaggaggcccgccucaagcgcgaggagaucuccggcgucaagcucgaguccaucggcaccuaccagauccucuccaucuacuccaccgucgccuccucccucgcccucgccaucauggucgccggccucuuccucuggaugugcuccaacggcucccuccagugccgcaucugcaucuga

SEQ ID NO: 100798 - RNA, 1704 nt, Artificial Sequence
  derived and/or modified CDS sequence (opt2) from hemagglutinin__InfluenzaA__ADG21414
auggagaagaucguccuccuccucgccaucgucuccaucgucaaguccgaccagaucugcaucggcuaccacgccaacaacuccaccgagcacgucgacaccaucauggagaagaacgucaccgucacccacgcccaggacauccucgagaagacccacaacggcaagcucugcaaccucgacggcgucaagccccucauccuccgcgacugcuccgucgccggcuggcuccucggcaaccccaugugcgacgaguuccucaacguccccgagugguccuacaucgucgagaagaucaaccccgccaacgaccucugcuaccccggcaacuucaacgacuacgaggagcucaagcaccuccucucccgcaucaaccacuucgagaagauccagaucauccccaagaacuccugguccgaccacgaggccuccggcgucuccuccgccugccccuaccagggccgcuccuccuucuuccgcaacgucgucuggcucaccaagaagaacaacgccuaccccaccaucaagaaguccuacaacaacaccaaccaggaggaccuccucguccucuggggcauccaccaccccaacgacggcgccgagcagacccgccucuaccagaaccccaccaccuacaucuccgucggcaccuccacccucaaccagcgccucguccccaagaucgccacccgcuccaaggucaacggccaguccggccgcauggaguucuucuggaccauccucaaguccaacgacgccaucaacuucgaguccaacggcaacuucaucgcccccgagaacgccuacaagaucgucaagaagggcgacuccaccaucaugaaguccgagcucgaguacggcaacugcaacaccaagugccagacccccaucggcgccaucaacuccuccaugcccuuccacaacauccacccccucaccaucggcgagugccccaaguacgucaaguccaaccgccucguccucgccaccggccuccgcaacuccccccagggcgagcgccgccgcaagaagcgcggccucuucggcgccaucgccggcuucaucgagggcggcuggcagggcauggucgacggcugguacggcuaccaccacuccaacgagcagggcuccggcuacgccgccgacaaggaguccacccagaaggccaucgacggcgucaccaacaaggucaacuccaucaucgacaagaugaacacccaguucgaggccgucggccgcgaguucaacaaccucgagcgccgcaucgagaaccucaacaagaagauggaggacggcuuccucgacgucuggaccuacaacgccgagcuccucguccucauggagaacgagcgcacccucgacuuccacgacuccaacgucaagaaccucuacgacaagguccgccuccagcuccgcgacaacgccaaggagcucggcaacggcugcuucgaguucuaccaccgcugcgacaacgagugcauggaguccguccgcaacggcaccuacgacuacccccaguacuccgaggaggcccgccucaagcgcgaggagaucuccggcgucaagcucgaguccaucggcaccuaccagauccucuccaucuacuccaccgucgccuccucccucgcccucgccaucauggucgccggccucuuccucuggaugugcuccaacggcucccuccagugccgcaucugcaucuga

SEQ ID NO: 100799 - RNA, 1704 nt, Artificial Sequence
  derived and/or modified CDS sequence (opt2) from hemagglutinin__InfluenzaA__ADG21416
auggagaagaucguccuccuccucgccaucgucuccaucgucaaguccgaccagaucugcaucggcuaccacgccaacaacuccaccgagcaggucgacaccaucauggagaagaacgucaccgucacccacgcccaggacauccucgagaagacccacaacggcaagcucugcaaccucgacggcgucaagccccucauccuccgcgacugcuccgucgccggcuggcuccucggcaaccccaugugcgacgaguuccucaacguccccgagugguccuacaucgucgagaagaucaaccccgccaacgaccucugcuaccccggcaacuucaacgacuacgaggagcucaagcaccuccucucccgcaucaaccacuucgagaagauccagaucauccccaagaacuccugguccgaccacgaggccuccggcgucuccuccgccugccccuaccagggccgcuccuccuucuuccgcaacgucgucuggcucaccaagaagaacaacgccuaccccaccaucaagaaguccuacaacaacaccaaccaggaggaccuccucguccucuggggcauccaccaccccaacgacgccgccgagcagaccggccucuaccagaaccccaccaccuacaucuccgucggcaccuccacccucaaccagcgccucguccccaagaucgccacccgcuccaaggucaacggccaguccggccgcauggaguucuucuggaccauccucaaguccaacgacgucaucaacuucgaguccaacggcaacuucaucgcccccgagaacgccuacaagaucgucaagaagggcgacuccaccaucaugaaguccgagcucgaguacggcaacugcaacaccaagugccagacccccaucggcgccaucaacuccuccaugcccuuccacaacauccacccccucaccaucggcgagugccccaaguacgucaaguccaaccgccucguccucgccaccggccuccgcaacuccccccagggcgagcgccgccgcaagaagcgcggccucuucggcgccaucgccggcuucaucgagggcggcuggcagggcauggucgacggcugguacggcuaccaccacuccaacgagcagggcuccggcuacgccgccgacaaggaguccacccagaaggccaucgacggcgucaccaacaaggucaacuccaucaucgacaagaugaacacccaguucgaggccgucggccgcgaguucaacaaccucgagcgccgcaucgagaaccucaacaagaagauggaggacggcuuccucgacgucuggaccuacaacgccgagcuccucguccucauggagaacgagcgcacccucgacuuccacgacuccaacgucaagaaccucuacgacaagguccgccuccagcuccgcgacaacgccaaggagcucggcaacggcugcuucgaguucuaccaccgcugcgacaacgagugcauggaguccguccgcaacggcaccuacgacuacccccaguacuccgaggaggcccgccucaagcgcgaggagaucuccggcgucaagcucgaguccaucggcaccuaccagauccucuccaucuacuccaccgucgccuccucccucgcccucgccaucauggucgccggccucuuccucuggaugugcuccaacggcucccuccagugccgcaucugcaucuga

SEQ ID NO: 100800 - RNA, 1704 nt, Artificial Sequence
  derived and/or modified CDS sequence (opt2) from hemagglutinin__InfluenzaA__ADG21420
auggagaagaucguccuccuccucgccaucgucuccaucgucaaguccgaccagaucugcaucggcuaccacgccaacaacuccaccgagcaggucgacaccaucauggagaagaacgucaccgucacccacgcccaggacauccucgagaagacccacaacggcaagcucugcaaccucgacggcgucaagccccucauccuccgcgacugcuccgucgccggcuggcuccucggcaaccccaugugcgacgaguuccucaacguccccgagugguccuacaucgucgagaagaucaaccccgccaacgaccucugcuaccccggcaacuucaacgacuacgaggagcucaagcaccuccucucccgcaucaaccacuucgagaagauccagaucauccccaagaacuccugguccgaccacgaggccuccggcgucuccuccgccugccccuaccagggccgcuccuccuucuuccgcaacgucgucuggcucaccaagaagaacaacgccuaccccaccaucaagaaguccuacaacaacaccaaccaggaggaccuccucguccucuggggcauccaccaccccaacgacgccgccgagcagacccgccucuaccagaaccccaccaccuacaucuccgucggcaccuccacccucaaccagcgccucguccccaagaucgccacccgcuccaaggucaacggccaguccggccgcauggaguucuucuggaccauccucaaguccaacgacgccaucaacuucgaguccaacggcaacuucaucgcccccgagaacgccuacaagaucgucaagaagggcgacuccaccaucaugaaguccgagcucgaguacggcaacugcaacaccaagugccagacccccaucggcgccaucaacuccuccaugcccuuccacaacauccacccccucaccaucggcgagugccccaaguacgucaaguccaaccgccucguccucgccaccggccuccgcaacuccccccagggcgagcgccgccgcaagaagcgcggccucuucggcgccaucgccggcuucaucgagggcggcuggcagggcauggucgacggcugguacggcuaccaccacuccaacgagcagggcuccggcuacgccgccgacaaggaguccacccagaaggccaucgacggcgucaccaacaaggucaacuccaucaucgacaagaugaacacccaguucgaggccgucggccgcgaguucaacaaccucgagcgccgcaucgagaaccucaacaagaagauggaggacggcuuccucgacgucuggaccuacaacgccgagcuccucguccucauggagaacgagcgcacccucgacuuccacgacuccaacgucaagaaccucuacgacaagguccgccuccagcuccgcgacaacgccaaggagcucggcaacggcugcuucgaguucuaccaccgcugcgacaacgagugcauggaguccguccgcaacggcaccuacgacuacccccaguacuccgaggaggcccgccucaagcgcgaggagaucuccggcgucaagcucgaguccaucggcaccuaccagauccucuccaucuacuccaccgucgccuccucccucgcccucgccaucauggucgccggccucuuccucuggaugugcuccaacggcucccuccagugccgcaucugcaucuga

SEQ ID NO: 100801 - RNA, 1704 nt, Artificial Sequence
  derived and/or modified CDS sequence (opt2) from hemagglutinin__InfluenzaA__ADG21422
auggagaagaucguccuccuccucgccaucgucucccucgucaaguccgaccagaucugcaucggcuaccacgccaacaacuccaccgagcaggucgacaccaucauggagaagaacgucaccgucacccacgcccaggacauccucgagaagacccacaacggcaagcucugcaaccucgacggcgucaagccccucauccuccgcgacugcuccgucgccggcuggcuccucggcaaccccaugugcgacgaguuccucaacguccccgagugguccuacaucgucgagaagaucaaccccaccaacgaccucugcuaccccggcaacuucaacgacuacgaggagcucaagcaccuccucucccgcaucaaccacuucgagaagauccagaucauccccaagaacuccugguccgaccacgaggccuccggcgucuccuccgccugccccuaccagggccgcuccuccuucuuccgcaacgucgucuggcucaccaagaagaacaacgccuaccccaccaucaagcgcuccuacaacaacaccaaccaggaggaccuccucguccucuggggcauccaccaccccaacgacgccgccgagcagacccgccucuaccagaaccccaccaccuacaucuccgucggcaccuccacccucaaccagcgccucguccccaagaucgccacccgcuccaaggucaacggccaguccggccgcauggaguucuucuggaccauccucaaguccaacgacgccaucaacuucgaguccaacggcaacuucaucgcccccgagaacgccuacaagaucgucaagaagggcgacuccaccaucaugaaguccgagcucgaguacggcaacugcaacaccaagugccagacccccaucggcgccaucaacuccuccaugcccuuccacaacauccacccccucaccaucggcgagugccccaaguacgucaaguccaaccgccucguccucgccaccggccuccgcaacuccccccagggcgagcgccgccgcaagaagcgcggccucuucggcgccaucgccggcuucaucgagggcggcuggcagggcauggucgacggcugguacggcuaccaccacuccaacgagcagggcuccggcuacgccgccgacaaggaguccacccagaaggccaucgacggcgucaccaacaaggucaacuccaucaucgacaagaugaacacccaguucgaggccgucggccgcgaguucaacaaccucgagcgccgcaucgagaaccucaacaagaagauggaggacggcuuccucgacgucuggaccuacaacgccgagcuccucguccucauggagaacgagcgcacccucgacuuccacgacuccaacgucaagaaccucuacgacaagguccgccuccagcuccgcgacaacgccaaggagcucggcaacggcugcuucgaguucuaccaccgcugcgacaacgagugcauggaguccguccgcaacggcaccuacgacuacccccaguacuccgaggaggcccgcuccaagcgcgaggagaucuccggcgucaagcucgaguccaucggcaccuaccagauccucuccaucuacuccaccgucgccuccucccucgcccucgccaucauggucgccggccucuuccucuggaugugcuccaacggcucccuccagugccgcaucugcaucuga

SEQ ID NO: 100802 - RNA, 1704 nt, Artificial Sequence
  derived and/or modified CDS sequence (opt2) from hemagglutinin__InfluenzaA__ADG21425
auggagaagaucguccuccuccucgccaucgucucccucgucaaguccgaccagaucugcaucggcuaccacgccaacaacuccaccgagcaggucgacaccaucauggagaagaacgucaccgucacccacgcccaggacauccucgagaagacccacaacggcaagcucugcaaccucgacggcgucaagccccucauccuccgcgacugcuccgucgccggcuggcuccucggcaaccccaugugcgacgaguuccucaacguccccgagugguccuacaucgucgagaagaucaaccccgccaacgaccucugcuaccccggcaacuucaacgacuacgaggagcucaagcaccuccucucccgcaucaaccacuucgagaagauccagaucauccccaagaacuccugguccgaccacggcgccuccggcgucuccuccgccugccccuaccagggccgcuccuccuucuuccgcaacgucgucuggcucaccaagaagaacaacgccuaccccaccaucaagaaguccuacaacaacaccaaccaggaggaccuccucguccucuggggcauccaccaccccaacgacgccgaggagcagacccgccucuaccagaaccccaccaccuacaucuccgucggcaccuccacccucaaccagcgccucguccccaagaucgccacccgcuccaaggucaacggccaguccggccgcauggaguucuucuggaccauccucaaguccaacgacgccaucaacuucgaguccaacggcaacuucaucgcccccgagaacgccuacaagaucgucaagaagggcgacuccaccaucaugaaguccgagcucgaguacgacaacugcaacaccaagugccagacccccaucggcgccaucaacuccuccaugcccuuccacaacauccacccccucaccaucggcgagugccccaaguacgucaaguccaacaagcucguccucgccaccggccuccgcaacuccccccagggcgagaagcgccgcaagaagcgcggccucuucggcgccaucgccggcuucaucgagggcggcuggcagggcauggucgacggcugguacggcuaccaccacuccaacgagcagggcuccggcuacgccgccgacaaggaguccacccagaaggccaucgacggcgucaccaacaaggucaacuccaucaucgacaagaugaacacccaguucgaggccgucggccgcgaguucaacgcccucgagcgccgcaucgagaaccucaacaagaagauggaggacggcuuccucgacgucuggaccuacaacgccgagcuccucguccucauggagaacgagcgcacccucgacuuccacgacuccaacgucaagaaccucuacgacaagguccgccuccagcuccgcgacaacgccaaggagcucggcaacggcugcuucgaguucuaccaccgcugcgacaacgagugcauggaguccguccgcaacggcaccuacgacuacccccaguacuccgaggaggcccgccucaagcgcgaggagaucuccggcgucaagcucgaguccaucggcaccuaccagauccucuccaucuacuccaccgucgccuccucccucgcccucgccaucauggucgccggccucucccucuggaugugcuccaacggcucccuccagugccgcaucugcaucuga

SEQ ID NO: 100803 - RNA, 1704 nt, Artificial Sequence
  derived and/or modified CDS sequence (opt2) from hemagglutinin__InfluenzaA__ADG21429
auggagaagaucguccuccuccucgccaucgucuccaucgucaaguccgaccagaucugcaucggcuaccacgccaacaacuccaccgagcaggucgacaccaucauggagaagaacgucaccgucacccacgcccaggacauccucgagaagacccacaacggcaagcucugcaaccucgacggcgucgagccccucauccuccgcgacugcuccgucgccggcuggcuccucggcaaccccaugugcgacgaguuccucaacguccccgagugguccuacaucgucgagaagaucaaccccgccaacgaccucugcuaccccggcaacuucaacgacuacgaggagcucaagcaccuccucucccgcaucaaccacuucgagaagauccagaucauccccaagaacuccugguccgaccacgaggccuccggcgucuccuccgccugccccuaccagggccgcuccuccuucuuccgcaacgucgucuggcucaccaagaagaacaacgccuaccccaccaucaagaaguccuacaacaacaccaaccaggaggaccuccucguccucuggggcauccaccaccccaacgacgccgccgagcagacccgccucuaccagaaccccaccaccuacaucuccgucggcaccuccacccucaaccagcgccucguccccaagaucgccacccgcuccaaggucaacggccaguccggccgcauggaguucuucuggaccauccucaaguccaacgacgucaucaacuucgaguccaacggcaacuucaucgcccccgagaacgccuacaagaucgucaagaagggcgacuccaccaucaugaaguccgagcucgaguacggcaacugcaacaccaagugccagacccccaucggcgccaucaacuccuccaugcccuuccacaacauccacccccucaccaucggcgagugccccaaguacgucaaguccgaccgccucguccucgccaccggccuccgcaacuccccccagggcgagcgccgccgcaagaagcgcggccucuucggcgccaucgccggcuucaucgagggcggcuggcagggcauggucgacggcugguacggcuaccaccacuccaacgagcagggcuccggcuacgccgccgacaaggaguccacccagaaggccaucgacggcgucaccaacaaggucaacuccaucaucgacaagaugaacacccaguucgaggccgucggccgcgaguucaacaaccucgagcgccgcaucgagaaccucaacaagaagauggaggacggcuuccucgacgucuggaccuacaacgccgagcuccucguccucauggagaacgagcgcacccucgacuuccacgacuccaacgucaagaaccucuacgacaagguccgccuccagcuccgcgacaacgccaaggagcucggcaacggcugcuucgaguucuaccaccgcugcgacaacgagugcauggaguccguccgcaacggcaccuacgacuacccccaguacuccgaggaggcccgccucaagcgcgaggagaucuccggcgucaagcucgaguccaucggcaccuaccagauccucuccaucuacuccaccgucgccuccucccucgcccucgccaucauggucgccggccuccuccucuggaugugcuccaacggcucccuccagugccgcaucugcaucuga

SEQ ID NO: 100804 - RNA, 1704 nt, Artificial Sequence
  derived and/or modified CDS sequence (opt2) from hemagglutinin__InfluenzaA__ADG21437
auggagaagaucguccuccuccucgccaucgucuccaucgucaaguccgaccagaucugcaucggcuaccacgccaacaacuccaccgagcaggucgacaccaucauggagaagaacgucaccgucacccacgcccaggacauccucgagaagacccacaacggcaagcucugcaaccucgacggcgucaagccccucauccuccgcgacugcuccgucgccggcuggcuccucggcaaccccaugugcgacgaguuccucaacguccccgagugguccuacaucgucgagaagaucaaccccgccaacgaccucugcuaccccggcaacuucaacgacuacgaggagcucaagcaccuccucucccgcaucaaccacuucgagaagauccagaucauccccaagaacuccugguccgaccacgaggccuccggcgucuccuccgccugccccuaccagggccgcuccuccuucuuccgcaacgucgucuggcucacccagaagaacaacgccuaccccaccaucaagaaguccuacaacaacaccaaccaggaggaccuccucguccucuggggcauccaccaccccaacgacgccgccgagcagacccgccucuaccagaaccccaccaccuacaucuccgucggcaccuccacccucaaccagcgccucguccccaagaucgccacccgcuccaaggucaacggccaguccggccgcauggaguucuucuggaccauccucaaguccaacgacgucaucaacuucgaguccaacggcaacuucaucgcccccgagaacgccuacaagaucgucaagaagggcgacuccaccaucaugaaguccgagcucgaguacggcaacugcaacaccaagugccagacccccaucggcgccaucaacuccuccaugcccuuccacaacauccacccccucaccaucggcgagugccccaaguacgucaaguccaaccgccucguccucgccaccggccuccgcaacuccccccagggcgagcgccgccgcaagaagcgcggccucuucggcgccaucgccggcuucaucgagggcggcuggcagggcauggucgacggcugguacggcuaccaccacuccaacgagcagggcuccggcuacgccgccgacaaggaguccacccagaaggccaucgacggcgucaccaacaaggucaacuccaucaucgacaagaugaacacccaguucgaggccgucggccgcgaguucaacaaccucgagcgccgcaucgagaaccucaacaagaagauggaggacggcuuccucgacgucuggaccuacaacgccgagcuccucguccucauggagaacgagcgcacccucgacuuccacgacuccaacgucaagaaccucuacgacaagguccgccuccagcuccgcgacaacgccaaggagcucggcaacggcugcuucgaguucuaccaccgcugcgacaacgagugcauggaguccguccgcaacggcaccuacgacuacccccaguacuccgaggaggcccgccucaagcgcgaggagaucuccggcgucaagcucgaguccaucggcaccuaccagauccucuccaucuacuccaccgucgccuccucccucgcccucgccaucauggucgccggccucuuccucuggaugugcuccaacggcucccuccagugccgcaucugcaucuga

SEQ ID NO: 100805 - RNA, 1704 nt, Artificial Sequence
  derived and/or modified CDS sequence (opt2) from hemagglutinin__InfluenzaA__ADG21439
auggagaagaucguccuccuccucgccaucgucuccaucgucaaguccgaccagaucugcaucggcuaccacgccaacaacuccaccgagcaggucgacaccaucauggagaagaacgucaccgucacccacgcccaggacauccucgagaagacccacaacggcaagcucugcaaccucgacggcgucaagccccucauccuccgcgacugcuccgucgccggcuggcuccucggcaaccccaugugcgacgaguuccucaacguccccgagugguccuacaucgucgagaagaucaaccccgccaacgaccucugcuaccccggcaacuucaacgacuacgaggagcucaagcaccuccucucccgcaucaaccacuucgagaagauccagaucauccccaagggcuccugguccgaccacgaggccuccggcgucuccuccgccugccccuaccagggccgcuccuccuucuuccgcaacgucgucuggcucaccaagaagaacaacgccuaccccaccaucaagaaguccuacaacaacaccaaccaggaggaccuccucguccucuggggcauccaccaccccaacgacgccgccgagcagacccgccucuaccagaaccccaccaccuacaucuccgucggcaccuccacccucaaccagcgccucgucccccagaucgccacccgcuccaaggucaacggccaguccggccgcauggaguucuucuggaccauccucaaguccaacgacgccaucaacuucgaguccaacggcaacuucaucgcccccgagaacgccuacaagaucgucaagaagggcgacuccaccaucaugaaguccgagcucgaguacggcaacugcaacaccaagugccagacccccaucggcgccaucaacuccuccaugcccuuccacaacauccacccccucaccaucggcgagugccccaaguacgucaaguccaaccgccucguccucgccaccggccuccgcaacuccccccagggcgagcgccgccgcaagaagcgcggccucuucggcgccaucgccggcuucaucgagggcggcuggcagggcauggucgacggcugguacggcuaccaccacuccaacgagcagggcuccggcuacgccgccgacaaggaguccacccagaaggccaucgacggcgucaccaacaaggucaacuccaucaucgacaagaugaacacccaguucgaggccgucggccgcgaguucaacaaccucgagcgccgcaucgagaaccucaacaagaagauggaggacggcuuccucgacgucuggaccuacaacgccgagcuccucguccucauggagaacgagcgcacccucgacuuccacgacuccaacgucaagaaccucuacgacaagguccgccuccagcuccgcgacaacgccaaggagcucggcaacggcugcuucgaguucuaccaccgcugcgacaacgagugcauggaguccguccgcaacggcaccuacgacuacccccaguacuccgaggaggcccgccucaagcgcgaggagaucuccggcgucaagcucgaguccaucggcaccuaccagauccucuccaucuacuccaccgucgccuccucccucgcccucgccaucauggucgccggccucuuccucuggaugugcuccaacggcucccuccagugccgcaucugcaucuga

SEQ ID NO: 100806 - RNA, 1704 nt, Artificial Sequence
  derived and/or modified CDS sequence (opt2) from hemagglutinin__InfluenzaA__ADG21441
auggagaagaucguccuccuccucgccaucgucuccaucgucaaguccgaccagaucugcaucggcuaccacgccaacaacuccaccgagcaggucgacaccaucauggagaagaacgucaccgucacccacgcccaggacauccucgagaagacccacaacggcaagcucugcaaccucgacggcgucaagccccucauccuccgcgacugcuccgucgccggcuggcuccucggcaaccccaugugcgacgaguuccucaacguccccgagugguccuacaucgucgagaagaucaaccccuccaacgaccucugcuaccccggcaacuucaacgacuacgaggagcucaagcaccuccucucccgcaucaaccacuucgagaagauccagaucauccccaagaacuccugguccgaccacgaggccuccggcgucuccuccgccugccccuaccagggccgcuccuccuucuuccgcaacgucgucuggcucaccaagaagaacaacgccuaccccaccaucaagaaguccuacaacaacaccaaccaggaggaccuccucguccucuggggcauccaccaccccaacgacgaggccgagcagaccucccucuaccagaaccccaccaccuacaucuccgucggcaccuccacccucaaccagcgccucguccccaagaucgccacccgcuccaaggucaacggccaguccggccgcauggaguucuucuggaccauccucaaguccaacgacgccaucaacuucgaguccaacggcaacuucaucgcccccgagaacgccuacaagaucgucaagaagggcgacuccaccaucaugaaguccgagcucgaguacggcaacugcaacaccaagugccagacccccaucggcgccaucaacuccuccaugcccuuccacaacauccacccccucaccaucggcgagugccccaaguacgucaaguccaaccgccucguccucgccaccggccuccgcaacuccccccagggcgagcgccgccgcaagaagcgcggccucuucggcgccaucgccggcuucaucgagggcggcuggcagggcauggucgacggcugguacggcuaccaccacuccaacgagcagggcuccggcuacgccgccgacaaggaguccacccagaaggccaucgacggcgucaccaacaaggucaacuccaucaucgacaagaugaacacccaguucgaggccgucggccgcgaguucaacaaccucgagcgccgcaucgagaaccucaacaagaagauggaggacggcuuccucgacgucuggaccuacaacgccgagcuccucguccucauggagaacgagcgcacccucgacuuccacgacuccaacgucaagaaccucuacgacaagguccgccuccagcuccgcgacaacgccaaggagcucggcaacggcugcuucgaguucuaccaccgcugcgacaacgagugcauggaguccguccgcaacggcaccuacgacuacccccaguacuccgaggaggcccgccucaagcgcgaggagaucuccggcgucaagcucgaguccaucggcaccuaccagauccucuccaucuacuccaccgucgccuccucccucgcccucgccaucauggucgccggccucuuccucuggaugugcuccaacggcucccuccagugccgcaucugcaucuga

SEQ ID NO: 100807 - RNA, 1704 nt, Artificial Sequence
  derived and/or modified CDS sequence (opt2) from hemagglutinin__InfluenzaA__ADG21443
auggagaagaucguccuccuccucgccaucgucuccaucgucaaguccgaccagaucugcaucggcuaccacgccaacaacuccaccgagcaggucgacaccaucauggagaagaacgucaccgucacccacgcccaggacauccucgagaagacccacaacggcaagcucugcaaccucgacggcgucaagccccucauccuccgcgacugcuccgucgccggcuggcuccucggcaaccccaugugcgacgaguuccucaacguccccgagugguccuacaucgucgagaagaucaaccccaccaacgaccucugcuaccccggcaacuucaacgacuacgaggagcucaagcaccuccucucccgcaucaaccacuucgagaagauccagaucauccccaagaacuccugguccgaccacgaggccuccggcgucuccuccgccugccccuaccagggccgcuccuccuucuuccgcaacgucgucuggcucaccaagaagaacaacgccuaccccaccaucaagaaguccuacaacaacaccaaccaggaggaccuccucguccucuggggcauccaccaccccaacgacgccgccgagcagacccgccucuaccagaaccccaccaccuacaucuccgucggcaccuccacccucaaccagcgccucguccccaagaucgccacccgcuccaaggucaacggccaguccggccgcauggaguucuucuggaccauccucaaguccaacgacgccaucaacuucgaguccaacggcaacuucaucgcccccgagaacgccuacaagaucgucaagaagggcgacuccaccaucaugaaguccgagcucgaguacggcaacugcaacaccaagugccagacccccaucggcgccaucaacuccuccaugcccuuccacaacauccacccccucaccaucggcgagugccccaaguacgucaaguccaaccgccucguccucgccaccggccuccgcaacuccccccagggcgagcgccgccgcaagaagcgcggccucuucggcgccaucgccggcuucaucgagggcggcuggcagggcauggucgacggcugguacggcuaccaccacuccaacgagcagggcuccggcuacgccgccgacaaggaguccacccagaaggccaucgacggcgucaccaacaaggucaacuccaucaucgacaagaugaacacccaguucgaggccgucggccgcgaguucaacaaccucgagcgccgcaucgagaaccucaacaagaagauggaggacggcuuccucgacgucuggaccuacaacgccgagcuccucguccucauggagaacgagcgcacccucgacuuccacgacuccaacgucaagaaccucuacgacaagguccgccuccagcuccgcgacaacgccaaggagcucggcaacggcugcuucgaguucuaccaccgcugcgacaacgagugcauggaguccguccgcaacggcaccuacgacuacccccaguacuccgaggaggcccgccucaagcgcgaggagaucuccggcgucaagcucgaguccaucggcaccuaccagauccucuccaucuacuccaccgucgccuccucccucgcccucgccaucauggucgccggccucuuccucuggaugugcuccaacggcucccuccagugccgcaucugcaucuga

SEQ ID NO: 100808 - RNA, 1704 nt, Artificial Sequence
  derived and/or modified CDS sequence (opt2) from hemagglutinin__InfluenzaA__ADG21445
auggagaagaucguccuccuccucgccaucgucuccaucgucaaguccgaccagaucugcaucggcuaccacgccaacaacuccaccgagcaggucgacaccaucauggagaagaacgucaccgucacccacgcccaggacauccucgagaagacccacaacggcaagcucugcaaccucgacggcgucaagccccucauccuccgcgacugcuccgucgccggcuggcuccucggcaaccccaugugcgacgaguuccucaacguccccgagugguccuacaucgucgagaagaucaaccccuccaacgaccucugcuaccccggcaacuucaacgacuacgaggagcucaagcaccuccucucccgcaucaaccacuucgagaagauccagaucauccccaagaacuccugguccgaccacgaggccuccggcgucuccuccgccugccccuaccagggccgcuccuccuucuuccgcaacgucgucuggcucaccaagaagaacaacgccuaccccaccaucaagaaguccuacaacaacaccaaccaggaggaccuccucguccucuggggcauccaccaccccaacgacgaggccgagcagacccgccucuaccagaaccccaccaccuacaucuccgucggcaccuccacccucaaccagcgccucguccccaagaucgccacccgcuccaaggucaacggccaguccggccgcauggaguucuucuggaccauccucaaguccaacgacgccaucaacuucgaguccaacggcaacuucaucgcccccgagaacgccuacaagaucgucaagaagggcgacuccaccaucaugaaguccgagcucgaguacggcaacugcaacaccaagugccagacccccaucggcgccaucaacuccuccaugcccuuccacaacauccacccccucaccaucggcgagugccccaaguacgucaaguccaaccgccucguccucgccaccggccuccgcaacuccccccagggcgagcgccgccgcaagaagcgcggccucuucggcgccaucgccggcuucaucgagggcggcuggcagggcauggucgacggcugguacggcuaccaccacuccaacgagcagggcuccggcuacgccgccgacaaggaguccacccagaaggccaucgacggcgucaccaacaaggucaacuccaucaucgacaagaugaacacccaguucgaggccgucggccgcgaguucaacaaccucgagcgccgcaucgagaaccucaacaagaagauggaggacggcuuccucgacgucuggaccuacaacgccgagcuccucguccucauggagaacgagcgcacccucgacuuccacgacuccaacgucaagaaccucuacgacaagguccgccuccagcuccgcgacaacgccaaggagcucggcaacggcugcuucgaguucuaccaccgcugcgacaacgagugcauggaguccguccgcaacggcaccuacgacuacccccaguacuccgaggaggcccgccucaagcgcgaggagaucuccggcgucaagcucgaguccaucggcaccuaccagauccucuccaucuacuccaccgucgccuccucccucgcccucgccaucauggucgccggccucuuccucuggaugugcuccaacggcucccuccagugccgcaucugcaucuga

SEQ ID NO: 100809 - RNA, 1701 nt, Artificial Sequence; identical to SEQ ID NO: 98947
  derived and/or modified CDS sequence (opt2) from hemagglutinin__InfluenzaA__ADG21912

SEQ ID NO: 100810 - RNA, 1701 nt, Artificial Sequence; identical to SEQ ID NO: 98705
  derived and/or modified CDS sequence (opt2) from hemagglutinin__InfluenzaA__ADG21913

SEQ ID NO: 100811 - RNA, 1701 nt, Artificial Sequence
  derived and/or modified CDS sequence (opt2) from hemagglutinin__InfluenzaA__ADG21914
augaaggccaucaucgucguccuccucuacaccuucgccaccgccaacgccgacacccucugcaucggcuaccacgccaacaacuccaccgacaccgucgacaccguccucgagaagaacgucaccgucacccacuccgucaaccuccucgaggacaagcacaacggcaagcucugcaagcuccgcggcgucgccccccuccaccucggcaagugcaacaucgccggcuggauccucggcaaccccgagugcgagucccucuccaccgccuccuccugguccuacaucgucgagaccuccuccuccgacaacggcaccugcuaccccggcgacuucaucgacuacgaggagcuccgcgagcagcucuccuccgucuccuccuucgagcgcuucgagaucuuccccaagaccuccuccuggcccaaccacgacuccaacaagggcgucaccgccgccugcccccacgccggcgccaaguccuucuacaagaaccucaucuggcucgucaagaagggcaacuccuaccccaagcucuccaaguccuacaucaacgacaagggcaaggagguccucguccucuggggcauccaccaccccuccaccuccgccgaccagcagucccucuaccagaacgccgacgccuacgucuucgucggcaccucccgcuacuccaagaaguucaagcccgagaucgccauccgccccaagguccgcgaccaggagggccgcaugaacuacuacuggacccucgucgagcccggcgacaagaucaccuucgaggccaccggcaaccucgucgucccccgcuacgccuucgccauggagcgcaacgccggcuccggcaucaucaucuccgacacccccguccacgacugcaacaccaccugccagacccccaagggcgccaucaacaccucccuccccuuccagaacauccaccccaucaccaucggcaagugccccaaguacgucaaguccaccaagcuccgccucgccaccggccuccgcaacguccccuccauccagucccgcggccucuucggcgccaucgccggcuucaucgagggcggcuggaccggcauggucgacggcugguacggcuaccaccaccagaacgagcagggcuccggcuacgccgccgaccucaaguccacccagaacgccaucgacgagaucaccaacaaggucaacuccgucaucgagaagaugaacacccaguucaccgccgucggcaaggaguucaaccaccucgagaagcgcaucgagaaccucaacaagaaggucgacgacggcuuccucgacaucuggaccuacaacgccgagcuccucguccuccucgagaacgagcgcacccucgacuaccacgacuccaacgucaagaaccucuacgagaagguccgcucccagcucaagaacaacgccaaggagaucggcaacggcugcuucgaguucuaccacaagugcgacaacaccugcauggaguccgucaagaacggcaccuacgacuaccccaaguacuccgaggaggccaagcucaaccgcgaggagaucgacggcgucaagcucgaguccacccgcaucuaccagauccucgccaucuacuccaccgucgccuccucccucguccucgucgucucccucggcgccaucuccuucuggaugugcuccaacggcucccuccagugccgcaucugcaucuga

SEQ ID NO: 100812 - RNA, 1701 nt, Artificial Sequence
  derived and/or modified CDS sequence (opt2) from hemagglutinin__InfluenzaA__ADG21915
auggaggccauccucgucguccuccucuacaccuucgccaccgccaacgccgacacccucugcaucggcuaccacgccaacaacuccaccgacaccgucgacaccguccucgagaagaacgucaccgucacccacuccgucaacauccucgaggacaagcacaacggcaagcucugcaagcuccgcggcgucgccccccuccaccucggcaagugcaacaucgccggcuggauccucggcaaccccgagugcgagucccucuccaccgccuccuccugguccuacaucgucgagaccuccuccuccgacaacggcaccugcuaccccggcgacuucaucgacuacgaggagcuccgcgagcagcucuccuccgucuccuccuucgagcgcuucgagaucuuccccaagaccuccuccuggcccaaccacgacuccaacaagggcgucaccgccgccugcccccacgccggcgccaaguccuucuacaagaaccucaucuggcucgucaagaagggcaacuccuaccccaagcucuccaaguccuacaucaacgacaagggcaaggagguccucguccucuggggcauccaccaccccuccaccuccgccgaccagcagucccucuaccagaacgccgacgccuacgucuucgucggcuccucccgcuacuccaagaaguucaagcccgagaucgccauccgccccaagguccgcgaccaggagggccgcaugaacuacuacuggacccucgucgagcccggcgacaagaucaccuucgaggccaccggcaaccucgucgucccccgcuacgccuucgccaucgagcgcaacgccggcuccggcaucaucaucuccgacacccccguccacgacugcaacaccaccugccagacccccaagggcgccaucaacaccucccuccccuuccacaacauccaccccaucaccaucggcaagugccccaaguacgucaaguccaccaagcuccgccucgccaccggccuccgcaacguccccuccauccagucccgcggccucuucggcgccaucgccggcuucaucgagggcggcuggaccggcauggucgacggcugguacggcuaccaccaccagaacgagcagggcuccggcuacgccgccgaccucaaguccacccagaacgccaucgacgagaucaccaacaaggucaacuccgucaucgagaagaugaacacccaguucaccgccgucggcaaggaguucaaccaccucgagaagcgcaucgagaaccucaacaagaaggucgacgacggcuuccucgacaucuggaccuacaacgccgagcuccucguccuccucgagaacgagcgcacccucgacuaccacgacuccaacgucaagaaccucuacgagaagguccgcucccagcucaagaacaacgccaaggagaucggcaacggcugcuucgaguucuaccacaagugcgacaacaccugcauggaguccgucaagaacggcaccuacgacuaccccaaguacuccgaggaggccaagcucaaccgcgaggagaucgacggcgucaagcucgaguccacccgcaucuaccagauccucgccaucuacuccaccgucgccuccucccucguccucgucgucucccucggcgccaucuccuucuggaugugcuccaacggcucccuccagugccgcaucugcaucuga

SEQ ID NO: 100813 - RNA, 1701 nt, Artificial Sequence; identical to SEQ ID NO: 98947
  derived and/or modified CDS sequence (opt2) from hemagglutinin__InfluenzaA__ADG21916

SEQ ID NO: 100814 - RNA, 1701 nt, Artificial Sequence; identical to SEQ ID NO: 98705
  derived and/or modified CDS sequence (opt2) from hemagglutinin__InfluenzaA__ADG21917

SEQ ID NO: 100815 - RNA, 1701 nt, Artificial Sequence; identical to SEQ ID NO: 100205
  derived and/or modified CDS sequence (opt2) from hemagglutinin__InfluenzaA__ADG21918

SEQ ID NO: 100816 - RNA, 1701 nt, Artificial Sequence
  derived and/or modified CDS sequence (opt2) from hemagglutinin__InfluenzaA__ADG21919
augaaggccauccucgucguccuccucuacaccuucgccaccgccaacgccgacacccucugcaucggcuaccacgccaacaacuccaccgacaccgucgacaccguccucgagaagaacgucaccgucacccacuccgucaaccuccucgaggacaagcacaacggcaagcucugcaagcuccgcggcgucaccccccuccaccucggcaagugcaacaucgccggcuggauccucggcaaccccgagugcgagucccucuccaccgccuccuccugguccuacaucgucgagaccuccuccuccgacaacggcaccugcuaccccggcgacuucaucgacuacgaggagcuccgcgagcagcucuccuccgucuccuccuucgagcgcuucgagaucuuccccaagaccuccuccuggcccaaccacgacuccaacaagggcgucaccgccgccugcccccacgccggcgccaaguccuucuacaagaaccucaucuggcucgucaagaagggcaacuccuaccccaagcucuccaaguccuacaucaacgacaagggcaaggagguccucguccucuggggcauccaccaccccuccaccuccgccgaccagcagucccucuaccagaacgccgacgccuacgucuucgucggcaccucccgcuacuccaagaaguucaagcccgagaucgccauccgccccaagguccgcgaccaggagggccgcaugaacuacuacuggacccucgucgagcccggcgacaagaucaccuucgaggccaccggcaaccucgucgucccccgcuacgccuucgccauggagcgcaacgccggcuccggcaucaucaucuccgacacccccguccacgacugcaacaccaccugccagacccccaagggcgccaucaacaccucccuccccuuccagaacauccaccccaucaccaucggcaagugccccaaguacgucaaguccaccaagcuccgccucgccaccggccuccgcaacguccccuccauccagucccgcggccucuucggcgccaucgccggcuucaucgagggcggcuggaccggcauggucgacggcugguacggcuaccaccaccagaacgagcagggcuccggcuacgccgccgaccucaaguccacccagaacgccaucgacgagaucaccaacaaggucaacuccgucaucgagaagaugaacacccaguucaccgccgucggcaaggaguucaaccaccucgagaagcgcaucgagaaccucaacaagaagaucgacgacggcuuccucgacaucuggaccuacaacgccgagcuccucguccuccucgagaacgagcgcacccucgacuaccacgacuccaacgucaagaaccucuacgagaagguccgcucccagcucaagaacaacgccaaggagaucggcaacggcugcuucgaguucuaccacaagugcgacaacaccugcauggaguccgucaagaacggcaccuacgacuaccccaaguacuccgaggaggccaagcucaaccgcgaggagaucgacggcgucaagcucgaguccacccgcaucuaccagauccucgccaucuacuccaccgucgccuccucccucguccucgucgucucccucggcgccaucuccuucuggaugugcuccaacggcucccuccagugccgcaucugcaucuga

SEQ ID NO: 100817 - RNA, 1701 nt, Artificial Sequence; identical to SEQ ID NO: 98947
  derived and/or modified CDS sequence (opt2) from hemagglutinin__InfluenzaA__ADG21921

SEQ ID NO: 100818 - RNA, 1701 nt, Artificial Sequence; identical to SEQ ID NO: 98705
  derived and/or modified CDS sequence (opt2) from hemagglutinin__InfluenzaA__ADG21922

SEQ ID NO: 100819 - RNA, 1701 nt, Artificial Sequence
  derived and/or modified CDS sequence (opt2) from hemagglutinin__InfluenzaA__ADG21923
augaaggccauccucgucguccuccucuacaccuucgccaccgccaacgccgacacccucugcaucggcuaccacgccaacaacuccaccgacaccgucgacaccguccucgagaagaacgucaccgucacccacuccgccaaccuccucgaggacaagcacaacggcaagcucugcaagcuccgcggcgucgccccccuccaccucggcaagugcaacaucgccggcuggauccucggcaaccccgagugcgagucccucuccaccgccuccuccugguccuacaucgucgagaccuccuccuccgacaacggcaccugcuaccccggcgacuucaucgacuacgaggagcuccgcgagcagcucuccuccgucuccuccuucgagcgcuucgagaucuuccccaagaccuccuccuggcccaaccacgacuccaacaagggcgucaccgccgccugcccccacgccggcgccaaguccuucuacaagaaccucaucuggcucgucaagaagggcaacuccuaccccaagcucuccaaguccuacaucaacgacaagggcaaggagguccucguccucuggggcauccaccaccccuccaccuccgccgaccagcagucccucuaccagaacgccgacgccuacgucuucgucggcuccuccaaguacuccaagaaguucaagcccgagaucgccauccgccccaagguccgcgaccaggagggccgcaugaacuacuacuggacccucgucgagcccggcgacaagaucaccuucgaggccaccggcaaccucgucgucccccgcuacgccuucgccauggagcgcaacgccggcuccggcaucaucaucuccgacacccccguccacgacugcaacaccaccugccagacccccaagggcgccaucaacaccucccuccccuuccacaacauccaccccaucaccaucggcaagugccccaaguacgucaaguccaccaagcuccgccucgccaccggccuccgcaacguccccuccauccagucccgcggccucuucggcgccaucgccggcuucaucgagggcggcuggaccggcauggucgacggcugguacggcuaccaccaccagaacgagcagggcuccggcuacgccgccgaccucaaguccacccagaacgccaucgacgagaucaccaacaaggucaacuccgucaucgagaagaugaacacccaguucaccgccgucggcaaggaguucaaccaccucgagaagcgcaucgagaaccucaacaagaaggucgacgacggcuuccucgacaucuggaccuacaacgccgagcuccucguccuccucgagaacgagcgcacccucgacuaccacgacuccaacgucaagaaccucuacgagaagguccgcucccagcucaagaacaacgccaaggagaucggcaacggcugcuucgaguucuaccacaagugcgacaacaccugcauggaguccgucaagaacggcaccuacgacuaccccaaguacuccgaggaggccaagcucaaccgcgaggagaucgacggcgucaagcucgaguccacccgcaucuaccagauccucgccaucuacuccaccgucgccuccucccucguccucgucgucucccucggcgccaucuccuucuggaugugcuccaacggcucccuccagugccgcaucugcaucuga

SEQ ID NO: 100820 - RNA, 1701 nt, Artificial Sequence
  derived and/or modified CDS sequence (opt2) from hemagglutinin__InfluenzaA__ADG21924
auggaggccauccucgucguccuccucuacaccuucgccaccgccaacgccgacacccucugcaucggcuaccacgccaacaacuccaccgacaccgucgacaccguccucgagaagaacgucaccgucacccacuccgucaaccuccucgagaacaagcacaacggcaagcucugcaagcuccgcggcgucgccccccuccaccucggcaagugcaacaucgccggcuggauccucggcaaccccgagugcgagucccucuccaccgccuccuccugguccuacaucgucgagaccuccuccuccgacaacggcaccugcuaccccggcgacuucaucgacuacgaggagcuccgcgagcagcucuccuccgucuccuccuucgagcgcuucgagaucuuccccaagaccuccuccuggcccaaccacgacuccaacaagggcgucaccgccgccugcccccacgccggcgccaaguccuucuacaagaaccucaucuggcucgucaagaagggcaacuccuaccccaagcucuccaaguccuacaucaacgacaagggcaaggagguccucguccucuggggcauccaccaccccuccaccuccgccgaccagcagucccucuaccagaacgccgacgccuacgucuucgucggcuccucccgcuacuccaagaaguucaagcccgagaucgccauccgccccaagguccgcgaccaggagggccgcaugaacuacuacuggacccucgucgagcccggcgacaagaucaccuucgaggccaccggcaaccucgucgucccccgcuacgccuucgccauggagcgcaacgccggcuccggcaucaucaucuccgacacccccguccacgacugcaacaccaccugccagacccccaagggcgccaucaacaccucccuccccuuccacaacauccaccccaucaccaucggcaagugccccaaguacgucaaguccaccaagcuccgccucgccaccggccuccgcaacguccccuccauccagucccgcggccucuucggcgccaucgccggcuucaucgagggcggcuggaccggcauggucgacggcugguacggcuaccaccaccagaacgagcagggcuccggcuacgccgccgaccucaaguccacccagaacgccaucgacgagaucaccaacaaggucaacuccgucaucgagaagaugaacacccaguucaccgccgucggcaaggaguucaaccaccucgagaagcgcaucgagaaccucaacaagaaggucgacgacggcuuccucgacaucuggaccuacaacgccgagcuccucguccuccucgagaacgagcgcacccucgacuaccacgacuccaacgucaagaaccucuacgagaagguccgcucccagcucaagaacaacgccaaggagaucggcaacggcugcuucgaguucuaccacaagugcgacaacaccugcauggaguccgucaagaacggcaccuacgacuaccccaaguacuccgaggaggccaagcucaaccgcgaggagaucgacggcgucaagcucgaguccacccgcaucuaccagauccucgccaucuacuccaccgucgccuccucccucguccucgucgucucccucggcgccaucuccuucuggaugugcuccaacggcucccuccagugccgcaucugcaucuga

SEQ ID NO: 100821 - RNA, 1701 nt, Artificial Sequence
  derived and/or modified CDS sequence (opt2) from hemagglutinin__InfluenzaA__ADG21925
augaaggccauccucgucguccuccucuacaccuucgccaccgccaacgccgacacccucugcaucggcuaccacgccaacaacuccaccgacaccgucgacaccguccucgagaagaacgucaccgucacccacuccgucaaccuccucgaggacaagcacaacggcaagcucugcaagcuccgcggcgucgccccccuccaccucggcaagugcaacaucgccggcuggauccucggcaaccccgagugcgagucccucuccaccgccuccuccugguccuacaucgucgagaccuccuccuccgacaacggcaccugcuaccccggcgacuucaucgacuacgaggagcuccgcgagcagcucuccuccgucuccuccuucgagcgcuucgagaucuuccccaagaccuccuccuggcccaaccacgacuccaacaagggcgucaccgccgccugcccccacgccggcgccaaguccuucuacaagaaccucaucuggcucgucaagaagggcaacuccuaccccaagcucuccaaguccuacaucaacgacaagggcaaggagguccucguccucuggggcauccaccaccccuccaccuccgccgaccagcagucccucuaccagaacgccgacgccuacgucuucgucggcaccucccgcuacuccaagaaguucaagcccgagaucgccauccgccccaagguccgcgaccaggagggccgcaugaacuacuacuggacccucgucgagcccggcgacaagaucaccuucgaggccaccggcaaccucgucgucccccgcuacgccuucgccauggagcgcgacgccggcuccggcaucaucaucuccgacacccccguccacgacugcaacaccaccugccagacccccaagggcgccaucaacaccucccuccccuuccagaacauccaccccaucaccaucggcaagugccccaaguacgucaaguccaccaagcuccgccucgccaccggccuccgcaacguccccuccauccagucccgcggccucuucggcgccaucgccggcuucaucgagggcggcuggaccggcauggucgacggcugguacggcuaccaccaccagaacgagcagggcuccggcuacgccgccgaccucaaguccacccagaacgccaucgacgagaucaccaacaaggucaacuccgucaucgagaagaugaacacccaguucaccgccgucggcaaggaguucaaccaccucgagaagcgcaucgagaaccucaacaagaagaucgacgacggcuuccucgacaucuggaccuacaacgccgagcuccucguccuccucgagaacgagcgcacccucgacuaccacgacuccaacgucaagaaccucuacgagaagguccgcucccagcucaagaacaacgccaaggagaucggcaacggcugcuucgaguucuaccacaagugcgacaacaccugcauggaguccgucaagaacggcaccuacgacuaccccaaguacuccgaggaggccaagcucaaccgcgaggagaucgacggcgucaagcucgaguccacccgcaucuaccagauccucgccaucuacuccaccgucgccuccucccucguccucgucgucucccucggcgccaucuccuucuggaugugcuccaacggcucccuccagugccgcaucugcaucuga

SEQ ID NO: 100822 - RNA, 1701 nt, Artificial Sequence
  derived and/or modified CDS sequence (opt2) from hemagglutinin__InfluenzaA__ADG21926
augaaggccauccucgucguccuccucuacaccuucgccaccgccaacgccgacacccucugcaucggcuaccacgccaacaacuccaccgacaccgucgacaccauccucgagaagaacgucaccgucacccacuccgucaaccuccucgaggacaagcacaacggcaagcucugcaagcuccgcggcgucgccccccuccaccucggcaagugcaacaucgccggcuggauccucggcaaccccgagugcgagucccucuccaccgccuccuccugguccuacaucgucgagaccuccuccuccgacaacggcaccugcuaccccggcgacuucaucgacuacgaggagcuccgcgagcagcucuccuccgucuccuccuucgagcgcuucgagaucuuccccaagaccuccuccuggcccaaccacgacuccaacaagggcgucaccgccgccugcccccacgccggcgccaaguccuucuacaagaaccucaucuggcucgucaagaagggcaacuccuaccccaagcucuccaaguccuacaucaacgacaagggcaaggagguccucguccucuggggcauccaccaccccuccaccuccgccgaccagcagucccucuaccagaacgccgacgccuacgucuucgucggcaccucccgcuacuccaagaaguucaagcccgagaucgccauccgccccaagguccgcgaccaggagggccgcaugaacuacuacuggacccucgucgagcccggcgacaagaucaccuucgaggccaccggcaaccucgucgucccccgcuacgccuucgccauggagcgcaacgccggcuccggcaucaucaucuccgacacccccguccacgacugcaacaccaccugccagacccccaagggcgccaucaacaccucccuccccuuccagaacauccaccccaucaccaucggcaagugccccaaguacgucaaguccaccaagcuccgccucgccaccggccuccgcaacguccccuccauccagucccgcggccucuucggcgccaucgccggcuucaucgagggcggcuggaccggcauggucgacggcugguacggcuaccaccaccagaacgagcagggcuccggcuacgccgccgaccucaaguccacccagaacgccaucgacgagaucaccaacaaggucaacuccgucaucgagaagaugaacacccaguucaccgccgucggcaaggaguucaaccaccucgagaagcgcaucgagaaccucaacaagaaggucgacgacggcuuccucgacaucuggaccuacaacgccgagcuccucguccuccucgagaacgagcgcaaccucgacuaccacgacuccaacgucaagaaccucuacgagaagguccgcucccagcucaagaacaacgccaaggagaucggcaacggcugcuucgaguucuaccacaagugcgacaacaccugcauggaguccgucaagaacggcaccuacgacuaccccaaguacuccgaggaggccaagcucaaccgcgaggagaucgacggcgucaagcucgaguccacccgcaucuaccagauccucgccaucuacuccaccgucgccuccucccucguccucgucgucucccucggcgccaucuccuucuggaugugcuccaacggcucccuccagugccgcaucugcaucuga

SEQ ID NO: 100823 - RNA, 1701 nt, Artificial Sequence; identical to SEQ ID NO: 98947
  derived and/or modified CDS sequence (opt2) from hemagglutinin__InfluenzaA__ADG21927

SEQ ID NO: 100824 - RNA, 1701 nt, Artificial Sequence
  derived and/or modified CDS sequence (opt2) from hemagglutinin__InfluenzaA__ADG21928
augaaggccacccucgucguccuccucuacaccuucgccaccgccaacgccgacacccucugcaucggcuaccacgccaacaacuccaccgacaccgucgacaccguccucgagaagaacgucaccgucacccacuccgucaaccuccucgaggacaagcacaacggcaagcucugcaagcuccgcggcgucgccccccuccaccucggcaagugcaacaucgccggcuggauccucggcaaccccgagugcgagucccucuccaccgccuccuccugguccuacaucgucgagaccuccuccuccgacaacggcaccugcuaccccggcgacuucaucgacuacgaggagcuccgcgagcagcucuccuccgucuccuccuucgagcgcuucgagaucuuccccaagaccuccuccuggcccaaccacgacuccaacaagggcgucaccgccgccugcccccacgccggcgccaaguccuucuacaagaaccucaucuggcucgucaagaagggcaacuccuaccccaagcucuccaaguccuacaucaacgacaagggcaaggagguccucguccucuggggcauccaccaccccuccaccuccgccgaccagcagucccucuaccagaacgccgacgccuacgucuucgucggcaccucccgcuacuccaagaaguucaagcccgagaucgccauccgcccccgcguccgcgaccaggagggccgcaugaacuacuacuggacccucgucgagcccggcgacaagaucaccuucgaggccaccggcaaccucgucgucccccgcuacgccuucgccauggagcgcgacgccggcuccggcaucaucaucuccgacacccccguccacgacugcaacaccaccugccagacccccaagggcgccaucaacaccucccuccccuuccagaacauccaccccaucaccaucggcaagugccccaaguacgucaaguccaccaagcuccgccucgccaccggccuccgcaacguccccuccauccagucccgcggccucuucggcgccaucgccggcuucaucgagggcggcuggaccggcauggucgacggcugguacggcuaccaccaccagaacgagcagggcuccggcuacgccgccgaccucaaguccacccagaacgccaucgacgagaucaccaacaaggucaacuccgucaucgagaagaugaacacccaguucaccgccgucggcaaggaguucaaccaccucgagaagcgcaucgagaaccucaacaagaagaucgacgacggcuuccucgacaucuggaccuacaacgccgagcuccucguccuccucgagaacgagcgcacccucgacuaccacgacuccaacgucaagaaccucuacgagaagguccgcucccagcucaagaacaacgccaaggagaucggcaacggcugcuucgaguucuaccacaagugcgacaacaccugcauggaguccgucaagaacggcaccuacgacuaccccaaguacuccgaggaggccaagcucaaccgcgaggagaucgacggcgucaagcucgaguccacccgcaucuaccagauccucgccaucuacuccaccgucgccuccucccucguccucgucgucucccucggcgccaucuccuucuggaugugcuccaacggcucccuccagugccgcaucugcaucuga

SEQ ID NO: 100825 - RNA, 1701 nt, Artificial Sequence; identical to SEQ ID NO: 100821
  derived and/or modified CDS sequence (opt2) from hemagglutinin__InfluenzaA__ADG21930

SEQ ID NO: 100826 - RNA, 1701 nt, Artificial Sequence; identical to SEQ ID NO: 98947
  derived and/or modified CDS sequence (opt2) from hemagglutinin__InfluenzaA__ADG21931

SEQ ID NO: 100827 - RNA, 1701 nt, Artificial Sequence; identical to SEQ ID NO: 98947
  derived and/or modified CDS sequence (opt2) from hemagglutinin__InfluenzaA__ADG21932

SEQ ID NO: 100828 - RNA, 1701 nt, Artificial Sequence; identical to SEQ ID NO: 98947
  derived and/or modified CDS sequence (opt2) from hemagglutinin__InfluenzaA__ADG21933

SEQ ID NO: 100829 - RNA, 1701 nt, Artificial Sequence; identical to SEQ ID NO: 100821
  derived and/or modified CDS sequence (opt2) from hemagglutinin__InfluenzaA__ADG21934

SEQ ID NO: 100830 - RNA, 1701 nt, Artificial Sequence
  derived and/or modified CDS sequence (opt2) from hemagglutinin__InfluenzaA__ADG21935
auggaggccauccucgucguccuccucuacaccuucgccaccgccaacgccgacacccucugcaucggcuaccacgccaacaacuccaccgacaccgucgacaccguccucgagaagaacgucaccgucacccacuccgucaaccuccucgaggacaagcacaacggcaagcucugcaagcuccgcggcgucgccccccuccaccucggcaagugcaacaucgccggcuggauccucggcaaccccgagugcgagucccucuccaccgccuccuccugguccuacaucgucgagaccuccuccuccgacaacggcaccugcuaccccggcgacuucaucgacuacgaggagcuccgcgagcagcucuccuccgucuccuccuucgagcgcuucgagaucuuccccaagaccuccuccuggcccaaccacgacuccaacaagggcgucaccgccgccugcccccacgccggcgccaaguccuucuacaagaaccucaucuggcucgucaagaagggcaacuccuaccccaagcucuccaaguccuacaucaacgacaagggcaaggagguccucguccucuggggcauccaccaccccuccaccuccgccgaccagcagucccucuaccagaacgccgacgccuacgucuucgucggcuccucccgcuacuccaagaaguucaagcccgagaucgccauccgccccaagguccgcgaccaggagggccgcaugaacuacuacuggacccucgucgagcccggcgacaagaucaccuucgaggccaccggcaaccucgucgucccccgcuacgccuucgccauggagcgcaacgccggcuccggcaucaucaucuccgacacccccguccacgacugcaacaccaacugccagacccccaacggcgccaucaacaccucccuccccuuccacaacauccaccccaucaccaucggcaagugccccaaguacgucaaguccaccaagcuccgccucgccaccggccuccgcaacguccccuccauccagucccgcggccucuucggcgccaucgccggcuucaucgagggcggcuggaccggcauggucgacggcugguacggcuaccaccaccagaacgagcagggcuccggcuacgccgccgaccucaaguccacccagaacgccaucgacgagaucaccaacaaggucaacuccgucaucgagaagaugaacacccaguucaccgccgucggcaaggaguucaaccaccucgagaagcgcaucgagaaccucaacaagaaggucgacgacggcuuccucgacaucuggaccuacaacgccgagcuccucguccuccucgagaacgagcgcacccucgacuaccacgacuccaacgucaagaaccucuacgagaagguccgcucccagcucaagaacaacgccaaggagaucggcaacggcugcuucgaguucuaccacaagugcgacaacaccugcauggaguccgucaagaacggcaccuacgacuaccccaaguacuccgaggaggccaagcucaaccgcgaggagaucgacggcgucaagcucgaguccacccgcaucuaccagauccucgccaucuacuccaccgucgccuccucccucguccucgucgucucccucggcgccaucuccuucuggaugugcuccaacggcucccuccagugccgcaucugcaucuga

SEQ ID NO: 100831 - RNA, 1701 nt, Artificial Sequence; identical to SEQ ID NO: 98947
  derived and/or modified CDS sequence (opt2) from hemagglutinin__InfluenzaA__ADG21936

SEQ ID NO: 100832 - RNA, 1701 nt, Artificial Sequence; identical to SEQ ID NO: 98947
  derived and/or modified CDS sequence (opt2) from hemagglutinin__InfluenzaA__ADG21937

SEQ ID NO: 100833 - RNA, 1701 nt, Artificial Sequence
  derived and/or modified CDS sequence (opt2) from hemagglutinin__InfluenzaA__ADG21938
auggaggccauccucgucguccuccucuacaccuucgccaccgccaacgccgacacccucugcaucggcuaccacgccaacaacuccaccgacaccgucgacaccguccucgagaagaacgucaccgucacccacuccgucaaccuccucgaggacaagcacaacggcaagcucugcaagcuccgcggcgucgccccccuccaccucggcaagugcaacaucgccggcuggauccucggcaaccccgagugcgagucccucuccaccgccuccuccugguccuacaucgucgagaccuccuccuccgacaacggcaccugcuaccccggcgacuucaucgacuacgaggagcuccgcgagcagcucuccuccgucuccuccuucgagcgcuucgagaucuuccccaagaccuccuccuggcccaaccacgacuccaacaagggcgucaccgccgccugcccccacgccggcgccaaguccuucuacaagaaccucaucuggcucgucaagaagggcaacuccuaccccaagcucuccaaguccuacaucaacgacaagggcaaggagguccucguccucuggggcauccaccaccccuccaccuccgccgaccagcagucccucuaccagaacgccgacgccuacgucuucgucggcuccucccgcuacuccaagaaguucaagcccgagaucgccauccgccccaagguccgcgaccaggagggccgcaugaacuacuacuggacccucgucgagcccggcgacaagaucaccuucgaggccaccggcaaccucgucgucccccgcuacgccuucgccauggagcgcaacgccggcuccggcaucaucaucuccgacacccccguccacgacugcaacaccaccugccagacccccaagggcgccaucaacaccucccuccccuuccacaacauccaccccaucaccaucggcaagugccccaaguacgucaaguccaccaagcuccgccucgccaccggccuccgcaacguccccuccauccagucccgcggccucuucggcgccaucgccggcuucaucgagggcggcuggaccggcauggucgacggcugguacggcuaccaccaccagaacgagcagggcuccggcuacgccgccgaccucaaguccacccagaacgccaucgacgagaucaccaacaaggucaacuccgucaucgagaagaugaacacccaguucaccgccgucggcaaggaguucaaccaccucgagaagcgcaucgagaaccucaacaagaaggucgacgacggcuuccucgacaucuggaccuacaacgccgagcuccucguccuccucgagaacgagcgcaaccucgacuaccacgacuccaacgucaagaaccucuacgagaagguccgcucccagcucaagaacaacgccaaggagaucggcaacggcugcuucgaguucuaccacaagugcgacaacaccugcauggaguccgucaagaacggcaccuacgacuaccccaaguacuccgaggaggccaagcucaaccgcgaggagaucgacggcgucaagcucgaguccacccgcaucuaccagauccucgccaucuacuccaccgucgccuccucccucguccucgucgucucccucggcgccaucuccuucuggaugugcuccaacggcucccuccagugccgcaucugcaucuga

SEQ ID NO: 100834 - RNA, 1701 nt, Artificial Sequence; identical to SEQ ID NO: 98947
  derived and/or modified CDS sequence (opt2) from hemagglutinin__InfluenzaA__ADG21939

SEQ ID NO: 100835 - RNA, 1701 nt, Artificial Sequence; identical to SEQ ID NO: 98947
  derived and/or modified CDS sequence (opt2) from hemagglutinin__InfluenzaA__ADG21940

SEQ ID NO: 100836 - RNA, 1701 nt, Artificial Sequence
  derived and/or modified CDS sequence (opt2) from hemagglutinin__InfluenzaA__ADG21941
auggaggccauccucgucguccuccucuacaccuucgccaccgccaacgccgacacccucugcaucggcuaccacgccaacaacuccaccgacaccgucgacaccguccucgagaagaacgucaccgucacccacuccgucaaccuccucgaggacaagcacaacggcaagcucugcaagcuccgcggcgucgccccccuccaccucggcaagugcaacaucgccggcuggauccucggcaaccccgagugcgagucccucuccaccgccuccuccugguccuacaucgucgagaccuccuccuccgacaacggcaccugcuaccccggcgacuucaucgacuacgaggagcuccgcgagcagcucuccuccgucuccuccuucgagcgcuucgagaucuuccccaagaccuccuccuggcccaaccacgacuccaacaagggcgucaccgccgccugcccccacgccggcgccaaguccuucuacaagaaccucaucuggcucgucaagaagggcaacuccuaccccaagcucuccaaguccuacaucaacgacaagggcaaggagguccucguccucuggggcauccaccaccccuccaccuccgccgaccagcagucccucuaccagaacgccgacgccuacgucuucgucggcuccucccgcuacuccaagaaguucaagcccgagaucgccauccgccccaagguccgcgaccaggagggccgcaugaacuacuacuggacccucgucgagcccggcgacaagaucaccuucgaggccaccggcaaccucgucgucccccgcuacgccuucgccauggagcgcaacgccggcuccggcaucaucaucuccgacacccccguccacgacugcaacaccaccugccagacccccaagggcgccaucaacaccucccuccccuuccacaacauccaccccaucaccaucggcaagugccccaaguacgucaaguccaccaagcuccgccucgccaccggccuccgcaacguccccuccauccagucccgcggccucuucggcgccaucgccggcuucaucgagggcggcuggaccggcauggucgacggcugguacggcuaccaccaccagaacgagcagggcuccggcuacgccgccgaccucaaguccacccagaacgccaucgacgagaucaccaacaaggucaacuccgucaucgagaagaugaacacccaguucaccgccgucggcaaggaguucaaccaccucgagaagcgcaucgagaaccucaacaagaagaucgacgacggcuuccucgacaucuggaccuacaacgccgagcuccucguccuccucgagaacgagcgcacccucgacuaccacgacuccaacgucaagaaccucuacgagaagguccgcucccagcucaagaacaacgccaaggagaucggcaacggcugcuucgaguucuaccacaagugcgacaacaccugcauggaguccgucaagaacggcaccuacgacuaccccaaguacuccgaggaggccaagcucaaccgcgaggagaucgacggcgucaagcucgaguccacccgcaucuaccagauccucgccaucuacuccaccgucgccuccucccucguccucgucgucucccucggcgccaucuccuucuggaugugcuccaacggcucccuccagugccgcaucugcaucuga

SEQ ID NO: 100837 - RNA, 1701 nt, Artificial Sequence
  derived and/or modified CDS sequence (opt2) from hemagglutinin__InfluenzaA__ADG21943
augaaggccauccucgucguccuccucuacaccuucgccaccgccaacgccgacacccucugcaucggcuaccacgccaacaacuccaccgacaccgucgacaccguccucgagaagaacgucaccgucacccacuccgucaaccuccucgaggacaagcacaacggcaagcucugcaagcuccgcggcgucgccccccuccaccucggcaagugcaacaucgccggcuggauccucggcaaccccgagugcgagucccucuccaccgccaacuccugguccuacaucgucgagaccuccuccuccgacaacggcaccugcuaccccggcgacuucaucgacuacgaggagcuccgcgagcagcucuccuccgucuccuccuucgagcgcuucgagaucuuccccaagaccuccuccuggcccaaccacgacuccaacaagggcgucaccgccgccugcccccacgccggcgccaaguccuucuacaagaaccucaucuggcucgucaagaagggcaacuccuaccccaagcucuccaaguccuacaucaacgacaagggcaaggagguccucguccucuggggcauccaccaccccuccaccuccgccgaccagcagucccucuaccagaacgccgacgccuacgucuucgucggcaccucccgcuacuccaagaaguucaagcccgagaucgccauccgccccaagguccgcgaccaggagggccgcaugaacuacuacuggacccucgucgagcccggcgacaagaucaccuucgaggccaccggcaaccucgucgucccccgcuacgccuucgccauggagcgcgacgccggcuccggcaucaucaucuccgacacccccguccacgacugcaacaccaccugccagacccccaagggcgccaucaacaccucccuccccuuccagaacauccaccccaucaccaucggcaagugccccaaguacgucaaguccaccaagcuccgccucgccaccggccuccgcaacguccccuccauccagucccgcggccucuucggcgccaucgccggcuucaucgagggcggcuggaccggcauggucgacggcugguacggcuaccaccaccagaacgagcagggcuccggcuacgccgccgaccucaaguccacccagaacgccaucgacgagaucaccaacaaggucaacuccgucaucgagaagaugaacacccaguucaccgccgucggcaaggaguucaaccaccucgagaagcgcaucgagaaccucaacaagaagaucgacgacggcuuccucgacaucuggaccuacaacgccgagcuccucguccuccucgagaacgagcgcacccucgacuaccacgacuccaacgucaagaaccucuacgagaagguccgcucccagcucaagaacaacgccaaggagaucggcaacggcugcuucgaguucuaccacaagugcgacaacaccugcauggaguccgucaagaacggcaccuacgacuaccccaaguacuccgaggaggccaagcucaaccgcgaggagaucgacggcgucaagcucgaguccacccgcaucuaccagauccucgccaucuacuccaccgucgccuccucccucguccucgucgucucccucggcgccaucuccuucuggaugugcuccaacggcucccuccagugccgcaucugcaucuga

SEQ ID NO: 100838 - RNA, 1701 nt, Artificial Sequence
  derived and/or modified CDS sequence (opt2) from hemagglutinin__InfluenzaA__ADG21944
auggaggccauccucaucguccuccucuacaccuucgccaccgccaacgccgacacccucugcaucggcuaccacgccaacaacuccaccgacaccgucgacaccguccucgagaagaacgucaccgucacccacuccgucaaccuccucgaggacaagcacaacggcaagcucugcaagcuccgcggcgucgccccccuccaccucggcaagugcaacaucgccggcuggauccucggcaaccccgagugcgagucccucuccaccgccuccuccugguccuacaucgucgagaccuccuccuccgacaacggcaccugcuaccccggcgacuucaucgacuacgaggagcuccgcgagcagcucuccuccgucuccuccuucgagcgcuucgagaucuuccccaagaccuccuccuggcccaaccacgacuccaacaagggcgucaccgccgccugcccccacgccggcgccaaguccuucuacaagaaccucaucuggcucgucaagaagggcaacuccuaccccaagcucuccaaguccuacaucaacgacaagggcaaggagguccucguccucuggggcauccaccaccccuccaccuccgccgaccagcagucccucuaccagaacgccgacgccuacgucuucgucggcuccucccgcuacuccaagaaguucaagcccgagaucgccauccgccccaagguccgcgaccaggagggccgcaugaacuacuacuggacccucgucgagcccggcgacaagaucaccuucgaggccaccggcaaccucgucgucccccgcuacgccuucgccauggagcgcaacgccggcuccggcaucaucaucuccgacacccccguccacgacugcaacaccaccugccagacccccaagggcgccaucaacaccucccuccccuuccacaacauccaccccaucaccaucggcaagugccccaaguacgucaaguccaccaagcuccgccucgccaccggccuccgcaacguccccuccauccagucccgcggccucuucggcgccaucgccggcuucaucgagggcggcuggaccggcauggucgacggcugguacggcuaccaccaccagaacgagcagggcuccggcuacgccgccgaccucaaguccacccagaacgccaucgacgagaucaccaacaaggucaacuccgucaucgagaagaugaacacccaguucaccgccgucggcaaggaguucaaccaccucgagaagcgcaucgagaaccucaacaagaaggucgacgacggcuuccucgacaucuggaccuacaacgccgagcuccucguccuccucgagaacgagcgcacccucgacuaccacgacuccaacgucaagaaccucuacgagaagguccgcucccagcucaagaacaacgccaaggagaucggcaacggcugcuucgaguucuaccacaagugcgacaacaccugcauggaguccgucaagaacggcaccuacgacuaccccaaguacuccgaggaggccaagcucaaccgcgaggagaucgacggcgucaagcucgaguccacccgcaucuaccagauccucgccaucuacuccaccgucgccuccucccucguccucgucgucucccucggcgccaucuccuucuggaugugcuccaacggcucccuccagugccgcaucugcaucuga

SEQ ID NO: 100839 - RNA, 1701 nt, Artificial Sequence; identical to SEQ ID NO: 98947
  derived and/or modified CDS sequence (opt2) from hemagglutinin__InfluenzaA__ADG21945

SEQ ID NO: 100840 - RNA, 1701 nt, Artificial Sequence; identical to SEQ ID NO: 98947
  derived and/or modified CDS sequence (opt2) from hemagglutinin__InfluenzaA__ADG21946

SEQ ID NO: 100841 - RNA, 1701 nt, Artificial Sequence; identical to SEQ ID NO: 98947
  derived and/or modified CDS sequence (opt2) from hemagglutinin__InfluenzaA__ADG21947

SEQ ID NO: 100842 - RNA, 1701 nt, Artificial Sequence
  derived and/or modified CDS sequence (opt2) from hemagglutinin__InfluenzaA__ADG21948
auggaggccauccucgucguccuccucuacaccuucgccaccgccaacgccgacacccucugcaucggcuaccacgccaacaacuccaccgacaccgucgacaccguccucgagaagaacgucaccgucacccacuccgucaaccuccucgaggacaagcacaacggcaagcucugcaagcuccgcggcgucgccccccuccaccucggcaagugcaacaucgccggcuggauccucggcaaccccgagugcgagucccucuccaccgccuccuccugguccuacaucgucgagaccuccuccuccgacaacggcaccugcuaccccggcgacuucaucgacuacgaggagcuccgcgagcagcucuccuccgucuccuccuucgagcgcuucgagaucuuccccaagaccuccuccuggcccaaccacgacuccaacaagggcgucaccgccgccugcccccacgccggcgccaaguccuucuacaagaaccucaucuggcucgucaagaagggcaacuccuaccccaagcucuccaaguccuacaucaacgacaagggcaaggagguccucguccucuggggcauccaccaccccuccaccuccgccgaccagcagucccucuaccagaacgccgacgccuacgucuucgucggcuccucccgcuacuccaagaaguucaagcccgagaucgccauccgccccaagguccgcgaccaggagggccgcaugaacuacuacuggacccucgucgagcccggcgacaagaucaccuucgaggccaccggcaaccucgucgucccccgcuacgccuucgccauggagcgcaacgccggcuccggcaucaucaucuccgacacccccguccacgacugcaacaccaccugccagacccccaagggcgccaucaacaccucccuccccuuccacaacauccaccccaucaccaucggcaagugccccaaguacgucaaguccaccaagcuccgccucgccaccggccuccgcaacguccccuccauccagucccgcggccucuucggcgccaucgccggcuucaucgagggcggcuggaccggcauggucgacggcugguacggcuaccaccaccagaacgagcagggcuccggcuacgccgccgaccucaaguccacccagaacgccaucgacgagaucaccaacaaggucaacuccgucaucgagaagaugaacacccaguucaccgccgucggcaaggaguucaaccaccucgagaagcgcaucgagaaccucaacaagaaggucgacgacggcuuccucgacaucuggaccuacaacgccgagcuccucguccuccucgagaacgagcgcacccucgaccaccacgacuccaacgucaagaaccucuacgagaagguccgcucccagcucaagaacaacgccaaggagaucggcaacggcugcuucgaguucuaccacaagugcgacaacaccugcauggaguccgucaagaacggcaccuacgacuaccccaaguacuccgaggaggccaagcucaaccgcgaggagaucgacggcgucaagcucgaguccacccgcaucuaccagauccucgccaucuacuccaccgucgccuccucccucguccucgucgucucccucggcgccaucuccuucuggaugugcuccaacggcucccuccagugccgcaucugcaucuga

SEQ ID NO: 100843 - RNA, 1701 nt, Artificial Sequence
  derived and/or modified CDS sequence (opt2) from hemagglutinin__InfluenzaA__ADG27794
augaaggccauccucgucguccuccucuacaccuucgccaccgccaacgccgacacccucugcaucggcuaccacgccaacaacuccaccgacaccgucgacaccguccucgagaagaacgucaccgucacccacuccgucaaccuccucgaggacaagcacaacggcaagcucugcaagcuccgcggcgucgccccccuccaccucggcaagugcaacaucgccggcuggauccucggcaaccccgagugcgagucccucuccaccgccuccuccugguccuacaucgucgagaccuccuccuccgacaacggcaccugcuaccccggcgacuucaucgacuacgaggagcuccgcgagcagcucuccuccgucuccuccuucgagcgcuucgagaucuuccccaagaccuccuccuggcccaaccacgacuccaacaagggcgucaccgccgccugcccccacgccggcgccaaguccuucuacaagaaccucaucuggcucgucaagaagggcaacuccuaccccaagcucuccaaguccuacaucaacgacaagggcaaggagguccucguccucuggggcauccaccaccccuccaccuccgccgaccagcagucccucuaccagaacgccgacgccuacgucuucgucggcaccucccgcuacuccaagaaguucaagcccgagaucgccauccgccccaagguccgcgaccaggagggccgcaugaacuacuacuggacccucgucgagcccggcgacaagaucaccuucgaggccaccggcaaccucgucgucccccgcuacgccuucgccauggagcgcaacgccggcuccggcaucaucaucuccgacacccccguccacgacugcaacaccaccugccagacccccaagggcgccaucaacaccucccuccccuuccagaacauccaccccaucaccaucggcaagugccccaaguacgucaaguccaccaagcuccgccucgccaccggccuccgcaacguccccuccauccagucccgcggccucuucggcgccaucgccggcuucaucgagggcggcuggaccggcauggucgacggcugguacggcuaccaccaccagaacgagcagggcuccggcuacgccgccgaccucaaguccacccagaacgccaucgacgagaucaccaacaaggucaacuccgucaucgagaagaugaacacccaguucaccgccgucggcaaggaguucaaccaccucgagaagcgcaucgagaaccucaacaagaaggucgacgacggcuuccucgacaucuggaccuacaacgccgagcuccucguccuccucgagaacgagcgcacccucgacuaccacgacuccaacgucaagaaccucuacgagaagguccgcucccagcucaagaacaacgccaaggagaucggcaacggcugcuucgaguucuaccacaagugcgacaacaccugcauggaguccgucaagaacggcaccuacgacuaccccaaguacuccgaggaggccaagcucaaccgcgaggagaucgacggcgucaagcucgaguccacccgcaccuaccagauccucgccaucuacuccaccgucgccuccucccucguccucgucgucucccucggcgccaucuccuucuggaugugcuccaacggcucccuccagugccgcaucugcaucuga

SEQ ID NO: 100844 - RNA, 1701 nt, Artificial Sequence; identical to SEQ ID NO: 98692
  derived and/or modified CDS sequence (opt2) from hemagglutinin__InfluenzaA__ADG27948

SEQ ID NO: 100845 - RNA, 1701 nt, Artificial Sequence; identical to SEQ ID NO: 98692
  derived and/or modified CDS sequence (opt2) from hemagglutinin__InfluenzaA__ADG27966

SEQ ID NO: 100846 - RNA, 1701 nt, Artificial Sequence
  derived and/or modified CDS sequence (opt2) from hemagglutinin__InfluenzaA__ADG27974
augaaggccauccucgucguccuccucuacaccuucgccaccgccaacgccgacacccucugcaucggcuaccacgccaacaacuccaccgacaccgucgacaccguccucgagaagaacgucaccgucacccacuccgucaaccuccucgaggacaagcacaacggcaagcucugcaagcuccgcggcgucgccccccuccaccucggcaagugcaacaucgccggcuggauccucggcaaccccgagugcgagucccucuccaccgccuccuccugguccuacaucgucgagaccuccuccuccgacaacggcaccugcuaccccggcgacuucaucgacuacgaggagcuccgcgagcagcucuccuccgucuccuccuucgagcgcuucgagaucuuccccaagaccuccuccuggcccaaccacgacuccaacaagggcgucaccgccgccugcccccacgccggcgccaaguccuucuacaagaaccucaucuggcucgucaagaagggcaacuccuaccccaagcucuccaaguccuacaucaacgacaagggcaaggagguccucguccucuggggcauccaccaccccuccaccuccgccgaccagcagucccucuaccagaacgccgacgccuacgucuucgucggcuccucccgcuacuccaagaaguucaagcccgagaucgccauccgccccaagguccgcgaccaggagggccgcaugaacuacuacuggacccucgucgagcccggcgacaagaucaccuucgaggccaccggcaaccucgucgucccccgcuacgccuucgccauggagcgcaacgccggcuccggcaucaucaucuccgacacccccguccacgacugcaacaccaccugccagacccccaagggcgccaucaacaccucccuccccuuccagaacauccaccccaucaccaucggcaagugccccaaguacgucaaguccaccaagcuccgccucgccaccggccuccgcaacguccccuccauccagucccgcggccucuucggcgccaucgccggcuucaucgagggcggcuggaccggcauggucgacggcugguacggcuaccaccaccagaacgagcagggcuccggcuacgccgccgaccucaaguccacccagaacgccaucgacgagaucaccaacaaggucaacuccgucaucgagaagaugaacacccaguucaccgccgucggcaaggaguucaaccaccucgagaagcgcaucgagaaccucaacaagaaggucgacgacggcuuccucgacaucuggaccuacaacgccgagcuccucguccuccucgagaacgagcgcacccucgacuaccacgacuccaacgucaagaaccucuacgagaagguccgcucccagcucaagaacaacgccaaggagaucggcaacggcugcuucgaguucuaccacaagugcgacaacaccugcauggaguccgucaagaacggcaccuacgacuaccccaaguacuccgaggaggccaagcucaaccgcgaggagaucgacggcgucaagcucgaguccacccgcaucuaccagauccucgccaucuacuccaccgucgccuccucccucauccucgucgucucccucggcgccaucuccuucuggaugugcuccaacggcucccuccagugccgcaucugcaucuga

SEQ ID NO: 100847 - RNA, 1701 nt, Artificial Sequence
  derived and/or modified CDS sequence (opt2) from hemagglutinin__InfluenzaA__ADG27982
augaaggccauccucgucguccuccucuacaccuucgccaccgccaacgccgacacccucugcaucggcuaccacgccaacaacuccaccgacaccgucgacaccguccucgagaagaacgucaccgucacccacuccgucaaccuccucgaggacaagcacaacggcaagcucugcaagcuccgcggcgucgccccccuccaccucggcaagugcaacaucgccggcuggauccucggcaaccccgagugcgagucccucuccaccgccuccuccugguccuacaucgucgagaccuccuccuccgacaacggcaccugcuaccccggcgacuucaucgacuacgaggagcuccgcgagcagcucuccuccgucuccuccuucgagcgcuucgagaucuuccccaagaccuccuccuggcccaaccacgacuccaacaagggcgucaccgccgccugcccccacgccggcgccaaguccuucuacaagaaccucaucuggcucgucaagaagggcaacuccuaccccaagcucuccaaguccuacaucaacgacaagggcaaggagguccucguccucuggggcauccaccaccccuccaccuccgccgaccagcagucccucuaccagaacgccgacgccuacgucuucgucggcuccucccgcuacuccaagaaguucaagcccgagaucgccauccgccccaagguccgcgaccaggagggccgcaugaacuacuacuggacccucgucgagcccggcgacaagaucaccuucgaggccaccggcaaccucgucgucccccgcuacgccuucgccauggagcgcaacgccggcuccggcaucaucaucuccgacacccccguccacgacugcaacaccaccugccagacccccaagggcgccaucaacaccucccuccccuuccagaacauccaccccaucaccaucggcaagugccccaaguacgucaaguccaccaagcuccgccucgccaccggccuccgcaacguccccuccauccagucccgcggccucuucggcgccaucgccggcuucaucgagggcggcuggaccggcauggucgacggcugguacggcuaccaccaccagaacgagcagggcuccggcuacgccgccgaccucaaguccacccagaacgccaucgacgagaucaccaacaaggucaacuccgucaucgagaagaugaacacccaguucaccgccgucggcaaggaguucaaccaccucgagaagcgcaucgagaaccucaacaagaaggucgacgacggcuuccucgacaucuggaccuacaacgccgagcuccucguccuccucgagaacgagcgcacccucgacuaccacgacuccaacgucaagaagcucuacgagaagguccgcucccagcucaagaacaacgccaaggagaucggcaacggcugcuucgaguucuaccacaagugcgacaacaccugcauggaguccgucaagaacggcaccuacgacuaccccaaguacuccgaggaggccaagcucaaccgcgaggagaucgacggcgucaagcucgaguccacccgcaucuaccagauccucgccaucuacuccaccgucgccuccucccucguccucgucgucucccucggcgccaucuccuucuggaugugcuccaacggcucccuccagugccgcaucugcaucuga

SEQ ID NO: 100848 - RNA, 1701 nt, Artificial Sequence; identical to SEQ ID NO: 98692
  derived and/or modified CDS sequence (opt2) from hemagglutinin__InfluenzaA__ADG27988

SEQ ID NO: 100849 - RNA, 1701 nt, Artificial Sequence; identical to SEQ ID NO: 98692
  derived and/or modified CDS sequence (opt2) from hemagglutinin__InfluenzaA__ADG27997

SEQ ID NO: 100850 - RNA, 1701 nt, Artificial Sequence; identical to SEQ ID NO: 98692
  derived and/or modified CDS sequence (opt2) from hemagglutinin__InfluenzaA__ADG28011

SEQ ID NO: 100851 - RNA, 1701 nt, Artificial Sequence; identical to SEQ ID NO: 100257
  derived and/or modified CDS sequence (opt2) from hemagglutinin__InfluenzaA__ADG42093

SEQ ID NO: 100852 - RNA, 1701 nt, Artificial Sequence; identical to SEQ ID NO: 99869
  derived and/or modified CDS sequence (opt2) from hemagglutinin__InfluenzaA__ADG42103

SEQ ID NO: 100853 - RNA, 1701 nt, Artificial Sequence; identical to SEQ ID NO: 99058
  derived and/or modified CDS sequence (opt2) from hemagglutinin__InfluenzaA__ADG42113

SEQ ID NO: 100854 - RNA, 1701 nt, Artificial Sequence; identical to SEQ ID NO: 100257
  derived and/or modified CDS sequence (opt2) from hemagglutinin__InfluenzaA__ADG42123

SEQ ID NO: 100855 - RNA, 1701 nt, Artificial Sequence
  derived and/or modified CDS sequence (opt2) from hemagglutinin__InfluenzaA__ADG42133
augaaggccauccucgucguccuccucuacaccuucgccaccgccaacgccgacacccucugcaucggcuaccacgccaacaacuccaccgacaccgucgacaccguccucgagaagaacgucaccgucacccacuccgucaaccuccucgaggacaagcacaacggcaagcucugcaagcuccgcggcgucgccccccuccaccucggcaagugcaacaucgccggcuggauccucggcaaccccgagugcgagucccucuccaccgccuccuccugguccuacaucgucgagaccuccuccuccgacaacggcaccugcuaccccggcgacuucaucgacuacgaggagcuccgcgagcagcucuccuccgucuccuccuucgagcgcuucgagaucuuccccaagaccuccuccuggcccaaccacgacuccaacaagggcgucaccgccgccugccccuacgccggcgccaaguccuucuacaagaaccucaucuggcucgucaagaagggcaacuccuaccccaagcucuccaaguccuacaucaacgacaagggcaaggagguccucguccucuggggcauccaccaccccuccaccuccgccgaccagcagucccucuaccagaacgccgacgccuacgucuucgucggcaccucccgcuacuccaagaaguucaagcccgagaucgccauccgccccaagguccgcgaccaggagggccgcaugaacuacuacuggacccucgucgagcccggcgacaagaucaccuucgaggccaccggcaaccucgucgucccccgcuacgccuucgccauggagcgcaacgccggcuccggcaucaucaucuccgacacccccguccacgacugcaacaccaccugccagacccccaagggcgccaucaacaccucccuccccuuccagaacauccaccccaucaccaucggcaagugccccaaguacgucaaguccaccaagcuccgccucgucaccggccuccgcaacguccccuccauccagucccgcggccucuucggcgccaucgccggcuucaucgagggcggcuggaccggcauggucgacggcugguacggcuaccaccaccagaacgagcagggcuccggcuacgccgccgaccucaaguccacccagcacgccaucgacgagaucaccaacaaggucaacuccgucaucgagaagaugaacacccaguucaccgccgucggcaaggaguucaaccaccucgagaagcgcaucgagaaccucaacaagaaggucgacgacggcuuccucgacaucuggaccuacaacgccgagcuccucguccuccucgagaacgagcgcacccucgacuaccacgacuccaacgucaagaaccucuacgagaagguccgcucccagcucaagaacaacgccaaggagaucggcaacggcugcuucgaguucuaccacaagugcgacaacaccugcauggaguccgucaagaacggcaccuacgacuaccccaaguacuccgaggaggccaagcucaaccgcgaggagaucgacggcgucaagcucgaguccacccgcaucuaccagauccucgccaucuacuccaccgucgccuccucccucguccucgucgucucccucggcgccaucuccuucuggaugugcuccaacggcucccuccagugccgcaucugcaucuga

SEQ ID NO: 100856 - RNA, 1701 nt, Artificial Sequence
  derived and/or modified CDS sequence (opt2) from hemagglutinin__InfluenzaA__ADG42143
augaaggccauccucgucguccuccucuacaccuucgccaccgccaacgccgacacccucugcaucggcuaccacgccaacaacuccaccgacaccgucgacaccguccucgagaagaacgucaccgucacccacuccgucaacauccucgaggacaagcacaacggcaagcucugcaagcuccgcggcgucgccccccuccaccucggcaagugcaacaucgccggcuggauccucggcaaccccgagugcgagucccucuccaccgccuccuccugguccuacaucgucgagaccuccuccuccgacaacggcaccugcuaccccggcgacuucaucgacuacgaggagcuccgcgagcagcucuccuccgucuccuccuucgagcgcuucgagaucuuccccaagaccuccuccuggcccaaccacgacuccaacaagggcgucaccgccgccugcccccacgccggcgccaaguccuucuacaagaaccucaucuggcucgucaagaagggcaacuccuaccccaagcucuccaaguccuacaucaacgacaagggcaaggagguccucguccucuggggcauccaccaccccuccaccuccgccgaccagcagucccucuaccagaacgccgacgccuacgucuucgucggcuccucccgcuacuccaagaaguucaagcccgagaucgccauccgccccaagguccgcgaccaggagggccgcaugaacuacuacuggacccucgucgagcccggcgacaagaucaccuucgaggccaccggcaaccucgucgucccccgcuacgccuucgccauggagaagaacgccggcuccggcaucaucaucuccgacacccccguccacgacugcaacaccaccugccagacccccaagggcgccaucaacaccucccuccccuuccagaacauccaccccaucaccaucggcaagugccccaaguacgucaaguccaccaagcuccgccucgccaccggccuccgcaacguccccuccauccagucccgcggccucuucggcgccaucgccggcuucaucgagggcggcuggaccggcauggucgacggcugguacggcuaccaccaccagaacgagcagggcuccggcuacgccgccgaccucaaguccacccagaacgccaucgacgagaucaccaacaaggucaacuccgucaucgagaagaugaacacccaguucaccgccgucggcaaggaguucaaccaccucgagaagcgcaucgagaaccucaacaagaaggucgacgacggcuuccucgacaucuggaccuacaacgccgagcuccucguccuccucgagaacgagcgcacccucgacuaccacgacuccaacgucaagaaccucuacgagaagguccgcucccagcucaagaacaacgccaaggaggucggcaacggcugcuucgaguucuaccacaagugcgacaacaccugcauggaguccgucaagaacggcaccuacgacuaccccaaguacuccgaggaggccaagcucaaccgcgaggagaucgacggcgucaagcucgaguccacccgcaucuaccagauccucgccaucuacuccaccgccgccuccucccucguccucgucgucucccucggcgccaucuccuucuggaugugcuccaacggcucccuccagugccgcaucugcaucuga

SEQ ID NO: 100857 - RNA, 1701 nt, Artificial Sequence
  derived and/or modified CDS sequence (opt2) from hemagglutinin__InfluenzaA__ADG42153
augaaggccauccucgucguccuccucuacaccuucgccaccgccaacgccgacacccucugcaucggcuaccacgccaacaacuccaccgacaccgucgacaccguccucgagaagaacgucaccgucacccacuccgucaaccuccucgaggacaagcacaacggcaagcucugcaagcuccgcggcgucgccccccuccaccucggcaagugcaacaucgccggcuggauccucggcaaccccgagugcgagucccucuccaccgccuccuccugguccuacaucgucgagaccuccuccuccgacaacggcaccugcuaccccggcgacuucaucgacuacgaggagcuccgcgagcagcucuccuccgucuccuccuucgagcgcuucgagaucuuccccaagaccuccuccuggcccaaccacgacuccaacaagggcaucaccgccgccugcccccacgccggcgccaaguccuucuacaagaaccucaucuggcucgucaagaagggcaacuccuaccccaagcucuccaaguccuacaucaacgacaagggcaaggagguccucguccucuggggcauccaccaccccuccaccuccgccgaccagcagucccucuaccagaacgccgacgccuacgucuucgucggcaccucccgcuacuccaagaaguucaagcccgagaucgccauccgccccaagguccgcgaccaggagggccgcaugaacuacuacuggacccucgucgagcccggcgacaagaucaccuucgaggccaccggcaaccucgucgucccccgcuacgccuucgccauggagcgcaacgccggcuccggcaucaucaucuccgacacccccguccucgacugcaacaccaccugccagacccccaagggcgccaucaacaccucccuccccuuccagaacauccaccccaucaccaucggcaagugccccaaguacgucaaguccaccaagcuccgccucgccaccggccuccgcaacguccccuccauccagucccgcggccucuucggcgccaucgccggcuucaucgagggcggcuggaccggcauggucgacggcugguacggcuaccaccaccagaacgagcagggcuccggcuacgccgccgaccucaaguccacccagaacgccaucgacgagaucaccaacaaggucaacuccgucaucgagaagaugaacacccaguucaccgccgucggcaaggaguucaaccaccucgagaagcgcaucgagaaccucaacaagaaggucgacgacggcuuccucgacaucuggaccuacaacgccgagcuccucguccuccucgagaacgagcgcacccucgacuaccacgacuccaacgucaagaaccucuacgagaagguccgcucccagcucaagaacaacgccaaggagaucggcaacggcugcuucgaguucuaccacaagugcgacaacaccugcauggaguccgucaagaacggcaccuacgacuaccccaaguacuccgaggaggccaagcucaaccgcgaggagaucgacggcgucaagcucgaguccacccgcaucuaccagauccucgccaucuacuccaccgucgccuccucccucguccucgucgucucccucggcgccaucuccuucuggaugugcuccaacggcucccuccagugccgcaucugcaucuga

SEQ ID NO: 100858 - RNA, 1701 nt, Artificial Sequence; identical to SEQ ID NO: 98705
  derived and/or modified CDS sequence (opt2) from hemagglutinin__InfluenzaA__ADG42193

SEQ ID NO: 100859 - RNA, 1701 nt, Artificial Sequence; identical to SEQ ID NO: 98705
  derived and/or modified CDS sequence (opt2) from hemagglutinin__InfluenzaA__ADG42213

SEQ ID NO: 100860 - RNA, 1701 nt, Artificial Sequence; identical to SEQ ID NO: 98705
  derived and/or modified CDS sequence (opt2) from hemagglutinin__InfluenzaA__ADG42233

SEQ ID NO: 100861 - RNA, 1701 nt, Artificial Sequence
  derived and/or modified CDS sequence (opt2) from hemagglutinin__InfluenzaA__ADG42243
augaaggccauccucgucguccuccucuacaccuucgccaccgccaacgccgacacccucugcaucggcuaccacgccaacaacuccaccgacaccgucgacaccguccucgagaagaacgucaccgucacccacuccgucaaccuccucgaggacaagcacaacggcaagcucugcaagcuccgcggcgucgccccccuccaccucggcaagugcaacaucgccggcuggauccucggcaaccccgagugcgagucccucuccaccgccuccuccugguccuacaucgucgagaccuccuccuccgacaacggcaccugcuaccccggcgacuucaucgacuacgaggagcuccgcgagcagcucuccuccgucuccuccuucgagcgcuucgagaucuuccccaagaccuccuccuggcccaaccacgacuccaacaagggcgucaccgccgccugcccccacgccggcgccaaguccuucuacaagaaccucaucuggcucgucaagaagggcaacuccuaccccaagcucuccaaguccuacaucaacgacaagggcaaggagguccucguccucuggggcauccaccaccccuccaccuccgccgaccagcagucccucuaccagaacgccgacgccuacgucuucgucggcaccucccgcuacuccaagaaguucaagcccgagaucgccauccgccccaagguccgcgaccaggagggccgcaugaacuacuacuggacccucgucgagcccggcgacaagaucaccuucgaggccaccggcaaccucgucgucccccgcuacgccuucgccauggagcgcaacgccggcuccggcaucaucaucuccgacacccccguccucgacugcaacaccaccugccagacccccaagggcgccaucaacaccucccuccccuuccagaacauccaccccaucaccaucggcaagugccccaaguacgucaaguccaccaagcuccgccucgccaccggccuccgcaacguccccuccauccagucccgcggccucuucggcgccaucgccggcuucaucgagggcggcuggaccggcauggucgacggcugguacggcuaccaccaccagaacgagcagggcuccggcuacgccgccgaccucaaguccacccagcacgccaucgacgagaucaccaacaaggucaacuccgucaucgagaagaugaacacccaguucaccgccgucggcaaggaguucaaccaccucgagaagcgcaucgagaaccucaacaagaaggucgacgacggcuuccucgacaucuggaccuacaacgccgagcuccucguccuccucgagaacgagcgcacccucgacuaccacgacuccaacgucaagaaccucuacgagaagguccgcucccagcucaagaacaacgccaaggagaucggcaacggcugcuucgaguucuaccacaagugcgacaacaccugcauggaguccgucaagaacggcaccuacgacuaccccaaguacuccgaggaggccaagcucaaccgcgaggagaucgacggcgucaagcucgaguccacccgcaucuaccagauccucgccaucuacuccaccgucgccuccucccucguccucgucgucucccucggcgccaucuccuucuggaugugcuccaacggcucccuccagugccgcaucugcaucuga

SEQ ID NO: 100862 - RNA, 1701 nt, Artificial Sequence; identical to SEQ ID NO: 100125
  derived and/or modified CDS sequence (opt2) from hemagglutinin__InfluenzaA__ADG42253

SEQ ID NO: 100863 - RNA, 1701 nt, Artificial Sequence; identical to SEQ ID NO: 98705
  derived and/or modified CDS sequence (opt2) from hemagglutinin__InfluenzaA__ADG42263

SEQ ID NO: 100864 - RNA, 1701 nt, Artificial Sequence; identical to SEQ ID NO: 99806
  derived and/or modified CDS sequence (opt2) from hemagglutinin__InfluenzaA__ADG42273

SEQ ID NO: 100865 - RNA, 1701 nt, Artificial Sequence; identical to SEQ ID NO: 99806
  derived and/or modified CDS sequence (opt2) from hemagglutinin__InfluenzaA__ADG42283

SEQ ID NO: 100866 - RNA, 1701 nt, Artificial Sequence; identical to SEQ ID NO: 100388
  derived and/or modified CDS sequence (opt2) from hemagglutinin__InfluenzaA__ADG42293

SEQ ID NO: 100867 - RNA, 1701 nt, Artificial Sequence
  derived and/or modified CDS sequence (opt2) from hemagglutinin__InfluenzaA__ADG42303
augaaggccauccucgucguccuccucuacaccuucgccaccgccaacgccgacacccucugcaucggcuaccacgccaacaacuccaccgacaccgucgacaccguccucgagaagaacgucaccgucacccacuccgucaaccuccucgaggacaagcacaacggcaagcucugcaagcucaagggcgucgccccccuccaccucggcaagugcaacaucgccggcuggauccucggcaaccccgagugcgagucccucuccaccgccuccuccugguccuacaucgucgagaccuccuccuccgacaacggcaccugcuaccccggcgacuucaucgacuacgaggagcuccgcgagcagcucuccuccgucuccuccuucgagcgcuucgagaucuuccccaagaccuccuccuggcccaaccacgacuccaacaagggcgucaccgccgccugcccccacgccggcgccaaguccuucuacaagaaccucaucuggcucgucaagaagggcaacuccuaccccaagcucuccaaguccuacaucaacgacaagggcaaggagguccucguccucuggggcauccaccaccccuccaccuccgccgaccagcagucccucuaccagaacgccgacgccuacgucuucgucggcaccucccgcuacuccaagaaguucaagcccgagaucgccauccgccccaagguccgcgaccaggagggccgcaugaacuacuacuggacccucgucgagcccggcgacaagaucaccuucgaggccaccggcaaccucgucgucccccgcuacgccuucgccauggagcgcaacgccggcuccggcaucgucaucuccgacacccccguccacgacugcaacaccaccugccagacccccaagggcgccaucaacaccucccuccccuuccagaacauccaccccaucaccaucggcaagugccccaaguacgucaaguccaccaagcuccgccucgccaccggccuccgcaacguccccuccauccagucccgcggccucuucggcgccaucgccggcuucaucgagggcggcuggaccggcauggucgacggcugguacggcuaccaccaccagaacgagcagggcuccggcuacgccgccgaccucaaguccacccagaacgccaucgacgagaucaccaacaaggucaacuccgucaucgagaagaugaacacccaguucaccgccgucggcaaggaguucaaccaccucgagaagcgcaucgagaaccucaacaagaaggucgacgacggcuuccucgacaucuggaccuacaacgccgagcuccucguccuccucgagaacgagcgcacccucgacuaccacgacuccaacgucaagaaccucuacgagaagguccgcucccagcucaagaacaacgccaaggagaucggcaacggcugcuucgaguucuaccacaagugcgacaacaccugcauggaguccgucaagaacggcaccuacgacuaccccaaguacuccgaggaggccaagcucaaccgcgaggagaucgacggcgucaagcucgaguccacccgcaucuaccagauccucgccaucuacuccaccgucgccuccucccucguccucgucgucucccucggcgccaucuccuucuggaugugcuccaacggcucccuccagugccgcaucugcaucuga

SEQ ID NO: 100868 - RNA, 1701 nt, Artificial Sequence; identical to SEQ ID NO: 100415
  derived and/or modified CDS sequence (opt2) from hemagglutinin__InfluenzaA__ADG42313

SEQ ID NO: 100869 - RNA, 1701 nt, Artificial Sequence
  derived and/or modified CDS sequence (opt2) from hemagglutinin__InfluenzaA__ADG42323
augaaggccauccucgucguccuccucuacaccuucgccaccgccaacgccgacacccucugcaucggcuaccacgccaacaacuccaccgacaccgucgacaccguccucgagaagaacgucaccgucacccacuccgucaaccuccucgaggacaagcacaacggcaagcucugcaagcuccgcggcgucgccccccuccaccucggcaagugcaacaucgccggcuggauccucggcaaccccgagugcgagucccucuccaccgccuccuccugguccuacaucgucgagaccuccuccuccgacaacggcaccugcuaccccggcgacuucaucgacuacgaggagcuccgcgagcagcucuccuccgucuccuccuucgagcgcuucgagauguuccccaagaccuccuccuggcccaaccacgacuccaacaagggcgucaccgccgccugcccccacgccggcgccaaguccuucuacaagaaccucaucuggcucgucaagaagggcaacuccuaccccaagcucuccaaguccuacaucaacgacaagggcaaggagguccucguccucuggggcauccaccaccccuccaccuccgccgaccagcagucccucuaccagaacgccgacgccuacgucuucgucggcaccucccgcuacuccaagaaguucaagcccgagaucgccauccgccccaagguccgcgaccaggagggccgcaugaacuacuacuggacccucgucgagcccggcgacaagaucaccuucgaggccaccggcaaccucgucgucccccgcuacgccuucgccauggagcgcaacgccggcuccggcaucaucaucuccgacacccccguccacgacugcaacaccaccugccagacccccaagggcgccaucaacaccucccuccccuuccagaacauccaccccaucaccaucggcaagugccccaaguacgucaaguccaccaagcuccgccucgccaccggccuccgcaacguccccuccauccagucccgcggccucuucggcgccaucgccggcuucaucgagggcggcuggaccggcauggucgacggcugguacggcuaccaccaccagaacgagcagggcuccggcuacgccgccgaccucaaguccacccagaacgccaucgacgagaucaccaacaaggucaacuccgucaucgagaagaugaacacccaguucaccgccgucggcaaggaguucaaccaccucgagaagcgcaucgagaaccucaacaagaaggucgacgacggcuuccucgacaucuggaccuacaacgccgagcuccucguccuccucgagaacgagcgcacccucgacuaccacgacuccaacgucaagaaccucuacgagaagguccgcucccagcucaagaacaacgccaaggaggucggcaacggcugcuucgaguucuaccacaagugcgacaacaccugcauggaguccgucaagaacggcaccuacgacuaccccaaguacuccgaggaggccaagcucaaccgcgaggagaucgacggcgucaagcucgaguccacccgcaucuaccagauccucgccaucuacuccaccgucgccuccucccucguccucgucgucucccucggcgccaucuccuucuggaugugcuccaacggcucccuccagugccgcaucugcaucuga

SEQ ID NO: 100870 - RNA, 1701 nt, Artificial Sequence
  derived and/or modified CDS sequence (opt2) from hemagglutinin__InfluenzaA__ADG42333
augaaggccauccucgucguccuccucuacacccucgccaccgccaacgccgacacccucugcaucggcuaccacgccaacaacuccaccgacaccgucgacaccguccucgagaagaacgucaccgucacccacuccgucaaccuccucgaggacaagcacaacggcaagcucugcaagcuccgcggcaucgccccccuccaccucggcaagugcaacaucgccggcuggauccucggcaaccccgagugcgagucccucuccaccgccuccuccugguccuacaucgucgagaccuccuccuccgacaacggcaccugcuaccccggcgacuucaucgacuacgaggagcuccgcgagcagcucuccuccgucuccuccuucgagcgcuucgagaucuuccccaagaccuccuccuggcccaaccacgacuccaacaagggcgucaccgccgccugcccccacgccggcgccaaguccuucuacaagaaccucaucuggcucgucaagaagggcaacuccuaccccaagcucuccaaguccuacaucaacgacaagggcaaggagguccucguccucuggggcauccaccaccccuccaccuccgccgaccagcagucccucuaccagaacgccgacgccuacgucuucgucggcaccucccgcuacuccaagaaguucaagcccgagaucgccauccgccccaagguccgcgaccaggagggccgcaugaacuacuacuggacccucgucgagcccggcgacaagaucaccuucgaggccaccggcaaccucgucgucccccgcuacgccuucgccauggagcgcaacgccggcuccggcaucaucaucuccgacgcccccguccacgacugcaacaccaccugccagacccccaagggcgccaucaacaccucccuccccuuccagaacauccaccccaucaccaucggcaagugccccaaguacgucaaguccaccaagcuccgccucgccaccggccuccgcaacguccccuccauccagucccgcggccucuucggcgccaucgccggcuucaucgagggcggcuggaccggcauggucgacggcugguacggcuaccaccaccagaacgagcagggcuccggcuacgccgccgaccucaaguccacccagaacgccaucgacgagaucaccaacaaggucaacuccgucaucgagaagaugaacacccaguucaccgccgucggcaaggaguucaaccaccucgagaagcgcaucgagaaccucaacaagaaggucgacgacggcuuccucgacaucuggaccuacaacgccgagcuccucguccuccucgagaacgagcgcacccucgacuaccacgacuccaacgucaagaaccucuacgagaagguccgcucccagcucaagaacaacgccaaggagaucggcaacggcugcuucgaguucuaccacaagugcgacaacaccugcauggaguccgucaagaacggcaccuacgacuaccccaaguacuccgaggaggccaagcucaaccgcgaggagaucgacggcgucaagcucgaguccacccgcaucuaccagauccucgccaucuacuccaccgucgccuccucccucguccucgucgucucccucggcgccaucuccuucuggaugugcuccaacggcucccuccagugccgcaucugcaucuga

SEQ ID NO: 100871 - RNA, 1701 nt, Artificial Sequence
  derived and/or modified CDS sequence (opt2) from hemagglutinin__InfluenzaA__ADG42343
augaaggccauccucgucguccuccucuacaccuucgccaccgccaacgccgacacccucugcaucggcuaccacgccaacaacuccaccgacaccgucgacaccguccucgagaagaacgucaccgucacccacuccgucaaccuccucgaggacaagcacaacggcaagcucugcaagcuccgcggcgucgccccccuccaccucggcaagugcaacaucgccggcuggauccucggcaaccccgagugcgagucccucuccaccgccuccuccugguccuacaucgucgagaccuccuccuccgacaacggcaccugcuaccccggcgacuucaucgacuacgaggagcuccgcgagcagcucuccuccgucuccuccuucgagcgcuucgagaucuuccccaagaccuccuccuggcccaaccacgacuccaacaagggcgucaccgccgccugcccccacgccggcgccaaguccuucuacaagaaccucaucuggcucgucaagaagggcaacuccuaccccaagcucuccaaguccuacaucaacgacaagggcaaggagguccucguccucuggggcauccaccaccccuccaccuccgccgaccagcagucccucuaccagaacgccgacgccuacgucuucgucggcaccucccgcuacuccaagaaguucaagcccgagaucgccauccgccccaagguccgcgaccaggagggccgcaugaacuacuacuggacccucgucgagcccggcgacaagaucaccuucgaggccaccggcaaccucgucgucccccgcuacgccuucgccauggaguccaacgccggcuccggcaucaucaucuccgacacccccguccacgacugcaacaccaccugccagacccccaagggcgccaucaacaccucccuccccuuccagaacauccaccccaucaccaucggcaagugccccaaguacgucaaguccaccaagcuccgccucgccaccggccuccgcaacguccccuccauccagucccgcggccucuucggcgccaucgccggcuucaucgagggcggcuggaccggcauggucgacggcugguacggcuaccaccaccagaacgagcagggcuccggcuacgccgccgaccucaaguccacccagcacgccaucgacgagaucaccaacaaggucaacuccgucaucgagaagaugaacacccaguucaccgccgucggcaaggaguucaaccaccucgagaagcgcaucgagaaccucaacaagaaggucgacgacggcuuccucgacaucuggaccuacaacgccgagcuccucguccuccucgagaacgagcgcacccucgacuaccacgacuccaacgucaagaaccucuacgagaagguccgcucccagcucaagaacaacgccaaggagaucggcaacggcugcuucgaguucuaccacaagugcgacaacaccugcauggaguccgucaagaacggcaccuacgacuaccccaaguacuccgaggaggccaagcucaaccgcgaggagaucgacggcgucaagcucgaguccacccgcaucuaccagauccucgccaucuacuccaccgucgccuccucccucguccucgucgucucccucggcgccaucuccuucuggaugugcuccaacggcucccuccagugccgcaucugcaucuga

SEQ ID NO: 100872 - RNA, 1701 nt, Artificial Sequence
  derived and/or modified CDS sequence (opt2) from hemagglutinin__InfluenzaA__ADG42363
augaaggccauccucgucguccuccucuacaccuucgccaccgccaacgccgacacccucugcaucggcuaccacgccaacaacuccaccgacaccgucgacaccguccucgagaagaacgucaccgucacccacuccgucaaccuccucgaggacaagcacaacggcaagcucugcaagcuccgcggcaucgccccccuccaccucggcaagugcaacaucgccggcuggauccucggcaaccccgagugcgagucccucuccaccgccuccuccugguccuacaucgucgagaccuccuccuccgacaacggcaccugcuaccccggcgacuucaucgacuacgaggagcuccgcgagcagcucuccuccgucuccuccuucgagcgcuucgagaucuuccccaagaccuccuccuggcccaaccacgacuccaacaagggcgucaccgccgccugcccccacgccggcgccaaguccuucuacaagaaccucaucuggcucgucaagaagggcaacuccuaccccaagcucuccaaguccuacaucaacgacaagggcaaggagguccucguccucuggggcauccaccaccccuccaccuccgccgaccagcagucccucuaccagaacgccgacgccuacgucuucgucggcaccucccgcuacuccaagaaguucaagcccgagaucgccauccgccccaagguccgcgaccaggagggccgcaugaacuacuacuggacccucgucgagcccggcgacaagaucaccuucgaggccaccggcaaccucgucgucccccgcuacgccuucgccauggagcgcaacgccggcuccggcaucaucaucuccgacacccccguccacgacugcaacaccaccugccagacccccaagggcgccaucaacaccucccuccccuuccagaacauccaccccaucaccaucggcaagugccccaaguacgucaaguccaccaagcuccgccucgccaccggccuccgcaacguccccuccauccagucccgcggccucuucggcgccaucgccggcuucaucgagggcggcuggaccggcauggucgacggcugguacggcuaccaccaccagaacgagcagggcuccggcuacgccgccgaccucaaguccacccagaacgccaucgacgagaucaccaacaaggucaacuccgucaucgagaagaugaacacccaguucaccgccgucggcaaggaguucaaccaccucgagaagcgcaucgagaaccucaacaagaaggucgacgacggcuuccucgacaucuggaccuacaacgccgagcuccucguccuccucgagaacgagcgcacccucgacuaccacgacuccaacgucaagaaccucuacgagaagguccgcucccagcucaagaacaacgccaaggagaucggcaacggcugcuucgaguucuaccacaagugcgacaacaccugcauggaguccgucaagaacggcaccuacgacuaccccaaguacuccgaggaggccaagcucaaccgcgaggagaucgacggcgucaagcucgaguccacccgcaucuaccagauccucgccaucuacuccaccgucgccuccucccucguccucgucgucucccucggcgccaucuccuucuggaugugcuccaacggcucccuccagugccgcaucugcaucuga

SEQ ID NO: 100873 - RNA, 1701 nt, Artificial Sequence
  derived and/or modified CDS sequence (opt2) from hemagglutinin__InfluenzaA__ADG42373
augaaggccauccucgucguccuccucuacaccuucgccaccgccaacgccgacacccucugcaucggcuaccacgccaacaacuccaccgacaccgucgacaccguccucgagaagaacgucaccgucacccacuccgucaaccuccucgaggacaagcacaacggcaagcucugcaagcuccgcggcgucgccccccuccaccucggcaagugcaacaucgccggcuggauccucggcaaccccgagugcgagucccucuccaccgccuccuccugguccuacaucgucgagaccuccuccuccgacaacggcaccugcuaccccggcgacuucaucgacuacgaggagcuccgcgagcagcucuccuccgucuccuccuucgagcgcuucgagaucuuccccaagaccuccuccuggcccaaccacgacuccaacaagggcgucaccgccgccugcccccacgccggcgccaaguccuucuacaagaaccucaucuggcucgucaagaagggcaacuccuaccccaagcucuccaaguccuacaucaacgacaagggcaaggagguccucguccucuggggcauccaccaccccuccaccuccgccgaccagcagucccucuaccagaacgccgacgccuacgucuucgucggcaccucccgcuacuccaagaaguucaagcccgagaucgccauccgccccaagguccgcgaccaggagggccgcaugaacuacuacuggacccucgucgagcccggcgacaagaucaccuucgaggccaccggcaaccucgucgucccccgcuacgccuucgccauggagcgcaacgccggcuccggcaucaucaucuccgacacccccguccacgacugcaacaccaccugccagacccccaagggcgccaucaacaccucccuccccuuccagaacauccaccccaucaccaucggcaagugccccaaguacgucaaguccaccaagcuccgccucgccaccggccuccgcaacguccccuccauccagucccgcggccucuucggcgccaucgccggcuucaucgagggcggcuggaccggcauggucgacggcugguacggcuaccaccaccagaacgagcagggcuccggcuacgccgccgaccucaaguccacccagaacgccaucgacgagaucaccaacaaggucaacuccgucaucgagaagaugaacacccaguucaccgccgucggcaaggaguucaaccaccucgagaagcgcaucgagaaccucaacaagaaggucgacgacggcuuccucgacaucuggaccuacaacgccgagcuccucguccuccucgagaacgagcgcacccucgacuaccacgacuccaacgucaagaaccucuacgagaagguccgcaaccagcucaagaacaacgccaaggagaucggcaacggcugcuucgaguucuaccacaagugcgacaacaccugcauggaguccgucaagaacggcaccuacgacuaccccaaguacuccgaggaggccaagcucaaccgcgaggagaucgacggcgucaagcucgaguccacccgcaucuaccagauccucgccaucuacuccaccgucgccuccucccucguccucgucgucucccucggcgccaucuccuucuggaugugcuccaacggcucccuccagugccgcaucugcaucuga

SEQ ID NO: 100874 - RNA, 1701 nt, Artificial Sequence
  derived and/or modified CDS sequence (opt2) from hemagglutinin__InfluenzaA__ADG42393
augaaggccauccucgucguccuccucuacaccuucgccaccgccaacgccgacacccucugcaucggcuaccacgccaacaacuccaccgacaccgucgacaccguccucgagaagaacgucaccgucacccacuccgucaaccuccucgaggacaagcacaacgagaagcucugcaagcuccgcggcgucgccccccuccaccucggcaagugcaacaucgccggcuggauccucggcaaccccgagugcgagucccucuccaccgccuccuccugguccuacaucgucgagaccuccuccuccgacaacggcaccugcuaccccggcgacuucaucgacuacgaggagcuccgcgagcagcucuccuccgucuccuccuucgagcgcuucgagaucuuccccaagaccuccuccuggcccaaccacgacuccaacaagggcgucaccgccgccugcccccacgccggcgccaaguccuucuacaagaaccucaucuggcucgucaagaagggcaacuccuaccccaagcucuccaaguccuacaucaacgacaagggcaaggagguccucguccucuggggcauccaccaccccuccaccuccgccgaccagcagucccucuaccagaacgccgacgccuacgucuucgucggcaccucccgcuacuccaagaaguucaagcccgagaucgccauccgccccaagguccgcgagcaggagggccgcaugaacuacuacuggacccucgucgagcccggcgacaagaucaccuucgaggccaccggcaaccucgucgucccccgcuacgccuucgccauggagcgcaacgccggcuccggcaucaucaucuccgacacccccguccacgacugcaacaccaccugccagacccccaagggcgccaucaacaccucccuccccuuccagaacauccaccccaucaccaucggcaagugccccaaguacgucaaguccaccaagcuccgccucgccaccggccuccgcaacguccccuccauccagucccgcggccucuucggcgccaucgccggcuucaucgagggcggcuggaccggcauggucgacggcugguacggcuaccaccaccagaacgagcagggcuccggcuacgccgccgaccucaaguccacccagaacgccaucgacgagaucaccaacaaggucaacuccgucaucgagaagaugaacacccaguucaccgccgucggcaaggaguucaaccaccucgagaagcgcaucgagaaccucaacaagaaggucgacgacggcuuccucgacaucuggaccuacaacgccgagcuccucguccuccucgagaacgagcgcacccucgacuaccacgacuccaacgucaagaaccucuacgagaagguccgcucccagcucaagaacaacgccaaggagaucggcaacggcugcuucgaguucuaccacaagugcgacaacaccugcauggaguccgucaagaacggcaccuacgacuaccccaaguacuccgaggaggccaagcucaaccgcgaggagaucgacggcgucaagcucgaguccacccgcaucuaccagauccucgccaucuacuccaccgucgccuccucccucguccuccucgucucccucggcgccaucuccuucuggaugugcuccaacggcucccuccagugccgcaucugcaucuga

SEQ ID NO: 100875 - RNA, 1701 nt, Artificial Sequence; identical to SEQ ID NO: 99869
  derived and/or modified CDS sequence (opt2) from hemagglutinin__InfluenzaA__ADG42403

SEQ ID NO: 100876 - RNA, 1701 nt, Artificial Sequence; identical to SEQ ID NO: 100125
  derived and/or modified CDS sequence (opt2) from hemagglutinin__InfluenzaA__ADG42413

SEQ ID NO: 100877 - RNA, 1701 nt, Artificial Sequence; identical to SEQ ID NO: 100872
  derived and/or modified CDS sequence (opt2) from hemagglutinin__InfluenzaA__ADG42423

SEQ ID NO: 100878 - RNA, 1701 nt, Artificial Sequence; identical to SEQ ID NO: 100125
  derived and/or modified CDS sequence (opt2) from hemagglutinin__InfluenzaA__ADG42443

SEQ ID NO: 100879 - RNA, 1701 nt, Artificial Sequence
  derived and/or modified CDS sequence (opt2) from hemagglutinin__InfluenzaA__ADG42453
augaaggccauccucgucguccuccucuacaccuucgccaccgccaacgccgacacccucugcaucggcuaccacgccaacaacuccaccgacaccgucgacaccguccucgagaagaacgucaccgucacccacuccgucaacauccucgaggacaagcacaacggcaagcucugcaagcuccgcggcgucgccccccuccaccucggcaagugcaacaucgccggcuggauccucggcaaccccgagugcgagucccucuccaccgccuccuccugguccuacaucgucgagaccuccuccuccgacaacggcaccugcuaccccggcgacuucaucgacuacgaggagcuccgcgagcagcucuccuccgucuccuccuucgagcgcuucgagaucuuccccaagaccuccuccuggcccaaccacgacuccaacaagggcgucaccgccgccugcccccacgccggcgccaaguccuucuacaagaaccucaucuggcucgucaagaagggcaacuccuaccccaagcucuccaaguccuacaucaacgacaagggcaaggagguccucguccucuggggcauccaccaccccuccaccuccgccgaccagcagucccucuaccagaacgccgacgccuacgucuucgucggcaccucccgcuacuccaagaaguucaagcccgagaucgccauccgccccaagguccgcgaccaggagggccgcaugaacuacuacuggacccucgucgagcccggcgacaagaucaccuucgaggccaccggcaaccucgucgucccccgcuacgccuucgccauggagcgcaacgccggcuccggcaucaucaucuccgacacccccguccacgacugcaacaccaccugccagacccccaagggcgccaucaacaccucccuccccuuccagaacauccaccccaucaccaucggcaagugccccaaguacgucaaguccaccaagcuccgccucgccaccggccuccgcaacguccccuccauccagucccgcggccucuucggcgccaucgccggcuucaucgagggcggcuggaccggcauggucgacggcugguacggcuaccaccaccagaacgagcagggcuccggcuacgccgccgaccucaaguccacccagaacgccaucgacgagaucaccaacaaggucaacuccgucaucgagaagaugaacacccaguucaccgccgucggcaaggaguucaaccaccucgagaagcgcgucgagaaccucaacaagaaggucgacgacggcuuccucgacaucuggaccuacaacgccgagcuccucguccuccucgagaacgagcgcacccucgacuaccacgacuccaacgucaagaaccucuacgagaagguccgcucccagcucaagaacaacgccaaggagaucggcaacggcugcuucgaguucuaccacaagugcgacaacaccugcauggaguccgucaagaacggcaccuacgacuaccccaaguacuccgaggaggccaagcucaaccgcgaggagaucgacggcgucaagcucgaguccacccgcaucuaccagauccucgccaucuacuccaccgucgccuccucccucguccucgucgucucccucggcgccaucuccuucuggaugugcuccaacggcucccuccagugccgcaucugcaucuga

SEQ ID NO: 100880 - RNA, 1701 nt, Artificial Sequence; identical to SEQ ID NO: 99058
  derived and/or modified CDS sequence (opt2) from hemagglutinin__InfluenzaA__ADG42463

SEQ ID NO: 100881 - RNA, 1701 nt, Artificial Sequence; identical to SEQ ID NO: 98705
  derived and/or modified CDS sequence (opt2) from hemagglutinin__InfluenzaA__ADG42473

SEQ ID NO: 100882 - RNA, 1701 nt, Artificial Sequence; identical to SEQ ID NO: 100125
  derived and/or modified CDS sequence (opt2) from hemagglutinin__InfluenzaA__ADG42483

SEQ ID NO: 100883 - RNA, 1701 nt, Artificial Sequence; identical to SEQ ID NO: 100257
  derived and/or modified CDS sequence (opt2) from hemagglutinin__InfluenzaA__ADG42493

SEQ ID NO: 100884 - RNA, 1701 nt, Artificial Sequence; identical to SEQ ID NO: 100318
  derived and/or modified CDS sequence (opt2) from hemagglutinin__InfluenzaA__ADG42503

SEQ ID NO: 100885 - RNA, 1701 nt, Artificial Sequence; identical to SEQ ID NO: 99806
  derived and/or modified CDS sequence (opt2) from hemagglutinin__InfluenzaA__ADG42513

SEQ ID NO: 100886 - RNA, 1701 nt, Artificial Sequence
  derived and/or modified CDS sequence (opt2) from hemagglutinin__InfluenzaA__ADG42533
augaaggccauccucgucguccuccucuacaccuucgccaccgccaaggccgacacccucugcaucggcuaccacgccaacaacuccaccgacaccgucgacaccguccucgagaagaacgucaccgucacccacuccgucaaccuccucgaggacaagcacaacggcaagcucugcaagcuccgcggcgucgccccccuccaccucggcaagugcaacaucgccggcuggauccucggcaaccccgagugcgagucccucuccaccgccuccuccugguccuacaucgucgagaccuccuccuccgacaacggcaccugcuaccccggcgacuucaucgacuacgaggagcuccgcgagcagcucuccuccgucuccuccuucgagcgcuucgagaucuuccccaagaccuccuccuggcccaaccacgacuccaacaagggcgucaccgccgccugcccccacgccggcgccaaguccuucuacaagaaccucaucuggcucgucaagaagggcaacuccuaccccaagcucuccaaguccuacaucaacgacaagggcaaggagguccucguccucuggggcauccaccaccccuccaccuccgccgaccagcagucccucuaccagaacgccgacgccuacgucuucgucggcaccucccgcuacuccaagaaguucaagcccgagaucgccauccgccccaagguccgcgaccaggagggccgcaugaacuacuacuggacccucgucgagcccggcgacaagaucaccuucgaggccaccggcaaccucgucgucccccgcuacgccuucgccauggagcgcaacgccggcuccggcaucaucaucuccgacacccccguccacgacugcaacaccaccugccagacccccaagggcgccaucaacaccucccuccccuuccagaacauccaccccaucaccaucggcaagugccccaaguacgucaaguccaccaagcuccgccucgccaccggccuccgcaacauccccuccauccagucccgcggccucuucggcgccaucgccggcuucaucgagggcggcuggaccggcauggucgacggcugguacggcuaccaccaccagaacgagcagggcuccggcuacgccgccgaccucaaguccacccagaacgccaucgacgagaucaccaacaaggucaacuccgucaucgagaagaugaacacccaguucaccgccgucggcaaggaguucaaccaccucgagaagcgcaucgagaaccucaacaagaaggucgacgacggcuuccucgacaucuggaccuacaacgccgagcuccucguccuccucgagaacgagcgcacccucgacuaccacgacuccaacgucaagaaccucuacgagaagguccgcucccagcucaagaacaacgccaaggagaucggcaacggcugcuucgaguucuaccacaagugcgacaacaccugcauggaguccgucaagaacggcaccuacgacuaccccaaguacuccgaggaggccaagcucaaccgcgaggagaucgacggcgucaagcucgaguccacccgcaucuaccagauccucgccaucuacuccaccgucgccuccucccucguccucgucgucucccucggcgccaucuccuucuggaugugcuccaacggcucccuccagugccgcaucugcaucuga

SEQ ID NO: 100887 - RNA, 1701 nt, Artificial Sequence
  derived and/or modified CDS sequence (opt2) from hemagglutinin__InfluenzaA__ADG42553
augaaggccauccucgucguccuccucuacaccuucgccaccgccaacgccgacacccucugcaucggcuaccacgccaacaacuccaccgacaccgucgacaccguccucgagaagaacgucaccgucacccacuccgucaaccuccucgaggacaagcacaacggcaagcucugcaagcuccgcggcgucgccccccuccaccucggcaagugcaacaucgccggcuggauccucggcaaccccgagugcgagucccucuccaccgccuccuccugguccuacaucgucgagaccuccuccuccgacaacggcaccugcuaccccggcgacuucaucgacuacgaggagcuccgcgagcagcucuccuccgucuccuccuucgagcgcuucgagaucuuccccaagaccuccuccuggcccaaccacgacuccaacaagggcgucaccgccgccugcucccacgccggcgccaaguccuucuacaagaaccucaucuggcucgucaagaagggcaacuccuaccccaagcucaacaaguccuacaucaacgacaagggcaaggagguccucguccucuggggcauccaccaccccuccaccuccgccgaccagcagucccucuaccagaacgccgacgccuacgucuucgucggcaccucccgcuacuccaagaaguucaagcccgagaucgccauccgccccaagguccgcgagcaggagggccgcaugaacuacuacuggacccucgucgagcccggcgacaagaucaccuucgaggccaccggcaaccucgucgucccccgcuacgccuucgccauggagcgcaacgccggcuccggcaucaucaucuccgacacccccguccacgacugcaacaccaccugccagacccccaagggcgccaucaacaccucccuccccuuccagaacauccaccccaucaccaucggcaagugccccaaguacgucaaguccaccaagcuccgccucgccaccggccuccgcaacguccccuccauccagucccgcggccucuucggcgccaucgccggcuucaucgagggcggcuggaccggcauggucgacggcugguacggcuaccaccaccagaacgagcagggcuccggcuacgccgccgaccucaaguccacccagaacgccaucgacgagaucaccaacaaggucaacuccgucaucgagaagaugaacacccaguucaccgccgucggcaaggaguucaaccaccucgagaagcgcaucgagaaccucaacaagaaggucgacgacggcuuccucgacaucuggaccuacaacgccgagcuccucguccuccucgagaacgagcgcacccucgacuaccacgacuccaacgucaagaaccucuacgagaagguccgcucccagcucaagaacaacgccaaggagaucggcaacggcugcuucgaguucuaccacaagugcgacaacaccugcauggaguccgucaagaacggcaccuacgacuaccccaaguacuccgaggaggccaagcucaaccgcgaggagaucgacggcgucaagcucgaguccacccgcaucuaccagauccucgccaucuacuccaccgucgccuccucccucguccucgucgucucccucggcgccaucuccuucuggaugugcuccaacggcucccuccagugccgcaucugcaucuga

SEQ ID NO: 100888 - RNA, 1701 nt, Artificial Sequence
  derived and/or modified CDS sequence (opt2) from hemagglutinin__InfluenzaA__ADG42573
augaaggccauccucgucguccuccucuacaccuucgccaccgccaacgccgacacccucugcaucggcuaccacgccaacaacuccaccgacaccgucgacaccguccucgagaagaacgucaccgucacccacuccgucaaccuccucgaggacaagcacaacggcaagcucugcaagcuccgcggcgucgccccccuccaccucggcaagugcaacaucgccggcuggauccucggcaaccccgagugcgagucccucuccaccgccuccuccugguccuacaucgucgagaccuccuccuccgacaacggcaccugcuaccccggcgacuucaucgacuacgaggagcuccgcgagcagcucuccuccgucuccuccuucgagcgcuucgagaucuuccccaagaccuccuccuggcccaaccacgacuccaacaagggcgucaccgccgccugcccccacgccggcgccaaguccuucuacaagaaccucaucuggcucgucaagaagggcaacuccuaccccaagcucuccaaguccuacaucaacgacaagggcaaggagguccucguccucuggggcauccaccaccccuccaccuccgccgaccagcagucccucuaccagaacgccgacgccuacgucuucgucggcaccucccgcuacuccaagaaguucaagcccgagaucgccauccgccccaagguccgcgaccaggagggccgcaugaacuacuacuggacccucaucgagcccggcgacaagaucaccuucgaggccaccggcaaccucgucgucccccgcuacgccuucgccauggagcgcaacgccggcuccggcaucaucaucuccgacacccccguccacgacugcaacaccaccugccagacccccaagggcgccaucaacaccucccuccccuuccagaacauccaccccaucaccaucggcaagugccccaaguacgucaaguccaccaagcuccgccucgccaccggccuccgcaacguccccuccauccagucccgcggccucuucggcgccaucgccggcuucaucgagggcggcuggaccggcauggucgacggcugguacggcuaccaccaccagaacgagcagggcuccggcuacgccgccgaccucaaguccacccagaacgccaucgacgagaucaccaacaaggucaacuccgucaucgagaagaugaacacccaguucaccgccgucggcaaggaguucaaccaccucgagaagcgcaucgagaaccucaacaagaaggucgacgacggcuuccucgacaucuggaccuacaacgccgagcuccucguccuccucgagaacgagcgcacccucgacuaccacgacuccaacgucaagaagcucuacgagaagguccgcucccagcucaagaacaacgccaaggagaucggcaacggcugcuucgaguucuaccacaagugcgacaacaccugcauggaguccgucaagaacggcaccuacgacuaccccaaguacuccgaggaggccaagcucaaccgcgaggagaucgacggcgucaagcucgaguccacccgcaucuaccagauccucgccaucuacuccaccgucgccuccucccucguccucgucgucucccucggcgccaucuccuucuggaugugcuccaacggcucccuccagugccgcaucugcaucuga

SEQ ID NO: 100889 - RNA, 1701 nt, Artificial Sequence
  derived and/or modified CDS sequence (opt2) from hemagglutinin__InfluenzaA__ADG42583
augaaggccauccucgucguccuccucuacaccuucgccaccgccaacgccgacacccucugcaucggcuaccacgccaacaacuccaccgacaccgucgacaccguccucgagaagaacgucaccgucacccacuccgucaaccuccucgaggacaagcacaacggcaagcucugcaagcuccgcggcgucgccccccuccaccucggcaagugcaacaucgccggcuggauccucggcaaccccgagugcgagucccucuccaccgccuccuccugguccuacaucgucgagaccuccuccuccgacaacggcaccugcuaccccggcgacuucaucgacuacgaggagcuccgcgagcagcucuccuccgucuccuccuucgagcgcuucgagaucuuccccaagaccuccuccuggcccaaccacgacuccaacaagggcgucaccgccgccugcccccacgccggcgccaaguccuucuacaagaaccucaucuggcucgucaagaagggcaacuccuaccccaagcucuccaaguccuacaucaacgacaagggcaaggagguccucguccucuggggcauccaccaccccuccaccuccgccgaccagcagucccucuaccagaacgccgacuccuacgucuucgucggcaccucccgcuacuccaagaaguucaagcccgagaucgccauccgccccaagguccgcgaccaggagggccgcaugaacuacuacuggacccucgucgagcccggcgacaagaucaccuucgaggccaccggcaaccucgucgucccccgcuacgccuucgccauggagcgcaacgccggcuccggcaucaucaucuccgacacccccguccacgacugcaacaccaccugccagacccccaagggcgccaucaacaccucccuccccuuccagaacauccaccccaucaccaucggcaagugccccaaguacgucaaguccaccaagcuccgccucgccaccggccuccgcaacguccccuccauccagucccgcggccucuucggcgccaucgccggcuucaucgagggcggcuggaccggcauggucgacggcugguacggcuaccaccaccagaacgagcagggcuccggcuacgccgccgaccucaaguccacccagcacgccaucgacgagaucaccaacaaggucaacuccgucaucgagaagaugaacacccaguucaccgccgucggcaaggaguucaaccaccucgagaagcgcaucgagaaccucaacaagaaggucgacgacggcuuccucgacaucuggaccuacaacgccgagcuccucguccuccucgagaacgagcgcacccucgacuaccacgacuccaacgucaagaaccucuacgagaagguccgcucccagcucaagaacaacgccaaggagaucggcaacggcugcuucgaguucuaccacaagugcgacaacaccugcauggaguccgucaagaacggcaccuacgacuaccccaaguacuccgaggaggccaagcucaaccgcgaggagaucgacggcgucaagcucgaguccacccgcaucuaccagauccucgccaucuacuccaccgucgccuccucccucguccucgucgucucccucggcgccaucuccuucuggaugugcuccaacggcucccuccagugccgcaucugcaucuga

SEQ ID NO: 100890 - RNA, 1701 nt, Artificial Sequence; identical to SEQ ID NO: 100302
  derived and/or modified CDS sequence (opt2) from hemagglutinin__InfluenzaA__ADG42593

SEQ ID NO: 100891 - RNA, 1701 nt, Artificial Sequence
  derived and/or modified CDS sequence (opt2) from hemagglutinin__InfluenzaA__ADG42603
augaaggccauccucgucguccuccucuacaccuucgccaccgccaacgccgacacccucugcaucggcuaccacgccaacaacuccaccgacaccgucgacaccguccucgagaagaacgucaccgucacccacuccgucaaccuccucgaggacaagcacaacggcaagcucugcaagcuccgcggcgucgccccccuccaccucggcaagugcaacaucgccggcuggauccucggcaaccccgagugcgagucccucuccaccgccuccuccugguccuacaucgucgagaccuccuccuccgacaacggcaccugcuaccccggcgacuucaucgacuacgaggagcuccgcgagcagcucuccuccgucuccuccuucgagcgcuucgagaucuuccccaagaccuccuccuggcccaaccacgacuccaacaagggcgucaccgccgccugcccccacgccggcgccaaguccuucuacaagaaccucaucuggcucgucaagaagggcaacuccuaccccaagcuccgcaaguccuacaucaacgacaagggcaaggagguccucguccucuggggcauccaccaccccuccaccuccgccgaccagcagucccucuaccagaacgccgacgccuacgucuucgucggcaccucccgcuacuccaagaaguucaagcccgagaucgccacccgccccaagguccgcgaccaggagggccgcaugaacuacuacuggacccucgucgagcccggcgacaagaucaccuucgaggccaccggcaaccucgucgucccccgcuacgccuucgccauggagcgcaacgccggcuccggcaucaucaucuccgacacccccguccacgacugcaacaccaccugccagacccccaagggcuccaucaacaccucccuccccuuccagaacauccaccccaucaccaucggcaagugccccaaguacgucaaguccaccaagcuccgccucgccaccggccuccgcaacguccccuccauccagucccgcggccucuucggcgccaucgccggcuucaucgagggcggcuggaccggcauggucgacggcugguacggcuaccaccaccagaacgagcagggcuccggcuacgccgccgaccucaaguccacccagcacgccaucgacgagaucaccaacaaggucaacuccgucaucgagaagaugaacacccaguucaccgccgucggcaaggaguucaaccaccucgagaagcgcaucgagaaccucaacaagaaggucgacgacggcuuccucgacaucuggaccuacaacgccgagcuccucguccuccucgagaacgagcgcacccucgacuaccacgacuccaacgucaagaaccucuacgagaagguccgcucccagcucaagaacaacgccaaggagaucggcaacggcugcuucgaguucuaccacaagugcgacaacaccugcauggaguccgucaagaacggcaccuacgacuaccccaaguacuccgaggaggccaagcucaaccgcgaggagaucgacggcgucaagcucgaguccacccgcaucuaccagauccucgccaucuacuccaccgucgccuccucccucguccucgucgucucccucggcgccaucuccuucuggaugugcuccaacggcucccuccagugccgcaucugcaucuga

SEQ ID NO: 100892 - RNA, 1701 nt, Artificial Sequence
  derived and/or modified CDS sequence (opt2) from hemagglutinin__InfluenzaA__ADG42613
augaaggccauccucgucguccuccucuacaccuucgccaccgccaacgccgacacccucugcaucggcuaccacgccaacaacuccaccgacaccgucgacaccguccucgagaagaacgucaccgucacccacuccgucaacauccucgaggacaagcacaacggcaagcucugcaagcuccgcggcgucgccccccuccaccucggcaagugcaacaucgccggcuggauccucggcaaccccgagugcgagucccucuccaccgccuccuccugguccuacaucgucgagaccuccuccuccgacaacggcaccugcuaccccggcgacuucaucgacuacgaggagcuccgcgagcagcucuccuccgucuccuccuucgagcgcuucgagaucuuccccaagaccuccuccuggcccaaccacgacuccaacaagggcgucaccgccgccugcccccacgccggcgccaaguccuucuacaagaaccucaucuggcucgucaagaagggcaacuccuaccccaagcucuccaaguccuacaucaacgacaagggcaaggagguccucguccucuggggcauccaccaccccuccaccuccgccgaccagcagucccucuaccagaacgccgacgccuacgucuucgucggcaccucccgcuacuccaagaaguucaagcccgagaucgccauccgccccaagguccgcgaccaggagggccgcaugaacuacuacuggacccucgucgagcccggcgacaagaucaccuucgaggccaccggcaaccucgucgucccccgcuacgccuucgccauggagcgcaacgccggcuccggcaucaucaucuccgacacccccguccacgacugcaacaccaccugccagacccccaagggcgccaucaacaccucccuccccuuccagaacauccaccccaucaccaucggcaagugccccaaguacgucaaguccaccaagcuccgccucgccaccggccuccgcaacguccccuccauccagucccgcggccucuucggcgccaucgccggcuucaucgagggcggcuggaccggcauggucgacggcugguacggcuaccaccaccagaacgagcagggcuccggcuacgccgccgaccucaaguccacccagaacgccaucgacgagaucaccaacaaggucaacuccgucaucgagaagaugaacacccaguucaccgccgucggcaaggaguucaaccaccucgagaagcgcaucgagaaccucaacaagaaggucgacgacggcuuccucgacaucuggaccuacaacgccgagcuccucguccuccucgagaacgagcgcacccucgacuaccacgacuccaacgucaagaaccucuacgagaagguccgcucccagcucaagaacaacgccaaggagaucggcaacggcugcuucgaguucuaccacaagugcgacaacaccugcauggaguccgucaagaacggcaccuacgacuaccccaaguacuccgaggaggccaagcucaaccgcgagaagaucgacggcgucaagcucgaguccacccgcaucuaccagauccucgccaucuacuccaccgucgccuccucccucguccucgucgucucccucggcgccaucuccuucuggaugugcuccaacggcucccuccagugccgcaucugcaucuga

SEQ ID NO: 100893 - RNA, 1701 nt, Artificial Sequence; identical to SEQ ID NO: 100332
  derived and/or modified CDS sequence (opt2) from hemagglutinin__InfluenzaA__ADG42623

SEQ ID NO: 100894 - RNA, 1701 nt, Artificial Sequence; identical to SEQ ID NO: 98705
  derived and/or modified CDS sequence (opt2) from hemagglutinin__InfluenzaA__ADG42633

SEQ ID NO: 100895 - RNA, 1701 nt, Artificial Sequence
  derived and/or modified CDS sequence (opt2) from hemagglutinin__InfluenzaA__ADG42643
augaaggccauccucgucguccuccucuacaccuucgccaccgccaacgccgacacccucugcaucggcuaccacgccaacaacuccaccgacaccgucgacaccguccucgagaagaacgucaccgucacccacuccgccaaccuccucgaggacaagcacaacggcaagcucugcaagcuccgcggcgccgccccccuccaccucggcaagugcaacaucgccggcuggauccucggcaaccccgagugcgagucccucuccaccgccuccuccugguccuacaucgucgagaccuccuccuccgacaacggcaccugcuaccccggcgacuucaucgacuacgaggagcuccgcgagcagcucuccuccgucuccuccuucgagcgcuucgagauguuccccaagaccuccuccuggcccaaccacgacuccaacaagggcgucaccgccgccugcccccacgccggcgccaaguccuucuacaagaaccucaucuggcucgucaagaagggcaacuccuaccccaagcucuccaaguccuacgucaacgacaagggcaaggagguccucguccucuggggcauccaccaccccuccaccuccgccgaccagcagucccucuaccagaacgccgacgccuacgucuucgucggcaccucccgcuacuccaagaaguucaagcccgagaucgccauccgccccaagguccgcgaccaggagggccgcaugaacuacuacuggacccucgucgagcccggcgacaagaucaccuucgaggccaccggcaaccucgucgucccccgcuacgccuucgccauggagcgcaacgccggcuccggcaucaucaucuccgacacccccguccacgacugcaacaccaccugccagacccccaagggcgccaucaacaccucccuccccuuccagaacauccaccccaucaccaucggcaagugccccaaguacgucaaguccaccaagcuccgccucgccaccggccuccgcaacguccccuccauccagucccgcggccucuucggcgccaucgccggcuucaucgagggcggcuggaccggcauggucgacggcugguacggcuaccaccaccagaacgagcagggcuccggcuacgccgccgaccucaaguccacccagaacgccaucgacgagaucaccaacaaggucaacuccgucaucgagaagaugaacacccaguucaccgccgucggcaaggaguucaaccaccucgagaagcgcaucgagaaccucaacaagaaggucgacgacggcuuccucgacaucuggaccuacaacgccgagcuccucguccuccucgagaacgagcgcacccucgacuaccacgacuccaacgucaagaaccucuacgagaagguccgcucccagcucaagaacaacgccaaggagaucggcaacggcugcuucgaguucuaccacaagugcgacaacaccugcauggaguccgucaagaacggcaccuacgacuaccccaaguacuccgaggaggccaagcucaaccgcgaggagaucgacggcgucaagcucgaguccacccgcaucuaccagauccucgccaucuacuccaccgucgccuccucccucguccucgucgucucccucggcgccaucuccuucuggaugugcuccaacggcucccuccagugccgcaucugcaucuga

SEQ ID NO: 100896 - RNA, 1701 nt, Artificial Sequence
  derived and/or modified CDS sequence (opt2) from hemagglutinin__InfluenzaA__ADG42653
augaaggccauccucgucguccuccucuacaccuccgccaccgccaacgccgacacccucugcaucggcuaccacgccaacaacuccaccgacaccgucgacaccguccucgagaagaacgucaccgucacccacuccgucaaccuccucgaggacaagcacaacggcaagcucugcaagcuccgcggcgucgccccccuccaccucggcaagugcaacaucgccggcuggauccucggcaaccccgagugcgagucccucuccaccgccuccuccugguccuacaucgucgagaccuccuccuccgacaacggcaccugcuaccccggcgacuucaucgacuacgaggagcuccgcgagcagcucuccuccgucuccuccuucgagcgcuucgagauguuccccaagaccuccuccuggcccaaccacgacuccaacaagggcgucaccgccgccugcccccacgccggcgccaaguccuucuacaagaaccucaucuggcucgucaagaagggcaacuccuaccccaagcucuccaaguccuacaucaacgacaagggcaaggagguccucguccucuggggcauccaccaccccuccaccuccgccgaccagcagucccucuaccagaacgccgacgccuacgucuucgucggcaccucccgcuacuccaagaaguucaagcccgagaucgccauccgccccaagguccgcgaccaggagggccgcaugaacuacuacuggacccucgucgagcccggcgacaagaucaccuucgaggccaccggcaaccucgucgucccccgcuacgccuucgccauggagcgcaacgccggcuccggcaucaucaucuccgacacccccguccacgacugcaacaccaccugccagacccccaagggcgccaucaacaccucccuccccuuccagaacauccaccccaucaccaucggcaagugccccaaguacgucaaguccaccaagcuccgccucgccaccggccuccgcaacguccccuccauccagucccgcggccucuucggcgccaucgccggcuucaucgagggcggcuggaccggcauggucgacggcugguacggcuaccaccaccagaacgagcagggcuccggcuacgccgccgaccucaaguccacccagaacgccaucgacgagaucaccaacaaggucaacuccgucaucgagaagaugaacacccaguucaccgccgucggcaaggaguucaaccaccucgagaagcgcaucgagaaccucaacaagaaggucgacgacggcuuccucgacaucuggaccuacaacgccgagcuccucguccuccucgagaacgagcgcacccucgacuaccacgacuccaacgucaagaaccucuacgagaagguccgcucccagcucaagaacaacgccaaggagaucggcaacggcugcuucgaguucuaccacaagugcgacaacaccugcauggaguccgucaagaacggcaccuacgacuaccccaaguacuccgaggaggccaagcucaaccgcgaggagaucgacggcgucaagcucgaguccacccgcaucuaccagauccucgccaucuacuccaccgucgccuccucccucguccucgucgucucccucggcgccaucuccuucuggaugugcuccaacggcucccuccagugccgcaucugcaucuga

SEQ ID NO: 100897 - RNA, 1701 nt, Artificial Sequence; identical to SEQ ID NO: 99869
  derived and/or modified CDS sequence (opt2) from hemagglutinin__InfluenzaA__ADG42663

SEQ ID NO: 100898 - RNA, 1701 nt, Artificial Sequence
  derived and/or modified CDS sequence (opt2) from hemagglutinin__InfluenzaA__ADG42673
augaaggccauccucgucguccuccucuacaccuucgccaccgccaacgccgacacccucugcaucggcuaccacgccaacaacuccaccgacaccgucgacaccguccucgagaagaacgucaccgucacccacuccgucaaccuccucgaggacaagcacaacggcaagcucugcaagcucaagggcgucgccccccuccaccucggcaagugcaacaucgccggcuggauccucggcaaccccgagugcgagucccucuccaccgccggcuccugguccuacaucgucgagaccuccuccuccgacaacggcaccugcuaccccggcgacuucaucgacuacgaggagcuccgcgagcagcucuccuccgucuccuccuucgagcgcuucgagaucuuccccaagaccuccuccuggcccaaccacgacuccaacaagggcgucaccgccgccugcccccacgccggcgccaaguccuucuacaagaaccucaucuggcucgucaagaagggcaacuccuaccccaagcucuccaaguccuacaucaacgacaagggcaaggagguccucguccucuggggcauccaccaccccuccaccuccgccgaccagcagucccucuaccagaacgccgacgccuacgucuucgucggcaccucccgcuacuccaagaaguucaagcccgagaucgccauccgccccaagguccgcgaccaggagggccgcaugaacuacuacuggacccucgucgagcccggcgacaagaucaccuucgaggccaccggcaaccucgucgucccccgcuacgccuucgccauggagcgcaacgccggcuccggcaucaucaucuccgacacccccguccacgacugcaacaccaccugccagacccccaagggcgccaucaacaccucccuccccuuccagaacauccaccccaucaccaucggcaagugccccaaguacgucaaguccaccaagcuccgccucgccaccggccuccgcaacguccccuccauccagucccgcggccucuucggcgccaucgccggcuucaucgagggcggcuggaccggcauggucgacggcugguacggcuaccaccaccagaacgagcagggcuccggcuacgccgccgaccucaaguccacccagaacgccaucgacggcaucaccaacaaggucaacuccgucaucgagaagaugaacacccaguucaccgccgucggcaaggaguucaaccaccucgagaagcgcaucgagaaccucaacaagaaggucgacgacggcuuccucgacaucuggaccuacaacgccgagcuccucguccuccucgagaacgagcgcacccucgacuaccacgacuccaacgucaagaaccucuacgagaagguccgcucccagcucaagaacaacgccaaggagaucggcaacggcugcuucgaguucuaccacaagugcgacaacaccugcauggaguccgucaagaacggcaccuacgacuaccccaaguacuccgaggaggccaagcucaaccgcgaggagaucgacggcgucaagcucgaguccacccgcaucuaccagauccucgccaucuacuccaccgucgccuccucccucguccucgucgucucccucggcgccaucuccuucuggaugugcuccaacggcucccuccagugccgcaucugcaucuga

SEQ ID NO: 100899 - RNA, 1701 nt, Artificial Sequence
  derived and/or modified CDS sequence (opt2) from hemagglutinin__InfluenzaA__ADG42683
augaaggccauccucgucguccuccucuacaccuucgccaccgccaacgccgacacccucugcaucggcuaccacgccaacaacuccaccgacaccgucgacaccguccucgagaagaacgucaccgucacccacuccgucaacauccucgaggacaagcacaacggcaagcucugcaagcuccgcggcgucgccccccuccaccucggcaagugcaacaucgccggcuggauccucggcaaccccgagugcgagucccucuccaccgccuccuccugguccuacaucgucgagaccuccuccuccgacaacggcaccugcuaccccggcaacuucaucgacuacgaggagcuccgcgagcagcucuccuccgucuccuccuucgagcgcuucgagaucuuccccaagaccuccuccuggcccaaccacgacuccaacaagggcgucaccgccgccugcccccacgccggcgccaaguccuucuacaagaaccucaucuggcucgucaagaagggcaacuccuaccccaagcucuccaaguccuacaucaacgacaagggcaaggagguccucguccucuggggcauccaccaccccuccaccuccgccgaccagcagucccucuaccagaacgccgacgccuacgucuucgucggcaccucccgcuacuccaagaaguucaagcccgagaucgccauccgccccaagguccgcgaccaggagggccgcaugaacuacuacuggacccucgucgagcccggcgacaagaucaccuucgaggccaccggcaaccucgucgucccccgcuacgccuucgccauggagcgcaacgccggcuccggcaucaucaucuccgacacccccguccacgacugcaacaccaccugccagacccccaagggcgccaucaacaccucccuccccuuccagaacauccaccccaucaccaucggcaagugccccaaguacgucaaguccaccaagcuccgccucgccaccggccuccgcaacguccccuccauccagucccgcggccucuucggcgccaucgccggcuucaucgagggcggcuggaccggcauggucgacggcugguacggcuaccaccaccagaacgagcagggcuccggcuacgccgccgaccucaaguccacccagaacgccaucgacgagaucaccaacaaggucaacuccgucaucgagaagaugaacacccaguucaccgccgucggcaaggaguucaaccaccucgagaagcgcaucgagaaccucaacaagaaggucgacgacggcuuccucgacaucuggaccuacaacgccgagcuccucguccuccucgagaacgagcgcacccucgacuaccacgacuccaacgucaagaaccucuacgagaagguccgcucccagcucaagaacaacgccaaggagaucggcaacggcugcuucgaguucuaccacaagugcgacaacaccugcauggaguccgucaagaacggcaccuacgacuaccccaaguacuccgaggaggccaagcucaaccgcgaggagaucgacggcgucaagcucgaguccacccgcaucuaccagauccucgccaucuacuccaccgucgccuccucccucguccucgucgucucccucggcgccaucuccuucuggaugugcuccaacggcucccuccagugccgcaucugcaucuga

SEQ ID NO: 100900 - RNA, 1701 nt, Artificial Sequence; identical to SEQ ID NO: 99869
  derived and/or modified CDS sequence (opt2) from hemagglutinin__InfluenzaA__ADG42693

SEQ ID NO: 100901 - RNA, 1701 nt, Artificial Sequence; identical to SEQ ID NO: 100577
  derived and/or modified CDS sequence (opt2) from hemagglutinin__InfluenzaA__ADG42703

SEQ ID NO: 100902 - RNA, 1701 nt, Artificial Sequence
  derived and/or modified CDS sequence (opt2) from hemagglutinin__InfluenzaA__ADG42723
augaaggccauccucgucguccuccucuacaccuucgccaccgccaacgccgacacccucugcaucggcuaccacgccaacaacuccaccgacaccgucgacaccguccucgagaagaacgucaccgucacccacuccgucaaccuccucgaggacaagcacaacggcaagcucugcaagcuccgcggcgucgccccccuccaccucggcaagugcaacaucgccggcuggauccucggcaaccccgagugcgagucccucuccaccgccuccuccugguccuacaucgucgagaccuccuccuccgacaacggcaccugcuaccccggcgacuucaucgacuacgaggagcuccgcgagcagcucuccuccgucuccuccuucgagcgcuucgagaucuuccccaagaccuccuccuggcccaaccacgacuccaacaagggcgucaccgccgccugcccccacgccggcgccaaguccuucuacaagaaccucaucuggcucgucaagaagggcaacuccuaccccaagcucuccaaguccuacaucaacgacaagggcaaggagguccucguccucuggggcauccaccaccccuccaccuccgccgaccagcagucccucuaccagaacgccgacgccuacgucuucgucggcaccucccgcuacuccaagaaguucaagcccgagauggccauccgccccaagguccgcgaccaggagggccgcaugaacuacuacuggacccucgucgagcccggcgacaagaucaccuucgaggccaccggcaaccucgucgucccccgcuacgccuucgccauggagcgcaacgccggcuccggcaucaucaucuccgacacccccguccacgacugcaacaccaccugccagacccccaagggcgccaucaacaccucccuccccuuccagaacauccaccccaucaccaucggcaagugccccaaguacgucaaguccaccaagcuccgccucgccaccggccuccgcaacguccccuccauccagucccgcggccucuucggcgccaucgccggcuucaucgagggcggcuggaccggcauggucgacggcugguacggcuaccaccaccagaacgagcagggcuccggcuacgccgccgaccucaaguccacccagaacgccaucgacaagaucaccaacaaggucaacuccgucaucgagaagaugaacacccaguucaccgccgucggcaaggaguucaaccaccucgagaagcgcaucgagaaccucaacaagaaggucgacgacggcuuccucgacaucuggaccuacaacgccgagcuccucguccuccucgagaacgagcgcacccucgacuaccacgacuccaacgucaagaaccucuacgagaagguccgcucccagcucaagaacaacgccaaggagaucggcaacggcugcuucgaguucuaccacaagugcgacaacaccugcauggaguccgucaagaacggcaccuacgacuaccccaaguacuccgaggaggccaagcucaaccgcgaggagaucgacggcgucaagcucgaguccacccgcaucuaccagauccucgccaucuacuccaccgucgccuccucccucguccucgucgucucccucggcgccaucuccuucuggaugugcuccaacggcucccuccagugccgcaucugcaucuga

SEQ ID NO: 100903 - RNA, 1701 nt, Artificial Sequence; identical to SEQ ID NO: 100332
  derived and/or modified CDS sequence (opt2) from hemagglutinin__InfluenzaA__ADG42743

SEQ ID NO: 100904 - RNA, 1701 nt, Artificial Sequence
  derived and/or modified CDS sequence (opt2) from hemagglutinin__InfluenzaA__ADG42753
augaaggccauccucgucguccuccucuacaccuucgccaccgccaacgccgacacccucugcaucggcuaccacgccaacaacuccaccgacaccgucgacaccguccucgagaagaacgucaccgucacccacuccgucaaccuccucgaggacaagcacaacggcaagcucugcaagcuccgcggcgucgccccccuccaccucggcaagugcaacaucgccggcuggauccucggcaaccccgagugcgagucccucuccaccgccuccuccugguccuacaucgucgagaccuccuccuccgacaacggcaccugcuaccccggcgacuucaucgacuacgaggagcuccgcgagcagcucuccuccgucuccuccuucgagcgcuucgagaucuuccccaagaccuccuccuggcccaaccacgacuccaacaagggcgucaccgccgccugcccccacgccggcgccaaguccuucuacaagaaccucaucuggcucgucaagaagggcaacuccuaccccaagcucuccaaguccuacaucaacgacaagggcaaggagguccucguccucuggggcauccaccaccccuccaccuccaccgaccagcagucccucuaccagaacgccgacgccuacgucuucgucggcaccucccgcuacuccaagaaguucaagcccgagaucgccauccgccccaagguccgcgaccaggagggccgcaugaacuacuacuggacccucgucgagcccggcgacaagaucaccuucgaggccaccggcaaccucgucgucccccgcuacgccuucgccauggagcgcaacuccggcuccggcaucaucaucuccgacacccccguccacgacugcaacaccaccugccagacccccaagggcgccaucaacaccucccuccccuuccagaacauccaccccaucaccaucggcaagugccccaaguacgucaaguccaccaagcuccgccucgccaccggccuccgcaacguccccuccauccagucccgcggccucuucggcgccaucgccggcuucaucgagggcggcuggaccggcauggucgacggcugguacggcuaccaccaccagaacgagcagggcuccggcuacgccgccgaccucaaguccacccagaacgccaucgacgagaucaccaacaaggucaacuccgucaucgagaagaugaacacccaguucaccgccgucggcaaggaguucaaccaccucgagaagcgcaucgagaaccucaacaagaaggucgacgacggcuuccucgacaucuggaccuacaacgccgagcuccucguccuccucgagaacgagcgcacccucgacuaccacgacuccaacgucaagaaccucuacgagaagguccgcucccagcucaagaacaacgccaaggagaucggcaacggcugcuucgaguucuaccacaagugcgacaacaccugcauggaguccgucaagaacggcaccuacgacuaccccaaguacuccgaggaggccaagcucaaccgcgaggagaucgacggcgucaagcucgaguccacccgcaucuaccagauccucgccaucuacuccaccgucgccuccucccucguccucgucgucucccucggcgccaucuccuucuggaugugcuccaacggcucccuccagugccgcaucugcaucuga

SEQ ID NO: 100905 - RNA, 1701 nt, Artificial Sequence; identical to SEQ ID NO: 99869
  derived and/or modified CDS sequence (opt2) from hemagglutinin__InfluenzaA__ADG42763

SEQ ID NO: 100906 - RNA, 1701 nt, Artificial Sequence; identical to SEQ ID NO: 99869
  derived and/or modified CDS sequence (opt2) from hemagglutinin__InfluenzaA__ADG42773

SEQ ID NO: 100907 - RNA, 1701 nt, Artificial Sequence
  derived and/or modified CDS sequence (opt2) from hemagglutinin__InfluenzaA__ADG42783
augaaggccauccucgucguccuccucuacaccuucgccaccgccaacgccgacacccucugcaucggcuaccacgccaacaacuccaccgacaccgucgacaccguccucgagaagaacgucaccgucacccacuccgucaaccuccucgaggacaagcacaacggcaagcucugcaagcuccgcggcgucgccccccuccaccucggcaagugcaacaucgccggcuggauccucggcaaccccgagugcgagucccucuccaccgccuccuccugguccuacaucgucgagaccuccuccuccgacaacggcaccugcuaccccggcgacuucaucgacuacgaggagcuccgcgagcagcucuccuccgucuccuccuucgagcgcuucgagauguuccccaagaccuccuccuggcccaaccacgacuccaacaagggcgucaccgccgccugcccccacgccggcgccaaguccuucuacaagaaccucaucuggcucgucaagaagggcaacuccuaccccaagcucuccaaguccuacaucaacgacaagggcaaggagguccucguccucuggggcauccaccaccccuccaccuccaccgaccagcagucccucuaccagaacgccgacgccuacgucuucgucggcaccucccgcuacuccaagaaguucaagcccgagaucgccauccgccccaagguccgcgaccaggagggccgcaugaacuacuacuggacccucgucgagcccggcgacaagaucaccuucgaggccaccggcaaccucgucgucccccgcuacgccuucgccauggagcgcaacgccggcuccggcaucaucaucuccgacacccccguccacgacugcaacaccaccugccagacccccaagggcgccaucaacaccucccuccccuuccagaacauccaccccaucaccaucggcaagugccccaaguacgucaaguccaccaagcuccgccucgccaccggccuccgcaacguccccuccauccagucccgcggccucuucggcgccaucgccggcuucaucgagggcggcuggaccggcauggucgacggcugguacggcuaccaccaccagaacgagcagggcuccggcuacgccgccgaccucaaguccacccagaacgccaucgacaagaucaccaacaaggucaacuccgucaucgagaagaugaacacccaguucaccgccgucggcaaggaguucaaccaccucgagaagcgcaucgagaaccucaacaagaaggucgacgacggcuuccucgacaucuggaccuacaacgccgagcuccucguccuccucgagaacgagcgcacccucgacuaccacgacuccaacgucaagaaccucuacgagaagguccgcucccagcucaagaacaacgccaaggagaucggcaacggcugcuucgaguucuaccacaagugcgacaacaccugcauggaguccgucaagaacggcaccuacgacuaccccaaguacuccgaggaggccaagcucaaccgcgaggagaucgacggcgucaagcucgaguccacccgcaucuaccagauccucgccaucuacuccaccgucgccuccucccucguccucgucgucucccucggcgccaucuccuucuggaugugcuccaacggcucccuccagugccgcaucugcaucuga

SEQ ID NO: 100908 - RNA, 1701 nt, Artificial Sequence; identical to SEQ ID NO: 99869
  derived and/or modified CDS sequence (opt2) from hemagglutinin__InfluenzaA__ADG42793

SEQ ID NO: 100909 - RNA, 1701 nt, Artificial Sequence; identical to SEQ ID NO: 100907
  derived and/or modified CDS sequence (opt2) from hemagglutinin__InfluenzaA__ADG42803

SEQ ID NO: 100910 - RNA, 1701 nt, Artificial Sequence; identical to SEQ ID NO: 100257
  derived and/or modified CDS sequence (opt2) from hemagglutinin__InfluenzaA__ADG42813

SEQ ID NO: 100911 - RNA, 1701 nt, Artificial Sequence; identical to SEQ ID NO: 100400
  derived and/or modified CDS sequence (opt2) from hemagglutinin__InfluenzaA__ADG42823

SEQ ID NO: 100912 - RNA, 1701 nt, Artificial Sequence; identical to SEQ ID NO: 100302
  derived and/or modified CDS sequence (opt2) from hemagglutinin__InfluenzaA__ADG42833

SEQ ID NO: 100913 - RNA, 1701 nt, Artificial Sequence; identical to SEQ ID NO: 99869
  derived and/or modified CDS sequence (opt2) from hemagglutinin__InfluenzaA__ADG42843

SEQ ID NO: 100914 - RNA, 1701 nt, Artificial Sequence; identical to SEQ ID NO: 99869
  derived and/or modified CDS sequence (opt2) from hemagglutinin__InfluenzaA__ADG42853

SEQ ID NO: 100915 - RNA, 1701 nt, Artificial Sequence; identical to SEQ ID NO: 100423
  derived and/or modified CDS sequence (opt2) from hemagglutinin__InfluenzaA__ADG42863

SEQ ID NO: 100916 - RNA, 1701 nt, Artificial Sequence; identical to SEQ ID NO: 100443
  derived and/or modified CDS sequence (opt2) from hemagglutinin__InfluenzaA__ADG42883

SEQ ID NO: 100917 - RNA, 1701 nt, Artificial Sequence
  derived and/or modified CDS sequence (opt2) from hemagglutinin__InfluenzaA__ADG42893
augaaggccauccucgucguccuccucuacaccuucgccaccgccaacgccgacacccucugcaucggcuaccacgccaacaacuccaccgacaccgucgacaccguccucgagaagaacgucaccgucacccacuccgucaaccuccucgaggacaagcacaacggcaagcucugcaagcuccgcggcgucgccccccuccaccucggcaagugcaacaucgccggcuggauccucggcaaccccgagugcgagucccucuccaccgccuccuccugguccuacaucgucgagaccuccuccuccgacaacggcaccugcuaccccggcgacuucaucgacuacgaggagcuccgcgagcagcucuccuccgucuccuccuucgagcgcuucgagaucuuccccaagaccuccuccuggcccaaccacgacuccaacaagggcgucaccgccgccugcccccacgccggcgccaaguccuucuacaagaaccucaucuggcucgucaagaagggcaacuccuaccccaagcucuccaaguccuacaucaacgacaagggcaaggagguccucguccucuggggcauccaccaccccuccaccuccgccgaccagcagucccucuaccagaacgccgacgccuacgucuucgucggcaccucccgcuacuccaagaaguucaagcccgagaucgccauccgccccaagguccgcgaccaggagggccgcaugaacuacuacuggacccucgucgagcccggcgacaagaucaccuucgaggccaccggcaaccucgucgucccccgcuacgccuucgccauggagcgcaacgccggcuccggcaucaucaucuccgacacccccguccacgacugcaacaccaccugccagacccccaagggcgccaucaacaccucccuccccuuccagaacauccaccccaucaccaucggcaagugccccaaguacgucaaguccaccaaccuccgccucgccaccggccuccgcaacguccccuccauccagucccgcggccucuucggcgccaucgccggcuucaucgagggcggcuggaccggcauggucgacggcugguacggcuaccaccaccagaacgagcagggcuccggcuacgccgccgaccucaaguccacccagaacgccaucgacgagaucaccaacaaggucaacuccgucaucgagaagaugaacacccaguucaccgccgucggcaaggaguucaaccaccucgagaagcgcaucgagaaccucaacaagaaggucgacgacggcuuccucgacaucuggaccuacaacgccgagcuccucguccuccucgagaacgagcgcacccucgacuaccacgacuccaacgucaagaaccucuacgagaagguccgcucccagcucaagaacaacgccaaggagaucggcaacggcugcuucgaguucuaccacaagugcgacaacaccugcauggaguccgucaagaacggcaccuacgacuaccccaaguacuccgaggaggccaagcucaaccgcgaggagaucgacggcgucaagcucgaguccacccgcaucuaccagauccucgccaucuacuccaccgucgccuccucccucguccucgucgucucccucggcgccaucuccuucuggaugugcuccaacggcucccuccagugccgcaucugcaucuga

SEQ ID NO: 100918 - RNA, 1701 nt, Artificial Sequence; identical to SEQ ID NO: 98705
  derived and/or modified CDS sequence (opt2) from hemagglutinin__InfluenzaA__ADG42903

SEQ ID NO: 100919 - RNA, 1701 nt, Artificial Sequence; identical to SEQ ID NO: 99869
  derived and/or modified CDS sequence (opt2) from hemagglutinin__InfluenzaA__ADG42913

SEQ ID NO: 100920 - RNA, 1701 nt, Artificial Sequence; identical to SEQ ID NO: 100433
  derived and/or modified CDS sequence (opt2) from hemagglutinin__InfluenzaA__ADG42923

SEQ ID NO: 100921 - RNA, 1701 nt, Artificial Sequence
  derived and/or modified CDS sequence (opt2) from hemagglutinin__InfluenzaA__ADG57087
augaaggccauccucgucguccuccucuacaccuucgccaccgccaacgccgacacccucugcaucggcuaccacgccaacaacuccaccgacaccgucgacaccguccucgagaagaacgucaccgucacccacuccgucaaccuccucgaggacaagcacaacggcaagcucugcaagcuccgcggcgucgccccccuccaccucggcaagugcaacaucgccggcuggauccucggcaaccccgagugcgagucccucuccaccgccuccuccugguccuacaucgucgagaccuccuccuccgacaacggcaccugcuaccccggcgacuucaucgacuacgaggagcuccgcgagcagcucuccuccgucuccuccuucgagcgcuucgagaucuuccccaagaccuccuccuggcccaaccacgacuccaacaagggcgucaccgccgccugcccccacgccggcgccaaguccuucuacaagaaccucaucuggcucgucaagaagggcaacuccuaccccaagcucuccaaguccuacaucaacgacaagggcaaggagguccucguccucuggggcauccaccaccccuccaccuccgccgaccagcagucccucuaccagaacgccgacgccuacgucuucgucggcaccucccgcuacuccaagaaguucaagcccgagaucgccauccgccccaagguccgcgaccaggagggccgcaugaacuacuacuggacccucgucgagcccggcgacaagaucaccuucgaggccaccggcaaccucgucgucccccgcuacgccuucgccauggagcgcaacgccggcuccggcaucaucaucuccgacacccccguccacgacugcaacaccaccugccagacccccaagggcgccaucaacaccucccuccccuuccagaacauccaccccaucaccaucggcaagugccccaaguacgucaaguccaccaagcuccgccucgccaccggccuccgcaacguccccuccauccagucccgcggccucuucggcgccaucgccggcuucaucgagggcggcuggaccggcauggucgacggcugguacggcuaccaccaccagaacgagcagggcuccggcuacgccgccgaccucaaguccacccagaacgccaucgacgagaucaccaacaaggucaacuccgucaucgagaagaugaacacccaguucaccgccgucggcaaggaguucaaccaccucgagaagcgcaucgagaaccucaacaagaaggucgacgacggcuuccucgacaucuggaccuacaacgccgagcuccucguccuccucgagaacgagcgcacccucgacuaccacgacuccaacgucaagaaccucuacgagaagguccgcucccagcucaagaacaacgccaaggagaucggcaacggcugcuucgaguucuaccacaagugcgacaacaccugcauggaguccgucaagaacggcaccuacgacuaccccaaguacuccgaggaggccaagcucaaccgcgaggagaucgacggcgucaagcucgaguccacccgcaucuaccagauccucgccaucuacuccaccgucgccaucucccucguccucgucgucucccucggcgccaucuccuucuggaugugcuccaacggcucccuccgcugccgcaucugcaucuga

SEQ ID NO: 100922 - RNA, 1701 nt, Artificial Sequence; identical to SEQ ID NO: 98705
  derived and/or modified CDS sequence (opt2) from hemagglutinin__InfluenzaA__ADG57088

SEQ ID NO: 100923 - RNA, 1701 nt, Artificial Sequence
  derived and/or modified CDS sequence (opt2) from hemagglutinin__InfluenzaA__ADG57089
auggaggccauccucgucguccuccucuacaccuucgccaccgccaacgccgacacccucugcaucggcuaccacgccaacaacuccaccgacaccgucgacaccguccucgagaagaacgucaccgucacccacuccgucaaccuccucgaggacaagcacaacggcaagcucugcaagcuccgcggcgucgccccccuccaccucggcaagugcaacaucgccggcuggauccucggcaaccccgagugcgagucccucuccaccgccuccuccugguccuacaucgucgagaccuccuccuccgacaacggcaccugcuaccccggcgacuucauccaguacgaggagcuccgcgagcagcucuccuccgucuccuccuucgagcgcuucgagaucuuccccaagaccuccuccuggcccaaccacgacuccaacaagggcgucaccgccgccugcccccacgccggcgccaaguccuucuacaagaaccucaucuggcucgucaagaagggcaacuccuaccccaagcucuccaaguccuacaucaacgacaagggcaaggagguccucguccucuggggcauccaccaccccuccaccuccgccgaccagcagucccucuaccagaacgccgacgccuacgucuucgucggcuccucccgcuacuccaagaaguucaagcccgagaucgccauccgccccaagguccgcgaccaggagggccgcaugaacuacuacuggacccucgucgagcccggcgacaagaucaccuucgaggccaccggcaaccucgucgucccccgcuacgccuucgccauggagcgcaacgccggcuccggcaucaucaucuccgacacccccguccacgacugcaacaccaccugccagacccccaagggcgccaucaacaccucccuccccuuccacaacauccaccccaucaccaucggcaagugccccaaguacgucaaguccaccaagcuccgccucgccaccggccuccgcaacguccccuccauccagucccgcggccucuucggcgccaucgccggcuucaucgagggcggcuggaccggcauggucgacggcugguacggcuaccaccaccagaacgagcagggcuccggcuacgccgccgaccucaaguccacccagaacgccaucgacgagaucaccaacaaggucaacuccgucaucgagaagaugaacacccaguucaccgccgucggcaaggaguucaaccaccucgagaagcgcaucgagaaccucaacaagaaggucgacgacggcuuccucgacaucuggaccuacaacgccgagcuccucguccuccucgagaacgagcgcacccucgacuaccacgacuccaacgucaagaaccucuacgagaagguccgcucccagcucaagaacaacgccgaggagaucggcaacggcugcuucgaguucuaccacaagugcgacaacaccugcauggaguccgucaagaacggcaccuacgacuaccccaaguacuccgaggaggccaagcucaaccgcgaggagaucgacggcgucaagcucgaguccacccgcaucuaccagauccucgccaucuacuccaccgucgccuccucccucguccucgucgucucccucggcgccaucuccuucuggaugugcuccaacggcucccuccagugccgcaucugcaucuga

SEQ ID NO: 100924 - RNA, 1701 nt, Artificial Sequence
  derived and/or modified CDS sequence (opt2) from hemagglutinin__InfluenzaA__ADG57090
augaaggccauccucgucguccuccucuacaccuucgccaccgccaacgccgacacccucugcaucggcuaccacgccaacaacuccaccgacaccgucgacaccguccucgagaagaacgucaccgucacccacuccgucaaccuccucgaggacaagcacaacggcaagcucugcaagcuccgcggcgucgccccccuccaccucggcaagugcaacaucgccggcuggauccucggcaaccccgagugcgagucccucuccaccgccuccuccugguccuacaucgucgagaccuccuccuccgacaacggcaccugcuaccccggcgacuucaucgacuacgaggagcuccgcgagcagcucuccuccgucuccuccuucgagcgcuucgagaucuuccccaagaccuccuccuggcccaaccacgacuccaacaagggcgucaccgccgccugcccccacgccggcgccaaguccuucuacaagaaccucaucuggcucgucaagaagggcaacuccuaccccaagcucuccaaguccuacaucaacgacaagggcaaggagguccucguccucuggggcauccaccaccccuccaccuccgccgaccagcaguccaucuaccagaacgccgacgccuacgucuucgucggcaccucccgcuacuccaagaaguucaagcccgagaucgccauccgccccaagguccgcgaccaggagggccgcaugaacuacuacuggacccucgucgagcccggcgacaagaucaccuucgaggccaccggcaaccucgucgucccccgcuacgccuucgccauggagcgcaacgccggcuccggcaucaucaucuccgacacccccguccacgacugcaacaccaccugccagacccccaagggcgccaucaacaccucccuccccuuccagaacauccaccccaucaccaucggcaagugccccaaguacgucaaguccaccaagcuccgccucgccaccggccuccgcaacguccccuccauccagucccgcggccucuucggcgccaucgccggcuucaucgagggcggcuggaccggcauggucgacggcugguacggcuaccaccaccagaacgagcagggcuccggcuacgccgccgaccucaaguccacccagaacgccaucgacgagaucaccaacaaggucaacuccgucaucgagaagaugaacacccaguucaccgccgucggcaaggaguucaaccaccucgagaagcgcaucgagaaccucaacaagaaggucgacgacggcuuccucgacaucuggaccuacaacgcccagcuccucguccuccucgagaacgagcgcacccucgacuaccacgacuccaacgucaagaaccucuacgagaagguccgcucccagcucaagaacaacgccaaggagaucggcaacggcugcuucgaguucuaccacaagugcgacaacaccugcauggaguccgucaagaacggcaccuacgacuaccccaaguacuccgaggaggccaagcucaaccgcgaggagaucgacggcgucaagcucgaguccacccgcaucuaccagauccucgccaucuacuccaccgucgccuccucccucguccucgucgucucccucggcgccaucuccuucuggaugugcuccaacggcucccuccagugccgcaucugcaucuga

SEQ ID NO: 100925 - RNA, 1701 nt, Artificial Sequence
  derived and/or modified CDS sequence (opt2) from hemagglutinin__InfluenzaA__ADG57091
auggaggccauccucgucguccuccucuacaccuucgccaccgccaacgccgacacccucugcaucggcuaccacgccaacaacuccaccgacaccgucgacaccguccucgagaagaacgucaccgucacccacuccgucaaccuccucgaggacaagcacaacggcaagcucugcaagcuccgcggcgucgccccccuccaccucggcaagugcaacaucgccggcuggauccucggcaaccccgagugcgagucccucuccaccgccuccuccugguccuacaucgucgagaccuccuccuccgacaacggcaccugcuaccccggcgacuucaucgacuacgaggagcuccgcgagcagcucuccuccgucuccuccuucgagcgcuucgagaucuuccccaagaccuccuccuggcccaaccacgacuccaacaagggcgucaccgccgccugcccccacgccggcgccaaguccuucuacaagaaccucaucuggcucgucaagaagggcaacuccuaccccaagcucuccaaguccuacaucaacgacaagggcaaggagguccucguccucuggggcauccaccaccccuccaccuccgccgaccagcagucccucuaccagaacgccgacgccuacgucuucgucggcuccucccgcuacuccaagaaguucaagcccgagaucgccauccgccccaagguccgcgaccaggagggccgcaugaacuacuacuggacccucgucgagcccggcgacaagaucaccuucgaggccaccggcaaccucgucgucccccgcuacgccuucgccauggagcgcaacgccggcuccggcaucaucaucuccgacacccccguccacgacugcaacaccaccugccagacccccaagggcgccaucaacaccucccuccccuuccacaacauccaccccaucaccaucggcaagugccccaaguacgucaaguccaccaagcuccgccucgccaccggccuccgcaacguccccuccauccagucccgcggccucuucggcgccaucgccggcuucaucgagcgcggcuggaccggcauggucgacggcugguacggcuaccaccaccagaacgagcagggcuccggcuacgccgccgaccucaaguccacccagaacgccaucgacgagaucaccaacaaggucaacuccgucaucgagaagaugaacacccaguucaccgccgucggcaaggaguucaaccaccucgagaagcgcaucgagaaccucaacaagaaggucgacgacggcuuccucgacaucuggaccuacaacgccgagcuccucguccuccucgagaacgagcgcacccucgacuaccacgacuccaacgucaagaaccucuacgagaagguccgcucccagcucaagaacaacgccaaggagaucggcaacggcugcuucgaguucuaccacaagugcgacaacaccugcauggaguccgucaagaacggcaccuacgacuaccccaaguacuccgaggaggccaagcucaaccgcgaggagaucgacggcgucaagcucgaguccacccgcaucuaccagauccucgccaucuacuccaccgucgccuccucccucguccucgucgucucccucggcgccaucuccuucuggaugugcuccaacggcucccuccagugccgcaucugcaucuga

SEQ ID NO: 100926 - RNA, 1701 nt, Artificial Sequence
  derived and/or modified CDS sequence (opt2) from hemagglutinin__InfluenzaA__ADG57092
augaaggccauccucgucguccuccucuacaccuucgccaccgccaacgccgacacccucugcaucggcuaccacgccaacaacuccaccgacaccgucgacaccguccucgagaagaacgucaccgucacccacuccgucaaccuccucgaggacaagcacaacggcaagcucugcaagcuccgcggcgucgccccccuccaccucggcaagugcaacaucgccggcuggauccucggcaaccccgagugcgagucccucuccaccgccuccuccugguccuacaucgucgagaccuccuccuccgacaacggcaccugcuaccccggcgacuucaucgacuacgaggagcuccgcgagcagcucuccuccgucuccuccuucgagcgcuucgagaucuuccccaagaccuccuccuggcccaaccacgacuccaacaagggcgucaccgccgccugcccccacgccggcgccaaguccuucuacaagaaccucaucuggcucgucaagaagggcaacuccuaccccaagcucaucaaguccuacaucaacgacaagggcaaggagguccucguccucuggggcauccaccaccccuccaccuccgccgaccagcagucccucuaccagaacgccgacgccuacgucuucgucggcaccucccgcuacuccaagaaguucaagcccgagaucgccauccgccccaagguccgcgaccaggagggccgcaugaacuacuacuggacccucgucgagcccggcgacaagaucaccuucgaggccaccggcaaccucgucgucccccgcuacgccuucgccauggagcgcaacgccggcuccggcaucaucaucuccgacacccccguccacgacugcaacaccaccugccagacccccaagggcgccaucaacaccucccuccccuuccagaacauccaccccaucaccaucggcaagugccccaaguacgucaaguccaccaagcuccgccucgccaccggccuccgcaacguccccuccauccagucccgcggccucuucggcgccaucgccggcuucaucgagggcggcuggaccggcauggucgacggcugguacggcuaccaccaccagaacgagcagggcuccggcuacgccgccgaccucaaguccacccagaacgccaucgacgagaucaccaacaaggucaacuccgucaucgagaagaugaacacccaguucaccgccgucggcaaggaguucaaccaccucgagaagcgcaucgagaaccucaacaagaaggucgacgacggcuuccucgacaucuggaccuacaacgccgagcuccucguccuccucgagaacgagcgcacccucgacuaccacgacuccaacgucaagaaccucuacgagaagguccgcucccagcucaagaacaacgccaaggagaucggcaacggcugcuucgaguucuaccacaagugcgacaacaccugcauggaguccgucaagaacggcaccuacgacuaccccaaguacuccgaggaggccaagcucaaccgcgaggagaucgacggcgucaagcucgaguccacccgcaucuaccagauccucgccaucuacuccaccgucgccuccucccucguccucgucgucucccucggcgccaucuccuucuggaugugcuccaacggcucccuccagugccgcaucugcaucuga

SEQ ID NO: 100927 - RNA, 1701 nt, Artificial Sequence
  derived and/or modified CDS sequence (opt2) from hemagglutinin__InfluenzaA__ADG57093
auggaggccauccucgucguccuccucuacaccuucgccaccgccaacgccgacacccucugcaucggcuaccacgccaacaacuccaccgacaccgucgacaccguccucgagaagaacgucaccgucacccacuccgucaaccuccucgaggacaagcacaacggcaagcucugcaagcuccgcggcgucgccccccuccaccucggcaagugcaacaucgccggcuggauccucggcaaccccgagugcgagucccucuccaccgccuccuccugguccuacaucgucgagaccuccuccuccgacaacggcaccugcuaccccggcgacuucaucgacuacgaggagcuccgcgagcagcucuccuccgucuccuccuucgagcgcuucgagaucuuccccaagaccuccuccuggcccaaccacgacuccaacaagggcgucaccgccgccugcccccacgccggcgccaaguccuucuacaagaaccucaucuggcucgucaagaagggcaacuccuaccccaagcucuccaaguccuacaucaacgacaagggcaaggagauccucguccucuggggcauccaccaccccuccaccuccgccgaccagcagucccucuaccagaacgccgacgccuacgucuucgucugguccucccgcuacuccaagaaguucaagcccgagaucgccauccgccccaagguccgcgaccaggagggccgcaugaacuacuacuggacccucgucgagcccggcgacaagaucaccuucgaggccaccggcaaccuccucgucccccgcuacgccuucgccauggagcgcaacgccggcuccggcaucaucaucuccgacacccccguccacgacugcaacaccaccugccagacccccaagggcgccaucaacaccucccuccccuuccacaacauccaccccaucaccaucggcaagugccccaaguacgucaaguccaccaagcuccgccucgccaccggccuccgcaacguccccuccauccagucccgcggccucuucggcgccaucgccggcuucaucgagggcggcuggaccggcauggucgacggcugguacggcuaccaccaccagaacgagcagggcuccggcuacgccgccgaccucaaguccacccagaacgccaucgacgagaucaccaacaaggucaacuccgucaucgagaagaugaacacccaguucaccgccgucggcaaggaguucaaccaccucgagaagcgcaucgagaaccucaacaagaaggucgacgacggcuuccucgacaucuggaccuacaacgccgagcuccucguccuccucgagaacgagcgcacccucgacuaccacgacuccaacgucaagaaccucuacgagaagguccgcucccagcucaagaacaacgccaaggagaucggcaacggcugcuucgaguucuaccacaagugcgacaacaccugcauggaguccgucaagaacggcaccuacgacuaccccaaguacuccgaggaggccaagcucaaccgcgaggagaucgacggcgucaagcucgaguccacccgcaucuaccagauccucgccaucuacuccaccgucgccuccucccucguccucgucgucucccucggcgccaucuccuucuggaugugcuccaacggcucccuccagugccgcaucugcaucuga

SEQ ID NO: 100928 - RNA, 1701 nt, Artificial Sequence
  derived and/or modified CDS sequence (opt2) from hemagglutinin__InfluenzaA__ADG57094
augaaggccauccucgucguccuccucuacaccuucgccaccgccaacgccgacacccucugcgucggcuaccacgccaacaacuccaccgacaccgucgacaccguccucgagaagaacgucaccgucacccacuccgucaaccuccucgaggacaagcacaacggcaagcucugcaagcuccgcggcgucgccccccuccaccucggcaagugcaacaucgccggcuggauccucggcaaccccgagugcgagucccucuccaccgccuccuccugguccuacaucgucgagaccuccuccuccgacaacggcaccugcuaccccggcgacuucaucgacuacgaggagcuccgcgagcagcucuccuccgucuccuccuucgagcgcuucgagaucuuccccaagaccuccuccuggcccaaccacgacuccaacaagggcgucaccgccgccugcccccacgccggcgccaaguccuucuacaagaaccucaucuggcucgucaagaagggcaacuccuaccccaagcucuccaaguccuacaucaacgacaagggcaaggagguccucguccucuggggcauccaccaccccuccaccuccgccgaccagcagucccucuaccagaacgccgacgccuacgucuucgucggcaccucccgcuacuccaagaaguucaagcccgagaucgccauccgccccaagguccgcgaccgcgagggccgcaugaacuacuacuggacccucgucgagcccggcgacaagaucaccuucgaggccaccggcaaccucgucgucccccgcuacgccuucgccauggagcgcaacgccggcuccggcaucaucaucuccgacacccccguccacgacugcaacaccaccugccagacccccaagggcgccaucaacaccucccuccccuuccagaacauccaccccaucaccaucggcaagugccccaaguacgucaaguccaccaagcuccgccucgccaccggccuccgcaacguccccuccauccagucccgcggccucuucggcgccaucgccggcuucaucgagggcggcuggaccggcauggucgacggcugguacggcuaccaccaccagaacgagcagggcuccggcuacgccgccgaccucaaguccacccagaacgccaucgacgagaucaccaacaaggucaacuccgucaucgagaagaugaacacccaguucaccgccgucggcaaggaguucaaccaccucgagaagcgcaucgagaaccucaacaagaaggucgacgacggcuuccucgacaucuggaccuacaacgccgagcuccucguccuccucgagaacgagcgcacccucgacuaccacgacuccaacgucaagaaccucuacgagaagguccgcucccagcucaagaacaacgccaaggagaucggcaacggcugcuucgaguucuaccacaagugcgacaacaccugcauggaguccgucaagaacggcaccuacgacuaccccaaguacuccgaggaggccaagcucaaccgcgaggagaucgacggcgucaagcucgaguccacccgcaucuaccagauccucgccaucuacuccaccgucgccuccucccucguccucgucgucucccucggcgccaucuccuucuggaugugcuccaacggcucccuccagugccgcaucugcaucuga

SEQ ID NO: 100929 - RNA, 1701 nt, Artificial Sequence; identical to SEQ ID NO: 98705
  derived and/or modified CDS sequence (opt2) from hemagglutinin__InfluenzaA__ADG57095

SEQ ID NO: 100930 - RNA, 1701 nt, Artificial Sequence
  derived and/or modified CDS sequence (opt2) from hemagglutinin__InfluenzaA__ADG57097
auggaggccauccucgucguccuccucuacaccuucgccaccgccaacgccgacacccucugcaucggcuaccacgccaacaacuccaccgacaccgucgacaccguccucgagaagaacgucaccgucacccacuccgucaaccuccucgaggacaagcacaacggcaagcucugcaagcuccgcggcgucgccccccuccaccucggcaagugcaacaucgccggcuggauccucggcaaccccgagugcgagucccucuccaccgccuccuccugguccuacaucgucgagaccuccuccuccgacaacggcaccugcuaccccggcgacuucaucgacuacgaggagcuccgcgagcagcucuccuccgucuccuccuucgagcgcuucgagaucuuccccaagaccuccuccuggcccaaccacgacuccaacaagggcgucaccgccgccugcccccacgccggcgccaaguccuucuacaagaaccucaucuggcucgucaagaagggcaacuccuaccccaagcucuccaaguccuacaucaacgacaagggcaaggagguccucguccucuggggcauccaccaccccuccaccuccgccgaccagcagucccucuaccagaacgccgacgccuacgucuucgucggcuccucccgcuacuccaagaaguucaagcccgagaucgccauccgccccaagguccgcggccaggagggccgcaugaacuacuacuggacccucgucgagcccggcgacaagaucaccuucgaggccaccggcaaccucgucgucccccgcuacgccuucgccauggagcgcaacgccggcuccggcaucaucaucuccgacacccccguccacgacugcaacaccaccugccagacccccaagggcgccaucaacaccucccuccccuuccacaacauccaccccaucaccaucggcaagugccccaaguacgucaaguccaccaagcuccgccucgccaccggccuccgcaacguccccuccauccagucccgcggccucuucggcgccaucgccggcuucaucgagggcggcuggaccggcauggucgacggcugguacggcuaccaccaccagaacgagcagggcuccggcuacgccgccgaccucaaguccacccagaacgccaucgacgagaucaccaacaaggucaacuccgucaucgagaagaugaacacccaguucaccgccgucggcaaggaguucaaccaccucgagaagcgcaucgagaaccucaacaagaaggucgacgacggcuuccucgacaucuggaccuacaacgccgagcuccucguccuccucgagaacgagcgcacccucgacuaccacgacuccaacgucaagaaccucuacgagaagguccgcucccagcucaagaacaacgccaaggagaucggcaacggcugcuucgaguucuaccacaagugcgacaacaccugcauggaguccgucaagaacggcaccuacgacuaccccaaguacuccgaggaggccaagcucaaccgcgaggagaucgacggcgucaagcucgaguccacccgcaucuaccagauccucgccaucuacuccaccgucgccuccucccucguccucgucgucucccucggcgccaucuccuucuggaugugcuccaacggcucccuccagugccgcaucugcaucuga

SEQ ID NO: 100931 - RNA, 1701 nt, Artificial Sequence; identical to SEQ ID NO: 99869
  derived and/or modified CDS sequence (opt2) from hemagglutinin__InfluenzaA__ADG57098

SEQ ID NO: 100932 - RNA, 1701 nt, Artificial Sequence
  derived and/or modified CDS sequence (opt2) from hemagglutinin__InfluenzaA__ADG57099
augaaggccauccucgucguccuccucuacaccuucgccaccgccaacgccgacacccucugcaucggcuaccacgccaacaacuccaccgacaccgucgacaccguccucgagaagaacgucaccgucacccacuccgucaaccuccucgaggacaagcacaacggcaagcucugcaagcuccgcggcgucgccccccuccaccucggcaagugcaacaucgccggcuggauccucggcaaccccgagugcgagucccucuccaccgccuccuccugguccuacaucgucgagaccuccuccuccgacaacggcaccugcuaccccggcgacuucaucgacuacgaggagcuccgcgagcagcucuccuccgucuccuccuucgagcgcuucgagaucuuccccaagaccuccuccuggcccaaccacgacuccaacaagggcgucaccgccgccugcccccacgccggcgccaaguccuucuacaagaaccucaucuggcucgucaagaagggcaacuccuaccccaagcucuccaaguccuacaucaacgacaagggcaaggagguccucguccucuggggcauccaccaccccuccaccuccgccgaccagcagucccucuaccagaacgccgacgccuacgucuucgucggcaccucccgcuacuccaagaaguucaagcccgagaucgccauccgccccaagguccgcgaccaggagggccgcaugaacuaccacuggacccucgucgagcccggcgacaagaucaccuucgaggccaccggcaaccucgucgucccccgcuacgccuucgccauggagcgcaacgccggcuccggcaucaucaucaccgacacccccguccacgacugcaacaccaccugccagacccccaagggcgccgucaacaccucccuccccuuccagaacauccaccccaucaccaucggcaagugccccaaguacgucaaguccaccaagcuccgccucgccaccggccuccgcaacguccccuccauccagucccgcggccucuucggcgccaucgccggcuucaucgagggcggcuggaccggcauggucgacggcugguacggcuaccaccaccagaacgagcagggcuccggcuacgccgccgaccucaaguccacccagaacgccaucgacaagaucaccaacaaggucaacuccgucaucgagaagaugaacacccaguucaccgccgucggcaaggaguucaaccaccucgagaagcgcaucgagaaccucaacaagaaggucgacgacggcuuccucgacaucuggaccuacaacgccgagcuccucguccuccucgagaacgagcgcacccucgacuaccacgacuccaacgucaagaaccucuacgagaagguccgcucccagcucaagaacaacgccaaggagaucggcaacggcugcuucgaguucuaccacaagugcgacaacaccugcauggaguccgucaagaacggcaccuacgacuaccccaaguacuccgaggaggccaagcucaaccgcgaggagaucgacggcgucaagcucgaguccacccgcaucuaccagauccucgccaucuacuccaccgucgccuccucccucguccucgucgucucccucggcgccaucuccuucuggaugugcuccaacggcucccuccagugccgcaucugcaucuga

SEQ ID NO: 100933 - RNA, 1701 nt, Artificial Sequence
  derived and/or modified CDS sequence (opt2) from hemagglutinin__InfluenzaA__ADG57100
augaaggccauccucgucguccuccucuacaccuucgccaccgccaacgccgacacccucugcaucggcuaccacgccaacaacuccaccgacaccgucgacaccguccucgagaagaacgucaccgucacccacuccgucaaccuccucgaggacaagcacaacggcaagcucugcaagcuccgcggcgucgccccccuccaccucggcaagugcaacaucgccggcuggauccucggcaaccccgagugcgagucccucuccaccgccuccuccugguccuacaucgucgagaccuccuccuccgacaacggcaccugcuaccccggcgacuucaucgacuacgaggagcuccgcgagcagcucuccuccgucuccuccuucgagcgcuucgagaucuuccccaagaccuccuccuggcccaaccacgacuccaacaagggcgucaccgccgccugcccccacgccggcgccaaguccuucuacaagaaccucaucuggcucgucaagaagggcaacuccuaccccaagcucuccaaguccuacaucaacgacaagggcaaggagguccucguccucuggggcauccaccaccccuccaccuccgccgaccagcagucccucuaccagaacgccgacgccuacgucuucgucggcaccucccgcuacuccaagaaguucaagcccgagaucgccauccgccccaagguccgcgaccaggagggccgcaugaacuacuacuggacccucgucgagcccggcgacaagaucaccuucgaggccaccggcaaccucgucgucccccgcuacgccuucgccauggagcgcaacgccggcuccggcaucaucaucuccgacacccccguccacgacugcaacaccaccugccagacccccaagggcgccaucaacaccucccuccccuuccagaacauccaccccaucaccaucggcaagugccccaaguacgucaaguccaccaagcuccgccucgccaccggccuccgcaacguccccuccauccagucccgcggccucuucggcgccaucgccggcuucaucgagggcggcuggaccggcauggucgacggcugguacggcuaccaccaccagaacgagcagggcuccggcuacgccgccgaccucaaguccacccagaacgccaucgacaagaucaccaacaaggucaacuccgucaucgagaagaugaacacccaguucaccgccggcggcaaggaguucaaccaccucgagaagcgcaucgagaaccucaacaagaaggucgacgacggcuuccucgacaucuggaccuacaacgccgagcuccucguccuccucgagaacgagcgcacccucgacuaccacgacuccaacgucaagaaccucuacgagaagguccgcucccagcucaagaacaacgccaaggagaucggcaacggcugcuucgaguucuaccacaagugcgacaacaccugcauggaguccgucaagaacggcaccuacgacuaccccaaguacuccgaggaggccaagcucaaccgcgaggagaucgacggcgucaagcucgaguccacccgcaucuaccagauccucgccaucuacuccaccgucgccuccucccucguccucgucgucucccucggcgccaucuccuucuggaugugcuccaacggcucccuccagugccgcaucugcaucuga

SEQ ID NO: 100934 - RNA, 1701 nt, Artificial Sequence; identical to SEQ ID NO: 98705
  derived and/or modified CDS sequence (opt2) from hemagglutinin__InfluenzaA__ADG58939

SEQ ID NO: 100935 - RNA, 1701 nt, Artificial Sequence; identical to SEQ ID NO: 98705
  derived and/or modified CDS sequence (opt2) from hemagglutinin__InfluenzaA__ADG58940

SEQ ID NO: 100936 - RNA, 1701 nt, Artificial Sequence
  derived and/or modified CDS sequence (opt2) from hemagglutinin__InfluenzaA__ADG58941
augaaggccauccucgucguccuccucuacaccuucgccaccgccaacgccgacacccucugcaucggcuaccacgccaacaacuccaccgacaccgucgacaccguccucgagaagaacgucaccgucacccacuccgucaaccuccucgaggacaagcacaacggcaagcucugcaagcuccgcggcgucgccccccuccaccucggcaagugcaacaucgccggcuggauccucggcaaccccgagugcgagucccucuccaccgccuccuccugguccuacaucgucgagaccuccuccuccgacaacggcaccugcuaccccggcgacuucaucgacuacgaggagcuccgcgagcagcucuccuccgucuccuccuucgagcgcuucgagaucuuccccaagaccuccuccuggcccaaccacgacuccaacaagggcgucaccgccgccugcccccacgccggcgccaaguccuucuacaagaaccucaucuggcucgucaagaagggcaacuccuaccccaagcucuccaaguccuacaucaacgacaagggcaaggagguccucguccucuggggcauccaccaccccuccaccuccgccgaccagcagucccucuaccagaacgccgacaccuacgucuucgucggcaccucccgcuacuccaagaaguucaagcccgagaucgccauccgccccaagguccgcgaccaggagggccgcaugaacuacuacuggacccucgucgagcccggcgacaagaucaccuucgaggccaccggcaaccucgucgucccccgcuacgccuucgccauggagcgcaacgccggcuccggcaucaucaucuccgacacccccguccacgacugcaacaccaccugccagacccccaagggcgccaucaacaccucccuccccuuccagaacauccaccccaucaccaucggcaagugccccaaguacgucaaguccaccaagcuccgccucgccaccggccuccgcaacguccccuccauccagucccgcggccucuucggcgccaucgccggcuucaucgagggcggcuggaccggcauggucgacggcugguacggcuaccaccacgagaacgagcagggcuccggcuacgccgccgaccucaaguccacccagaacgccaucgacgagaucaccaacaaggucaacuccgucaucgagaagaugaacacccaguucaccgccgucggcaaggaguucaaccaccucgagaagcgcaucgagaaccucaacaagaagaucgacgacggcuuccucgacaucuggaccuacaacgccgagcuccucguccuccucgagaacgagcgcacccucgacuaccacgacuccaacgucaagaaccucuacgagaagguccgcucccagcucaagaacaacgccaaggagaucggcaacggcugcuucgaguucuaccacaagugcgacaacaccugcauggaguccgucaagaacggcaccuacgacuaccccaaguacuccgaggaggccaagcucaaccgcgaggagaucgacggcgucaagcucgaguccacccgcaucuaccagauccucgccaucuacuccaccgucgccuccucccucguccucgucgucucccucggcgccaucuccuucuggaugugcuccaacggcucccuccagugccgcaucugcaucuga

SEQ ID NO: 100937 - RNA, 1701 nt, Artificial Sequence
  derived and/or modified CDS sequence (opt2) from hemagglutinin__InfluenzaA__ADG58942
augaaggccauccucgucguccuccucuacaccuucgccaccgccaacgccgacacccucugcaucggcuaccacgccaacaacuccaccgacaccgucgacaccguccucgagaagaacgucaccgucacccacuccgucaaccuccucgaggacaagcacaacggcaagcucugcaagcuccgcggcgucgccccccuccaccucggcaagugcaacaucgccggcuggauccucggcaaccccgagugcgagucccucuccaccgccuccuccugguccuacaucgucgagaccuccuccuccgacaacggcaccugcuaccccggcgacuucaucgacuacgaggagcuccgcgagcagcucuccuccgucuccuccuucgagcgcuucgagaucuuccccaagaccuccuccuggcccaaccacgacuccaacaagggcgucaccgccgccugcccccacgccggcgccaaguccuucuacaagaaccucaucuggcucgucaagaagggcaacuccuaccccaagcucuccaaguccuacaucaacgacaagggcaaggagguccucguccucuggggcauccaccaccccuccaccuccgccgaccagcagucccucuaccagaacgccgacaccuacgucuucgucggcaccucccgcuacuccaagaaguucaagcccgagaucgccauccgccccaagguccgcgaccaggagggccgcaugaacuacuacuggacccucgucgagcccggcgacaagaucaccuucgaggccaccggcaaccucgucgucccccgcuacgccuucgccauggagcgcaacgccggcuccggcaucaucaucuccgacacccccguccacgacugcaacaccaccugccagacccccaagggcgccaucaacaccucccuccccuuccagaacauccaccccaucaccaucggcaagugccccaaguacgucaaguccaccaagcuccgccucgccaccggccuccgcaacguccccuccauccagucccgcggccucuucggcgccaucgccggcuucaucgagggcggcuggaccggcauggucgacggcugguacggcuaccuccaccagaacgagcagggcuccggcuacgccgccgaccucaaguccacccagaacgccaucgacgagaucaccaacaaggucaacuccgucaucgagaagaugaacacccaguucaccgccgucggcaaggaguucaaccaccucgagaagcgcaucgagaaccucaacaagaagaucgacgacggcuuccucgacaucuggaccuacaacgccgagcuccucguccuccucgagaacgagcgcacccucgacuaccacgacuccaacgucaagaaccucuacgagaagguccgcucccagcucaagaacaacgccaaggagaucggcaacggcugcuucgaguucuaccacaagugcgacaacaccugcauggaguccgucaagaacggcaccuacgacuaccccaaguacuccgaggaggccaagcucaaccgcgaggagaucgacggcgucaagcucgaguccacccgcaucuaccagauccucgccaucuacuccaccgucgccuccucccucguccucgucgucucccucggcgccaucuccuucuggaugugcuccaacggcucccuccagugccgcaucugcaucuga

SEQ ID NO: 100938 - RNA, 1701 nt, Artificial Sequence; identical to SEQ ID NO: 98705
  derived and/or modified CDS sequence (opt2) from hemagglutinin__InfluenzaA__ADG58943

SEQ ID NO: 100939 - RNA, 1701 nt, Artificial Sequence
  derived and/or modified CDS sequence (opt2) from hemagglutinin__InfluenzaA__ADG58944
augaaggccauccucgucguccuccucuacaccuucgccaccgccaacgccgacacccucugcaucggcuaccacgccaacaacuccaccgacaccgucgacaccguccucgagaagaacgucaccgucacccacuccgucaaccuccucgaggacaagcacaacggcaagcucugcaagcuccgcggcgucgccccccuccaccucggcaagugcaacaucgccggcuggauccucggcaaccccgagugcgagucccucuccaccgccuccuccugguccuacaucgucgagaccuccuccuccgacaacggcaccugcuaccccggcgacuucaucgacuacgaggagcuccgcgagcagcucuccuccgucuccuccuucgagcgcuucgagaucuuccccaagaccuccuccuggcccaaccacgacuccaacaagggcgucaccgccgccugcccccacgccggcgccaaguccuucuacaagaaccucaucuggcucgucaagaagggcaacuccuaccccaagcucuccaaguccuacaucaacgacaagggcaaggagguccucguccucuggggcauccaccaccccuccaccuccgccgaccagcagucccucuaccagaacgccgacgccuacgucuucgucggcaccucccgcuacuccaagaaguucaagcccgagaucgccauccgccccaagguccgcgaccaggagggccgcaugaacuacuacuggacccucgucgagcccggcgacaagaucaccuucgaggccaccggcaaccuccucgucccccgcuacgccuucgccauggagcgcaacgccggcuccggcaucaucaucuccgacacccccguccacgacugcaacaccaccugccagacccccaagggcgccaucaacaccucccuccccuuccagaacauccaccccaucaccaucggcaagugccccaaguacgucaaguccaccaagcuccgccucgccaccggccuccgcaacguccccuccauccagucccgcggccucuucggcgccaucgccggcuucaucgagggcggcuggaccggcauggucgacggcugguacggcuaccaccaccagaacgagcagggcuccggcuacgccgccgaccucaaguccacccagaacgccaucgacgagaucaccaacaaggucaacuccgucaucgagaagaugaacacccaguucaccgccgucggcaaggaguucaaccaccucgagaagcgcaucgagaaccucaacaagaaggucgacgacggcuuccucgacaucuggaccuacaacgccgagcuccucguccuccucgagaacgagcgcacccucgacuaccacgacuccaacgucaagaaccucuacgagaagguccgcucccagcucaagaacaacgccaaggagaucggcaacggcugcuucgaguucuaccacaagugcgacaacaccugcauggaguccgucaagaacggcaccuacgacuaccccaaguacuccgaggaggccaagcucaaccgcgaggagaucgacggcgucaagcucgaguccacccgcaucuaccagauccucgccaucuacuccaccgucgccuccucccucguccucgucgucucccucggcgccaucuccuucuggaugugcuccaacggcucccuccagugccgcaucugcaucuga

SEQ ID NO: 100940 - RNA, 1701 nt, Artificial Sequence; identical to SEQ ID NO: 99503
  derived and/or modified CDS sequence (opt2) from hemagglutinin__InfluenzaA__ADG58946

SEQ ID NO: 100941 - RNA, 1701 nt, Artificial Sequence; identical to SEQ ID NO: 98705
  derived and/or modified CDS sequence (opt2) from hemagglutinin__InfluenzaA__ADG58947

SEQ ID NO: 100942 - RNA, 1701 nt, Artificial Sequence
  derived and/or modified CDS sequence (opt2) from hemagglutinin__InfluenzaA__ADG58948
augaaggccauccucaucguccuccucuacaccuucgccaccgccaacgccgacacccucugcaucggcuaccacgccaacaacuccaccgacaccgucgacaccguccucgagaagaacgucaccgucacccacuccgucaaccuccucgaggacaagcacaacggcaagcucugcaagcuccgcggcgucgccccccuccaccucggcaagugcaacaucgccggcuggauccucggcaaccccgagugcgagucccucuccaccgccuccuccugguccuacaucgucgagaccuccuccuccgacaacggcaccugcuaccccggcgacuucaucgacuacgaggagcuccgcgagcagcucuccuccgucuccuccuucgagcgcuucgagaucuuccccaagaccuccuccuggcccaaccacgacuccaacaagggcgucaccgccgccugcccccacgccggcgccaaguccuucuacaagaaccucaucuggcucgucaagaagggcaacuccuaccccaagcucuccaaguccuacaucaacgacaagggcaaggagguccucguccucuggggcauccaccaccccuccaccuccgccgaccagcagucccucuaccagaacgccgacaccuacgucuucgucggcaccucccgcuacuccaagaaguucaagcccgagaucgccauccgccccaagguccgcgaccaggagggccgcaugaacuacuacuggacccucgucgagcccggcgacaagaucaccuucgaggccaccggcaaccucgucgucccccgcuacgccuucgccauggagcgcaacgccggcuccggcaucaucaucuccgacacccccguccacgacugcaacaccaccugccagacccccaagggcgccaucaacaccucccuccccuuccagaacauccaccccaucaccaucggcaagugccccaaguacgucaaguccaccaagcuccgccucgccaccggccuccgcaacguccccuccauccagucccgcggccucuucggcgccaucgccggcuucaucgagggcggcuggaccggcauggucgacggcugguacggcuaccaccaccagaacgagcagggcuccggcuacgccgccgaccucaaguccacccagaacgccaucgacgagaucaccaacaaggucaacuccgucaucgagaagaugaacacccaguucaccgccgucggcaaggaguucaaccaccucgagaagcgcaucgagaaccucaacaagaagaucgacgacggcuuccucgacaucuggaccuacaacgccgagcuccucguccuccucgagaacgagcgcacccucgacuaccacgacuccaacgucaagaaccucuacgagaagguccgcucccagcucaagaacaacgccaaggagaucggcaacggcugcuucgaguucuaccacaagugcgacaacaccugcauggaguccgucaagaacggcaccuacgacuaccccaaguacuccgaggaggccaagcucaaccgcgaggagaucgacggcgucaagcucgaguccacccgcaucuaccagauccucgccaucuacuccaccgucgccuccucccucguccucgucgucucccucggcgccaucuccuucuggaugugcuccaacggcucccuccagugccgcaucugcaucuga

SEQ ID NO: 100943 - RNA, 1701 nt, Artificial Sequence
  derived and/or modified CDS sequence (opt2) from hemagglutinin__InfluenzaA__ADG58949
augaaggccauccucgucguccuccucuacaccuucgccaccgccaacgccgacacccucugcaucggcuaccacgccaacaacuccaccgacaccgucgacaccguccucgagaagaacgucaccgucacccacuccgucaaccuccucgaggacaagcacaacggcaagcucugcaagcuccgcggcgucgccccccuccaccucggcaagugcaacaucgccggcuggauccucggcaaccccgagugcgagucccucuccaccgccuccuccugguccuacaucgucgagaccuccuccuccgacaacggcaccugcuaccccggcgacuucaucgacuacgaggagcuccgcgagcagcucuccuccgucuccuccuucgagcgcuucgagaucuuccccaagaccuccuccuggcccaaccacgacuccaacaagggcgucaccgccgccugcccccacgccggcgccaaguccuucuacaagaaccucaucuggcucgucaagaagggcaacuccuaccccaagcucuccaaguccuacaucaacgacaagggcaaggagguccucguccucuggggcauccaccaccccuccaccuccgccgaccagcagucccucuaccagaacgccgacaccuacgucuucgucggcaccucccgcuacuccaagaaguucaagcccgagaucgccauccgccccaagguccgcgaccaggagggccgcaugaacuacuacuggacccucgucgagcccggcgacaagaucaccuucgaggccaccggcaaccucgucgucccccgcuacgccuucgccauggagcgcaacgccggcuccggcaucaucaucuccgacaccuccguccacgacugcaacaccaccugccagacccccaagggcgccaucaacaccucccuccccuuccagaacauccaccccaucaccaucggcaagugccccaaguacgucaaguccaccaagcuccgccucgccaccggccuccgcaacguccccuccauccagucccgcggccucuucggcgccaucgccggcuucaucgagggcggcuggaccggcauggucgacggcugguacggcuaccaccaccagaacgagcagggcuccggcuacgccgccgaccucaaguccacccagaacgccaucgacgagaucaccaacaaggucaacuccgucaucgagaagaugaacacccaguucaccgccgucggcaaggaguucaaccaccucgagaagcgcaucgagaaccucaacaagaagaucgacgacggcuuccucgacaucuggaccuacaacgccgagcuccucguccuccucgagaacgagcgcacccucgacuaccacgacuccaacgucaagaaccucuacgagaagguccgcucccagcucaagaacaacgccaaggagaucggcaacggcugcuucgaguucuaccacaagugcgacaacaccugcauggaguccgucaagaacggcaccuacgacuaccccaaguacuccgaggaggccaagcucaaccgcgaggagaucgacggcgucaagcucgaguccacccgcaucuaccagauccucgccaucuacuccaccgucgccuccucccucguccucgucgucucccucggcgccaucuccuucuggaugugcuccaacggcucccuccagugccgcaucugcaucuga

SEQ ID NO: 100944 - RNA, 1701 nt, Artificial Sequence
  derived and/or modified CDS sequence (opt2) from hemagglutinin__InfluenzaA__ADG58951
augaaggccauccucgucguccuccuccacaccuucgccaccgccaacgccgacacccucugcaucggcuaccacgccaacaacuccaccgacaccgucgacaccguccucgagaagaacgucaccgucacccacuccgucaaccuccucgaggacaagcacaacggcaagcucugcaagcuccgcggcgucgccccccuccaccucggcaagugcaacaucgccggcuggauccucggcaaccccgagugcgagucccucuccaccgccuccuccugguccuacaucgucgagaccuccaacuccggcaacggcaccugcuaccccggcgaguucaucgacuacgaggagcuccgcgagcagcucuccuccgucuccuccuucgagcgcuucgagaucuuccccaagaccuccuccuggcccaaccacgacuccaacaagggcgucaccgccgccugcccccacgccggcgccaaguccuucuacaagaaccucaucuggcucgucaagaagggcaacuccuaccccaagcucuccaaguccuacaucaacgacaagggcaaggagguccucguccucuggggcauccaccaccccuccaccuccgccgaccagcagucccucuaccagaacgccgacgccuacgucuucgucggcaccucccgcuacuccaagaaguucaagcccgagaucgccauccgccccaagguccgcgaccaggagggccgcaugaacuacuacuggacccucgucgagcccggcgacaagaucaccuucgaggccaccggcaaccucgucgucccccgcuacgccuucgccauggagcgcaacgccggcuccggcaucaucaucuccgacacccccguccacgacugcaacaccaccugccagacccccaagggcgccaucaacaccucccuccccuuccagaacauccaccccaucaccaucggcaagugccccaaguacgucaaguccaccaagcuccgccucgccaccggccuccgcaacguccccuccauccagucccgcggccucuucggcgccaucgccggcuucaucgagggcggcuggaccggcauggucgacggcugguacggcuaccaccaccagaacgagcagggcuccggcuacgccgccgaccucaaguccacccagaacgccaucgacgagaucaccaacaaggucaacuccgucaucgagaagaugaacacccaguucaccgccgucggcaaggaguucaaccaccucgagaagcgcaucgagaaccucaacaagaaggucgacgacggcuuccucgacaucuggaccuacaacgccgagcuccucguccuccucgagaacgagcgcacccucgacuaccacgacuccaacgucaagaaccucuacgagaagguccgcucccagcucaagaacaacgccaaggagaucggcaacggcugcuucgaguucuaccacaagugcgacaacaccugcaucgaguccgucaagaacggcaccuacgacuaccccaaguacuccgaggaggccaagcucaaccgcgaggagaucgacggcgucaagcucgaguccacccgcaucuaccagauccucgccaucuacuccaccgucgccuccucccucguccucgucgucucccucggcgccaucuccuucuggaugugcuccaacggcucccuccagugccgcaucugcaucuga

SEQ ID NO: 100945 - RNA, 1701 nt, Artificial Sequence; identical to SEQ ID NO: 100944
  derived and/or modified CDS sequence (opt2) from hemagglutinin__InfluenzaA__ADG58952

SEQ ID NO: 100946 - RNA, 1701 nt, Artificial Sequence; identical to SEQ ID NO: 100944
  derived and/or modified CDS sequence (opt2) from hemagglutinin__InfluenzaA__ADG58953

SEQ ID NO: 100947 - RNA, 1701 nt, Artificial Sequence; identical to SEQ ID NO: 100944
  derived and/or modified CDS sequence (opt2) from hemagglutinin__InfluenzaA__ADG58954

SEQ ID NO: 100948 - RNA, 1701 nt, Artificial Sequence; identical to SEQ ID NO: 100944
  derived and/or modified CDS sequence (opt2) from hemagglutinin__InfluenzaA__ADG58955

SEQ ID NO: 100949 - RNA, 1701 nt, Artificial Sequence; identical to SEQ ID NO: 100944
  derived and/or modified CDS sequence (opt2) from hemagglutinin__InfluenzaA__ADG58956

SEQ ID NO: 100950 - RNA, 1701 nt, Artificial Sequence
  derived and/or modified CDS sequence (opt2) from hemagglutinin__InfluenzaA__ADG58957
augaaggccauccucgucguccuccuccacaccuucgccaccgccaacgccgacacccucugcaucggcuaccacgccaacaacuccaccgacaccgucgacaccguccucgagaagaacgucaccgucacccacuccgucaaccuccucgaggacaagcacaacggcaagcucugcaagcuccgcggcgucgccccccuccaccucggcaagugcaacaucgccggcuggauccucggcaaccccgagugcgagucccucuccaccgccuccuccugguccuacaucgucgagaccuccaacuccggcaacggcaccugcuaccccggcgaguucaucgacuacgaggagcuccgcgagcagcucuccuccgucuccuccuucgagcgcuucgagaucuuccccaagaccuccuccuggcccaaccacgacuccaacaagggcgucaccgccgccugcccccacgccggcgccaaguccuucuacaagaaccucaucuggcucgucaagaagggcaacuccuaccccaagcucuccaaguccuacaucaacgacaagggcaaggagguccucguccucuggggcauccaccaccccuccaccuccgccgaccagcagucccucuaccagaacgccgacgccuacgucuucgucggcaccucccgcuacuccaagaaguucaagcccgagaucgccauccgccccaagguccgcgaccaggagggccgcaugaacuacuacuggacccucgucgagcccggcgacaagaucaccuucgaggccaccggcaaccucgucgucccccgcuacgccuucgccauggagcgcaacgccggcuccggcaucaucaucuccgacacccccguccacgacugcaacaccaccugccagacccccaagggcgccaucaacaccucccuccccuuccagaacauccaccccaucaccaucggcaagugccccaaguacgucaaguccaccaagcuccgccucgccaccggccuccgcaacguccccuccauccagucccgcggccucuucggcgccaucgccggcuucaucgagggcggcuggaccggcauggucgacggcugguacggcuaccaccaccagaacgagcagggcuccggcuacgccgccgaccucaaguccacccagaacgccaucgacgagaucaccaacaaggucaacuccgucaucgagaagaugaacacccaguucaccgccgucggcaaggaguucaaccaccucgagaagcgcaucgagaaccucaacaagaaggucgacgacggcuuccucgacaucuggaccuacaacgccgagcuccucguccuccucgagaacgagcgcacccucgacuaccacgacuccaacgucaagaaccucuacgagaagguccgcucccagcucaagaacaacgccaaggagaucggcaacggcugcuucgaguucuaccacaagugcgacaacaccugcauggaguccgucaagaacggcaccuacgacuaccccaaguacuccgaggaggccaagcucaaccgcgaggagaucgacggcgucaagcucgaguccacccgcaucuaccagauccucgccaucuacuccaccgucgccuccucccucguccucgucgucucccucggcgccaucuccuucuggaugugcuccaacggcucccuccagugccgcaucugcaucuga

SEQ ID NO: 100951 - RNA, 1701 nt, Artificial Sequence
  derived and/or modified CDS sequence (opt2) from hemagglutinin__InfluenzaA__ADG58959
augaaggccauccucgucguccuccucuacaccuucgccaccgccaacgccgacacccucugcaucggcuaccacgccaacaacuccaccgacaccgucgacaccguccucgagaagaacgucaccgucacccacuccgucaaccuccucgaggacaagcacaacggcaagcucugcaagcuccgcggcgucgccccccuccaccucggcaagugcaacaucgccggcuggauccucggcaaccccgagugcgagucccucuccaccgccaacuccugguccuacaucgucgagaccuccuccuccgacaacggcaccugcuaccccggcgacuucaucgacuacgaggagcuccgcgagcagcucuccuccgucuccuccuucgagcgcuucgagaucuuccccaagaccuccuccuggcccaaccacgacuccaacaagggcgucaccgccgccugcccccacgccggcgccaaguccuucuacaagaaccucaucuggcucgucaagaagggcaacuccuaccccaagcucuccaaguccuacaucaacgacaagggcaaggagguccucguccucuggggcauccaccaccccuccaccuccgccgaccagcagucccucuaccagaacgccgacgccuacgucuucgucggcaccucccgcuacuccaagaaguucaagcccgagaucgccauccgccccaagguccgcgaccaggagggccgcaugaacuacuacuggacccucgucgagcccggcgacaagaucaccuucgaggccaccggcaaccucgucgucccccgcuacgccuucgccauggagcgcaacgccggcuccggcaucaucaucuccgacacccccguccacgacugcaacaccaccugccagacccccaagggcgccaucaacaccucccuccccuuccagaacauccaccccaucaccaucggcaagugccccaaguacgucaaguccaccaagcuccgccucgccaccggccuccgcaacguccccuccauccagucccgcggccucuucggcgccaucgccggcuucaucgagggcggcuggaccggcauggucgacggcugguacggcuaccaccaccagaacgagcagggcuccggcuacgccgccgaccucaaguccacccagaacgccaucgacgagaucaccaacaaggucaacuccgucaucgagaagaugaacacccaguucaccgccgucggcaaggaguucaaccaccucgagaagcgcaucgagaaccucaacaagaaggucgacgacggcuuccucgacaucuggaccuacaacgccgagcuccucguccuccucgagaacgagcgcacccucgacuaccacgacuccaacgucaagaaccucuacgagaagguccgcucccagcucaagaacaacgccaaggagaucggcaacggcugcuucgaguucuaccacaagugcgacaacaccugcauggaguccgucaagaacggcaccuacgacuaccccaaguacuccgaggaggccaagcucaaccgcgaggagaucgacggcgucaagcucgaguccacccgcaucuaccagauccucgccaucuacuccaccgucgccuccucccucguccucgucgucucccucggcgccaucuccuucuggaugugcuccaacggcucccuccagugccgcaucugcaucuga

SEQ ID NO: 100952 - RNA, 1701 nt, Artificial Sequence; identical to SEQ ID NO: 100869
  derived and/or modified CDS sequence (opt2) from hemagglutinin__InfluenzaA__ADG58960

SEQ ID NO: 100953 - RNA, 1701 nt, Artificial Sequence; identical to SEQ ID NO: 100869
  derived and/or modified CDS sequence (opt2) from hemagglutinin__InfluenzaA__ADG58961

SEQ ID NO: 100954 - RNA, 1701 nt, Artificial Sequence; identical to SEQ ID NO: 100869
  derived and/or modified CDS sequence (opt2) from hemagglutinin__InfluenzaA__ADG58962

SEQ ID NO: 100955 - RNA, 1701 nt, Artificial Sequence; identical to SEQ ID NO: 100869
  derived and/or modified CDS sequence (opt2) from hemagglutinin__InfluenzaA__ADG58963

SEQ ID NO: 100956 - RNA, 1701 nt, Artificial Sequence; identical to SEQ ID NO: 100869
  derived and/or modified CDS sequence (opt2) from hemagglutinin__InfluenzaA__ADG58964

SEQ ID NO: 100957 - RNA, 1701 nt, Artificial Sequence; identical to SEQ ID NO: 100869
  derived and/or modified CDS sequence (opt2) from hemagglutinin__InfluenzaA__ADG58965

SEQ ID NO: 100958 - RNA, 1701 nt, Artificial Sequence; identical to SEQ ID NO: 100869
  derived and/or modified CDS sequence (opt2) from hemagglutinin__InfluenzaA__ADG58966

SEQ ID NO: 100959 - RNA, 1701 nt, Artificial Sequence; identical to SEQ ID NO: 100869
  derived and/or modified CDS sequence (opt2) from hemagglutinin__InfluenzaA__ADG58967

SEQ ID NO: 100960 - RNA, 1701 nt, Artificial Sequence; identical to SEQ ID NO: 100869
  derived and/or modified CDS sequence (opt2) from hemagglutinin__InfluenzaA__ADG58968

SEQ ID NO: 100961 - RNA, 1701 nt, Artificial Sequence; identical to SEQ ID NO: 98705
  derived and/or modified CDS sequence (opt2) from hemagglutinin__InfluenzaA__ADG59628

SEQ ID NO: 100962 - RNA, 1701 nt, Artificial Sequence; identical to SEQ ID NO: 98705
  derived and/or modified CDS sequence (opt2) from hemagglutinin__InfluenzaA__ADG59629

SEQ ID NO: 100963 - RNA, 1701 nt, Artificial Sequence; identical to SEQ ID NO: 98705
  derived and/or modified CDS sequence (opt2) from hemagglutinin__InfluenzaA__ADG59630

SEQ ID NO: 100964 - RNA, 1701 nt, Artificial Sequence; identical to SEQ ID NO: 98705
  derived and/or modified CDS sequence (opt2) from hemagglutinin__InfluenzaA__ADG59631

SEQ ID NO: 100965 - RNA, 1701 nt, Artificial Sequence; identical to SEQ ID NO: 98705
  derived and/or modified CDS sequence (opt2) from hemagglutinin__InfluenzaA__ADG59632

SEQ ID NO: 100966 - RNA, 1701 nt, Artificial Sequence; identical to SEQ ID NO: 99806
  derived and/or modified CDS sequence (opt2) from hemagglutinin__InfluenzaA__ADG59633

SEQ ID NO: 100967 - RNA, 1701 nt, Artificial Sequence; identical to SEQ ID NO: 99806
  derived and/or modified CDS sequence (opt2) from hemagglutinin__InfluenzaA__ADG59634

SEQ ID NO: 100968 - RNA, 1701 nt, Artificial Sequence; identical to SEQ ID NO: 98705
  derived and/or modified CDS sequence (opt2) from hemagglutinin__InfluenzaA__ADG59635

SEQ ID NO: 100969 - RNA, 1701 nt, Artificial Sequence
  derived and/or modified CDS sequence (opt2) from hemagglutinin__InfluenzaA__ADG59636
augaaggccauccucgucguccuccucuacaccuucgccaccgccaacgccgacacccucugcaucggcuaccacgccaacaacuccaccgacaccgucgacaccguccucgagaagaacgucaccgucacccacuccgucaaccuccucgaggacaagcacaacggcaagcucugcaagcuccgcggcgucgccccccuccaccucggcaagugcaacaucgccggcuggauccucggcaaccccgagugcgagucccucuccaccgccuccuccugguccuacaucgucgagaccuccuccuccgacaacggcaccugcuaccccggcgacuucaucgacuacgaggagcuccgcgagcagcucuccuccgucuccuccuucgagcgcuucgagaucuuccccaagaccuccuccuggcccaaccacgacuccaacaagggcgucaccgccgccugcccccacgccggcgccaaguccuucuacaagaaccucaucuggcucgucaagaagggcaacuccuaccccaagcucuccaaguccuacaucaacgacaagggcaaggagguccucguccucuggggcauccaccaccccuccaccuccgccgaccagcagucccucuaccagaacgccgacgccuacgucuucgucggcaccucccgcuacuccaagaaguucaagcccgagaucgccauccgccccaagguccgcggccaggagggccgcaugaacuacuacuggacccucgucgagcccggcgacaagaucaccuucgaggccaccggcaaccucgucgucccccgcuacgccuucgccauggagcgcaacgccggcuccggcaucaucaucuccgacacccccguccacgacugcaacaccaccugccagacccccaagggcgccaucaacaccucccuccccuuccagaacauccaccccaucaccaucggcaagugccccaaguacgucaaguccaccaagcuccgccucgccaccggccuccgcaacauccccuccauccagucccgcggccucuucggcgccaucgccggcuucaucgagggcggcuggaccggcauggucgacggcugguacggcuaccaccaccagaacgagcagggcuccggcuacgccgccgaccucaaguccacccagaacgccaucgacgagaucaccaacaaggucaacuccgucaucgagaagaugaacacccaguucaccgccgucggcaaggaguucaaccaccucgagaagcgcaucgagaaccucaacaagaaggucgacgacggcuuccucgacaucuggaccuacaacgccgagcuccucguccuccucgagaacgagcgcacccucgacuaccacgacuccaacgucaagaaccucuacgagaagguccgcucccagcucaagaacaacgccaaggagaucggcaacggcugcuucgaguucuaccacaagugcgacaacaccugcauggaguccgucaagaacggcaccuacgacuaccccaaguacuccgaggaggccaagcucaaccgcgaggagaucgacggcgucaagcucgaguccacccgcaucuaccagauccucgccaucuacuccaccgucgccuccucccucguccucgucgucucccucggcgccaucuccuucuggaugugcuccaacggcucccuccagugccgcaucugcaucuga

SEQ ID NO: 100970 - RNA, 1701 nt, Artificial Sequence; identical to SEQ ID NO: 99453
  derived and/or modified CDS sequence (opt2) from hemagglutinin__InfluenzaA__ADG59638

SEQ ID NO: 100971 - RNA, 1701 nt, Artificial Sequence; identical to SEQ ID NO: 99806
  derived and/or modified CDS sequence (opt2) from hemagglutinin__InfluenzaA__ADG59639

SEQ ID NO: 100972 - RNA, 1701 nt, Artificial Sequence; identical to SEQ ID NO: 99058
  derived and/or modified CDS sequence (opt2) from hemagglutinin__InfluenzaA__ADG59641

SEQ ID NO: 100973 - RNA, 1701 nt, Artificial Sequence; identical to SEQ ID NO: 99548
  derived and/or modified CDS sequence (opt2) from hemagglutinin__InfluenzaA__ADG59643

SEQ ID NO: 100974 - RNA, 1701 nt, Artificial Sequence; identical to SEQ ID NO: 98692
  derived and/or modified CDS sequence (opt2) from hemagglutinin__InfluenzaA__ADG59644

SEQ ID NO: 100975 - RNA, 1701 nt, Artificial Sequence; identical to SEQ ID NO: 98705
  derived and/or modified CDS sequence (opt2) from hemagglutinin__InfluenzaA__ADG59646

SEQ ID NO: 100976 - RNA, 1701 nt, Artificial Sequence; identical to SEQ ID NO: 99806
  derived and/or modified CDS sequence (opt2) from hemagglutinin__InfluenzaA__ADG59647

SEQ ID NO: 100977 - RNA, 1701 nt, Artificial Sequence; identical to SEQ ID NO: 99869
  derived and/or modified CDS sequence (opt2) from hemagglutinin__InfluenzaA__ADG59648

SEQ ID NO: 100978 - RNA, 1701 nt, Artificial Sequence; identical to SEQ ID NO: 99869
  derived and/or modified CDS sequence (opt2) from hemagglutinin__InfluenzaA__ADG59649

SEQ ID NO: 100979 - RNA, 1701 nt, Artificial Sequence; identical to SEQ ID NO: 99869
  derived and/or modified CDS sequence (opt2) from hemagglutinin__InfluenzaA__ADG59650

SEQ ID NO: 100980 - RNA, 1701 nt, Artificial Sequence; identical to SEQ ID NO: 99869
  derived and/or modified CDS sequence (opt2) from hemagglutinin__InfluenzaA__ADG59651

SEQ ID NO: 100981 - RNA, 1701 nt, Artificial Sequence; identical to SEQ ID NO: 98705
  derived and/or modified CDS sequence (opt2) from hemagglutinin__InfluenzaA__ADG59652

SEQ ID NO: 100982 - RNA, 1701 nt, Artificial Sequence; identical to SEQ ID NO: 98705
  derived and/or modified CDS sequence (opt2) from hemagglutinin__InfluenzaA__ADG59653

SEQ ID NO: 100983 - RNA, 1701 nt, Artificial Sequence; identical to SEQ ID NO: 100969
  derived and/or modified CDS sequence (opt2) from hemagglutinin__InfluenzaA__ADG59655

SEQ ID NO: 100984 - RNA, 1701 nt, Artificial Sequence; identical to SEQ ID NO: 99806
  derived and/or modified CDS sequence (opt2) from hemagglutinin__InfluenzaA__ADG59656

SEQ ID NO: 100985 - RNA, 1701 nt, Artificial Sequence
  derived and/or modified CDS sequence (opt2) from hemagglutinin__InfluenzaA__ADG59657
augaaggccauccucgucguccuccucuacaccuucgccaccgccaacgccgacacccucugcaucggcuaccacgccaacaacuccaccgacaccgucgacaccguccucgagaagaacgucaccgucacccacuccgucaaccuccucgaggacaagcacaacggcaagcucugcaagcuccgcggcgucgccccccuccaccucggcaagugcaacaucgccggcuggauccucggcaaccccgagugcgagucccucuccaccgccuccuccugguccuacaucgucgagaccuccuccuccgacaacggcaccugcuaccccggcgacuucaucgacuacgaggagcuccgcgagcagcucuccuccgucuccuccuucgagcgcuucgagaucuuccccaagaccuccuccuggcccaaccacgacuccaacaagggcgucaccgccgccugcccccacgccggcgccaaguccuucuacaagaaccucaucuggcucgucaagaagggcaacuccuaccccaagcucuccaaguccuacaucaacgacaagggcaaggagguccucguccucuggggcauccaccaccccuccaccuccgccgaccagcagucccucuaccagaacgccgacgccuacgucuucgucggcuccuccaaguacuccaagaaguucaagcccgagaucgccauccgccccaagguccgcgaccaggagggccgcaugaacuacuacuggacccucgucgagcccggcgacaagaucaccuucgaggccaccggcaaccucgucgucccccgcuacgccuucgccauggagcgcaacgccggcuccggcaucaucaucuccgacacccccguccacgacugcaacaccaccugccagacccccaagggcgccaucaacaccucccuccccuuccagaacauccaccccaucaccaucggcaagugccccaaguacgucaaguccaccaagcuccgccucgccaccggccuccgcaacguccccuccacccagucccgcggccucuucggcgccaucgccggcuucaucgagggcggcuggaccggcauggucgacggcugguacggcuaccaccaccagaacgagcagggcuccggcuacgccgccgaccucaaguccacccagaacgccaucgacgagaucaccaacaaggucaacuccgucaucgagaagaugaacacccaguucaccgccgucggcaaggaguucaaccaccucgagaagcgcaucgagaaccucaacaagaaggucgacgacggcuuccucgacaucuggaccuacaacgccgagcuccucguccuccucgagaacgagcgcacccucgacuaccacgacuccaacgucaagaaccucuacgagaagguccgcucccagcucaagaacaacgccaaggagaucggcaacggcugcuucgaguucuaccacaagugcgacaacaccugcauggaguccgucaagaacggcaccuacgacuaccccaaguacuccgaggaggccaagcucaaccgcgaggagaucgacggcgucaagcucgaguccacccgcaucuaccagauccucgccaucuacuccaccgucgccuccucccucguccucgucgucucccucggcgccaucuccuucuggaugugcuccaacggcucccuccagugccgcaucugcaucuga

SEQ ID NO: 100986 - RNA, 1701 nt, Artificial Sequence
  derived and/or modified CDS sequence (opt2) from hemagglutinin__InfluenzaA__ADG59658
augaaggccauccucgucguccuccucuacaccuucgccaccgccaacgccgacacccucugcaucggcuaccacgccaacaacuccaccgacaccaucgacaccguccucgagaagaacgucaccgucacccacuccgucaaccuccucgaggacaagcacaacggcaagcucugcaagcuccgcggcgucgccccccuccaccucggcaagugcaacaucgccggcuggauccucggcaaccccgagugcgagucccucuccaccgccuccuccugguccuacaucgucgagaccuccuccuccgacaacggcaccugcuaccccggcgacuucaucgacuacgaggagcuccgcgagcagcucuccuccgucuccuccuucgagcgcuucgagaucuuccccaagaccuccuccuggcccaaccacgacuccaacaagggcgucaccgccgccugcccccacgccggcgccaaguccuucuacaagaaccucaucuggcucgucaagaagggcaacuccuaccccaagcucuccaaguccuacaucaacgacaagggcaaggagguccucguccucuggggcauccaccaccccuccaccuccgccgaccagcagucccucuaccagaacgccgacgccuacgucuucgucggcaccucccgcuacuccaagaaguucaagcccgagaucgccauccgccccaagguccgcaaccaggagggccgcaugaacuacuacuggacccucgucgagcccggcgacaagaucaccuucgaggccaccggcaaccucgucgucccccgcuacgccuucgccauggagcgcaacgccggcuccggcaucaucaucuccgacacccccguccacgacugcaacaccaccugccagacccccaagggcgccaucaacaccucccuccccuuccagaacauccaccccaucaccaucggcaagugccccaaguacgucaaguccaccaagcuccgccucgccaccggccuccgcaacauccccuccauccagucccgcggccucuucggcgccaucgccggcuucaucgagggcggcuggaccggcauggucgacggcugguacggcuaccaccaccagaacgagcagggcuccggcuacgccgccgaccucaaguccacccagaacgccaucgacgagaucaccaacaaggucaacuccgucaucgagaagaugaacacccaguucaccgccgucggcaaggaguucaaccaccucgagaagcgcaucgagaaccucaacaagaaggucgacgacggcuuccucgacaucuggaccuacaacgccgagcuccucguccuccucgagaacgagcgcacccucgacuaccacgacuccaacgucaagaaccucuacgagaagguccgcucccagcucaagaacaacgccaaggagaucggcaacggcugcuucgaguucuaccacaagugcgacaacaccugcauggaguccgucaagaacggcaccuacgacuaccccaaguacuccgaggaggccaagcucaaccgcgaggagaucgacggcgucaagcucgaguccacccgcaucuaccagauccucgccaucuacuccaccgucgccuccucccucguccucgucgucucccucggcgccaucuccuucuggaugugcuccaacggcucccuccagugccgcaucugcaucuga

SEQ ID NO: 100987 - RNA, 1701 nt, Artificial Sequence; identical to SEQ ID NO: 99152
  derived and/or modified CDS sequence (opt2) from hemagglutinin__InfluenzaA__ADG59659

SEQ ID NO: 100988 - RNA, 1701 nt, Artificial Sequence; identical to SEQ ID NO: 99152
  derived and/or modified CDS sequence (opt2) from hemagglutinin__InfluenzaA__ADG59660

SEQ ID NO: 100989 - RNA, 1701 nt, Artificial Sequence; identical to SEQ ID NO: 99058
  derived and/or modified CDS sequence (opt2) from hemagglutinin__InfluenzaA__ADG59662

SEQ ID NO: 100990 - RNA, 1701 nt, Artificial Sequence
  derived and/or modified CDS sequence (opt2) from hemagglutinin__InfluenzaA__ADG59663
augaaggccauccucgucguccuccucuacaccuucgccaccgccaacgccgacacccucugcaucggcuaccacgccaacaacuccaccgacaccgucgacaccguccucgagaagaacgucaccgucacccacuccgucaaccuccucgaggacaagcacaacggcaagcucugcaagcuccgcggcgucgccccccuccaccucggcaagugcaacaucgccggcuggauccucggcaaccccgagugcgagucccucuccaccgccuccuccugguccuacaucgucgagaccuccuccuccgacaacggcaccugcuaccccggcgacuucaucgacuacgaggagcuccgcgagcagcucuccuccgucuccuccuucgagcgcuucgagaucuuccccaagaccuccuccuggcccaaccacgacuccaacaagggcgucaccgccgccugcccccacgccggcgccaaguccuucuacaagaaccucaucuggcucgucaagaagggcaacuccuaccccaagcucuccaaguccuacaucaacgacaagggcaaggagguccucguccucuggggcauccaccaccccuccaccuccgccgaccagcagucccucuaccagaacgccgacgccuacgucuucgucggcaccucccgcuacuccaagaaguucaagcccgagaucgccauccgccccaagguccgcgaccaggagggccgcaugaacuacuacuggacccucgucgagcccggcgacaagaucaccuucgaggccaccggcaaccucgucgucccccgcuacgccuucgccauggagcgcaacgccggcuccggcaucaucaucuccgacacccccuuccacgacugcaacaccaccugccagacccccaagggcgccaucaacaccucccuccccuuccagaacauccaccccaucaccaucggcaagugccccaaguacgucaaguccaccaagcuccgccucgccaccggccuccgcaacauccccuccauccagucccgcggccucuucggcgccaucgccggcuucaucgagggcggcuggaccggcauggucgacggcugguacggcuaccaccaccagaacgagcagggcuccggcuacgccgccgaccucaaguccacccagaacgccaucgacgagaucaccaacaaggucaacuccgucaucgagaagaugaacacccaguucaccgccgucggcaaggaguucaaccaccucgagaagcgcaucgagaaccucaacaagaaggucgacgacggcuuccucgacaucuggaccuacaacgccgagcuccucguccuccucgagaacgagcgcacccucgacuaccacgacuccaacgucaagaaccucuacgagaagguccgcucccagcucaagaacaacgccaaggagaucggcaacggcugcuucgaguucuaccacaagugcgacaacaccugcauggaguccgucaagaacggcaccuacgacuaccccaaguacuccgaggaggccaagcucaaccgcgaggagaucgacggcgucaagcucgaguccacccgcaucuaccagauccucgccaucuacuccaccgucgccuccucccucguccucgucgucucccucggcgccaucuccuucuggaugugcuccaacggcucccuccagugccgcaucugcaucuga

SEQ ID NO: 100991 - RNA, 1701 nt, Artificial Sequence; identical to SEQ ID NO: 99058
  derived and/or modified CDS sequence (opt2) from hemagglutinin__InfluenzaA__ADG59664

SEQ ID NO: 100992 - RNA, 1701 nt, Artificial Sequence
  derived and/or modified CDS sequence (opt2) from hemagglutinin__InfluenzaA__ADG59666
augaaggccauccucgucguccuccucuacaccuucgccaccgccaacgccgacacccucugcaucggcuaccacgccaacaacuccaccgacaccgucgacaccguccucgagaagaacgucaccgucacccacuccgucaaccuccucgaggacaagcacaacggcaagcucugcaagcuccgcggcgucgccccccuccaccucggcaagugcaacaucgccggcuggauccucggcaaccccgagugcgagucccucuccaccgccuccuccugguccuacaucgucgagaccuccuccuccgacaacggcaccugcuaccccggcgacuucaucgacuacgaggagcuccgcgagcagcucuccuccgucuccuccuucgagcgcuucgagaucuuccccaagaccuccuccuggcccaaccacgacuccaacaagggcgucaccgccgccugcccccacgccggcgccaaguccuucuacaagaaccucaucuggcucgucaagaagggcaacuccuaccccaagcucuccaaguccuacaucaacgacaagggcaaggagguccucguccucuggggcauccaccaccccuccaccuccgccgaccagcagucccucuaccagaacgccgacgccuacgucuucgucggcaccucccgcuacuccaagaaguucaagcccgagaucgccauccgccccaagguccgcgaccaggagggccgcaugaacuacuacuggacccucgucgagcccggcgacaagaucaccuucgaggccaccggcaaccucgucgucccccgcuacgccuucgccauggagcgcgacgccggcuccggcaucaucaucuccgacacccccguccacgacugcaacaccaccugccagacccccaagggcgccaucaacaccucccuccccuuccagaacauccaccccaucaccaucggcaagugccccaaguacgucaaguccaccaagcuccgccucgccaccggccuccgcaacguccccuccauccagucccgcggccucuucggcgccaucgccggcuucaucgagggcggcuggaccggcauggucgacggcugguacggcuaccaccaccagaacgagcagggcuccggcuacgccgccgaccucaaguccacccagaacgccaucgacgagaucaccaacaaggucaacuccgucaucgagaagaugaacacccaguucaccgccgucggcaaggaguucaaccaccucgagaagcgcaucgagaaccucaacaagaagaucgacgacggcuuccucgacaucuggaccuacaacgccgagcuccucguccuccucgagaacgagcgcacccucgacuaccacgacuccaacgucaagaaccucuacgagaagguccgcucccagcucaagaacaacgccaaggagaucggcaacggcugcuucgaguucuaccacaagugcgacaacaccugcauggaguccgucaagaacggcaccuacgacuaccccaaguacuccgaggaggccaagcucaaccgcgaggagaucgacggcgucaagcucgaguccacccgcaucuaccagauccucgccaucuacuccgccgucgccuccucccucguccucgucgucucccucggcgccaucuccuucuggaugugcuccaacggcucccuccagugccgcaucugcaucuga

SEQ ID NO: 100993 - RNA, 1701 nt, Artificial Sequence; identical to SEQ ID NO: 99807
  derived and/or modified CDS sequence (opt2) from hemagglutinin__InfluenzaA__ADG59667

SEQ ID NO: 100994 - RNA, 1701 nt, Artificial Sequence
  derived and/or modified CDS sequence (opt2) from hemagglutinin__InfluenzaA__ADG59669
augaaggccauccucgucguccuccucuacaccuucgccaccgccaacgccgacacccucugcaucggcuaccacgccaacaacuccaccgacaccgucgacaccguccucgagaagaacgucaccgucacccacuccgucaaccuccucgaggacaagcacaacggcaagcucugcaagcuccgcggcgucgccccccuccaccucggcaagugcaacaucgccggcuggauccucggcaaccccgagugcgagucccucuccaccgccuccuccugguccuacaucgucgagaccuccuccuccgacaacggcaccugcuaccccggcgacuucaucgacuacgaggagcuccgcgagcagcucuccuccgucuccuccuucgagcgcuucgagaucuuccccaagaccuccuccuggcccaaccacgacuccaacaagggcgucaccgccgccugcccccacgccggcgccaaguccuucuacaagaaccucaucuggcucgucaagaagggcaacuccuaccccaagcucuccaaguccuacaucaacgacaagggcaaggagguccucguccucuggggcauccaccaccccuccaccuccgccgaccagcagucccucuaccagaacgccgacgccuacgucuucgucggcaccucccgcuacuccaagaaguucaagcccgagaucgccauccgccccaagguccgcgagcaggagggccgcaugaacuacuacuggacccucgucgaccccggcgacaagaucaccuucgaggccaccggcaaccucgucgucccccgcuacgccuucgccauggagcgcaacgccggcuccggcaucaucaucuccgacacccccguccacgacugcaacaccaccugccagacccccaagggcgccaucaacaccucccuccccuuccagaacauccacuccaucaccaucggcaagugccccaaguacgucaaguccaccaagcuccgccucgccaccggccuccgcaacguccccuccauccagucccgcggccucuucggcgccaucgccggcuucaucgagggcggcuggaccggcauggucgacggcugguacggcuaccaccaccagaacgagcagggcuccggcuacgccgccgaccucaaguccacccagaacgccaucgacgagaucaccaacaaggucaacuccgucaucgagaagaugaacacccaguucaccgccgucggcaaggaguucaaccaccucgagaagcgcaucgagaaccucaacaagaaggucgacgacggcuuccucgacaucuggaccuacaacgccgagcuccucguccuccucgagaacgagcgcacccucgacuaccacgacuccaacgucaagaaccucuacgagaagguccgcucccagcucaagaacaacgccaaggagaucggcaacggcugcuucgaguucuaccacaagugcgacaacaccugcauggaguccgucaagaacggcaccuacgacuaccccaaguacuccgaggaggccaagcucaaccgcgaggagaucgacggcgucaagcucgaguccacccgcaucuaccagauccucgccaucuacuccaccgucgccuccucccucguccucgucgucucccucggcgccaucuccuucuggaugugcuccaacggcucccuccagugccgcaucugcaucuga

SEQ ID NO: 100995 - RNA, 1701 nt, Artificial Sequence; identical to SEQ ID NO: 100994
  derived and/or modified CDS sequence (opt2) from hemagglutinin__InfluenzaA__ADG59670

SEQ ID NO: 100996 - RNA, 1701 nt, Artificial Sequence; identical to SEQ ID NO: 100994
  derived and/or modified CDS sequence (opt2) from hemagglutinin__InfluenzaA__ADG59671

SEQ ID NO: 100997 - RNA, 1701 nt, Artificial Sequence; identical to SEQ ID NO: 100994
  derived and/or modified CDS sequence (opt2) from hemagglutinin__InfluenzaA__ADG59672

SEQ ID NO: 100998 - RNA, 1701 nt, Artificial Sequence
  derived and/or modified CDS sequence (opt2) from hemagglutinin__InfluenzaA__ADG59673
augaaggccauccucgucguccuccucuacaccuucgccaccgccaacgccgacacccucugcaucggcuaccacgccaacaacuccaccgacaccgucgacaccguccucgagaagaacgucaccgucacccacuccgucgaccuccucgaggacaagcacaacggcaagcucugcaagcuccgcggcgucgccccccuccaccucggcgagugcaacaucgccggcuggauccucggcaaccccgagugcgagucccucuccaccgccuccuccugguccuacaucgucgagaccuccuccuccgacaacggcaccugcuaccccggcgacuucaucgacuacgaggagcuccgcgagcagcucuccuccgucuccuccuucgagcgcuucgagaucuuccccaagaccuccuccuggcccaaccacgacuccaacaagggcgucaccgccgccugcccccacgccggcgccaaguccuucuacaagaaccucaucuggcucgucaagaagggcaacuccuaccccaagcucuccaaguccuacaucaacgacaagggcaaggagguccucguccucuggggcauccaccaccccuccaccuccgccgaccagcagucccucuaccagaacgccgacgccuacgucuucgucggcaccucccgcuacuccaagaaguucaagcccgagaucgccauccgccccaagguccgcgaccaggagggccgcaugaacuacuacuggacccucgucgagcccggcgacaagaucaccuucgaggccaccggcaaccucgucgucccccgcuacgccuucgccauggagcgcaacgccggcuccggcaucaucaucuccgacacccccguccacgacugcaacaccaccugccagacccccaagggcgccaucaacaccucccuccccuuccagaacauccaccccaucaccaucggcaagugccccaaguacgucaaguccaccaagcuccgccucgccaccggccuccgcaacguccccuccauccagucccgcggccucuucggcgccaucgccggcuucaucgagggcggcuggaccggcauggucgacggcugguacggcuaccaccaccagaacgagcagggcuccggcuacgccgccgaccucaaguccacccagaacgccaucgacgagaucaccaacaaggucaacuccgucaucgagaagaugaacacccaguucaccgccgucggcaaggaguucaaccaccucgagaagcgcaucgagaaccucaacaagaaggucgacgacggcuuccucgacaucuggaccuacaacgccgagcuccucguccuccucgagaacgagcgcacccucgacuaccacgacuccaacgucaagaaccucuacgagaagguccgcucccagcucaagaacaacgccaaggagaucggcaacggcugcuucgaguucuaccacaagugcgacaacaccugcauggaguccgucaagaacggcaccuacgacuaccccaaguacuccgaggaggccaagcucaaccgcgaggagaucgacggcgucaagcucgaguccacccgcaucuaccagauccucgccaucuacuccaccgucgccuccucccucguccucgucgucucccucggcgccaucuccuucuggaugugcuccaacggcucccuccagugccgcaucugcaucuga

SEQ ID NO: 100999 - RNA, 1701 nt, Artificial Sequence
  derived and/or modified CDS sequence (opt2) from hemagglutinin__InfluenzaA__ADG59674
augaaggccauccucgucguccuccucuacaccuucgccaccgccaacgccgacacccucugcgucggcuaccacgccaacaacuccaccgacaccgucgacaccguccucgagaagaacgucaccgucacccacuccgucaaccuccucgaggacaagcacaacggcaagcucugcaagcuccgcggcgucgccccccuccaccucggcaagugcaacaucgccggcuggauccucggcaaccccgagugcgagucccucuccaccgccuccuccugguccuacaucgucgagaccuccuccuccgacaacggcaccugcuaccccggcgacuucaucgacuacgaggagcuccgcgagcagcucuccuccgucuccuccuucgagcgcuucgagaucuuccccaagaccuccuccuggcccaaccacgacuccaacaagggcgucaccgccgccugcccccacgccggcgccaaguccuucuacaagaaccucaucuggcucgucaagaagggcaacuccuaccccaagcucuccaaguccuacaucaacgacaagggcaaggagguccucguccucuggggcauccaccaccccuccaccuccgccgaccagcagucccucuaccagaacgccgacgccuacgucuucgucggcaccucccgcuacuccaagaaguucaagcccgagaucgccauccgccccaagguccgcgagcaggagggccgcaugaacuacuacuggacccucgucgagcccggcgacaagaucaccuucgaggccaccggcaaccucgucgucccccgcuacgccuucgccauggagcgcaacgccggcuccggcaucaucaucuccgacacccccguccacgacugcaacaccaccugccagacccccaagggcgccaucaacaccucccuccccuuccagaacguccaccccaucaccaucggcaagugccccaaguacgucaaguccaccaagcuccgccucgccaccggccuccgcaacguccccuccauccagucccgcggccucuucggcgccaucgccggcuucaucgagggcggcuggaccggcauggucgacggcugguacggcuaccaccaccagaacgagcagggcuccggcuacgccgccgaccucaaguccacccagaacgccaucgacgagaucaccaacaaggucaacuccgucaucgagaagaugaacacccaguucaccgccgucggcaaggaguucaaccaccucgagaagcgcaucgagaaccucaacaagaaggucgacgacggcuuccucgacaucuggaccuacaacgccgagcuccucguccuccucgagaacgagcgcacccucgacuaccacgacuccaacgucaagaaccucuacgagaagguccgcucccagcucaagaacaacgccaaggagaucggcaacggcugcuucgaguucuaccacaagugcgacaacaccugcauggaguccgucaagaacggcaccuacgacuaccccaaguacuccgaggaggccaagcucaaccgcgaggagaucgacggcgucaagcucgaguccaccaagaucuaccagauccucgccaucuacuccaccgucgccuccucccucguccucgucgucucccucggcgccaucuccuucuggaugugcuccaacggcucccuccagugccgcaucugcaucuga

SEQ ID NO: 101000 - RNA, 1701 nt, Artificial Sequence
  derived and/or modified CDS sequence (opt2) from hemagglutinin__InfluenzaA__ADG59675
augaaggccauccucgucguccuccucuacaccuucgccaccgccaacgccgacacccucugcaucggcuaccacgccaacaacuccaccgacaccgucgacaccguccucgagaagaacgucaccgucacccacuccgucaaccuccucgaggacaagcacaacggcaagcucugcaagcuccgcggcgucgccccccuccaccucggcaagugcaacaucgccggcuggauccucggcaaccccgagugcgagucccucuccaccgccuccuccugguccuacaucgucgagaccuccuccuccgacaacggcaccugcuaccccggcgacuucaucgacuacgaggagcuccgcgagcagcucuccuccgucuccuccuucgagcgcuucgagaucuuccccaagaccuccuccuggcccaaccacgacuccaacaagggcgucaccgccgccugcccccacgccggcgccaaguccuucuacaagaaccucaucuggcucgucaagaagggcaacuccuaccccaagcucuccaaguccuacaucaacgacaagggcaaggagguccucguccucuggggcauccaccaccccuccaccuccgccgaccagcagucccucuaccagaacgccgacgccuacgucuucgucggcuccucccgcuacuccaagaaguucaagcccgagaucgccauccgccccaagguccgcgaccaggagggccgcaugaacuacuacuggacccucgucgagcccggcgacaagaucaccuucgaggccaccggcaaccucgucgucccccgcuacgccuucgccauggagcgcaacgccggcuccggcaucaucaucuccgacacccccguccacgacugcaacaccaccugccagacccccaacggcgccaucaacaccucccuccccuuccacaacauccaccccaucaccaucggcaagugccccaaguacgucaaguccaccaagcuccgccucgccaccggccuccgcaacguccccuccauccagucccgcggccucuucggcgccaucgccggcuucaucgagggcggcuggaccggcauggucgacggcugguacggcuaccaccaccagaacgagcagggcuccggcuacgccgccgaccucaaguccacccagaacgccaucgacgagaucaccaacaaggucaacuccgucaucgagaagaugaacacccaguucaccgccgucggcaaggaguucaaccaccucgagaagcgcaucgagaaccucaacaagaaggucgacgacggcuuccucgacaucuggaccuacaacgccgagcuccucguccuccucgagaacgagcgcacccucgacuaccacgacuccaacgucaagaaccucuacgagaagguccgcucccagcucaagaacaacgccaaggagaucggcaacggcugcuucgaguucuaccacaagugcgacaacaccugcauggaguccgucaagaacggcaccuacgacuaccccaaguacuccgaggaggccaagcucaaccgcgaggagaucgacggcgucaagcucgaguccacccgcaucuaccagauccucgccaucuacuccaccgucgccuccucccucguccucgucgucucccucggcgccaucuccuucuggaugugcuccaacggcucccuccagugccgcaucugcaucuga

SEQ ID NO: 101001 - RNA, 1701 nt, Artificial Sequence
  derived and/or modified CDS sequence (opt2) from hemagglutinin__InfluenzaA__ADG59676
augaaggccauccucgucguccuccucuacaccuucgccaccgccaacgccgacacccucugcaucggcuaccacgccaacaacuccaccgacaccgucgacaccguccucgagaagaacgucaccgucacccacuccgucaaccuccucgaggacaagcacaacggcaagcucugcaagcuccgcggcgucgccccccuccaccucggcaagugcaacaucgccggcuggauccucggcaaccccgagugcgagucccucuccaccgccuccuccugguccuacaucgucgagaccuccuccuccgacaacggcaccugcuaccccggcgacuucaucgacuacgaggagcuccgcgagcagcucuccuccgucuccuccuucgagcgcuucgagaucuuccccaagaccuccuccuggcccaaccacgacuccaacaagggcgucaccgccgccugcccccacgccggcgccaaguccuucuacaagaaccucaucuggcucgucaagaagggcaacuccuaccccaagcucuccaaguccuacaucaacgacaagggcaaggagguccucguccucuggggcauccaccaccccuccaccuccgccgaccagcagucccucuaccagaacgccgacgccuacgucuucgucggcaccucccgcuacuccaagaaguucaagcccgagaucgccauccgccccaagguccgcgaccaggagggccgcaugaacuacuacuggacccucgucgagcccggcgacaagaucaccuucgaggccaccggcaaccucgucgucccccgcuacgccuucgccauggagcgcaacgccggcuccggcaucaucaucuccgacacccccguccacgacugcaacgccaccugccagacccccaagggcgccaucaacaccucccuccccuuccagaacauccaccccaucaccaucggcaagugccccaaguacgucaaguccaccaagcuccgccucgccaccggccuccgcaacauccccuccauccagucccgcggccucuucggcgccaucgccggcuucaucgagggcggcuggaccggcauggucgacggcugguacggcuaccaccaccagaacgagcagggcuccggcuacgccgccgaccucaaguccacccagaacgccaucgacgagaucaccaacaaggucaacuccgucaucgagaagaugaacacccaguucaccgccgucggcaaggaguucaaccaccucgagaagcgcaucgagaaccucaacaagaaggucgacgacggcuuccucgacaucuggaccuacaacgccgagcuccucguccuccucgagaacgagcgcacccucgacuaccacgacuccaacgucaagaaccucuacgagaagguccgcucccagcucaagaacaacgccaaggagaucggcaacggcugcuucgaguucuaccacaagugcgacaacaccugcauggaguccgucaagaacggcaccuacgacuaccccaaguacuccgaggaggccaagcucaaccgcgaggagaucgacggcgucaagcucgaguccacccgcaucuaccagauccucgccaucuacuccaccgucgccuccucccucguccucgucgucucccucggcgccaucuccuucuggaugugcuccaacggcucccuccagugccgcaucugcaucuga

SEQ ID NO: 101002 - RNA, 1701 nt, Artificial Sequence; identical to SEQ ID NO: 99806
  derived and/or modified CDS sequence (opt2) from hemagglutinin__InfluenzaA__ADG59678

SEQ ID NO: 101003 - RNA, 1701 nt, Artificial Sequence; identical to SEQ ID NO: 100969
  derived and/or modified CDS sequence (opt2) from hemagglutinin__InfluenzaA__ADG59680

SEQ ID NO: 101004 - RNA, 1701 nt, Artificial Sequence; identical to SEQ ID NO: 100969
  derived and/or modified CDS sequence (opt2) from hemagglutinin__InfluenzaA__ADG59681

SEQ ID NO: 101005 - RNA, 1701 nt, Artificial Sequence
  derived and/or modified CDS sequence (opt2) from hemagglutinin__InfluenzaA__ADG59683
augaaggccauccucgucguccuccucuacaccuucgccaucgccaacgccgacacccucugcaucggcuaccacgccaacaacuccaccgacaccgucgacaccguccucaagaagaacgucaccgucacccacuccgucaaccuccucgaggacaagcacaacggcaagcucugcaagcuccgcggcgucgccccccuccaccucggcaagugcaacaucgccggcuggauccucggcaaccccgagugcgagucccucuccaccgccuccuccugguccuacaucgucgagaccuccuccuccgacaacggcaccugcuaccccggcgacuucaucgacuacgaggagcuccgcgagcagcucuccuccgucuccuccuucgagcgcuucgagaucuuccccaagaccuccuccuggcccaaccacgacuccaacaagggcgucaccgccgccugcccccacgccggcgccaaguccuucuacaagaaccucaucuggcucgucaagaagggcaacuccuaccccaagcucuccaaguccuacaucaacgacaagggcaaggagguccucguccucuggggcauccaccaccccuccaccuccgccgaccagcagucccucuaccagaacgccgacgccuacgucuucgucggcaccucccgcuacuccaagaaguucaagcccgagaucgccauccgccccaagguccgcgaccaggagggccgcaugaacuacuacuggacccucgucgagcccggcgacaagaucaccuucgaggccaccggcaaccucgucgucccccgcuacgccuucgccauggagcgcaacgccggcuccggcaucgucaucuccgacacccccguccacgacugcaacaccaccugccagacccccaagggcgccaucaacaccucccuccccuuccagaacauccaccccaucaccaucggcaagugccccaaguacgucaaguccaccaagcuccgccucgccaccggccuccgcaacguccccuccauccagucccgcggccucuucggcgccaucgccggcuucaucgagggcggcuggaccggcauggucgacggcugguacggcuaccaccaccagaacgagcagggcuccggcuacgccgccgaccucaaguccacccagaacgccaucgacgagaucaccaacaaggucaacuccgucaucgagaagaugaacacccaguucaccgccgucggcaaggaguucaaccaccucgagaagcgcaucgagaaccucaacaagaaggucgacgacggcuuccucgacaucuggaccuacaacgccgagcuccucguccuccucgagaacgagcgcacccucgacuaccacgacuccaacgucaagaaccucuacgagaagguccgcucccagcucaagaacaacgccaaggagaucggcaacggcugcuucgaguucuaccacaagugcgacaacaccugcauggaguccgucaagaacggcaccuacgacuaccccaaguacuccgaggaggccaagcucaaccgcgaggagaucgacggcgucaagcucgaguccacccgcaucuaccagauccucgccaucuacuccaccgucgccuccucccucguccucgucgucucccucggcgccaucuccuucuggaugugcuccaacggcucccuccagugccgcaucugcaucuga

SEQ ID NO: 101006 - RNA, 1701 nt, Artificial Sequence; identical to SEQ ID NO: 99806
  derived and/or modified CDS sequence (opt2) from hemagglutinin__InfluenzaA__ADG59684

SEQ ID NO: 101007 - RNA, 1701 nt, Artificial Sequence
  derived and/or modified CDS sequence (opt2) from hemagglutinin__InfluenzaA__ADG59685
augaaggccauccucgucguccuccucuacaccuucgccaccgccaacgccgacacccucugcaucggcuaccacgccaacaacuccaccgacaccaucgacaccguccucgagaagaacgucaccgucacccacuccgucaaccuccucgaggacaagcacaacggcaagcucugcaagcuccgcggcgucgccccccuccaccucggcaagugcaacaucgccggcuggauccucggcaaccccgagugcgagucccucuccaccgccuccuccugguccuacaucgucgagaccuccuccuccgacaacggcaccugcuaccccggcgacuucaucgacuacgaggagcuccgcgagcagcucuccuccgucuccuccuucgagcgcuucgagaucuuccccaagaccuccuccuggcccaaccacgacuccaacaagggcgucaccgccgccugcccccacgccggcgccaaguccuucuacaagaaccucaucuggcucgucaagaagggcaacuccuaccccaagcucuccaaguccuacaucaacgacaagggcaaggagguccucguccucuggggcauccaccaccccuccaccuccgccgaccagcagucccucuaccagaacgccgacgccuacgucuucgucggcaccucccgcuacuccaagaaguucaagcccgagaucgccauccgccccaagguccgcgaccaggagggccgcaugaacuacuacuggacccucgucgagcccggcgacaagaucaccuucgaggccaccggcaaccucgucgucccccgcuacgccuucgccauggagcgcaacgccggcuccggcaucaucaucuccgacacccccguccacgacugcaacaccaccugccagacccccaagggcgccaucaacaccucccuccccuuccagaacauccaccccaucaccaucggcaagugccccaaguacgucaaguccaccaagcuccgccucgccaccggccuccgcaacauccccuccauccagucccgcggccucuucggcgccaucgccggcuucaucgagggcggcuggaccggcauggucgacggcugguacggcuaccaccaccagaacgagcagggcuccggcuacgccgccgaccucaaguccacccagaacgccaucgacgagaucaccaacaaggucaacuccgucaucgagaagaugaacacccaguucaccgccgucggcaaggaguucaaccaccucgagaagcgcaucgagaaccucaacaagaaggucgacgacggcuuccucgacaucuggaccuacaacgccgagcuccucguccuccucgagaacgagcgcacccucgacuaccacgacuccaacgucaagaaccucuacgagaagguccgcucccagcucaagaacaacgccaaggagaucggcaacggcugcuucgaguucuaccacaagugcgacaacaccugcauggaguccgucaagaacggcaccuacgacuaccccaaguacuccgaggaggccaagcucaaccgcgaggagaucgacggcgucaagcucgaguccacccgcaucuaccagauccucgccaucuacuccaccgucgccuccucccucguccucgucgucucccucggcgccaucuccuucuggaugugcuccaacggcucccuccagugccgcaucugcaucuga

SEQ ID NO: 101008 - RNA, 1701 nt, Artificial Sequence; identical to SEQ ID NO: 99806
  derived and/or modified CDS sequence (opt2) from hemagglutinin__InfluenzaA__ADG59686

SEQ ID NO: 101009 - RNA, 1701 nt, Artificial Sequence; identical to SEQ ID NO: 100969
  derived and/or modified CDS sequence (opt2) from hemagglutinin__InfluenzaA__ADG59687

SEQ ID NO: 101010 - RNA, 1701 nt, Artificial Sequence
  derived and/or modified CDS sequence (opt2) from hemagglutinin__InfluenzaA__ADG59688
augaaggccauccucgucguccuccucuacaccaucgccaccgccaacgccgacacccucugcaucggcuaccacgccaacaacuccaccgacaccaucgacaccguccucgagaagaacgucaccgucacccacuccgucaaccuccucgaggacaagcacaacggcaagcucugcaagcuccgcggcgucgccccccuccaccucggcaagugcaacaucgccggcuggauccucggcaaccccgagugcgagucccucuccaccgccuccuccugguccuacaucgucgagaccuccuccuccgacaacggcaccugcuaccccggcgacuucaucgacuacgaggagcuccgcgagcagcucuccuccgucuccuccuucgagcgcuucgagaucuuccccaagaccuccuccuggcccaaccacgacuccaacaagggcgucaccgccgccugcccccacgccggcgccaaguccuucuacaagaaccucaucuggcucgucaagaagggcaacuccuaccccaagcucuccaaguccuacaucaacgacaagggcaaggagguccucguccucuggggcauccaccaccccuccaccuccgccgaccagcagucccucuaccagaacgccgacgccuacgucuucgucggcaccucccgcuacuccaagaaguucaagcccgagaucgccauccgccccaagguccgcggccaggagggccgcaugaacuacuacuggacccucgucgagcccggcgacaagaucaccuucgaggccaccggcaaccucgucgucccccgcuacgccuucgccauggagcgcaacgccggcuccggcaucaucaucuccgacacccccguccacgacugcaacaccaccugccagacccccaagggcgccaucaacaccucccuccccuuccagaacauccaccccaucaccaucggcaagugccccaaguacgucaaguccaccaagcuccgccucgccaccggccuccgcaacauccccuccauccagucccgcggccucuucggcgccaucgccggcuucaucgagggcggcuggaccggcauggucgacggcugguacggcuaccaccaccagaacgagcagggcuccggcuacgccgccgaccucaaguccacccagaacgccaucgacgagaucaccaacaaggucaacuccgucaucgagaagaugaacacccaguucaccgccgucggcaaggaguucaaccaccucgagaagcgcaucgagaaccucaacaagaaggucgacgacggcuuccucgacaucuggaccuacaacgccgagcuccucguccuccucgagaacgagcgcacccucgacuaccacgacuccaacgucaagaaccucuacgagaagguccgcucccagcucaagaacaacgccaaggagaucggcaacggcugcuucgaguucuaccacaagugcgacaacaccugcauggaguccgucaagaacggcaccuacgacuaccccaaguacuccgaggaggccaagcucaaccgcgaggagaucgacggcgucaagcucgaguccacccgcaucuaccagauccucgccaucuacuccaccgucgccuccucccucguccucgucgucucccucggcgccaucuccuucuggaugugcuccaacggcucccuccagugccgcaucugcaucuga

SEQ ID NO: 101011 - RNA, 1701 nt, Artificial Sequence; identical to SEQ ID NO: 98705
  derived and/or modified CDS sequence (opt2) from hemagglutinin__InfluenzaA__ADG59689

SEQ ID NO: 101012 - RNA, 1701 nt, Artificial Sequence; identical to SEQ ID NO: 98705
  derived and/or modified CDS sequence (opt2) from hemagglutinin__InfluenzaA__ADG59691

SEQ ID NO: 101013 - RNA, 1701 nt, Artificial Sequence
  derived and/or modified CDS sequence (opt2) from hemagglutinin__InfluenzaA__ADG59693
augaaggccauccucgucguccuccucuacaccuucgccaccgccaacgccgacacccucugcaucggcuaccacgccaacaacuccaccgacaccgucgacaccguccucgagaagaacgucaccgucacccacuccgucaaccuccucgaggacaagcacaacggcaagcucugcaagcuccgcggcgucgccccccuccaccucggcaagugcaacaucgccggcuggauccucggcaaccccgagugcgagucccucuccaccgccuccuccugguccuacaucgucgagaccuccuccuccgacaacggcaccugcuaccccggcgacuucaucgacuacgaggagcuccgcgagcagcucuccuccgucuccuccuucgagcgcuucgagaucuuccccaagaccuccuccuggcccaaccacgacuccaacaagggcgucaccgccgccugcccccacgccggcgccaaguccuucuacaagaaccucaucuggcucgucaagaagggcaacuccuaccccaagcucuccaaguccuacaucaacgacaagggcaaggagguccucguccucuggggcauccaccaccccuccaccuccgccgaccagcagucccucuaccagaacgccgacgccuacgucuucgucggcaccucccgcuacuccaagaaguucaagcccgagaucgccauccgccccaagguccgcaaccaggagggccgcaugaacuacuacuggacccucgucgagcccggcgacaagaucaccuucgaggccaccggcaaccucgucgucccccgcuacgccuucgccauggagcgcaacgccggcuccggcaucaucaucuccgacacccccguccacgacugcaacaccaccugccagacccccaagggcgccaucaacaccucccuccccuuccagaacauccaccccaucaccaucggcaagugccccaaguacgucaaguccaccaagcuccgccucgccaccggccuccgcaacauccccuccauccagucccgcggccucuucggcgccaucgccggcuucaucgagggcggcuggaccggcauggucgacggcugguacggcuaccaccaccagaacgagcagggcuccggcuacgccgccgaccucaaguccacccagaacgccaucgacgagaucaccaacaaggucaacuccgucaucgagaagaugaacacccaguucaccgccgucggcaaggaguucaaccaccucgagaagcgcaucgagaaccucaacaagaaggucgacgacggcuuccucgacaucuggaccuacaacgccgagcuccucguccuccucgagaacgagcgcacccucgacuaccacgacuccaacgucaagaaccucuacgagaagguccgcucccagcucaagaacaacgccaaggagaucggcaacggcugcuucgaguucuaccacaagugcgacaacaccugcauggaguccgucaagaacggcaccuacgacuaccccaaguacuccgaggaggccaagcucaaccgcgaggagaucgacggcgucaagcucgaguccacccgcaucuaccagauccucgccaucuacuccaccgucgccuccucccucguccucgucgucucccucggcgccaucuccuucuggaugugcuccaacggcucccuccagugccgcaucugcaucuga

SEQ ID NO: 101014 - RNA, 1701 nt, Artificial Sequence
  derived and/or modified CDS sequence (opt2) from hemagglutinin__InfluenzaA__ADG59696
augaaggccauccucgucguccuccucuacaccuucgccaccgccaacgccgacacccucugcaucggcuaccacgccaacaacuccaccgacaccgucgacaccguccucgagaagaacgucaccgucacccacuccgucaaccuccucgaggacaagcacaacggcaagcucugcaagcuccgcggcgucgccccccuccaccucggcaagugcaacaucgccggcuggauccucggcaaccccgagugcgagucccucuccaccgccuccuccugguccuacaucgucgagaccuccuccuccgacaacggcaccugcuaccccggcgacuucaucgacuacgaggagcuccgcgagcagcucuccuccgucuccuccuucgagcgcuucgagaucuuccccaagaccuccuccuggcccaaccacgacuccaacaagggcgucaccgccgccugcccccacgccggcgccaaguccuucuacaagaaccucaucuggcucgucaagaagggcaacuccuaccccaagcucuccaaguccuacaucaacgacaagggcaaggagguccucguccucuggggcauccaccaccccuccaccuccgccgaccagcagucccucuaccagaacgccgacgccuacgucuucgucggcaccucccgcuacuccaagaaguucaagcccgagaucgccauccgccccaagguccgcgagcaggagggccgcaugaacuacuacuggacccucgucgagcccggcgacaagaucaccuucgaggccaccggcaaccucgucgucccccgcuacgccuucgccauggagcgcgacgccggcuccggcaucaucaucuccgacacccccguccacgacugcaacaccaccugccagacccccaagggcgccaucaacaccucccuccccuuccagaacauccaccccaucaccaucggcaagugccccaaguacgucaaguccaccaagcuccgccucgccaccggccuccgcaacguccccuccauccagucccgcggccucuucggcgccaucgccggcuucaucgagggcggcuggaccggcauggucgacggcugguacggcuaccaccaccagaacgagcagggcuccggcuacgccgccgaccucaaguccacccagaacgccaucgacgagaucaccaacaaggucaacuccgucaucgagaagaugaacacccaguucaccgccgucggcaaggaguucaaccaccucgagaagcgcaucgagaaccucaacaagaaggucgacgacggcuuccucgacaucuggaccuacaacgccgagcuccucguccuccucgagaacgagcgcacccucgacuaccacgacuccaacgucaagaaccucuacgagaagguccgcucccagcucaagaacaacgccaaggagaucggcaacggcugcuucgaguucuaccacaagugcgacaacaccugcauggaguccgucaagaacggcaccuacgacuaccccaaguacuccgaggaggccaagcucaaccgcgaggagaucgacggcgucaagcucgaguccacccgcaucuaccagauccucgccaucuacuccaccgucgccuccucccucguccucgucgucucccucggcgccaucuccuucuggaugugcuccaacggcucccuccagugccgcaucugcaucuga

SEQ ID NO: 101015 - RNA, 1701 nt, Artificial Sequence
  derived and/or modified CDS sequence (opt2) from hemagglutinin__InfluenzaA__ADG59697
augaaggccauccucgucguccuccucuacaccuucgccaccgccaacgccgacacccucugcaucggcuaccacgccaacaacuccaccgacaccgucgacaccguccucgagaagaacgucaccgucacccacuccgucaaccuccucgaggacaagcacaacggcaagcucugcaagcuccgcggcgucgccccccuccaccucggcaagugcaacaucgccggcuggauccucggcaaccccgagugcgagucccucuccaccgccuccuccugguccuacaucgucgagaccuccuccuccgacaacggcaccugcuaccccggcgacuucaucgacuacgaggagcuccgcgagcagcucuccuccgucuccuccuucgagcgcuucgagaucuuccccaagaccuccuccuggcccaaccacgacuccaacaagggcgucaccgccgccugcccccacgccggcgccaagaacuucuacaagaaccucaucuggcucgucaagaagggcaacuccuaccccaagcucuccaaguccuacaucaacgacaagggcaaggagguccucguccucuggggcauccaccaccccuccaccuccgccgaccagcagucccucuaccagaacgccgacgccuacgucuucgucggcaccucccgcuacuccaagaaguucaagcccgagaucgccauccgccccaagguccgcggccaggagggccgcaugaacuacuacuggacccucgucgagcccggcgacaagaucaccuucgaggccaccggcaaccucgucgucccccgcuacgccuucgccauggagcgcaacgccggcuccggcaucaucaucuccgacacccccguccacgacugcaacaccaccugccagacccccaagggcgccaucaacaccucccuccccuuccagaacauccaccccaucaccaucggcaagugccccaaguacgucaaguccaccaagcuccgccucgccaccggccuccgcaacguccccuccauccagucccgcggccucuucggcgccaucgccggcuucaucgagggcggcuggaccggcauggucgacggcugguacggcuaccaccaccagaacgagcagggcuccggcuacgccgccgaccucaaguccacccagaacgccaucgacgagaucaccaacaaggucaacuccgucaucgagaagaugaacacccaguucaccgccgucggcaaggaguucaaccaccucgagaagcgcaucgagaaccucaacaagaaggucgacgacggcuuccucgacaucuggaccuacaacgccgagcuccucguccuccucgagaacgagcgcacccucgacuaccacgacuccaacgucaagaaccucuacgagaagguccgcucccagcucaagaacaacgccaaggagaucggcaacggcugcuucgaguucuaccacaagugcgacaacaccugcauggaguccgucaagaacggcaccuacgacuaccccaaguacuccgaggaggccaagcucaaccgcgaggagaucgacggcgucaagcucgaguccacccgcaucuaccagauccucgccaucuacuccaccgucgccuccucccucguccucgucgucucccucggcgccaucuccuucuggaugugcuccaacggcucccuccagugccgcaucugcaucuga

SEQ ID NO: 101016 - RNA, 1701 nt, Artificial Sequence
  derived and/or modified CDS sequence (opt2) from hemagglutinin__InfluenzaA__ADG59700
augaaggccauccucgucguccuccucuacaccuucgccaccgccaacgccgacacccucugcaucggcuaccacgccaacaacuccaccgacaccgucgacaccguccucgagaagaacgucaccgucacccacuccgucaaccuccucgaggacaagcacaacggcaagcucugcaagcuccgcggcgucgccccccuccaccucggcaagugcaacaucgccggcuggauccucggcaaccccgagugcgagucccucuccaccgccuccuccugguccuacaucgucgagaccuccuccuccgacaacggcaccugcuaccccggcgacuucaucgacuacgaggagcuccgcgagcagcucuccuccgucuccuccuucgagcgcuucgagaucuuccccaagaccuccuccuggcccaaccacgacuccaacaagggcgucaccgccgccugcccccacgccggcgccaaguccuucuacaagaaccucaucuggcucgucaagaagggcaacuccuaccccaagcucuccaaguccuacaucaacgacaagggcaaggagguccucguccucuggggcauccaccaccccuccaccuccgccgaccagcagucccucuaccagaacgccgacgccuacgucuucgucggcaccucccgcuacuccaagaaguucaagcccgagaucgccauccgccccaagguccgcgaccaggagggccgcaugaacuacuacuggacccucgucgagcccggcgacaagaucaccuucgaggccaccggcaaccucgucgucccccgcuacgccuucgccauggagcgcaacgccggcuccggcaucaucaucuccgacacccccguccacgacugcaacaccaccugccagacccucaagggcgccaucaacaccucccuccccuuccagaacauccaccccaucaccaucggcaagugccccaaguacgucaaguccaccaagcuccgccucgccaccggccuccgcaacauccccuccauccagucccgcggccucuucggcgccaucgccggcuucaucgagggcggcuggaccggcauggucgacggcugguacggcuaccaccaccagaacgagcagggcuccggcuacgccgccgaccucaaguccacccagaacgccaucgacgagaucaccaacaaggucaacuccgucaucgagaagaugaacacccaguucaccgccgucggcaaggaguucaaccaccucgagaagcgcaucgagaaccucaacaagaaggucgacgacggcuuccucgacaucuggaccuacaacgccgagcuccucguccuccucgagaacgagcgcacccucgacuaccacgacuccaacgucaagaaccucuacgagaagguccgcucccagcucaagaacaacgccaaggagaucggcaacggcugcuucgaguucuaccacaagugcgacaacaccugcauggaguccgucaagaacggcaccuacgacuaccccaaguacuccgaggaggccaagcucaaccgcgaggagaucgacggcgucaagcucgaguccacccgcaucuaccagauccucgccaucuacuccaccgucgccuccucccucguccucgucgucucccucggcgccaucuccuucuggaugugcuccaacggcucccuccagugccgcaucugcaucuga

SEQ ID NO: 101017 - RNA, 1701 nt, Artificial Sequence
  derived and/or modified CDS sequence (opt2) from hemagglutinin__InfluenzaA__ADG59701
augaaggccauccucgucguccuccucuacaccuucgccgccgccaacgccgacacccucugcaucggcuaccacgccaacaacuccaccgacaccgucgacaccguccucgagaagaacgucaccgucacccacuccgucaaccuccucgaggacaagcacaacggcaagcucugcaagcuccgcggcgucgccccccuccaccucggcaagugcaacaucgccggcuggauccucggcaaccccgagugcgagucccucuccaccgccuccuccugguccuacaucgucgagaccuccuccuccgacaacggcaccugcuaccccggcgacuucaucgacuacgaggagcuccgcgagcagcucuccuccgucuccuccuucgagcgcuucgagaucuuccccaagaccuccuccuggcccaaccacgacuccaacaagggcgucaccgccgccugcccccacgccggcgccaaguccuucuacaagaaccucaucuggcucgucaagaagggcaacuccuaccccaagcucuccaaguccuacaucaacgacaagggcaaggagguccucguccucuggggcauccaccaccccuccaccuccgccgaccagcagucccucuaccagaacgccgacgccuacgucuucgucggcaccucccgcuacuccaagaaguucaagcccgagaucgccauccgccccaagguccgcgaccaggagggccgcaugaacuacuacuggacccucgucgagcccggcgacaagaucaccuucgaggccaccggcaaccucgucgucccccgcuacgccuucgccauggagcgcaacgccggcuccggcaucaucaucuccgacacccccguccacgacugcaacaccaccugccagacccccaagggcgccaucaacaccucccuccccuuccagaacauccaccccaucaccaucggcaagugccccaaguacgucaaguccaccaagcuccgccucgccaccggccuccgcaacguccccuccauccagucccgcggccucuucggcgccaucgccggcuucaucgagggcggcuggaccggcauggucgacggcugguacggcuaccaccaccagaacgagcagggcuccggcuacgccgccgaccucaaguccacccagaacgccaucgacaagaucaccaacaaggucaacuccgucaucgagaagaugaacacccaguucaccgccgucggcaaggaguucaaccaccucgagaagcgcaucgagaaccucaacaagaaggucgacgacggcuuccucgacaucuggaccuacaacgccgagcuccucguccuccucgagaacgagcgcacccucgacuaccacgacuccaacgucaagaaccucuacgagaagguccgcucccagcucaagaacaacgccaaggagaucggcaacggcugcuucgaguucuaccacaagugcgacaacaccugcauggaguccgucaagaacggcaccuacgacuaccccaaguacuccgaggaggccaagcucaaccgcgaggagaucgacggcgucaagcucgaguccacccgcaucuaccagauccucgccaucuacuccaccgucgccuccucccucguccucgucgucucccucggcgccaucuccuucuggaugugcuccaacggcucccuccagugccgcaucugcaucuga

SEQ ID NO: 101018 - RNA, 1701 nt, Artificial Sequence
  derived and/or modified CDS sequence (opt2) from hemagglutinin__InfluenzaA__ADG59702
augaaggccauccucgucguccuccucuacaccuucgccaccgccaacgccgacacccucugcaucggcuaccacgccaacaacuccaccgacaccgucgacaccguccucgagaagaacgucaccgucacccacuccgucaaccuccucgaggacaagcacaacggcaagcucugcaagcuccgcggcgucgccccccuccaccucggcaagugcaacaucgccggcuggauccucggcaaccccgagugcgagucccucuccaccgccuccuccugguccuacaucgucgagaccuccuccuccgacaacggcaccugcuaccccggcgacuucaucgacuacgaggagcuccgcgagcagcucuccuccgucuccuccuucgagcgcuucgagaucuuccccaagaccuccuccuggcccaaccacgacuccaacaagggcgucaccgccgccugcccccacgccggcgccaaguccuucuacaagaaccucaucuggcucgucaagaagggcaacuccuaccccaagcucuccaaguccuacaucaacgacaagggcaaggagguccucguccucuggggcauccaccaccccuccaccuccgccgaccagcagucccucuaccagaacgccgacgccuacgucuucgucggcaccucccgcuacuccaagaaguucaagcccgagaucgccauccgccccaagguccgcgaccaggagggccgcaugaacuacuacuggacccucgucgagcccggcgacaagaucaccuucgaggccaccggcaaccucgucgucccccgcuacgccuucgccauggagcgcaacgccggcuccggcaucaucaucuccgacacccccguccacgacugcaacaccaccugccagacccccaagggcgccaucaacaccucccuccccuuccagaacauccaccccaucaccaucggcaagugccccaaguacgucaaguccaccaagcuccgccucgccaccggccuccgcaacauccccuccauccagucccgcggccucuucggcgccaucgccggcuucaucgagggcggcuggaccggcauggucgacggcugguacggcuaccaccaccagaacgagcagggcuccggcuacgccgccgaccucaaguccacccagaacgccaucgacgagaucaccaacaaggucaacuccgucaucgagaagaugaacacccaguucaccgccgucggcaaggaguucaaccaccucgagaagcgcaucgagaaccucaacaagaaggucgacgacggcuuccucgacaucuggaccuacaacgccgagcuccucguccuccucgagaacgagcgcaaccucgacuaccacgacuccaacgucaagaaccucuacgagaagguccgcucccagcucaagaacaacgccaaggagaucggcaacggcugcuucgaguucuaccacaagugcgacaacaccugcauggaguccgucaagaacggcaccuacgacuaccccaaguacuccgaggaggccaagcucaaccgcgaggagaucgacggcgucaagcucgaguccacccgcaucuaccagauccucgccaucuacuccaccgucgccuccucccucguccucgucgucucccucggcgccaucuccuucuggaugugcuccaacggcucccuccagugccgcaucugcaucuga

SEQ ID NO: 101019 - RNA, 1701 nt, Artificial Sequence
  derived and/or modified CDS sequence (opt2) from hemagglutinin__InfluenzaA__ADG59703
augaaggccauccucgucguccuccucuacaccuucgccaccgccaacgccgacacccucugcaucggcuaccacgccaacaacuccaccgacaccgucgacaccguccucgagaagaacgucaccgucacccacuccgucaaccuccucgaggacaagcacaacggcaagcucugcaagcuccgcggcgucgccccccuccaccucggcaagugcaacaucgccggcuggauccucggcaaccccgagugcgagucccucuccaccgccuccuccugguccuacaucgucgagaccuccuccuccgacaacggcaccugcuaccccggcgacuucaucgacuacgaggagcuccgcgagcagcucuccuccgucuccuccuucgagcgcuucgagaucuuccccaagaccuccuccuggcccaaccacgaccccaacaagggcgucaccgccgccugcccccacgccggcgccaaguccuucuacaagaaccucaucuggcucgucaagaagggcaacuccuaccccaagcucuccaaguccuacaucaacgacaagggcaaggagguccucguccucuggggcauccaccaccccuccaccuccgccgaccagcagucccucuaccagaacgccgacgccuacgucuucgucggcaccucccgcuacuccaagaaguucaagcccgagaucgccauccgccccaagguccgcgaccaggagggccgcaugaacuacuacuggacccucgucgagcccggcgacaagaucaccuucgaggccaccggcaaccucgucgucccccgcuacgccuucgccauggagcgcaacgccggcuccggcaucgucaucuccgacacccccguccacgacugcaacaccaccugccagacccccaagggcgccaucaacaccucccuccccuuccagaacauccaccccaucaccaucggcaagugccccaaguacgucaaguccaccaagcuccgccucgccaccggccuccgcaacguccccuccauccagucccgcggccucuucggcgccaucgccggcuucaucgagggcggcuggaccggcauggucgacggcugguacggcuaccaccaccagaacgagcagggcuccggcuacgccgccgaccucaaguccacccagaacgccaucgacgagaucaccaacaaggucaacuccgucaucgagaagaugaacacccaguucaccgccgucggcaaggaguucaaccaccucgagaagcgcaucgagaaccucaacaagaaggucgacgacggcuuccucgacaucuggaccuacaacgccgagcuccucguccuccucgagaacgagcgcacccucgacuaccacgacuccaacgucaagaaccucuacgagaagguccgcucccagcucaagaacaacgccaaggagaucggcaacggcugcuucgaguucuaccacaagugcgacaacaccugcauggaguccgucaagaacggcaccuacgacuaccccaaguacuccgaggaggccaagcucaaccgcgaggagaucgacggcgucaagcucgaguccacccgcaucuaccagauccucgccaucuacuccaccgucgccuccucccucguccucgucgucucccucggcgccaucuccuucuggaugugcuccaacggcucccuccagugccgcaucugcaucuga

SEQ ID NO: 101020 - RNA, 1701 nt, Artificial Sequence; identical to SEQ ID NO: 98720
  derived and/or modified CDS sequence (opt2) from hemagglutinin__InfluenzaA__ADG76646

SEQ ID NO: 101021 - RNA, 1701 nt, Artificial Sequence
  derived and/or modified CDS sequence (opt2) from hemagglutinin__InfluenzaA__ADG76652
augaaggccauccucgucguccuccucuacaccuucgccaccgccaacgccgacacccucugcaucggcuaccacgccaacaacuccaccgacaccgucgacaccguccucgagaagaacgucaccgucacccacuccgucaaccuccucgaggacaagcacaacggcaagcucugcaagcuccgcggcgucgccccccuccaccucggcaagugcaacaucgccggcuggauccucggcaaccccgagugcgaguccuucuccaccuccuccuccugguccuacaucgucgagacccccuccuccgacaacggcaccugcuaccccggcgacuucaucgacuacgaggagcuccgcgagcagcucuccuccgucuccuccuucgagcgcuucgagaucuuccccaagaccuccuccuggcccaaccacgacuccaacaagggcgucaccgccgccugcccccacgccggcgccaaguccuucuacaagaaccucaucuggcucgucaagaagggcaacuccuaccccaagcucuccaaguccuacaucaacgacaagggcaaggagguccucguccucuggggcauccaccaccccuccaccuccgccgaccagcagucccucuaccagaacgccgacaccuacgucuucgucggcuccucccgcuacuccaagaaguucaagcccgagaucgccauccgccccaagguccgcgaccaggagggccgcaugaacuacuacuggacccucgucgagcccggcgacaagaucaccuucgaggccaccggcaaccucgucgucccccgcuacgccuucgccauggagcgcaacgccggcuccggcaucaucaucuccgacacccccguccacgacugcaacaccaccugccagacccccaagggcgccaucaacaccucccuccccuuccagaacauccaccccaucaccaucggcaagugccccaaguacgucaaguccaccaagcuccgccucgccaccggccuccgcaacauccccuccauccagucccgcggccucuucggcgccaucgccggcuucaucgagggcggcuggaccggcauggucgacggcugguacggcuaccaccaccagaacgagcagggcuccggcuacgccgccgaccucaaguccacccagaacgccaucgacgagaucaccaacaaggucaacuccgucaucgagaagaugaacacccaguucaccgccgucggcaaggaguucaaccaccucgagaagcgcaucgagaaccucaacaagaaggucgacgacggcuuccucgacaucuggaccuacaacgccgagcuccucguccuccucgagaacgagcgcacccucgacuaccacgacuccaacgucaagaaccucuacgagaagguccgcucccagcucaagaacaacgccaaggagaucggcaacggcugcuucgaguucuaccacaagugcgacaacaccugcauggaguccgucaagaacggcaccuacgacuaccccaaguacuccgaggaggccaagcucaaccgcgaggagaucgacggcgucaagcucgaguccacccgcaucuaccagauccucgccaucuacuccaccgucgccuccucccucguccucgucgucucccucggcgccaucuccuucuggaugugcuccaacggcucccuccagugccgcaucugcaucuga

SEQ ID NO: 101022 - RNA, 1701 nt, Artificial Sequence; identical to SEQ ID NO: 98947
  derived and/or modified CDS sequence (opt2) from hemagglutinin__InfluenzaA__ADH01808

SEQ ID NO: 101023 - RNA, 1701 nt, Artificial Sequence
  derived and/or modified CDS sequence (opt2) from hemagglutinin__InfluenzaA__ADH01818
augaaggccauccucgucguccuccucuacaccuucgccaccgccaacgccgacacccucugcaucggcuaccacgccaacaacuccaccgacaccgucgacaccguccucgagaagaacgucaccgucacccacuccgucaaccuccucgaggacaagcacaacggcaagcucugcaagcuccgcggcgucgccccccuccaccucggcaagugcaacaucgccggcuggauccucggcaaccccgagugcgagucccucuccaccgccuccuccugguccuacaucgucgagaccuccuccuccgacaacggcaccugcuaccccggcgacuucaucgacuacgaggagcuccgcgagcagcucuccuccgucuccuccuucgagcgcuucgagaucuuccccaagaccuccuccuggcccaaccacgacuccaacaagggcgucaccgccgccugcccccacgccggcgccaaguccuucuacaagaaccucaucuggcucgucaagaagggcaacuccuaccccaagcucuccaaguccuacaucaacgacaagggcaaggagguccucguccucuggggcauccaccaccccuccaccuccgccgaccagcagucccucuaccagaacgccgacgccuacgucuucgucggcaccucccgcuacuccaagaaguucaagcccgagaucgccauccgccccaagguccgcgaccaggagggccgcaugaacuacuacuggacccucgucgagcccggcgacaagaucaccuucgaggccaccggcaaccucgucgucccccgcuacgccuucgccauggagcgcaacgccggcuccggcaucaucaucuccgacacccccguccacgacugcaacaccaccugccagacccccaagggcgccaucaacaccucccuccccuuccagaacauccaccccaucaccaucggcaagugccccaaguacgucaaguccaccaagcuccgccucgccaccggccuccgcaacguccccuccauccagucccgcggccucuucggcgccaucgccggcuucaucgagggcggcuggaccggcauggucgacggcugguacggcuaccaccaccagaacgagcagggcuccggcuacgccgccgaccucaaguccacccagaacgccaucgacgagaucaccaacaaggucaacuccgucaucgagaagaugaacacccaguucaccgccgucggcaaggaguucaaccaccucgagaagcgcaucgagaaccucaacaagaaggucgacgacggcuuccucgacaucuggaccuacaacgccgagcuccucguccuccucgagaacgagcgcacccucgacuaccacgacuccaacgucaagaaccucuacgagaagguccgcucccagcucaagaacaacgccaaggagaucggcaacggcugcuucgaguucuaccacaagugcgacaacaccugcauggaguccgucaagaacggcaccuacgacuaccccaaguacuccgaggaggccaagcucaaccgcgaggagaucgacggcgucaagcucgaguccacccgcaucuaccagauccucgccaucuacuccaccgucgccuccucccucguccucaucgucucccucggcgccaucuccuucuggaugugcuccaacggcucccuccagugccgcaucugcaucuga

SEQ ID NO: 101024 - RNA, 1701 nt, Artificial Sequence; identical to SEQ ID NO: 98947
  derived and/or modified CDS sequence (opt2) from hemagglutinin__InfluenzaA__ADH01828

SEQ ID NO: 101025 - RNA, 1701 nt, Artificial Sequence; identical to SEQ ID NO: 98705
  derived and/or modified CDS sequence (opt2) from hemagglutinin__InfluenzaA__ADH01838

SEQ ID NO: 101026 - RNA, 1701 nt, Artificial Sequence; identical to SEQ ID NO: 98947
  derived and/or modified CDS sequence (opt2) from hemagglutinin__InfluenzaA__ADH01848

SEQ ID NO: 101027 - RNA, 1701 nt, Artificial Sequence; identical to SEQ ID NO: 98947
  derived and/or modified CDS sequence (opt2) from hemagglutinin__InfluenzaA__ADH01858

SEQ ID NO: 101028 - RNA, 1701 nt, Artificial Sequence; identical to SEQ ID NO: 98705
  derived and/or modified CDS sequence (opt2) from hemagglutinin__InfluenzaA__ADH01868

SEQ ID NO: 101029 - RNA, 1701 nt, Artificial Sequence; identical to SEQ ID NO: 98705
  derived and/or modified CDS sequence (opt2) from hemagglutinin__InfluenzaA__ADH01878

SEQ ID NO: 101030 - RNA, 1701 nt, Artificial Sequence; identical to SEQ ID NO: 98947
  derived and/or modified CDS sequence (opt2) from hemagglutinin__InfluenzaA__ADH01888

SEQ ID NO: 101031 - RNA, 1701 nt, Artificial Sequence; identical to SEQ ID NO: 98705
  derived and/or modified CDS sequence (opt2) from hemagglutinin__InfluenzaA__ADH01898

SEQ ID NO: 101032 - RNA, 1701 nt, Artificial Sequence; identical to SEQ ID NO: 98796
  derived and/or modified CDS sequence (opt2) from hemagglutinin__InfluenzaA__ADH01908

SEQ ID NO: 101033 - RNA, 1701 nt, Artificial Sequence
  derived and/or modified CDS sequence (opt2) from hemagglutinin__InfluenzaA__ADH01918
augaaggccauccucgucguccuccucuacaccuucgccaccgccaacgccgacacccucugcaucggcuaccacgccaacaacuccaccgacaccgucgacaccguccucgagaagaacgucaccgucacccacuccgucaaccuccucgaggacaagcacaacggcaagcucugcaagcuccgcggcgucgccccccuccaccucggcaagugcaacaucgccggcuggauccucggcaaccccgagugcgagucccucuccaccgaguccuccugguccuacaucgucgagaccuccuccuccgacaacggcaccugcuaccccggcgacuucaucgacuacgaggagcuccgcgagcagcucuccuccgucuccuccuucgagcgcuucgagaucuuccccaagaccuccuccuggcccaaccacgacuccaacaagggcgucaccgccgccugcccccacgccggcgccaaguccuucuacaagaaccucaucuggcucgucaagaagggcaacuccuaccccaagcucuccaaguccuacaucaacgacaaggagaaggagguccucguccucuggggcauccaccaccccuccaccuccgccgaccagcagucccucuaccagaacgccgacgccuacgucuucgucggcaccucccgcuacuccaagaaguucaagcccgagaucgccauccgccccaagguccgcgaccaggagggccgcaugaacuacuacuggacccucgucgagcccggcgacaagaucaccuucgaggccaccggcaaccucgucgucccccgcuacgccuucgccauggagcgcaacgccggcuccggcaucaucaucuccgacacccccguccacgacugcaacaccaccugccagacccccaagggcgccaucaacaccucccuccccuuccagaacauccaccccaucaccaucggcaagugccccaaguacgucaaguccaccaagcuccgccucgccaccggccuccgcaacguccccuccauccagucccgcggccucuucggcgccaucgccggcuucaucgagggcggcuggaccggcauggucgacggcugguacggcuaccaccaccagaacgagcagggcuccggcuacgccgccgaccucaaguccacccagaacgccaucgacaagaucaccaacaaggucaacuccgucaucgagaagaugaacacccaguucaccgccgucggcaaggaguucaaccaccucgagaagcgcaucgagaaccucaacaagaaggucgacgacggcuuccucgacaucuggaccuacaacgccgagcuccucguccuccucgagaacgagcgcacccucgacuaccacgacuccaacgucaagaaccucuacgagaagguccgcucccagcucaagaacaacgccaaggagaucggcaacggcugcuucgaguucuaccacaagugcgacaacaccugcauggaguccgucaagaacggcaccuacgacuaccccaaguacuccgaggaggccaagcucaaccgcgaggagaucgacggcgucaagcucgaguccacccgcaucuaccagauccucgccaucuacuccaccgucgccuccucccucguccucgucgucucccucggcgccaucuccuucuggaugugcuccaacggcucccuccagugccgcaucugcaucuga

SEQ ID NO: 101034 - RNA, 1701 nt, Artificial Sequence
  derived and/or modified CDS sequence (opt2) from hemagglutinin__InfluenzaA__ADH01928
augaaggccauccucgucguccuccucuacaccuucgccaccgccaacgccgacacccucugcaucggcuaccacgccaacaacuccaccgacaccgucgacaccguccucgagaagaacgucaccgucacccacuccgucaaccuccucgaggacaagcacaacggcaagcucugcaagcuccgcggcgucgccccccuccaccucggcaagugcaacaucgccggcuggauccucggcaaccccgagugcgagucccucuccaccgccuccuccugguccuacaucgucgagaccuccuccuccgacaacggcaccugcuaccccggcgacuucaucgacuacgaggagcuccgcgagcagcucuccuccgccuccuccuucgagcgcuucgagaucuuccccaagaccuccuccuggcccaaccacgacuccaacaagggcgucaccgccgccugcccccacgccggcgccaaguccuucuacaagaaccucaucuggcucgucaagaagggcaacuccuaccccaagcucuccaaguccuacaucaacgacaagggcaaggagguccucguccucuggggcauccaccaccccuccaccuccgccgaccagcagucccucuaccagaacgccgacgccuacgucuucgucggcaccucccgcuacuccaagaaguucaagcccgagaucgccauccgccccaagguccgcgaccaggagggccgcaugaacuacuacuggacccucgucgagcccggcgacaagaucaccuucgaggccaccggcaaccucgucgucccccgcuacgccuucgccauggagcgcaacgccggcuccggcaucaucaucuccgacacccccguccacgacugcaacaccaccugccagacccccaagggcgccaucaacaccucccuccccuuccagaacauccaccccaucaccaucggcaagugccccaaguacgucaaguccaccaagcuccgccucgccaccggccuccgcaacauccccuccauccagucccgcggccucuucggcgccaucgccggcuucaucgagggcggcuggaccggcauggucgacggcugguacggcuaccaccaccagaacgagcagggcuccggcuacgccgccgaccucaaguccacccagaacgccaucgacgagaucaccaacaaggucaacuccgucaucgagaagaugaacacccaguucaccgccgucggcaaggaguucaaccaccucgagaagcgcaucgagaaccucaacaagaaggucgacgacggcuuccucgacaucuggaccuacaacgccgagcuccucguccuccucgagaacgagcgcacccucgacuaccacgacuccaacgucaagaaccucuacgagaagguccgcucccagcucaagaacaacgccaaggagaucggcaacggcugcuucgaguucuaccacaagugcgacaacaccugcauggaguccgucaagaacggcaccuacgacuaccccaaguacuccgaggaggccaagcucaaccgcgaggagaucgacggcgucaagcucgaguccacccgcaucuaccagauccucgccaucuacuccaccgucgccuccucccucguccucgucgucucccucggcgccaucuccuucuggaugugcuccaacggcucccuccagugccgcaucugcaucuga

SEQ ID NO: 101035 - RNA, 1701 nt, Artificial Sequence
  derived and/or modified CDS sequence (opt2) from hemagglutinin__InfluenzaA__ADH01938
augaaggccauccucgucguccuccucuacaccuucgccaccgccaacgccgacacccucugcaucggcuaccacgccaacaacuccaccgacaccgucgacaccguccucgagaagaacgucaccgucacccacuccgucaaccuccucgaggacaagcacaacggcaagcucugcaagcuccgcggcgucgccccccuccaccucggcaagugcaacaucgccggcuggauccucggcaaccccgagugcgagucccucuccaccgccuccuccugguccuacaucgucgagaccuccuccuccgacaacggcaccugcuaccccggcgacuucaucgacuacgaggagcuccgcgagcagcucuccuccgucuccuccuucgagcgcuucgagaucuuccccaagaccuccuccuggcccaaccacgacuccaacaagggcgucaccgccgccugcccccacgccggcgccaaguccuucuacaagaaccucaucuggcucgucaagaagggcaacuccuaccccaagcucuccaaguccuacaucaacgacaagggcaaggagguccucguccucuggggcauccaccaccccuccaccuccgccgaccagcagucccucuaccagaacgccgacgccuacgucuucgucggcaccucccgcuacuccaagaaguucaagcccgagaucgccauccgccccaagguccgcgaccaggagggccgcaugaacuacuacuggacccucgucgagcccggcgacaagaucaccuucgaggccaccggcaaccucgucgucccccgcuacgccuucgccauggagcgcaacgccggcuccggcaucaucaucuccgacacccccguccacgacugcaacaccaccugccagacccccaagggcgccaucaacaccucccuccccuuccagaacauccaccccaucaccaucggcaagugccccaaguacgucaaguccaccaagcuccgccucgccaccggccuccgcaacguccccuccauccagucccgcggccucuucggcgccaucgccggcuucaucgagggcggcuggaccggcauggucgacggcugguacggcuaccaccaccagaacgagcagggcuccggcuacgccgccgaccucaaguccacccagaacgccaucgacgagaucaccaacaaggucaacuccgucaucgagaagaugaacacccaguucaccgccgucggcaaggaguucaaccaccucgagaagcgcaucgagaaccucaacaagaaggucgacgacggcuuccucgacaucuggaccuacaacgccgagcuccucguccuccucgagaacgagcgcacccucgacuaccacgacuccaacgucaagaaccucuacaagaagguccgcucccagcucaagaacaacgccaaggagaucggcaacggcugcuucgaguucuaccacaagugcgacaacaccugcauggaguccgucaagaacggcaccuacgacuaccccaaguacuccgaggaggccaagcucaaccgcgaggagaucgacggcgucaagcucgaguccacccgcaucuaccagauccucgccaucuacuccaccgucgccuccucccucguccucgucgucucccucggcgccaucuccuucuggaugugcuccaacggcucccuccagugccgcaucugcaucuga

SEQ ID NO: 101036 - RNA, 1701 nt, Artificial Sequence; identical to SEQ ID NO: 99869
  derived and/or modified CDS sequence (opt2) from hemagglutinin__InfluenzaA__ADH01948

SEQ ID NO: 101037 - RNA, 1701 nt, Artificial Sequence
  derived and/or modified CDS sequence (opt2) from hemagglutinin__InfluenzaA__ADH01958
augaaggccauccucgucguccuccucuacaccuucgccaccgccaacgccgacacccucugcaucggcuaccacgccaacaacuccaccgacaccgucgacaccguccucgagaagaacgucaccgucacccacuccgucaaccuccucgaggacaagcacaacggcaagcucugcaagcuccgcggcgucgccccccuccaccucggcaagugcaacaucgccggcuggauccucggcaaccccgagugcgagucccucuccaccgccuccuccugguccuacaucgucgagaccuccuccuccgacaacggcaccugcuaccccggcgacuucaucgacuacgaggagcuccgcgagcagcucuccuccgucuccuccuucgagcgcuucgagaucuuccccaagaccuccuccuggcccaaccacgacuccaacaagggcgucaccgccgccugcccccacgccggcgccaaguccuucuacaagaaccucaucuggcucgucaagaagggcaacuccuaccccaagcucuccaaguccuacaucaacgacaagggcaaggagguccucguccucuggggcauccaccaccccuccaccuccgccgaccagcagucccucuaccagaacgccgacgccuacgucuucgucggcaccucccgcuacuccaagaaguucaagcccgagaucgccauccgccccaagguccgcgaccaggagggccgcaugaacuacuacuggacccucgucgagcccggcgacaagaucaccuucgaggccaccggcaaccucgucgucccccgcuacgccuucgccauggagcgcaacgccggcuccggcaucaucaucuccgacacccccguccacgacugcaacaccaccugccagacccccaagggcgccaucaacaccucccuccccuuccagaacauccaccccaucaccaucggcaacugccccaaguacgucaaguccaccaagcuccgccucgccaccggccuccgcaacguccccuccauccagucccgcggccucuucggcgccaucgccggcuucaucgagggcggcuggaccggcauggucgacggcugguacggcuaccaccaccagaacgagcagggcuccggcuacgccgccgaccucaaguccacccagaacgccaucgacaagaucaccaacaaggucaacuccgucaucgagaagaugaacacccaguucaccgccgucggcaaggaguucaaccaccucgagaagcgcaucgagaaccucaacaagaaggucgacgacggcuuccucgacaucuggaccuacaacgccgagcuccucguccuccucgagaacgagcgcacccucgacuaccacgacuccaacgucaagaaccucuacgagaagguccgcucccagcucaagaacaacgccaaggagaucggcaacggcugcuucgaguucuaccacaagugcgacaacaccugcauggaguccgucaagaacggcaccuacgacuaccccaaguacuccgaggaggccaagcucaaccgcgaggagaucgacggcgucaagcucgaguccacccgcaucuaccagauccucgccaucuacuccaccgucgccuccucccucguccucaucgucucccucggcgccaucuccuucuggaugugcuccaacggcucccuccagugccgcaucugcaucuga

SEQ ID NO: 101038 - RNA, 1701 nt, Artificial Sequence
  derived and/or modified CDS sequence (opt2) from hemagglutinin__InfluenzaA__ADH01968
augaaggccauccucgucguccuccucuacaccuucgccaccgccaacgccgacacccucugcaucggcuaccacgccaacaacuccaccgacaccgucgacaccguccucgagaagaacgucaccgucacccacuccgucaaccuccucgaggacaagcacaacggcaagcucugcaagcuccgcggcgucgccccccuccaccucggcaagugcaacaucgccggcuggauccucggcaaccccgagugcgagucccucuccaccgccuccuccugguccuacaucgucgagaccuccuccuccgacaacggcaccugcuaccccggcgacuucaucgacuacgaggagcuccgcgagcagcucuccuccgucuccuccuucgagcgcuucgagaucuuccccaagaccuccuccuggcccaaccacgacuccaacaagggcgucaccgccgccugcccccacgccggcgccaaguccuucuacaagaaccucaucuggcucgucaagaagggcaacuccuaccccaagcucuccaaguccuacaucaacgacaagggcaaggagguccucguccucuggggcauccaccaccccuccaccuccgccgaccagcagucccucuaccagaacgccgacgccuacgucuucgucggcaccucccgcuacuccaagaaguucaagcccgagaucgccauccgccccaagguccgcgagcaggagggccgcaugaacuacuacuggacccucgucgagcccggcgacaagaucaccuucgaggccaccggcaaccucgucgucccccgcuacgccuucgccauggagcgcaacgccggcuccggcaucaucaucuccgacacccccguccacgacugcaacaccaccugccagacccccaagggcgccaucaacaccucccuccccuuccagaacauccaccccaucaccaucggcaagugccccaaguacgucaaguccaccaagcuccgccucgccaccggccuccgcaacguccccuccauccagucccgcggccucuucggcgccaucgccggcuucaucgagggcggcuggaccggcauggucgacggcugguacggcuaccaccaccagaacgagcagggcuccggcuacgccgccgaccucaaguccacccagaacgccaucgacaagaucaccaacaaggucaacuccgucaucgagaagaugaacacccaguucaccgccgucggcaaggaguucaaccaccucgagaagcgcaucgagaaccucaacaagaaggucgacgacggcuuccucgacaucuggaccuacaacgccgagcuccucguccuccucgagaacgagcgcacccucgacuaccacgacuccaacgucaagaaccucuacgagaagguccgcaaccagcucaagaacaacgccaaggagaucggcaacggcugcuucgaguucuaccacaagugcgacaacaccugcauggaguccgucaagaacggcaccuacgacuaccccaaguacuccgaggaggccaagcucaaccgcgaggagaucgacggcgucaagcucgaguccacccgcaucuaccagauccucgccaucuacuccaccgucgccuccucccucguccucgucgucucccucggcgccaucuccuucuggaugugcuccaacggcucccuccagugccgcaucugcaucuga

SEQ ID NO: 101039 - RNA, 1701 nt, Artificial Sequence; identical to SEQ ID NO: 99869
  derived and/or modified CDS sequence (opt2) from hemagglutinin__InfluenzaA__ADH01978

SEQ ID NO: 101040 - RNA, 1701 nt, Artificial Sequence; identical to SEQ ID NO: 99869
  derived and/or modified CDS sequence (opt2) from hemagglutinin__InfluenzaA__ADH01988

SEQ ID NO: 101041 - RNA, 1701 nt, Artificial Sequence; identical to SEQ ID NO: 100872
  derived and/or modified CDS sequence (opt2) from hemagglutinin__InfluenzaA__ADH01998

SEQ ID NO: 101042 - RNA, 1701 nt, Artificial Sequence
  derived and/or modified CDS sequence (opt2) from hemagglutinin__InfluenzaA__ADH02008
augaaggccauccucgucguccuccucuacaccuucgccaccgccaacgccgacacccucugcaucggcuaccacgccaacaacuccaccgacaccgucgacaccguccucgagaagaacgucaccgucacccacuccgucaaccuccucgagggcaagcacaacggcaagcucugcaagcuccgcggcgucgccccccuccaccucggcaagugcaacaucgccggcuggauccucggcaaccccgagugcgagucccucuccaccgccuccuccugguccuacaucgucgagaccuccuccuccgacaacggcaccugcuaccccggcgacuucaucgacuacgaggagcuccgcgagcagcucuccuccgucuccuccuucgagcgcuucgagaucuuccccaagaccuccuccuggcccaaccacgacuccaacaagggcgucaccgccgccugcccccacgccggcgccaaguccuucuacaagaaccucaucuggcucaucaagaagggcaacuccuaccccaagcucuccaaguccuacaucaacgacaaggagaaggagguccucguccucuggggcauccaccaccccuccaccuccgccgaccagcagucccucuaccagaacgccgacgccuacgucuucgucggcaccucccgcuacuccaagaaguucaagcccgagaucgccauccgccccaagguccgcgaccaggagggccgcaugaacuacuacuggacccucgucgagcccggcgacaagaucaccuucgaggccaccggcaaccucgucgucccccgcuacgccuucgccauggagcgcaacgccggcuccggcaucaucaucuccgacacccccguccacgacugcaacaccaccugccagacccccaagggcgccaucaacaccucccuccccuuccagaacauccaccccaucaccaucggcaagugccccaaguacgucaaguccaccaagcuccgccucgccaccggccuccgcaacauccccuccauccagucccgcggccucuucggcgccaucgccggcuucaucgagggcggcuggaccggcauggucgacggcugguacggcuaccaccaccagaacgagcagggcuccggcuacgccgccgaccucaaguccacccagaacgccaucgacgagaucaccaacaaggucaacuccgucaucgagaagaugaacacccaguucaccgccgucggcaaggaguucaaccaccucgagaagcgcaucgagaaccucaacaagaaggucgacgacggcuuccucgacaucuggaccuacaacgccgagcuccucguccuccucgagaacgagcgcacccucgacuaccacgacuccaacgucaagaaccucuacgagaagguccgcucccagcucaagaacaacgccaaggagaucggcaacggcugcuucgaguucuaccacaagugcgacaacaccugcauggaguccgucaagaacggcaccuacgacuaccccaaguacuccgaggaggccaagcucaaccgcgaggagaucgacggcgucaagcucgaguccacccgcaucuaccagauccucgccaucuacuccaccgucgccuccucccucguccucgucgucucccucggcgccaucuccuucuggaugugcuccaacggcucccuccagugccgcaucugcaucuga

SEQ ID NO: 101043 - RNA, 1701 nt, Artificial Sequence; identical to SEQ ID NO: 99869
  derived and/or modified CDS sequence (opt2) from hemagglutinin__InfluenzaA__ADI24508

SEQ ID NO: 101044 - RNA, 1701 nt, Artificial Sequence
  derived and/or modified CDS sequence (opt2) from hemagglutinin__InfluenzaA__ADI24515
augaaggccauccucgucguccuccucuacaccuucgccaccgccaacgccgacacccucugcgucggcuaccacgccaacaacuccaccgacaccgucgacaccguccucgagaagaacgucaccgucacccacuccgucaaccuccucgaggacaagcacaacggcaagcucugcaagcuccgcggcgucgccccccuccaccucggcaagugcaacaucgccggcuggauccucggcaaccccgagugcgagucccuccccaccgccuccuccugguccuacaucgucgagaccuccuccuccgacaacggcaccugcuaccccggcgacuucaucgacuacgaggagcuccgcgagcagcucuccuccgucuccuccuucgagcgcuucgagaucuuccccaagaccuccuccuggcccaaccacgacuccaacaagggcgucaccgccgccugcccccacgccggcgccaaguccuucuacaagaaccucaucuggcucgucaagaagggcaacuccuaccccaagcucuccaaguccuacaucaacgacaagggcaaggagguccucguccucuggggcauccaccaccccuccaccuccgccgaccagcagucccucuaccagaacgccgacgccuacgucuucgucggcaccucccgcuacuccaagaaguucaagcccgagaucgccauccgccccaagguccgcgaccaggagggccgcaugaacuacuacuggacccucgucgagcccggcgacaagaucaccuucgaggccaccggcaaccucgucgucccccgcuacgccuucgccauggagcgcaacgccggcuccggcaucaucaucuccgacacccccguccacgacugcaacaccaccugccagacccccaagggcgccaucaacaccucccuccccuuccagaacauccaccccaucaccaucggcaagugccccaaguacgucaaguccaccaagcuccgccucgccaccggccuccgcaacguccccuccauccagucccgcggccucuucggcgccaucgccggcuucaucgagggcggcuggaccggcauggucgacggcugguacggcuaccaccaccagaacgagcagggcuccggcuacgccgccgaccucaaguccacccagaacgccaucgacaaguccaccaacaaggucaacuccgucaucgagaagaugaacacccaguucaccgccgucggcaaggaguucaaccaccucgagaagcgcaucgagaaccucaacaagaaggucgacgacggcuuccucgacaucuggaccuacaacgccgagcuccucguccuccucgagaacgagcgcacccucgacuaccacgacuccaacgucaagaaccucuacgagaagguccgcucccagcucaagaacaacgccaaggagaucggcaacggcugcuucgaguucuaccacaagugcgacaacaccugcauggaguccgucaagaacggcaccuacgacuaccccaaguacuccgaggaggccaagcucaaccgcgaggagaucgacggcgucaagcucgaguccacccgcaucuaccagauccucgccaucuacuccaccgucgccuccucccucguccucgucgucucccucggcgccaucuccuucuggaugugcuccaacggcucccuccagugccgcaucugcaucuga

SEQ ID NO: 101045 - RNA, 1701 nt, Artificial Sequence; identical to SEQ ID NO: 99869
  derived and/or modified CDS sequence (opt2) from hemagglutinin__InfluenzaA__ADI24517

SEQ ID NO: 101046 - RNA, 1701 nt, Artificial Sequence; identical to SEQ ID NO: 99869
  derived and/or modified CDS sequence (opt2) from hemagglutinin__InfluenzaA__ADI24519

SEQ ID NO: 101047 - RNA, 1701 nt, Artificial Sequence; identical to SEQ ID NO: 99869
  derived and/or modified CDS sequence (opt2) from hemagglutinin__InfluenzaA__ADI24521

SEQ ID NO: 101048 - RNA, 1701 nt, Artificial Sequence; identical to SEQ ID NO: 100257
  derived and/or modified CDS sequence (opt2) from hemagglutinin__InfluenzaA__ADI24523

SEQ ID NO: 101049 - RNA, 1701 nt, Artificial Sequence
  derived and/or modified CDS sequence (opt2) from hemagglutinin__InfluenzaA__ADI24525
augaaggccauccucgucguccuccucuacaccuucgccaccgccaacgccgacacccucugcaucggcuaccacgccaacaacuccaccgacaccgucgacaccguccucgagaagaacgucaccgucacccacuccgucaaccuccucgaggacaagcacaacggcaagcucugcgagcuccgcggcgucgccccccuccaccucggcaagugcaacaucgccggcuggauccucggcaaccccgagugcgagucccucuccaccgcccgcuccugguccuacaucgucgagaccuccuccuccgacaacggcaccugcuaccccggcgacuucaucgacuacgaggagcuccgcgagcagcucuccuccgucuccuccuucgagcgcuucgagaucuuccccaagaccuccuccuggcccaaccacgacuccaacaagggcgucaccgccgccugcccccacgccggcgccaaguccuucuacaagaaccucaucuggcucgucaagaagggcaacuccuaccccaagcucuccaaguccuacaucaacgacaagggcaaggagguccucguccucuggggcauccaccaccccuccaccuccgccgaccagcagucccucuaccagaacgccgacgccuacgucuucgucggcaccucccgcuacuccaagaaguucaagcccgagaucgccauccgccccaagguccgcgaccaggagggccgcaugaacuacuacuggacccucgucgagcccggcgacaagaucaccuucgaggccaccggcaaccucgucgucccccgcuacgccuucgccauggagcgcaacgccggcuccggcaucaucaucuccgacacccccguccacgacugcaacaccaccugccagacccccaagggcgccaucaacaccucccuccccuuccagaacauccaccccaucaccaucggcaagugccccaaguacgucaaguccaccaagcuccgccucgccaccggccuccgcaacguccccuccauccagucccgcggccucuucggcgccaucgccggcuucaucgagggcggcuggaccggcauggucgacggcugguacggcuaccaccaccagaacgagcagggcuccggcuacgccgccgaccucaaguccacccagaacgccaucgacaagaucaccaacaaggucaacuccgucaucgagaagaugaacacccaguucaccgccgucggcaaggaguucaaccaccucgagaagcgcaucgagaaccucaacaagaaggucgacgacggcuuccucgacaucuggaccuacaacgccgagcuccucguccuccucgagaacgagcgcacccucgacuaccacgacuccaacgucaagaaccucuacgagaaggucaagucccagcucaagaacaacgccaaggagaucggcaacggcugcuucgaguucuaccacaagugcgacaacaccugcauggaguccgucaagaacggcaccuacgacuaccccaaguacuccgaggaggccaagcucaaccgcgaggagaucgacggcgucaagcucgaguccacccgcaucuaccagauccucgccaucuacuccaccgucgccuccucccucguccucgucgucucccucggcgccaucuccuucuggaugugcuccaacggcucccuccagugccgcaucugcaucuga

SEQ ID NO: 101050 - RNA, 1701 nt, Artificial Sequence; identical to SEQ ID NO: 99869
  derived and/or modified CDS sequence (opt2) from hemagglutinin__InfluenzaA__ADI24527

SEQ ID NO: 101051 - RNA, 1701 nt, Artificial Sequence; identical to SEQ ID NO: 100257
  derived and/or modified CDS sequence (opt2) from hemagglutinin__InfluenzaA__ADI24529

SEQ ID NO: 101052 - RNA, 1701 nt, Artificial Sequence
  derived and/or modified CDS sequence (opt2) from hemagglutinin__InfluenzaA__ADI24531
augaaggccauccucgucguccuccucuacaccuucgccaccgccaacgccgacacccucugcaucggcuaccacgccaacaacuccaccgacaccgucgacaccguccucgagaagaacgucaccgucacccacuccgucaaccuccucgaggacaagcacaacggcaagcucugcaagcuccgcggcgucgccccccuccaccucggcaagugcaacaucgccggcuggauccucggcaaccccgagugcgagucccucuccaccgccuccuccugguccuacaucgucgagaccuccuccuccgacaacggcaccugcuaccccggcgacuucaucaacuacgaggagcuccgcgagcagcucuccuccgucuccuccuucgagcgcuucgagaucuuccccaagaccuccuccuggcccaaccacgacuccaacaagggcgucaccgccgccugcccccacgccggcgccaaguccuucuacaagaaccucaucuggcucgucaagaagggcaacuccuaccccaagcucuccaaguccuacaucaacgacaagggcaaggagguccucguccucuggggcauccaccaccccuccaccuccgccgaccagcagucccucuaccagaacgccgacgccuacgucuucgucggcaccucccgcuacuccaagaaguucaagcccgagaucgccauccgccccaagguccgcgaccaggagggccgcaugaacuacuacuggacccucgucgagcccggcgacaagaucaccuucgaggccaccggcaaccucgucgucccccgcuacgccuucgccauggagcgcaacgccggcuccggcaucaucaucuccgacacccccguccacgacugcaacaccaccugccagacccccaagggcgccaucaacaccucccuccccuuccagaacauccaccccaucaccaucggcaagugccccaaguacgucaaguccaccaagcuccgccucgccaccggccuccgcaacguccccuccauccagucccgcggccuccucggcgccaucgccggcuucaucgagggcggcuggaccggcauggucgacggcugguacggcuaccaccaccagaacgagcagggcuccggcuacgccgccgaccucaaguccacccagaacgccaucgacaagaucaccaacaaggucaacuccgucaucgagaagaugaacacccaguucaccgccgucggcaaggaguucaaccaccucgagaagcgcaucgagaaccucaacaagaaggucgacgacggcuuccucgacaucuggaccuacaacgccgagcuccucguccuccucgagaacgagcgcacccucgacuaccacgacuccaacgucaagaaccucuacgagaagguccgcucccagcucaagaacaacgccaaggagaucggcaacggcugcuucgaguucuaccacaagugcgacaacaccugcauggaguccgucaagaacggcaccuacgacuaccccaaguacuccgaggaggccaagcucaaccgcgaggagaucgacggcgucaagcucgaguccacccgcaucuaccagauccucgccaucuacuccaccgucgccuccucccucguccucgucgucucccucggcgccaucuccuucuggaugugcuccaacggcucccuccagugcaagaucugcaucuga

SEQ ID NO: 101053 - RNA, 1701 nt, Artificial Sequence
  derived and/or modified CDS sequence (opt2) from hemagglutinin__InfluenzaA__ADI24536
augaaggccauccucgucguccuccucuacaccuucgccaccgccaacgccgacacccucugcaucggcuaccacgccaacaacuccaccgacaccgucgacaccguccucgagaagaacgucaccgucacccacuccgucaaccuccucgaggacaagcacaacggcaagcucugcaagcuccgcggcgucgccccccuccaccucggcaagugcaacaucgccggcuggauccucggcaaccccgagugcgagucccucuccaccgccuccuccugguccuacaucgucgagaccuccuccuccgacaacggcaccugcuaccccggcgacuucaucgacuacgaggagcuccgcgagcagcucuccuccgucuccuccuucgagcgcuucgagaucuuccccaagaccuccuccuggcccaaccacgacuccaacaagggcgucaccgccgccugcccccacgccggcgccaaguccuucuacaagaaccucaucuggcucgucaagaagggcaacuccuaccccaagcucuccaaguccuacaucaacgacaagggcaaggagguccucguccucuggggcauccaccaccccuccaccuccgccgaccagcagucccucuaccagaacgccgacgccuacgucuucgucggcaccucccgcuacuccaagaaguucaagcccgagaucgccauccgccccaagguccgcgaccaggagggccgcaugaacuacuacuggacccucgucgagcccggcgacaagaucaccuucgaggccaccggcaaccucgucgucccccgcuacgccuucgccauggagcgcgacgccggcuccggcaucaucaucuccgacacccccguccacgacugcaacaccaccugccagacccccaagggcgccaucaacaccucccuccccuuccagaacauccaccccaucaccaucggcaagugccccaaguacgucaaguccaccaagcuccgccucgccaccggccuccgcaacguccccuccauccagucccgcggccucuucggcgccaucgccggcuucaucgagggcggcuggaccggcauggucgacggcugguacggcuaccaccaccagaacgagcagggcuccggcuacgccgccgaccucaaguccacccagaacgccaucgacaagaucaccaacaaggucaacuccgucaucgagaagaugaacacccaguucaccgccgucggcaaggaguucaaccaccucgagaagcgcaucgagaaccucaacaagaagaucgacgacggcuuccucgacaucuggaccuacaacgccgagcuccucguccuccucgagaacgagcgcacccucgacuaccacgacuccaacgucaagaaccucuacgagaagguccgcucccagcucaagaacaacgccaaggagaucggcaacggcugcuucgaguucuaccacaagugcgacaacaccugcauggaguccgucaagaacggcaccuacgacuaccccaaguacuccgaggaggccaagcucaaccgcgaggagaucgacggcgucaagcucgaguccacccgcaucuaccagauccucgccaucuacuccaccgucgccuccucccucguccucgucgucucccucggcgccaucuccuucuggaugugcuccaacggcucccuccagugccgcaucugcaucuga

SEQ ID NO: 101054 - RNA, 1701 nt, Artificial Sequence; identical to SEQ ID NO: 99869
  derived and/or modified CDS sequence (opt2) from hemagglutinin__InfluenzaA__ADI24546

SEQ ID NO: 101055 - RNA, 1701 nt, Artificial Sequence; identical to SEQ ID NO: 99869
  derived and/or modified CDS sequence (opt2) from hemagglutinin__InfluenzaA__ADI24553

SEQ ID NO: 101056 - RNA, 1701 nt, Artificial Sequence; identical to SEQ ID NO: 99869
  derived and/or modified CDS sequence (opt2) from hemagglutinin__InfluenzaA__ADI24555

SEQ ID NO: 101057 - RNA, 1701 nt, Artificial Sequence
  derived and/or modified CDS sequence (opt2) from hemagglutinin__InfluenzaA__ADI24557
augaaggccauccucgucguccuccucuacaccuucgccaccgccaacgccgacacccucugcaucggcuaccacgccaacaacuccaccgacaccgucgacaccguccucgagaagaacgucaccgucacccacuccgucaaccuccucgaggacaagcacaacggcaagcucugcaagcuccgcggcgucgccccccuccaccucggcaagugcaacaucgccggcuggauccucggcaaccccgagugcgagucccucuccaccgccuccuccugguccuacaucgucgagaccuccuccuccgacaacggcaccugcuaccccggcgacuucaucgacuacgaggagcuccgcgagcagcucuccuccgucuccuccuucgagcgcuucgagaucuuccccaagaccuccuccuggcccaaccacgacuccaacaagggcgucaccgccgccugcccccacgccggcgccaaguccuucuacaagaaccucaucuggcucgucaagaagggcaacuccuaccccaagcucuccaaguccuacaucaacgacaagggcaaggagauccucguccucuggggcauccaccaccccuccaccuccgccgaccagcagucccucuaccagaacgccgacgccuacgucuucgucggcaccucccgcuacuccaagaaguucaagcccgagaucgccauccgccccaagguccgcgaccaggagggccgcaugaacuacuacuggacccucgucgagcccggcgacaagaucaccuucgaggccaccggcaaccucgucgucccccgcuacgccuucgccauggagcgcaacgccggcuccggcaucaucaucuccgacacccccguccacgacugcaacaccaccugccagacccccaagggcgccaucaacaccucccuccccuuccagaacauccaccccaucaccaucggcaagugccccaaguacgucaaguccaccaagcuccgccucgccaccggccuccgcaacguccccuccauccagucccgcggccucuucggcgccaucgccggcuucaucgagggcggcuggaccggcauggucgacggcugguacggcuaccaccaccagaacgagcagggcuccggcuacgccgccgaccucaaguccacccagaacgccaucgacaagaucaccaacaaggucaacuccgucaucgagaagaugaacacccaguucaccgccgucggcaaggaguucaaccaccucgagaagcgcaucgagaaccucaacaagaaggucgacgacggcuuccucgacaucuggaccuacaacgccgagcuccucguccuccucgagaacgagcgcacccucgacuaccacgacuccaacgucaagaaccucuacgagaagguccgcucccagcucaagaacaacgccaaggagaucggcaacggcugcuucgaguucuaccacaagugcgacaacaccugcauggaguccgucaagaacggcaccuacgacuaccccaaguacuccgaggaggccaagcucaaccgcgaggagaucgacggcgucaagcucgaguccacccgcaucuaccagauccucgccaucuacuccaccgucgccuccucccucguccucgucgucucccucggcgccaucuccuucuggaugugcuccaacggcucccuccagugccgcaucugcaucuga

SEQ ID NO: 101058 - RNA, 1701 nt, Artificial Sequence; identical to SEQ ID NO: 99869
  derived and/or modified CDS sequence (opt2) from hemagglutinin__InfluenzaA__ADI24559

SEQ ID NO: 101059 - RNA, 1701 nt, Artificial Sequence
  derived and/or modified CDS sequence (opt2) from hemagglutinin__InfluenzaA__ADI24561
augaaggccauccucgucauccuccucuacaccuucgccaccgccaacgccgacacccucugcaucggcuaccacgccaacaacuccaccgacaccgucgacaccguccucgagaagaacgucaccgucacccacuccgucaaccuccucgaggacaagcacgacggcaagcucugcaagcuccgcggcgucgccccccuccaccucggcaagugcaacaucgccggcuggauccucggcaaccccgagugcgagucccucuccaccgccuccuccugguccuacaucgucgagaccuccuccuccgacaacggcaccugcuaccccggcgacuucaucgacuacgaggagcuccgcgagcagcucuccuccgucuccuccuucgagcgcuucgagaucuuccccaagaccuccuccuggcccaaccacgacuccaacaagggcgucaccgccgccugcccccacgccggcgccaaguccuucuacaagaaccucaucuggcucgucaagaagggcaacuccuaccccaagcucuccaaguccuacaucaacgacaagggcaaggagguccucguccucuggggcauccaccaccccuccaccuccgccgaccagcagucccucuaccagaacgccgacgccuacgucuucgucggcaccucccgcuacuccaagaaguucaagcccgagaucgccauccgccccaagguccgcgaccaggagggccgcaugaacuacuacuggacccucgucgagcccggcgacaagaucaccuucgaggccaccggcaaccucgucgucccccgcuacgccuucgccauggagcgcaacgccggcuccggcaucaucaucuccgacacccccguccacgacugcaacaccaccugccagacccccaagggcgccaucaacaccucccuccccuuccagaacauccaccccaucaccaucggcaagugccccaaguacgucaaguccaccaagcuccgccucgccaccggccuccgcaacguccccuccauccagucccgcggccucuucggcgccaucgccggcuucaucgagggcggcuggaccggcauggucgacggcugguacggcuaccaccaccagaacgagcagggcuccggcuacgccgccgaccucaaguccacccagaacgccaucgacaagaucaccaacaaggucaacuccgucaucgagaagaugaacacccaguucaccgccgucggcaaggaguucaaccaccucgagaagcgcaucgagaaccucaacaagaaggucgacgacggcuuccucgacaucuggaccuacaacgccgagcuccucguccuccucgagaacgagcgcacccucgacuaccacgacuccaacgucaagaaccucuacgagaagguccgcucccagcucaagaacaacgccaaggagaucggcaacggcugcuucgaguucuaccacaagugcgacaacaccugcauggaguccgucaagaacggcaccuacgacuaccccaaguacuccgaggaggccaagcucaaccgcgaggagaucgacggcgucaagcucgaguccacccgcaucuaccagauccucgccaucuacuccaccgucgccuccucccucguccucgucgucucccucggcgccaucuccuucuggaugugcuccaacggcucccuccagugccgcaucugcaucuga

SEQ ID NO: 101060 - RNA, 1701 nt, Artificial Sequence; identical to SEQ ID NO: 99869
  derived and/or modified CDS sequence (opt2) from hemagglutinin__InfluenzaA__ADI24563

SEQ ID NO: 101061 - RNA, 1701 nt, Artificial Sequence
  derived and/or modified CDS sequence (opt2) from hemagglutinin__InfluenzaA__ADI24565
augaaggccauccucgucguccuccucuacaccuucgccaccgccaacgccgacacccucugcaucggcuaccacgccaacaacuccaccgacaccgucgacaccguccucgagaagaacgucaccgucacccacuccgucaaccuccucgaggacaagcacgacggcaagcucugcaagcuccgcggcgucgccccccuccaccucggcaagugcaacaucgccggcuggauccucggcaaccccgagugcgagucccucuccaccgccuccuccugguccuacaucgucgagaccuccuccuccgacaacggcaccugcuaccccggcgacuucaucgacuacgaggagcuccgcgagcagcucuccuccgucuccuccuucgagcgcuucgagaucuuccccaagaccuccuccuggcccaaccacgacuccaacaagggcgucaccgccgccugcccccacgccggcgccaaguccuucuacaagaaccucaucuggcucgucaagaagggcaacuccuaccccaagcucuccaaguccuacaucaacgacaagggcaagaagguccucguccucuggggcauccaccaccccuccaccuccgccgaccagcagucccucuaccagaacgccgacgccuacgucuucgucggcaccucccgcuacuccaagaaguucaagcccgagaucgccauccgccccaagguccgcgaccaggagggccgcaugaacuacuacuggacccucgucgagcccggcgacaagaucaccuucgaggccaccggcaaccucgucgucccccgcuacgccuucgccauggagcgcaacgccggcuccggcaucaucaucuccgacacccccguccacgacugcaacaccaccugccagacccccaagggcgccaucaacaccucccuccccuuccagaacauccaccccaucaccaucggcaagugccccaaguacgucaaguccaccaagcuccgccucgccaccggccuccgcaacguccccuccauccagucccgcggccucuucggcgccaucgccggcuucaucgagggcggcuggaccggcauggucgacggcugguacggcuaccaccaccagaacgagcagggcuccggcuacgccgccgaccucaaguccacccagaacgccaucgacaagaucaccaacaaggucaacuccgucaucgagaagaugaacacccaguucaccgccgucggcaaggaguucaaccaccucgagaagcgcaucgagaaccucaacaagaaggucgacgacggcuuccucgacaucuggaccuacaacgccgagcuccucguccuccucgagaacgagcgcacccucgacuaccacgacuccaacgucaagaaccucuacgagaagguccgcucccagcucaagaacaacgccaaggagaucggcaacggcugcuucgaguucuaccacaagugcgacaacaccugcauggaguccgucaagaacggcaccuacgacuaccccaaguacuccgaggaggccaagcucaaccgcgaggagaucgacggcgucaagcucgaguccacccgcaucuaccagauccucgccaucuacuccaccgucgccuccucccucguccucgucgucucccucggcgccaucuccuucuggaugugcuccaacggcucccuccagugccgcaucugcaucuga

SEQ ID NO: 101062 - RNA, 1701 nt, Artificial Sequence; identical to SEQ ID NO: 99869
  derived and/or modified CDS sequence (opt2) from hemagglutinin__InfluenzaA__ADI24567

SEQ ID NO: 101063 - RNA, 1701 nt, Artificial Sequence
  derived and/or modified CDS sequence (opt2) from hemagglutinin__InfluenzaA__ADI24569
augaaggccauccucgucguccuccucuacaccuucgccaccgccaacgccgacacccucugcaucggcuaccacgccaacaacuccaccgacaccgucgacaccguccucgagaagaacgucaccgucacccacuccgucaaccuccucgaggacaagcacaacggcaagcucugcaagcuccgcggcgucgccccccuccaccucggcaagugcaacaucgccggcuggauccucggcaaccccgagugcgagucccucuccaccgccuccuccugguccuacaucgucgagaccuccuccuccgacaacggcaccugcuaccccggcgacuucaucgacuacgaggagcuccgcgagcagcucuccuccgucuccuccuucgagcgcuucgagaucuuccccaagaccuccuccuggcccaaccacgacuccaacaagggcgucaccgccgccugcccccacgccggcgccaaguccuucuacaagaaccucaucuggcucgucaagaagggcaacuccuaccccaagcucuccaaguccuacaucaacgacaagggcaaggagguccucguccucuggggcauccaccaccccuccaccuccgccgaccagcagucccucuaccagaacgccgacgccuacgucuucgucggcaccucccgcuacuccaagaaguucaagcccgagaucgccauccgccccaagguccgcgaccaggagggccgcaugaacuacuacuggacccucgucgagcccggcgacaagaucaccuucgaggccaccggcaaccucgucgucccccgcuacgccuucgccaucgagcgcaacgccggcuccggcaucaucaucuccgacacccccguccacgacugcaacaccaccugccagacccccaagggcgccaucaacaccucccuccccuuccagaacauccaccccaucaccaucggcaagugccccaaguacgucaaguccaccaagcuccgccucgccaccggccuccgcaacguccccuccauccagucccgcggccucuucggcgccaucgccggcuucaucgagggcggcuggaccggcauggucgacggcugguacggcuaccaccaccagaacgagcagggcuccggcuacgccgccgaccucaaguccacccagaacgccaucgacaagaucaccaacaaggucaacuccgucaucgagaagaugaacacccaguucaccgccgucggcaaggaguucaaccaccucgagaagcgcaucgagaaccucaacaagaaggucgacgacggcuuccucgacaucuggaccuacaacgccgagcuccucguccuccucgagaacgagcgcacccucgacuaccacgacuccaacgucaagaaccucuacgagaagguccgcucccagcucaagaacaacgccaaggagaucggcaacggcugcuucgaguucuaccacaagugcgacaacaccugcauggaguccgucaagaacggcaccuacgacuaccccaaguacuccgaggaggccaagcucaaccgcgaggagaucgacggcgucaagcucgaguccacccgcaucuaccagauccucgccaucuacuccaccgucgccuccucccucguccucgucgucucccucggcgccaucuccuucuggaugugcuccaacggcucccuccagugccgcaucugcaucuga

SEQ ID NO: 101064 - RNA, 1701 nt, Artificial Sequence; identical to SEQ ID NO: 99869
  derived and/or modified CDS sequence (opt2) from hemagglutinin__InfluenzaA__ADI24571

SEQ ID NO: 101065 - RNA, 1701 nt, Artificial Sequence; identical to SEQ ID NO: 100257
  derived and/or modified CDS sequence (opt2) from hemagglutinin__InfluenzaA__ADI24573

SEQ ID NO: 101066 - RNA, 1701 nt, Artificial Sequence
  derived and/or modified CDS sequence (opt2) from hemagglutinin__InfluenzaA__ADI24575
augaaggccauccucgucguccuccucuacaccuucgccaccgccaacgccgacacccucugcaucggcuaccacgccaacaacuccaccgacaccgucgacaccguccucgagaagaacgucaccgucacccacuccgucaaccuccucgaggacaagcacaacggcaagcucugcaagcuccgcggcgucgccccccuccaccucggcaagugcaacaucgccggcuggauccucggcaaccccgagugcgagucccucuccaccgccuccuccugguccuacaucgucgagaccuccuccuccgacaacggcaccugcuaccccggcgacuucaucaacuacgaggagcuccgcgagcagcucuccuccgucuccuccuucgagcgcuucgagaucuuccccaagaccuccuccuggcccaaccacgacuccaacaagggcgucaccgccgccugcccccacgccggcgccaaguccuucuacaagaaccucaucuggcucgucaagaagggcaacuccuaccccaagcucuccaaguccuacaucaacgacaagggcaaggagguccucguccucuggggcauccaccaccccuccaccuccgccgaccagcagucccucuaccagaacgccgacgccuacgucuucgucggcaccucccgcuacuccaagaaguucaagcccgagaucgccauccgccccaagguccgcgaccaggagggccgcaugaacuacuacuggacccucgucgagcccggcgacaagaucaccuucgaggccaccggcaaccucgucgucccccgcuacgccuucgccauggagcgcaacgccggcuccggcaucaucaucuccgacacccccguccacgacugcaacaccaccugccagacccccaagggcgccaucaacaccucccuccccuuccagaacauccaccccaucaccaucggcaagugccccaaguacgucaaguccaccaagcuccgccucgccaccggccuccgcaacguccccuccauccagucccgcggccucuucggcgccaucgccggcuucaucgagggcggcuggaccggcauggucgacggcugguacggcuaccaccaccagaacgagcagggcuccggcuacgccgccgaccucaaguccacccagaacgccaucgacaagaucaccaacaaggucaacuccgucaucgagaagaugaacacccaguucaccgccgucggcaaggaguucaaccaccucgagaagcgcaucgagaaccucaacaagaaggucgacgacggcuuccucgacaucuggaccuacaacgccgagcuccucguccuccucgagaacgagcgcacccucgacuaccacgacuccaacgucgagaaccucuacgagaagguccgcucccagcucaagaacaacgccaaggagaucggcaacggcugcuucgaguucuaccacaagugcgacaacaccugcauggaguccgucaagaacggcaccuacgacuaccccaaguacuccgaggaggccaagcucaaccgcgaggagaucgacggcgucaagcucgaguccacccgcaucuaccagauccucgccaucuacuccaccgucgccuccucccucguccucgucgucucccucggcgccaucuccuucuggaugugcuccaacggcucccuccagugccgcaucugcaucuga

SEQ ID NO: 101067 - RNA, 1701 nt, Artificial Sequence; identical to SEQ ID NO: 99869
  derived and/or modified CDS sequence (opt2) from hemagglutinin__InfluenzaA__ADI24577

SEQ ID NO: 101068 - RNA, 1701 nt, Artificial Sequence
  derived and/or modified CDS sequence (opt2) from hemagglutinin__InfluenzaA__ADI24581
augaaggccauccucgucguccuccucuacaccuucgccaccgccaacgccgacacccucugcaucggcuaccacgccaacaacuccaccgacaccgucgacaccguccucgagaagaacgucaccgucacccacuccgucaaccuccucgaggacaagcacaacggcaagcucugcaagcuccgcggcgucgccccccuccaccucggcaagugcaacaucgccggcuggguccucggcaaccccgagugcgagucccucuccaccgccuccuccugguccuacaucgucgagaccuccuccuccgacaacggcaccugcuaccccggcgacuucaucgacuacgaggagcuccgcgagcagcucuccuccgucuccuccuucgagcgcuucgagaucuuccccaagaccuccuccuggcccaaccacgacuccaacaagggcgucaccgccgccugcccccacgccggcgccaaguccuucuacaagaaccucaucuggcucgucaagaagggcaacuccuaccccaagcucuccaaguccuacaucaacgacaagggcaaggagguccucguccucuggggcauccaccaccccuccaccuccgccgaccagcagucccucuaccagaacgccgacgccuacgucuucgucggcaccucccgcuacuccaagaaguucaagcccgagaucgccauccgccccaagguccgcgaccaggagggccgcaugaacuacuacuggacccucgucgagcccggcgacaagaucaccuucgaggccaccggcaaccucgucgucccccgcuacgccuucgccauggagcgcaacgccggcuccggcaucaucaucuccgacacccccguccacgacugcaacaccaccugccagacccccaagggcgccaucaacaccucccuccccuuccagaacauccaccccaucaccaucggcaagugccccaaguacgucaaguccaccaagcuccgccucgccaccggccuccgcaacguccccuccauccagucccgcggccucuucggcgccaucgccggcuucaucgagggcggcuggaccggcauggucgacggcugguacggcuaccaccaccagaacgagcagggcuccggcuacgccgccgaccucaaguccacccagaacgccaucgacaagaucaccaacaaggucaacuccgucaucgagaagaugaacacccaguucaccgccgucggcaaggaguucaaccaccucgagaagcgcaucgagaaccucaacaagaaggucgacgacggcuuccucgacaucuggaccuacaacgccgagcuccucguccuccucgagaacgagcgcacccucgacuaccacgacuccaacgucaagaaccucuacgagaagguccgcucccagcucaagaacaacgccaaggagaucggcaacggcugcuucgaguucuaccacaagugcgacaacaccugcauggaguccgucaagaacggcaccuacgacuaccccaaguacuccgaggaggccaagcucaaccgcgaggagaucgacggcgucaagcucgaguccacccgcaucuaccagauccucgccaucuacuccaccgucgccuccucccucguccucgucgucucccucggcgccaucuccuucuggaugugcuccaacggcucccuccagugccgcaucugcaucuga

SEQ ID NO: 101069 - RNA, 1701 nt, Artificial Sequence
  derived and/or modified CDS sequence (opt2) from hemagglutinin__InfluenzaA__ADI24583
augaaggccauccucgucguccuccucuacaccuucgccaccgccaacgccgacacccucugcaucggcuaccacgccaacaacuccaccgacaccgucgacaccauccucgagaagaacgucaccgucacccacuccgucaaccuccucgaggacaagcacaacggcaagcucugcaagcuccgcggcgucgccccccuccaccucggcaagugcaacaucgccggcuggauccucggcaaccccgagugcgagucccucuccaccgccuccuccugguccuacaucgucgagaccuccuccuccgacaacggcaccugcuaccccggcgacuucaucgacuacgaggagcuccgcgagcagcucuccuccgucuccuccuucgagcgcuucgagaucuuccccaagaccuccuccuggcccaaccacgacuccaacaagggcgucaccgccgccugcccccacgccggcgccaaguccuucuacaagaaccucaucuggcucgucaagaagggcaacuccuaccccaagcucuccaaguccuacaucaacgacaagggcaaggagguccucguccucuggggcauccaccaccccuccaccuccgccgaccagcagucccucuaccagaacgccgacgccuacgucuucgucggcaccucccgcuacuccaagaaguucaagcccgagaucgccauccgccccaagguccgcgaccaggagggccgcaugaacuacuacuggacccucgucgagcccggcgacaagaucaccuucgaggccaccggcaaccucgucgucccccgcuacgccuucgccauggagcgcaacgccggcuccggcaucaucaucuccgacacccccguccacgacugcaacaccaccugccagacccccaagggcgccaucaacaccucccuccccuuccagaacauccaccccaucaccaucggcaagugccccaaguacgucaaguccaccaagcuccgccucgccaccggccuccgcaacguccccuccauccagucccgcggccucuucggcgccaucgccggcuucaucgagggcggcuggaccggcauggucgacggcugguacggcuaccaccaccagaacgagcagggcuccggcuacgccgccgaccucaaguccacccagaacgccaucgacaagaucaccaacaaggucaacuccgucaucgagaagaugaacacccaguucaccgccgucggcaaggaguucaaccaccucgagaagcgcaucgagaaccucaacaagaaggucgacgacggcuuccucgacaucuggaccuacaacgccgagcuccucguccuccucgagaacgagcgcacccucgacuaccacgacuccaacgucaagaaccucuacgagaagguccgcucccagcucaagaacaacgccaaggagaucggcaacggcugcuucgaguucuaccacaagugcgacaacaccugcauggaguccgucaagaacggcaccuacgacuaccccaaguacuccgaggaggccaagcucaaccgcgaggagaucgacggcgucaagcucgaguccacccgcaucuaccagauccucgccaucuacuccaccgucgccuccucccucguccucgucgucucccucggcgccaucuccuucuggaugugcuccaacggcucccuccagugccgcaucugcaucuga

SEQ ID NO: 101070 - RNA, 1701 nt, Artificial Sequence
  derived and/or modified CDS sequence (opt2) from hemagglutinin__InfluenzaA__ADI24590
augaaggccauccucgucguccuccucuacaccuucgccaccgccaacgccgacacccucugcaucggcuaccacgccaacaacuccaccgacaccgucgacaccguccucgagaagaacgucaccgucacccacuccgccaaccuccucgaggacaagcacaacggcaagcucugcaagcuccgcggcgucgccccccuccaccucggcaagugcaacaucgccggcuggauccucggcaaccccgagugcgagucccucuccaccgccuccuccugguccuacaucgucgagaccuccuccuccgacaacggcaccugcuaccccggcgacuucaucgacuacgaggagcuccgcgagcagcucuccuccgucuccuccuucgagcgcuucgagaucuuccccaagaccuccuccuggcccaaccacgacuccaacaagggcgucaccgccgccugcccccacgccggcgccaaguccuucuacaagaaccucaucuggcucgucaagaagggcaacuccuaccccaagcucuccaaguccuacaucaacgacaagggcaaggagguccucguccucuggggcauccaccaccccuccaccuccgccgaccagcagucccucuaccagaacgccgacgccuacgucuucgucggcaccucccgcuacuccaagaaguucaagcccgagaucgccauccgccccaagguccgcgaccaggagggccgcaugaacuacuacuggacccucgucgagcccggcgacaagaucaccuucgaggccaccggcaaccucgucgucccccgcuacgccuucgccauggagcgcaacgccggcuccggcaucaucaucuccgacacccccguccacgacugcaacaccaccugccagacccccaagggcgccaucaacaccucccuccccuuccagaacauccaccccaucaccaucggcaagugccccaaguacgucaaguccaccaagcuccgccucgccaccggccuccgcaacguccccuccauccagucccgcggccucuucggcgccaucgccggcuucaucgagggcggcuggaccggcauggucgacggcugguacggcuaccaccaccagaacgagcagggcuccggcuacgccgccgaccucaaguccacccagaacgccaucgacaagaucaccaacaaggucaacuccgucaucgagaagaugaacacccaguucaccgccgucggcaaggaguucaaccaccucgagaagcgcaucgagaaccucaacaagaaggucgacgacggcuuccucgacaucuggaccuacaacgccgagcuccucguccuccucgagaacgagcgcacccucgacuaccacgacuccaacgucaagaaccucuacgagaagguccgcucccagcucaagaacaacgccaaggagaucggcaacggcugcuucgaguucuaccacaagugcgacaacaccugcauggaguccgucaagaacggcaccuacgacuaccccaaguacuccgaggaggccaagcucaaccgcgaggagaucgacggcgucaagcucgaguccacccgcaucuaccagauccucgccaucuacuccaccgucgccuccucccucguccucgucgucucccucggcgccaucuccuucuggaugugcuccaacggcucccuccagugccgcaucugcaucuga

SEQ ID NO: 101071 - RNA, 1701 nt, Artificial Sequence
  derived and/or modified CDS sequence (opt2) from hemagglutinin__InfluenzaA__ADI24597
augaaggccauccucgucguccuccucuacaccuucgccaccgccaacgccgacacccucugcaucggcuaccacgccaacaacuccaccgacaccgucgacaccguccucgagaagaacgucaccgucacccacuccgccaaccuccucgaggacaagcacaacggcaagcucugcaagcuccgcggcgucgccccccuccaccucggcaacugcaacaucgccggcuggauccucggcaaccccgagugcgagucccucuccaccgccuccuccugguccuacaucgucgagaccuccuccuccgacaacggcaccugcuaccccggcgacuucaucgacuacgaggagcuccgcgagcagcucuccuccgucuccuccuucgagcgcuucgagaucuuccccaagaccuccuccuggcccaaccacgacuccaacaagggcgucaccgccgccugcccccacgccggcgccaaguccuucuacaagaaccucaucuggcucgucaagaagggcaacuccuaccccaagcucuccaaguccuacaucaacgacaagggcaaggagguccucguccucuggggcauccaccaccccuccaccuccgccgaccagcagucccucuaccagaacgccgacgccuacgucuucgucggcaccucccgcuacuccaagaaguucaagcccgagaucgccauccgccccaagguccgcgaccaggagggccgcaugaacuacuacuggacccucgucgagcccggcgacaagaucaccuucgaggccaccggcaaccucgucgucccccgcuacgccuucgccauggagcgcaacgccggcuccggcaucaucaucuccgacacccccguccacgacugcaacaccaccugccagacccccaagggcgccaucaacaccucccuccccuuccagaacauccaccccaucaccaucggcaagugccccaaguacgucaaguccaccaagcuccgccucgccaccggccuccgcaacguccccuccauccagucccgcggccucuucggcgccaucgccggcuucaucgagggcggcuggaccggcauggucgacggcugguacggcuaccaccaccagaacgagcagggcuccggcuacgccgccgaccucaaguccacccagaacgccaucgacaagaucaccaacaaggucaacuccgucaucgagaagaugaacacccaguucaccgccgucggcaaggaguucaaccaccucgagaagcgcaucgagaaccucaacaagaaggucgacgacggcuuccucgacaucuggaccuacaacgccgagcuccucguccuccucgagaacgagcgcacccucgacuaccacgacuccaacgucaagaaccucuacgagaagguccgcucccagcucaagaacaacgccaaggagaucggcaacggcugcuucgaguucuaccacaagugcgacaacaccugcauggaguccgucaagaacggcaccuacgacuaccccaaguacuccgaggaggccaagcucaaccgcgaggagaucgacggcgucaagcucgaguccacccgcaucuaccagauccucgccaucuacuccaccgucgccuccucccucguccucgucgucucccucggcgccaucuccuucuggaugugcuccaacggcucccuccagugccgcaucugcaucuga

SEQ ID NO: 101072 - RNA, 1701 nt, Artificial Sequence; identical to SEQ ID NO: 101070
  derived and/or modified CDS sequence (opt2) from hemagglutinin__InfluenzaA__ADI24612

SEQ ID NO: 101073 - RNA, 1701 nt, Artificial Sequence
  derived and/or modified CDS sequence (opt2) from hemagglutinin__InfluenzaA__ADI24619
augaaggccauccucgucguccuccucuacaccuucgccaccgccaacgccgacacccucugcaucggcuaccacgccaacaacuccaccgacaccgucgacaccguccucgagaagaacgucaccgucacccacuccgccaaccuccucgaggacaagcacaacggcaagcucugcaagcuccgcggcgucgccccccuccaccucggcaagugcaacaucgccggcuggauccucggcaaccccgagugcgagucccucuccaccgccuccuccugguccuacaucgucgagaccuccuccuccgacaacggcaccugcuaccccggcgacuucaucgacuacgaggagcuccgcgagcagcucuccuccgucuccuccuucgagcgcuucgagaucuuccccaagaccuccuccuggcccaaccacgacuccaacaagggcgucaccgccgccugcccccacgccggcgccaaguccuucuacaagaaccucaucuggcucgucaagaagggcaacuccuaccccaagcucuccaaguccuacaucaacgacaagggcaaggagguccucguccucuggggcauccaccaccccuccaccuccgucgaccagcagucccucuaccagaacgccgacgccuacgucuucgucggcaccucccgcuacuccaagaaguucaagcccgagaucgccauccgccccaagguccgcgaccaggagggccgcaugaacuacuacuggacccucgucgagcccggcgacaagaucaccuucgaggccaccggcaaccucgucgucccccgcuacgccuucgccauggagcgcaacgccggcuccggcaucaucaucuccgacacccccguccacgacugcaacaccaccugccagacccccaagggcgccaucaacaccucccuccccuuccagaacauccaccccaucaccaucggcaagugccccaaguacgucaaguccaccaagcuccgccucgccaccggccuccgcaacguccccuccauccagucccgcggccucuucggcgccaucgccggcuucaucgagggcggcuggaccggcauggucgacggcugguacggcuaccaccaccagaacgagcagggcuccggcuacgccgccgaccucaaguccacccagaacgccaucgacaagaucaccaacaaggucaacuccgucaucgagaagaugaacacccaguucaccgccgucggcaaggaguucaaccaccucgagaagcgcaucgagaaccucaacaagaaggucgacgacggcuuccucgacaucuggaccuacaacgccgagcuccucguccuccucgagaacgagcgcacccucgacuaccacgacuccaacgucaagaaccucuacgagaagguccgcucccagcucaagaacaacgccaaggagaucggcaacggcugcuucgaguucuaccacaagugcgacaacaccugcauggaguccgucaagaacggcaccuacgacuaccccaaguacuccgaggaggccaagcucaaccgcgaggagaucgacggcgucaagcucgaguccacccgcaucuaccagauccucgccaucuacuccaccgucgccuccucccucguccucgucgucucccucggcgccaucuccuucuggaugugcuccaacggcucccuccagugccgcaucugcaucuga

SEQ ID NO: 101074 - RNA, 1701 nt, Artificial Sequence
  derived and/or modified CDS sequence (opt2) from hemagglutinin__InfluenzaA__ADI24621
augaaggccauccucgucguccuccucuacaccuucgccaccgccaacgccgacacccucugcaucggcuaccacgccaacaacuccaccgacaccgucgacaccguccucgagaagaacgucaccgucacccacuccgucaaccuccucgaggacaagcacaacggcaagcucugcaagcuccgcggcgucgccccccuccaccucggcaagugcaacaucgccggcuggauccucggcaaccccgagugcgagucccucuccaccgccuccuccugguccuacaucgucgagaccuccuccuccgacaacggcaccugcuaccccggcgacuucaucgacuacgaggagcuccgcgagcagcucuccuccgucuccuccuucgagcgcuucgagaucuuccccaagaccuccuccuggcccaaccacgacuccaacaagggcgucaccgccgccugcccccacgccggcgccaaguccuucuacaagaaccucaucuggcucgucaagaagggcaacuccuaccccaagcucuccaaguccuacaucaacgacaagggcaaggagguccucguccucuggggcauccaccaccccuccaccuccgccgaccagcagucccucuaccagaacgccgacgccuacgucuucgucggcaccucccgcuacuccaagaaguucaagcccgagaucgccauccgccccaagguccgcgaccaggagggccgcaugaacuacuacuggacccucgucgagcccggcgacaagaucaccuucgaggccaccggcaaccucgucgucccccgcuacgccuucgccauggagcgcaacgccggcuccggcaucaucaucuccgacacccccguccacgacugcaacaccaccugccagacccccaagggcaccaucaacaccucccuccccuuccagaacauccaccccaucaccaucggcaagugccccaaguacgucaaguccaccaagcuccgccucgccaccggccuccgcaacguccccuccauccagucccgcggccucuucggcgccaucgccggcuucaucgagggcggcuggaccggcauggucgacggcugguacggcuaccaccaccagaacgagcagggcuccggcuacgccgccgaccucaaguccacccagaacgccaucgacaagaucaccaacaaggucaacuccgucaucgagaagaugaacacccaguucaccgccgucggcaaggaguucaaccaccucgagaagcgcaucgagaaccucaacaagaaggucgacgacggcuuccucgacaucuggaccuacaacgccgagcuccucguccuccucgagaacgagcgcacccucgacuaccacgacuccaacgucaagaaccucuacgagaagguccgcucccagcucaagaacaacgccaaggagaucggcaacggcugcuucgaguucuaccacaagugcgacaacaccugcauggaguccgucaagaacggcaccuacgacuaccccaaguacuccgaggaggccaagcucaaccgcgaggagaucgacggcgucaagcucgaguccacccgcaucuaccagauccucgccaucuacuccaccgucgccuccucccucguccucaucgucucccucggcgccaucuccuucuggaugugcuccaacggcucccuccagugccgcaucugcaucuga

SEQ ID NO: 101075 - RNA, 1701 nt, Artificial Sequence
  derived and/or modified CDS sequence (opt2) from hemagglutinin__InfluenzaA__ADI48184
augaaggccauccucgucguccuccucuacaccuucgccaccgccaacgccgacacccucugcaucggcuaccacgccaacaacuccaccgacaccgucgacaccguccucgagaagaacgucaccgucacccacuccgucaaccuccucgaggacaagcacaacggcaagcucugcaagcuccgcggcgucgccccccuccaccucggcaagugcaacaucgccggcuggauccucggcaaccccgagugcgagucccucuccaccgccuccuccugguccuacaucgucgagaccuccuccuccgacaacggcaccugcuaccccggcgacuucaucgacuacgaggagcuccgcgagcagcucuccuccgucuccuccuucgagcgcuucgagaucuuccccaagaccuccuccuggcccaaccacgacuccaacaagggcgucaccgccgccugcccccacgccggcgccaaguccuucuacaagaaccucaucuggcucgucaagaagggcaacuccuaccccaagcucuccaaguccuacaucaacgacaagggcaaggagguccucguccucuggggcauccaccaccccuccaccuccgccgaccagcagucccucuaccagaacgccgacgccuacgucuucgucggcaccucccgcuacuccaagaaguucaagcccgagaucgccauccgccccaagguccgcgaccaggagggccgcaugaacuacuacuggacccucgucgagcccggcgacaagaucaccuucgaggccaccggcaaccucgucgucccccgcuacgccuucgccaugggccgcaacgccggcuccggcaucaucaucuccgacacccccguccacgacugcaacaccaccugccagacccccaagggcgccaucaacaccucccuccccuuccagaacauccaccccaucaccaucggcaagugccccaaguacgucaaguccaccaagcuccgccucgccaccggccuccgcaacguccccuccauccagucccgcggccucuucggcgccaucgccggcuucaucgagggcggcuggaccggcauggucgacggcugguacggcuaccaccaccagaacgagcagggcuccggcuacgccgccgaccucaaguccacccagaacgccaucgacaagaucaccaacaaggucaacuccgucaucgagaagaugaacacccaguucaccgccgucggcaaggaguucaaccaccucgagaagcgcaucgagaaccucaacaagaaggucgacgacggcuuccucgacaucuggaccuacaacgccgagcuccucguccuccucgagaacgagcgcacccucgacuaccacgacuccaacgucaagaaccucuacgagcgcguccgcucccagcucaagaacaacgccaaggagaucggcaacggcugcuucgaguucuaccacaagugcgacaacaccugcauggaguccgucaagaacggcaccuacgacuaccccaaguacuccgaggaggccaagcucaaccgcgaggagaucgacggcgucaagcucgaguccacccgcaucuaccagauccucgccaucuacuccaccgucgccuccucccucguccucgucgucucccucggcgccaucuccuucuggaugugcuccaacggcucccuccagugccgcaucugcaucuga

SEQ ID NO: 101076 - RNA, 1701 nt, Artificial Sequence; identical to SEQ ID NO: 99869
  derived and/or modified CDS sequence (opt2) from hemagglutinin__InfluenzaA__ADI48186

SEQ ID NO: 101077 - RNA, 1701 nt, Artificial Sequence
  derived and/or modified CDS sequence (opt2) from hemagglutinin__InfluenzaA__ADI48188
augaaggccauccucgucguccuccucuacaccuucgccaccgccaacgccgacacccucugcaucggcuaccacgccaacaacuccaccgacaccgucgacaccguccucgagaagaacgucaccgucacccacuccgucaaccuccucgaggacaagcacaacggcaagcucugcaagcuccgcggcgucgccccccuccaccucggcaagugcaacaucgccggcuggauccucggcaaccccgagugcgagucccucuccaccgccuccuccugguccuacaucgucgagaccuccuccuccgacaacggcaccugcuaccccggcgacuucaucgacuacgaggagcuccgcgagcagcucuccuccgucuccuccuucgagcgcuucgagaucuuccccaagaccuccuccuggcccaaccacgacuccaacaagggcgucaccgccgccugcccccacgccggcgccaaguccuucuacaagaaccucaucuggcucgucaagaagggcaacuccuaccccaagcucuccaaguccuacaucaacgacaagggcaaggagguccucguccucuggggcauccaccaccccuccaccuccgccgaccagcagucccucuaccagaacgccgacgccuacgucuucgucggcaccucccgcuacuccaagaaguucaagcccgagaucgccauccgccccaagguccgcgaccaggagggccgcaugaacuacuacuggacccucgucgagcccggcgacaagaucaccuucgaggccaccggcaaccucgucgucccccgcuacgccuucgccauggagcgcaacgccggcuccgacaucaucaucuccgacacccccguccacgacugcaacaccaccugccagacccccaagggcgccaucaacaccucccuccccuuccagaacauccaccccaucaccaucggcaagugccccaaguacgucaaguccaccaagcuccgccucgccaccggccuccgcaacguccccuccauccagucccgcggccucuucggcgccaucgccggcuucaucgagggcggcuggaccggcauggucgacggcugguacggcuaccaccaccagaacgagcagggcuccggcuacgccgccgaccucaaguccacccagaacgccaucgacaagaucaccaacaaggucaacuccgucaucgagaagaugaacacccaguucaccgccgucggcaaggaguucaaccaccucgagaagcgcaucgagaaccucaacaagaaggucgacgacggcuuccucgacaucuggaccuacaacgccgagcuccucguccuccucgagaacgagcgcacccucgacuaccacgacuccaacgucaagaaccucuacgagaagguccgcucccagcucaagaacaacgccaaggagaucggcaacggcugcuucgaguucuaccacaagugcgacaacaccugcauggaguccgucaagaacggcaccuacgacuaccccaaguacuccgaggaggccaagcucaaccgcgaggagaucgacggcgucaagcucgaguccacccgcaucuaccagauccucgccaucuacuccaccgucgccuccucccucguccucgucgucucccucggcgccaucuccuucuggaugugcuccaacggcucccuccagugccgcaucugcaucuga

SEQ ID NO: 101078 - RNA, 1701 nt, Artificial Sequence
  derived and/or modified CDS sequence (opt2) from hemagglutinin__InfluenzaA__ADI48190
augaaggccauccucgucguccuccucuacaccuucgccaccgccaacgccgacacccucugcaucggcuaccacgccaacaacuccaccgacaccgucgacaccguccucgagaagaacgucaccgucacccacuccgucaaccuccucgaggacaagcacaacggcaagcucugcaagcuccgcggcgucgccccccuccaccucggcaagugcaacaucgccggcuggauccucggcaaccccgagugcgagucccucuccaccgccuccuccugguccuacaucgucgagaccuccuccuccgacaacggcaccugcuaccccggcgacuucaucgacuacgaggagcuccgcgagcagcucuccuccgucuccuccuucgagcgcuucgagaucuuccccaagaccuccuccuggcccaaccacgacuccaacaagggcgucaccgccgccugcccccacgccggcgccaaguccuucuacaagaaccucaucuggcucgucaagaagggcaacuccuaccccaagcucuccaaguccuacaucaacgacaagggcaaggagguccucguccucuggggcauccaccaccccuccaccuccgccgaccagcagucccucuaccagaacgccgacgccuacgucuucgucggcaccucccgcuacuccaagaaguucaagcccgagaucgccauccgccccaagguccgcgaccaggagggccgcaugaacuacuacuggacccucgucgagcccggcgacaagaucaccuucgaggccaccggcaaccucgucgucccccgcuacgccuucgccauggagcgcaacgccggcuccggcaucaucaucuccgacacccccguccacgacugcaacaccaccugccagacccccaagggcgccaucaacaccucccuccccuuccagaacauccaccccaucaccaucggcaagugccccaaguacgucaaguccaccaagcuccgccucgccaccggccuccgcaacguccccuccauccagucccgcggccucuucggcgccaucgccggcuucaucgagggcggcuggaccggcauggucgacggcugguacggcuaccaccaccagaacgagcagggcuccggcuacgccgccgaccucaaguccacccagaacgccaucgacaagaucaccaacaaggucaacuccgucaucgagaagaugaacacccaguucaccgccgucggcaaggaguucaaccaccucgagaagcgcaucgagaaccucaacaagaaggucgacgacggcuuccucgacaucuggaccuacaacgccgagcuccucguccuccucgagaacgagcgcacccucgacuaccacgacuccaacgucaagaaccucuacgagaagguccgcucccagcucaagaacaacgccaaggagaucggcaacggcugcuucgaguucuaccacaagugcgacaacaccugcauggaguccgucaagaacggcaccuacgacuaccccaaguacuccgaggaggccaagcucaaccgcgaggagaucgacggcgucaagcucgaguccaccaagaucuaccagauccucgccaucuacuccaccgucgccuccucccucguccucgucgucucccucggcgccaucuccuucuggaugugcuccaacggcucccuccagugccgcaucugcaucuga

SEQ ID NO: 101079 - RNA, 1701 nt, Artificial Sequence
  derived and/or modified CDS sequence (opt2) from hemagglutinin__InfluenzaA__ADI48192
augaaggccauccucgucguccuccucuacaccuucgccaccgccaacgccgacacccucugcaucggcuaccacgccaacaacuccaccgacaccgucgacaccguccucgagaagaacgucaccgucacccacuccgucaaccuccucgaggacaagcacaacggcaagcucugcaagcuccgcggcgucgccccccuccaccucggcaagugcaacaucgccggcuggauccucggcaaccccgagugcgagucccucuccaccgccuccuccugguccuacaucgucgagaccuccuccuccgacaacggcaccugcuaccccggcgacuucaucgacuacgaggagcuccgcgagcagcucuccuccgucuccuccuucgagcgcuucgagaucuuccccaagaccuccuccuggcccaaccacgacuccaacaagggcgucaccgccgccugcccccacgccggcgccaaguccuucuacaagaaccucaucuggcucgucaagaagggcaacuccuaccccaagcucuccaaguccuacaucaacgacaagggcaaggagguccucguccucuggggcauccaccaccccuccaccuccgccgaccagcagucccucuaccagaacgccgacgccuacgucuucgucggcaccucccgcuacuccaagaaguucaagcccgagaucgccauccgccccaagguccgcgaccaggagggccgcaugaacuacuacuggacccucgucgagcccggcgacaagaucaccuucgaggccaccggcaaccucgucgucccccgcuacgccuucgccauggagcgcaacgccggcuccggcaucaucaucuccgacacccccguccacgacugcaacaccaccugccagacccccaagggcgccaucaacaccucccuccccuuccagaacauccaccccaucaccaucggcaagugccccaaguacgucaaguccaccaagcuccgccucgccaccggccuccgcaacguccccuccauccagucccgcggccucuucggcgccaucgccggcuucaucgagggcggcuggaccggcauggucgacggcugguacggcuaccaccaccagaacgagcagggcuccggcuacgccgccgaccucaaguccacccagaacgccaucgacaagaucaccaacaaggucaacuccgucaucgagaagaugaacacccaguucaccgccgucggcaaggaguucaaccaccucgagaagcgcaucgagaaccucaacaagaaggucgacgacggcuuccucgacaucuggaccuacaacgccgagcuccucguccuccucgagaacgagcgcacccucgacuaccacgacuccaacgucaagaaccucuacgagaagguccgcucccagcucaagaacaacgccaaggagaucggcaacggcugcuucgaguucuaccacaagugcgacaacaccugcauggaguccgucaagaacggcaccuacgacuaccccaaguacuccgaggaggccaagcucaaccgcgaggagaucgacggcgucaagcucgaguccacccgcaucuaccagauccucaccaucuacuccaccgucgccuccucccucguccucgucgucucccucggcgccaucuccuucuggaugugcuccaacggcucccuccagugccgcaucugcaucuga

SEQ ID NO: 101080 - RNA, 1701 nt, Artificial Sequence
  derived and/or modified CDS sequence (opt2) from hemagglutinin__InfluenzaA__ADI48194
augaaggccauccucgucguccuccucuacaccuucgccaccgccaacgccgacacccucugcaucggcuaccacgccaacaacuccaccgacaccgucgacaccguccucgagaagaacgucaccgucacccacuccgucaaccuccucgaggacaagcacaacggcaagcucugcaagcuccgcggcgucgccccccuccaccucggcaagugcaacaucgccggcuggauccucggcaaccccgagugcgagucccucuccaccgccuccuccugguccuacaucgucgagaccuccuccuccgacaacggcaccugcuaccccggcgacuucaucgacuacgaggagcuccgcgagcagcucucccucgucuccuccuucgagcgcuucgagaucuuccccaagaccaacuccuggcccaaccacgacuccaacaagggcgucaccgccgccugcccccacgccggcgccaaguccuucuacaagaaccucaucuggcucgucaagaagggcaacuccuaccccaagcucuccaaguccuacaucaacgacaagggcaaggagguccucguccucuggggcauccaccaccccuccaccuccgccgaccagcagucccucuaccagaacgccgacgccuacgucuucgucggcaccucccgcuacuccaagaaguucaagcccgagaucgccauccgccccaagguccgcgaccaggagggccgcaugaacuacuacuggacccucgucgagcccggcgacaagaucaccuucgaggccaccggcaaccucgucgucccccgcuacgccuucgccauggagcgcaacgccggcuccggcaucaucaucuccgacacccccguccacgacugcaacaccaccugccagacccccaagggcgccaucaacaccucccuccccuuccagaacauccaccccaucaccaucggcaagugccccaaguacgucaaguccaccaagcuccgccucgccaccggccuccgcaacguccccuccauccagucccgcggccucuucggcgccaucgccggcuucaucgagggcggcuggaccggcauggucgacggcugguacggcuaccaccaccagaacgagcagggcuccggcuacgccgccgaccucaaguccacccagaacgccaucgacaagaucaccaacaaggucaacuccgucaucgagaagaugaacacccaguucaccgccgucggcaaggaguucaaccaccucgagaagcgcaucgagaaccucaacaagaaggucgacgacggcuuccucgacaucuggaccuacaacgccgagcuccucguccuccucgagaacgagcgcacccucgacuaccacgacuccaacgucaagaaccucuacgagaagguccgcucccagcucaagaacaacgccaaggagaucggcaacggcugcuucgaguucuaccacaagugcgacaacaccugcauggaguccgucaagaacggcaccuacgacuaccccaaguacuccgaggaggccaagcucaaccgcgaggagaucgacggcgucaagcucgaguccacccgcaucuaccagauccucgccaucuacuccaccgucgccuccucccucguccucgucgucucccucggcgccaucuccuucuggaugugcuccaacggcucccuccagugccgcaucugcaucuga

SEQ ID NO: 101081 - RNA, 1701 nt, Artificial Sequence
  derived and/or modified CDS sequence (opt2) from hemagglutinin__InfluenzaA__ADI48196
augaaggccauccucgucguccuccucuacaccuucgccaccgccaacgccgacacccucugcaucggcuaccacgccaacaacuccaccgacaccgucgacaccguccucgagaagaacgucaccgucacccacuccgucaaccuccucgaggacaagcacaacggcaagcucugcaagcuccgcggcgucgccccccuccaccucggcaagugcaacaucgccggcuggauccucggcaaccccgagugcgagucccucuccaccgccuccuccugguccuacaucgucgagaccuccuccuccgacaacggcaccugcuaccccggcgacuucaucgacuacgaggagcuccgcgagcagcucuccuccgucuccuccuucgagcgcuucgagaucuuccccaagaccuccuccuggcccaaccacgacuccaacaagggcgucaccgccgccugcccccacgccggcgccaaguccuucuacaagaaccucaucuggcucgucaagaagggcaacuccuaccccaagcucuccaaguccuacaucaacgacaagggcaaggagguccucguccucuggggcauccaccaccccuccaccuccgccgaccagcagucccucuaccagaacgccgacgccuacgucuucgucggcaccucccgcuacuccaagaaguucaagcccgagaucgccauccgccccaagguccgcgaccaggagggccgcaugaacuacuacuggacccucgucgagcccggcgacaagaucaccuucgaggccaccggcaaccucgucgucccccgcuacgccuucgccauggagcgcaacgccggcuccggcaucaucaucuccgacacccccguccacgacugcaacaccaccugccagacccccaagggcgccaucaacaccucccuccccuuccagaacauccaccccaucaccaucggcaagugccccaaguacgucaaguccaccaagcuccgccucgccaccggccuccgcaacguccccuccauccagucccgcggccucuucggcgccaucgccggcuucaucgagggcggcuggaccggcauggucgacggcugguacggcuaccaccaccagaacgagcagggcuccggcuacgccgccgaccucaaguccacccagaacgccaucgacaagaucaccaacaaggucaacuccgucaucgagaagaugaacacccaguucaccgccgucggcaaggaguucaaccaccucgagaagcgcaucgagaaccucaacaagaaggucgacgacggcuuccucgacaucuggaccuacaacgccgagcuccucguccuccucgagaacgagcgcacccucgacuaccacgacuccaacgucaagaaccucuacgagaagguccgcucccagcucaagaacaacgccaaggagaucggcaacggcugcuucgaguucuaccacaagugcgacaacaccugcauggaguccgucaagaacggcaccuacgacuaccccaaguacuccgaggaggccaagcucaaccgcgaggagaucgacggcgucaagcucgacuccacccgcaucuaccagauccucgccaucuacuccaccgucgccuccucccucguccucgucgucucccucggcgccaucuccuucuggaugugcuccaacggcucccuccagugccgcaucugcaucuga

SEQ ID NO: 101082 - RNA, 1701 nt, Artificial Sequence; identical to SEQ ID NO: 99869
  derived and/or modified CDS sequence (opt2) from hemagglutinin__InfluenzaA__ADI48198

SEQ ID NO: 101083 - RNA, 1701 nt, Artificial Sequence; identical to SEQ ID NO: 99869
  derived and/or modified CDS sequence (opt2) from hemagglutinin__InfluenzaA__ADI48200

SEQ ID NO: 101084 - RNA, 1701 nt, Artificial Sequence
  derived and/or modified CDS sequence (opt2) from hemagglutinin__InfluenzaA__ADI48202
augaaggccauccucgucguccuccucuacaccuucgccaccgccaacgccgacacccucugcaucggcuaccacgccaacaacuccaccgacaccgucgacaccguccucgagaagaacgucaccgucacccacuccgucaaccuccucgaggacaagcacaacggcaagcucugcaagcuccgcggcgucgccccccuccaccucggcaagugcaacaucgccggcuggauccucggcaaccccgagugcgagucccucuccaccgccuccuccugguccuacaucgucgagaccuccuccuccgacaacggcaccugcuaccccggcgacuucaucgacuacgaggagcuccgcgagcagcucuccuccgucuccuccuucgagcgcuucgagaucuuccccaagaucuccuccuggcccaaccacgacuccaacaagggcgucaccgccgccugcccccacgccggcgccaaguccuucuacaagaaccucaucuggcucgucaagaagggcaacuccuaccccaagcucuccaaguccuacaucaacgacaagggcaaggagguccucguccucuggggcauccaccaccccuccaccuccgccgaccagcagucccucuaccagaacgccgacgccuacgucuucgucggcaccucccgcuacuccaagaaguucaagcccgagaucgccauccgccccaagguccgcgaccaggagggccgcaugaacuacuacuggacccucgucgagcccggcgacaagaucaccuucgaggccaccggcaaccucgucgucccccgcuacgccuucgccauggagcgcaacgccggcuccggcaucaucaucuccgacacccccguccacgacugcaacaccaccugccagacccccaagggcgccaucaacaccucccuccccuuccagaacauccaccccaucaccaucggcaagugccccaaguacgucaaguccaccaagcuccgccucgccaccggccuccgcaacguccccuccauccagucccgcggccucuucggcgccaucgccggcuucaucgagggcggcuggaccggcauggucgacggcugguacggcuaccaccaccagaacgagcagggcuccggcuacgccgccgaccucaaguccacccagaacgccaucgacaagaucaccaacaaggucaacuccgucaucgagaagaugaacacccaguucaccgccgucggcaaggaguucaaccaccucgagaagcgcaucgagaaccucaacaagaaggucgacgacggcuuccucgacaucuggaccuacaacgccgagcuccucguccuccucgagaacgagcgcacccucgacuaccacgacuccaacgucaagaaccucuacgagaagguccgcucccagcucaagaacaacgccaaggagaucggcaacggcugcuucgaguucuaccacaagugcgacaacaccugcauggaguccgucaagaacggcaccuacgacuaccccaaguacuccgaggaggccaagcucaaccgcgaggagaucgacggcgucaagcucgaguccacccgcaucuaccagauccucgccaucuacuccaccgucgccuccucccucguccucgucgucucccucggcgccaucuccuucuggaugugcuccaacggcucccuccagugccgcaucugcaucuga

SEQ ID NO: 101085 - RNA, 1701 nt, Artificial Sequence
  derived and/or modified CDS sequence (opt2) from hemagglutinin__InfluenzaA__ADI48204
augaaggccauccucgucguccuccucuacaccuucgccaccgccaacgccgacacccucugcaucggcuaccacgccaacaacuccaccgacaccgucgacaccguccucgagaagaacgucaccgucacccacuccgucaaccuccucgaggacaagcacaacggcaagcucugcaagcuccgcggcgucgccccccuccaccucggcaagugcaacaucgccggcuggauccucggcaaccccgagugcgagucccucuccaccgccuccuccugguccuacaucgucgagaccuccuccuccgacaacggcaccugcuaccccggcgacuucaucgacuacgaggagcuccgcgagcagcucuccuccgucuccuccuucgagcgcuucgagaucuuccccaagaccuccuccuggcccaaccacgacuccaacaagggcgucaccgccgccugcccccacgccggcgccaaguccuucuacaagaaccucaucuggcucgucaagaagggcaacuccuaccccaagcucuccaaguccuacaucaacgacaagggcaaggagguccucguccucuggggcauccaccaccccuccaccuccgccgaccagcagucccucuaccagaacgucgacgccuacgucuucgucggcaccucccgcuacuccaagaaguucaagcccgagaucgccauccgccccaagguccgcgaccaggagggccgcaugaacuacuacuggacccucgucgagcccggcgacaagaucaccuucgaggccaccggcaaccucgucgucccccgcuacgccuucgccauggagcgcaacgccggcuccggcaucaucaucuccgacacccccguccacgacugcaacaccaccugccagacccccaagggcgccaucaacaccucccuccccuuccagaacauccaccccaucaccaucggcaagugccccaaguacgucaaguccaccaagcuccgccucgccaccggccuccgcaacguccccuccauccagucccgcggccucuucggcgccaucgccggcuucaucgagggcggcuggaccggcauggucgacggcugguacggcuaccaccaccagaacgagcagggcuccggcuacgccgccgaccucaaguccacccagaacgccaucgacaagaucaccaagaaggucaacuccgucaucgagaagaugaacacccaguucaccgccgucggcaaggaguucaaccaccucgagaagcgcaucgagaaccucaacaagaaggucgacgacggcuuccucgacaucuggaccuacaacgccgagcuccucguccuccucgagaacgagcgcacccucgacuaccacgacuccaacgucaagaaccucuacgagaagguccgcucccagcucaagaacaacgccaaggagaucggcaacggcugcuucgaguucuaccacaagugcgacaacaccugcauggaguccgucaagaacggcaccuacgacuaccccaaguacuccgaggaggccaagcucaaccgcgaggagaucgacggcgucaagcucgaguccacccgcaucuaccagauccucgccaucuacuccaccgucgccuccucccucguccucgucgucucccucggcgccaucuccuucuggaugugcuccaacggcucccuccagugccgcaucugcaucuga

SEQ ID NO: 101086 - RNA, 1701 nt, Artificial Sequence; identical to SEQ ID NO: 99869
  derived and/or modified CDS sequence (opt2) from hemagglutinin__InfluenzaA__ADI48208

SEQ ID NO: 101087 - RNA, 1701 nt, Artificial Sequence; identical to SEQ ID NO: 99869
  derived and/or modified CDS sequence (opt2) from hemagglutinin__InfluenzaA__ADI48210

SEQ ID NO: 101088 - RNA, 1701 nt, Artificial Sequence
  derived and/or modified CDS sequence (opt2) from hemagglutinin__InfluenzaA__ADI48212
augaaggccauccucgucguccuccucuacaccuucgccaccgccaacgccgacacccucugcaucggcuaccacgccaacaacuccaccgacaccgucgacaccguccucgagaagaacgucaccgucacccacuccgucaaccuccucgaggacaagcacaacggcaagcucugcaagcuccgcggcgucgccccccuccaccucggcaagugcaacaucgccggcuggauccucggcaaccccgagugcgagucccucuccaccgccuccuccugguccuacaucgucgagaccuccuccuccgacaacggcaccugcuaccccggcgacuucaucgacuacgaggagcuccgcgagcagcucuccuccgucuccuccuucgagcgcuucgagaucuuccccaagaccuccuccuggcccaaccacgacuccaacaagggcgucaccgccgccugcccccacgccggcgccaaguccuucuacaagaaccucaucuggcucgucaagaagggcaacuccuaccccaagcucuccaaguccuacaucaacgacaagggcaaggagguccucguccucuggggcauccaccaccccuccaccuccgccgaccagcagucccucuaccagaacgccgacgccuacgucuucgucggcaccucccgcuacuccaagaaguucaagcccgagaucgccauccgccccaagguccgcgaccaggagggccgcaugaacuacuacuggacccucgucgagcccggcgacaagaucaccuucgaggccaccggcaaccucgucgucccccgcuacgccuucgccauggagcgcaacgccggcuccggcaucaucaucuccgacacccccguccacgacugcaacaccaccugccagacccccaagggcgccaucaacaccucccuccccuuccagaacauccaccccaucaccaucggcaagugccccaaguacgucaaguccaccaagcuccgccucgccaccggccuccgcaacguccccuccauccagucccgcggccucuucggcgccaucgccggcuucaucgagggcggcuggaccggcauggucgacggcugguacggcuaccaccaccagaacgagcagggcuccggcuacgccgccgaccucaaguccacccagaacgccaucgacaagaucaccaacaaggucaacuccgucaucgagaagaugaacacccaguucaccgccgucggcaaggaguucaaccaccucgagaagcgcaucgagaaccucaacaagaaggucgacgacggcuuccucgacgucuggaccuacaacgccgagcuccucguccuccucgagaacgagcgcacccucgacuaccacgacuccaacgucaagaaccucuacgagaagguccgcucccagcucaagaacaacgccaaggagaucggcaacggcugcuucgaguucuaccacaagugcgacaacaccugcauggaguccgucaagaacggcaccuacgacuaccccaaguacuccgaggaggccaagcucaaccgcgaggagaucgacggcgucaagcucgaguccacccgcaucuaccagauccucgccaucuacuccaccgucgccuccucccucguccucgucgucucccucggcgccaucuccuucuggaugugcuccaacggcucccuccagugccgcaucugcaucuga

SEQ ID NO: 101089 - RNA, 1701 nt, Artificial Sequence
  derived and/or modified CDS sequence (opt2) from hemagglutinin__InfluenzaA__ADI48214
augaaggccauccucgucguccuccucuacaccuucgccaucgccaacgccgacacccucugcaucggcuaccacgccaacaacuccaccgacaccgucgacaccguccucgagaagaacgucaccgucacccacuccgucaaccuccucgaggacaagcacaacggcaagcucugcaagcuccgcggcgucgccccccuccaccucggcaagugcaacaucgccggcuggauccucggcaaccccgagugcgagucccucuccaccgccuccuccugguccuacaucgucgagaccuccuccuccgacaacggcaccugcuaccccggcgacuucaucgacuacgaggagcuccgcgagcagcucuccuccgucuccuccuucgagcgcuucgagaucuuccccaagaccuccuccuggcccaaccacgacuccaacaagggcgucaccgccgccugcccccacgccggcgccaaguccuucuacaagaaccucaucuggcucgucaagaagggcaacuccuaccccaagcucuccaaguccuacaucaacgacaagggcaaggagguccucguccucuggggcauccaccaccccuccaccuccgccgaccagcagucccucuaccagaacgccgacgccuacgucuucgucggcaccucccgcuacuccaagaaguucaagcccgagaucgccauccgccccaagguccgcgaccaggagggccgcaugaacuacuacuggacccucgucgagcccggcgacaagaucaccuucgaggccaccggcaaccucgucgucccccgcuacgccuucgccauggagcgcaacgccggcuccggcaucaucaucuccgacacccccguccacgacugcaacaccaccugccagacccccaagggcgccaucaacaccucccuccccuuccagaacauccaccccaucaccaucggcaagugccccaaguacgucaaguccaccaagcuccgccucgccaccggccuccgcaacguccccuccauccagucccgcggccucuucggcgccaucgccggcuucaucgagggcggcuggaccggcauggucgacggcugguacggcuaccaccaccagaacgagcagggcuccggcuacgccgccgaccucaaguccacccagaacgccaucgacaagaucaccaacaaggucaacuccgucaucgagaagaugaacacccaguucaccgccgucggcaaggaguucaaccaccucgagaagcgcaucgagaaccucaacaagaaggucgacgacggcuuccucgacaucuggaccuacaacgccgagcuccucguccuccucgagaacgagcgcacccucgacuaccacgacuccaacgucaagaaccucuacgagaagguccgcucccagcucaagaacaacgccaaggagaucggcaacggcugcuucgaguucuaccacaagugcgacaacaccugcauggaguccgucaagaacggcaccuacgacuaccccaaguacuccgaggaggccaagcucaaccgcgaggagaucgacggcgucaagcucgaguccacccgcaucuaccagauccucgccaucuacuccaccgucgccuccucccucguccucgccgucucccucggcgccaucuccuucuggaugugcuccaacggcucccuccagugccgcaucugcaucuga

SEQ ID NO: 101090 - RNA, 1701 nt, Artificial Sequence; identical to SEQ ID NO: 101088
  derived and/or modified CDS sequence (opt2) from hemagglutinin__InfluenzaA__ADI48216

SEQ ID NO: 101091 - RNA, 1701 nt, Artificial Sequence
  derived and/or modified CDS sequence (opt2) from hemagglutinin__InfluenzaA__ADI48218
augaaggccauccucgucguccuccucuacaccuucgccaccgccaacgccgacacccucugcaucggcuaccacgccaacaacuccaccgacaccgucgacaccguccucgagaagaacgucaccgucacccacuccgucaaccuccucgaggacaagcacaacggcaagcucugcaagcuccgcggcgucgccccccuccaccucggcaagugcaacaucgccggcuggauccucggcaaccccgagugcgagucccucuccaccgccuccuccugguccuacaucgucgagaccuccuccuccgacaacggcaccugcuaccccggcgacuucaucgacuacgaggagcuccgcgagcagcucuccuccgucuccuccuucgagcgcuucgagaucuuccccaagaccuccuccuggcccaaccacgacuccaacaagggcgucaccgccgccugcccccacgccggcgccaaguccuucuacaagaaccucaucuggcucgucaagaagggcaacuccuaccccaagcucuccaaguccuacaucaacgacaagggcaaggagguccucguccucuggggcauccaccaccccuccaccuccgccgaccagcagucccucuaccagaacgccgacgccuacgucuucgucggcaccucccgcuacuccaagaaguucaagcccgagaucgccauccgccccaagguccgcgaccaggagggccgcaugaacuacuacuggacccucgucgagcccggcgacaagaucaccuucgaggccaccggcaaccucgucgucccccgcuacgccuucgccauggagcgcaacgccggcuccggcaucaucaucuccgacacccccguccacgacugcaacaccaccugccagacccccaagggcgccaucaacaccucccuccccuuccagaacauccaccccaucaccaucggcaagugccccaaguacgucaaguccaccaagcuccgccucgccaccggccuccgcaacguccccuccauccagucccgcggccucuucggcgccaucgccggcuucaucgagggcggcuggaccggcauggucgacggcugguacggcuaccaccaccagaacgagcagggcuccggcuacgccgccgaccucaaguccacccagaacgccaucgacaagaucaccaacaaggucaacuccgucaucgagaagaugaacacccaguucaccgccgucggcaaggaguucaaccaccucgagaagcgcaucgagaaccucaacaagaaggucgacgacggcuuccucgacaucuggaccuacaacgccgagcuccucguccuccucgagaacgagcgcacccucgacuaccaggacuccaacgucaagaaccucuacgagaagguccgcucccagcucaagaacaacgccaaggagaucggcaacggcugcuucgaguucuaccacaagugcgacaacaccugcauggaguccgucaagaacggcaccuacgacuaccccaaguacuccgaggaggccaagcucaaccgcgaggagaucgacggcgucaagcucgaguccacccgcaucuaccagauccucgccaucuacuccaccgucgccuccucccucguccucgucgucucccucggcgccaucuccuucuggaugugcuccaacggcucccuccagugccgcaucugcaucuga

SEQ ID NO: 101092 - RNA, 1701 nt, Artificial Sequence
  derived and/or modified CDS sequence (opt2) from hemagglutinin__InfluenzaA__ADI48220
augaaggccauccucgucguccuccucuacaccuucgccaccgccaacgccgacacccucugcaucggcuaccacgccaacaacuccaccgacaccgucgacaccguccucgagaagaacgucaccgucacccacuccgucaaccuccucgaggacaagcacaacggcaagcucugcaagcuccgcggcgucgccccccuccaccucggcaagugcaacaucgccggcuggauccucggcaaccccgagugcgagucccucuccaccgccuccuccugguccuacaucgucgagaccuccuccuccgacaacggcaccugcuaccccggcgacuucaucgacuacgaggagcuccgcgagcagcucuccuccgucuccuccuucgagcgcuucgagaucuuccccaagaccuccuccuggcccaaccacgacuccaacaagggcgucaccgccgccugcccccacgccggcgccaaguccuucuacaagaaccucaucuggcucgucaagaagggcaacuccuaccccaagcucuccaaguccuacaucaacgacaagggcaaggagguccucguccucuggggcauccaccaccccuccaccuccgccgaccagcagucccucuaccagaacgccgacgccuacgucuucgucggcaccucccgcuacuccaagaaguucaagcccgagaucgccauccgccccaagguccgcgaccaggagggccgcaugaacuacuacuggacccucgucgagcccggcgacaagaucaccuucgagaccaccggcaaccucgucgucccccgcuacgccuucgccauggagcgcaacgccggcuccggcaucaucaucuccgacacccccguccacgacugcaacaccaccugccagacccccaagggcgccaucaacaccucccuccccuuccagaacauccaccccaucaccaucggcaagugccccaaguacgucaaguccaccaagcuccgccucgccaccggccuccgcaacguccccuccauccagucccgcggccucuucggcgccaucgccggcuucaucgagggcggcuggaccggcauggucgacggcugguacggcuaccaccaccagaacgagcagggcuccggcuacgccgccgaccucaaguccacccagaacgccaucgacaagaucaccaacaaggucaacuccgucaucgagaagaugaacacccaguucaccgccgucggcaaggaguucaaccaccucgagaagcgcaucgagaaccucaacaagaaggucgacgacggcuuccucgacaucuggaccuacaacgccgagcuccucguccuccucgagaacgagcgcacccucggcuaccacgacuccaacgucaagaaccucuacgagaagguccgcucccagcucaagaacaacgccaaggagaucggcaacggcugcuucgaguucuaccacaagugcgacaacaccugcauggaguccgucaagaacggcaccuacgacuaccccaaguacuccgaggaggccaagcucaaccgcgaggagaucgacggcgucaagcucgaguccacccgcaucuaccagauccucgccaucuacuccaccgucgccuccucccucguccucgucgucucccucggcgccaucuccuucuggaugugcuccaacggcucccuccagugccgcaucugcaucuga

SEQ ID NO: 101093 - RNA, 1701 nt, Artificial Sequence
  derived and/or modified CDS sequence (opt2) from hemagglutinin__InfluenzaA__ADI48622
augaaggccauccucgucuuccuccucuacaccuucgccaccgccaacgccgacacccucugcaucggcuaccacgccaacaacuccaccgacaccgucgacaccguccucgagaagaacgucaccgucacccacuccgucaaccuccucgaggacaagcacaacggcaagcucugcaagcuccgcggcgucgccccccuccaccucggcaagugcaacaucgccggcuggauccucggcaaccccgagugcgagucccucuccaccgccuccuccugguccuacaucgucgagaccuccuccuccgacaacggcaccugcuaccccggcgacuucaucgacuacgaggagcuccgcgagcagcucuccuccgucuccuccuucgagcgcuucgagaucuuccccaagaccuccuccuggcccaaccacgacuccaacaagggcgucaccgccgccugcccccacgccggcgccaaguccuucuacaagaaccucaucuggcucgucaagaagggcaacuccuaccccaagcucuccaaguccuacaucaacgacaagggcaaggagguccucguccucuggggcauccaccaccccuccaccuccgccgaccagcagucccucuaccagaacgccgacgccuacgucuucgucggcaccucccgcuacuccaagaaguucaagcccgagaucgccauccgccccaagguccgcgaccaggagggccgcaugaacuacuacuggacccucgucgagcccggcgacaagaucaccuucgaggccaccggcaaccucgucgucccccgcuacgccuucgccauggagcgcaacgccggcuccggcaucaucaucuccgacacccccguccacgacugcaacaccaccugccagacccccaagggcgccaucaacaccucccuccccuuccagaacauccaccccaucaccaucggcaagugccccaaguacgucaaguccaccaagcuccgccucgccaccggccuccgcaacguccccuccauccagucccgcggccucuucggcgccaucgccggcuucaucgagggcggcuggaccggcauggucgacggcugguacggcuaccaccaccagaacgagcagggcuccggcuacgccgccgaccucaaguccacccagaacgccaucgacgagaucaccaacaaggucaacuccgucaucgagaagaugaacacccaguucaccgccgucggcaaggaguucaaccaccucgagaagcgcaucgagaaccucaacaagaaggucgacgacggcuuccucgacaucuggaccuacaacgccgagcuccucguccuccucgagaacgagcgcacccucgacuaccacgacuccaacgucaagaaccucuacgagaagguccgcucccagcucaagaacaacgccaaggagaucggcaacggcugcuucgaguucuaccacaagugcgacaacaccugcauggaguccgucaagaacggcaccuacgacuaccccaaguacuccgaggaggccaagcucaaccgcgaggagaucgacggcgucaagcucgaguccacccgcaucuaccagauccucgccaucuacuccaccgucgccuccucccucguccucgucgucucccucggcgccaucuccuucuggaugugcuccaacggcucccuccagugccgcaucugcaucuga

SEQ ID NO: 101094 - RNA, 1701 nt, Artificial Sequence
  derived and/or modified CDS sequence (opt2) from hemagglutinin__InfluenzaA__ADI48632
auggaggccauccucgucguccuccucuacaccuucgccaccgccaacgccgacacccucugcaucggcuaccacgccaacaacuccaccgacaccgucgacaccguccucgagaagaacgucaccgucacccacuccgucaaccuccucgaggacaagcacaacggcaagcucugcaagcuccgcggcgucgccccccuccaccucggcaagugcaacaucgccggcuggauccucggcaaccccgagugcgagucccucuccaccgccuccuccugguccuacaucgucgagaccuccuccuccgacaacggcaccugcuaccccggcgacuucaucgacuacgaggagcuccgcgagcagcucuccuccgucuccuccuucgagcgcuucgagaucuuccccaagaccuccuccuggcccaaccacgacuccaacaagggcgucaccgccgccugcccccacgccggcgccaaguccuucuacaagaaccucaucuggcucgucaagaagggcaacuccuaccccaagcucuccaaguccuacaucaacgacaagggcaaggagguccucguccucuggggcguccaccaccccuccaccuccgccgaccagcagucccucuaccagaacgccgacgccuacgucuucgucggcuccucccgcuacuccaagaaguucaagcccgagaucgccauccgccccaagguccgcgaccaggagggccgcaugaacuacuacuggacccucgucgagcccggcgacaagaucaccuucgaggccaccggcaaccucgucgucccccgcuacgccuucgccauggagcgcaacgccggcuccggcaucaucaucuccgacacccccguccacgacugcaacaccaccugccagacccccaagggcgccaucaacaccucccuccccuuccacaacauccaccccaucaccaucggcaagugccccaaguacgucaaguccaccaagcuccgccucgccaccggccuccgcaacguccccuccauccagucccgcggccucuucggcgccaucgccggcuucaucgagggcggcuggaccggcauggucgacggcugguacggcuaccaccaccagaacgagcagggcuccggcuacgccgccgaccucaaguccacccagaacgccaucgacgagaucaccaacaaggucaacuccgucaucgagaagaugaacacccaguucaccgccgucggcaaggaguucaaccaccucgagaagcgcaucgagaaccucaacaagaaggucgacgacggcuuccucgacaucuggaccuacaacgccgagcuccucguccuccucgagaacgagcgcacccucgacuaccacgacuccaacgucaagaaccucuacgagaagguccgcucccagcucaagaacaacgccaaggagaucggcaacggcugcuucgaguucuaccacaagugcgacaacaccugcauggaguccgucaagaacggcaccuacgacuaccccaaguacuccgaggaggccaagcucaaccgcgaggagaucgacggcgucaagcucgaguccacccgcaucuaccagauccucgccaucuacuccaccgucgccuccucccucguccucgucgucucccucggcgccaucuccuucuggaugugcuccaacggcucccuccagugccgcaucugcaucuga

SEQ ID NO: 101095 - RNA, 1701 nt, Artificial Sequence; identical to SEQ ID NO: 98947
  derived and/or modified CDS sequence (opt2) from hemagglutinin__InfluenzaA__ADI48642

SEQ ID NO: 101096 - RNA, 1701 nt, Artificial Sequence; identical to SEQ ID NO: 98947
  derived and/or modified CDS sequence (opt2) from hemagglutinin__InfluenzaA__ADI48652

SEQ ID NO: 101097 - RNA, 1701 nt, Artificial Sequence
  derived and/or modified CDS sequence (opt2) from hemagglutinin__InfluenzaA__ADI48672
auggaggccauccucgucguccuccucuacaccuucgccaccgccaacgccgacacccucugcaucggcuaccacgccaacaacuccaccgacaccgucgacaccguccucgagaagaacgucaccgucacccacuccgucaaccuccucgaggacaagcacaacggcaagcucugcaagcuccgcggcgucgccccccuccaccucggcaagugcaacaucgccggcuggauccucggcaaccccgagugcgagucccucuccaccgccuccuccugguccuacaucgucgagaccuccuccuccgacaacggcaccugcuaccccggcgacuucaucgacuacgaggagcuccgcgagcagcucuccuccgucuccuccuucgagcgcuucgagaucuuccccaagaccuccuccuggcccaaccacgacuccaacaagggcgucaccgccgccugcccccacgccggcgccaaguccuucuacaacaaccucaucuggcucgucaagaagggcaacuccuaccccaagcucuccaaguccuacaucaacgacaagggcaaggagguccucguccucuggggcauccaccaccccuccaccuccgccgaccagcagucccucuaccagaacgccgacgccuacgucuucgucggcuccucccgcuacuccaagaaguucaagcccgagaucgccauccgccccaagguccgcgaccaggagggccgcaugaacuacuacuggacccucgucgagcccggcgacaagaucaccuucgaggccaccggcaaccucgucgucccccgcuacgccuucgccauggagcgcaacgccggcuccggcaucaucaucuccgacacccccguccacgacugcaacaccaccugccagacccccaagggcgccaucaacaccucccuccccuuccacaacauccaccccaucaccaucggcaagugccccaaguacgucaaguccaccaagcuccgccucgccaccggccuccgcaacguccccuccauccagucccgcggccucuucggcgccaucgccggcuucaucgagggcggcuggaccggcauggucgacggcugguacggcuaccaccaccagaacgagcagggcuccggcuacgccgccgaccucaaguccacccagaacgccaucgacgagaucaccaacaaggucaacuccgucaucgagaagaugaacacccaguucaccgccgucggcaaggaguucaaccaccucgagaagcgcaucgagaaccucaacaagaaggucgacgacggcuuccucgacaucuggaccuacaacgccgagcuccucguccuccucgagaacgagcgcacccucgacuaccacgacuccaacgucaagaaccucuacgagaagguccgcucccagcucaagaacaacgccaaggagaucggcaacggcugcuucgaguucuaccacaagugcgacaacaccugcauggaguccgucaagaacggcaccuacgacuaccccaaguacuccgaggaggccaagcucaaccgcgaggagaucgacggcgucaagcucgaguccacccgcaucuaccagauccucgccaucuacuccaccgucgccuccucccucguccucgucgucucccucggcgccaucuccuucuggaugugcuccaacggcucccuccagugccgcaucugcaucuga

SEQ ID NO: 101098 - RNA, 1701 nt, Artificial Sequence; identical to SEQ ID NO: 98705
  derived and/or modified CDS sequence (opt2) from hemagglutinin__InfluenzaA__ADI48682

SEQ ID NO: 101099 - RNA, 1701 nt, Artificial Sequence; identical to SEQ ID NO: 98947
  derived and/or modified CDS sequence (opt2) from hemagglutinin__InfluenzaA__ADI48692

SEQ ID NO: 101100 - RNA, 1701 nt, Artificial Sequence; identical to SEQ ID NO: 98885
  derived and/or modified CDS sequence (opt2) from hemagglutinin__InfluenzaA__ADI48702

SEQ ID NO: 101101 - RNA, 1701 nt, Artificial Sequence; identical to SEQ ID NO: 98947
  derived and/or modified CDS sequence (opt2) from hemagglutinin__InfluenzaA__ADI48712

SEQ ID NO: 101102 - RNA, 1701 nt, Artificial Sequence; identical to SEQ ID NO: 98947
  derived and/or modified CDS sequence (opt2) from hemagglutinin__InfluenzaA__ADI48722

SEQ ID NO: 101103 - RNA, 1701 nt, Artificial Sequence; identical to SEQ ID NO: 98705
  derived and/or modified CDS sequence (opt2) from hemagglutinin__InfluenzaA__ADI48732

SEQ ID NO: 101104 - RNA, 1701 nt, Artificial Sequence; identical to SEQ ID NO: 98705
  derived and/or modified CDS sequence (opt2) from hemagglutinin__InfluenzaA__ADI48742

SEQ ID NO: 101105 - RNA, 1701 nt, Artificial Sequence
  derived and/or modified CDS sequence (opt2) from hemagglutinin__InfluenzaA__ADI48752
auggaggccauccucgucuuccuccucuacaccuucgccaccgccaacgccgacacccucugcaucggcuaccacgccaacaacuccaccgacaccgucgacaccguccucgagaagaacgucaccgucacccacuccgucaaccuccucgaggacaagcacaacggcaagcucugcaagcuccgcggcgucgccccccuccaccucggcaagugcaacaucgccggcuggauccucggcaaccccgagugcgagucccucuccaccgccuccuccugguccuacaucgucgagaccuccuccuccgacaacggcaccugcuaccccggcgacuucaucgacuacgaggagcuccgcgagcagcucuccuccgucuccuccuucgagcgcuucgagaucuuccccaagaccuccuccuggcccaaccacgacuccaacaagggcaucaccgccgccugcccccacgccggcgccaaguccuucuacaagaaccucaucuggcucgucaagaagggcaacuccuaccccaagcucuccaaguccuacaucaacgacaagggcaaggagguccucguccucuggggcauccaccaccccuccaccuccgccgaccagcagucccucuaccagaacgccgacgccuacgucuucgucggcuccucccgcuacuccaagaaguucaagcccgagaucgccauccgccccaagguccgcgaccaggagggccgcaugaacuacuacuggacccucgucgagcccggcgacaagaucaccuucgaggccaccggcaaccucgucgucccccgcuacgccuucgccauggagcgcaacgccggcuccggcaucaucaucuccgacacccccguccacgacugcaacaccaccugccagacccccaagggcgccaucaacaccucccuccccuuccacaacauccaccccaucaccaucggcaagugccccaaguacgucaaguccaccaagcuccgccucgccaccggccuccgcaacguccccuccauccagucccgcggccucuucggcgccaucgccggcuucaucgagggcggcuggaccggcauggucgacggcugguacggcuaccaccaccagaacgagcagggcuccggcuacgccgccgaccucaaguccacccagaacgccaucgacgagaucaccaacaaggucaacuccgucaucgagaagaugaacacccaguucaccgccgucggcaaggaguucaaccaccucgagaagcgcaucgagaaccucaacaagaaggucgacgacggcuuccucgacaucuggaccuacaacgccgagcuccucguccuccucgagaacgagcgcacccucgacuaccacgacuccaacgucaagaaccucuacgagaagguccgcucccagcucaagaacaacgccaaggagaucggcaacggcugcuucgaguucuaccacaagugcgacaacaccugcauggaguccgucaagaacggcaccuacgacuaccccaaguacuccgaggaggccaagcucaaccgcgaggagaucgacggcgucaagcucgaguccacccgcaucuaccagauccucgccaucuacuccaccgucgccuccucccucguccucgucgucucccucggcgccaucuccuucuggaugugcuccaacggcucccuccagugccgcaucugcaucuga

SEQ ID NO: 101106 - RNA, 1701 nt, Artificial Sequence; identical to SEQ ID NO: 98947
  derived and/or modified CDS sequence (opt2) from hemagglutinin__InfluenzaA__ADI48762

SEQ ID NO: 101107 - RNA, 1701 nt, Artificial Sequence
  derived and/or modified CDS sequence (opt2) from hemagglutinin__InfluenzaA__ADI48772
auggaggccauccucgucguccuccucuacaccuucgccaccgccaacgccgacacccucugcaucggcuaccaggccaacaacuccaccgacaccgucgacaccguccucgagaagaacgucaccgucacccacuccgucaaccuccucgaggacaagcacaacggcaagcucugcaagcuccgcggcgucgccccccuccaccucggcaagugcaacaucgccggcuggauccucggcaaccccgagugcgagucccucuccaccgccuccuccugguccuacaucgucgagaccuccuccuccgacaacggcaccugcuaccccggcgacuucaucgacuacgaggagcuccgcgagcagcucuccuccgucuccuccuucgagcgcuucgagaucuuccccaagaccuccuccuggcccaaccacgacuccaacaagggcgucaccgccgccugcccccacgccggcgccaaguccuucuacaagaaccucaucuggcucgucaagaagggcaacuccuaccccaagcucuccaaguccuacaucaacgacaagggcaaggagguccucguccucuggggcauccaccaccccuccaccuccgccgaccagcagucccucuaccagaacgccgacgccuacgucuucgucggcuccucccgcuacuccaagaaguucaagcccgagaucgccauccgccccaagguccgcgaccaggagggccgcaugaacuacuacuggacccucgucgagcccggcgacaagaucaccuucgaggccaccggcaaccucgucgucccccgcuacgccuucgccauggagcgcaacgccggcuccggcaucaucaucuccgacacccccguccacgacugcaacaccaccugccagacccccaagggcgccaucaacaccucccuccccuuccacaacauccaccccaucaccaucggcaagugccccaaguacgucaaguccaccaagcuccgccucgccaccggccuccgcaacguccccuccauccagucccgcggccucuucggcgccaucgccggcuucaucgagggcggcuggaccggcauggucgacggcugguacggcuaccaccaccagaacgagcagggcuccggcuacgccgccgaccucaaguccacccagaacgccaucgacgagaucaccaacaaggucaacuccgucaucgagaagaugaacacccaguucaccgccgucggcaaggaguucaaccaccucgagaagcgcaucgagaaccucaacaagaaggucgacgacggcuuccucgacaucuggaccuacaacgccgagcuccucguccuccucgagaacgagcgcacccucgacuaccacgacuccaacgucaagaaccucuacgagaagguccgcucccagcucaagaacaacgccaaggagaucggcaacggcugcuucgaguucuaccacaagugcgacaacaccugcauggaguccgucaagaacggcaccuacgacuaccccaaguacuccgaggaggccaagcucaaccgcgaggagaucgacggcgucaagcucgaguccacccgcaucuaccagauccucgccaucuacuccaccgucgccuccucccucguccucgucgucucccucggcgccaucuccuucuggaugugcuccaacggcucccuccagugccgcaucugcaucuga

SEQ ID NO: 101108 - RNA, 1701 nt, Artificial Sequence
  derived and/or modified CDS sequence (opt2) from hemagglutinin__InfluenzaA__ADI48782
augaaggccauccucgucguccuccucuacaccuucgccaccgccaacgccgacacccucugcaucggcuaccacgccaacaacuccaccgacaccgucgacaccguccucgagaagaacgucaccgucacccacuccgucaaccuccucgaggacaagcacaacggcaagcucugcaagcuccgcggcgucgccccccuccaccucggcaagugcaacaucgccggcuggauccucggcaaccccgagugcgagucccucuccaccgccuccuccugguccuacaucgucgagaccuccuccuccgacaacggcaccugcuaccccggcgacuucaucgacuacgaggagcuccgcgagcagcucuccuccgucuccuccuucgagcgcuucgagaucuuccccaagaccuccuccuggcccaaccacgacuccaacaagggcgucaccgccgccugcccccacgccggcgccaaguccuucuacaagaaccucaucuggcucgucaagaagggcaacuccuaccccaagcucuccaaguccuacaucaacgacaagggcaaggagguccucguccucuggggcauccaccaccccuccaccuccgccgaccagcagucccucuaccagaacgccgacgccuacgucuucgucggcaccucccgcuacuccaagaaguucaagcccgagaucgccauccgccccaagguccgcgaccaggagggccgcaugaacuacuacuggacccucgucgagcccggcgacaagaucaccuucgaggccaccggcaaccucgucgucccccgcuacgccuucgccauggagcgcaacgccggcuccggcaucaucaucuccgacacccccguccacgacugcaacaccaccugccagacccccaagggcgccaucaacaccucccuccccuuccagaacauccaccccaucaccaucggcaagugccccaaguacgucaaguccaccaagcuccgccucgccaccggccuccgcaacguccccuccauccagucccgcggccucuucggcgccaucgccggcuucaucgagggcggcuggaccggcauggucgacggcugguacggcuaccaccaccagaacgagcagggcuccggcuacgccgccgaccucaaguccacccagaacgccaucgacgagaucaccaacaaggucaacuccgucaucgagaagaugaacacccaguucaccgccgucggcaaggaguucaaccaccucgagaagcgcaucgagaaccucaacaagaaggucgacgacggcuuccucgacaucuggaccuacaacgccgagcuccucguccuccucgagaacgagcgcacccucgacuaccacgacuccaacgucaagaaccucuacgagaagguccgcucccagcucaagaacaacgccaaggagaucggcaacggcugcuucgaguucuaccacaagugcgacaacaccugcauggaguccgucaagaacggcaccuacgacuaccccaaguacuccgaggaguccaagcucaaccgcgaggagaucgacggcgucaagcucgaguccacccgcaucuaccagauccucgccaucuacuccaccgucgccuccucccucguccucgucgucucccucggcgccaucuccuucuggaugugcuccaacggcucccuccagugccgcaucugcaucuga

SEQ ID NO: 101109 - RNA, 1701 nt, Artificial Sequence
  derived and/or modified CDS sequence (opt2) from hemagglutinin__InfluenzaA__ADI48792
auggaggccauccucgucguccuccucuacaccuucgccaccgccaacgccgacacccucugcaucggcuaccacgccaacaacuccaccgacaccgucgacaccguccucgagaagaacgucaccgucacccacuccgucaaccuccucgaggacaagcacaacggcaagcucugcaagcuccgcggcgucgccccccuccaccucggcaagugcaacaucgccggcuggauccucggcaaccccgagugcgagucccucuccaccgccuccuccugguccuacaucgucgagaccuccuccuccgacaacggcaccugcuaccccggcgacuucaucgacuacgaggagcuccgcgagcagcucuccuccgucuccuccuucgagcgcuucgagaucuuccccaagaccuccuccuggcccaaccacgacuccaacaagggcgucaccgccgccugcccccacgccggcgccaaguccuucuacaagaaccucaucuggcucgucaagaagggcaacuccuaccccaagcucuccaaguccuacaucaacgacaagggcaaggagguccucguccucuggggcauccaccaccccuccaccuccgccgaccagcagucccucuaccagaacgccgacgccuacaucuucgucggcuccucccgcuacuccaagaaguucaagcccgagaucgccauccgccccaagguccgcgaccaggagggccgcaugaacuacuacuggacccucgucgagcccggcgacaagaucaccuucgaggccaccggcaaccucgucgucccccgcuacgccuucgccauggagcgcaacgccggcuccggcaucaucaucuccgacacccccguccacgacugcaacaccaccugccagacccccaagggcgccaucaacaccucccuccccuuccacaacauccaccccaucaccaucggcaagugccccaaguacgucaaguccaccaagcuccgccucgccaccggccuccgcaacguccccuccauccagucccgcggccucuucggcgccaucgccggcuucaucgagggcggcuggaccggcauggucgacggcugguacggcuaccaccaccagaacgagcagggcuccggcuacgccgccgaccucaaguccacccagaacgccaucgacgagaucaccaacaaggucaacuccgucaucgagaagaugaacacccaguucaccgccgucggcaaggaguucaaccaccucgagaagcgcaucgagaaccucaacaagaaggucgacgacggcuuccucgacaucuggaccuacaacgccgagcuccucguccuccucgagaacgagcgcacccucgacuaccacgacuccaacgucaagaaccucuacgagaagguccgcucccagcucaagaacaacgccaaggagaucggcaacggcugcuucgaguucuaccacaagugcgacaacaccugcauggaguccgucaagaacggcaccuacgacuaccccaaguacuccgaggaggccaagcucaaccgcgaggagaucgacggcgucaagcucgaguccacccgcaucuaccagauccucgccaucuacuccaccgucgccuccucccucguccucgucgucucccucggcgccaucuccuucuggaugugcuccaacggcucccuccagugccgcaucugcaucuga

SEQ ID NO: 101110 - RNA, 1701 nt, Artificial Sequence
  derived and/or modified CDS sequence (opt2) from hemagglutinin__InfluenzaA__ADI49029
auggaggccauccucgucguccuccucuacaccuucgccaccgccaacgccgacacccucugcaucggcuaccacgccaacaacuccaccgacaccgucgacaccguccucgagaagaacgucaccgucacccacuccgucaaccuccucgaggacaagcacaacggcaagcucugcaagcuccgcggcgucgccccccuccaccucggcaagugcaacaucgccggcuggauccucggcaaccccgagugcgagucccucuccaccgccuccuccugguccuacaucgucgagaccuccaucuccgacaacggcaccugcuaccccggcgacuucaucgacuacgaggagcuccgcgagcagcucuccuccgucuccuccuucgagcgcuucgagaucuuccccaagaccuccuccuggcccaaccacgacuccaacaagggcgucaccgccgccugcccccacgccggcgccaaguccuucuacaagaaccucaucuggcucgucaagaagggcaacuccuaccccaagcucuccaaguccuacaucaacgacaagggcaaggagguccucguccucuggggcauccaccaccccuccaccuccgccgaccagcagucccucuaccagaacgccgacgccuacgucuucgucggcuccucccgcuacuccaagaaguucaagcccgagaucgccauccgccccaagguccgcgaccaggagggccgcaugaacuacuacuggacccucgucgagcccggcgacaagaucaccuucgaggccaccggcaaccucgucgucccccgcuacgccuucgccauggagcgcaacgccggcuccggcaucaucaucuccgacacccccguccacgacugcaacaccaccugccagacccccaagggcgccaucaacaccucccuccccuuccacaacauccaccccaucaccaucggcaagugccccaaguacgucaaguccaccaagcuccgccucgccaccggccucaagaacguccccuccauccagucccgcggccucuucggcgccaucgccggcuucaucgagggcggcuggaccggcauggucgacggcugguacggcuaccaccaccagaacgagcagggcuccggcuacgccgccgaccucaaguccacccagaacgccaucgacgagaucaccaacaaggucaacuccgucaucgagaagaugaacacccaguucaccgccgucggcaaggaguucaaccaccucgagaagcgcaucgagaaccucaacaagaaggucgacgacggcuuccucgacaucuggaccuacaacgccgagcuccucguccuccucgagaacgagcgcacccucgacuaccacgacuccaacgucaagaaccucuacgagaagguccgcucccagcucaagaacaacgccaaggagaucggcaacggcugcuucgaguucuaccacaagugcgacaacaccugcauggaguccgucaagaacggcaccuacgacuaccccaaguacuccgaggaggccaagcucaaccgcgaggagaucgacggcgucaagcucgaguccacccgcaucuaccagauccucgccaucuacuccaccgucgccuccucccucguccucgucgucucccucggcgccaucuccuucuggaugugcuccaacggcucccuccagugccgcaucugcaucuga

SEQ ID NO: 101111 - RNA, 1701 nt, Artificial Sequence; identical to SEQ ID NO: 98947
  derived and/or modified CDS sequence (opt2) from hemagglutinin__InfluenzaA__ADI49240

SEQ ID NO: 101112 - RNA, 1701 nt, Artificial Sequence; identical to SEQ ID NO: 98947
  derived and/or modified CDS sequence (opt2) from hemagglutinin__InfluenzaA__ADI49260

SEQ ID NO: 101113 - RNA, 1701 nt, Artificial Sequence
  derived and/or modified CDS sequence (opt2) from hemagglutinin__InfluenzaA__ADI49270
augaaggccauccucgucguccuccucuacaccuucgccaccgccaacgccgacacccucugcaucggcuaccacgccaacaacuccaccgacaccgucgacaccguccucgagaagaacgucaccgucacccacuccgucaaccuccucgaggacaagcacaacggcaagcucugcaagcuccgcggcgucgccccccuccaccucggcaagugcaacaucgccggcuggauccucggcaaccccgagugcgagucccucuccaccgccuccuccugguccuacaucgucgagaccuccuccuccgacaacggcaccugcuaccccggcgacuucaucgacuacgaggagcuccgcgagcagcucuccuccgucuccuccuucgagcgcuucgagaucuuccccaagaccuccuccuggcccaaccacgacuccaacaagggcgucaccgccgccugcccccacgccggcgccaaguccuucuacaagaaccucaucuggcucgucaagaagggcaacuccuaccccaagcucuccaaguccuacaucaacgacaagggcaaggagguccucguccucuggggcauccaccaccccuccaccuccgccgaccagcagucccucuaccagaacgccgacgccuacgucuucgucggcaccucccgcuacuccaagaaguucaagcccgagaucgccauccgccccaagguccgcgaccaggagggccgcaugaacuacuacuggacccucgucgagcccggcgacaagaucaccuucgaggccaccggcaaccucgucgucccccgcuacgccuucgccauggagcgcaacgccggcuccggcaucaucaucuccgacacccccguccacgacugcaacaccaccugccagacccccaagggcgccaucaacaccucccuccccuuccagaacauccaccccaucaccaucggcaagugccccaaguacgucaaguccaccaagcuccgccucgccaccggccuccgcaacguccccuccauccagucccgcggccucuucggcgccaucgccggcuucaucgagggcggcuggaccggcauggucgacggcugguacggcuaccaccaccagaacgagcagggcuccggcuacgccgccgaccucaaguccacccagaacgccaucgacgagaucaccaacaaggucaacuccgucaucgagaagaugaacacccaguucaccgccgucggcaaggaguucaaccaccucgagaagcgcaucgagaaccucaacaagaaggucgacgacggcuuccucgacaucuggaccuacaacgccgagcuccucguccuccucgagaacgagcgcacccucgacuaccacgacuccaacgucaagaaccucuacgagaagguccgcucccagcucaagaacaacgcccgcgagaucggcaacggcugcuucgaguucuaccacaagugcgacaacaccugcauggaguccgucaagaacggcaccuacgacuaccccaaguacuccgaggaggccaagcucaaccgcgaggagaucgacggcgucaagcucgaguccacccgcaucuaccagauccucgccaucuacuccaccgucgccuccucccucguccucgucgucucccucggcgccaucuccuucuggaugugcuccaacggcucccuccagugccgcaucugcaucuga

SEQ ID NO: 101114 - RNA, 1701 nt, Artificial Sequence; identical to SEQ ID NO: 98947
  derived and/or modified CDS sequence (opt2) from hemagglutinin__InfluenzaA__ADI49280

SEQ ID NO: 101115 - RNA, 1701 nt, Artificial Sequence; identical to SEQ ID NO: 98947
  derived and/or modified CDS sequence (opt2) from hemagglutinin__InfluenzaA__ADI49312

SEQ ID NO: 101116 - RNA, 1701 nt, Artificial Sequence; identical to SEQ ID NO: 98947
  derived and/or modified CDS sequence (opt2) from hemagglutinin__InfluenzaA__ADI49322

SEQ ID NO: 101117 - RNA, 1701 nt, Artificial Sequence; identical to SEQ ID NO: 98947
  derived and/or modified CDS sequence (opt2) from hemagglutinin__InfluenzaA__ADI49332

SEQ ID NO: 101118 - RNA, 1701 nt, Artificial Sequence; identical to SEQ ID NO: 99274
  derived and/or modified CDS sequence (opt2) from hemagglutinin__InfluenzaA__ADI49342

SEQ ID NO: 101119 - RNA, 1701 nt, Artificial Sequence; identical to SEQ ID NO: 98947
  derived and/or modified CDS sequence (opt2) from hemagglutinin__InfluenzaA__ADI49352

SEQ ID NO: 101120 - RNA, 1701 nt, Artificial Sequence; identical to SEQ ID NO: 98705
  derived and/or modified CDS sequence (opt2) from hemagglutinin__InfluenzaA__ADI49362

SEQ ID NO: 101121 - RNA, 1701 nt, Artificial Sequence; identical to SEQ ID NO: 100257
  derived and/or modified CDS sequence (opt2) from hemagglutinin__InfluenzaA__ADI49382

SEQ ID NO: 101122 - RNA, 1701 nt, Artificial Sequence; identical to SEQ ID NO: 99058
  derived and/or modified CDS sequence (opt2) from hemagglutinin__InfluenzaA__ADI49392

SEQ ID NO: 101123 - RNA, 1701 nt, Artificial Sequence; identical to SEQ ID NO: 98692
  derived and/or modified CDS sequence (opt2) from hemagglutinin__InfluenzaA__ADI49717

SEQ ID NO: 101124 - RNA, 1701 nt, Artificial Sequence
  derived and/or modified CDS sequence (opt2) from hemagglutinin__InfluenzaA__ADI49727
augaaggccauccucgucguccuccucuacaccuucgccaccgccaacgccgacacccucugcaucggcuaccacgccaacaacuccaccgacaccgucgacaccguccucgagaagaacgucaccgucacccacuccgucaaccuccucgaggacaagcacaacggcaagcucugcaagcuccgcggcgucgccccccuccaccucggcaagugcaacaucgccggcuggauccucggcaaccccgagugcgagucccucuccaccgccuccuccugguccuacaucgucgagaccuccuccuccgacaacggcaccugcuaccccggcgacuucaucgacuacgaggagcuccgcgagcagcucuccuccgucuccuccuucgagcgcuucgagaucuuccccaagaccuccuccuggcccaaccacgacuccaacaagggcgucaccgccgccugcccccacgccggcgccaaguccuucuacaagaaccucaucuggcucgucaagaagggcaacuccuaccccaagcucuccaaguccuacaucaacgacaagggcaaggagguccucguccucuggggcauccaccaccccuccaccuccgccgaccagcagucccucuaccagaacgccgacgccuacgucuucgucggcuccucccgcuacuccaagaaguucaagcccgagaucgccauccgccccaagguccgcgaccaggagggccgcaugaacuacuacuggacccucgucgagcccggcgacaagaucaccuucgaggccaccggcaaccucgucgucccccgcuacgccuucgccauggagcgcaacgccggcuccggcaucaucaucuccgacacccccguccacgacugcaacaccaccugccagacccccaagggcgccaucaacaccucccuccccuuccagaacauccaccccaucaccaucggcaagugccccaaguacgucaaguccaccaagcuccgccucgccaccggccuccgcaacguccccuccauccagucccgcggccucuucggcgccaucgccggcuucaucgagggcggcuggaccggcauggucgacggcugguacggcuaccaccaccagaacgagcagggcuccggcuacgccgccgaccucaaguccacccagaacgccaucgacgagaucaccaacaaggucaacuccaucaucgagaagaugaacacccaguucaccgccgucggcaaggaguucaaccaccucgagaagcgcaucgagaaccucaacaagaaggucgacgacggcuuccucgacaucuggaccuacaacgccgagcuccucguccuccucgagaacgagcgcacccucgacuaccacgacuccaacgucaagaaccucuacgagaagguccgcucccagcucaagaacaacgccaaggagaucggcaacggcugcuucgaguucuaccacaagugcgacaacaccugcauggaguccgucaagaacggcaccuacgacuaccccaaguacuccgaggaggccaagcucaaccgcgaggagaucgacggcgucaagcucgaguccacccgcaucuaccagauccucgccaucuacuccaccgucgccuccucccucguccucgucgucucccucggcgccaucuccuucuggaugugcuccaacggcucccuccagugccgcaucugcaucuga

SEQ ID NO: 101125 - RNA, 1701 nt, Artificial Sequence; identical to SEQ ID NO: 98692
  derived and/or modified CDS sequence (opt2) from hemagglutinin__InfluenzaA__ADI49737

SEQ ID NO: 101126 - RNA, 1701 nt, Artificial Sequence; identical to SEQ ID NO: 98692
  derived and/or modified CDS sequence (opt2) from hemagglutinin__InfluenzaA__ADI49747

SEQ ID NO: 101127 - RNA, 1701 nt, Artificial Sequence; identical to SEQ ID NO: 98692
  derived and/or modified CDS sequence (opt2) from hemagglutinin__InfluenzaA__ADI49757

SEQ ID NO: 101128 - RNA, 1701 nt, Artificial Sequence; identical to SEQ ID NO: 98692
  derived and/or modified CDS sequence (opt2) from hemagglutinin__InfluenzaA__ADI49767

SEQ ID NO: 101129 - RNA, 1701 nt, Artificial Sequence
  derived and/or modified CDS sequence (opt2) from hemagglutinin__InfluenzaA__ADI49777
augaaggccauccucgucguccuccucuacaccuucgccaccgccaacgccgacacccucugcaucggcuaccacgccaacaacuccaccgacaccgucgacaccguccucgagaagaacgucaccgucacccacuccgucaacauccucgaggacaagcacaacggcaagcucugcaagcuccgcggcgucgccccccuccaccucggcaagugcaacaucgccggcuggauccucggcaaccccgagugcgagucccucuccaccgccuccuccugguccuacaucgucgagaccuccuccuccgacaacggcaccugcuaccccggcgacuucaucgacuacgaggagcuccgcgagcagcucuccuccgucuccuccuucgagcgcuucgagaucuuccccaagaccuccuccuggcccaaccacgacuccaacaagggcgucaccgccgccugcccccacgccggcgccaaguccuucuacaagaaccucaucuggcucgucaagaagggcaacuccuaccccaagcucuccaaguccuacaucaacgacaagggcaaggagguccucguccucuggggcauccaccaccccuccaccuccaccgaccagcagucccucuaccagaacgccgacgccuacgucuucgucggcuccucccgcuacuccaagaaguucaagcccgagaucgccauccgccccaagguccgcgaccaggagggccgcaugaacuacuacuggacccucgucgagcccggcgacaagaucaccuucgaggccaccggcaaccucgucgucccccgcuacgccuucgccauggagcgcaacgccggcuccggcaucaucaucuccgacacccccguccacgacugcaacaccaccugccagacccccaagggcgccaucaacaccucccuccccuuccagaacauccaccccaucaccaucggcaagugccccaaguacgucaaguccaccaagcuccgccucgccaccggccuccgcaacguccccuccauccagucccgcggccucuucggcgccaucgccggcuucaucgagggcggcuggaccggcauggucgacggcugguacggcuaccaccaccagaacgagcagggcuccggcuacgccgccgaccucaaguccacccagaacgccaucgacgagaucaccaacaaggucaacuccgucaucgagaagaugaacacccaguucaccgccgucggcaaggaguucaaccaccucgagaagcgcaucgagaaccucaacaagaaggucgacgacggcuuccucgacaucuggaccuacaacgccgagcuccucguccuccucgagaacgagcgcacccucgacuaccacgacuccaacgucaagaaccucuacgagaagguccgcucccagcucaagaacaacgccaaggagaucggcaacggcugcuucgaguucuaccacaagugcgacaacaccugcauggaguccgucaagaacggcaccuacgacuaccccaaguacuccgaggaggccaagcucaaccgcgaggagaucgacggcgucaagcucgaguccacccgcaucuaccagauccucgccaucuacuccaccgucgccuccucccucguccucgucgucucccucggcgccaucuccuucuggaugugcuccaacggcucccuccagugccgcaucugcaucuga

SEQ ID NO: 101130 - RNA, 1701 nt, Artificial Sequence
  derived and/or modified CDS sequence (opt2) from hemagglutinin__InfluenzaA__ADI49787
augaaggccauccucgucguccuccucuacaccuucgccaccgccaacgccgacacccucugcaucggcuaccacgccaacaacuccaccgacaccgucgacaccguccucgagaagaacgucaccgucacccacuccgucaaccuccucgaggacaagcacaacggcaagcucugcaagcuccgcggcgucgccccccuccaccucggcaagugcaacaucgccggcuggauccucggcaaccccgagugcgaguccaucuccaccgccuccuccugguccuacaucgucgagaccuccuccuccgacaacggcaccugcuaccccggcgacuucaucgacuacgaggagcuccgcgagcagcucuccuccgucuccuccuucgagcgcuucgagaucuuccccaagaccuccuccuggcccaaccacgacuccaacaagggcgucaccgccgccugcccccacgccggcgccaaguccuucuacaagaaccucaucuggcucgucaagaagggcaacuccuaccccaagcucuccaaguccuacaucaacgacaagggcaaggagguccucguccucuggggcauccaccaccccuccaccuccgccgaccagcagucccucuaccagaacgccgacgccuacgucuucgucggcuccucccgcuacuccaagaaguucaagcccgagaucgccauccgccccaagguccgcgaccaggagggccgcaugaacuacuacuggacccucgucgagcccggcgacaagaucaccuucgaggccaccggcaaccucgucgucccccgcuacgccuucgccauggagcgcaacgccggcuccggcaucaucaucuccgacacccccguccacgacugcaacaccaccugccagacccccaagggcgccaucaacaccucccuccccuuccagaacauccaccccaucaccaucggcaagugccccaaguacgucaaguccaccaagcuccgccucgccaccggccuccgcaacguccccuccauccagucccgcggccucuucggcgccaucgccggcuucaucgagggcggcuggaccggcauggucgacggcugguacggcuaccaccaccagaacgagcagggcuccggcuacgccgccgaccucaaguccacccagaacgccaucgacgagaucaccaacaaggucaacuccgucaucgagaagaugaacacccaguucaccgccgucggcaaggaguucaaccaccucgagaagcgcaucgagaaccucaacaagaaggucgacgacggcuuccucgacaucuggaccuacaacgccgagcuccucguccuccucgagaacgagcgcacccucgacuaccacgacuccaacgucaagaaccucuacgagaagguccgcucccagcucaagaacaacgccaaggagaucggcaacggcugcuucgaguucuaccacaagugcgacaacaccugcauggaguccgucaagaacggcaccuacgacuaccccaaguacuccgaggaggccaagcucaaccgcgaggagaucgacggcgucaagcucgaguccacccgcaucuaccagauccucgccaucuacuccaccgucgccuccucccucguccucgucgucucccucggcgccaucuccuucuggaugugcuccaacggcucccuccagugccgcaucugcaucuga

SEQ ID NO: 101131 - RNA, 1701 nt, Artificial Sequence; identical to SEQ ID NO: 100040
  derived and/or modified CDS sequence (opt2) from hemagglutinin__InfluenzaA__ADI49822

SEQ ID NO: 101132 - RNA, 1701 nt, Artificial Sequence
  derived and/or modified CDS sequence (opt2) from hemagglutinin__InfluenzaA__ADI50027
augaaggccauccucgucguccuccucuacaccuucgccaccgccaacgccgacacccucugcaucggcuaccacgccaacaacuccaccgacaccgucgacaccguccucgagaagaacgucaccgucacccacuccgucaaccuccucgaggacaagcacaacggcaagcucugcaagcuccgcggcgucgccccccuccaccucggcaagugcaacaucgccggcuggauccucggcaaccccgagugcgagucccucuccaccgccuccuccugguccuacaucgucgagaccuccuccuccgacaacggcaccugcuaccccggcgacuucaucgacuacgaggagcuccgcgagcagcucuccuccgucuccuccuucgagcgcuucgagaucuuccccaagaccuccuccuggcccaaccacgacuccaacaagggcgucaccgccgccugcccccacgccggcgccaaguccuucuacaagaaccucaucuggcucgucaagaagggcaacuccuaccccaagcucuccaaguccuacaucaacgacaagggcaaggagguccucguccucuggggcauccaccaccccuccaccuccgccgaccagcagucccucuaccagaacgccgacgccuacgucuucgucggcuccucccgcuacuccaagaaguucaagcccgagaucgccauccgccccaagguccgcgaccaggagggccgcaugaaguacuacuggacccucgucgagcccggcgacaagaucaccuucgaggccaccggcaaccucgucgucccccgcuacgccuucgccauggagcgcaacgccggcuccggcaucaucaucuccgacacccccguccacgacugcaacaccaccugccagacccccaagggcgccaucaacaccucccuccccuuccagaacauccaccccaucaccaucggcaagugccccaaguacgucaaguccaccaagcuccgccucgccaccggccuccgcaacguccccuccauccagucccgcggccucuucggcgccaucgccggcuucaucgagggcggcuggaccggcauggucgacggcugguacggccaccaccaccagaacgagcagggcuccggcuacgccgccgaccucaaguccacccagaacgccaucgacgagaucaccaacaaggucaacuccgucaucgagaagaugaacacccaguucaccgccgucggcaaggaguucaaccaccucgagaagcgcaucgagaaccucaacaagaaggucgacgacggcuuccucgacaucuggaccuacaacgccgagcuccucguccuccucgagaacgagcgcacccucgacuaccacgacuccaacgucaagaaccucuacgagaagguccgcucccagcucaagaacaacgccaaggagaucggcaacggcugcuucgaguucuaccacaagugcgacaacaccugcauggaguccgucaagaacggcaccuacgacuaccccaaguacuccgaggaggccaagcucaaccgcgaggagaucgacggcaucaagcucgaguccacccgcaucuaccagauccucgccaucuacuccaccgucgccuccucccucguccucgucgucucccucggcgccaucuccuucuggaugugcuccaacggcucccuccagugccgcaucugcaucuga

SEQ ID NO: 101133 - RNA, 1701 nt, Artificial Sequence
  derived and/or modified CDS sequence (opt2) from hemagglutinin__InfluenzaA__ADI52834
augaaggccauccucgucguccuccucuacaccuucgccaccgccaacgccgacacccucugcaucggcuaccacgccaacaacuccaccgacaccgucgacaccguccucgagaagaacgucaccgucacccacuccgucaacauccucgaggacaagcacaacggcaagcucugcaagcuccgcggcgucgccccccuccaccucggcaagugcaacaucgccggcuggauccucggcaaccccgagugcgagucccucuccaccgccuccuccugguccuacaucgucgagaccuccuccuccgacaacggcaccugcuaccccggcgacuucaucgacuacgaggagcuccgcgagcagcucuccuccgucuccuccuucgagcgcuucgagaucuuccccaagaccuccuccuggcccaaccacgacuccaacaagggcgucaccgccgccugcccccacgccggcgccaaguccuucuacaagaaccucaucuggcucgucaagaagggcaacuccuaccccaagcucuccaaguccuacaucaacgacaagggcaaggagguccucguccucuggggcauccaccacccccccaccuccgccgaccagcagucccucuaccagaacgccgacgccuacgucuucgucggcuccucccgcuacuccaagaaguucaagcccgagaucgccauccgccccaagguccgcgaccaggagggccgcaugaacuacuacuggacccucgucgagcccggcgacaagaucaccuucgaggccaccggcaaccucgucgucccccgcuacgccuucgccauggagcgcaacgccggcuccggcaucaucaucuccgacacccccguccacgacugcaacaccaccugccagacccccaagggcgccaucaacaccucccuccccuuccagaacauccaccccaucaccaucggcaagugccccaaguacgucaaguccaccaagcuccgccucgccaccggccuccgcaacguccccuccauccagucccgcggccucuucggcgccaucgccggcuucaucgagggcggcuggaccggcauggucgacggcugguacggcuaccaccaccagaacgagcagggcuccggcuacgccgccgaccucaaguccacccagaacgccaucgacgagaucaccaacaaggucaacuccgucaucgagaagaugaacacccaguucaccgccgucggcaaggaguucaaccaccucgagaagcgcaucgagaaccucaacaagaaggucgacgacggcuuccucgacaucuggaccuacaacgccgagcuccucguccuccucgagaacgagcgcacccucgacuaccacgacuccaacgucaagaaccucuacgagaagguccgcucccagcucaagaacaacgccaaggaggucggcaacggcugcuucgaguucuaccacaagugcgacaacaccugcauggaguccgucaagaacggcaccuacgacuaccccaaguacuccgaggaggccaagcucaaccgcgaggagaucgacggcgucaagcucgaguccacccgcaucuaccagauccucgccaucuacuccaccgccgccuccucccucguccucgucgucucccucggcgccaucuccuucuggaugugcuccaacggcucccuccagugccgcaucugcaucuga

SEQ ID NO: 101134 - RNA, 1701 nt, Artificial Sequence
  derived and/or modified CDS sequence (opt2) from hemagglutinin__InfluenzaA__ADI52835
auggaggccauccucgucguccuccucuacaccuucgccaccgccaacgccgacacccucugcaucggcuaccacgccaacaacuccaccgacaccgucgacaccguccucgagaagaacgucaccgucacccacuccgucaaccuccucgaggacaagcacaacggcaagcucugcaagcuccgcggcgucgccccccuccaccucggcaagugcaacaucgccggcuggauccucggcaaccccgagugcgagucccucuccaccgccuccuccugguccuacaucgucgagaccuccuccuccgacaacggcaccugcuaccccggcgacuucaucgacuacgaggagcuccgcgagcagcucuccuccgucuccuccuucgagcgcuucgagaucuuccccaagaccuccuccuggcccaaccacgacuccaacaagggcgucaccgccgccugcccccacgccggcgccaaguccuucuacaagaaccucaucuggcucgucaagaagggcaacuccuaccccaagcucuccaaguccuacaucaacgacaagggcaaggagguccucguccucuggggcauccaccacccccccaccuccgccgaccagcagucccucuaccagaacgccgacgccuacgucuucgucggcuccuccaaguacuccaagaaguucaagcccgagaucgccauccgccccaagguccgcgaccaggagggccgcaugaacuacuacuggacccucgucgagcccggcgacaagaucaccuucgaggccaccggcaaccucgucgucccccgcuacgccuucgccauggagcgcaacgccggcuccggcaucaucaucuccgacacccccguccacgacugcaacaccaccugccagacccccaagggcgccaucaacaccucccuccccuuccacaacauccaccccaucaccaucggcaagugccccaaguacgucaaguccaccaagcuccgccucgccaccggccuccgcaacguccccuccauccagucccgcggccucuucggcgccaucgccggcuucaucgagggcggcuggaccggcauggucgacggcugguacggcuaccaccaccagaacgagcagggcuccggcuacgccgccgaccucaaguccacccagaacgccaucgacgagaucaccaacaaggucaacuccgucaucgagaagaugaacacccaguucaccgccgucggcaaggaguucaaccaccucgagaagcgcaucgagaaccucaacaagaaggucgacgacggcuuccucgacaucuggaccuacaacgccgagcuccucguccuccucgagaacgagcgcacccucgacuaccacgacuccaacgucaagaaccucuacgagaagguccgcucccagcucaagaacaacgccaaggagaucggcaacggcugcuucgaguucuaccacaagugcgacaacaccugcauggaguccgucaagaacggcaccuacgacuaccccaaguacuccgaggaggccaagcucaaccgcgaggagaucgacggcgucaagcucgaguccaccaagaucuaccagauccucgccaucuacuccaccgucgccuccucccucguccucgucgucucccucggcgccaucuccuucuggaugugcuccaacggcucccuccagugccgcaucugcaucuga

SEQ ID NO: 101135 - RNA, 1701 nt, Artificial Sequence
  derived and/or modified CDS sequence (opt2) from hemagglutinin__InfluenzaA__ADI52836
auggaggccauccucgucguccuccucuacaccuucgccaccgccaacgccgacacccucugcaucggcuaccacgccaacaacuccaccgacaccgucgacaccguccucgagaagaacgucaccgucacccacuccgucaaccuccucgaggacaagcacaacggcaagcucugcaagcuccgcggcgucgccccccuccaccucggcaagugcaacaucgccggcuggauccucggcaaccccgagugcgagucccucuccaccgccuccuccugguccuacaucgucgagaccuccuccuccgacaacggcaccugcuaccccggcgacuucaucgacuacgaggagcuccgcgagcagcucuccuccgucuccuccuucgagcgcuucgagaucuuccccaagaccuccuccuggcccaaccacgacuccaacaagggcgucaccgccgccugcccccacgccggcgccaaguccuucuacaagaaccucaucuggcucgucaagaaggagaacuccuaccccaagcucuccaaguccuacaucaacgacaagggcaaggagguccucguccucuggggcauccaccaccccuccaccuccgccgaccagcagcgccucuaccagaacgccgacgccuacgucuucgucggcuccuccaaguacuccaagaaguucaagcccgagaucgccauccgccccaagguccgcgaccaggagggccgcaugaacuacuacuggacccucgucgagcccggcgacaagaucaccuucgaggccaccggcaaccucgucgucccccgcuacgccuucgccauggagcgcaacgccggcuccggcaucaucaucuccgacacccccguccacgacugcaacaccaccugccagacccccaagggcgccaucaacaccucccuccccuuccacaacauccaccccaucaccaucggcaagugccccaaguacgucaaguccaccaagcuccgccucgccaccggccuccgcaacguccccuccauccagucccgcggccucuucggcgccaucgccggcuucaucgagggcggcuggaccggcauggucgacggcugguacggcuaccaccaccagaacgagcagggcuccggcuacgccgccgaccucaaguccacccagaacgccaucgacgagaucaccaacaaggucaacuccgucaucgagaagaugaacacccaguucaccgccgucggcaaggaguucaaccaccucgagaagcgcaucgagaaccucaacaagaaggucgacgacggcuuccucgacaucuggaccuacaacgccgagcuccucguccuccucgagaacgagcgcacccucgacuaccacgacuccaacgucaagaaccucuacgagaagguccgcucccagcucaagaacaacgccaaggagaucggcaacggcugcuucgaguucuaccacaagugcgacaacaccugcauggaguccgucaagaacggcaccuacgacuaccccaaguacuccgaggaggccaagcucaaccgcgaggagaucgacggcgucaagcucgaguccaccaagaucuaccagauccucgccaucuacuccaccgucgccuccucccucguccucgucgucucccucggcgccaucuccuucuggaugugcuccaacggcucccuccagugccgcaucugcaucuga

SEQ ID NO: 101136 - RNA, 1701 nt, Artificial Sequence
  derived and/or modified CDS sequence (opt2) from hemagglutinin__InfluenzaA__ADI52837
auggaggccauccucgucguccuccucuacaccuucgccaccgccaacgccgacacccucugcaucggcuaccacgccaacaacuccaccgacaccgucgacaccguccucgagaagaacgucaccgucacccacuccgucaaccuccucgaggucaagcacaacggcaagcucugcaagcuccgcggcgucgccccccuccaccucggcaagugcaacaucgccggcuggauccucggcaaccccgagugcgagucccucuccaccgccuccuccugguccuacaucgucgagaccuccuccuccgacaacggcaccugcuaccccggcgacuucaucgacuacgaggagcuccgcgagcagcucuccuccgucuccuccuucgagcgcuucgagaucuuccccaagaccuccuccuggcccaaccacgacuccaacaagggcgucaccgccgccugcccccacgccggcgccaaguccuucuacaagaaccucaucuggcucgucaagaagggcaacuccuaccccaagcucuccaaguccuacaucaacgacaagggcaaggagguccucguccucuggggcauccaccaccccuccaccuccgccgaccagcagucccucuaccagaacgccgacgccuacgucuucgucggcuccuccaaguacuccaagaaguucaagcccgagaucgccauccgccccaagguccgcgaccaggagggccgcaugaacuacuacuggacccucgucgagcccggcgacaagaucaccuucgaggccaacggcaaccucgucgucccccgcuacgccuucgccauggagcgcaacgccggcuccggcaucaucaucuccgacacccccguccacgacugcaacaccaccugccagacccccaagggcgccaucaacaccucccuccccuuccacaacauccaccccaucaccaucggcaagugccccaaguacgucaaguccaccaagcuccgccucgccaccggccuccgcaacguccccuccauccagucccgcggccucuucggcgccaucgccggcuucaucgagggcggcuggaccggcauggucgacggcugguacggcuaccaccaccagaacgagcagggcuccggcuacgccgccgaccucaaguccacccagaacgccaucgacgagaucaccaacaaggucaacuccgucaucgagaagaugaacacccaguucaccgccgucggcaaggaguucaaccaccucgagaagcgcaucgagaaccucaacaagaaggucgacgacggcuuccucgacaucuggaccuacaacgccgagcuccucguccuccucgagaacgagcgcacccucgacuaccacgacuccaacgucaagaaccucuacgagaagguccgcucccagcucaagaacaacgccaaggagaucggcaacggcugcuucgaguucuaccacaagugcgacaacaccugcauggaguccgucaagaacggcaccuacgacuaccccaaguacuccgaggaggccaagcucaaccgcgaggagaucgacggcgucaagcucgaguccaccaagaucuaccagauccucgccaucuacuccaccgucgccuccucccucguccucgucgucucccucggcgccaucuccuucuggaugugcuccaacggcucccuccagugccgcaucugcaucuga

SEQ ID NO: 101137 - RNA, 1701 nt, Artificial Sequence; identical to SEQ ID NO: 99503
  derived and/or modified CDS sequence (opt2) from hemagglutinin__InfluenzaA__ADI72915

SEQ ID NO: 101138 - RNA, 1701 nt, Artificial Sequence; identical to SEQ ID NO: 99503
  derived and/or modified CDS sequence (opt2) from hemagglutinin__InfluenzaA__ADI72916

SEQ ID NO: 101139 - RNA, 1701 nt, Artificial Sequence; identical to SEQ ID NO: 99503
  derived and/or modified CDS sequence (opt2) from hemagglutinin__InfluenzaA__ADI72917

SEQ ID NO: 101140 - RNA, 1701 nt, Artificial Sequence
  derived and/or modified CDS sequence (opt2) from hemagglutinin__InfluenzaA__ADI72918
augaaggccauccucgucguccuccucuacaccuucgccaccgccaacgccgacacccucugcaucggcuaccacgccaacaacuccaccgacaccgucgacaccguccucgagaagaacgucaccgucacccacuccgucaaccuccucgaggacaagcacaacggcaagcucugcaagcuccgcggcgucgccccccuccaccucggcaagugcaacaucgccggcuggauccucggcaaccccgagugcgagucccucuccaccgccuccuccugguccuacaucgucgagaccuccuccuccgacaacggcaccugcuaccccggcgacuucaucgacuacgaggagcuccgcgagcagcucuccuccgucuccuccuucgagcgcuucgagaucuuccccaagaccuccuccuggcccaaccacgaccccaacaagggcgucaccgccgccugcccccacgccggcgccaaguccuucuacaagaaccucaucuggcucgucaagaagggcaacuccuaccccaagcucuccaaguccuacaucaacgaccgcggcaaggagguccucguccucuggggcauccaccaccccuccaccuccgccgaccagcagucccucuaccagaacgccgacgccuacgucuucgucggcaccucccgcuacuccaagaaguucaagcccgagaucgccauccgccccaagguccgcgaccaggagggccgcaugaacuacuacuggacccucgucgagcccggcgacaagaucaccuucgaggccaccggcaaccucgucgucccccgcuacgccuucgccauggagcgcaacgccggcuccggcaucaucaucuccgacacccccguccacgacugcaacaccaccugccagacccccaagggcgccaucaacaccucccuccccuuccagaacauccaccccaucaccaucggcaagugccccaaguacgucaaguccaccaagcuccgccucgccaccggccuccgcaacguccccuccauccagucccgcggccucuucggcgccaucgccggcuucaucgagggcggcuggaccggcauggucgacggcugguacggcuaccaccaccagaacgagcagggcuccggcuacgccgccgaccucaaguccacccagaacgccaucgacgagaucaccaacaaggucaacuccgucaucgagaagaugaacacccaguucaccgccgucggcaaggaguucaaccaccucgagaagcgcaucgagaaccucaacaagaaggucgacgacggcuuccucgacaucuggaccuacaacgccgagcuccucguccuccucgagaacgagcgcacccucgacuaccacgacuccaacgucaagaagcucuacgagaagguccgcucccagcucaagaacaacgccaaggagaucggcaacggcugcuucgaguucuaccacaagugcgacaacaccugcauggaguccgucaagaacggcaccuacgacuaccccaaguacuccgaggaggccaagcucaaccgcgaggagaucgacggcgucaagcucgaguccacccgcaucuaccagauccucgccaucuacuccaccgucgccuccucccucguccucgucgucucccucggcgccaucuccuucuggaugugcuccaacggcucccuccagugccgcaucugcaucuga

SEQ ID NO: 101141 - RNA, 1701 nt, Artificial Sequence; identical to SEQ ID NO: 99503
  derived and/or modified CDS sequence (opt2) from hemagglutinin__InfluenzaA__ADI72919

SEQ ID NO: 101142 - RNA, 1701 nt, Artificial Sequence; identical to SEQ ID NO: 99503
  derived and/or modified CDS sequence (opt2) from hemagglutinin__InfluenzaA__ADI72920

SEQ ID NO: 101143 - RNA, 1701 nt, Artificial Sequence
  derived and/or modified CDS sequence (opt2) from hemagglutinin__InfluenzaA__ADI72921
augaaggccauccucgucguccuccucuacaccuucgccaccgccaacgccgacacccucugcaucggcuaccacgccaacaacuccaccgacaccgucgacaccguccucgagaagaacgucaccgucacccacuccgucaaccuccucgaggacaagcacaacggcaagcucugcaagcuccgcggcgucgccccccuccaccucggcaagugcaacaucgccggcuggauccucggcaaccccgagugcgagucccucuccaccgccuccuccugguccuacaucgucgagaccuccuccuccgacaacggcaccugcuaccccggcgacuucaucgacuacgaggagcuccgcgagcagcucuccuccgucuccuccuucgagcgcuucgagaucuuccccaagaccuccuccuggcccaaccacgaccccaacaagggcgucaccgccgccugcccccacgccggcgccaaguccuucuacaagaaccucaucuggcucgucaagaagggcaacuccuaccccaagcucuccaaguccuacaucaacgacaagggcaaggagguccucguccucuggggcauccaccaccccuccaccuccgccgaccagcagucccucuaccagaacgccgacgccuacgucuucgucggcaccucccgcuacuccaagaaguucaagcccgagaucgccauccgccccaagguccgcgaccaggagggccgcaugaacuacuacuggacccucgucgagcccggcgacaagaucaccuucgaggccaccggcaaccucgucgucccccgcuacgccuucgccauggagcgcaacgccggcuccggcaucaucaucuccgacacccccguccacgacugcaacaccaccugccagacccccaagggcgccaucaacaccucccuccccuuccagaacauccaccccaucaccaucggcaagugccccaaguacgucaaguccaccaagcuccgccucgccaccggccuccgcaacguccccuccauccagucccgcggccucuucggcgccaucgccggcuucaucgagggcggcuggaccggcauggucgacggcugguacggcuaccaccaccagaacgagcagggcuccggcuacgccgccgaccucaaguccacccagaacgcccucgacgagaucaccaacaaggucaacuccgucaucgagaagaugaacacccaguucaccgccgucggcaaggaguucaaccaccucgagaagcgcaucgagaaccucaacaagaaggucgacgacggcuuccucgacaucuggaccuacaacgccgagcuccucguccuccucgagaacgagcgcacccucgacuaccacgacuccaacgucaagaaccucuacgagaagguccgcucccagcucaagaacaacgccaaggagaucggcaacggcugcuucgaguucuaccacaagugcgacaacaccugcauggaguccgucaagaacggcaccuacgacuaccccaaguacuccgaggaggccaagcucaaccgcgaggagaucgacggcgucaagcucgaguccacccgcaucuaccagauccucgccaucuacuccaccgucgccuccucccucguccucgucgucucccucggcgccaucuccuucuggaugugcuccaacggcucccuccagugccgcaucugcaucuga

SEQ ID NO: 101144 - RNA, 1701 nt, Artificial Sequence; identical to SEQ ID NO: 98705
  derived and/or modified CDS sequence (opt2) from hemagglutinin__InfluenzaA__ADI72922

SEQ ID NO: 101145 - RNA, 1701 nt, Artificial Sequence
  derived and/or modified CDS sequence (opt2) from hemagglutinin__InfluenzaA__ADI72923
augaaggccauccucgucguccuccucuacaccuucgccaccuccaacgccgacacccucugcaucggcuaccacgccaacaacuccaccgacaccgucgacaccguccucgagaagaacgucaccgucacccacuccgucaaccuccucgaggacaagcacaacggcaagcucugcaagcuccgcggcgucgccccccuccaccucggcaagugcaacaucgccggcuggauccucggcaaccccgagugcgagucccucuccaccgccuccuccugguccuacaucgucgagaccuccuccuccgacaacggcaccugcuaccccggcgacuucaucgacuacgaggagcuccgcgagcagcucuccuccgucuccuccuucgagcgcuucgagaucuuccccaagaccuccuccuggcccaaccacgaccccaacaagggcgucaccgccgccugcccccacgccggcgccaaguccuucuacaagaaccucaucuggcucgucaagaagggcaacuccuaccccaagcucuccaaguccuacaucaacgacaagggcaaggagguccucguccucuggggcauccaccaccccuccaccuccgccgaccagcagucccucuaccagaacgccgacgccuacgucuucgucggcaccucccgcuacuccaagaaguucaagcccgagaucgccauccgccccaagguccgcgaccaggagggccgcaugaacuacuacuggacccucgucgagcccggcgacaagaucaccuucgaggccaccggcaaccucgucgucccccgcuacgccuucgccauggagcgcaacgccggccccggcaucaucaucuccgacacccccguccacgacugcaacaccaccugccagacccccaagggcgccaucaacaccucccuccccuuccagaacauccaccccaucaccaucggcaagugccccaaguacgucaaguccaccaagcuccgccucgccaccggccuccgcaacguccccuccauccagucccgcggccucuucggcgccaucgccggcuucaucgagggcggcuggaccggcauggucgacggcugguacggcuaccaccaccagaacgagcagggcuccggcuacgccgccgaccucaaguccacccagaacgccaucgacgagaucaccaacaaggucaacuccgucaucgagaagaugaacacccaguucaccgccgucggcaaggaguucaaccaccucgagaagcgcaucgagaaccucaacaagaaggucgacgacggcuuccucgacaucuggaccuacaacgccgagcuccucguccuccucgagaacgagcgcacccucgacuaccacgacuccaacgucaagaaccucuacgagaagguccgcucccagcucaagaacaacgccaaggagaucggcaacggcugcuucgaguucuaccacaagugcgacaacaccugcauggaguccgucaagaacggcaccuacgacuaccccaaguacuccgaggaggccaagcucaaccgcgaggagaucgacggcgucaagcucgaguccacccgcaucuaccagauccucgccaucuacuccaccgucgccuccucccucguccucgucgucucccucggcgccaucuccuucuggaugugcuccaacggcucccuccagugccgcaucugcaucuga

SEQ ID NO: 101146 - RNA, 1701 nt, Artificial Sequence; identical to SEQ ID NO: 99503
  derived and/or modified CDS sequence (opt2) from hemagglutinin__InfluenzaA__ADI72924

SEQ ID NO: 101147 - RNA, 1701 nt, Artificial Sequence; identical to SEQ ID NO: 98705
  derived and/or modified CDS sequence (opt2) from hemagglutinin__InfluenzaA__ADI72925

SEQ ID NO: 101148 - RNA, 1701 nt, Artificial Sequence
  derived and/or modified CDS sequence (opt2) from hemagglutinin__InfluenzaA__ADI72926
augaaggccauccucgucguccuccucuacaccuucgccaccgccaacgccgacacccucugcaucggcuaccacgccaacaacuccaccgacaccgucgacaccguccucgagaagaacgucaccgucacccacuccgucaaccuccucgaggacaagcacaacggcaagcucugcaagcuccgcggcgucgccccccuccaccucggcaagugcaacaucgccggcuggauccucggcaaccccgagugcgagucccucuccaccgccuccuccugguccuacaucgucgagaccuccuccuccgacaacggcaccugcuaccccggcgacuucaucgacuacgaggagcuccgcgagcagcucuccuccgucuccuccuucgagcgcuucgagaucuuccccaagaccuccuccuggcccaaccacgaccccaacaagggcgucaccgccgccugcccccacgccggcgccaaguccuucuacaagaaccucaucuggcucgucaagaagggcaacuccuaccccaagcucuccaaguccuacaucaacgacaagggcaaggagguccucguccucuggggcauccaccaccccuccaccuccgccgaccagcagucccucuaccagaacgccgacgccuacgucuucgucggcaccuccggcuacuccaagaaguucaagcccgagaucgccauccgccccaagguccgcgaccaggagggccgcaugaacuacuacuggacccucgucgagcccggcgacaagaucaccuucgaggccaccggcaaccucgucgucccccgcuacgccuucgccauggagcgcaacgccggcuccggcaucaucaucuccgacacccccguccacgacugcaacaccaccugccagacccccaagggcgccaucaacaccucccuccccuuccagaacauccaccccaucaccaucggcaagugccccaaguacgucaaguccaccaagcuccgccucgccaccggccuccgcaacguccccuccauccagucccgcggccucuucggcgccaucgccggcuucaucgagggcggcuggaccggcauggucgacggcugguacggcuaccaccaccagaacgagcagggcuccggcuacgccgccgaccucaaguccacccagaacgccaucgacgagaucaccaacaaggucaacuccgucaucgagaagaugaacacccaguucaccgccgucggcaaggaguucaaccaccucgagaagcgcaucgagaaccucaacaagaaggucgacgacggcuuccucgacaucuggaccuacaacgccgagcuccucguccuccucgagaacgagcgcacccucgacuaccacgacuccaacgucaagaaccucuacgagaagguccgcucccagcucaagaacaacgccaaggagaucggcaacggcugcuucgaguucuaccacaagugcgacaacaccugcauggaguccgucaagaacggcaccuacgacuaccccaaguacuccgaggaggccaagcucaaccgcgaggagaucgacggcgucaagcucgaguccacccgcaucuaccagauccucgccaucuacuccaccgucgccuccucccucguccucgucgucucccucggcgccaucuccuucuggaugugcuccaacggcucccuccagugccgcaucugcaucuga

SEQ ID NO: 101149 - RNA, 1701 nt, Artificial Sequence
  derived and/or modified CDS sequence (opt2) from hemagglutinin__InfluenzaA__ADI72927
augaaggccauccucgucguccuccucuacaccuucgccaccgccaacgccgacacccucugcaucggcuaccacgccaacaacuccaccgacaccgucgacaccguccucgagaagaacgucaccgucacccacuccgucaaccuccucgaggacaagcacaacggcaagcucugcaagcuccgcggcgucgccccccuccaccucggcaagugcaacaucgccggcuggauccucggcaaccccgagugcgagucccucuccaccgccuccuccugguccuacaucgucgagaccuccuccuccgacaacggcaccugcuaccccggcgacuucaucgacuacgaggagcuccgcgagcagcucuccuccgucuccuccuucgagcgcuucgagaucuuccccaagaccuccuccuggcccaaccacgaccccaacaagggcgucaccgccgccugcccccacgccggcgccaaguccuucuacaagaaccucaucuggcucgucaagaagggcaacuccuaccccaagcucuccaaguccuacaucaacgacaagggcaaggagguccucguccucuggggcauccaccaccccuccaccuccgccgaccagcagucccucuaccagaacgccgacgccuacgucuucgucggcaccucccgcuacuccaagaaguucaagcccgagaucgccauccgccccaagguccgcgaccaggagggccgcaugaacuacuacuggacccucgucgagcccggcgacaagaucaccuucgaggccaccggcaaccucgucgucccccgcuacgccuucgccauggagcgcaacgccggcuccggcaucaucaccuccgacacccccguccacgacugcaacaccaccugccagacccccaagggcgccaucaacaccucccuccccuuccagaacauccaccccaucaccaucggcaagugccccaaguacgucaaguccaccaagcuccgccucgccaccggccuccgcaacguccccuccauccagucccgcggccucuucggcgccaucgccggcuucaucgagggcggcuggaccggcauggucgacggcugguacggcuaccaccaccagaacgagcagggcuccggcuacgccgccgaccucaaguccacccagaacgccaucgacgagaucaccaacaaggucaacuccgucaucgagaagaugaacacccaguucaccgccgucggcaaggaguucaaccaccucgagaagcgcaucgagaaccucaacaagaaggucgacgacggcuuccucgacaucuggaccuacaacgccgagcuccucguccuccucgagaacgagcgcacccucgacuaccacgacuccaacgucaagaaccucuacgagaagguccgcucccagcucaagaacaacgccaaggagaucggcaacggcugcuucgaguucuaccacaagugcgacaacaccugcauggaguccgucaagaacggcaccuacgacuaccccaaguacuccgaggaggccaagcucaaccgcgaggagaucgacggcgucaagcucgaguccacccgcaucuaccagauccucgccaucuacuccaccgucgccuccucccucguccucgucgucucccucggcgccaucuccuucuggaugugcuccaacggcucccuccagugccgcaucugcaucuga

SEQ ID NO: 101150 - RNA, 1701 nt, Artificial Sequence
  derived and/or modified CDS sequence (opt2) from hemagglutinin__InfluenzaA__ADI72928
augaaggccauccucgucguccuccucuacaccuucgccaccgccaacgccgacacccucugcaucggcuaccacgccaacaacuccaccgacaccgucgacaccauccucgagaagaacgucaccgucacccacuccgucaaccuccucgaggacaagcacaacggcaagcucugcaagcuccgcggcgucgccccccuccaccucggcaagugcaacaucgccggcuggauccucggcaaccccgagugcgagucccucuccaccgccuccuccugguccuacaucgucgagaccuccuccuccgacaacggcaccugcuaccccggcgacuucaucgacuacgaggagcuccgcgagcagcucuccuccgucuccuccuucgagcgcuucgagaucuuccccaagaccuccuccuggcccaaccacgaccccaacaagggcgucaccgccgccugcccccacgccggcgccaaguccuucuacaagaaccucaucuggcucgucaagaagggcaacuccuaccccaagcucuccaaguccuacaucaacgacaagggcaaggagguccucguccucuggggcauccaccaccccuccaccuccgccgaccagcagucccucuaccagaacgccgacgccuacgucuucgucggcaccucccgcuacuccaagaaguucaagcccgagaucgccauccgccccaagguccgcgaccaggagggccgcaugaacuacuacuggacccucgucgagcccggcgacaagaucaccuucgaggccaccggcaaccucgucgucccccgcuacgccuucgccauggagcgcaacgccggcuccggcaucaucaucuccgacacccccguccacgacugcaacaccaccugccagacccccaagggcgccaucaacaccucccuccccuuccagaacauccaccccaucaccaucggcaagugccccaaguacgucaaguccaccaagcuccgccucgccaccggccuccgcaacguccccuccauccagucccgcggccucuucggcgccaucgccggcuucaucgagggcggcuggaccggcauggucgacggcugguacggcuaccaccaccagaacgagcagggcuccggcuacgccgccgaccucaaguccacccagaacgccaucgacgagaucaccaacaaggucaacuccgucaucgagaagaugaacacccaguucaccgccgucggcaaggaguucaaccaccucgagaagcgcaucgagaaccucaacaagaaggucgacgacggcuuccucgacaucuggaccuacaacgccgagcuccucguccuccucgagaacgagcgcacccucgacuaccacgacuccaacgucaagaaccucuacgagaagguccgcucccagcucaagaacaacgccaaggagaucggcaacggcugcuucgaguucuaccacaagugcgacaacaccugcauggaguccgucaagaacggcaccuacgacuaccccaaguacuccgaggaggccaagcucaaccgcaaggagaucgacggcgucaagcucgaguccacccgcaucuaccagauccucgccaucuacuccaccgucgccuccucccucguccucgucgucucccucggcgccaucuccuucuggaugugcuccaacggcucccuccagugccgcaucugcaucuga

SEQ ID NO: 101151 - RNA, 1701 nt, Artificial Sequence; identical to SEQ ID NO: 98705
  derived and/or modified CDS sequence (opt2) from hemagglutinin__InfluenzaA__ADI72929

SEQ ID NO: 101152 - RNA, 1701 nt, Artificial Sequence; identical to SEQ ID NO: 98705
  derived and/or modified CDS sequence (opt2) from hemagglutinin__InfluenzaA__ADI72930

SEQ ID NO: 101153 - RNA, 1701 nt, Artificial Sequence
  derived and/or modified CDS sequence (opt2) from hemagglutinin__InfluenzaA__ADI72931
augaaggccauccucgucguccuccucuacaccuucgccaccgccaacgccgacacccucugcaucggcuaccacgccaacaacuccaccgacaccgucgacaccguccucgagaagaacgucaccgucacccacuccgucaaccuccucgaggacaagcacaacggcaagcucugcaagcuccgcggcgucgccccccuccaccucggcaagugcaacaucgccggcuggauccucggcaaccccgagugcgagucccucuccaccgccuccuccugguccuacaucgucgagaccuccuccuccgacaacggcaccugcuaccccggcgacuucaucgacuacgaggagcuccgcgagcagcucuccuccgucuccuccuucgagcgcuucgagaucuuccccaagaccuccuccuggcccaaccacgaccccaacaagggcgucaccgccgccugcccccacgccggcgccaaguccuucuacaagaaccucaucuggcucgucaagaagggcaacuccuaccccaagcucuccaaguccuacaucaacgacaagggcaaggagguccucguccucuggggcauccaccaccccuccaccuccgccgaccagcagucccucuaccagaacgccgacgccuacgucuucgucggcaccucccgcuacuccaagaaguucaagcccgagaucgccauccgccccaagguccgcgaccaggagggccgcaugaacuacuacuggacccucgucgagcccggcgacaagaucaccuucgaggccaccggcaaccucgucgucccccgcuacgccuucgccauggagcgcaacgccggcuccggcaucaucaucuccgacacccccguccacgacugcaacaccaccugccagacccccaagggcgccaucaacaccucccuccccuuccagaacauccaccccaucaccaucggcaagugccccaaguacgucaaguccaccaagcuccgccucgccaccggccuccgcaacguccccuccauccagucccgcggccucuucggcgccaucgccggcuucaucgagggcggcuggaccggcauggucgacggcugguacggcuaccaccaccagaacgagcagggcuccggcuacgccgccgaccucaaguccacccagaacgccaucgacgagaucaccaacaaggucaacuccgucaucgagaagaugaacacccaguucaccgccgucggcaaggaguucaaccaccucgagaagcgcaucgagaaccucaacaagaaggucgacgacggcuuccucgacaucuggaccuacaacgccgagcuccucguccuccucgagaacgagcgcacccucgacuaccacgacuccaacgucaagaaccucuacgagaagguccgcucccagcucaagaacaacgccaaggagaucggcaacggcugcuucgaguucuaccacaagugcgacaacaccugcauggaguccgucaagaacggcaccuacgacuaccccaaguacuccgaggaggccaagcucaaccgcgaggagaucgacggcaucaagcucgaguccacccgcaucuaccagauccucgccaucuacuccaccgucgccuccucccucguccucgucgucucccucggcgccaucuccuucuggaugugcuccaacggcucccuccagugccgcaucugcaucuga

SEQ ID NO: 101154 - RNA, 1701 nt, Artificial Sequence; identical to SEQ ID NO: 100361
  derived and/or modified CDS sequence (opt2) from hemagglutinin__InfluenzaA__ADI72932

SEQ ID NO: 101155 - RNA, 1698 nt, Artificial Sequence
  derived and/or modified CDS sequence (opt2) from hemagglutinin__InfluenzaA__ADI75818
augaaggucaagcuccucguccuccucugcaccuucaccgccaccuacgccgacaccaucugcaucggcuaccacgccaacaacuccaccgacaccgucgacaccguccucgagaagaacgucaccgucacccacuccgucaaccuccucgagaacucccacaacggcaagcucugccuccucaagggcaucgccccccuccagcucggcaacugcuccgucgccggcuggauccucggcaaccccgagugcgagcuccucaucuccaaggaguccugguccuacaucgucgagaagcccaaccccgagaacggcaccugcuaccccggccacuucgccgacuacgaggagcuccgcgagcagcucuccuccgucuccuccuucgagcgcuucgagaucuuccccaaggaguccuccuggcccaaccacaccgucaccggcgucuccgccuccugcucccacaacggcgaguccuccuucuacaagaaccuccucuggcucaccgagaagaacggccucuaccccaaccucuccaaguccuacgccaacaacaaggagaaggagguccucguccucuggggcguccaccacccccccuccaucuccgaccagaagacccucuaccacaccgagaacgccuacgucuccgucgucuccucccacuacucccgcaaguucacccccgagaucgccaagcgccccaagguccgcgaccaggagggccgcaucaacuacuacuggacccuccucgagcccggcgacaccaucaucuucgaggccaacggcaaccucaucgccccccgcuacgccuucgcccucucccgcggcuucggcuccggcaucaucaacuccaacgcccccauggacaagugcgacgccaagugccagaccccccagggcgccaucaacuccucccuccccuuccagaacguccaccccgucaccaucggcgagugccccaaguacguccgcuccgccaagcuccgcauggucaccggccuccgcaacauccccuccauccagucccgcggccucuucggcgccaucgccggcuucaucgagggcggcuggaccggcauggucgacggcugguacggcuaccaccaccagaacgagcagggcuccggcuacgccgccgaccagaaguccacccagaacgccaucaacggcaucaccaacaaggucaacuccgucaucgagaagaugaacacccaguucaccgccgucggcaaggaguucaacaagcucgagcgccgcauggagaaccucaacaagaaggucgacgacggcuucaucgacaucuggaccuacaacgccgagcuccucguccuccucgagaacgagcgcacccucgacuuccacgacuccaacgucaagaaccucuacgagaaggucaagaaccagcucaagaacaacgccaaggagaucggcaacggcugcuucgaguucuaccacaagugcaacgacgagugcauggaguccgucaagaacggcaccuacgacuaccccaaguacuccgaggaguccaagcucaaccgcgagaagaucgacggcgucaagcucgaguccaugggcgucuaccagauccucgccaucuacuccaccgucgccuccucccucguccuccucgucucccucggcgccaucuccuucuggaugugcuccaacggcucccuccagugccgcaucugcaucuga

SEQ ID NO: 101156 - RNA, 1698 nt, Artificial Sequence
  derived and/or modified CDS sequence (opt2) from hemagglutinin__InfluenzaA__ADI75851
augaaggucaagcuccucguccuccucugcaccuucaccgccaccuacgccgacaccaucugcaucggcuaccacgccaacaacuccaccgacaccgucgacaccguccucgagaagaacgucaccgucacccacuccgucaaccuccucgagaacucccacaacggcaagcucugccuccucaagggcaucgccccccuccagcucggcaacugcuccgucgccggcuggauccucggcaaccccgagugcggccuccucaucuccaaggaguccugguccuacaucgucgagaagcccaaccccgagaacggcaccugcuaccccggccacuucgccgacuacgaggagcuccgcgagcagcucuccuccgucuccuccuucgagcgcuucgagaucuuccccaaggaguccuccuggcccaaccacaccgucaccggcgucuccgccuccugcucccacaacggcgaguccuccuucuaccgcaaccuccucuggcucaccggcaagaacggccucuaccccaaccucuccaaguccuacgccaacaacaaggagaaggagguccucguccucuggggcguccaccacccccccaacaucgucgaccagaagacccucuaccgcaccgagaacgccuacgucuccgucgucuccucccacuacucccgcaaguucacccccgagaucgccaagcgccccaagguccgcgaccaggagggccgcaucaacuacuacuggacccuccucgagcccggcgacaccaucaucuucgaggccaacggcaaccucaucgccccccgcuacgccuucgcccucucccgcggcuucggcuccggcaucaucaacuccaacgcccccaugggcaagugcgacgccaagugccagaccccccagggcgccaucaacuccucccuccccuuccagaacguccaccccgucaccaucggcgagugccccaaguacguccgcuccgccaagcuccgcauggucaccggccuccgcaacauccccuccauccagucccgcggccucuucggcgccaucgccggcuucaucgagggcggcuggaccggcauggucgacggcugguacggcuaccaccaccagaacgagcagggcuccggcuacgccgccgaccagaaguccacccagaacgccaucaacggcaucaccaacaaggucaacuccgucaucgagaagaugaacacccaguucaccgccgucggcaaggaguucaacaagcucgagcgccgcauggagaaccucaacaagaaggucgacgacggcuucaucgacaucuggaccuacaacgccgagcuccucguccuccucgagaacgagcgcacccucgacuuccacgacuccaacgucaagaaccucuacgagaaggucaagucccagcucaagaacaacgccaaggagaucggcaacggcugcuucgaguucuaccacaagugcaacgacgagugcauggaguccgucaagaacggcaccuacgacuaccccaaguacuccgaggaguccaagcucaaccgcgagaagaucgacggcgucaagcucgaguccaugggcgucuaccagauccucgccaucuacuccaccgucgccuccucccucguccuccucgucucccucggcgccaucuccuucuggaugugcuccaacggcucccuccagugccgcaucugcaucuga

SEQ ID NO: 101157 - RNA, 1701 nt, Artificial Sequence; identical to SEQ ID NO: 98470
  derived and/or modified CDS sequence (opt2) from hemagglutinin__InfluenzaA__ADI75884

SEQ ID NO: 101158 - RNA, 1701 nt, Artificial Sequence; identical to SEQ ID NO: 98470
  derived and/or modified CDS sequence (opt2) from hemagglutinin__InfluenzaA__ADI75917

SEQ ID NO: 101159 - RNA, 1698 nt, Artificial Sequence
  derived and/or modified CDS sequence (opt2) from hemagglutinin__InfluenzaA__ADI77349
augaaggucaagcuccucguccuccucugcaccuucaccgccaccuacgccgacaccaucugcaucggcuaccacgccaacaacuccaccgacaccgucgacaccguccucgagaagaacgucaccgucacccacuccgucaaccuccucgagaacucccacaacggcaagcucugccuccucaagggcaucgccccccuccagcucggcaacugcuccgucgccggcuggauccucggcaaccccgagugcgagcuccucaucuccaaggaguccugguccuacaucgucgagaagcccaaccccgagaacggcaccugcuaccccggccacuucgccgacuacgaggagcuccgcgagcagcucuccuccgucuccuccuucgagcgcuucgagaucuuccccaaggaguccuccuggcccaaccacaccgucaccggcgucuccgccuccugcucccacaacggcgagaacuccuucuaccgcaaccuccucuggcucaccggcaagaacggccucuaccccaaccucuccaaguccuacgccaacaacaaggagaaggagguccucauccucuggggcguccaccacccccccaacauggccgaccagaagacccucuaccacaccgagaacgccuacgucuccgucgucuccucccacuacucccgcaaguucacccccgagaucgccaagcgccccaagguccgcgaccaggagggccgcaucaacuacuacuggacccuccucgagcccggcgacaccaucaucuucgaggccaacggcaaccucaucgccccccgcuacgccuucgcccucucccgcggcuucggcuccggcaucaucaacuccaacgcccccauggacaagugcgacaccaagugccagaccccccagggcgccaucaacuccucccuccccuuccagaacguccaccccgucaccaucggcgagugccccaaguacguccgcuccgccaagcuccgcauggucaccggccuccgcaacauccccuccauccagucccgcggccucuucggcgccaucgccggcuucaucgagggcggcuggaccggcauggucgacggcugguacggcuaccaccaccagaacgagcagggcuccggcuacgccgccgaccagaaguccacccagaacgccaucaacggcaucaccaacaaggucaacuccgucaucgagaagaugaacacccaguucaccgccgucggcaaggaguucaacaagcucgagcgccgcauggagaaccucaacaagaaggucgacgacggcuucaucgacaucuggaccuacaacgccgagcuccucguccuccucgagaacgagcgcacccucgacuuccacgacuccaacgucaagaaccucuacgagaaggucaagucccagcucaagaacaacgccaaggagaucggcaacggcugcuucgaguucuaccacaagugcaacgacgagugcauggaguccgucaagaacggcaccuacgacuaccccaaguacuccgaggaguccaagcucaaccgcgagaagaucgacggcgucaagcucgaguccaugggcgucuaccagauccucgccaucuacuccaccgucgccuccucccucguccuccucgucucccucggcgccaucuccuucuggaugugcuccaacggcucccuccagugccgcaucugcaucuga

SEQ ID NO: 101160 - RNA, 1701 nt, Artificial Sequence; identical to SEQ ID NO: 98705
  derived and/or modified CDS sequence (opt2) from hemagglutinin__InfluenzaA__ADI77360

SEQ ID NO: 101161 - RNA, 1701 nt, Artificial Sequence
  derived and/or modified CDS sequence (opt2) from hemagglutinin__InfluenzaA__ADI99498
augaagaccauccucgucguccuccucuacaccuucgccaccgccaacgccgacacccucugcaucggcuaccacgccaacaacuccaccgacaccgucgacaccguccucgagaagaacgucaccgucacccacuccgucaaccuccucgaggacaagcacaacggcaagcucugcaagcuccgcggcgucgccccccuccaccucggcaagugcaacaucgccggcuggauccucggcaaccccgagugcgagucccucuccaccgccuccuccugguccuacaucgucgagaccuccuccuccgacaacggcaccugcuaccccggcgacuucaucgacuacgaggagcuccgcgagcagcucuccuccgucuccuccuucgagcgcuucgagaucuuccccaagaccuccuccuggcccaaccacgacuccaacaagggcgucaccgccgccugcccccacgccggcgccaaguccuucuacaagaaccucaucuggcucgucaagaagggcaacuccuaccccaagcucaacaaguccuacaucaacgacaagggcaaggagguccucguccucuggggcauccaccaccccuccaccuccgccgaccagcagucccucuaccagaacgccgacgccuacgucuucgucggcaccucccgcuacuccaagaaguucaagcccgagaucgccauccgccccaagguccgcggccaggagggccgcaugaacuacuacuggacccucgucaagcccggcgacaagaucaccuucgaggccaccggcaaccucgucgucccccgcuacgccuucgccauggagcgcaacgccggcuccggcaucaucaucuccgacacccccguccacgacugcaacaccaccugccagacccccaagggcgccaucaacaccucccuccccuuccagaacauccaccccaucaccaucggcaagugccccaaguacgucaaguccaccaagcuccgccucgccaccggccuccgcaacguccccuccauccagucccgcggccucuucggcgccaucgccggcuucaucgagggcggcuggaccggcauggucgacggcugguacggcuaccaccaccagaacgagcagggcuccggcuacgccgccgaccucaaguccacccagaacgccaucgacgagaucaccaacaaggucaacuccgucaucgagaagaugaacacccaguucaccgccgucggcaaggaguucaaccaccucgagaagcgcaucgagaaccucaacaagaaggucgacgacggcuuccucgacaucuggaccuacaacgccgagcuccucguccuccucgagaacgagcgcacccucgacuaccacgacuccaacgucaagaaccucuacgagaagguccgcucccagcucaagaacaacgccaaggagaucggcaacggcugcuucgaguucuaccacaagugcgacaacaccugcauggaguccgucaagaacggcaccuacgacuaccccaaguacuccgaggaggccaagcucaaccgcgaggagaucgacggcgucaagcucgaguccacccgcaucuaccagauccucgccaucuacuccaccgucgccuccucccucguccucgucgucucccucggcgccaucuccuucuggaugugcuccaacggcucccuccagugccgcaucugcaucuga

SEQ ID NO: 101162 - RNA, 1701 nt, Artificial Sequence
  derived and/or modified CDS sequence (opt2) from hemagglutinin__InfluenzaA__ADI99560
augaaggccauccucgucguccuccucuacaccuucgccaccgccaacgccgacacccucugcaucggcuaccacgccaacaacuccaccgacaccgucgacaccguccucgagaagaacgucaccgucacccacuccgucaaccuccucgaggacaagcacaacggcaagcucugcaagcuccgcggcgucgccccccuccaccucggcaagugcaacaucgccggcuggauccucggcaaccccgagugcgagucccucuccaccgccuccuccugguccuacaucgucgagaccuccuccuccgacaacggcaccugcuaccccggcgacuucaucaacuacgaggagcuccgcgagcagcucuccuccgucuccuccuucgagcgcuucgagaucuuccccaagaccuccuccuggcccaaccacgacuccaacaagggcgucaccgccgccugcccccacgccggcgccaaguccuucuacaagaaccucaucuggcucgucaagaagggcaacuccuaccccaagcucuccaaguccuacaucaacgacaagggcaaggagguccucguccucuggggcauccaccaccccuccaccuccgccgaccagcagucccucuaccagaacgccgacgccuacgucuucgucggcaccucccgcuacuccaagaaguucaagcccgagaucgccauccgccccaagguccgcgaccaggagggccgcaugaacuacuacuggacccucgucgagcccggcgacaagaucaccuucgaggccaccggcaaccucgucgucccccgcuacgccuucgccauggagcgcaacgccggcuccggcaucaucaucuccgacacccccguccacgacugcaacaccaccugccagacccccaagggcgccaucaacaccucccuccccuuccagaacauccaccccaucaccaucggcaagugccccaaguacgucaaguccaccaagcuccgccucgccaccggccuccgcaacguccccuccauccagucccgcggccucuucggcgccaucgccggcuucaucgagggcggcuggaccggcauggucgacggcugguacggcuaccaccaccagaacgagcagggcuccggcuacgccgccgaccucaaguccacccagaacgccaucgacaagaucaccaacaaggucaacuccgucaucgagaagaugaacacccaguucaccgccgucggcaaggaguucaaccaccucgagaagcgcaucgagaaccucaacaagaaggucgacgacggcuuccucgacaucuggaccuacaacgccgagcuccucguccuccucgagaacgagcgcacccucgacuaccacgacuccaacgucaagaaccucuacgagaagguccgcucccagcucaagaacaacgccaaggagaucggcaacggcugcuucgaguucuaccacaagugcaacaacaccugcauggaguccgucaagaacggcaccuacgacuaccccaaguacuccgaggaggccaagcucaaccgcgaggagaucgacggcgucaagcucgaguccacccgcaucuaccagauccucgccaucuacuccaccgucgccuccucccucguccucgucgucucccucggcgccaucuccuucuggaugugcuccaacggcucccuccagugccgcaucugcaucuga

SEQ ID NO: 101163 - RNA, 1701 nt, Artificial Sequence; identical to SEQ ID NO: 101162
  derived and/or modified CDS sequence (opt2) from hemagglutinin__InfluenzaA__ADI99570

SEQ ID NO: 101164 - RNA, 1701 nt, Artificial Sequence; identical to SEQ ID NO: 101162
  derived and/or modified CDS sequence (opt2) from hemagglutinin__InfluenzaA__ADI99580

SEQ ID NO: 101165 - RNA, 1701 nt, Artificial Sequence; identical to SEQ ID NO: 100318
  derived and/or modified CDS sequence (opt2) from hemagglutinin__InfluenzaA__ADI99590

SEQ ID NO: 101166 - RNA, 1701 nt, Artificial Sequence
  derived and/or modified CDS sequence (opt2) from hemagglutinin__InfluenzaA__ADI99610
augaaggccauccucgucguccuccucuacaccuucgccaccgccaacgccgacacccucugcaucggcuaccacgccaacaacuccaccgacaccgucgacaccguccucgagaagaacgucaccgucacccacuccgucaaccuccucgaggacaagcacaacggcaagcucugcaagcuccgcggcgucgccccccuccaccucggcaagugcaacaucgccggcuggauccucggcaaccccgagugcgagucccucuccaccgccuccuccugguccuacaucgucgagaccuccuccuccgacaacggcaccugcuaccccggcgacuucaucaacuacgaggagcuccgcgagcagcucuccuccgucuccuccuucgagcgcuucgagaucuuccccaagaccuccuccuggcccaaccacgacuccaacaagggcgucaccgccgccugcccccacgccggcgccaaguccuucuacaagaaccucaucuggcucgucaagaagggcaacuccuaccccaagcucuccaaguccuacaucaacgacaagggcaaggagauccucguccucuggggcauccaccaccccuccaccuccgccgaccagcagucccucuaccagaacgccgacgccuacgucuucgucggcaccucccgcuacuccaagaaguucaagcccgagaucgccauccgccccaagguccgcgaccaggagggccgcaugaacuacuacuggacccucgucgagcccggcgacaagaucaccuucgaggccaccggcaaccucgucgucccccgcuacgccuucgccauggagcgcaacgccggcuccggcaucaucaucuccgacacccccguccacgacugcaacaccaccugccagacccccaagggcgccaucaacaccucccuccccuuccagaacauccaccccaucaccaucggcaagugccccaaguacgucaaguccaccaagcuccgccucgccaccggccuccgcaacguccccuccauccagucccgcggccucuucggcgccaucgccggcuucaucgagggcggcuggaccggcauggucgacggcugguacggcuaccaccaccagaacgagcagggcuccggcuacgccgccgaccucaaguccacccagaacgccaucgacaagaucaccaacaaggucaacuccgucaucgagaagaugaacacccaguucaccgccgucggcaaggaguucaaccaccucgagaagcgcaucgagaaccucaacaagaaggucgacgacggcuuccucgacaucuggaccuacaacgccgagcuccucguccuccucgagaacgagcgcacccucgacuaccacgacuccaacgucaagaaccucuacgagaagguccgcucccagcucaagaacaacgccaaggagaucggcaacggcugcuucgaguucuaccacaagugcgacaacaccugcauggaguccgucaagaacggcaccuacgacuaccccaaguacuccgaggaggccaagcucaaccgcgaggagaucgacggcgucaagcucgaguccacccgcaucuaccagauccucgccaucuacuccaccgucgccuccucccucguccucgucgucucccucggcgccaucuccuucuggaugugcuccaacggcucccuccagugccgcaucugcaucuga

SEQ ID NO: 101167 - RNA, 1701 nt, Artificial Sequence
  derived and/or modified CDS sequence (opt2) from hemagglutinin__InfluenzaA__ADI99620
augaaggccauccucgucguccuccucuacaccuucgccaccgccaacgccgacacccucugcaucggcuaccacgccaacaacuccaccgacaccgucgacaccguccucgagaagaacgucaccgucacccacuccgucaaccuccucgaggacaagcacaacggcaagcucugcaagcuccgcggcgucgccccccuccaccucggcaagugcaacaucgccggcuggauccucggcaaccccgagugcgagucccucuccaccgccuccuccugguccuacaucgucgagaccuccuccuccgacaacggcaccugcuaccccggcgacuucaucaacuacgaggagcuccgcgagcagcucuccuccgucuccuccuucgagcgcuucgagaucuuccccaagaccuccuccuggcccaaccacgacuccaacaagggcgucaccgccgccugcccccacgccggcgccaaguccuucuacaagaaccucaucuggcucgucaagaagggcaacuccuaccccaagcucuccaaguccuacaucaacgacaagggcaaggagguccucguccucuggggcauccaccaccccuccaccuccgccgaccagcagucccucuaccagaacgccgacgccuacgucuucgucggcaccucccgcuacuccaagaaguucaagcccgagaucgccauccgccccaagguccgcgaccaggagggccgcaugaacuacuacuggacccucgucgagcccggcgacaagaucaccuucgaggccaccggcaaccucgucgucccccgcuacgccuucgccauggagcgcaacgccggcuccggcaucaucaucaccgacacccccguccacgacugcaacaccaccugccagacccccaagggcgccaucaacaccucccuccccuuccagaacauccaccccaucaccaucggcaagugccccaaguacgucaaguccaccaagcuccgccucgccaccggccuccgcaacguccccuccauccagucccgcggccucuucggcgccaucgccggcuucaucgagggcggcuggaccggcauggucgacggcugguacggcuaccaccaccagaacgagcagggcuccggcuacgccgccgaccucaaguccacccagaacgccaucgacaagaucaccaacaaggucaacuccgucaucgagaagaugaacacccaguucaccgccgucggcaaggaguucaaccaccucgagaagcgcaucgagaaccucaacaagaaggucgacgacggcuuccucgacaucuggaccuacaacgccgagcuccucguccuccucgagaacgagcgcacccucgacuaccacgacuccaacgucaagaaccucuacgagaagguccgcucccagcucaagaacaacgccaaggagaucggcaacggcugcuucgaguucuaccacaagugcgacaacaccugcauggaguccgucaagaacggcaccuacgacuaccccaaguacuccgaggaggccaagcucaaccgcgaggagaucgacggcgucaagcucgaguccacccgcaucuaccagauccucgccaucuacuccaccgucgccuccucccucguccucgucgucucccucggcgccaucuccuucuggaugugcuccaacggcucccuccagugccgcaucugcaucuga

SEQ ID NO: 101168 - RNA, 1701 nt, Artificial Sequence
  derived and/or modified CDS sequence (opt2) from hemagglutinin__InfluenzaA__ADI99630
augaaggccauccucgucguccuccucuacaccuucgccaccgccaacgccgacacccucugcaucggcuaccacgccaacaacuccaccgacaccgucgacaccguccucgagaagaacgucaccgucacccacuccgucaaccuccucgaggacaagaacaacggcaagcucugcaagcuccgcggcgucgccccccuccaccucggcaagugcaacaucgccggcuggauccucggcaaccccgagugcgagucccucuccaccgccuccuccugguccuacaucgucgagaccuccuccuccgacaacggcaccugcuaccccggcaacuucaucgacuacgaggagcuccgcgagcagcucuccuccgucuccuccuucgagcgcuucgagaucuuccccaagaccuccuccuggcccaaccacgacuccaacaagggcgucaccgccgccugcccccacgccggcgccaaguccuucuacaagaaccucaucuggcucgucaagaagggcaacuccuaccccaagcucuccaaguccuacaucaacgacaagggcaaggagguccucguccucuggggcauccaccaccccuccaccuccgccgaccagcagucccucuaccagaacgccgacgccuacgucuucgucggcaccucccgcuacuccaagaaguucaagcccgagaucgccauccgccccaagguccgcgaccaggagggccgcaugaacuacuacuggacccucgucgagcccggcgacaagaucaccuucgaggccaccggcaaccucgucgucccccgcuacgccuucgccauggagcgcaacgccggcuccggcaucaucaucuccgacacccccguccacgacugcaacaccaccugccagacccccaagggcgccaucaacaccucccuccccuuccagaacauccaccccaucaccaucggcaagugccccaaguacgucaaguccaccaagcuccgccucgccaccggccuccgcaacguccccuccauccagucccgcggccucuucggcgccaucgccggcuucaucgagggcggcuggaccggcauggucgacggcugguacggcuaccaccaccagaacgagcagggcuccggcuacgccgccgaccucaaguccacccagaacgccaucgacaagaucaccaacaaggucaacuccgucaucgagaagaugaacacccaguucaccgccgucggcaaggaguucaaccaccucgagaagcgcaucgagaaccucaacaagaaggucgacgacggcuuccucgacaucuggaccuacaacgccgagcuccucguccuccucgagaacgagcgcacccucgacuaccacgacuccaacgucaagaaccucuacgagaagguccgcucccagcucaagaacaacgccaaggagaucggcaacggcugcuucgaguucuaccacaagugcgacaacaccugcauggaguccgucaagaacggcaccuacgacuaccccaaguacuccgaggaggccaagcucaaccgcgaggagaucgacggcgucaagcucgaguccacccgcaucuaccagauccucgccaucuacuccaccgucgccuccucccucguccucgucgucucccucggcgccaucuccuucuggaugugcuccaacggcucccuccagugccgcaucugcaucuga

SEQ ID NO: 101169 - RNA, 1701 nt, Artificial Sequence
  derived and/or modified CDS sequence (opt2) from hemagglutinin__InfluenzaA__ADI99640
augaaggccauccucgucguccuccucuacaccuucgccaccgccaacgccgacacccucugcaucggcuaccacgccaacaacuccaccgacaccgucgacaccguccucgagaagaacgucaccgucacccacuccgucaaccuccucgaggacaagcacaacggcaagcucugcaagcuccgcggcgucgccccccuccaccucggcaagugcaacaucgccggcuggauccucggcaaccccgagugcgagucccucuccaccgccuccuccugguccuacaucgucgagaccuccuccuccgacaacggcaccugcuaccccggcgacuucaucgacuacgaggagcuccgcgagcagcucuccuccgucuccuccuucgagcgcuucgagaucuuccccaagaccuccuccuggcccaaccacgacuccaacaagggcgucaccgccgccugcccccacgccggcgccaaguccuucuacaagaaccucaucuggcucgucaagaagggcaacuccuaccccaagcucuccaaguccuacaucaacgacaagggcaaggagguccucguccucuggggcauccaccaccccuccaccuccaccgaccagcagucccucuaccagaacgccgacuccuacgucuucgucggcaccucccgcuacuccaagaaguucaagcccgagaucgccauccgccccaagguccgcgaccaggagggccgcaugaacuacuacuggacccucgucgagcccggcgacaagaucaccuucgaggccaccggcaaccucgucgucccccgcuacgccuucgccauggagcgcaacgccggcuccggcaucaucaucuccgacacccccauccacgacugcaacaccaccugccagacccccgagggcgccaucaacaccucccuccccuuccagaacauccaccccaucaccaucggcaagugccccaaguacgucaaguccaccaagcuccgccucgccaccggccuccgcaacguccccuccauccagucccgcggccucuucggcgccaucgccggcuucaucgagggcggcuggaccggcauggucgacggcugguacggcuaccaccaccagaacgagcagggcuccggcuacgccgccgaccucaaguccacccagaacgccaucgacgagaucaccaacaaggucaacuccgucaucgagaagaugaacacccaguucaccgccgucggcaaggaguucaaccaccucgagaagcgcaucgagaaccucaacaagaaggucgacgacggcuuccucgacaucuggaccuacaacgccgagcuccucguccuccucgagaacgagcgcacccucgacuaccacgacuccaacgucaagaaccucuacgagaagguccgcucccagcucaagaacaacgccaaggagaucggcaacggcugcuucgaguucuaccacaagugcgacaacaccugcauggaguccgucaagaacggcaccuacgacuaccccaaguacuccgaggaggccaagcucaaccgcgaggagaucgacggcgucaagcucgaguccacccgcaucuaccagauccucgccaucuacuccaccgucgccuccucccucguccucgucgucucccucggcgccaucuccuucuggaugugcuccaacggcucccuccagugccgcaucugcaucuga

SEQ ID NO: 101170 - RNA, 1701 nt, Artificial Sequence; identical to SEQ ID NO: 100257
  derived and/or modified CDS sequence (opt2) from hemagglutinin__InfluenzaA__ADI99660

SEQ ID NO: 101171 - RNA, 1701 nt, Artificial Sequence
  derived and/or modified CDS sequence (opt2) from hemagglutinin__InfluenzaA__ADI99670
augaaggccauccucgucguccuccucuacaccuucgccaccgccaacgccgacacccucugcaucggcuaccacgccaacaacuccaccgacaccgucgacaccguccucgagaagaacgucaccgucacccacuccgucaacauccucgaggacaagcacaacggcaagcucugcaagcuccgcggcgucgccccccuccaccucggcaagugcaacaucgccggcuggauccucggcaaccccgagugcgagucccucuccaccgccuccuccugguccuacaucgucgagaccuccuccuccgacaacggcaccugcuaccccggcgacuucaucgacuacgaggagcuccgcgagcagcucuccuccgucuccuccuucgagcgcuucgagaucuuccccaagaccuccuccuggcccaaccacgacuccaacaagggcgucaccgccgccugcccccacgccggcgccaaguccuucuacaagaaccucaucuggcucgucaagaagggcaacuccuaccccaagcucuccaaguccuacaucaacgacaagggcaaggagguccucguccucuggggcauccaccaccccuccaccuccgccgaccagcagucccucuaccagaacgccgacgccuacgucuucgucggcaccucccgcuacuccaagaaguucaagcccgagaucgccauccgccccaagguccgcgaccaggagggccgcaugaacuacuacuggacccucgucgagcccggcgacaagaucaccuucgaggccaccggcaaccucgucgucccccgcuacgccuucgccauggagcgcaacgccggcuccggcaucaucaucuccgacacccccguccacgacugcaacaccaccugccagacccccaagggcgccaucaacaccucccuccccuuccagaacauccaccccaucaccaucggcaagugccccaaguacgucaaguccaccaagcuccgccucgccaccggccuccgcaacguccccuccauccagucccgcggccucuucggcgccaucgccggcuucaucgagggcggcuggaccggcauggucgacggcugguacggcuaccaccaccagaacgagcagggcuccggcuacgccgccgaccucaaguccacccagaacgccaucgacgagaucaccaacaaggucaacuccgucaucgagaagaugaacacccaguucaccgccgucggcaaggaguucaaccaccucgagaagcgcaucgagaaccucaacaagaaggucgacgacggcuuccucgacaucuggaccuacaacgccgagcuccucguccuccucgagaacgagcgcacccucgacuaccacgacuccaacgucaagaaccucuacgagaagguccgcucccagcucaagaacaacgccaaggagaucggcaacggcugcuucgaguucuaccacaagugcgacaacaccugcauggaguccgucaagaacggcaccuacggcuaccccaaguacuccgaggaggccaagcucaaccgcgaggagaucgacggcgucaagcucgaguccacccgcaucuaccagauccucgccaucuacuccaccgucgccuccucccucguccucgucgucucccucggcgccaucuccuucuggaugugcuccaacggcucccuccagugccgcaucugcaucuga

SEQ ID NO: 101172 - RNA, 1701 nt, Artificial Sequence
  derived and/or modified CDS sequence (opt2) from hemagglutinin__InfluenzaA__ADI99680
augaaggccauccucgucguccuccucuacaccuucgccaccgccaacgccgacacccucugcaucggcuaccacgccaacaacuccaccgacaccgucgacaccguccucgagaagaacgucaccgucacccacuccgucaacauccucgaggacaagcacaacggcaagcucugcaagcuccgcggcgucgccccccuccaccucggcaagugcaacaucgccggcuggauccucggcaaccccgagugcgagucccucuccaccgccuccuccugguccuacaucgucgagaccuccuccuccgacaacggcaccugcuaccccggcgacuucaucgacuacgaggagcuccgcgagcagcucuccuccgucuccuccuucgagcgcuucgagaucuuccccaagaccuccuccuggcccaaccacgacuccaacaagggcgucaccgccgccugcccccacgccggcgccaaguccuucuacaagaaccucaucuggcucgucaagaagggcaacuccuaccccaagcucuccaaguccuacaucaacgacaagggcaaggagguccucguccucuggggcauccaccaccccuccaccuccgccgaccagcagucccucuaccagaacgccgacgccuacgucuucgucggcaccucccgcuacuccaagaaguucaagcccgagaucgccauccgccccaagguccgcgaccaggagggccgcaugaacuacuacuggaccaucgucgagcccggcgacaagaucaccuucgaggccaccggcaaccucgucgucccccgcuacgccuucgccauggagcgcaacgccggcuccggcaucaucaucuccgacacccccguccacgacugcaacaccaccugccagacccccaagggcgccaucaacaccucccuccccuuccagaacauccaccccaucaccaucggcaagugccccaaguacgucaaguccaccaagcuccgccucgccaccggccuccgcaacguccccuccauccagucccgcggccucuucggcgccaucgccggcuucaucgagggcggcuggaccggcauggucgacggcugguacggcuaccaccaccagaacgagcagggcuccggcuacgccgccgaccucaaguccacccagaacgccaucgacgagaucaccaacaaggucaacuccgucaucgagaagaugaacacccaguucaccgccgucggcaaggaguucaaccaccucgagaagcgcaucgagaaccucaacaagaaggucgacgacggcuuccucgacaucuggaccuacaacgccgagcuccucguccuccucgagaacgagcgcacccucgacuaccacgacuccaacgucaagaaccucuacgagaagguccgcucccagcucaagaacaacgccaaggagaucggcaacggcugcuucgaguucuaccacaagugcgacaacaccugcauggaguccgucaagaacggcaccuacgacuaccccaaguacuccgaggaggccaagcucaaccgcgaggagaucgacggcgucaagcucgaguccacccgcaucuaccagauccucgccaucuacuccaccgucgccuccucccucguccucgucgucucccucggcgccaucuccuucuggaugugcuccaacggcucccuccagugccgcaucugcaucuga

SEQ ID NO: 101173 - RNA, 1701 nt, Artificial Sequence
  derived and/or modified CDS sequence (opt2) from hemagglutinin__InfluenzaA__ADI99690
augaaggccauccucgccguccuccucuacaccuucgccaucgccaacgccgacacccucugcaucggcuaccacgccaacaacuccaccgacaccgucgacaccguccucgagaagaacgucaccgucacccacuccgucaacauccucgaggacaagcacaacggcaagcucugcaagcuccgcggcgucgccccccuccaccucggcaagugcaacaucgccggcuggauccucggcaaccccgagugcgagucccucuccaccgccuccuccugguccuacaucgucgagaccuccuccuccgacaacggcaccugcuaccccggcgacuucaucgacuacgaggagcuccgcgagcagcucuccuccgucuccuccuucgagcgcuucgagaucuuccccaagaccuccuccuggcccaaccacgacuccaacaagggcgucaccgccgccugcccccacgccggcgccaaguccuucuacaagaaccucaucuggcucgucaagaagggcaacuccuaccccaagcucuccaaguccuacaucaacgacaagggcaagaagguccucguccucuggggcauccaccaccccuccaccuccgccgaccagcagucccucuaccagaacgccgacgccuacgucuucgucggcaccucccgcuacuccaagaaguucaagcccgagaucgccauccgccccaagguccgcgaccaggagggccgcaugaacuacuacuggacccucgucgagcccggcgacaagaucaccuucgaggccaccggcaaccucgucgucccccgcuacgccuucgccauggagcgcaacgccggcuccggcaucaucaucuccgacacccccguccacgacugcaacaccaccugccagacccccaagggcgccaucaacaccucccuccccuuccagaacauccaccccaucaccaucggcaagugccccaaguacgucaaguccaccaagcuccgccucgccaccggccuccgcaacguccccuccauccagucccgcggccucuucggcgccaucgccggcuucaucgagggcggcuggaccggcauggucgacggcugguacggcuaccaccaccagaacgagcagggcuccggcuacgccgccgaccucaaguccacccagaacgccaucgacgagaucaccaacaaggucaacuccgucaucgagaagaugaacacccaguucaccgccgucggcaaggaguucaaccaccucgagaagcgcaucgagaaccucaacaagaaggucgacgacggcuuccucgacaucuggaccuacaacgccgagcuccucguccuccucgagaacgagcgcacccucgacuaccacgacuccaacgucaagaaccucuacgagaagguccgcucccagcucaagaacaacgccaaggagaucggcaacggcugcuucgaguucuaccacaagugcgacaacaccugcauggaguccgucaagaacggcaccuacgacuaccccaaguacuccgaggaggccaagcucaaccgcgaggagaucgacggcgucaagcucgaguccacccgcaucuaccagauccucgccaucuacuccaccgucgccuccucccucguccucgucgucucccucggcgccaucuccuucuggaugugcuccaacggcucccuccagugccgcaucugcaucuga

SEQ ID NO: 101174 - RNA, 1701 nt, Artificial Sequence
  derived and/or modified CDS sequence (opt2) from hemagglutinin__InfluenzaA__ADI99700
augaaggccauccucgucguccuccucuacaccuucgccaccgccaacgccgacacccucugcaucggcuaccacgccaacaacuccaccgacaccgucgacaccguccucgagaagaacgucaccgucacccacuccgucaaccuccucgaggacaagcacaacggcaagcucugcaagcuccgcggcgucuccccccuccaccucggcaagugcaacaucgccggcuggauccucggcaaccccgagugcgagucccucuccaccgccuccuccugguccuacaucgucgagaccuccuccuccgacaacggcaccugcuaccccggcgacuucaucgacuacgaggagcuccgcgagcagcucuccuccgucuccuccuucgagcgcuucgagaucuuccccaagaccuccuccuggcccaaccacgacuccaacaagggcgucaccgccgccugcccccacgccggcgccaaguccuucuacaagaaccucaucuggcucgucaagaagggcaacuccuaccccaagcucuccaaguccuacaucaacgacaagggcaaggagguccucguccucuggggcguccaccaccccuccaccuccgccgaccagcagucccucuaccagaacgccgacgccuacgucuucgucggcaccucccgcuacuccaagaaguucaagcccgagaucgccauccgccccaagguccgcgaccaggagggccgcaugaacuacuacuggacccucgucgagcccggcgacaagaucaccuucgaggccaccggcaaccucgucgccccccgcuacgccuucgccauggagcgcaacgccggcuccggcaucaucaucuccgacacccccguccacgacugcaacaccaccugccagacccccaagggcgccaucaacaccucccuccccuuccagaacauccaccccaucaccaucggcaagugccccaaguacgucaaguccaccaagcuccgccucgccaccggccuccgcaacguccccuccauccagucccgcggccucuucggcgccaucgccggcuucaucgagggcggcuggaccggcauggucgacggcugguacggcuaccaccaccagaacgagcagggcuccggcuacgccgccgaccucaaguccacccagaacgccaucgacgagaucaccaacaaggucaacuccgucaucgagaagaugaacacccaguucaccgccgucggcaaggaguucaaccaccucgagaagcgcaucgagaaccucaacaagaaggucgacgacggcuuccucgacaucuggaccuacaacgccgagcuccucguccuccucgagaacgagcgcacccucgacuaccacgacuccaacgucaagaaccucuacgagaagguccgcucccagcucaagaacaacgccaaggagaucggcaacggcugcuucgaguucuaccacaagugcgacaacaccugcauggaguccgucaagaacggcaccuacgacuaccccaaguacuccgaggaggccaagcucaaccgcgaggagaucgacggcgucaagcucgaguccacccgcaucuaccagauccucgccaucuacuccaccgucgccuccucccucguccucgucgucucccucggcgccaucuccuucuggaugugcuccaacggcucccuccagugccgcaucugcaucuga

SEQ ID NO: 101175 - RNA, 1701 nt, Artificial Sequence; identical to SEQ ID NO: 100354
  derived and/or modified CDS sequence (opt2) from hemagglutinin__InfluenzaA__ADI99710

SEQ ID NO: 101176 - RNA, 1701 nt, Artificial Sequence
  derived and/or modified CDS sequence (opt2) from hemagglutinin__InfluenzaA__ADI99720
augaaggccauccucgucguccuccucuacaccuucgccaccgccaacgccgacacccucugcaucggcuaccacgccaacaacuccaccgacaccgucgacaccguccucgagaagaacgucaccgucacccacuccgucaaccuccucgaggacaagcacaacggcaagcucugcaagcuccgcggcgucgccccccuccaccucggcaagugcaacaucgccggcuggauccucggcaaccccgagugcgagucccucuccaccgccuccuccugguccuacaucgucgagaccuccuccuccgacaacggcaccugcuaccccggcgacuucaucgacuacgaggagcuccgcgagcagcucuccuccgucuccuccuucgagcgcuucgagaucuuccccaagaccuccuccuggcccgaccacgacuccaacaagggcgucaccgccgccugcccccacgccggcgccaaguccuucuacaagaaccucaucuggcucgucaagaagggcaacuccuaccccaagcucuccaaguccuacaucaacgacaagggcaaggagguccucguccucuggggcauccaccaccccuccaccuccgccgaccagcagucccucuaccagaacgccgacgccuacgucuucgucggcaccucccgcuacuccaagaaguucaagcccgagaucgccauccgccccaagguccgcggccaggagggccgcaugaacuacuacuggacccucgucgagcccggcgacaagaucaccuucgaggccaccggcaaccucgucgucucccgcuacgccuucgccauggagcgcaacgccggcuccggcaucaucaucuccgacacccccguccacgacugcaacaccaccugccagacccccaagggcgccaucaacaccucccuccccuuccagaacauccaccccaucaccaucggcaagugccccaaguacgucaaguccaccaagcuccgccucgccaccggccuccgcaacguccccuccauccagucccgcggccucuucggcgccaucgccggcuucaucgagggcggcuggaccggcauggucgacggcugguacggcuaccaccaccagaacgagcagggcuccggcuacgccgccgaccucaaguccacccagaacgccaucgacgagaucaccaacaaggucaacuccgucaucgagaagaugaacacccaguucaccgccgucggcaaggaguucaaccaccucgagaagcgcaucgagaaccucaacaagaaggucgacgacggcuuccucgacaucuggaccuacaacgccgagcuccucguccuccucgagaacgagcgcacccucgacuaccacgacuccaacgucaagaaccucuacgagaagguccgcucccagcucaagaacaacgccaaggagaucggcaacggcugcuucgaguucuaccacaagugcgacaacaccugcauggaguccgucaagaacggcaccuacgacuaccccaaguacuccgaggaggccaagcucaaccgcgaggagaucgacggcgucaagcucgaguccacccgcaucuaccagauccucgccaucuacuccaccgucgccuccucccucguccucgucgucucccucggcgccaucuccuucuggaugugcuccaacggcucccuccagugccgcaucugcaucuga

SEQ ID NO: 101177 - RNA, 1701 nt, Artificial Sequence; identical to SEQ ID NO: 98705
  derived and/or modified CDS sequence (opt2) from hemagglutinin__InfluenzaA__ADI99730

SEQ ID NO: 101178 - RNA, 1701 nt, Artificial Sequence; identical to SEQ ID NO: 98705
  derived and/or modified CDS sequence (opt2) from hemagglutinin__InfluenzaA__ADJ00497

SEQ ID NO: 101179 - RNA, 1701 nt, Artificial Sequence; identical to SEQ ID NO: 98705
  derived and/or modified CDS sequence (opt2) from hemagglutinin__InfluenzaA__ADJ00498

SEQ ID NO: 101180 - RNA, 1701 nt, Artificial Sequence; identical to SEQ ID NO: 99899
  derived and/or modified CDS sequence (opt2) from hemagglutinin__InfluenzaA__ADJ00501

SEQ ID NO: 101181 - RNA, 1701 nt, Artificial Sequence; identical to SEQ ID NO: 99869
  derived and/or modified CDS sequence (opt2) from hemagglutinin__InfluenzaA__ADJ18163

SEQ ID NO: 101182 - RNA, 1701 nt, Artificial Sequence; identical to SEQ ID NO: 99869
  derived and/or modified CDS sequence (opt2) from hemagglutinin__InfluenzaA__ADJ18165

SEQ ID NO: 101183 - RNA, 1701 nt, Artificial Sequence
  derived and/or modified CDS sequence (opt2) from hemagglutinin__InfluenzaA__ADJ18167
augaaggccauccucgucguccuccucuacaccuucgccaccgccaacgccgacacccucugcaucggcuaccacgccaacaacuccaccgacaccgucgacaccguccucgagaagaacgucaccgucacccacuccgucaaccuccucgaggacaagcacaacggcaagcucugcaagcuccgcggcgucgccccccuccaccucggcaagugcaacaucgccggcuggauccucggcaaccccgagugcgagucccucuccaccgccuccuccugguccuacaucgucgagaccuccuccuccgacaacggcaccugcuaccccggcgacuucaucgacuacgaggagcuccgcgagcagcucuccuccgucuccuccuucgagcgcuucgagaucuuccccaagaccuccuccuggcccaaccacgacuccaacaagggcgucaccgccgccugccccuacgccggcgccaaguccuucuacaagaaccucaucuggcucgucaagaagggcaacuccuaccccaagcucuccaaguccuacaucaacgacaagggcaaggagguccucguccucuggggcauccaccaccccuccaccuccgccgaccagcagucccucuaccagaacgccgacgccuacgucuucgucggcaccucccgcuacuccaagaaguucaagcccgagaucgccauccgccccaagguccgcgaccgcgagggccgcaugaacuacuacuggacccucgucgagcccggcgacaagaucaccuucgaggccaccggcaaccucgucgucccccgcuacgccuucgccauggagcgcaacgccggcuccggcaucaucaucuccgacacccccguccacgacugcaacaccaccugccagacccccaagggcgccaucaacaccucccuccccuuccagaacauccaccccaucaccaucggcaagugccccaaguacgucaaguccaccaagcuccgccucgccaccggccuccgcaacauccccuccauccagucccgcggccucuucggcgccaucgccggcuucaucgagggcggcuggaccggcauggucgacggcugguacggcuaccaccaccagaacgagcagggcuccggcuacgccgccgaccucaaguccacccagaacgccaucgacaagaucaccaacaaggucaacuccgucaucgagaagaugaacacccaguucaccgccgucggcaaggaguucaaccaccucgagaagcgcaucgagaaccucaacaagaaggucgacgacggcuuccucgacaucuggaccuacaacgccgagcuccucguccuccucgagaacgagcgcacccucgacuaccacgacuccaacgucaagaaccucuacgagaagguccgcucccagcucaagaacaacgccaaggagaucggcaacggcugcuucgaguucuaccacaagugcgacaacaccugcauggaguccgucaagaacggcaccuacgacuaccccaaguacuccgaggaggccaagcucaaccgcgaggagaucgacggcgucaagcucgaguccacccgcaucuaccagauccucgccaucuacuccaccgucgccuccucccucguccucgucgucucccucggcgccaucuccuucuggaugugcuccaacggcucccuccagugccgcaucugcaucuga

SEQ ID NO: 101184 - RNA, 1701 nt, Artificial Sequence
  derived and/or modified CDS sequence (opt2) from hemagglutinin__InfluenzaA__ADJ18169
augaaggccauccucgucguccuccucuacaccuucgccaccgccaacgccgacacccucugcaucggcuaccacgccaacaacuccaccgacaccgucgacaccguccucgagaagaacgucaccgucacccacuccgucaaccuccucgaggacaagcacaacggcaagcucugcaagcuccgcggcgucgccccccuccaccucggcaagugcaacaucgccggcuggauccucggcaaccccgagugcgagucccucuccaccgccuccuccugguccuacaucgucgagaccuccuccuccgacaacggcaccugcuaccccggcgacuucaucgacuacgaggagcuccgcgagcagcucuccuccgucuccuccuucgagcgcuucgagaucuuccccaagaccuccuccuggcccaaccacgacuccaacaagggcgucaccgccgccugcccccacgccggcgccaaguccuucuacaagaaccucaucuggcucgucaagaagggcaacuccuaccccaagcucuccaaguccuacaucaacgacaagggcaaggagguccucguccucuggggcauccaccaccccuccaccuccgccgaccagcagucccucuaccagaacgccgacgccuacgucuucgucggcaccucccgcuacuccaagaaguucaagcccgagaucgccauccgccccaagguccgcgaccgcgagggccgcaugaacuacuacuggacccucgucgagcccggcgacaagaucaccuucgaggccaccggcaaccucgucgucccccgcuacgccuucgccauggagcgcaacgccggcuccggcaucaucaucuccgacacccccguccacgacugcaacaccaccugccagacccccaagggcgccaucaacaccucccuccccuuccagaacauccaccccaucaccaucggcaagugccccaaguacgucaaguccaccaagcuccgccucgccaccggccuccgcaacguccccuccauccagucccgcggccucuucggcgccaucgccggcuucaucgagggcggcuggaccggcauggucgacggcugguacggcuaccaccaccagaacgagcagggcuccggcuacgccgccgaccucaaguccacccagaacgccaucgacaagaucaccaacaaggucaacuccgucaucgagaagaugaacacccaguucaccgccgucggcaaggaguucaaccaccucgagaagcgcaucgagaaccucaacaagaaggucgacgacggcuuccucgacaucuggaccuacaacgccgagcuccucguccuccucgagaacgagcgcacccucgacuaccacgacuccaacgucaagaaccucuacgagaagguccgcucccagcucaagaacaacgccaaggagaucggcaacggcugcuucgaguucuaccacaagugcgacaacaccugcauggaguccgucaagaacggcaccuacgacuaccccaaguacuccgaggaggccaagcucaaccgcgaggagaucgacggcgucaagcucgaguccacccgcaucuaccagauccucgccaucuacuccaccgucgccuccucccucguccucgucgucucccucggcgccaucuccuucuggaugugcuccaacggcucccuccagugccgcaucugcaucuga

SEQ ID NO: 101185 - RNA, 1701 nt, Artificial Sequence
  derived and/or modified CDS sequence (opt2) from hemagglutinin__InfluenzaA__ADJ18171
augaaggccauccucgucguccuccucuacaccuucgccaccgccaacgccgacacccucugcaucggcuaccacgccaacaacuccaccgacaccgucgacaccguccucgagaagaacgucaccgucacccacuccgucaaccuccucgaggacaagcacaacggcaagcucugcaagcuccgcggcgucgccccccuccaccucggcaagugcaacaucgccggcuggauccucggcaaccccgagugcgagucccucuccaccgccuccuccuggcccuacaucgucgagaccuccuccuccgacaacggcaccugcuaccccggcgacuucaucgacuacgaggagcuccgcgagcagcucuccuccgucuccuccuucgagcgcuucgagaucuuccccaagaccuccuccuggcccaaccacgacuccaacaagggcgucaccgccgccugcccccacgccggcgccaaguccuucuaccagaaccucaucuggcucgucaagaagggcaacuccuaccccaagcucuccaaguccuacauccacgacaagggcaaggagguccucguccucuggggcauccaccaccccuccaccuccgccgaccagcagucccucuaccagaacgccgacgccuacgucuucgucggcaccucccgcuacuccaagaaguucaagcccgagaucgccauccgccccaagguccgcgaccgccagggccgcaugaacuacuacuggacccucgucgagcucggcgacaagaucaccuucgaggccaccggcaaccucgucgucccccgcuacgccuucgccauggagcgcaacgccggcuccggcaucaucaucuccgacacccccguccacaacugcaacaccaccugccagaccaccaccggcgccaucaacaccucccuccccuuccagaacauccaccccaucaccaucggcaagugccccaaguacgucaaguccaccaagcuccgccucgccaccggccuccgcaacguccccuccauccagucccgcggccucuucggcgccaucgccggcuucaucgagggcggcuggaccggcauggucgacggcugguacggcuaccaccaccagaacgagcagggcuccggcuacgccgccgaccucaaguccacccagaacgccaucgacaagaucaccaacaaggucaacuccgucaucgagaagaugaacacccaguucaccgccgucggcaaggaguucaaccaccucgagaagcgcaucgagaaccucaacaagaaggucgacgacggcuuccucgacaucuggaccuacaacgccgagcuccucguccuccucgagaacgagcgcacccucgacuaccacgacuccaacgucaagaaccucuacgagaagguccgcucccagcucaagaacaacgccaaggagaucggcaacggcugcuucgaguucuaccacaagugcgacaacaccugcauggaguccgucaagaacggcaccuacgacuaccccaaguacuccgaggaggccaagcucaaccgcgaggagaucgacggcgucaagcucgaguccacccgcaucuaccagauccucgccaucuacuccaccgucgccuccucccucguccucgucgucucccucggcgccaucuccuucuggaugugcuccaacggcucccuccagugccgcaucugcaucuga

SEQ ID NO: 101186 - RNA, 1701 nt, Artificial Sequence; identical to SEQ ID NO: 99869
  derived and/or modified CDS sequence (opt2) from hemagglutinin__InfluenzaA__ADJ18173

SEQ ID NO: 101187 - RNA, 1701 nt, Artificial Sequence; identical to SEQ ID NO: 99869
  derived and/or modified CDS sequence (opt2) from hemagglutinin__InfluenzaA__ADJ18175

SEQ ID NO: 101188 - RNA, 1701 nt, Artificial Sequence
  derived and/or modified CDS sequence (opt2) from hemagglutinin__InfluenzaA__ADJ18177
augaaggccauccucgucguccuccucuacaccuucgccaccgccaacgccgacacccucugcaucggcuaccacgccaacaacuccaccgacaccgucgacaccguccucgagaagaacgucaccgucacccacuccgucaaccuccucgaggacaagcacaacggcaagcucugcaagcuccgcggcgucgccccccuccaccucggcaagugcaacaucgccggcuggauccucggcaaccccgagugcgagucccucuccaccgccuccuccugguccuacaucgucgagaccuccuccuccgacaacggcaccugcuaccccggcgacuucaucgacuacgaggagcuccgcgagcagcucuccuccgucuccuccuucgagcgcuucgagaucuuccccaagaccuccuccuggcccaaccacgacuccaacaagggcgucaccgccgccugcccccacgccggcgccaaguccuucuacaagaaccucaucuggcucgucaagaagggcaacuccuaccccaagcucuccaaguccuacaucaacgacaagggcaaggagguccucguccucuggggcauccaccaccccuccaccuccgccgaccagcagucccucuaccagaacgccgacgccuacgucuucgucggcaccucccgcuacuccaagaaguucaagcccgagaucgccauccgccccaagguccgcggccaggagggccgcaugaacuacuacuggacccucgucgagcccggcgacaagaucaccuucgaggccaccggcaaccucgucgucccccgcuacgccuucgccauggagcgcaacgccggcuccggcaucaucaucuccgacacccccguccacgacugcaacaccaccugccagacccccaagggcgccaucaacaccucccuccccuuccagaacauccaccccaucaccaucggcaagugccccaaguacgucaaguccaccaagcuccgccucgccaccggccuccgcaacauccccuccguccagucccgcggccucuucggcgccaucgccggcuucaucgagggcggcuggaccggcauggucgacggcugguacggcuaccaccaccagaacgagcagggcuccggcuacgccgccgaccucaaguccacccagaacgccaucgacaagaucaccaacaaggucaacuccgucaucgagaagaugaacacccaguucaccgccgucggcaaggaguucaaccaccucgagaagcgcaucgagaaccucaacaagaaggucgacgacggcuuccucgacaucuggaccuacaacgccgagcuccucguccuccucgagaacgagcgcacccucgacuaccacgacuccaacgucaagaaccucuacgagaagguccgcucccagcucaagaacaacgccaaggagaucggcaacggcugcuucgaguucuaccacaagugcgacaacaccugcauggaguccgucaagaacggcaccuacgacuaccccaaguacuccgaggaggccaagcucaaccgcgaggagaucgacggcgucaagcucgaguccacccgcaucuaccagauccucgccaucuacuccaccgucgccuccucccucguccucgucgucucccucggcgccaucuccuucuggaugugcuccaacggcucccuccagugccgcaucugcaucuga

SEQ ID NO: 101189 - RNA, 1701 nt, Artificial Sequence
  derived and/or modified CDS sequence (opt2) from hemagglutinin__InfluenzaA__ADJ40444
augaaggccauccucgucguccuccucuacaccuucgccaccgccaacgccgacacccucugcaucggcuaccacgccaacaacuccaccgacaccgucgacaccguccucaagaagaacgucaccgucacccacuccgucaaccuccucgaggacaagcacaacggcaagcucugcaagcuccgcggcgucgccccccuccaccucggcaagugcaacaucgccggcuggauccucggcaaccccgagugcgagucccucuccaccgccuccuccugguccuacaucgucgagaccuccuccuccgacaacggcaccugcuaccccggcgacuucaucgacuacgaggagcuccgcgagcagcucuccuccgucuccuccuucgagcgcuucgagaucuuccccaagaccuccuccuggcccaaccacgacuccaacaagggcgucaccgccgccugcccccacgccggcgccaaguccuucuacaagaaccucaucuggcucgucaagaagggcaacuccuaccccaagcucuccaaguccuacaucaacgacaagggcaaggagguccucguccucuggggcauccaccaccccuccaccuccgccgaccagcagucccucuaccagaacgccgacgccuacgucuucgucggcaccucccgcuacuccaagaaguucaagcccgagaucgccauccgccccaagguccgcgaccaggagggccgcaugaacuacuacuggacccucgucgagcccggcgacaagaucaccuucgaggccaccggcaaccucgucgucccccgcuacgccuucgccauggagcgcaacgccggcuccggcaucaucaucuccgacacccccguccacgacugcaacaccaccugccagacccccaagggcgccaucaacaccucccuccccuuccagaacauccaccccaucaccaucggcaagugccccaaguacgucaaguccaccaagcuccgccucgccaccggccuccgcaacguccccuccauccagucccgcggccucuucggcgccaucgccggcuucaucgagggcggcuggaccggcauggucgacggcugguacggcuaccaccaccagaacgagcagggcuccggcuacgccgccgaccucaaguccacccagaacgccaucgacgagaucaccaacaaggucaacuccgucaucgagaagaugaacacccaguucaccgccgucggcaaggaguucaaccaccucgagaagcgcaucgagaaccucaacaagaaggucgacgacggcuuccucgacaucuggaccuacaacgccgagcuccucguccuccucgagaacgagcgcacccucgacuaccacgacuccaacgucaagaaccucuacgagaagguccgcucccagcucaagaacaacgccaaggagaucggcaacggcugcuucgaguucuaccacaagugcgacaacaccugcauggaguccgucaagaacggcaccuacgacuaccccaaguacuccgaggaggccaagcucaaccgcgaggagaucgacggcgucaagcucgaguccacccgcaucuaccagauccucgccaucuacuccaccgucgccuccucccucguccucgucgucucccucggcgccaucuccuucuggaugugcuccaacggcucccuccagugccgcaucugcaucuga

SEQ ID NO: 101190 - RNA, 1701 nt, Artificial Sequence
  derived and/or modified CDS sequence (opt2) from hemagglutinin__InfluenzaA__ADJ40454
augaaggccauccucgucguccuccucuacaccuucgccaccgccaacgccgacacccucugcaucggcuaccacgccaacaacuccaccgacaccgucgacaccguccucgagaagaacgucaccgucacccacuccgucaaccuccucgaggacaagcacaacggcaagcucugcaagcuccgcggcgucgccccccuccaccucggcaagugcaacaucgccggcuggauccucggcaaccccgagugcgagucccucuccaccgccuccuccugguccuacaucgucgagaccuccuccuccgacaacggcaccugcuaccccggcgacuucaucgacuacgaggagcuccgcgagcagcucuccuccgucuccuccuucgagcgcuucgagaucuuccccaagaccuccuccuggcccaaccacgacuccaacaagggcgucaccgccgccugcccccacgccggcgccaaguccuucuacaagaaccucaucuggcucgucaagaagggcaacuccuaccccaagcucuccaaguccuacaucaacgacaagggcaaggagguccucguccucuggggcauccaccaccccuccaccuccgccgaccagcagucccucuaccagaacgccgacgccuacgucuucgucggcaccucccgcuacuccaagaaguucaagcccgagaucgccauccgccccaagguccgcaaccaggagggccgcaugaacuacuacuggacccucgucgagcccggcgacaagaucaccuucgaggccaccggcaaccucgucgucccccgcuacgccuucgccauggagcgcaacgccggcuccggcaucaucaucuccgacacccccguccacgacugcaacaccaccugccagacccccaagggcgccaucaacaccucccuccccuuccagaacauccaccccaucaccaucggcaagugccccaaguacgucaaguccaccaagcuccgccucgccaccggccuccgcaacauccccuccauccagucccgcggccucuucggcgccaucgccggcuucaucgagggcggcuggaccggcauggucgacggcugguacggcuaccaccaccagaacgagcagggcuccggcuacgccgccgaccucaaguccacccagaacgccaucgacaagaucaccaacaaggucaacuccgucaucgagaagaugaacacccaguucaccgccgucggcaaggaguucaaccaccucgagaagcgcaucgagaaccucaacaagaaggucgacgacggcuuccucgacaucuggaccuacaacgccgagcuccucguccuccucgagaacgagcgcacccucgacuaccacgacuccaacgucaagaaccucuacgagaagguccgcucccagcucaagaacaacgccaaggagaucggcaacggcugcuucgaguucuaccacaagugcgacaacaccugcauggaguccgucaagaacggcaccuacgacuaccccaaguacuccgaggaggccaagcucaaccgcgaggagaucgacggcgucgagcucgaguccacccgcaucuaccagauccucgccaucuacuccaccgucgccuccucccucguccucgucgucucccucggcgccaucuccuucuggaugugcuccaacggcucccuccagugccgcaucugcaucuga

SEQ ID NO: 101191 - RNA, 1701 nt, Artificial Sequence
  derived and/or modified CDS sequence (opt2) from hemagglutinin__InfluenzaA__ADJ40464
augaaggccauccucgucguccuccucuacaccuucgccaccgccaacaccgacacccucugcaucggcuaccacgccaacaacuccaccgacaccgucgacaccguccucgagaagaacgucaccgucacccacuccgucaaccuccucgaggacaagcacaacggcaagcucugcaagcuccgcggcgucgccccccuccaccucggcaagugcaacaucgccggcuggauccucggcaaccccgagugcgagucccucuccaccgccuccuccugguccuacaucgucgagaccuccuccuccgacaacggcaccugcuaccccggcgacuucaucgacuacgaggagcuccgcgagcagcucuccuccgucuccuccuucgagcgcuucgagaucuuccccaagaccuccuccuggcccaaccacgacuccaacaagggcgucaccgccgccugcccccacgccggcgccaaguccuucuacaagaaccucaucuggcucgucaagaagggcaacuccuaccccaagcucuccaaguccuacaucaacgacaagggcaaggagguccucguccucuggggcauccaccaccccuccaccuccgccgaccagcagucccucuaccagaacgccgacgccuacgucuucgucggcaccucccgcuacuccaagaaguucaagcccgagaucgccauccgccccaagguccgcgaccaggagggccgcaugaacuacuacuggacccucgucgagcccggcgacaagaucaccuucgaggccaccggcaaccucgucgucccccgcuacgccuucgccauggagcgcaacgccggcuccggcaucaucaucuccgacacccccguccacgacugcaacaccaccugccagacccccaagggcgccaucaacaccucccuccccuuccagaacauccaccccaucaccaucggcaagugccccaaguacgucaaguccaccaagcuccgccucgccaccggccuccgcaacguccccuccauccagucccgcggccucuucggcgccaucgccggcuucaucgagggcggcuggaccggcauggucgacggcugguacggcuaccaccaccagaacgagcagggcuccggcuacgccgccgaccucaaguccacccagaacgccaucgacgagaucaccaacaaggucaacuccgucaucgagaagaugaacacccaguucaccgccgucggcaaggaguucaaccaccucgagaagcgcaucgagaaccucaacaagaaggucgacgacggcuuccucgacaucuggaccuacaacgccgagcuccucauccuccucgagaacgagcgcacccucgacuaccacgacuccaacgucaagaaccucuacgagaagguccgcucccagcucaagaacaacgccaaggagaucggcaacggcugcuucgaguucuaccacaagugcgacaacaccugcauggaguccgucaagaacggcaccuacgacuaccccaaguacuccgaggaggccaagcucaaccgcgaggagaucgacggcgucaagcucgaguccacccgcaucuaccagauccucgccaucuacuccaccgucgccuccucccucguccucgucgucucccucggcgccaucuccuucuggaugugcuccaacggcucccuccagugccgcaucugcaucuga

SEQ ID NO: 101192 - RNA, 1701 nt, Artificial Sequence
  derived and/or modified CDS sequence (opt2) from hemagglutinin__InfluenzaA__ADJ40474
augaaggccauccucgucguccuccucuacaccuucgccaccgccaacgccgacacccucugcaucggcuaccacgccaacaacuccaccgacaccgucgacaccguccucgagaagaacgucaccgucacccacuccgucaaccuccucgaggacaagcacaacggcaagcucugcaagcuccgcggcgucgccccccuccaccucggcaagugcaacaucgccggcuggauccucggcaaccccgagugcgagucccucuccaccgccuccuccugguccuacaucgucgagaccuccuccuccgacaacggcaccugcuaccccggcgacuucaucgacuacgaggagcuccgcgagcagcucuccuccgucuccuccuucgagcgcuucgagaucuuccccaagaccuccuccuggcccaaccacgacuccaacaagggcgucaccgccgccugcccccacgccggcgccaaguccuucuacaagaaccucaucuggcucgucaagaagggcaacuccuaccccaagcucuccaaguccuacaucaacgacaagggcaaggagguccucguccucuggggcauccaccaccccuccaccuccgccgaccagcagucccucuaccagaacgccgacgccuacgucuucgucggcaccucccgcuacuccaagaaguucaagcccgagaucgccauccgccccaagguccgcgagcaggagggccgcaugaacuacuacuggacccucgucgagcccggcgacaagaucaccuucgaggccaccggcaaccucgucgucccccgcuacgccuucgccauggagcgcaacgccggcuccggcaucaucaucuccgacacccccguccacgacugcaacaccaccugccagacccccaagggcgccaucaacaccucccuccccuuccagaacauccaccccaucaccaucggcaagugccccaaguacgucaaguccaccaagcuccgccucgccaccggccuccgcaacguccccuccauccagucccgcggccucuucggcgccaucgccggcuucaucgagggcggcuggaccggcauggucgacggcugguacggcuaccaccaccagaacgagcagggcuccggcuacgccgccgaccucaaguccacccagaacgccaucgacgagaucaccaacaaggucaacuccgucaucgagaagaugaacacccaguucaccgccgucggcaaggaguucaaccaccucgagaagcgcaucgagaaccucaacaagaaggucgacgacggcuuccucgacaucuggaccuacaacgccgagcuccucguccuccucgagaacgagcgcacccucgacuaccacgacuccaacgucaagaaccucuacgagaagguccgccgccagcucaagaacaacgccaaggagaucggcaacggcugcuucgaguucuaccacaagugcgacaacaccugcauggaguccgucaagaacggcaccuacgacuaccccaaguacuccgaggaggccaagcucaaccgcgaggagaucgacggcgucaagcucgaguccacccgcaucuaccagauccucgccaucuacuccaccgucgccuccucccucguccucgucgucucccucggcgccaucuccuucuggaugugcuccaacggcucccuccagugccgcaucugcaucuga

SEQ ID NO: 101193 - RNA, 1701 nt, Artificial Sequence
  derived and/or modified CDS sequence (opt2) from hemagglutinin__InfluenzaA__ADJ40494
augaaggccauccucgucguccuccucuacaccuucgccaccgccaacgccgacacccucugcaucggcuaccacgccaacaacuccaccgacaccgucgacaccguccucgagaagaacgucaccgucacccacuccgucgaccuccucgaggacaagcacaacggcaagcucugcaagcuccgcggcgucgccccccuccaccucggcaagugcaacaucgccggcuggauccucggcaaccccgagugcgagucccucuccaccgccuccuccugguccuacaucgucgagaccuccuccuccgacaacggcaccugcuaccccggcgacuucaucgacuacgaggagcuccgcgagcagcucuccuccgucuccuccuucgagcgcuucgagaucuuccccaagaccuccuccuggcccaaccacgacuccaacaagggcgucaccgccgccugcccccacgccggcgccaaguccuucuacaagacccucaucuggcucgucaagaagggcaacuccuaccccaagcucuccaaguccuacaucaacgacaagggcaaggagguccucguccucuggggcauccaccaccccuccaccuccgccgaccagcagucccucuaccagaacgccgacgccuacgucuucgucggcaccucccgcuacuccaagaaguucaagcccgagaucgccauccgccccaagguccgcgaccaggagggccgcaugaacuacuacuggacccucgucgagcccggcgacaagaucaccuucgaggccaccggcaaccucgucgucccccgcuacgccuucgccauggagcgcaacgccggcuccggcaucaucaucuccgacacccccguccacgacugcaacaccaccugccagacccccaagggcgccaucaacaccucccuccccuuccagaacauccaccccaucaccaucggcaagugccccaaguacgucaaguccaccaagcuccgccucgccaccggccuccgcaacguccccuccauccagucccgcggccucuucggcgccaucgccggcuucaucgagggcggcuggaccggcauggucgacggcugguacggcuaccaccaccagaacgagcagggcuccggcuacgccgccgaccucaaguccacccagaacgccaucgacgagaucaccaacaaggucaacuccgucaucgagaagaugaacacccaguucaccgccgucggcaaggaguucaaccaccucgagaagcgcaucgagaaccucaacaagaaggucgacgacggcuuccucgacaucuggaccuacaacgccgagcuccucguccuccucgagaacgagcgcacccucgacuaccacgacuccaacgucaagaaccucuacgagaagguccgcucccagcucaagaacaacgccaaggagaucggcaacggcugcuucgaguucuaccacaagugcgacaacaccugcauggaguccgucaagaacggcaccuacgacuaccccaaguacuccgaggaggccaagcucaaccgcgaggagaucgacggcgucaagcucgaguccacccgcaucuaccagauccucgccaucuacuccaccgucgccuccucccucguccucgucgucucccucggcgccaucuccuucuggaugugcuccaacggcucccuccagugccgcaucugcaucuga

SEQ ID NO: 101194 - RNA, 1701 nt, Artificial Sequence
  derived and/or modified CDS sequence (opt2) from hemagglutinin__InfluenzaA__ADJ40514
augaaggccguccucgucguccuccucuacaccuucgccaccaccaacgccgacacccucugcaucggcuaccacgccaacaacuccaccgacaccgucgacaccguccucgagaagaacgucaccgucacccacuccgucaaccuccucgaggacaagcacaacggcaagcucugcaagcuccgcggcgucgccccccuccaccucggcaagugcaacaucgccggcuggauccucggcaaccccgagugcgagucccucuccaccgccuccuccugguccuacaucgucgagaccuccuccuccgacaacggcaccugcuaccccggcgacuucaucgacuacgaggagcuccgcgagcagcucuccuccgucuccuccuucgagcgcuucgagaucuuccccaagaccuccuccuggcccaaccacgacuccaacaagggcgucaccgccgccugcccccacgccggcgccaaguccuucuacaagaaccucaucuggcucgucaagaagggcaacuccuaccccaagcucuccaaguccuacaucaacgacaagggcaaggagguccucguccucuggggcauccaccaccccuccaccuccgccgaccagcagucccucuaccagaacgccgacgccuacgucuucgucggcaccucccgcuacuccaagaaguucaagcccgagaucgccauccgccccaagguccgcaaccaggagggccgcaugaacuacuacuggacccucgucgagcccggcgacaagaucaccuucgaggccaccggcaaccucgucgucccccgcuacgccuucgccauggagcgcaacgccggcuccggcaucaucaucuccgacacccccguccacgacugcaacaccaccugccagacccccaagggcgccaucaacaccucccuccccuuccagaacauccaccccaucaccaucggcaagugccccaaguacgucaaguccaccaagcuccgccucgccaccggccuccgcaacguccccuccauccagucccgcggccucuucggcgccaucgccggcuucaucgagggcggcuggaccggcauggucgacggcugguacggcuaccaccaccagaacgagcagggcuccggcuacgccgccgaccucaaguccacccagaacgccaucgacgagaucaccaacaaggucaacuccgucaucgagaagaugaacacccaguucaccgccgucggcaaggaguucaaccaccucgagaagcgcaucgagaaccucaacaagaaggucgacgacggcuuccucgacaucuggaccuacaacgccgagcuccucguccuccucgagaacgagcgcacccucgacuaccacgacuccaacgucaagaaccucuacgagaagguccgcucccagcucaagaacaacgccaaggagaucggcaacggcugcuucgaguucuaccacaagugcgacaacaccugcauggaguccgucaagaacggcaccuacgacuaccccaaguacuccgaggaggccaagcucaaccgcgaggagaucgacggcgucaagcucgaguccacccgcaucuaccagauccucgccaucuacuccaccgucgccuccucccucguccucgucgucucccucggcgccaucuccuucuggaugugcuccaacggcucccuccagugccgcaucugcaucuga

SEQ ID NO: 101195 - RNA, 1701 nt, Artificial Sequence; identical to SEQ ID NO: 98705
  derived and/or modified CDS sequence (opt2) from hemagglutinin__InfluenzaA__ADJ40524

SEQ ID NO: 101196 - RNA, 1701 nt, Artificial Sequence; identical to SEQ ID NO: 99058
  derived and/or modified CDS sequence (opt2) from hemagglutinin__InfluenzaA__ADJ40534

SEQ ID NO: 101197 - RNA, 1701 nt, Artificial Sequence
  derived and/or modified CDS sequence (opt2) from hemagglutinin__InfluenzaA__ADJ40554
augaaggccauccucgucguccuccucuacaccuucgccaccgccaacgccgacacccucugcaucggcuaccacgccaacaacuccaccgacaccgucgacaccguccucgagaagaacgucaccgucacccacuccgucaaccuccucgaggacaagcacaacggcaagcucugcaagcuccgcggcgucgccccccuccaccucggcaagugcaacaucgccggcuggauccucggcaaccccgagugcgagucccucuccaccgccuccuccugguccuacaucgucgagaccuccuccuccgacaacggcaccugcuaccccggcgacuucaucgacuacgaggagcuccgcgagcagcucuccuccgucuccuccuucgagcgcuucgagaucuuccccaacaccuccuccuggcccaaccacgacuccaacaagggcgucaccgccgccugcccccacgccggcgccaaguccuucuacaagaaccucaucuggcucgucaagaagggcaacuccuaccccaagcucuccaaguccuacaucaacgacaagggcaaggagguccucguccucuggggcauccaccaccccuccaccuccgccgaccagcagucccucuaccagaacgccgacgccuacgucuucgucggcaccucccgcuacuccaagaaguucaagcccgagaucgccauccgccccaagguccgcgaccaggagggccgcaugaacuacuacuggacccucgucgagcccggcgacaagaucaccuucgaggccaccggcaaccucgucgucccccgcuacgccuucgccauggagcgcaacgccggcuccggcaucaucaucuccgacacccccguccacgacugcaacaccaccugccagacccccaagggcgccaucaacaccucccuccccuuccagaacauccaccccaucaccaucggcaagugccccaaguacgucaaguccaccaagcuccgccucgccaccggccuccgcaacguccccuccauccagucccgcggccucuucggcgccaucgccggcuucaucgagggcggcuggaccggcauggucgacggcugguacggcuaccaccaccagaacgagcagggcuccggcuacgccgccgaccucaaguccacccagaacgccaucgacgagaucaccaacaaggucaacuccgucaucgagaagaugaacacccaguucaccgccgucggcaaggaguucaaccaccucgagaagcgcaucgagaaccucaacaagaaggucgacgacggcuuccucgacaucuggaccuacaacgccgagcuccucguccuccucgagaacgagcgcacccucgacuaccacgacuccaacgucaagaaccucuacgagaagguccgcucccagcucaagaacaacgccaaggagaucggcaacggcugcuucgaguucuaccacaagugcgacaacaccugcauggaguccgucaagaacggcaccuacgacuaccccaaguacuccgaggaggccaagcucaaccgcgaggagaucgacggcgucaagcucgaguccacccgcaucuaccagauccucgccaucuacuccaccgucgccuccucccucguccucgucgucucccucggcgccaucuccuucuggaugugcuccaacggcucccuccagugccgcaucugcaucuga

SEQ ID NO: 101198 - RNA, 1701 nt, Artificial Sequence; identical to SEQ ID NO: 98705
  derived and/or modified CDS sequence (opt2) from hemagglutinin__InfluenzaA__ADJ40564

SEQ ID NO: 101199 - RNA, 1701 nt, Artificial Sequence; identical to SEQ ID NO: 98705
  derived and/or modified CDS sequence (opt2) from hemagglutinin__InfluenzaA__ADJ40574

SEQ ID NO: 101200 - RNA, 1701 nt, Artificial Sequence; identical to SEQ ID NO: 100125
  derived and/or modified CDS sequence (opt2) from hemagglutinin__InfluenzaA__ADJ40584

SEQ ID NO: 101201 - RNA, 1701 nt, Artificial Sequence; identical to SEQ ID NO: 98705
  derived and/or modified CDS sequence (opt2) from hemagglutinin__InfluenzaA__ADJ40594

SEQ ID NO: 101202 - RNA, 1701 nt, Artificial Sequence; identical to SEQ ID NO: 99274
  derived and/or modified CDS sequence (opt2) from hemagglutinin__InfluenzaA__ADJ40604

SEQ ID NO: 101203 - RNA, 1701 nt, Artificial Sequence; identical to SEQ ID NO: 99274
  derived and/or modified CDS sequence (opt2) from hemagglutinin__InfluenzaA__ADJ40614

SEQ ID NO: 101204 - RNA, 1701 nt, Artificial Sequence; identical to SEQ ID NO: 98705
  derived and/or modified CDS sequence (opt2) from hemagglutinin__InfluenzaA__ADJ40634

SEQ ID NO: 101205 - RNA, 1701 nt, Artificial Sequence; identical to SEQ ID NO: 98705
  derived and/or modified CDS sequence (opt2) from hemagglutinin__InfluenzaA__ADJ40644

SEQ ID NO: 101206 - RNA, 1701 nt, Artificial Sequence; identical to SEQ ID NO: 98705
  derived and/or modified CDS sequence (opt2) from hemagglutinin__InfluenzaA__ADJ40654

SEQ ID NO: 101207 - RNA, 1701 nt, Artificial Sequence; identical to SEQ ID NO: 98705
  derived and/or modified CDS sequence (opt2) from hemagglutinin__InfluenzaA__ADJ40664

SEQ ID NO: 101208 - RNA, 1701 nt, Artificial Sequence; identical to SEQ ID NO: 98705
  derived and/or modified CDS sequence (opt2) from hemagglutinin__InfluenzaA__ADJ40674

SEQ ID NO: 101209 - RNA, 1701 nt, Artificial Sequence
  derived and/or modified CDS sequence (opt2) from hemagglutinin__InfluenzaA__ADJ41816
augaagaccaucaucgcccucuccuacauguucugccucgucuucgcccagaaccuccccggcaacgacaacuccaccgccacccucugccucggccaccacgccguccccaacggcacccucgucaagaccaucaccaacgaccagaucgaggucaccaacgccaccgagcucguccaguccuccuccaccggccgcaucugcgacuccccccaccgcauccucgacggcaagaacugcacccucaucgacgcccuccucggcgacccccacugcgacggcuuccagaacgagaagugggaccucuucgucgagcgcuccaaggccuucuccaacugcuaccccuacgacguccccgacuacgccucccuccgcucccucgucgccuccuccggcacccucgaguucaucaacgagggcuucaacuggaccggcgucacccaguccggcggcuccugcaccugcaagcgcggcuccaacgacuccuucuucucccgccucaacuggcucuacgaguccgaguccaaguaccccguccucaacgucaccaugcccaacaacggcaaguucgacaagcucuacaucuggggcauccaccaccccuccaccgacaaggagcagaccaaccucuacauccgcgccuccggccgcgucaccgucuccaccaagcgcucccagcagaccgucauccccaacaucggcucccgccccuggguccgcggccucuccucccgcaucuccaucuacuggaccaucgucaagcccggcgacauccuccucaucuccuccaccggcaaccucaucgccccccgcggcuacuucaagauccgcaccggcaaguccuccaucaugcgcuccgacgcccccaucggcaccugcuccuccgagugcaucacccccaacggcuccauccccaacgacaagcccuuccagaacgucaacaagaucaccuacggcgccugcccccgcuacgucaagcagaacacccucaagcucgccaccggcaugcgcaacguccccgagaagcagacccgcggcaucuucggcgccaucgccggcuucaucgagaacggcugggagggcauggucgacggcugguacggcuuccgccaccagaacuccgagggcaccggccaggccgccgaccucaaguccacccaggccgccaucgaccagaucaacggcaagcucaaccgcgucaucgagaagaccaacgagaaguuccaccagaucgagaaggaguucuccgaggucgagggccgcauccaggaccucgagaaguacgucgaggacaccaagaucgaccucugguccuacaacgccgagcuccucgucgcccucgagaaccagcacaccaucgaccucaccgacuccgagaugaacaagcucuucgagaagacccgcaagcagcuccgcgagaacgccgaggacaugggcaacggcugcuucaagaucuaccacaagugcgacaacgccugcaucggcuccauccgcaacggcaccuacgaccacgacgucuaccgcgacgaggcccucaacaaccgcuuccagaucaagggcgucgagcucaaguccggcuacaaggacuggauccucuggaucuccuucgccaucuccugcuuccuccucugcgucguccuccucggcuucaucaugugggccugccagaagggcaacauccgcugcaacaucugcaucuga

SEQ ID NO: 101210 - RNA, 1701 nt, Artificial Sequence; identical to SEQ ID NO: 98705
  derived and/or modified CDS sequence (opt2) from hemagglutinin__InfluenzaA__ADJ56640

SEQ ID NO: 101211 - RNA, 1701 nt, Artificial Sequence; identical to SEQ ID NO: 99503
  derived and/or modified CDS sequence (opt2) from hemagglutinin__InfluenzaA__ADJ56650

SEQ ID NO: 101212 - RNA, 1701 nt, Artificial Sequence; identical to SEQ ID NO: 98796
  derived and/or modified CDS sequence (opt2) from hemagglutinin__InfluenzaA__ADJ67983

SEQ ID NO: 101213 - RNA, 1701 nt, Artificial Sequence; identical to SEQ ID NO: 98796
  derived and/or modified CDS sequence (opt2) from hemagglutinin__InfluenzaA__ADJ67984

SEQ ID NO: 101214 - RNA, 1701 nt, Artificial Sequence; identical to SEQ ID NO: 98796
  derived and/or modified CDS sequence (opt2) from hemagglutinin__InfluenzaA__ADJ67985

SEQ ID NO: 101215 - RNA, 1701 nt, Artificial Sequence
  derived and/or modified CDS sequence (opt2) from hemagglutinin__InfluenzaA__ADJ80241
augaaggccauccucgucguccuccucuacaccuucgccaccgccaacgccgacacccucugcaucggcuaccacgccaacaacuccaccgacaccgucgacaccguccucgagaagaacgucaccgucacccacuccgucaaccuccucgaggacaagcacaacggcaagcucugcaagcuccgcggcgucgccccccuccaccucggcaagugcaacaucgccggcuggauccucggcaaccccgagugcgagucccucuccaccgccuccuccugguccuacaucgucgagaccuccuccuccgacaacggcaccugcuaccccggcgacuucaucgacuacgaggagcuccgcgagcagcucuccuccgucuccuccuucgagcgcuucgagaucuuccccaagaccuccuccuggcccaaccacgacuccaacaagggcgucaccgccgccugcccccacgccggcgccaaguccuucuacaagaaccucaucuggcucgucaagaagggcaacuccuaccccaagcucuccaaguccuacaucaacgacaagggcaaggagguccucguccucuggggcauccaccaccccuccaccuccgccgaccagcagucccucuaccagaacgccgacgccuacgucuucgucggcaccucccgcuacuccaagaaguucaagcccgagaucgccauccgccccaagguccgcaaccaggagggccgcaugaacuacuacuggacccucgucgagcccggcgacaagaucaccuucgaggccaccggcaaccucgucgucccccgcuacgccuucgccauggagcgcaacgccggcuccggcaucaucaucuccgacacccccguccacgacugcaacaccaccugccagacccccaagggcgccaucaacaccucccuccccuuccagaacauccaccccaucaccaucggcaagugccccaaguacgucaaguccaccaagcuccgccucgccaccggccuccgcaacguccccuccauccagucccgcggccucuucggcgccaucgccggcuucaucgagggcggcuggaccggcauggucgacggcugguacggcuaccaccaccagaacgagcagggcuccggcuacgccgccgaccucaaguccacccagaacgccaucgacaagaucaccaacaaggucaacuccgucaucgagaagaugaacacccaguucaccgccgucggcaaggaguucaaccaccucgagaagcgcaucgagaaccucaacaagaaggucgacgacggcuuccucgacaucuggaccuacaacgccgagcuccucguccuccucgagaacgagcgcacccucgacuaccacgacuccaacgucaagaaccucuacgagaagguccgcucccagcucaagaacaacgccaaggagaucggcaacggcugcuucgaguucuaccacaagugcgacaacaccugcauggaguccgucaagaacggcaccuacgacuaccccaaguacuccgaggaggccaagcucaaccgcgaggagaucgacggcgucaagcucgaguccacccgcaucuaccagauccucgccaucuacuccaccgucgccuccucccucguccucgucgucucccucggcgccaucuccuucuggaugugcuccaacggcucccuccagugccgcaucugcaucuga

SEQ ID NO: 101216 - RNA, 1701 nt, Artificial Sequence
  derived and/or modified CDS sequence (opt2) from hemagglutinin__InfluenzaA__ADJ80242
augaaggccauccucgucguccuccucuacaccuucgccaccgccaacgccgacacccucugcaucggcuaccacgccaacaacuccaccgacaccgucgacaccguccucgagaagaacgucaccgucacccacuccgucaaccuccucgaggacaagcacaacggcaagcucugcaagcuccgcggcgucgccccccuccaccucggcaagugcaacaucgccggcuggauccucggcaaccccgagugcgagucccucuccaccgccuccuccugguccuacaucgucgagaccuccuccuccgacaacggcaccugcuaccccggcgacuucaucgacuacgaggagcuccgcgagcagcucuccuccgucuccuccuucgagcgcuucgagaucuuccccaagaccuccuccuggcccaaccacgacuccaacaagggcgucaccgccgccugcccccacgccggcgccaaguccuucuacaagaaccucaucuggcucgucaagaagggcaacuccuaccccaagcucuccaaguccuacaucaacgacaagggcaaggagguccucguccucuggggcauccaccaccccuccaccuccgccgaccagcagucccucuaccagaacgccgacgccuacgucuucgucggcaccucccgcuacuccaagaaguucaagcccgagaucgccauccgccccaagguccgcgaccaggagggccgcaugaacuacuacuggacccucgucgagcccggcgacaagaucaccuucgaggccaccggcaaccucgucgucccccgcuacgccuucgccauggagcgcaacgccggcuccggcaucaucaucuccgacacccccguccacgacugcaacaccaccugccagacccccaagggcgccaucaacaccucccuccccuuccagaacauccaccccaucaccaucggcaagugccccaaguacgucaaguccaccaagcuccgccucgccaccggccuccgcaacguccccuccauccagucccgcggccucuucggcgccaucgccggcuucaucgagggcggcuggaccggcauggucgacggcugguacggcuaccaccaccagaacgagcagggcuccggcuacgccgccgaccucaaguccacccagaacgccaucgacgagaucaccaacaaggucaacuccgucaucgagaagaugaacacccaguucaccgccgucggcaaggaguucaaccaccucgagaagcgcaucgagaaccucaacaagaaggucgacgacggcuuccucgacaucuggaccuacaacgccgagcuccucguccuccucgagaacgagcgcacccucgacuaccacgacuccaacgucaagaaccucuacgagaagguccgcucccagcucaagaacaacgccaaggagaucggcaacggcugcuucgaguucuaccacaagugcgacaacaccugcauggaguccgucaagaacggcaccuacgacuaccccaaguacuccgaggaggccaagcucaaccgcgaggagaucgacggcgucaagcucgaguccacccgcaucuaccagauccucgccaucuacuccaccgccgccuccucccucguccucgucgucucccucggcgccaucuccuucuggaugugcuccaacggcucccuccagugccgcaucugcaucuga

SEQ ID NO: 101217 - RNA, 1701 nt, Artificial Sequence; identical to SEQ ID NO: 100257
  derived and/or modified CDS sequence (opt2) from hemagglutinin__InfluenzaA__ADJ80243

SEQ ID NO: 101218 - RNA, 1701 nt, Artificial Sequence; identical to SEQ ID NO: 98705
  derived and/or modified CDS sequence (opt2) from hemagglutinin__InfluenzaA__ADJ80634

SEQ ID NO: 101219 - RNA, 1701 nt, Artificial Sequence; identical to SEQ ID NO: 100707
  derived and/or modified CDS sequence (opt2) from hemagglutinin__InfluenzaA__ADJ80644

SEQ ID NO: 101220 - RNA, 1701 nt, Artificial Sequence; identical to SEQ ID NO: 100707
  derived and/or modified CDS sequence (opt2) from hemagglutinin__InfluenzaA__ADJ80654

SEQ ID NO: 101221 - RNA, 1701 nt, Artificial Sequence; identical to SEQ ID NO: 99869
  derived and/or modified CDS sequence (opt2) from hemagglutinin__InfluenzaA__ADJ80674

SEQ ID NO: 101222 - RNA, 1701 nt, Artificial Sequence; identical to SEQ ID NO: 99869
  derived and/or modified CDS sequence (opt2) from hemagglutinin__InfluenzaA__ADJ80684

SEQ ID NO: 101223 - RNA, 1701 nt, Artificial Sequence
  derived and/or modified CDS sequence (opt2) from hemagglutinin__InfluenzaA__ADJ80694
augaaggccauccucgucguccuccucuacaccuucgccaccgccaacgccgacacccucugcaucggcuaccacgccaacaacuccaccgacaccgucgacaccguccucgagaagaacgucaccgucacccacuccgucaacauccucgaggacaaccacaacggcaagcucugcaagcuccgcggcgucgccccccuccaccucggcaagugcaacaucgccggcuggauccucggcaaccccgagugcgagucccucuccaccgccuccuccugguccuacaucgucgagaccuccuccuccgacaacggcaccugcuaccccggcgacuucaucgacuacgaggagcuccgcgagcagcucuccuccgucuccuccuucgagcgcuucgagaucuuccccaagaccuccuccuggcccaaccacgacuccaacaagggcgucaccgccgccugcccccacgccggcgccaaguccuucuacaagaaccucaucuggcucgucaagaagggcaacuccuaccccaagcucuccaaguccuacaucaacgacaagggcaaggagguccucguccucuggggcauccaccaccccuccaccuccgccgaccagcagucccucuaccagaacgccgacgccuacgucuucgucggcuccucccgcuacuccaagaaguucaagcccgagaucgccauccgccccaagguccgcgaccaggagggccgcaugaacuacuacuggacccucgucgagcccggcgacaagaucaccuucgaggccaccggcaaccucgucgucccccgcuacgccuucgccauggagcgcaacgccggcuccggcaucaucaucuccgacacccccguccacgacugcaacaccaccugccagacccccaagggcgccaucaacaccucccuccccuuccagaacauccaccccaucaccaucggcaagugccccaaguacgucaaguccaccaagcuccgccucgccaccggccuccgcaacguccccuccauccagucccgcggccucuucggcgccaucgccggcuucaucgagggcggcuggaccggcauggucgacggcugguacggcuaccaccaccagaacgagcagggcuccggcuacgccgccgaccucaaguccacccagaacgccaucgacgagaucaccaacaaggucaacuccgucaucgagaagaugaacacccaguucaccgccgucggcaaggaguucaaccaccucgagaagcgcaucgagaaccucaacaagaaggucgacgacggcuuccucgacaucuggaccuacaacgccgagcuccucguccuccucgagaacgagcgcacccucgacuaccacgacuccaacgucaagaaccucuacgagaagguccgcucccagcucaagaacaacgccaaggaggucggcaacggcugcuucgaguucuaccacaagugcgacaacaccugcauggaguccgucaagaacggcaccuacgacuaccccaaguacuccgaggaggccaagcucaaccgcgaggagaucgacggcgucaagcucgaguccacccgcaucuaccagauccucgccaucuacuccaccgccgccuccucccucguccucgucgucucccucggcgccaucuccuucuggaugugcuccaacggcucccuccagugccgcaucugcaucuga

SEQ ID NO: 101224 - RNA, 1701 nt, Artificial Sequence; identical to SEQ ID NO: 99869
  derived and/or modified CDS sequence (opt2) from hemagglutinin__InfluenzaA__ADJ80704

SEQ ID NO: 101225 - RNA, 1701 nt, Artificial Sequence
  derived and/or modified CDS sequence (opt2) from hemagglutinin__InfluenzaA__ADJ80714
augaaggccauccucgucguccuccucuacaccuucgccaccgccaacgccgacacccucugcaucggcuaccacgccaacaacuccaccgacaccgucgacaccguccucgagaagaacgucaccgucacccacuccgucaaccuccucgaggacaagcacaacggcaagcucugcaagcuccgcggcgccgccccccuccaccucggcaagugcaacaucgccggcuggauccucggcaaccccgagugcgagucccucuccaccgccuccuccugguccuacaucgucgagaccuccuccuccgacaacggcaccugcuaccccggcgacuucaucgacuacgaggagcuccgcgagcagcucuccuccgucuccuccuucgagcgcuucgagaucuuccccaagaccuccuccuggcccaaccacgacuccaacaagggcgucaccgccgccugcccccacgccggcgccaaguccuucuacaagaaccucaucuggcucgucaagaagggcaacuccuaccccaagcucuccaaguccuacaucaacgacaagggcaaggagguccucguccucuggggcauccaccaccccuccaccuccgccgaccagcagucccucuaccagaacgccgacgccuacgucuucgucggcaccucccgcuacuccaagaaguucaagcccgagaucgccauccgccccaagguccgcgaccaggagggccgcaugaacuacuacuggacccucgucgagcccggcgacaagaucaccuucgaggccaccggcaaccucgucgucccccgcuacgccuucgccauggagcgcaacgccggcuccggcaucaucaucuccgacacccccguccacgacugcaacaccaccugccagacccccaagggcgccaucaacaccucccuccccuuccagaacauccaccccaucaccaucggcaagugccccaaguacgucaaguccaccaagcuccgccucgccaccggccuccgcaacguccccuccauccagucccgcggccucuucggcgccaucgccggcuucaucgagggcggcuggaccggcauggucgacggcugguacggcuaccaccaccagaacgagcagggcuccggcuacgccgccgaccucaaguccacccagaacgccaucgacaagaucaccaacaaggucaacuccgucaucgagaagaugaacacccaguucaccgccgucggcaaggaguucaaccaccucgagaagcgcaucgagaaccucaacaagaaggucgacgacggcuuccucgacaucuggaccuacaacgccgagcuccucguccuccucgagaacgagcgcacccucgacuaccacgacuccaacgucaagaaccucuacgagaagguccgcucccagcucaagaacaacgccaaggagaucggcaacggcugcuucgaguucuaccacaagugcgacaacaccugcauggaguccgucaagaacggcaccuacgacuaccccaaguacuccgaggaggccaagcucaaccgcgaggagaucgacggcgucaagcucgaguccacccgcaucuaccagauccucgccaucuacuccaccgucgccuccucccucguccucgucgucucccucggcgccaucuccuucuggaugugcuccaacggcucccuccagugccgcaucugcaucuga

SEQ ID NO: 101226 - RNA, 1701 nt, Artificial Sequence; identical to SEQ ID NO: 98705
  derived and/or modified CDS sequence (opt2) from hemagglutinin__InfluenzaA__ADJ80724

SEQ ID NO: 101227 - RNA, 1701 nt, Artificial Sequence; identical to SEQ ID NO: 99869
  derived and/or modified CDS sequence (opt2) from hemagglutinin__InfluenzaA__ADJ80734

SEQ ID NO: 101228 - RNA, 1701 nt, Artificial Sequence; identical to SEQ ID NO: 99869
  derived and/or modified CDS sequence (opt2) from hemagglutinin__InfluenzaA__ADJ80744

SEQ ID NO: 101229 - RNA, 1701 nt, Artificial Sequence; identical to SEQ ID NO: 99869
  derived and/or modified CDS sequence (opt2) from hemagglutinin__InfluenzaA__ADJ80754

SEQ ID NO: 101230 - RNA, 1701 nt, Artificial Sequence
  derived and/or modified CDS sequence (opt2) from hemagglutinin__InfluenzaA__ADJ80774
augaaggccauccucgucguccuccucuacaccuucgccaccgccaacgccgacacccucugcaucggcuaccacgccaacaacuccaccgacaccgucgacaccguccucgagaagaacgucaccgucacccacuccgucaacauccucgaggacaagcacaacggcaagcucugcaagcuccgcggcgucgccccccuccaccucggcaagugcaacaucgccggcuggauccucggcaaccccgagugcgagucccucuccaccgccaacuccugguccuacaucgucgagaccuccuccuccgacaacggcaccugcuaccccggcgacuucaucgacuacgaggagcuccgcgagcagcucuccuccgucuccuccuucgagcgcuucgagaucuuccccaagaccuccuccuggcccaaccacgacuccaacaagggcgucaccgccgccugcccccacgccggcgccaaguccuucuacaagaaccucaucuggcucgucaagaagggcaacuccuaccccaagcucuccaaguccuacaucaacgacaagggcaaggagguccucguccucuggggcauccaccaccccuccaccuccgccgaccagcagucccucuaccagaacgccgacgccuacgucuucgucggcuccucccgcuacuccaagaaguucaagcccgagaucgccauccgccccaagguccgcgaccaggagggccgcaugaacuacuacuggacccucgucgagcccggcgacaagaucaccuucgaggccaccggcaaccucgucgucccccgcuacgccuucgccauggagcgcaacgccggcuccggcaucaucaucuccgacacccccguccacgacugcaacaccaccugccagacccccaagggcgccaucaacaccucccuccccuuccagaacauccaccccaucaccaucggcaagugccccaaguacgucaaguccaccaagcuccgccucgccaccggccuccgcaacguccccuccauccagucccgcggccucuucggcgccaucgccggcuucaucgagggcggcuggaccggcauggucgacggcugguacggcuaccaccaccagaacgagcagggcuccggcuacgccgccgaccucaaguccacccagaacgccaucgacgagaucaccaacaaggucaacuccgucaucgagaagaugaacacccaguucaccgccgucggcaaggaguucaaccaccucgagaagcgcaucgagaaccucaacaagaaggucgacgacggcuuccucgacaucuggaccuacaacgccgagcuccucguccuccucgagaacgagcgcacccucgacuaccacgacuccaacgucaagaaccucuacgagaagguccgcucccagcucaagaacaacgccaaggaggucggcaacggcugcuucgaguucuaccacaagugcgacaacaccugcauggaguccgucaagaacggcaccuacgacuaccccaaguacuccgaggaggccaagcucaaccgcgaggagaucgacggcgucaagcucgaguccacccgcaucuaccagauccucgccaucuacuccaccgccgccuccucccucguccucgucgucucccucggcgccaucuccuucuggaugugcuccaacggcucccuccagugccgcaucugcaucuga

SEQ ID NO: 101231 - RNA, 1701 nt, Artificial Sequence
  derived and/or modified CDS sequence (opt2) from hemagglutinin__InfluenzaA__ADJ80784
augaaggccauccucgucguccuccucuacaccuucgccaccgccaacgccgacacccucugcaucggcuaccacgccaacaacuccaccgacaccgucgacaccguccucgagaagaacgucaccgucacccacuccgucaaccuccucgaggacaagcacaacggcaagcucugcaagcuccgcggcgucgccccccuccaccucggcaagugcaacaucgccggcuggauccucggcaaccccgagugcgagucccucuccaccgccuccuccugguccuacaucgucgagaccuccuccuccgacaacggcaccugcuaccccggcgacuucaucgacuacgaggagcuccgcgagcagcucuccuccgucuccuccuucgagcgcuucgagaucuuccccaagaccuccuccuggcccaaccacgacuccaacaagggcgucaccgccgccugcccccacgccggcgccaaguccuucuacaagaaccucaucuggcucgucaagaagggcaacuccuaccccaagcucuccaaguccuacaucaacgacaagggcaaggagguccucguccucuggggcauccaccaccccuccaccuccgccgaccagcagucccucuaccagaacgccgacgccuacgucuucgucggcaccucccgcuacuccaagaaguucaagcccgagaucgccauccgccccaagguccgcgaccaggagggccgcaugaacuacuacuggacccucgucgagcccggcgacaagaucaccuucgaggccaccggcaaccucgucgucccccgcuacgccuucgccauggagcgcaacgccggcuccggcaucaucaucuccgacacccccguccacgacugcaacaccaccugccagacccccaagggcgccaucaacaccucccuccccuuccacaacauccaccccaucaccaucggcaagugccccaaguacgucaaguccaccaagcuccgccucgccaccggccuccgcaacguccccuccauccagucccgcggccucuucggcgccaucgccggcuucaucgagggcggcuggaccggcauggucgacggcugguacggcuaccaccaccagaacgagcagggcuccggcuacgccgccgaccucaaguccacccagaacgccaucgacaagaucaccaacaaggucaacuccgucaucgagaagaugaacacccaguucaccgccgucggcaaggaguucaaccaccucgagaagcgcaucgagaaccucaacaagaaggucgacgacggcuuccucgacaucuggaccuacaacgccgagcuccucguccuccucgagaacgagcgcacccucgacuaccacgacuccaacgucaagaaccucuacgagaagguccgcucccagcucaagaacaacgccaaggagaucggcaacggcugcuucgaguucuaccacaagugcgacaacaccugcauggaguccgucaagaacggcaccuacgacuaccccaaguacuccgaggaggccaagcucaaccgcgaggagaucgacggcgucaagcucgaguccacccgcaucuaccagauccucgccaucuacuccaccgucgccuccucccucguccucgucgucucccucggcgccaucuccuucuggaugugcuccaacggcucccuccagugccgcaucugcaucuga

SEQ ID NO: 101232 - RNA, 1701 nt, Artificial Sequence; identical to SEQ ID NO: 99869
  derived and/or modified CDS sequence (opt2) from hemagglutinin__InfluenzaA__ADJ80794

SEQ ID NO: 101233 - RNA, 1701 nt, Artificial Sequence; identical to SEQ ID NO: 100707
  derived and/or modified CDS sequence (opt2) from hemagglutinin__InfluenzaA__ADJ80804

SEQ ID NO: 101234 - RNA, 1701 nt, Artificial Sequence
  derived and/or modified CDS sequence (opt2) from hemagglutinin__InfluenzaA__ADJ80814
augaaggccauccucgucguccuccucuacaccuucgccaccgccaacgccgacacccucugcaucggcuaccacgccaacaacuccaccgacaccgucgacaccguccucgagaagaacgucaccgucacccacuccgucaaccuccucgaggacaagcacaacggcaagcucugcaagcuccgcggcgucgccccccuccaccucggcaagugcaacaucgccggcuggauccucggcaaccccgagugcgagucccucuccaccgccuccuccugguccuacaucgucgagaccuccuccuccgacaacggcaccugcuaccccggcgacuucaucgacuacgaggagcuccgcgagcagcucuccuccgucuccuccuucgagcgcuucgagaucuuccccaagaccuccuccuggcccaaccacgacuccaacaagggcgucaccgccgccugcccccgcgccggcgccaaguccuucuacaagaaccucaucuggcucgucaagaagggcaacuccuaccccaagcucuccaaguccuacaucaacgacaagggcaaggagguccucguccucuggggcauccaccaccccuccaccuccgccgaccagcagucccucuaccagaacgccgacgccuacgucuucgucggcaccucccgcuacuccaagaaguucaagcccgagaucgccauccgccccaagguccgcgaccaggagggccgcaugaacuacuacuggacccucgucgagcccggcgacaagaucaccuucgaggccaccggcaaccucgucgucccccgcuacgccuucgccaucgagcgcaacgccggcuccggcaucaucaucuccgacacccccguccacgacugcaacaccaccugccagacccccaagggcgccaucaacaccucccuccccuuccagaacauccaccccaucaccaucggcaagugccccaaguacgucaaguccaccaagcuccgccucgccaccggccuccgcaacguccccuccauccagucccgcggccucuucggcgccaucgccggcuucaucgagggcggcuggaccggcauggucgacggcugguacggcuaccaccaccagaacgagcagggcuccggcuacgccgccgaccucaaguccacccagaacgccaucgacaagaucaccaacaaggucaacuccgucaucgagaagaugaacacccaguucaccgccgucggcaaggaguucaaccaccucgagaagcgcaucgagaaccucaacaagaaggucgacgacggcuuccucgacaucuggaccuacaacgccgagcuccucguccuccucgagaacgagcgcacccucgacuaccacgacuccaacgucaagaaccucuacgagaagguccgcucccagcucaagaacaacgccaaggagaucggcaacggcugcuucgaguucuaccacaagugcgacaacaccugcauggaguccgucaagaacggcaccuacgacuaccccaaguacuccgaggaggccaagcucaaccgcgaggagaucgacggcgucaagcucgaguccacccgcaucuaccagauccucgccaucuacuccaccgucgccuccucccucguccucgucgucucccucggcgccaucuccuucuggaugugcuccaacggcucccuccagugccgcaucugcaucuga

SEQ ID NO: 101235 - RNA, 1701 nt, Artificial Sequence
  derived and/or modified CDS sequence (opt2) from hemagglutinin__InfluenzaA__ADJ80834
augaaggccauccucgucguccuccucuacaccuucgccaccgccaacgccgacacccucugcaucggcuaccacgccaacaacuccaccgacaccgucgacaccguccucgagaagaacgucaccgucacccacuccgucaaccuccucgaggacaagcacaacggcaagcucugcaagcuccgcggcgucgccccccuccaccucggcaagugcaacaucgccggcuggauccucggcaaccccgagugcgagucccucuccaccgccuccuccugguccuacaucgucgagaccuccuccuccgacaacggcaccugcuaccccggcgacuucaucgacuacgaggagcuccgcgagcagcucuccuccgucuccuccuucgagcgcuucgagaucuuccccaagaccuccuccuggcccaaccacgacuccaacaagggcgucaccgccgccugcccccacgccggcgccaaguccuucuacaagaaccucaucuggcucgucaagaagggcaacuccuaccccaagcucuccaaguccuacaucaacgacaagggcaaggagguccucguccucuggggcauccaccaccccuccaccuccaccgaccagcagucccucuaccagaacgccgacgccuacgucuucgucggcaccucccgcuacuccaagaaguucaagcccgagaucgccauccgccccaagguccgcgaccaggagggccgcaugaacuacuacuggacccucgucgagcccggcgacaagaucaccuucgaggccaccggcaaccucgucgucccccgcuacgccuucgccauggagcgcaacuccggcuccggcaucaucaucuccgacacccccguccacuacugcaacaccaccugccagacccccaagggcgccaucaacaccucccuccccuuccagaacauccaccccaucaccaucggcaagugccccaaguacgucaaguccaccaagcuccgccucgccaccggccuccgcaacguccccuccauccagucccgcggccucuucggcgccaucgccggcuucaucgagggcggcuggaccggcauggucgacggcugguacggcuaccaccaccagaacgagcagggcuccggcuacgccgccgaccucaaguccacccagaacgccaucgacgagaucaccaacaaggucaacuccgucaucgagaagaugaacacccaguucaccgccgucggcaaggaguucaaccaccucgagaagcgcaucgagaaccucaacaagaaggucgacgacggcuuccucgacaucuggaccuacaacgccgagcuccucguccuccucgagaacgagcgcacccucgacuaccacgacuccaacgucaagaaccucuacgagaagguccgcucccagcucaagaacaacgccaaggagaucggcaacggcugcuucgaguucuaccacaagugcgacaacaccugcauggaguccgucaagaacggcaccuacgacuaccccaaguacuccgaggaggccaagcucaaccgcgaggagaucgacggcgucaagcucgaguccacccgcaucuaccagauccucgccaucuacuccaccgucgccuccucccucguccucgucgucucccucggcgccaucuccuucuggaugugcuccaacggcucccuccagugccgcaucugcaucuga

SEQ ID NO: 101236 - RNA, 1701 nt, Artificial Sequence; identical to SEQ ID NO: 100907
  derived and/or modified CDS sequence (opt2) from hemagglutinin__InfluenzaA__ADJ80848

SEQ ID NO: 101237 - RNA, 1701 nt, Artificial Sequence
  derived and/or modified CDS sequence (opt2) from hemagglutinin__InfluenzaA__ADJ80858
augaagaccauccucgucguccuccucuacaccuucgccaccgccaacgccgacacccucugcaucggcuaccacgccaacaacuccaccgacaccgucgacaccguccucgagaagaacgucaccgucacccacuccgucaaccuccucgaggacaagcacaacggcaagcucugcaagcuccgcggcgucgccccccuccaccucggcaagugcaacaucgccggcuggauccucggcaaccccgagugcgagucccucuccaccgccuccuccugguccuacaucgucgagaccuccuccuccgacaacggcaccugcuaccccggcgacuucaucgacuacgaggagcuccgcgagcagcucuccuccgucuccuccuucgagcgcuucgagaucuuccccaagaccuccuccuggcccaaccacgacuccaacaagggcgucaccgccgccugcccccacgccggcgccaaguccuucuacaagaaccucaucuggcucgucaagaagggcaacuccuaccccaagcucuccaaguccuacaucaacgacaagggcaaggagguccucguccucuggggcauccaccaccccuccaccuccgccgaccagcagucccucuaccagaacgccgacgccuacgucuucgucggcaccucccgcuacuccaagaaguucaagcccgagaucgccauccgccccaagguccgcgaccaggagggccgcaugaacuacuacuggacccucgucgagcccggcgacaagaucaccuucgaggccaccggcaaccucgucgucccccgcuacgccuucgccauggagcgcaacgccggcuccggcaucaucaucuccgacacccccguccacgacugcaacaccaccugccagacccccaagggcgccaucaacaccucccuccccuuccagaacauccaccccaucaccaucggcaagugccccaaguacgucaaguccaccaagcuccgccucgccaccggccuccgcaacguccccuccauccagucccgcggccucuucggcgccaucgccggcuucaucgagggcggcuggaccggcauggucgacggcugguacggcuaccaccaccagaacgagcagggcuccggcuacgccgccgaccucaaguccacccagaacgccaucgacaagaucaccaacaaggucaacuccgucaucgagaagaugaacacccaguucaccgccgucggcaaggaguucaaccaccucgagaagcgcaucgagaaccucaacaagaaggucgacgacggcuuccucgacaucuggaccuacaacgccgagcuccucguccuccucgagaacgagcgcacccucgacuaccacgacuccaacgucaagaaccucuacgagaagguccgcucccagcucaagaacaacgccaaggagaucggcaacggcugcuucgaguucuaccacaagugcgacaacaccugcauggaguccgucaagaacggcaccuacgacuaccccaaguacuccgaggaggccaagcucaaccgcgaggagaucgacggcgucaagcucgaguccacccgcaucuaccagauccucgccaucuacuccaccgucgccuccucccucguccucgucgucucccucggcgccaucuccuucuggaugugcuccaacggcucccuccagugccgcaucugcaucuga

SEQ ID NO: 101238 - RNA, 1701 nt, Artificial Sequence
  derived and/or modified CDS sequence (opt2) from hemagglutinin__InfluenzaA__ADJ80868
augaaggccauccucgucguccuccucuacaccuucgccaccgccaacgccgacacccucugcaucggcuaccacgccaacaacuccaccgacaccgucgacaccguccucgagaagaacgucaccgucacccacuccgucaaccuccucgaggacaagcacaacggcaagcucugcaagcuccgcggcgucgccccccuccaccucggcaagugcaacaucgccggcuggauccucggcaaccccgagugcgagucccucuccaccgccuccuccugguccuacaucgucgagaccuccuccuccgacaacggcaccugcuaccccggcgacuucaucgacuacgaggagcuccgcgagcagcucuccuccgucuccuccuucgagcgcuucgagaucuuccccaagaccuccuccuggcccaaccacgacuccaacaagggcgucaccgccgccugccccaacgccggcgccaaguccuucuacaagaaccucaucuggcucgucaagaagggcaacuccuaccccaagcucuccaaguccuacaucaacgacaagggcaaggagguccucguccucuggggcauccaccaccccuccaccuccgccgaccagcagucccucuaccagaacgccgacgccuacgucuucgucggcaccucccgcuacuccaagaaguucaagcccgagaucgccauccgccccaagguccgcgaccaggagggccgcaugaacuacuacuggacccucgucgagcccggcggcaagaucaccuucgaggccaccggcaaccucgucgucccccgcuacgccuucgccauggagcgcaacgccggcuccggcaucaucaucuccgacacccccguccacgacugcaacaccaccugccagacccccaagggcgccaucaacaccucccuccccuuccagaacauccaccccaucaccaucggcaagugccccaaguacgucaaguccaccaagcuccgccucgccaccggccuccgcaacguccccuccauccagucccgcggccucuucggcgccaucgccggcuucaucgagggcggcuggaccggcauggucgacggcugguacggcuaccaccaccagaacgagcagggcuccggcuacgccgccgaccucaaguccacccagaacgccaucgacaagaucaccaacaaggucaacuccgucaucgagaagaugaacacccaguucaccgccgucggcaaggaguucaaccaccucgagaagcgcaucgagaaccucaacaagaaggucgacgacggcuuccucgacaucuggaccuacaacgccgagcuccucguccuccucgagaacgagcgcacccucgacuaccacgacuccaacgucaagaaccucuacgagaagguccgcucccagcucaagaacaacgccaaggagaucggcaacggcugcuucgaguucuaccacaagugcgacaacaccugcauggaguccgucaagaacggcaccuacgacuaccccaaguacuccgaggaggccaagcucaaccgcgaggagaucgacggcgucaagcucgaguccacccgcaucuaccagauccucgccaucuacuccaccgucgccuccucccucguccucgucgucucccucggcgccaucuccuucuggaugugcuccaacggcucccuccagugccgcaucugcaucuga

SEQ ID NO: 101239 - RNA, 1701 nt, Artificial Sequence; identical to SEQ ID NO: 99869
  derived and/or modified CDS sequence (opt2) from hemagglutinin__InfluenzaA__ADJ80883

SEQ ID NO: 101240 - RNA, 1701 nt, Artificial Sequence; identical to SEQ ID NO: 99869
  derived and/or modified CDS sequence (opt2) from hemagglutinin__InfluenzaA__ADJ80893

SEQ ID NO: 101241 - RNA, 1701 nt, Artificial Sequence; identical to SEQ ID NO: 99869
  derived and/or modified CDS sequence (opt2) from hemagglutinin__InfluenzaA__ADJ80910

SEQ ID NO: 101242 - RNA, 1701 nt, Artificial Sequence; identical to SEQ ID NO: 98705
  derived and/or modified CDS sequence (opt2) from hemagglutinin__InfluenzaA__ADJ80927

SEQ ID NO: 101243 - RNA, 1701 nt, Artificial Sequence
  derived and/or modified CDS sequence (opt2) from hemagglutinin__InfluenzaA__ADJ80937
augaaggccauccucgucguccuccucuacaccuucgccaccgccaacgccgacacccucugcaucggcuaccacgccaacaacuccaccgacaccgucgacaccguccucgagaagaacgucaccgucacccacuccgucaaccuccucgaggacaagcacaacggcaagcucugcaagcuccgcggcgucgccccccuccaccucggcaagugcaacaucgccggcuggauccucggcaaccccgagugcgagucccucuccaccgccuccuccugguccuacaucgucgagaccuccuccuccgacaacggcaccugcuaccccggcgacuucaucgacuacgaggagcuccgcgagcagcucuccuccgucuccuccuucgagcgcuucgagaucuuccccaagaccuccuccuggcccaaccacgacuccaacaagggcgucaccgccgccugcccccacgccggcgccaaguccuucuacaagaaccucaucuggcucgucaagaagggcaacuccuaccccaagcucuccaaguccuacaucaacgacaagggcaaggagguccucguccucuggggcauccaccaccccuccaccuccgccgaccagcagucccucuaccagaacgccgacgccuacgccuucgucggcaccucccgcuacuccaagaaguucaagcccgagaucgccauccgccccaagguccgcgaccaggagggccgcaugaacuacuacuggacccucgucgagcccggcgacaagaucaccuucgaggccaccggcaaccucgucgucccccgcuacgccuucgccauggagcgcaacgccggcuccggcaucaucaucuccgacacccccguccacaacugcaacaccaccugccagacccccaagggcgccaucaacaccucccuccccuuccagaacauccaccccaucaccaucggcaagugccccaaguacgucaaguccaccaagcuccgccucgccaccggccuccgcaacguccccuccauccagucccgcggccucuucggcgccaucgccggcuucaucgagggcggcuggaccggcauggucgacggcugguacggcuaccaccaccagaacgagcagggcuccggcuacgccgccgaccucaaguccacccagaacgccaucgacgagaucaccaacaaggucaacuccgucaucgagaagaugaacacccaguucaccgccgucggcaaggaguucaaccaccucgagaagcgcaucgagaaccucaacaagaaggucgacgacggcuuccucgacaucuggaccuacaacgccgagcuccucguccuccucgagaacgagcgcacccucgacuaccacgacuccaacgucaagucccucuacgagaagguccgcucccagcucaagaacaacgccaaggagaucggcaacggcugcuucgaguucuaccacaagugcgacaacaccugcauggaguccgucaagaacggcaccuacgacuaccccaaguacuccgaggaggccaagcucaaccgcgaggagaucgacggcgucaagcucgaguccacccgcaucuaccagauccucgccaucuacuccaccgucgccuccucccucguccucgucgucucccucggcgccaucuccuucuggaugugcuccaacggcucccuccagugccgcaucugcaucuga

SEQ ID NO: 101244 - RNA, 1701 nt, Artificial Sequence; identical to SEQ ID NO: 99869
  derived and/or modified CDS sequence (opt2) from hemagglutinin__InfluenzaA__ADJ80947

SEQ ID NO: 101245 - RNA, 1701 nt, Artificial Sequence; identical to SEQ ID NO: 99869
  derived and/or modified CDS sequence (opt2) from hemagglutinin__InfluenzaA__ADJ80967

SEQ ID NO: 101246 - RNA, 1701 nt, Artificial Sequence; identical to SEQ ID NO: 99869
  derived and/or modified CDS sequence (opt2) from hemagglutinin__InfluenzaA__ADJ80977

SEQ ID NO: 101247 - RNA, 1701 nt, Artificial Sequence
  derived and/or modified CDS sequence (opt2) from hemagglutinin__InfluenzaA__ADJ80993
augaaggccauccucgucguccuccucuacaccuucgccaccgccaacgccgacacccucugcaucggcuaccacgccaacaacuccaccgacaccgucgacaccguccucgagaagaacgucaccgucacccacuccgucaaccuccucgaggacaagcacaacggcaagcucugcaagcuccgcggcgucgccccccuccaccucggcaagugcaacaucgccggcuggauccucggcaaccccgagugcgagucccucuccaccgccuccuccugguccuacaucgucgagaccuccuccuccgacaacggcaccugcuaccccggcgacuucaucgacuacgaggagcuccgcgagcagcucuccuccgucuccuccuucgagcgcuucgagaucuuccccaagaccuccuccuggcccaaccacgacuccaacaagggcgucaccgccgccugccccaacgccggcgccaaguccuucuacaagaaccucaucuggcucgucaagaagggcaacuccuaccccaagcucuccaaguccuacaucaacgacaagggcaaggagguccucguccucuggggcauccaccaccccuccaccuccgccgaccagcagucccucuaccagaacgccgacgccuacgucuucgucggcaccucccgcuacuccaagaaguucaagcccgagaucgccauccgccccaagguccgcgaccaggagggccgcaugaacuacuacuggacccucgucgagcccggcgacaagaucaccuucgaggccaccggcaaccucgucgucccccgcuacgccuucgccauggagcgcaacgccggcuccggcaucaucaucuccgacacccccguccacgacugcaacaccaccugccagacccccaagggcgccaucaacaccucccuccccuuccagaacauccaccccaucaccaucggcaagugccccaaguacgucaaguccaccaagcuccgccucgccaccggccuccgcaacguccccuccauccagucccgcggccucuucggcgccaucgccggcuucaucgagggcggcuggaccggcauggucgacggcugguacggcuaccaccaccagaacgagcagggcuccggcuacgccgccgaccucaaguccacccagaacgccaucgacaagaucaccaacaaggucaacuccgucaucgagaagaugaacacccaguucaccgccgucggcaaggaguucaaccaccucgagaagcgcaucgagaaccucaacaagaaggucgacgacggcuuccucgacaucuggaccuacaacgccgagcuccucguccuccucgagaacgagcgcacccucgacuaccacgacuccaacgucaagaaccucuacgagaagguccgcucccagcucaagaacaacgccaaggagaucggcaacggcugcuucgaguucuaccacaagugcgacaacaccugcauggaguccgucaagaacggcaccuacgacuaccccaaguacuccgaggaggccaagcucaaccgcgaggagaucgacggcgucaagcucgaguccacccgcaucuaccagauccucgccaucuacuccaccgucgccuccucccucguccucgucgucucccucggcgccaucuccuucuggaugugcuccaacggcucccuccagugccgcaucugcaucuga

SEQ ID NO: 101248 - RNA, 1701 nt, Artificial Sequence
  derived and/or modified CDS sequence (opt2) from hemagglutinin__InfluenzaA__ADJ81003
augaaggccauccucgucguccuccucuacaccuucgccaccgccaacgccgacacccucugcaucggcuaccacgccaacaacuccaccgacaccgucgacaccguccucgagaagaacgucaccgucacccacuccgucaaccuccucgaggacaagcacaacggcaagcucugcaagcuccgcggcgucgccccccuccaccucggcaagugcaacaucgccggcuggauccucggcaaccccgagugcgagucccucuccaccgccuccuccugguccuacaucgucgagaccuccuccuccgacaacggcaccugcuaccccggcgacuucaucgacuacgaggagcuccgcgagcagcucuccuccgucuccuccuucgagcgcuucgagaucuuccccaagaccuccuccuggcccaaccacgacuccaacaagggcgucaccgccgccugcccccacgccggcgccaaguccuucuacaagaaccucaucuggcucgucaagaagggcaacuccuaccccaagcucuccaaguccuacaucaacgacaagggcaaggagguccucguccucuggggcauccaccaccccuccaccuccgccgaccagcagucccucuaccagaacgccgacgccuacgucuucgucggcaccucccgcuacuccaagaaguucaagcccgagaucgccauccgccccaagguccgcgaccaggagggccgcaugaacuacuacuggacccucgucgagcccggcgacaagaucaccuucgaggccaccggcaaccucgucgucccccgcuacgccuucgccauggagcgcaacgccggcuccggcaucaucaucuccgacacccccguccacgacugcaacaccaccugccagacccccaagggcgccaucaacaccucccuccccuuccagaacauccaccccaucaccaucggcaagugccccaaguacgucaaguccaccaagcuccgccucgccaccggccuccgcaacguccccuccauccagucccgcggccucuucggcgccaucgccggcuucaucgagggcggcuggaccggcauggucgacggcugguacggcuaccaccaccagaacgagcagggcuccggcuacgccgccgaccucaaguccacccagaacgccaucgacaagaucaccaacaaggucaacuccgucaucgagaagaugaacacccaguucaccgccgucggcaaggaguucaaccaccucgagaagcgcaucgagaaccucaacaagaaggucgacgacggcuuccucgacaucuggaccuacaacgccgagcuccucguccuccucgagaacgagcgcacccucgacuaccacgacuccaacgucaagaaccucuacgagaagguccgcucccagcucaagaacaacgccaaggagaucggcaacggcugcuucgaguucuaccacaagugcgacaacaccugcauggaguccgucaagaacggcaccuacgacuaccccaaguacuccgaggaggccaagcucaaccgcgagaagaucgacggcgucaagcucgaguccacccgcaucuaccagauccucgccaucuacuccaccgucgccuccucccucguccucgucgucucccucggcgccaucuccuucuggaugugcuccaacggcucccuccagugccgcaucugcaucuga

SEQ ID NO: 101249 - RNA, 1701 nt, Artificial Sequence; identical to SEQ ID NO: 100907
  derived and/or modified CDS sequence (opt2) from hemagglutinin__InfluenzaA__ADJ81013

SEQ ID NO: 101250 - RNA, 1701 nt, Artificial Sequence
  derived and/or modified CDS sequence (opt2) from hemagglutinin__InfluenzaA__ADJ81023
augaaggccauccucgucguccuccucuacaccuucgccaccgccaacgccgacacccucugcaucggcuaccacgccaacaacuccaccgacaccgucgacaccguccucgagaagaacgucaccgucacccacuccgucaaccuccucgaggacaagcacaacggcaagcucugcaagcuccgcggcgucgccccccuccaccucggcaagugcaacaucgccggcuggauccucggcaaccccgagugcgagucccucuccaccgccuccuccugguccuacaucgucgagaccuccuccuccgacaacggcaccugcuaccccggcgacuucaucgacuacgaggagcuccgcgagcagcucuccuccgucuccuccuucgagcgcuucgagauguuccccaagaccuccuccuggcccaaccacgacuccaacaagggcgucaccgccgccugcccccacgccggcgccaaguccuucuacaagaaccucaucuggcucgucaagaagggcaacuccuaccccaagcucaacaaguccuacaucaacgacaagggcaaggagguccucguccucuggggcauccaccaccccuccaccuccgccgaccagcagucccucuaccagaacgccgacgccuacgucuucgucggcaccucccgcuacuccaagaaguucaagcccgagaucgccauccgccccaagguccgcgaccaggagggccgcaugaacuacuacuggacccucgucgagcccggcgacaagaucaccuucgaggccaccggcaaccucgucgucccccgcuacgccuucgccauggagcgcaacgccggcuccggcaucaucaucuccgacacccccguccacgacugcaacaccaccugccagacccccaagggcgccaucaacaccucccuccccuuccagaacauccaccccaucaccaucggcaagugccccaaguacgucaaguccaccaagcuccgccucgccaccggccuccgcaacguccccuccauccagucccgcggccucuucggcgccaucgccggcuucaucgagggcggcuggaccggcauggucgacggcugguacggcuaccaccaccagaacgagcagggcuccggcuacgccgccgaccucaaguccacccagaacgccaucgacgagaucaccaacaaggucaacuccgucaucgagaagaugaacacccaguucaccgccgucggcaaggaguucaaccaccucgagaagcgcaucgagaaccucaacaagaaggucgacgacggcuuccucgacaucuggaccuacaacgccgagcuccucguccuccucgagaacgagcgcacccucgacuaccacgacuccaacgucaagaaccucuacgagaagguccgcucccagcucaagaacaacgccaaggagaucggcaacggcugcuucgaguucuaccacaagugcgacaacaccugcauggaguccgucaagaacggcaccuacgacuaccccaaguacuccgaggaggccaagcucaaccgcgaggagaucgacggcgucaagcucgaguccacccgcaucuaccagauccucgccaucuacuccaccgucgccuccucccucguccucgucgucucccucggcgccaucuccuucuggaugugcuccaacggcucccuccagugccgcaucugcaucuga

SEQ ID NO: 101251 - RNA, 1701 nt, Artificial Sequence; identical to SEQ ID NO: 99869
  derived and/or modified CDS sequence (opt2) from hemagglutinin__InfluenzaA__ADJ81033

SEQ ID NO: 101252 - RNA, 1701 nt, Artificial Sequence; identical to SEQ ID NO: 98705
  derived and/or modified CDS sequence (opt2) from hemagglutinin__InfluenzaA__ADJ81043

SEQ ID NO: 101253 - RNA, 1701 nt, Artificial Sequence
  derived and/or modified CDS sequence (opt2) from hemagglutinin__InfluenzaA__ADJ81053
augaaggccauccucgucguccuccucuacaccuucaccaccgccaacgccgacacccucugcaucggcuaccacgccaacaacuccaccgacaccgucgacaccguccucgagaagaacgucaccgucacccacuccgucaaccuccucgaggacaagcacaacggcaagcucugcaagcuccgcggcgucgccccccuccaccucggcaagugcaacaucgccggcuggauccucggcaaccccgagugcgagucccucuccaccgccuccuccugguccuacaucgucgagaccuccuccuccgacaacggcaccugcuaccccggcgacuucaucgacuacgaggagcuccgcgagcagcucuccuccgucuccuccuucgagcgcuucgagaucuuccccaagaccuccuccuggcccaaccacgacuccaacaagggcgucaccgccgccugcccccacgccggcgccaaguccuucuacaagaaccucaucuggcucgucaagaagggcaacuccuaccccaagcucuccaaguccuacaucaacgacaagggcaaggagguccucguccucuggggcauccaccaccccuccaccuccgccgaccagcagucccucuaccagaacgccgacgccuacgucuucgucggcaccucccgcuacuccaagaaguucaagcccgagaucgccauccgccccaagguccgcgaccaggagggccgcaugaacuacuacuggacccucgucgagcccggcgacaagaucaccuucgaggccaccggcaaccucgucgucccccgcuacgccuucgccauggagcgcaacgccggcuccggcaucaucaucuccgacacccccguccacgacugcaacaccaccugccagacccccaagggcgccaucaacaccucccuccccuuccagaacauccaccccaucaccaucggcaagugccccaaguacgucaaguccaccaagcuccgccucgccaccggccuccgcaacguccccuccauccagucccgcggccucuucggcgccaucgccggcuucaucgagggcggcuggaccggcauggucgacggcugguacggcuaccaccaccagaacgagcagggcuccggcuacgccgccgaccucaaguccacccagaacgccaucgacaagaucaccaacaaggucaacuccgucaucgagaagaugaacacccaguucaccgccgucggcaaggaguucaaccaccucgagaagcgcaucgagaaccucaacaagaaggucgacgacggcuuccucgacaucuggaccuacaacgccgagcuccucguccuccucgagaacgagcgcacccucgacuaccacgacuccaacgucaagaaccucuacgagaagguccgcucccagcucaagaacaacgccaaggagaucggcaacggcugcuucgaguucuaccacaagugcgacaacaccugcauggaguccgucaagaacggcaccuacgacuaccccaaguacuccgaggaggccaagcucaaccgcgaggagaucgacggcgucaagcucgaguccacccgcaucuaccagauccucgccaucuacuccaccgucgccuccucccucguccucgucgucucccucggcgccaucuccuucuggaugugcuccaacggcucccuccagugccgcaucugcaucuga

SEQ ID NO: 101254 - RNA, 1701 nt, Artificial Sequence; identical to SEQ ID NO: 99869
  derived and/or modified CDS sequence (opt2) from hemagglutinin__InfluenzaA__ADJ81063

SEQ ID NO: 101255 - RNA, 1701 nt, Artificial Sequence; identical to SEQ ID NO: 99649
  derived and/or modified CDS sequence (opt2) from hemagglutinin__InfluenzaA__ADJ84772

SEQ ID NO: 101256 - RNA, 1701 nt, Artificial Sequence
  derived and/or modified CDS sequence (opt2) from hemagglutinin__InfluenzaA__ADJ88782
augaagaccaucaucgcccucuccuacaugcucugccucgucuucgcccagaagcuccccggcaacgacaacuccaccgccacccucugccucggccaccacgccguccccaacggcaccaucgucaagaccaucaccaacgaccagaucgaggucaccaacgccaccgagcucguccaguccuccuccaccggcgagaucugcgacuccccccaccagauccucgacggcgagaacugcacccucaucgacgcccuccucggcgacccccagugcgacggcuuccagaacaagaagugggaccucuucgucgagcgcuccaaggccuacuccaacugcuaccccuacgacguccccgacuacgccucccuccgcucccucaucgccuccuccggcacccucgaguucaacaacgaguccuucaacuggaccggcgucacccagaacggcaccuccuccgccugcauccgccgcuccaacaacuccuucuucucccgccucaacuggcucacccaccucaaguucaaguaccccgcccucaacgucaccaugcccaacaacgagcaguucgacaagcucuacaucuggggcguccaccaccccggcaccgacaacgaccagaucuuccucuacgcccaggccuccggccgcaucaccgucuccaccaagcgcucccagcagaccgucauccccaacaucggcucccgcccccgcguccgcaacauccccucccgcaucuccaucuacuggaccaucgucaagcccggcgacauccuccucaucaacuccaccggcaaccucaucgccccccgcggcuacuucaagauccgcuccggcaaguccuccaucaugcgcuccgacgcccccaucggcaagugcaacuccgagugcaucacccccaacggcuccauccccaacgacaagcccuuccagaacgucaaccgcaucaccuacggcgccugcccccgcuacgucaagcagaacacccucaagcucgccaccggcaugcgcaacguccccgagaagcagacccgcggcaucuucggcgccaucgccggcuucaucgagaacggcugggagggcauggucgacggcugguacggcuuccgccaccagaacuccgagggccgcggccaggccgccgaccucaaguccacccaggccgccaucgaccagaucaacggcaagcucaaccgccucaucggcaagaccaacgagaaguuccaccagaucgagaaggaguucuccgaggucgagggccgcauccaggaccucgagaaguacgucgaggacaccaagaucgaccucugguccuacaacgccgagcuccucgucgcccucgagaaccagcacaccaucgaccucaccgacuccgagaugaacaagcucuucgagaagaccaagaagcagcucggcgagaacgccgaggacaugggcaacggcugcuucaagaucuaccacaagugcgacaacgccugcaucggcuccauccgcaacggcaccuacgaccacgacgucuaccgcgacgaggcccucaacaaccgcuuccagaucaagggcgucgagcucaaguccggcuacaaggacuggauccucuggaucuccuucgccaucuccugcuuccuccucugcgucgcccuccucggcuucaucaugugggccugccagaagggcaacauccgcugcaacaucugcaucuga

SEQ ID NO: 101257 - RNA, 1701 nt, Artificial Sequence
  derived and/or modified CDS sequence (opt2) from hemagglutinin__InfluenzaA__ADK21733
augaaggccauccucgucguccuccucuacaccuucgccaccgccaacgccgacacccucugcaucggcuaccacgccaacaacuccaccgacaccgucgacaccguccucgagaagaacgucaccgucacccacuccgucaaccuccucgaggacaagcacaacggcaagcucugcaagcuccgcggcgucgccccccuccaccucggcaagugcaacaucgccggcuggauccucggcaaccccgagugcgagucccucuccaccgccuccuccugguccuacaucgucgagaccuccuccuccgacaacggcaccugcuaccccggcgacuucaucgacuacgaggagcuccgcgagcagcucuccuccgucuccuccuucgagcgcuucgagaucuuccccaagaccuccuccuggcccaaccacgacuccaacaagggcgucaccgccgccugcccccacgccggcgccaaguccuucuacaagaaccucaucuggcucgucaagaagggcaacuccuaccccaagcucuccaaguccuacaucaacgacaagggcaaggagguccucguccucuggggcauccaccaccccuccaccuccaccgaccagcagucccucuaccagaacgccgacgccuacgucuucgucggcaccucccgcuacuccaagaaguucaagcccgagaucgccauccgccccaagguccgcgaccaggagggccgcaugaacuacuacuggacccucgucgagcccggcgacaagaucaccuucgaggccaccggcaaccucgucgucccccgcuacgccuucgccauggagcgcaacgccggcuccggcaucaucaucuccgacacccccgcccacgacugcaacaccaccugccagacccccaagggcgccaucaacaccucccuccccuuccagaacauccaccccaucaccaucggcaagugccccaaguacgucaaguccaccaagcuccgccucgccaccggccuccgcaacguccccuccauccagucccgcggccucuucggcgccaucgccggcuucaucgagggcggcuggaccggcauggucgacggcugguacggcuaccaccaccagaacgagcagggcuccggcuacgccgccgaccucaaguccacccagaacgccaucgacaagaucaccaacaaggucaacuccgucaucgagaagaugaacacccaguucaccgccgucggcaaggaguucaaccaccucgagaagcgcaucgagaaccucaacaagaaggucgacgacggcuuccucgacaucuggaccuacaacgccgagcuccucguccuccucgagaacgagcgcacccucgacuaccacgacuccaacgucaagaaccucuacgagaagguccgcucccagcucaagaacaacgccaaggagaucggcaacggcugcuucgaguucuaccacaagugcgacaacaccugcauggaguccgucaagaacggcaccuacgacuaccccaaguacuccgaggaggccaagcucaaccgcgaggagaucgacggcgucaagcucgaguccacccgcaucuaccagauccucgccaucuacuccaccgucgccuccucccucguccucgucgucucccucggcgccaucuccuucuggaugugcuccaacggcucccuccagugccgcaucugcaucuga

SEQ ID NO: 101258 - RNA, 1701 nt, Artificial Sequence
  derived and/or modified CDS sequence (opt2) from hemagglutinin__InfluenzaA__ADK21743
augaaggccauccucgucguccuccucuacaccuucgccaccgccaacgccgacacccucugcaucggcuaccacgccaacaacuccaccgacaccgucgacaccguccucgagaagaacgucaccgucacccacuccgucaaccuccucgaggacaagcacaacggcaagcucugcaagcuccgcggcgucgccccccuccaccucggcaagugcaacaucgccggcuggauccucggcaaccccgagugcgagucccucuccaccgccuccuccugguccuacaucgucgagaccuccuccuccgacaacggcaccugcuaccccggcgacuucaucgacuacgaggagcuccgcgagcagcucuccuccgucuccuccuucgagcgcuucgagaucuuccccaagaccuccuccuggcccaaccacgacuccaacaagggcgucaccgccgccugcccccacgccggcgccaaguccuucuacaagaaccucaucuggcucgucaagaagggcaacuccuaccccaagaucuccaacuccuacaucaacgacaagggcaaggagguccucguccucuggggcauccaccaccccuccaccuccgccgaccagcagucccucuaccagaacgccgacgccuacgucuucgucggcaccucccgcuacuccaagaaguucaagcccgagaucgccauccgccccaagguccgcgaccaggagggccgcaugaacuacuacuggacccucgucgagcccggcgacaagaucaccuucgaggccaccggcaaccucgucgucccccgcuacgccuucgccauggagcgcaacgccggcuccggcaucaucaucuccgacacccccgcccacgacugcaacaccaccugccagacccccaagggcgccaucaacaccucccuccccuuccagaacauccaccccaucaccaucggcaagugccccaaguacgucaaguccaccaagcuccgccucgccaccggccuccgcaacguccccuccauccagucccgcggccucuucggcgccaucgccggcuucaucgagggcggcuggaccggcauggucgacggcugguacggcuaccaccaccagaacgagcagggcuccggcuacgccgccgaccucaaguccacccagaacgccaucgacgagaucaccaacaaggucaacuccgucaucgagaagaugaacacccaguucaccgccgucggcaaggaguucaaccaccucgagaagcgcaucgagaaccucaacaagaaggucgacgacggcuuccucgacaucuggaccuacaacgccgagcuccucguccuccucgagaacgagcgcacccucgacuaccacgacuccaacgucaagaaccucuacgagaagguccgcucccagcucaagaacaacgccaaggagaucggcaacggcugcuucgaguucuaccacaagugcgacaacaccugcauggaguccgucaagaacggcaccuacgacuaccccaaguacuccgaggaggccaagcucaaccgcgaggagaucgacggcgucaagcucgaguccacccgcaucuaccagauccucgccaucuacuccaccgucgccuccucccucguccucgucgucucccucggcgccaucuccuucuggaugugcuccaacggcucccuccagugccgcaucugcaucuga

SEQ ID NO: 101259 - RNA, 1701 nt, Artificial Sequence
  derived and/or modified CDS sequence (opt2) from hemagglutinin__InfluenzaA__ADK21753
augaaggccauccucgucguccuccucuacaccuucgccaccgccaacgccgacacccucugcaucggcuaccacgccaacaacuccaccgacaccgucgacaccguccucgagaagaacgucaccgucacccacuccgucaaccuccucgaggacaagcacaacggcaagcucugcaagcuccgcggcgucgccccccuccaccucggcaagugcaacaucgccggcuggauccucggcaaccccgagugcgagucccucuccaccgccuccuccugguccuacaucgucgagaccuccuccuccgacaacggcaccugcuaccccggcgacuucaucgacuacgaggagcuccgcgagcagcucuccuccgucuccuccuucgagcgcuucgagaucuuccccaagaccuccuccuggcccaaccacgacuccaacaagggcgucaccgccgccugcccccacgccggcgccaaguccuucuacaagaaccucaucuggcucgucaagaagggcaacuccuaccccaagcucuccaaguccuacaucaacgacaagggcaaggagguccucguccucuggggcauccaccaccccuccaccuccgccgaccagcagucccucuaccagaacgccgacgccuacgucuucgucggcaccucccgcuacuccaagaaguucaagcccgagaucgccauccgccccaagguccgcgaccaggagggccgcaugaacuacuacuggacccucgucgagcccggcgacaagaucaccuucgaggccaccggcaaccucgucgucccccgcuacgccuucgccauggagggcaacgccggcuccggcaucaucaucuccgacacccccguccacgacugcaacaccaccugccagacccccaagggcgccaucaacaccucccuccccuuccagaacauccaccccaucaccaucggcaagugccccaaguacgucaaguccaccaagcuccgccucgccaccggccuccgcaacguccccuccauccagucccgcggccucuucggcgccaucgccggcuucaucgagggcggcuggaccggcauggucgacggcugguacggcuaccaccaccagaacgagcagggcuccggcuacgccgccgaccucaaguccacccagaacgccaucgacaagaucaccaacaaggucaacuccgucaucgagaagaugaacacccaguucaccgccgucggcaaggaguucaaccaccucgagaagcgcaucgagaaccucaacaagaaggucgacgacggcuuccucgacaucuggaccuacaacgccgagcuccucguccuccucgagaacgagcgcacccucgacuaccacgacuccaacgucaagaaccucuacgagaagguccgcucccagcucaagaacaacgccaaggagaucggcaacggcugcuucgaguucuaccacaagugcgacaacaccugcauggaguccgucaagaacggcaccuacgacuaccccaaguacuccgaggaggccaagcucaaccgcgaggagaucgacggcgucaagcucgaguccacccgcaucuaccagauccucgccaucuacuccaccgucgccuccucccucguccucgucgucucccucggcgccaucuccuucuggaugugcuccaacggcucccuccagugccgcaucugcaucuga

SEQ ID NO: 101260 - RNA, 1701 nt, Artificial Sequence
  derived and/or modified CDS sequence (opt2) from hemagglutinin__InfluenzaA__ADK21763
augaaggccauccucgucguccuccucuacaccuucgccaccgccaacgccgacacccucugcaucggcuaccacgccaacaacuccaccgacaccgucgacaccguccucgagaagaacgucaccgucacccacuccgucaaccuccucgaggacaagcacaacggcaagcucugcaagcuccgcggcgucgccccccuccaccucggcaagugcaacaucgccggcuggauccucggcaaccccgagugcgagucccucuccaccgccuccuccugguccuacaucgucgagaccuccuccuccgacaacggcaccugcuaccccggcgacuucaucgacuacgaggagcuccgcgagcagcucuccuccgucuccuccuucgagcgcuucgagaucuuccccaagaccuccuccuggcccaaccacgacuccaacaagggcgucaccgccgccugcccccacgccggcgccaaguccuucuacaagaaccucaucuggcucgucaagaagggcaacuccuaccccaagcucuccaaguccuacaucaacgacaagggcaaggagguccucguccucuggggcauccaccaccccuccaccuccgccgaccagcagucccucuaccagaacgccgacgccuacgucuucgucggcaccuccaaguacuccaagaaguucaagcccgagaucgccauccgccccaagguccgcgaccaggagggccgcaugaacuacuacuggacccucgucgagcccggcgacaagaucaccuucgaggccaccggcaaccucgucgucccccgcuacgccuucgccauggagcgcaacgccggcuccggcaucaucaucuccgacacccccguccacgacugcaacaccaccugccagacccccaagggcgccaucaacaccucccuccccuuccagaacauccaccccaucaccaucggcaagugccccaaguacgucaaguccaccaagcuccgccucgccaccggccuccgcaacguccccuccauccagucccgcggccucuucggcgccaucgccggcuucaucgagggcggcuggaccggcauggucgacggcugguacggcuaccaccaccagaacgagcagggcuccggcuacgccgccgaccucaaguccacccagaacgccaucgacgagaucaccaacaaggucaacuccgucaucgagaagaugaacacccaguucaccgccgucggcaaggaguucaaccaccucgagaagcgcaucgagaaccucaacaagaaggucgacgacggcuuccucgacaucuggaccuacaacgccgagcuccucguccuccucgagaacgagcgcacccucgacuaccacgacuccaacgucaagaaccucuacgagaagguccgcucccagcucaagaacaacgccaaggagaucggcaacggcugcuucgaguucuaccacaagugcgacaacaccugcauggaguccgucaagaacggcaccuacgacuaccccaaguacuccgaggaggccaagcucaaccgcgaggagaucgacggcgucaagcucgaguccacccgcaucuaccagauccucgccaucuacuccaccgucgccuccucccucguccucgucgucucccucggcgccaucuccuucuggaugugcuccaacggcucccuccagugccgcaucugcaucuga

SEQ ID NO: 101261 - RNA, 1701 nt, Artificial Sequence; identical to SEQ ID NO: 99869
  derived and/or modified CDS sequence (opt2) from hemagglutinin__InfluenzaA__ADK21773

SEQ ID NO: 101262 - RNA, 1701 nt, Artificial Sequence; identical to SEQ ID NO: 99869
  derived and/or modified CDS sequence (opt2) from hemagglutinin__InfluenzaA__ADK21783

SEQ ID NO: 101263 - RNA, 1701 nt, Artificial Sequence; identical to SEQ ID NO: 98705
  derived and/or modified CDS sequence (opt2) from hemagglutinin__InfluenzaA__ADK21813

SEQ ID NO: 101264 - RNA, 1701 nt, Artificial Sequence; identical to SEQ ID NO: 100125
  derived and/or modified CDS sequence (opt2) from hemagglutinin__InfluenzaA__ADK21823

SEQ ID NO: 101265 - RNA, 1701 nt, Artificial Sequence
  derived and/or modified CDS sequence (opt2) from hemagglutinin__InfluenzaA__ADK21833
augaaggccauccucgucguccuccucuacaccuucgccaccgccaacgccgacacccucugcaucggcuaccacgccaacaacuccaccgacaccgucgacaccguccucgagaagaacgucaccgucacccacuccgucaaccuccucgaggacaagcacaacggcaagcucugcaagcuccgcggcgucgccccccuccaccucggcaagugcaacaucgccggcuggauccucggcaaccccgagugcgagucccucuccaccgccuccuccugguccuacaucgucgagaccuccuccuccgacaacggcaccugcuaccccggcgacuucaucgacuacgaggagcuccgcgagcagcucuccuccgucuccuccuucgagcgcuucgagaucuuccccaagaccuccuccuggcccaaccacgacuccaacaagggcgucaccgccgccugcccccacgccggcgccaaguccuucuacaagaaccucaucuggcucgucaagaagggcaacuccuaccccaagcucuccaaguccuacaucaacgacaagggcaaggagguccucguccucuggggcauccaccaccccuccaccuccgccgaccagcagucccucuaccagaacgccgacgccuacgucuucgucggcaccucccgcuacuccaagaaguucaagcccgagaucgccauccgccccaagguccgcgaccaggagggccgcaugaacuacuacuggacccucgucgagcccggcgacaagaucaccuucgaggccaccggcaaccucgucgucccccgcuacgccuucgccauggagcgcaacgccggcuccggcaucaucaucuccgacacccccguccgcgacugcaacaccaccugccagacccccaagggcgccaucaacaccucccuccccuuccagaacauccaccccaucaccaucggcaagugccccaaguacgucaaguccaccaagcuccgccucgccaccggccuccgcaacguccccuccauccagucccgcggccucuucggcgccaucgccggcuucaucgagggcggcuggaccggcauggucgacggcugguacggcuaccaccaccagaacgagcagggcuccggcuacgccgccgaccucaaguccacccagaacgccaucgacgagaucaccaacaaggucaacuccgucaucgagaagaugaacacccaguucaccgccgucggcaaggaguucaaccaccucgagaagcgcaucgagaaccucaacaagaaggucgacgacggcuuccucgacaucuggaccuacaacgccgagcuccucguccuccucgagaacgagcgcacccucgacuaccacgacuccaacgucaagaaccucuacgagaagguccgcucccagcucaagaacaacgccaaggagaucggcaacggcugcuucgaguucuaccacaagugcgacaacaccugcauggaguccgucaagaacggcaccuacgacuaccccaaguacuccgaggaggccaagcucaaccgcgaggagaucgacggcgucaagcucgaguccacccgcaucuaccagauccucgccaucuacuccaccgucgccuccucccucguccucgucgucucccucggcgccaucuccuucuggaugugcuccaacggcucccuccagugccgcaucugcaucuga

SEQ ID NO: 101266 - RNA, 1701 nt, Artificial Sequence; identical to SEQ ID NO: 99869
  derived and/or modified CDS sequence (opt2) from hemagglutinin__InfluenzaA__ADK21843

SEQ ID NO: 101267 - RNA, 1701 nt, Artificial Sequence; identical to SEQ ID NO: 99058
  derived and/or modified CDS sequence (opt2) from hemagglutinin__InfluenzaA__ADK21853

SEQ ID NO: 101268 - RNA, 1701 nt, Artificial Sequence; identical to SEQ ID NO: 100354
  derived and/or modified CDS sequence (opt2) from hemagglutinin__InfluenzaA__ADK21863

SEQ ID NO: 101269 - RNA, 1701 nt, Artificial Sequence; identical to SEQ ID NO: 99152
  derived and/or modified CDS sequence (opt2) from hemagglutinin__InfluenzaA__ADK21873

SEQ ID NO: 101270 - RNA, 1701 nt, Artificial Sequence
  derived and/or modified CDS sequence (opt2) from hemagglutinin__InfluenzaA__ADK21883
augaaggccauccucgucguccuccucuacaccuucgccaccgccaacgccgacacccucugcaucggcuaccacgccaacaacuccaccgacaccgucgacaccguccucgagaagaacgucaccgucacccacuccgucaaccuccucgaggacaagcacaacggcaagcucugcaagcuccgcggcgucgccccccuccaccucggcaagugcaacaucgccggcuggauccucggcaaccccgagugcgagucccucuccaccgccuccuccugguccuacaucgucgagaccuccuccuccgacaacggcaccugcuaccccggcgacuucaucgacuacgaggagcuccgcgagcagcucuccuccgucuccuccuucgagcgcuucgagaucuuccccaagaccuccuccuggcccaaccacgacuccaacaagggcgucaccgccgccugcccccacgccggcgccaaguccuucuacaagaaccucaucuggcucgucaagaagggcaacuccuaccccaagcucuccaaguccuacaucaacgacaagggcaaggagguccucguccucuggggcauccaccaccccuccaccuccgccgaccagcagucccucuaccagaacgccgacgccuacgucuucgucggcaccucccgcuacuccaagaaguucaagcccgagaucgccauccgccccaagguccgcgaccaggagggccgcaugaacuacuacuggacccucgucgagcccggcgacaagaucaccuucgaggccaccggcaaccucgucguccccaaguacgccuucgccauggagcgcaacgccggcuccggcaucaucaucuccgacacccccguccacgacugcaacaccaccugccagacccccaagggcgccaucaacaccucccuccccuuccagaacauccaccccaucaccaucggcaagugccccaaguacgucaaguccaccaagcuccgccucgccaccggccuccgcaacauccccuccauccagucccgcggccucuucggcgccaucgccggcuucaucgagggcggcuggaccggcauggucgacggcugguacggcuaccaccaccagaacgagcagggcuccggcuacgccgccgaccucaaguccacccagaacgccaucgacgagaucaccaacaaggucaacuccgucaucgagaagaugaacacccaguucaccgccgucggcaaggaguucaaccaccucgagaagcgcaucgagaaccucaacaagaaggucgacgacggcuuccucgacaucuggaccuacaacgccgagcuccucguccuccucgagaacgagcgcacccucgacuaccacgacuccaacgucaagaaccucuacgagaagguccgcucccagcucaagaacaacgccaaggagaucggcaacggcugcuucgaguucuaccacaagugcgacaacaccugcauggaguccgucaagaacggcaccuacgacuaccccaaguacuccgaggaggccaagcucaaccgcgaggagaucgacggcgucaagcucgaguccacccgcaucuaccagauccucgccaucuacuccaccgucgccuccucccucguccucgucgucucccucggcgccaucuccuucuggaugugcuccaacggcucccuccagugccgcaucugcaucuga

SEQ ID NO: 101271 - RNA, 1701 nt, Artificial Sequence; identical to SEQ ID NO: 98705
  derived and/or modified CDS sequence (opt2) from hemagglutinin__InfluenzaA__ADK21893

SEQ ID NO: 101272 - RNA, 1701 nt, Artificial Sequence; identical to SEQ ID NO: 100302
  derived and/or modified CDS sequence (opt2) from hemagglutinin__InfluenzaA__ADK21903

SEQ ID NO: 101273 - RNA, 1701 nt, Artificial Sequence; identical to SEQ ID NO: 100415
  derived and/or modified CDS sequence (opt2) from hemagglutinin__InfluenzaA__ADK21913

SEQ ID NO: 101274 - RNA, 1701 nt, Artificial Sequence
  derived and/or modified CDS sequence (opt2) from hemagglutinin__InfluenzaA__ADK21923
augaaggccauccucgucguccuccucuacaccuucgccaccgccaacgccgacacccucugcaucggcuaccacgccaacaacuccaccgacaccgucgacaccguccucgagaagaacgucaccgucacccacuccgucaacauccucgaggacaagcacaacggcaagcucugcaagcuccgcggcgucgccccccuccaccucggcaagugcaacaucgccggcuggauccucggcaaccccgagugcgagucccucuccaccgccuccuccugguccuacaucgucgagaccuccuccuccgacaacggcaccugcuaccccggcgacuucaucgacuacgaggagcuccgcgagcagcucuccuccgucuccuccuucgagcgcuucgagaucuuccccaagaccuccuccuggcccaaccacgacuccaacaagggcgucaccgccgccugcccccacgccggcgccaaguccuucuacaagaaccucaucuggcucgucaagaagggcaacuccuaccccaagcucuccaaguccuacaucaacgacaagggcaaggagguccucguccucuggggcauccaccaccccuccaccuccgccgaccagcagucccucuaccagaacgccgacgccuacgucuucgucggcaccucccgcuacuccaagaaguucaagcccgagaucgccauccgccccaagguccgcgaccaggagggccgcaugaacuacuacuggacccucgucgagcccggcgacaagaucaccuucgaggccaccggcaaccucgucgucccccgcuacgccuucgccauggagcgcaacgccggcuccggcaucaucaucuccgacacccccguccacgacugcaacaccaccugccagacccccaagggcgccaucaacaccucccuccccuuccagaacauccaccccaucaccaucggcaagugccccaaguacgucaaguccaccaagcuccgccucgccaccggccuccgcaacguccccuccauccagucccgcggccucuucggcgccaucgccggcuucaucgagggcggcuggaccggcauggucgacggcugguacggcuaccaccaccagaacgagcagggcuccggcuacgccgccgaccucaaguccacccagaacgccaucgacgagaucaccaacaaggucaacuccgucaucgagaagaugaacacccaguucaccgccgucggcaaggaguucaaccaccucgagaagcgcaucgagaaccucaacaagaaggucgacgacggcuuccucgacaucuggaccuacaacgccgagcuccucguccuccucgagaacgagcgcacccucgacuaccacgacuccaacgucaagaaccucuacgagaaggcccgcucccagcucaagaacaacgccaaggagaucggcaacggcugcuucgaguucuaccacaagugcgacaacaccugcauggaguccgucaagaacggcaccuacgacuaccccaaguacuccgaggaggccaagcucaaccgcgagaagaucgacggcgucaagcucgaguccacccgcaucuaccagauccucgccaucuacuccaccgucgccuccacccucguccucgucgucucccucggcgccaucuccuucuggaugugcuccaacggcucccuccagugccgcaucugcaucuga

SEQ ID NO: 101275 - RNA, 1701 nt, Artificial Sequence
  derived and/or modified CDS sequence (opt2) from hemagglutinin__InfluenzaA__ADK21933
augaaggccauccucgucguccuccucuacaccuucgccaccgccaacgccgacacccucugcaucggcuaccacgccaacaacuccaccgacaccgucgacaccguccucgagaagaacgucaccgucacccacuccgucgaccuccucgaggacaagcacaacggcaagcucugcaagcuccgcggcgucgccccccuccaccucggcaagugcaacaucgccggcuggauccucggcaaccccgagugcgagucccucuccaccgccuccuccugguccuacaucgucgagaccuccuccuccgacaacggcaccugcuaccccggcgacuucaucgacuacgaggagcuccgcgagcagcucuccuccgucuccuccuucgagcgcuucgagaucuuccccaagaccuccuccuggcccaaccacgacuccaacaagggcgucaccgccgccugccccaacgccggcgccaaguccuucuacaagaaccucaucuggcucgucaagaagggcaacuccuaccccaagcucuccaaguccuacaucaacgacaagggcaaggagguccucguccucuggggcauccaccaccccuccaccuccgccgaccagcagucccucuaccagaacgccgacgccuacgucuucgucggcaccucccgcuacuccaagaaguucaagcccgagaucgccauccgccccaagguccgcgaccaggagggccgcaugaacuacuacuggacccucgucgagcccggcgacaagaucaccuucgaggccaccggcaaccucgucgucccccgcuacgccuucgccauggagcgcaacgccggcuccggcaucaucaucuccgacacccccguccacgacugcaacaccaccugccagacccccaagggcgccaucaacaccucccuccccuuccagaacauccaccccaucaccaucggcaagugccccaaguacgucaaguccaccaagcuccgccucgccaccggccuccgcaacguccccuccauccagucccgcggccucuucggcgccaucgccggcuucaucgagggcggcuggaccggcauggucgacggcugguacggcuaccaccaccagaacgagcagggcuccggcuacgccgccgaccucaaguccacccagaacgccaucgacgagaucaccaacaaggucaacuccgucaucgagaagaugaacacccaguucaccgccgucggcaaggaguucaaccaccucgagaagcgcaucgagaaccucaacaagaaggucgacgacggcuuccucgacaucuggaccuacaacgccgagcuccucguccuccucgagaacgagcgcacccucgacuaccacgacuccaacgucaagaaccucuacgagaagguccgcucccagcucaagaacaacgccaaggagaucggcaacggcugcuucgaguucuaccacaagugcgacaacaccugcauggaguccgucaagaacggcaccuacgacuaccccaaguacuccgaggaggccaagcucaaccgcgaggagaucgacggcgucaagcucgaguccacccgcaucuaccagauccucgccaucuacuccaccgucgccuccucccucguccucgucgucucccucggcgccaucuccuucuggaugugcuccaacggcucccuccagugccgcaucugcaucuga

SEQ ID NO: 101276 - RNA, 1701 nt, Artificial Sequence; identical to SEQ ID NO: 98705
  derived and/or modified CDS sequence (opt2) from hemagglutinin__InfluenzaA__ADK21943

SEQ ID NO: 101277 - RNA, 1701 nt, Artificial Sequence
  derived and/or modified CDS sequence (opt2) from hemagglutinin__InfluenzaA__ADK21953
augaaggccauccucgucguccuccucuacaccuucgccaccgccaacgccgacacccucugcaucggcuaccacgccaacaacuccaccgacaccgucgacaccguccucgagaagaacgucaccgucacccacuccgucaaccuccucgaggacaagcacaacggcaagcucugcaagcuccgcggcgucgccccccuccaccucggcaagugcaacaucgccggcuggauccucggcaaccccgagugcgagucccucuccaccgccuccuccugguccuacaucgucgagaccuccuccuccgacaacggcaccugcuaccccggcgacuucaucgaccacgaggagcuccgcgagcagcucuccuccgucuccuccuucgagcgcuucgagaucuuccccaagaccuccuccuggcccaaccacgacuccaacaagggcgucaccgccgccugcccccacgccggcgccaaguccuucuacaagaaccucaucuggcucgucaagaagggcaacuccuaccccaagcucuccaaguccuacaucaacgacaagggcaaggagguccucguccucugggccauccaccaccccuccaccuccgccgaccagcagucccucuaccagaacgccgacgccuacgucuucgucggcaccucccgcuacuccaagaaguucaagcccgagaucgccauccgccccaagguccgcgaccaggagggccgcaugaacuacuacuggacccucgucgagcccggcgacaagaucaccuucgaggccaccggcaaccucgucgucccccgcuacgccuucgccauggagcgcaacgccggcuccggcaucaucaucuccgacacccccguccacgacugcaacaccaccugccagacccccaagggcgccaucaacaccucccuccccuuccagaacauccaccccaucaccaucggcaagugccccaaguacgucaaguccaccaagcuccgccucgccaccggccuccgcaacguccccuccauccagucccgcggccucuucggcgccaucgccggcuucaucgagggcggcuggaccggcauggucgacggcugguacggcuaccaccaccagaacgagcagggcuccggcuacgccgccgaccucaaguccacccagaacgccaucgacgagaucaccaacaaggucaacuccgucaucgagaagaugaacacccaguucaccgccgucggcaaggaguucaaccaccucgagaagcgcaucgagaaccucaacaagaaggucgacgacggcuuccucgacaucuggaccuacaacgccgagcuccucguccuccucgagaacgagcgcacccucgacuaccacgacuccaacgucaagaaccucuacgagaagguccgcucccagcucaagaacaacgccaaggagaucggcaacggcugcuucgaguucuaccacaagugcgacaacaccugcauggaguccgucaagaacggcaccuacgacuaccccaaguacuccgaggaggccaagcucaaccgcgaggagaucgacggcgucaagcucgaguccacccgcaucuaccagauccucgccaucuacuccaccgucgccuccucccucguccucgucgucucccucggcgccaucuccuucuggaugugcuccaacggcucccuccagugccgcaucugcaucuga

SEQ ID NO: 101278 - RNA, 1701 nt, Artificial Sequence; identical to SEQ ID NO: 100892
  derived and/or modified CDS sequence (opt2) from hemagglutinin__InfluenzaA__ADK32390

SEQ ID NO: 101279 - RNA, 1701 nt, Artificial Sequence; identical to SEQ ID NO: 100892
  derived and/or modified CDS sequence (opt2) from hemagglutinin__InfluenzaA__ADK32400

SEQ ID NO: 101280 - RNA, 1701 nt, Artificial Sequence
  derived and/or modified CDS sequence (opt2) from hemagglutinin__InfluenzaA__ADK32420
augaaggccauccucgucguccuccucuacaccuucgccaccgccaacgccgacacccucugcaucggcuaccacgccaacaacuccaccgacaccgucgacaccguccucgagaagaacgucaccgucacccacuccgucaaccuccucgaggacaagcacaacggcaagcucugcaagcuccgcggcgucgccccccuccaccucggcaagugcaacaucgccggcuggauccucggcaaccccgagugcgagucccucuccaccgccuccuccugguccuacaucgucgagaccuccuccuccgacaacggcaccugcuaccccggcgacuucaucgacuacgaggagcuccgcgagcagcucuccuccgucuccuccuucgagcgcuucgagaucuuccccaagaccuccuccuggcccaaccacgacuccaacaagggcgucaccgccgccugcccccacgccggcgccaaguccuucuacaagaaccucaucuggcucgucaagaagggcaacuccuaccccaagcucuccaaguccuacaucaacgacaagggcaaggagguccucguccucuggggcauccaccaccccuccaccuccgccgaccagcagucccucuaccagaacgccgacgccuacgucuucgucggcaccucccgcuacuccaagaaguucaagcccgagaucgccauccgccccaagguccgcgagcaggagggccgcaugaacuacuacuggacccucgucgagcccggcgacaagaucaccuucgaggccaccggcaaccucgucgucccccgcuacgccuucgccauggagcgcaacgccggcuccggcaucaucaucuccgacacccccguccacgacugcaacaccaccugccagacccccaagggcgccaucaacaccucccuccccuuccagaacauccacuccaucaccaucggcaagugccccaaguacgucaaguccaccaagcuccgccucgccaccggccuccgcaacguccccuccauccagucccgcggccucuucggcgccaucgccggcuucaucgagggcggcuggaccggcauggucgacggcugguacggcuaccaccaccagaacgagcagggcuccggcuacgccgccgaccucaaguccacccagaacgccaucgacgagaucaccaacaaggucaacuccgucaucgagaagaugaacacccaguucaccgccgucggcaaggaguucaaccaccucgagaagcgcaucgagaaccucaacaagaaggucgacgacggcuuccucgacaucuggaccuacaacgccgagcuccucguccuccucgagaacgagcgcacccucgacuaccacgacuccaacgucaagaaccucuacgagaagguccgcaaccagcucaagaacaacgccaaggagaucggcaacggcugcuucgaguucuaccacaagugcgacaacaccugcauggaguccgucaagaacggcaccuacgacuaccccaaguacuccgaggaggccaagcucaaccgcgaggagaucgacggcgucaagcucgaguccacccgcaucuaccagauccucgccaucuacuccaccgucgccuccucccucguccucgucgucucccucggcgccaucuccuucuggaugugcuccaacggcucccuccagugccgcaucugcaucuga

SEQ ID NO: 101281 - RNA, 1701 nt, Artificial Sequence; identical to SEQ ID NO: 100257
  derived and/or modified CDS sequence (opt2) from hemagglutinin__InfluenzaA__ADK32430

SEQ ID NO: 101282 - RNA, 1701 nt, Artificial Sequence
  derived and/or modified CDS sequence (opt2) from hemagglutinin__InfluenzaA__ADK32440
augaaggccauccucgucguccuccucuacaccuucgccaccgccaacgccgacacccucugcaucggcuaccacgccaacaacuccaccgacaccgucgacaccguccucgagaagaacgucaccgucacccacuccgucaaccuccucgaggacaagcacaacggcaagcucugcaagcuccgcggcgucgccccccuccaccucggcaagugcaacaucgccggcuggauccucggcaaccccgagugcgagucccucuccaccgccuccuccugguccuacaucgucgagaccuccuccuccgacaacggcaccugcuaccccggcgacuucaucgacuacgaggagcuccgcgagcagcucuccuccgucuccuccuucgagcgcuucgagaucuuccccaagaccuccuccuggcccaaccacgacuccaacaagggcgucaccgccgccugcccccacgccggcgccaaguccuucuacaagaaccucaucuggcucgucaagaagggcaacuccuaccccaagcucuccaaguccuacaucaacgacaagggcaaggagguccucguccucuggggcauccaccaccccuccaccuccgccgaccagcagucccucuaccagaacgccgacgccuacgucuucgucggcaccucccgcuacuccaagaaguucaagcccgagaucgccauccgccccaagguccgcgaccaggagggccgcaugaacuacuacuggacccucgucgagcccggcgacaagaucaccuucgaggccaccggcaaccucgucgucccccgcuacgccuucgccauggagcgcaacgccggcuccggcaucaucaucuccgacacccccguccacgacugcaacaccaccugccagacccccaagggcgccaucaacaccucccuccccuuccagaacauccaccccaucaccaucggcaagugccccaaguacgucaaguccaccaagcuccgccucgccaccggccuccgcaacguccccuccauccagucccgcggccucuucggcgccaucgccggcuucaucgagggcggcuggaccggcauggucgacggcugguacggcuaccaccaccagaacgagcagggcuccggcuacgccgccgaccucaaguccacccagaacgccaucgacggcaucaccaacaaggucaacuccgucaucgagaagaugaacacccaguucaccgccgucggcaaggaguucaaccaccucgagaagcgcaucgagaaccucaacaagaaggucgacgacggcuuccucgacaucuggaccuacaacgccgagcuccucguccuccucgagaacgagcgcacccucgacuaccacgacuccaacgucaagaaccucuacgagaagguccgcucccagcucaagaacaacgccaaggagaucggcaacggcugcuucgaguucuaccacaagugcgacaacaccugcauggaguccgucaagaacggcaccuacgacuaccccaaguacuccgaggaggccaagcucaaccgcgaggagaucgacggcgucaagcucgaguccacccgcaucuaccagauccucgccaucuacuccaccgucgccuccucccucguccucgucgucucccucggcgccaucuccuucuggaugugcuccaacggcucccuccagugccgcaucugcaucuga

SEQ ID NO: 101283 - RNA, 1701 nt, Artificial Sequence
  derived and/or modified CDS sequence (opt2) from hemagglutinin__InfluenzaA__ADK32450
augaaggccauccucgucguccuccucuacaccuucgccaccgccaacgccgacacccucugcaucggcuaccacgccaacaacuccaccgacaccgucgacaccguccucgagaagaacgucaccgucacccacuccgucaacauccucgaggacaagcacaacggcaagcucugcaagcuccgcggcgucgccccccuccaccucggcaagugcaacaucgccggcuggauccucggcaaccccgagugcgagucccucuccaccgccuccuccugguccuacaucgucgagaccuccuccuccgacaacggcaccugcuaccccggcgacuucaucgacuacgaggagcuccgcgagcagcucuccuccgucuccuccuucgagcgcuucgagaucuuccccaagaccuccuccuggcccaaccacgacuccaacaagggcgucaccgccgccugcccccacgccggcgccaaguccuucuacaagaaccucaucuggcucgucaagaagggcaacuccuaccccaagcucuccaaguccuacaucaacgacaagggcaaggagguccucguccucuggggcauccaccaccccuccaccuccgccgaccagcagucccucuaccagaacgccgacgccuacgucuucgucggcuccucccgcuacuccaagaaguucaagcccgagaucgccauccgccccaagguccgcgaccaggagggccgcaugaacuacuacuggacccucgucgagcccggcgacaagaucaccuucgaggccaccggcaaccucgucgucccccgcuacgccuucgccauggagcgcaacgccggcuccggcaucaucaucuccgacgcccccguccacgacugcaacaccaccugccagacccccaagggcgccaucaacaccucccuccccuuccagaacauccaccccaucaccaucggcaagugccccaaguacgucaaguccaccaagcuccgccucgccaccggccuccgcaacguccccuccauccagucccgcggccucuucggcgccaucgccggcuucaucgagggcggcuggaccggcauggucgacggcugguacggcuaccaccaccagaacgagcagggcuccggcuacgccgccgaccucaaguccacccagaacgccaucgacgagaucaccaacaaggucaacuccgucaucgagaagaugaacacccaguucaccgccgucggcaaggaguucaaccaccucgagaagcgcaucgagaaccucaacaagaaggucgacgacggcuuccucgacaucuggaccuacaacgccgagcuccucguccuccucgagaacgagcgcacccucgacuaccacgacuccaacgucaagaaccucuacgagaagguccgcucccagcucaagaacaacgccaaggaggucggcaacggcugcuucgaguucuaccacaagugcgacaacaccugcauggaguccgucaagaacggcaccuacgacuaccccaaguacuccgaggaggccaagcucaaccgcgaggagaucgacggcgucaagcucgaguccacccgcaucuaccagauccucgccaucuacuccaccgccgccuccucccucguccucgucgucucccucggcgccaucuccuucuggaugugcuccaacggcucccuccagugccgcaucugcaucuga

SEQ ID NO: 101284 - RNA, 1701 nt, Artificial Sequence
  derived and/or modified CDS sequence (opt2) from hemagglutinin__InfluenzaA__ADK32460
augaaggccauccucgucguccuccucuacaccuucgccaccgccaacgccgacacccucugcaucggcuaccacgccaacaacuccaccgacaccgucgacaccguccucgagaagaacgucaccgucacccacuccgucaaccuccucgaggacaagcacaacggcaagcucugcaagcuccgcggcgucgccccccuccaccucggcaagugcaacaucgccggcuggauccucggcaaccccgagugcgagucccucuccaccgccuccuccugguccuacaucgucgagaccuccuccuccgacaacggcaccugcuaccccggcgacuucaucgacuacgaggagcuccgcgagcagcucuccuccgucuccuccuucgagcgcuucgagaucuuccccaagaccuccuccuggcccaaccacgacuccaacaagggcgucaccgccgccugcccccacgccggcgccaaguccuucuacaagaaccucaucuggcucgucaagaagggcaacuccuaccccaagcucuccaaguccuacaucaacgacaagggcaaggagguccucguccucuggggcauccaccaccccuccaccuccgccgaccagcagucccucuaccagaacgccgacgccuacgccuucgucggcaccucccgcuacuccaagaaguucaagcccgagaucgccauccgccccaagguccgcgaccaggagggccgcaugaacuacuacuggacccucgucgagcccggcgacaagaucaccuucgaggccaccggcaaccucgucgucccccgcuacgccuucgccauggagcgcaacgccggcuccggcaucaucaucuccgacacccccguccacgacugcaacaccaccugccagacccccaagggcgccaucaacaccucccuccccuuccagaacauccaccccaucaccaucggcaagugccccaaguacgucaaguccaccaagcuccgccucgccaccggccuccgcaacguccccuccauccagucccgcggccucuucggcgccaucgccggcuucaucgagggcggcuggaccggcauggucgacggcugguacggcuaccaccaccagaacgagcagggcuccggcuacgccgccgaccucaaguccacccagaacgccaucgacgagaucaccaacaaggucaacuccgucaucgagaagaugaacacccaguucaccgccgucggcaaggaguucaaccaccucgagaagcgcaucgagaaccucaacaagaaggucgacgacggcuuccucgacaucuggaccuacaacgccgagcuccucguccuccucgagaacgagcgcacccucgacuaccacgacuccaacgucaagaaccucuacgagaagguccgcucccagcucaagaacaacgccaaggagaucggcaacggcugcuucgaguucuaccacaagugcgacaacaccugcauggaguccgucaagaacggcaccuacgacuaccccaaguacuccgaggaggccaagcucaaccgcgaggagaucgacggcgucaagcucgaguccacccgcaucuaccagauccucgccaucuacuccaccgucgccuccucccucguccucgucgucucccucggcgccaucuccuucuggaugugcuccaacggcucccuccagugccgcaucugcaucuga

SEQ ID NO: 101285 - RNA, 1701 nt, Artificial Sequence; identical to SEQ ID NO: 99869
  derived and/or modified CDS sequence (opt2) from hemagglutinin__InfluenzaA__ADK32470

SEQ ID NO: 101286 - RNA, 1701 nt, Artificial Sequence
  derived and/or modified CDS sequence (opt2) from hemagglutinin__InfluenzaA__ADK32480
augaaggccauccucgucguccuccucuacaccuucgccaccgccaacgccgacacccucugcaucggcuaccacgccaacaacuccaccgacaccgucgacaccguccucgagaagaacgucaccgucacccacuccgucaaccuccucgaggacaagcacaacggcaagcucugcaagcuccgcggcgucgccccccuccaccucggcaagugcaacaucgccggcuggauccucggcaaccccgagugcgagucccucuccaccgccuccuccugguccuacaucgucgagaccuccuccuccgacaacggcaccugcuaccccggcgacuucaucgacuacgaggagcuccgcgagcagcucuccuccgucuccuccuucgagcgcuucgagaucuuccccaagaccuccuccuggcccaaccacgacuccaacaagggcgucaccgccgccugcccccacgccggcgccaaguccuucuacaagaaccucaucuggcucgucaagaagggcaacuccuaccccaagcucuccaaguccuacaucaacgacaagggcaaggagguccucguccucuggggcauccaccaccccuccaccuccgccgaccagcagucccucuaccagaacgccgacgccuacgucuucgucggcaccucccgcuacuccaagaaguucaagcccgagaucgccauccgccccaagguccgcgaccaggagggccgcaugaacuacuacuggacccucgucgagcccggcgacaagaucaccuucgaggccaccggcaaccucgucgucccccgcuacgccuucgccauggagcgcaacgccggcuccggcaucaucaucuccgacacccccgcccacgacugcaacaccaccugccagacccccaagggcgccaucaacaccucccuccccuuccagaacauccaccccaucaccaucggcaagugccccaaguacgucaaguccaccaagcuccgccucgccaccggccuccgcaacguccccuccauccagucccgcggccucuucggcgccaucgccggcuucaucgagggcggcuggaccggcauggucgacggcugguacggcuaccaccaccagaacgagcagggcuccggcuacgccgccgaccucaaguccacccagaacgccaucgacaagaucaccaacaaggucaacuccgucaucgagaagaugaacacccaguucaccgccgucggcaaggaguucaaccaccucgagaagcgcaucgagaaccucaacaagaaggucgacgacggcuuccucgacaucuggaccuacaacgccgagcuccucguccuccucgagaacgagcgcacccucgacuaccacgacuccaacgucaagaaccucuacgagaagguccgcucccagcucaagaacaacgccaaggagaucggcaacggcugcuucgaguucuaccacaagugcgacaacaccugcauggaguccgucaagaacggcaccuacgacuaccccaaguacuccgaggaggccaagcucaaccgcgaggagaucgacggcgucaagcucgaguccacccgcaucuaccagauccucgccaucuacuccaccgucgccuccucccucguccucgucgucucccucggcgccaucuccuucuggaugugcuccaacggcucccuccagugccgcaucugcaucuga

SEQ ID NO: 101287 - RNA, 1701 nt, Artificial Sequence; identical to SEQ ID NO: 99869
  derived and/or modified CDS sequence (opt2) from hemagglutinin__InfluenzaA__ADK32490

SEQ ID NO: 101288 - RNA, 1701 nt, Artificial Sequence; identical to SEQ ID NO: 99869
  derived and/or modified CDS sequence (opt2) from hemagglutinin__InfluenzaA__ADK32502

SEQ ID NO: 101289 - RNA, 1701 nt, Artificial Sequence; identical to SEQ ID NO: 100341
  derived and/or modified CDS sequence (opt2) from hemagglutinin__InfluenzaA__ADK32637

SEQ ID NO: 101290 - RNA, 1701 nt, Artificial Sequence; identical to SEQ ID NO: 99869
  derived and/or modified CDS sequence (opt2) from hemagglutinin__InfluenzaA__ADK32647

SEQ ID NO: 101291 - RNA, 1701 nt, Artificial Sequence; identical to SEQ ID NO: 100033
  derived and/or modified CDS sequence (opt2) from hemagglutinin__InfluenzaA__ADK32657

SEQ ID NO: 101292 - RNA, 1701 nt, Artificial Sequence; identical to SEQ ID NO: 100257
  derived and/or modified CDS sequence (opt2) from hemagglutinin__InfluenzaA__ADK32677

SEQ ID NO: 101293 - RNA, 1701 nt, Artificial Sequence
  derived and/or modified CDS sequence (opt2) from hemagglutinin__InfluenzaA__ADK32687
augaaggccauccucgucguccuccucuacaccuucgccaccgccaacgccgacacccucugcaucggcuaccacgccaacaacuccaccgacaccgucgacaccguccucgagaagaacgucaccgucacccacuccgucaaccuccucgaggacaagcacaacggcaagcucugcaagcuccgcggcgucgccccccuccaccucggcaagugcaacaucgccggcuggauccucggcaaccccgagugcgagucccucuccaccgccuccuccugguccuacaucgucgagaccuccuccuccgacaacggcaccugcuaccccggcgacuucaucgacuacgaggagcuccgcgagcagcucuccuccgucuccuccuucgagcgcuucgagaucuuccccaagaccuccuccuggcccaaccacgacuccaacaagggcgucaccgccgccugcccccacgccggcgccaagaacuucuacaagaaccucaucuggcucgucaagaagggcaacuccuaccccaagcucuccaaguccuacaucaacgacaagggcaaggagguccucguccucuggggcauccaccaccccuccaccuccgccgaccagcagucccucuaccagaacgccgacgccuacgucuucgucggcaccucccgcuacuccaagaaguucaagcccgagaucgccauccgccccaagguccgcgaccaggagggccgcaugaacuacuacuggacccucgucgagcccggcgacaagaucaccuucgaggccaccggcaaccucgucgucccccgcuacgccuucgccauggagcgcaacgccggcuccggcaucaucaucuccgacacccccguccacgacugcaacaccaccugccagacccccaagggcgccaucaacaccucccuccccuuccagaacauccaccccaucaccaucggcaagugccccaaguacgucaaguccaccaagcuccgccucgccaccggccuccgcaacguccccuccauccagucccgcggccucuucggcgccaucgccggcuucaucgagggcggcuggaccggcauggucgacggcugguacggcuaccaccaccagaacgagcagggcuccggcuacgccgccgaccucaaguccacccagaacgccaucgacaagaucaccaacaaggucaacuccgucaucgagaagaugaacacccaguucaccgccgucggcaaggaguucaaccaccucgagaagcgcaucgagaaccucaacaagaaggucgacgacggcuuccucgacaucuggaccuacaacgccgagcuccucguccuccucgagaacgagcgcacccucgacuaccacgacuccaacgucaagaaccucuacgagaagguccgcucccagcucaagaacaacgccaaggagaucggcaacggcugcuucgaguucuaccacaagugcgacaacaccugcauggaguccgucaagaacggcaccuacgacuaccccaaguacuccgaggaggccaagcucaaccgcgaggagaucgacggcgucaagcucgaguccacccgcaucuaccagauccucgccaucuacuccaccgucgccuccucccucguccucgucgucucccucggcgccaucuccuucuggaugugcuccaacggcucccuccagugccgcaucugcaucuga

SEQ ID NO: 101294 - RNA, 1701 nt, Artificial Sequence; identical to SEQ ID NO: 100496
  derived and/or modified CDS sequence (opt2) from hemagglutinin__InfluenzaA__ADK32697

SEQ ID NO: 101295 - RNA, 1701 nt, Artificial Sequence; identical to SEQ ID NO: 99869
  derived and/or modified CDS sequence (opt2) from hemagglutinin__InfluenzaA__ADK32776

SEQ ID NO: 101296 - RNA, 1701 nt, Artificial Sequence; identical to SEQ ID NO: 100257
  derived and/or modified CDS sequence (opt2) from hemagglutinin__InfluenzaA__ADK33621

SEQ ID NO: 101297 - RNA, 1701 nt, Artificial Sequence
  derived and/or modified CDS sequence (opt2) from hemagglutinin__InfluenzaA__ADK33631
augaaggccauccucgucguccuccucuacaccuucgccaccgccaacgccgacacccucugcaucggcuaccacgccaacaacuccaccgacaccgucgacaccguccucgagaagaacgucaccgucacccacuccgucaaccuccucgaggucaagcacaacggcaagcucugcaagcuccgcggcgucgccccccuccaccucggcaagugcaacaucgccggcuggauccucggcaaccccgagugcgagucccucuccaccgccuccuccugguccuacaucgucgagaccuccuccuccgacaacggcaccugcuaccccggcgacuucaucaacuacgaggagcuccgcgagcagcucuccuccgucuccuccuucgagcgcuucgagaucuuccccaagaccuccuccuggcccaaccacgacuccaacaagggcgucaccgccgccugcccccacgccggcgccaaguccuucuacaagaaccucaucuggcucgucaagaagggcaacuccuaccccaagcucuccaaguccuacaucaacgacaagggcaaggagguccucguccucuggggcauccaccaccccuccaccuccgccgaccagcagucccucuaccagaacgccgacgccuacgucuucgucggcaccucccgcuacuccaagaaguucaagcccgagaucgccauccgccccaagguccgcgaccaggagggccgcaugaacuacuacuggacccucgucgagcccggcgacaagaucaccuucgaggccaccggcaaccucgucgucccccgcuacgccuucgccauggagcgcaacgccggcuccggcaucaucaucuccgacacccccguccacgacugcaacaccaccugccagacccccaagggcgccaucaacaccucccuccccuuccagaacauccaccccaucaccaucggcaagugccccaaguacgucaaguccaccaagcuccgccucgccaccggccuccgcaacguccccuccauccagucccgcggccucuucggcgccaucgccggcuucaucgagggcggcuggaccggcauggucgacggcugguacggcuaccaccaccagaacgagcagggcuccggcuacgccgccgaccucaaguccacccagaacgccaucgacaagaucaccaacaaggucaacuccgucaucgagaagaugaacacccaguucaccgccgucggcaaggaguucaaccaccucgagaagcgcaucgagaaccucaacaagaaggucgacgacggcuuccucgacaucuggaccuacaacgccgagcuccucguccuccucgagaacgagcgcacccucgacuaccacgacuccaacgucaagaaccucuacgagaagguccgcucccagcucaagaacaacgccaaggagaucggcaacggcugcuucgaguucuaccacaagugcgacaacaccugcauggaguccgucaagaacggcaccuacgacuaccccaaguacuccgaggaggccaagcucaaccgcgaggagaucgacggcgucaagcucgaguccacccgcaucuaccagauccucgccaucuacuccaccgucgccuccucccucguccucgucgucucccucggcgccaucuccuucuggaugugcuccaacggcucccuccagugccgcaucugcaucuga

SEQ ID NO: 101298 - RNA, 1701 nt, Artificial Sequence; identical to SEQ ID NO: 100257
  derived and/or modified CDS sequence (opt2) from hemagglutinin__InfluenzaA__ADK33641

SEQ ID NO: 101299 - RNA, 1701 nt, Artificial Sequence; identical to SEQ ID NO: 99869
  derived and/or modified CDS sequence (opt2) from hemagglutinin__InfluenzaA__ADK33651

SEQ ID NO: 101300 - RNA, 1701 nt, Artificial Sequence; identical to SEQ ID NO: 99869
  derived and/or modified CDS sequence (opt2) from hemagglutinin__InfluenzaA__ADK33661

SEQ ID NO: 101301 - RNA, 1701 nt, Artificial Sequence; identical to SEQ ID NO: 99869
  derived and/or modified CDS sequence (opt2) from hemagglutinin__InfluenzaA__ADK33671

SEQ ID NO: 101302 - RNA, 1701 nt, Artificial Sequence
  derived and/or modified CDS sequence (opt2) from hemagglutinin__InfluenzaA__ADK33681
augaaggccauccucgucguccuccucuacaccuucgccaccgccaacgccgacacccucugcaucggcuaccacgccaacaacuccaccgacaccgucgacaccguccucgagaagaacgucaccgucacccacuccgucaaccuccucgaggacaagcacaacggcaagcucugcaagcuccgcggcgucgccccccuccaccucggcaagugcaacaucgccggcuggauccucggcaaccccgagugcgagucccucuccaccgccuccuccugguccuacaucgucgagaccuccuccuccgacaacggcaccugcuaccccggcgacuucaucgacuacgaggagcuccgcgagcagcucuccuccgucuccuccuucgagcgcuucgagaucuuccccaagaccuccuccuggcccaaccacgacuccaacaagggcgucaccgccgccugcccccacgccggcgccaaguccuucuacaagaaccucaucuggcucgucaagaagggcaacuccuaccccaagcucuccaaguccuacaucaacgacaagggcaaggagguccucguccucuggggcauccaccaccccuccaccuccgccgaccagcagucccucuaccagaacgccgacgccuacgucuucgucggcaccucccgcuacuccaagaaguucaagcccgagaucgccauccgccccaagguccgcgaccaggagggccgcaugaacuacuacuggacccucgucgagcccggcgacaagaucaccuucgaggccaccggcaaccucgucgucccccgcuacgccuucgccauggagcgcaacgccggcuccggcaucaucaucuccgacacccccguccacgacugcaacaccaccugccagacccccaagggcgccaucaacaccucccuccccuuccagaacauccaccccaucaccaucggcaagugccccaaguacgucaaguccaccaagcuccgccucgccaccggccuccgcaacguccccuccauccagucccgcggccucuucggcgccaucgccggcuucaucgagggcggcuggaccggcauggucgacggcugguacggcuaccaccaccagaacgagcagggcuccggcuacgccgccgaccucaaguccacccagaacgccaucgacgagaucaccaacaaggucaacuccgucaucgagaagaugaacacccaguucaccgccgucggcaaggaguucaaccaccucgagaagcgcaucgagaaccucaacaagaaggucgacgacggcuuccucgacaucuggaccuacaacgccgagcuccucguccuccucgagaacgagcgcacccucgacuaccacgacuccaacgucaagaagcucuacgagaagguccgcucccagcucaagaacaacgccaaggagaucggcaacggcugcuucgaguucuaccacaagugcgacaacaccugcauggaguccgucaagaacggcaccuacgacuaccccaaguacuccgaggaggccaagcucaaccgcgaggagaucgacggcgucaagcucgaguccacccgcaucuaccagauccucgccaucuacuccaccgucgccuccucccucguccucgucgucucccucggcgccaucuccuucuggaugugcuccaacggcucccuccagugccgcaucugcaucuga

SEQ ID NO: 101303 - RNA, 1701 nt, Artificial Sequence; identical to SEQ ID NO: 100318
  derived and/or modified CDS sequence (opt2) from hemagglutinin__InfluenzaA__ADK33691

SEQ ID NO: 101304 - RNA, 1701 nt, Artificial Sequence
  derived and/or modified CDS sequence (opt2) from hemagglutinin__InfluenzaA__ADK33701
augaaggccauccucgucguccuccucuacaccuucgccaccgccaacgccgacacccucugcaucggcuaccacgccaacaacuccaccgacaccgucgacaccguccucgagaagaacgucaccgucacccacuccgucaaccuccucgaggacaagcacaacggcaagcucugcaagcuccgcggcgucgccccccuccaccucggcaagugcaacaucgccggcuggauccucggcaaccccgagugcgagucccucuccaccgccuccuccugguccuacaucgucgagaccuccuccuccgacaacggcaccugcuaccccggcgacuucaucgacuacgaggagcuccgcgagcagcucuccuccgucuccuccuucgagcgcuucgagaucuuccccaagaccuccuccuggcccaaccacgacuccaacaagggcgucaccgccgccugcccccacgccggcgccaaguccuucuacaagaaccucaucuggcucgucaagaagggcaacuccuaccccaagcucuccaaguccuacaucaacgacaagggcaaggagguccucguccucuggggcauccaccaccccuccaccuccgccgaccagcagucccucuaccagaacgccgacgccuacgucuucgucggcaccucccgcuacuccaagaaguucaagcccgagaucgccauccgccccaagguccgcgaccaggagggccgcaugaacuacuacuggacccucgucgagcccggcgacaagaucaccuucgaggccaccggcaaccucgucgucccccgcuacgccuucgccauggagcgcaacgccggcuccggcaucaucaucuccgacacccccguccacgacugcaacaccaccugccagacccccaagggcgccaucaacaccucccuccccuuccagaacauccaccccaucaccaucggcaagugccccaaguacgucaaguccaccaagcuccgccucgccaccggccuccgcaacguccccuccauccagucccgcggccucuucggcgccaucgccggcuucaucgagggcggcuggaccggcauggucgacggcugguacggcuaccaccaccagaacgagcagggcuccggcuacgccgccgaccucaaguccacccagaacgccaucgacaagaucaccaacaaggucaacuccgucaucgagaagaugaacacccaguucaccgccgucggcaaggaguucaaccaccucgagaagcgcaucgagaaccucaacaagaaggucgacgacggcuuccucgacaucuggaccuacaacgccgagcuccucguccuccucgagaacgagcgcacccucgacuaccacgacuccaacgucaagaaccucuacgagaagguccgcucccagcucaagaacaacgccaaggagaucggcaacggcugcuucgaguucuaccacaagugcgacaacaccugcauggaguccgucaagaacggcaccuacgacuaccccaaguacuccgaggaggccaagcucaaccgcgaggagaucgacggcgucaagcucgaguccacccgcgucuaccagauccucgccaucuacuccaccgucgccuccucccucguccucgucgucucccucggcgccaucuccuucuggaugugcuccaacggcucccuccagugccgcaucugcaucuga

SEQ ID NO: 101305 - RNA, 1701 nt, Artificial Sequence
  derived and/or modified CDS sequence (opt2) from hemagglutinin__InfluenzaA__ADK33711
augaaggccauccucgucguccuccucuacaccuucgccaccgccaacgccgacacccucugcaucggcuaccacgccaacaacuccaccgacaccgucgacaccguccucgagaagaacgucaccgucacccacuccgucaaccuccucgaggacaagcacaacggcaagcucugcaagcuccgcggcgucgccccccuccaccucggcaagugcaacaucgccggcuggauccucggcaaccccgagugcgagucccucuccaccgccuccuccugguccuacaucgucgagaccuccuccuccgacaacggcaccugcuaccccggcgacuucaucgacuacgaggagcuccgcgagcagcucuccuccgucuccuccuucgagcgcuucgagaucuuccccaagaccuccuccuggcccaaccacgacuccaacaagggcgucaccgccgccugcccccacgccggcgccaaguccuucuacaagaaccucaucuggcucgucaagaagggcaacuccuaccccaagcucuccaaguccuacaucaacgacaagggcaaggagauccucguccucuggggcauccaccaccccuccaccuccgccgaccagcagucccucuaccagaacgccgacgccuacgucuucgucggcaccucccgcuacuccaagaaguucaagcccgagaucgccauccgccccaagguccgcgaccaggagggccgcaugaacuacuacuggacccucgucgagcccggcgacaagaucaccuucgaggccaccggcaaccucgucgucccccgcuacgccuucgccauggagcgcaacgccggcuccggcaucaucaucuccgacacccccguccacgacugcaacaccaccugccagacccccaagggcgccaucaacaccucccuccccuuccagaacauccaccccaucaccaucggcaagugccccaaguacgucaaguccaccaagcuccgccucgccaccggccuccgcaacauccccuccauccagucccgcggccucuucggcgccaucgccggcuucaucgagggcggcuggaccggcauggucgacggcugguacggcuaccaccaccagaacgagcagggcuccggcuacgccgccgaccucaaguccacccagaacgccaucgacgagaucaccaacaaggucaacuccgucaucgagaagaugaacacccaguucaccgccgucggcaaggaguucaaccaccucgagaagcgcaucgagaaccucaacaagaaggucgacgacggcuuccucgacaucuggaccuacaacgccgagcuccucguccuccucgagaacgagcgcacccucgacuaccacgacuccaacgucaagaaccucuacgagaagguccgcucccagcucaagaacaacgccaaggagaucggcaacggcugcuucgaguucuaccacaagugcgacaacaccugcauggaguccgucaagaacggcaccuacgacuaccccaaguacuccgaggaggccaagcucaaccgcgaggagaucgacggcgucaagcucgaguccacccgcaucuaccagauccucgccaucuacuccaccgucgccuccucccucguccucgucgucucccucggcgccaucuccuucuggaugugcuccaacggcucccuccagugccgcaucugcaucuga

SEQ ID NO: 101306 - RNA, 1701 nt, Artificial Sequence
  derived and/or modified CDS sequence (opt2) from hemagglutinin__InfluenzaA__ADK33721
augaaggccauccucgucguccuccucuacaccuucgucaccgccaacgccgacacccucugcaucggcuaccacgccaacaacuccaccgacaccgucgacaccguccucgagaagaacgucaccgucacccacuccgucaaccuccucgaggacaagcacaacggcaagcucugcaagcuccgcggcgucgccccccuccaccucggcaagugcaacaucgccggcuggauccucggcaaccccgagugcgagucccucuccaccgccuccuccugguccuacaucgucgagaccuccuccuccgacaacggcaccugcuaccccggcgacuucaucgacuacgaggagcuccgcgagcagcucuccuccgucuccuccuucgagcgcuucgagaucuuccccaagaccuccuccuggcccaaccacgacuccaacaagggcgucaccgccgccugcccccacgccggcgccaaguccuucuacaagaaccucaucuggcucgucaagaagggcaacuccuaccccaagcucuccaaguccuacaucaacgacaagggcaaggagguccucguccucuggggcauccaccaccccuccaccuccgccgaccagcagucccucuaccagaacgccgacgccuacgucuucgucggcaccucccgcuacuccaagaaguucaagcccgagaucgccauccgccccaagguccgcgaccaggagggccgcaugaacuacuacuggacccucgucgagcccggcgacaagaucaccuucgaggccaccggcaaccucgucgucccccgcuacgccuucgccauggagcgcaacgccggcuccggcaucaucaucuccgacacccccguccacgacugcaacaccaccugccagacccccaagggcgccaucaacaccucccuccccuuccagaacauccaccccaucaccaucggcaagugccccaaguacgucaaguccaccaagcuccgccucgccaccggccuccgcaacguccccuccauccagucccgcggccucuucggcgccaucgccggcuucaucgagggcggcuggaccggcauggucgacggcugguacggcuaccaccaccagaacgagcagggcuccggcuacgccgccgaccucaaguccacccagcacgccaucgacgagaucaccaacaaggucaacuccgucaucgagaagaugaacacccaguucaccgccgucggcaaggaguucaaccaccucgagaagcgcaucgagaaccucaacaagaaggucgacgacggcuuccucgacaucuggaccuacaacgccgagcuccucguccuccucgagaacgagcgcacccucgacuaccacgacuccaacgucaagaaccucuacgagaagguccgcucccagcucaagaacaacgccaaggagaucggcaacggcugcuucgaguucuaccacaagugcgacaacaccugcauggaguccgucaagaacggcaccuacgacuaccccaaguacuccgaggaggccaagcucaaccgcgaggagaucgacggcgucaagcucgaguccacccgcaucuaccagauccucgccaucuacuccaccgucgccuccucccucguccucgucgucucccucggcgccaucuccuucuggaugugcuccaacggcucccuccagugccgcaucugcaucuga

SEQ ID NO: 101307 - RNA, 1701 nt, Artificial Sequence
  derived and/or modified CDS sequence (opt2) from hemagglutinin__InfluenzaA__ADK33731
augaaggccacccucgucguccuccucuacaccuucgccaccgccaacgccgacacccucugcaucggcuaccacgccaacaacuccaccgacaccgucgacaccguccucgagaagaacgucaccgucacccacuccgucaaccuccucgaggacaagcacaacggcaagcucugcaagcuccgcggcgucgccccccuccaccucggcaagugcaacaucgccggcuggauccucggcaaccccgagugcgagucccucuccaccgccuccuccugguccuacaucgucgagaccuccuccuccggcaacggcaccugcuaccccggcgacuucaucgacuacgaggagcuccgcgagcagcucuccuccgucuccuccuucgagcgcuucgagaucuuccccaagaccuccuccuggcccaaccacgacuccaacaagggcgucaccgccgccugcccccacgccggcgccaaguccuucuacaagaaccucaucuggcucgucaagaagggcaacuccuaccccaagcucuccaaguccuacaucaacgacaagggcaaggagguccucguccucuggggcauccaccaccccuccaccuccgccgaccagcagucccucuaccagaacgccgacgccuacgccuucgucggcaccucccgcuacuccaagaaguucaagcccgagaucgccauccgccccaagguccgcgaccaggagggccgcaugaacuacuacuggacccucgucgagcccggcgacaagaucaccuucgaggccaccggcaaccuccucgucccccgcuacgccuucgccauggagcgcaacgccggcuccggcaucaucaucuccgacacccccguccacgacugcaacaccaccugccagacccccaagggcgccaucaacaccucccuccccuuccagaacauccaccccaucaccaucggcaagugccccaaguacgucaaguccaccaagcuccgccucgccaccggccuccgcaacguccccuccauccagucccgcggccucuucggcgccaucgccggcuucaucgagggcggcuggaccggcauggucgacggcugguacggcuaccaccaccagaacgagcagggcuccggcuacgccgccgaccucaaguccacccagaacgccaucgacgagaucaccaacaaggucaacuccgucaucgagaagaugaacacccaguucaccgccgucggcaaggaguucaaccaccucgagaagcgcaucgagaaccucaacaagaaggucgacgacggcuuccucgacaucuggaccuacaacgccgagcuccucguccuccucgagaacgagcgcacccucgacuaccacgacuccaacgucaagaaccucuacgagaagguccgcucccagcucaagaacaacgccaaggagaucggcaacggcugcuucgaguucuaccacaagugcgacaacaccugcauggaguccgucaagaacggcaccuacgacuaccccaaguacuccgaggaggccaagcucaaccgcgaggagaucgacggcgucaagcucgaguccacccgcaucuaccagauccucgccaucuacuccaccgucgccuccucccucguccucgucgucucccucggcgccaucuccuucuggaugugcuccaacggcucccuccagugccgcaucugcaucuga

SEQ ID NO: 101308 - RNA, 1701 nt, Artificial Sequence; identical to SEQ ID NO: 100872
  derived and/or modified CDS sequence (opt2) from hemagglutinin__InfluenzaA__ADK33741

SEQ ID NO: 101309 - RNA, 1701 nt, Artificial Sequence; identical to SEQ ID NO: 98705
  derived and/or modified CDS sequence (opt2) from hemagglutinin__InfluenzaA__ADK33751

SEQ ID NO: 101310 - RNA, 1701 nt, Artificial Sequence
  derived and/or modified CDS sequence (opt2) from hemagglutinin__InfluenzaA__ADK33761
augaaggccauccucgucguccuccucuacaccuucgccaccgccaacgccgacacccucugcaucggcuaccacgccaacaacuccaccgacaccgucgacaccguccucgagaagaacgucaccgucacccacuccgucaaccuccucgaggacaagcacaacggcaagcucugcaagcuccgcggcgucgccccccuccaccucggcaagugcaacaucgccggcuggauccucggcaaccccgagugcgagucccucuccaccgccuccuccugguccuacaucgucgagaccuccuccuccgacaacggcaccugcuaccccggcgacuucaucgacuacgaggagcuccgcgagcagcucuccuccgucuccuccuucgagcgcuucgagaucuuccccaagaccuccuccuggcccaaccacgacuccaacaagggcgucaccgccgccugcccccacgccggcgccaaguccuucuacaagaaccucaucuggcucgucaagaagggcaacuccuaccccaagcucuccaaguccuacaucaacgacaagggcaaggagguccucguccucuggggcauccaccaccccuccaccuccgccgaccagcagucccucuaccagaacgccgacgccuacgucuucgucggcaccucccgcuacuccaagaaguucaagcccgagaucgccauccgccccaagguccgcgaccaggagggccgcaugaacuacuacuggacccucgucgagcccggcgacaagaucaccuucgaggccaccggcaaccucgucgucccccgcuacgccuucgccauggagcgcaacgccggcuccggcaucaucaucuccgacacccccguccacgacugcaacaccaccugccagacccccaagggcgccaucaacaccucccuccccuuccagaacauccaccccaucaccaucggcaagugccccaaguacgucaaguccaccaagcucucccucgccaccggccuccgcaacguccccuccauccagucccgcggccucuucggcgccaucgccggcuucaucgagggcggcuggaccggcauggucgacggcugguacggcuaccaccaccagaacgagcagggcuccggcuacgccgccgaccucaaguccacccagaacgccaucgacgagaucaccaacaaggucaacuccgucaucgagaagaugaacacccaguucaccgccgucggcaaggaguucaaccaccucgagaagcgcaucgagaaccucaacaagaaggucgacgacggcuuccucgacaucuggaccuacaacgccgagcuccucguccuccucgagaacgagcgcacccucgacuaccacgacuccaacgucaagaaccucuacgagaagguccgcucccagcucaagaacaacgccaaggagaucggcaacggcugcuucgaguucuaccacaagugcgacaacaccugcauggaguccgucaagaacggcaccuacgacuaccccaaguacuccgaggaggccaagcucaaccgcgaggagaucgacggcgucaagcucgaguccacccgcaucuaccagauccucgccaucuacuccaccgucgccuccucccucguccucgucgucucccucggcgccaucuccuucuggaugugcuccaacggcucccuccagugccgcaucugcaucuga

SEQ ID NO: 101311 - RNA, 1701 nt, Artificial Sequence; identical to SEQ ID NO: 99869
  derived and/or modified CDS sequence (opt2) from hemagglutinin__InfluenzaA__ADK33771

SEQ ID NO: 101312 - RNA, 1701 nt, Artificial Sequence; identical to SEQ ID NO: 99869
  derived and/or modified CDS sequence (opt2) from hemagglutinin__InfluenzaA__ADK33781

SEQ ID NO: 101313 - RNA, 1701 nt, Artificial Sequence; identical to SEQ ID NO: 99806
  derived and/or modified CDS sequence (opt2) from hemagglutinin__InfluenzaA__ADK33791

SEQ ID NO: 101314 - RNA, 1701 nt, Artificial Sequence; identical to SEQ ID NO: 101304
  derived and/or modified CDS sequence (opt2) from hemagglutinin__InfluenzaA__ADK33801

SEQ ID NO: 101315 - RNA, 1701 nt, Artificial Sequence
  derived and/or modified CDS sequence (opt2) from hemagglutinin__InfluenzaA__ADK33811
augaaggccauccucgucguccuccucuacaccuucgccaccgccaacgccgacacccucugcaucggcuaccacgccaacaacuccaccgacaccgucgacaccguccucgagaagaacgucaccgucacccacuccgucaaccuccucgaggacaagcacaacggcaagcucugcaagcuccgcggcgucgccccccuccaccucggcaagugcaacaucgccggcuggauccucggcaaccccgagugcgagucccucuccaccgccuccuccugguccuacaucgucgagaccuccuccuccgacaacggcaccugcuaccccggcgacuucaucgacuacgaggagcuccgcgagcagcucuccuccgucuccuccuucgagcgcuucgagaucuuccccaagaccuccuccuggcccaaccacgacuccaacaagggcgucaccgccgccugcccccacgccggcgccaaguccuucuacaagaaccucaucuggcucgucaagaagggcaacuccuaccccaagcucuccaaguccuacaucaacgacaagggcaaggagguccucguccucuggggcauccaccaccccuccaccuccgccgaccagcagucccucuaccagaacgccgacgccuacgucuucgucggcaccucccgcuacuccaagaaguucaagcccgagaucgccauccgccccaagguccgcgaccaggagggccgcaugaacuacuacuggacccucgucgagcccggcgacaagaucaccuucgaggccaccggcaaccucgucgucccccgcuacgccuucgccauggagcgcaacgccggcuccggcaucaucaucuccgacacccccguccacgacugcaacaccaccugccagacccccaagggcgccaucaacaccucccuccccuuccagaacauccaccccaucaccaucggcaagugccccaaguacgucaaguccaccaagcuccgccucgccaccggccuccgcaacguccccuccauccagucccgcggccucuucggcgccaucgccggcuucaucgagggcggcuggaccggcauggucgacggcugguacggcuaccaccaccagaacgagcagggcuccggcuacgccgccgaccucaaguccacccagcacgccaucgacgagaucaccaacaaggucaacuccgucaucgagaagaugaacacccaguucaccgccgucggcaaggaguucaaccaccucgagaagcgcaucgagaaccucaacaagaaggucgacgacggcuuccucgacaucuggaccuacaacgccgagcuccucguccuccucgagaacgagcgcacccucgacuaccacgacuccaacgucaagaaccucuacgagaagguccgcucccagcucaagaacaacgccaaggagaucggcaacggcugcuucgaguucuaccacaagugcgacaacaccugcauggaguccgucaagaacggcaccuacgacuaccccaaguacuccgaggaggccaagcucaaccgcgaggagaucgacggcaucaagcucgaguccacccgcaucuaccagauccucgccaucuacuccaccgucgccuccucccucguccucgucgucucccucggcgccaucuccuucuggaugugcuccaacggcucccuccagugccgcaucugcaucuga

SEQ ID NO: 101316 - RNA, 1701 nt, Artificial Sequence
  derived and/or modified CDS sequence (opt2) from hemagglutinin__InfluenzaA__ADK33821
augaaggccauccucgucguccuccucuacaccuucgccaccgccaacgccgacacccucugcaucggcuaccacgccaacaacuccaccgacaccgucgacaccguccucgagaagaacgucaccgucacccacuccgucaaccuccucgaggacaagcacaacggcaagcucugcaagcuccgcggcgucgccccccuccaccucggcaagugcaacaucgccggcuggauccucggcaaccccgagugcgagucccucuccaccgccuccuccugguccuacaucgucgagaccuccuccuccgacaacggcaccugcuaccccggcgacuucaucgacuacgaggagcuccgcgagcagcucuccuccgucuccuccuucgagcgcuucgagaucuuccccaagaccuccuccuggcccaaccacgacuccaacaagggcgucaccgccgccugcccccacgccggcgccaaguccuucuacaagaaccucaucuggcucgucaagaagggcaacuccuaccccaagcucuccaaguccuacaucaacgacaagggcaaggagguccucguccucuggggcauccaccaccccuccaccuccgccgaccagcagucccucuaccagaacgccgacgccuacgucuucgucggcaccucccgcuacuccaagaaguucaagcccgagaucgccauccgccccaagguccgcgaccaggagggccgcaugaacuacuacuggacccucgucgagcccggcgacaagaucaccuucgaggccaccggcaaccucgucgucccccgcuacgccuucaccauggagcgcaacgccggcuccggcaucaucaucuccgacacccccguccacgacugcaacaccaccugccagacccccaagggcgccaucaacaccucccuccccuuccagaacauccaccccaucaccaucggcaagugccccaaguacgucaaguccaccaagcuccgccucgccaccggccuccgcaacguccccuccauccagucccgcggccucuucggcgccaucgccggcuucaucgagggcggcuggaccggcauggucgacggcugguacggcuaccaccaccagaacgagcagggcuccggcuacgccgccgaccucaaguccacccagaacgccaucgacgagaucaccaacaaggucaacuccgucaucgagaagaugaacacccaguucaccgccgucggcaaggaguucaaccaccucgagaagcgcaucgagaaccucaacaagaaggucgacgacggcuuccucgacaucuggaccuacaacgccgagcuccucguccuccucgagaacgagcgcacccucgacuaccacgacuccaacgucaagaaccucuacgagaagguccgcaaccagcucaagaacaacgccaaggagaucggcaacggcugcuucgaguucuaccacaagugcgacaacaccugcauggaguccgucaagaacggcaccuacgacuaccccaaguacuccgaggaggccaagcucaaccgcgaggagaucgacggcgucaagcucgaguccacccgcaucuaccagauccucgccaucuacuccaccgucgccuccucccucguccucgccgucucccucggcgccaucuccuucuggaugugcuccaacggcucccuccagugccgcaucugcaucuga

SEQ ID NO: 101317 - RNA, 1701 nt, Artificial Sequence
  derived and/or modified CDS sequence (opt2) from hemagglutinin__InfluenzaA__ADK33831
augaaggccauccucgucguccuccucuacaccuucgccaccgccaacgccgacacccucugcaucggcuaccacgccaacaacuccaccgacaccgucgacaccguccucgagaagaacgucaccgucacccacuccgucaaccuccucgaggacaagcacaacggcaagcucugcaagcuccgcggcaucgccccccuccaccucggcaagugcaacaucgccggcuggauccucggcaaccccgagugcgagucccucuccaccgccuccuccugguccuacaucgucgagaccuccuccuccgacaacggcaccugcuaccccggcgacuucaucgacuacgaggagcuccgcgagcagcucuccuccgucuccuccuucgagcgcuucgagaucuuccccaacaccuccuccuggcccaaccacgacuccaacaagggcgucaccgccgccugcccccacgccggcgccaaguccuucuacaagaaccucaucuggcucgucaagaagggcaacuccuaccccaagcucuccaaguccuacaucaacgacaagggcaaggagguccucguccucuggggcauccaccaccccuccaccuccgccgaccagcagucccucuaccagaacgccgacgccuacgucuucgucggcaccucccgcuacuccaagaaguucaagcccgagaucgccauccgccccaagguccgcgaccaggagggccgcaugaacuacuacuggacccucgucgagcccggcgacaagaucaccuucgaggccaccggcaaccucgucgucccccgcuacgccuucgccauggagcgcaacgccggcuccggcaucaucaucuccgacacccccguccacgacugcaacaccaccugccagacccccaagggcgccaucaacaccucccuccccuuccagaacauccaccccaucaccaucggcaagugccccaaguacgucaaguccaccaagcuccgccucgccaccggccuccgcaacguccccuccauccagucccgcggccucuucggcgccaucgccggcuucaucgagggcggcuggaccggcauggucgacggcugguacggcuaccaccaccagaacgagcagggcuccggcuacgccgccgaccucaaguccacccagaacgccaucgacgagaucaccaacaaggucaacuccgucaucgagaagaugaacacccaguucaccgccgucggcaaggaguucaaccaccucgagaagcgcaucgagaaccucaacaagaaggucgacgacggcuuccucgacaucuggaccuacaacgccgagcuccucguccuccucgagaacgagcgcacccucgacuaccacgacuccaacgucaagaaccucuacgagaagguccgcucccagcucaagaacaacgccaaggagaucggcaacggcugcuucgaguucuaccacaagugcgacaacaccugcauggaguccgucaagaacggcaccuacgacuaccccaaguacuccgaggaggccaagcucaaccgcgaggagaucgacggcgucaagcucgaguccacccgcaucuaccagauccucgccaucuacuccaccgucgccuccucccucguccucgucgucucccucggcgccaucuccuucuggaugugcuccaacggcucccuccagugccgcaucugcaucuga

SEQ ID NO: 101318 - RNA, 1701 nt, Artificial Sequence; identical to SEQ ID NO: 100125
  derived and/or modified CDS sequence (opt2) from hemagglutinin__InfluenzaA__ADK33841

SEQ ID NO: 101319 - RNA, 1701 nt, Artificial Sequence; identical to SEQ ID NO: 100872
  derived and/or modified CDS sequence (opt2) from hemagglutinin__InfluenzaA__ADK33851

SEQ ID NO: 101320 - RNA, 1701 nt, Artificial Sequence; identical to SEQ ID NO: 98705
  derived and/or modified CDS sequence (opt2) from hemagglutinin__InfluenzaA__ADK33861

SEQ ID NO: 101321 - RNA, 1701 nt, Artificial Sequence
  derived and/or modified CDS sequence (opt2) from hemagglutinin__InfluenzaA__ADK33871
augaaggccauccucgucguccuccucuacaccuucgccaccgccaacgccgacacccucugcaucggcuaccacgccaacaacuccaccgacaccgucgacaccguccucgagaagaacgucaccgucacccacuccgucaaccuccucgaggacaagcacaacggcaagcucugcaagcuccgcggcgucgccccccuccaccucggcaagugcaacaucgccggcuggauccucggcaaccccgagugcgagucccucuccaccgccuccuccugguccuacaucgucgagaccuccuccuccgacaacggcaccugcuaccccggcgacuucaucgacuacgaggagcuccgcgagcagcucuccuccgucuccuccuucgagcgcuucgagaucuuccccaagaccuccuccuggcccaaccacgacuccaacaagggcgucaccgccgccugcccccacgccggcgccaaguccuucuacaagaaccucaucuggcucgucaagaagggcaacuccuaccccaagcucuccaaguccuacaucaacgacaagggcaaggagguccucguccucuggggcauccaccaccccuccaccuccgccgaccagcagucccucuaccagaacgccgacgccuacgucuucgucggcaccucccgcuacuccaagaaguucaagcccgagaucgccauccgccccaagguccgcgagcaggagggccgcaugaacuacuacuggacccucgucgagcccggcgacaagaucaccuucgaggccaccggcaaccucgucaucccccgcuacgccuucgccauggagcgcaacgccggcuccggcaucaucaucuccgacacccccguccacgacugcaacaccaccugccagacccccaagggcgccaucaacaccucccuccccuuccagaacauccaccccaucaccaucggcaagugccccaaguacgucaaguccaccaagcuccgccucgccaccggccuccgcaacguccccuccauccagucccgcggccucuucggcgccaucgccggcuucaucgagggcggcuggaccggcauggucgacggcugguacggcuaccaccaccagaacgagcagggcuccggcuacgccgccgaccucaaguccacccagaacgccaucgacgagaucaccaacaaggucaacuccgucaucgagaagaugaacacccaguucaccgccgucggcaaggaguucaaccaccucgagaagcgcaucgagaaccucaacaagaaggucgacgacggcuuccucgacaucuggaccuacaacgccgagcuccucguccuccucgagaacgagcgcacccucgacuaccacgacuccaacgucaagaaccucuacgagaagguccgcucccagcucaagaacaacgccaaggagaucggcaacggcugcuucgaguucuaccacaagugcgacaacaccugcauggaguccgucaagaacggcaccuacgacuaccccaaguacuccgaggaggccaagcucaaccgcgaggagaucgacggcgucaagcucgaguccacccgcaucuaccagauccucgccaucuacuccaccgucgccuccucccucguccuccucgucucccucggcgccaucuccuucuggaugugcuccaacggcucccuccagugccgcaucugcaucuga

SEQ ID NO: 101322 - RNA, 1701 nt, Artificial Sequence
  derived and/or modified CDS sequence (opt2) from hemagglutinin__InfluenzaA__ADK33881
augaaggccauccucgucguccuccucuacaccuucgccaccgccaacgccgacacccucugcaucggcuaccacgccaacaacuccaccgacaccgucgacaccguccucgagaagaacgucaccgucacccacuccgucaacauccucgaggacaagcacaacggcaagcucugcaagcuccgcggcgucgccccccuccaccucggcaagugcaacaucgccggcuggauccucggcaaccccgagugcgagucccucuccaccgccuccuccugguccuacaucgucgagaccuccuccuccgacaacggcaccugcuaccccggcgacuucaucgacuacgaggagcuccgcgagcagcucuccuccgucuccuccuucgagcgcuucgagaucuuccccaagaccuccuccuggcccaaccacgacuccaacaagggcgucaccgccgccugcccccacgccggcgccaaguccuucuacaagaaccucaucuggcucgucaagaagggcaacuccuaccccaagcucuccaaguccuacaucaacgacaagggcaaggagguccucguccucuggggcauccaccaccccuccaccuccgccgaccagcagucccucuaccagaacgccgacgccuacgucuucgucggcaccucccgcuacuccaagaaguucaagcccgagaucgccauccgccccaagguccgcgaccaggagggccgcaugaacuacuacuggacccucgucgagcccggcgacaagaucaccuucgaggccaccggcaaccucgucgucccccgcuacgccuucgccauggagcgcaacgccggcuccggcaucaucaucuccgacacccccguccacgacugcaacaccaccugccagacccccaagggcgccaucaacaccucccuccccuuccagaacauccaccccaucaccaucggcaagugccccaaguacgucaaguccaccaagcuccgccucgccaccggccuccgcaacguccccuccauccagucccgcggccucuucggcgccaucgccggcuucaucgagggcggcuggaccggcauggucgacggcugguacggcuaccaccaccagaacgagcagggcuccggcuacgccgccgaccucaaguccacccagaacgccaucgacgagaucaccaacaaggucaacuccgucaucgagaagaugaacacccaguucaccgccgucggcaaggaguucaaccaccucgagaagcgcaucgagaaccucaacaagaaggucgacgacggcuuccucgacaucuggaccuacaacgccgagcuccucguccuccucgagaacgagcgcacccucgacuaccacgacuccaacgucaagaaccucuacgagaagguccgcucccagcucaagaacaacgccaaggagaucggcaacggcugcuucgaguucuaccacaagugcgacaacaccugcauggaguccgucaagaacggcaccuacgacuaccccaaguacuccgaggaggccaagcucaaccgcgaggagaucgacggcgucaagcucgaguccaccaagaucuaccagauccucgccaucuacuccaccgucgccuccucccucguccucgucgucucccucggcgccaucuccuucuggaugugcuccaacggcucccuccagugccgcaucugcaucuga

SEQ ID NO: 101323 - RNA, 1701 nt, Artificial Sequence
  derived and/or modified CDS sequence (opt2) from hemagglutinin__InfluenzaA__ADK33891
augaaggccauccucgucguccuccucuacaccuucgccaccgccaacgccgacacccucugcaucggcuaccacgccaacaacuccaccgacaccgucgacaccguccucgagaagaacgucaccgucacccacuccgucaaccuccucgaggacaagcacaacggcaagcucugcaagcuccgcggcaucgccccccuccaccucggcaagugcaacaucgccggcuggauccucggcaaccccgagugcgagucccucuccaccgccuccuccugguccuacaucgucgagaccuccuccuccgacaacggcaccugcuaccccggcgacuucaucgacuacgaggagcuccgcgagcagcucuccuccgucuccuccuucgagcgcuucgagaucuuccccaagaccuccuccuggcccaaccacgacuccaacaagggcgucaccgccgccugcccccacgccggcgccaaguccuucuacaagaaccucaucuggcucgucaagaagggcaacuccuaccccaagcucuccaaguccuacaucaacgacaagggcaaggagguccucguccucuggggcauccaccaccccuccaccuccgccgaccagcagucccucuaccagaacgccgacgccuacgucuucgucggcaccucccgcuacuccaagaaguucaagcccgagaucgccauccgccccaagguccgcgaccaggagggccgcaugaacuacuacuggacccucgucgagcccggcgacaagaucaccuucgaggccaccggcaaccucgucgucccccgcuacgccuucgccauggagcgcaacgccggcuccggcaucaucaucuccgacacccccguccacgacugcaacaccaccugccagacccccaagggcgccaucaacaccucccuccccuuccagaacauccaccccaucaccaucggcaagugccccaaguacgucaaguccaccaagcuccgccucgccaccggccuccgcaacguccccuccauccagucccgcggccucuucggcgccaucgccggcuucaucgagggcggcuggaccggcauggucgacggcugguacggcuaccaccaccagaacgagcagggcuccggcuacgccgccgaccucaaguccacccagaacgccaucgacgagaucaccaacaaggucaacuccgucaucgagaagaugaacacccaguucaccgccgucggcaaggaguucaaccaccucgagaagcgcaucgagaaccucaacaagaaggucgacgacggcuuccucgacaucuggaccuacaacgccgagcuccucguccuccucgagaacgagcgcacccucgacuaccacgacuccaacgucaagaaccucuacgagaagguccgcaaccagcucaagaacaacgccaaggagaucggcaacggcugcuucgaguucuaccacaagugcgacaacaccugcauggaguccgucaagaacggcaccuacgacuaccccaaguacuccgaggaggccaagcucaaccgcgaggagaucgacggcgucaagcucgaguccacccgcaucuaccagauccucgccaucuacuccaccgucgccuccucccucguccucgucgucucccucggcgccaucuccuucuggaugugcuccaacggcucccuccagugccgcaucugcaucuga

SEQ ID NO: 101324 - RNA, 1701 nt, Artificial Sequence; identical to SEQ ID NO: 100872
  derived and/or modified CDS sequence (opt2) from hemagglutinin__InfluenzaA__ADK33901

SEQ ID NO: 101325 - RNA, 1701 nt, Artificial Sequence
  derived and/or modified CDS sequence (opt2) from hemagglutinin__InfluenzaA__ADK33911
augaaggccauccucgucguccuccucuacaccuucgccaccgccaacgccgacacccucugcaucggcuaccacgccaacaacuccaccgacaccgucgacaccguccucgagaagaacgucaccgucacccacuccgucaaccuccucgagggcaagcacaacggcaagcucugcaagcuccgcggcgucgccccccuccaccucggcaagugcaacaucgccggcuggauccucggcaaccccgagugcgagucccucuccaccgccuccuccugguccuacaucgucgagaccuccuccuccgacaacggcaccugcuaccccggcgacuucaucgacuacgaggagcuccgcgagcagcucuccuccgucuccuccuucgagcgcuucgagaucuuccccaagaccuccuccuggcccaaccacgacuccaacaagggcgucaccgccgccugcccccacgccggcgccaaguccuucuacaagaaccucaucuggcucaucaagaagggcaacuccuaccccaagcucuccaaguccuacaucaacgacaagggcaaggagguccucguccucuggggcauccaccaccccuccaccuccgccgaccagcagucccucuaccagaacgccgacgccuacgucuucgucggcaccucccgcuacuccaagaaguucaagcccgagaucgccauccgccccaagguccgcgaccaggagggccgcaugaacuacuacuggacccucgucgagcccggcgacaagaucaccuucgaggccaccggcaaccucgucgucccccgcuacgccuucgccauggagcgcaacgccggcuccggcaucaucaucuccgacacccccguccacgacugcaacaccaccugccagacccccaagggcgccaucaacaccucccuccccuuccagaacauccaccccaucaccaucggcaagugccccaaguacgucaaguccaccaagcuccgccucgccaccggccuccgcaacauccccuccauccagucccgcggccucuucggcgccaucgccggcuucaucgagggcggcuggaccggcauggucgacggcugguacggcuaccaccaccagaacgagcagggcuccggcuacgccgccgaccucaaguccacccagaacgccaucgacgagaucaccaacaaggucaacuccgucaucgagaagaugaacacccaguucaccgccgucggcaaggaguucaaccaccucgagaagcgcaucgagaaccucaacaagaaggucgacgacggcuuccucgacaucuggaccuacaacgccgagcuccucguccuccucgagaacgagcgcacccucgacuaccacgacuccaacgucaagaaccucuacgagaagguccgcucccagcucaagaacaacgccaaggagaucggcaacggcugcuucgaguucuaccacaagugcgacaacaccugcauggaguccgucaagaacggcaccuacgacuaccccaaguacuccgaggaggccaagcucaaccgcgaggagaucgacggcgucaagcucgaguccacccgcaucuaccagauccucgccaucuacuccaccgucgccuccucccucguccucgucgucucccucggcgccaucuccuucuggaugugcuccaacggcucccuccagugccgcaucugcaucuga

SEQ ID NO: 101326 - RNA, 1701 nt, Artificial Sequence
  derived and/or modified CDS sequence (opt2) from hemagglutinin__InfluenzaA__ADK33931
augaaggccauccucgucguccuccucuacaccuucgccaccgccaacgccgacacccucugcaucggcuaccacgccaacaacuccaccgacaccgucgacaccguccucgagaagaacgucaccgucacccacuccgucaaccuccucgaggacaagcacaacggcaagcucugcaagcuccgcggcgucgccccccuccaccucggcaagugcaacaucgccggcuggauccucggcaaccccgagugcgagucccucuccaccgccuccuccugguccuacaucgucgagaccuccuccuccgacaacggcaccugcuaccccggcgacuucaucgacuacgaggagcuccgcgagcagcucuccuccgucuccuccuucgagcgcuucgagaucuuccccaagaccuccuccuggcccaaccacgacuccaacaagggcgucaccgccgccugcccccacgccggcgccaaguccuucuacaagaaccucaucuggcucgucaagaagggcaacuccuaccccaagcucuccaaguccuacaucaacgacaagggcaaggagguccucguccucuggggcauccaccaccccuccaccuccgccgaccagcagucccucuaccagaacgccgacgccuacgucuucgucggcaccucccgcuacuccaagaaguucaagcccgagaucgccauccgccccaagguccgcgagcaggagggccgcaugaacuacuacuggacccucgucgagcccggcgacaagaucaccuucgaggccaccggcaaccucgucgucccccgcuacgccuucgccauggagcgcaacgccggcuccggcaucaucaucuccgacacccccguccacgacugcaacaccaccugccagacccccaagggcgccaucaacaccucccuccccuuccagaacauccaccccaucaccaucggcaagugccccaaguacgucaaguccaccaagcuccgccucgccaccggccuccgcaacguccccuccauccagucccgcggccucuucggcgccaucgccggcuucaucgagggcggcuggaccggcauggucgacggcugguacggcuaccaccaccagaacgagcagggcuccggcuacgccgccgaccucaaguccacccagaacgccaucgacgagaucaccaacaaggucaacuccgucaucgagaagaugaacacccaguucaccgccgucggcaaggaguucaaccaccucgagaagcgcaucgagaaccucaacaagaaggucgacgacggcuuccucgacaucuggaccuacaacgccgagcuccucguccuccucgagaacgagcgcacccucgacuaccacgacuccaacgucaagaaccucuacgagaagguccgcucccagcucaagaacaacgccaaggagaucggcaacggcugcuucgaguucuaccacaagugcgacaacaccugcauggaguccgucaagaacggcaccuacgacuaccccaaguacuccgaggaggccaagcucaaccgcgaggagaucgacggcgucaagcucgaguccacccgcaucuaccagauccucgccaucuacuccaccgucgccuccucccucguccuccucgucucccucggcgccaucuccuucuggaugugcuccaacggcucccuccagugccgcaucugcaucuga

SEQ ID NO: 101327 - RNA, 1701 nt, Artificial Sequence
  derived and/or modified CDS sequence (opt2) from hemagglutinin__InfluenzaA__ADK33941
augaaggccauccucgucguccuccucuacaccuucgccaccgccaacgccgacacccucugcaucggcuaccacgccaacaacuccaccgacaccgucgacaccguccucgagaagaacgucaccgucacccacuccgucaaccuccucgaggacaagcacaacggcaagcucugcaagcuccgcggcgucgccccccuccaccucggcaagugcaacaucgccggcuggauccucggcaaccccgagugcgagucccucuccaccgccuccuccugguccuacaucgucgagaccuccuccuccgacaacggcaccugcuaccccggcgacuucaucgacuacgaggagcuccgcgagcagcucuccuccgucuccuccuucgagcgcuucgagaucuuccccaagaccuccuccuggcccaaccacgacuccaacaagggcgucaccgccgccugcccccacgccggcgccaaguccuucuacaagaaccucaucuggcucgucaagaagggcaacuccuaccccaagcucuccaaguccuacaucaacgacaagggcaaggagguccucguccucuggggcauccaccaccccuccaccuccgccgaccagcagucccucuaccagaacgccgacgccuacgucuucgucggcaccucccgcuacuccaagaaguucaagcccgagaucgccauccgccccaagguccgcgaccaggagggccgcaugaacuacuacuggacccucgucgagcccggcgacaagaucaccuucgaggccaccggcaaccucgucgucccccgcuacgccuucgccauggagcgcaacgccggcuccggcaucgucaucuccgacacccccguccacgacugcaacaccaccugccagacccccaagggcgccaucaacaccucccuccccuuccagaacauccaccccaucaccaucggcaagugccccaaguacgucaaguccaccaagcuccgccucgccaccggccuccgcaacauccccuccauccagucccgcggccucuucggcgccaucgccggcuucaucgagggcggcuggaccggcauggucgacggcugguacggcuaccaccaccagaacgagcagggcuccggcuacgccgccgaccucaaguccacccagaacgccaucgacaagaucaccaacaaggucaacuccgucaucgagaagaugaacacccaguucaccgccgucggcaaggaguucaaccaccucgagaagcgcaucgagaaccucaacaagaaggucgacgacggcuuccucgacaucuggaccuacaacgccgagcuccucguccuccucgagaacgagcgcacccucgacuaccacgacuccaacgucaagaaccucuacgagaagguccgcucccagcucaagaacaacgccaaggagaucggcaacggcugcuucgaguucuaccacaagugcgacaacaccugcauggaguccgucaagaacggcaccuacgacuaccccaaguacuccgaggaggccaagcucaaccgcgaggagaucgacggcgucaagcucgaguccacccgcaucuaccagauccucgccaucuacuccaccgucgccuccucccucguccucgucgucucccucggcgccaucuccuucuggaugugcuccaacggcucccuccagugccgcaucugcaucuga

SEQ ID NO: 101328 - RNA, 1701 nt, Artificial Sequence; identical to SEQ ID NO: 101325
  derived and/or modified CDS sequence (opt2) from hemagglutinin__InfluenzaA__ADK33951

SEQ ID NO: 101329 - RNA, 1701 nt, Artificial Sequence; identical to SEQ ID NO: 99869
  derived and/or modified CDS sequence (opt2) from hemagglutinin__InfluenzaA__ADK33961

SEQ ID NO: 101330 - RNA, 1701 nt, Artificial Sequence; identical to SEQ ID NO: 99649
  derived and/or modified CDS sequence (opt2) from hemagglutinin__InfluenzaA__ADK45312

SEQ ID NO: 101331 - RNA, 1701 nt, Artificial Sequence
  derived and/or modified CDS sequence (opt2) from hemagglutinin__InfluenzaA__ADK45410
augaagaccaucaucgcccucuccuacauccucugccucgucuucgcccagaagcuccccggcaacgacaacuccaccgccacccucugccucggccaccacgccguccccaacggcaccaucgucaagaccaucaccaacgaccagaucgaggucaccaacgccaccgagcucguccaguccuccuccaccggcgagaucugcgacuccccccaccagauccucgacggcgagaacugcacccucaucgacgcccuccucggcgacccccagugcgacggcuuccagaacaagaagugggaccucuucgucgagcgcuccaaggcccacuccaacugcuaccccuacgacguccccgacuacgccucccuccgcucccucgucgccuccuccggcacccucgaguucaacaacgaguccuucaacuggaccggcgucacccagaacggcaccuccuccgccugcauccgccgcuccaacaacuccuucuucucccgccucaacuggcucacccaccucaaguucaaguaccccgcccucaacgucaccaugcccaacaacgagcaguucgacaagcucuacaucuggggcguccaccaccccggcaccgacaacgaccagaucuuccucuacgcccaggccuccggccgcaucaccgucuccaccaagcgcucccagcagaccgucauccccaacaucggcucccgcccccgcguccgcaacauccccucccgcaucuccaucuacuggaccaucgucaagcccggcgacauccuccucaucaacuccaccggcaaccucaucgccccccgcggcuacuucaagauccgcuccggcaaguccuccaucaugcgcuccgacgcccccaucggcaagugcaacuccgagugcaucacccccaacggcuccauccccaacgacaagcccuuccagaacgucaaccgcaucaccuacggcgccugcccccgcuacgucaagcagaacacccucaagcucgccaccggcaugcgcaacguccccgagaagcagacccgcggcaucuucggcgccaucgccggcuucaucgagaacggcugggagggcauggucgacggcugguacggcuuccgccaccagaacuccgagggccgcggccaggccgccgaccucaaguccacccaggccgccaucgaccagaucaacggcaagcucaaccgccucaucggcaagaccaacgagaaguuccaccagaucgagaaggaguucuccgaggucgagggccgcauccaggaccucgagaaguacgucgaggacaccaagaucgaccucugguccuacaacgccgagcuccucgucgcccucgagaaccagcacaccaucgaccucaccgacuccgagaugaacaagcucuucgagaagaccaagaagcagcuccgcgagaacgccgaggacaugggcaacggcugcuucaagaucuaccacaagugcgacaacaccugcaucggcuccauccgcaacggcaccuacgaccacgacgucuaccgcgacgaggcccucaacaaccgcuuccagaucaagggcgucgagcucaaguccggcuacaaggacuggauccucuggaucuccuucgccaucuccugcuuccuccucugcgucgcccuccucggcuucaucaugugggccugccagaagggcaacauccgcugcaacaucugcaucuga

SEQ ID NO: 101332 - RNA, 1701 nt, Artificial Sequence
  derived and/or modified CDS sequence (opt2) from hemagglutinin__InfluenzaA__ADK45421
augaagaccaucaucgcccucuccuacauccucugccucgucuucgcccagaagcuccccggcaacgacaacuccaccgccacccucugccucggccaccacgccguccccaacggcaccaucgucaagaccaucaccaacgaccagaucgaggucaccaacgccaccgagcucguccaguccuccuccaccggcgagaucugcgacuccccccaccagauccucgacggcaagaacugcacccucaucgacgcccuccucggcgacccccagugcgacggcuuccagaacaagaagugggaccucuucgucgagcgcuccaaggccuacuccaacugcuaccccuacgacguccccgacuacgccucccuccgcucccucgucgccuccuccggcacccucgaguucaacaacgaguccuucaacuggaccggcgucacccagaacggcaccuccuccgccugcauccgccgcuccaagaacuccuucuucucccgccucaacuggcucacccaccucaacuucaaguaccccgcccucaacgucaccaugcccaacaacgagcaguucgacaagcucuacaucuggggcguccaccaccccggcaccgacaaggaccagaucuuccucuacgcccaggccuccggccgcaucaccgucuccaccaagcgcucccagcagaccgucauccccaacaucggcucccgcccccgcauccgcaacauccccucccgcaucuccaucuacuggaccaucgucaagcccggcgacauccuccucaucaacuccaccggcaaccucaucgccccccgcggcuacuucaagauccgcuccggcaaguccuccaucaugcgcuccgacgcccccaucggcaagugcaacuccgagugcaucacccccaacggcuccauccccaacgacaagcccuuccagaacgucaaccgcaucaccuacggcgccugcccccgcuacgucaagcaguccacccucaagcucgccaccggcaugcgcaacguccccgagaagcagacccgcggcaucuucggcgccaucgccggcuucaucgagaacggcugggagggcauggucgacggcugguacggcuuccgccaccagaacuccgagggccgcggccaggccgccgaccucaaguccacccaggccgccaucgaccagaucaacggcaagcucaaccgccucaucggcaagaccaacgagaaguuccaccagaucgagaaggaguucuccgaggucgagggccgcauccaggaccucgagaaguacgucgaggacaccaagaucgaccucugguccuacaacgccgagcuccucgucgcccucgagaaccagcacaccaucgaccucaccgacuccgagaugaacaagcucuucgagaagaccaagaagcagcuccgcgagaacgccgaggacaugggcaacggcugcuucaagaucuaccacaagugcgacaacgccugcaucggcuccauccgcaacggcaccuacgaccacgacgucuaccgcgacgaggcccucaacaaccgcuuccagaucaagggcgucgagcucaaguccggcuacaaggacuggauccucuggaucuccuucgccaucuccugcuuccuccucugcgucgcccuccucggcuucaucaugugggccugccagaagggcaacauccgcugcaacaucugcaucuga

SEQ ID NO: 101333 - RNA, 1701 nt, Artificial Sequence
  derived and/or modified CDS sequence (opt2) from hemagglutinin__InfluenzaA__ADK45432
augaagaccaucaucgcccucuccuacacccucugccucgucuucgcccagaagcucccccgcaacgacaacuccaccgccacccucugccucggccaccacgccguccccaacggcaccaucgucaagaccaucaccaacgaccagaucgaggucaccaacgccaccgagcucguccaguccuccuccaccggcgagaucugcgacaacccccaccagauccucgacggcgagaacugcacccucaucgacgcccuccucggcgacccccagugcgacggcuuccagaacaagaagugggaccucuucgucgagcgcuccaaggccuacuccaacugcuaccccuacgacguccccgacuacgccucccuccgcucccucgucgccuccuccggcacccucgaguucaacaacgaguccuucaacuggaccggcgucacccagaacggcaccuccuccgccugcauccgccgcuccaacaacuccuucuucucccgccucaacuggcucacccaccucaaguucaaguaccccgcccucaacgucaccaugcccaacaacgagcaguucgacaagcucuacaucuggggcguccaccaccccggcaccgacaacgaccagaucuuccucuacgcccaggccuccggccgcaucaccgucuccaccaagcgcucccagcagaccgucauccccaacaucggcucccgcccccgcguccgcaacauccccucccgcaucuccaucuacuggaccaucgucaagcccggcgacauccuccucaucaacuccaccggcaaccucaucgccccccgcggcuacuucaagauccgcuccggcaaguccuccaucaugcgcuccgacgcccccaucggcaagugcaacuccgagugcaucacccccaacggcuccauccccaacgacaagcccuuccagaacgucaaccgcaucaccuacggcgccugcccccgcuacgucaagcagaacacccucaagcucgccaccggcaugcgcaacguccccgagaagcagacccgcggcaucuucggcgccaucgccggcuucaucgagaacggcugggagggcauggucgacggcugguacggcuuccgccaccagaacuccgagggccgcggccaggccgccgaccucaaguccacccaggccgccaucgaccagaucaacggcaagcucaaccgccucaucggcaagaccaacgagaaguuccaccagaucgagaaggaguucuccgaggucgagggccgcauccaggaccucgagaaguacgucgaggacaccaagaucgaccucugguccuacaacgccgagcuccucgucgcccucgagaaccagcacaccaucgaccucaccgacuccgagaugaacaagcucuucgagaagaccaagaagcagcuccgcgagaacgccgaggacaugggcaacggcugcuucaagaucuaccacaagugcgacaacgccugcaucggcuccauccgcaacggcaccuacgaccacgacgucuaccgcgacgaggcccucaacaaccgcuuccagaucaagggcgucgagcucaaguccggcuacaaggacuggauccucuggaucuccuucgccaucuccugcuuccuccucugcgucgcccuccucggcuucaucaugugggccugccagaagggcaacauccgcugcaacaucugcaucuga

SEQ ID NO: 101334 - RNA, 1701 nt, Artificial Sequence; identical to SEQ ID NO: 98470
  derived and/or modified CDS sequence (opt2) from hemagglutinin__InfluenzaA__ADK45443

SEQ ID NO: 101335 - RNA, 1701 nt, Artificial Sequence; identical to SEQ ID NO: 100869
  derived and/or modified CDS sequence (opt2) from hemagglutinin__InfluenzaA__ADK48798

SEQ ID NO: 101336 - RNA, 1701 nt, Artificial Sequence; identical to SEQ ID NO: 99869
  derived and/or modified CDS sequence (opt2) from hemagglutinin__InfluenzaA__ADK62683

SEQ ID NO: 101337 - RNA, 1701 nt, Artificial Sequence
  derived and/or modified CDS sequence (opt2) from hemagglutinin__InfluenzaA__ADK62693
augaaggccauccucgucguccuccucuacaccuucgccaccgccaacgccgacacccucugcaucggcuaccacgccaacaacuccaccgacaccgucgacaccguccucgagaagaacgucaccgucacccacuccgucaaccuccucgaggacaagcacaacggcaagcucugcaagcuccgcggcgucgccccccuccaccucggcaagugcaacaucgccggcuggauccucggcaaccccgagugcggcucccucuccaccgccuccuccugguccuacaucgucgagaccuccuccuccgacaacggcaccugcuaccccggcgacuucaucgacuacgaggagcuccgcgagcagcucuccuccgucuccuccuucgagcgcuucgagaucuuccccaagaccuccuccuggcccaaccacgacuccaacaagggcgucaccgccgccugcccccacgccggcgccaaguccuucuacaagaaccucaucuggcucgucaagaagggcaacuccuaccccaagcucuccaaguccuacaucaacgacaagggcaaggagguccucguccucuggggcauccaccaccccuccaccuccgccgaccagcagucccucuaccagaacgccgacgccuacgucuucgucggcaccucccgcuacuccaagaaguucaagcccgagaucgccauccgccccaagguccgcgagcaggagggccgcaugaacuacuacuggacccucgucgagcccggcgacaagaucaccuucgaggccaccggcaaccucgucgucccccgcuacgccuucgccauggagcgcaacgccggcuccggcaucaucaucuccgacacccccguccacgacugcaacaccaccugccagacccccaagggcgccaucaacaccucccuccccuuccagaacguccaccccaucaccaucggcaagugccccaaguacgucaaguccaccaagcuccgccucgccaccggccuccgcaacguccccuccauccagucccgcggccucuucggcgccaucgccggcuucaucgagggcggcuggaccggcauggucgacggcugguacggcuaccaccaccagaacgagcagggcuccggcuacgccgccgaccucaaguccacccagaacgccaucgacgagaucaccaacaaggucaacuccgucaucgagaagaugaacacccaguucaccgccgucggcaaggaguucaaccaccucgagaagcgcaucgagaaccucaacaagaaggucgacgacggcuuccucgacaucuggaccuacaacgccgagcuccucguccuccucgagaacgagcgcacccucgacuaccacgacuccaacgucaagaaccucuacgagaagguccgcucccagcucaagaacaacgccaaggagaucggcaacggcugcuucgaguucuaccacaagugcgacaacaccugcauggaguccgucaagaacggcaccuacgacuaccccaaguacuccgaggaggccaagcucaaccgcgaggagaucgacggcgucaagcucgaguccacccgcaucuaccagauccucgccaucuacuccaccgucgccuccucccucguccucgucgucucccucggcgccaucuccuucuggaugugcuccaacggcucccuccagugccgcaucugcaucuga

SEQ ID NO: 101338 - RNA, 1701 nt, Artificial Sequence; identical to SEQ ID NO: 99806
  derived and/or modified CDS sequence (opt2) from hemagglutinin__InfluenzaA__ADK62703

SEQ ID NO: 101339 - RNA, 1701 nt, Artificial Sequence
  derived and/or modified CDS sequence (opt2) from hemagglutinin__InfluenzaA__ADK64992
augaaggccauccucgucguccuccucuacaccuucgccaccgccaacgccgacacccucugcaucggcuaccacgccaacaacuccaccgacaccgucgacaccguccucgagaagaacgucaccgucacccacuccgucaaccuccucgaggacaagcacaacggcaagcucugcaagcuccgcggcgucgccccccuccaccucggcaagugcaacaucgccggcuggauccucggcaaccccgagugcgagucccucuccaccgccuccuccugguccuacaucgucgagaccuccuccuccgacaacggcaccugcuaccccggcgacuucaucgacuacgaggagcuccgcgagcagcucuccuccgucuccuccuucgagcgcuucgagaucuuccccaagaccuccuccuggcccaaccacgacuccaacaagggcgucaccgccgccugcccccacgccggcgccaaguccuucuacaagaaccucaucuggcucgucaagaagggcaacuccuaccccaagcucuccaaguccuacaucaacgacaagggcaaggagguccucguccucuggggcauccaccaccccuccaccuccgccgaccagcagucccucuaccagaacgccgacgccuacgucuucgucggcaccucccgcuacuccaagaaguucaagcccgagaucgccauccgccccaagguccgcgaccaggagggccgcaugaacuacuacuggacccucgucgagcccggcgacaagaucaccuucgaggccaccggcaaccucgucgucccccgcuacgccuucgccauggagcgcaacgccggcuccggcaucaucaucuccgacacccccguccacgacugcaacaccaccugccagacccccaagggcgccaucaacaccucccuccccuuccagaacauccaccccaucaccaucggcaagugccccaaguacgucaaguccaccaagcuccgccucgccaccggccuccgcaacguccccuccauccagucccgcggccucuucggcgccaucgccggcuucaucgagggcggcuggaccggcauggucgacggcugguacggcuaccaccaccagaacgagcagggcuccggcuacgccgccgaccucaaguccacccagaacgccaucgacgagaucaccaacaaggucaacuccgucaucgagaagaugaacacccaguucaccgccgucggcaaggaguucaaccaccucgagaagcgcaucgagaaccucaacaagaaggucgacgacggcuuccucgacaucuggaccuacaacgccgagcuccucguccuccucgagaacgagcgcacccucgacuaccacgacuccaacgucaagaaccucuacgagaagguccgcucccagcucaagaacaacgccaaggagaucggcaacggcugcuucgaguucuaccacaagugcgacaacaccugcauggaguccgucaagaacggcaccuacgacuaccccaaguacuccgaggaggccaagcucaaccgcgaggagaucgacggcaucaagcucgaguccacccgcaucuaccagauccucgccaucuacuccaccgucgccuccucccucguccucgucgucucccucggcgccaucuccuucuggaugugcuccaacggcucccuccaguaccgcaucugcaucuga

SEQ ID NO: 101340 - RNA, 1701 nt, Artificial Sequence
  derived and/or modified CDS sequence (opt2) from hemagglutinin__InfluenzaA__ADK65001
augaaggccauccucgucguccuccucuacaccuucgccaccgccaacgccgacacccucugcaucggcuaccacgccaacaacuccaccgacaccgucgacaccguccucgagaagaacgucaccgucacccacuccgucaaccuccucgaggacaagcacaacggcaagcucugcaagcucggcggcgucgccccccuccaccucggcaagugcaacaucgccggcuggauccucggcaaccccgagugcgagucccucuccaccgccuccuccugguccuacaucgucgagaccuccuccuccgacaacggcaccugcuaccccggcgacuucaucgacuacgaggagcuccgcgagcagcucuccuccgucuccuccuucgagcgcuucgagaucuuccccaagaccuccuccuggcccaaccacgacuccaacaagggcgucaccgccgccugcccccacgccggcgccaaguccuucuacaagaaccucaucuggcucgucaagaagggcaacuccuaccccaagcucuccaaguccuacaucaacgacaagggcaaggagguccucguccucuggggcauccaccaccccuccaccuccgccgaccagcagucccucuaccagaacgccgacgccuacgucuucgucggcaccucccgcuacuccaagaaguucaagcccgagaucgccauccgccccaagguccgcgaccaggagggccgcaugaacuacuacuggacccucgucgagcccggcgacaagaucaccuucgaggccaccggcaaccucgucgucccccgcuacgccuucgccauggagcgcaacgccggcuccggcaucaucaucuccgacacccccguccacgacugcaacaccaccugccagacccccaagggcgccaucaacaccucccuccccuuccagaacauccaccccaucaccaucggcaagugccccaaguacgucaaguccaccaagcuccgccucgccaccggccuccgcaacguccccuccauccagucccgcggccucuucggcgccaucgccggcuucaucgagggcggcuggaccggcauggucgacggcugguacggcuaccaccaccagaacgagcagggcuccggcuacgccgccgaccucaaguccacccagaacgccaucgacgagaucaccaacaaggucaacuccgucaucgagaagaugaacacccaguucaccgccgucggcaaggaguucaaccaccucgagaagcgcaucgagaaccucaacaagaaggucgacgacggcuuccucgacaucuggaccuacaacgccgagcuccucguccuccucgagaacgagcgcacccucgacuaccacgacuccaacgucaagaaccucuacgagaagguccgcucccagcucaagaacaacgccaaggagaucggcaacggcugcuucgaguucuaccacaagugcgacaacaccugccucgaguccgucaagaacggcaccuacgacuaccccaaguacuccgaggaggccaagcucaaccgcgaggagaucgacggcgucaagcucgaguccacccgcaucuaccagauccucgccaucuacuccaccgucgccuccucccucguccucgucgucucccucggcgccaucuccuucuggaugugcuccaacggcucccuccagugccgcaucugcaucuga

SEQ ID NO: 101341 - RNA, 1701 nt, Artificial Sequence
  derived and/or modified CDS sequence (opt2) from hemagglutinin__InfluenzaA__ADK65009
augaaggccauccucgucguccuccucuacaccuucgccaccgccaacgccgacacccucugcaucggcuaccacgccaacaacuccaccgacaccgucgacaccguccucgagaagaacgucaccgucacccacuccgucaaccuccucgaggacaagcacaacggcaagcucugcaagcuccgcggcgucgccccccuccaccucggcaagugcaacaucgccggcuggauccucggcaaccccgagugcgagucccucuccaccgccuccuccugguccuacaucgucgagaccuccuccuccgacaacggcaccugcuaccccggcgacuucaucgacuacgaggagcuccgcgagcagcucuccuccgucuccuccuucgagcgcuucgagaucuuccccaagaccuccuccuggcccaaccacgaccccaacaagggcgucaccgccgccugcccccacgccggcgccaaguccuucuacaagaaccucaucuggcucgucaagaagggcaacuccuaccccaagcucuccaaguccuacaucaacgacaagggcaaggagguccucguccucuggggcauccaccaccccuccaccuccgccgaccagcagucccucuaccagaacgccgacgccuacgucuucgucggcaccucccgcuacuccaagaaguucaagcccgagaucgccauccgccccaagguccgcgaccaggagggccgcaugaacuacuacuggacccucgucgagcccggcgacaagaucaccuucggcgccaccggcaaccucgucgucccccgcuacgccuucgccauggagcgcaacgccggcuccggcaucaucaucuccgacacccccguccacgacugcaacaccaccugccagacccccaagggcgccaucaacaccucccuccccuuccagaacauccaccccaucaccaucggcaagugccccaaguacgucaaguccaccaagcuccgccucgccaccggccuccgcaacguccccuccauccagucccgcggccucuucggcgccaucgccggcuucaucgagggcggcuggaccggcauggucgacggcugguacggcuaccaccaccagaacgagcagggcuccggcuacgccgccgaccucaaguccacccagaacgccaucgacgagaucaccaacaaggucaacuccgucaucgagaagaugaacacccaguucaccgccgucggcaaggaguucaaccaccucgagaagcgcaucgagaaccucaacaagaaggucgacgacggcuuccucgacaucuggaccuacaacgccgagcuccucguccuccucgagaacgagcgcacccucgacuaccacgacuccaacgucaagaaccucuacgagaagguccgcucccagcucaagaacaacgccaaggagaucggcaacggcugcuucgaguucuaccacaagugcgacaacaccugcauggaguccgucaagaacggcaccuacgacuaccccaaguacuccgaggaggccaagcucaaccgcgaggagaucgacggcgucaagcucgaguccacccgcaucuaccagauccucgccaucuacuccaccgucgccuccucccucguccucgucgucucccucggcgccaucuccuucuggaugugcuccaacggcucccuccagugccgcaucugcaucuga

SEQ ID NO: 101342 - RNA, 1701 nt, Artificial Sequence
  derived and/or modified CDS sequence (opt2) from hemagglutinin__InfluenzaA__ADK87287
augaagaccaucaucgcccucuccuacauccucugccucgucuucgcccagaagcuccccggcaacgacaacuccaccgccacccucugccucggccaccacgccguccccaacggcaccaucgucaagaccaucaccaacgaccagaucgaggucaccaacgccaccgagcucguccaguccuccuccaccggcgagaucugcgacuccccccaccagauccucgacggcaagaacugcacccucaucgacgcccuccucggcgacccccagugcgacggcuuccagaacaagaagugggaccucuucgucgagcgcuccaaggccuacuccaacugcuaccccuacgacguccccgacuacgccucccuccgcucccucgucgccuccuccggcacccucgaguucaacaacgaguccuucaacuggaccggcgucacccagaacggcaccuccuccgccugcauccgccgcuccaagaacuccuucuucucccgccucaacuggcucacccaccucaacuucaaguaccccgcccucaacgucaccaugcccaacaacgagcaguucgacaagcucuacaucuggggcguccaccaccccggcaccgacaaggaccagaucuuccucuacgcccaggccuccggccgcaucaccgucuccaccaagcgcucccagcagaccgccauccccaacaucggcucccgcccccgcguccgcaacauccccucccgcaucuccaucuacuggaccaucgucaagcccggcgacauccuccucaucaacuccaccggcaaccucaucgccccccgcggcuacuucaagauccgcuccggcaaguccuccaucaugcgcuccgacgcccucaucggcaagugcaacuccgagugcaucacccccaacggcuccauccccaacgacaagcccuuccagaacgucaaccgcaucaccuacggcgccugcccccgcuacgucaagcagaacacccucaagcucgccaccggcaugcgcaacguccccgagaagcagacccgcggcaucuucggcgccaucgccggcuucaucgagaacggcugggagggcauggucgacggcugguacggcuuccgccaccagaacuccgagggccgcggccaggccgccgaccucaaguccacccaggccgccaucgaccagaucaacggcaagcucaaccgccucaucggcaagaccaacgagaaguuccaccagaucgagaaggaguucuccgaggucgagggccgcauccaggaccucgagaaguacgucgaggacaccaagaucgaccucugguccuacaacgccgagcuccucgucgcccucgagaaccagcacaccaucgaccucaccgacuccgagaugaacaagcucuucgagaagaccaagaagcagcuccgcgagaacgccgaggacaugggcaacggcugcuucaagaucuaccacaagugcgacaacgccugcaucggcuccauccgcaacggcaccuacgaccacgacgucuaccgcgacgaggcccucaacaaccgcuuccagaucaagggcgucgagcucaaguccggcuacaaggacuggauccucuggaucuccuucgccaucuccugcuuccuccucugcgucgcccuccucggcuucaucaugugggccugccagaagggcaacauccgcugcaacaucugcaucuga

SEQ ID NO: 101343 - RNA, 1701 nt, Artificial Sequence
  derived and/or modified CDS sequence (opt2) from hemagglutinin__InfluenzaA__ADK87288
augaagaccaucaucgcccucuccuacauccucugccucgucuucgcccagaagcuccccggcaacgacaacuccaccgccacccucugccucggccaccacgccguccccaacggcaccaucgucaagaccaucaccaacgaccagaucgaggucaccaacgccaccgagcucguccaguccuccuccaccggcgagaucugcgacuccccccaccagauccucgacggcaagaacugcacccucaucgacgcccuccucggcgacccccagugcgacggcuuccagaacaagaagugggaccucuucgucgagcgcuccaaggccuacuccaacugcuaccccuacgacguccccgacuacgccucccuccgcucccucgucgccuccuccggcacccucgaguucaacaacgaguccuucaacuggaccggcgucacccagaacggcaccuccuccgccugcauccgccgcuccaagaacuccuucuucucccgccucaacuggcucacccaccucaacuucaaguaccccgcccucaacgucaccaugcccaacaacgagcaguucgacaagcucuacaucuggggcguccaccaccccggcaccgacaaggaccagaucuuccucuacgcccaggccaccggccgcaucaccgucuccaccaagcgcucccagcagaccgccauccccaacaucggcucccgcccccgcguccgcaacauccccucccgcaucuccaucuacuggaccaucgucaagcccggcgacauccuccucaucaacuccaccggcaaccucaucgccccccgcggcuacuucaagauccgcuccggcaaguccuccaucaugcgcuccgacgcccccaucggcaagugcaacuccgagugcaucacccccaacggcuccauccccaacgacaagcccuuccagaacgucaaccgcaucaccuacggcgccugcccccgcuacgucaagcagaacacccucaagcucgccaccggcaugcgcaacguccccgagaagcagacccgcggcaucuucggcgccaucgccggcuucaucgagaacggcugggagggcauggucgacggcugguacggcuuccgccaccagaacuccgagggccgcggccaggccgccgaccucaaguccacccaggccgccaucgaccagaucaacggcaagcucaaccgccucaucggcaagaccaacgagaaguuccaccagaucgagaaggaguucuccgaggucgagggccgcauccaggaccucgagaaguacgucgaggacaccaagaucgaccucugguccuacaacgccgagcuccucgucgcccucgagaaccagcacaccaucgaccucaccgacuccgagaugaacaagcucuucgagaagaccaagaagcagcuccgcgagaacgccgaggacaugggcaacggcugcuucaagaucuaccacaagugcgacaacgccugcaucggcuccauccgcaacggcaccuacgaccacgacgucuaccgcgacgaggcccucaacaaccgcuuccagaucaagggcgucgagcucaaguccggcuacaaggacuggauccucuggaucuccuucgccaucuccugcuuccuccucugcgucgcccuccucggcuucaucaugugggccugccagaagggcaacauccgcugcaacaucugcaucuga

SEQ ID NO: 101344 - RNA, 1701 nt, Artificial Sequence
  derived and/or modified CDS sequence (opt2) from hemagglutinin__InfluenzaA__ADK87289
augaagaccaucaucgcccucuccuacauccucugccucgucuucgcccagaagcuccccggcaacgacaacuccaccgccacccucugccucggccaccacgccguccccaacggcaccaucgucaagaccaucaccaacgaccagaucgaggucaccaacgccaccgagcucguccaguccuccuccaccggcgagaucugcgacuccccccaccagauccucgacggcaagaacugcacccucaucgacgcccuccucggcgacccccagugcgacggcuuccagaacaagaagugggaccucuucgucgagcgcuccaaggccuacuccaacugcuaccccuacgacguccccgacuacgccucccuccgcucccucgucgccuccuccggcacccucggcuucaacaacgaguccuucaacuggaccggcgucacccagaacggcaccuccuccgccugcauccgccgcuccaagaacuccuucuucucccgccucaacuggcucacccaccucaacuucaaguaccccgcccucaacgucaccaugcccaacaacgagcaguucgacaagcucuacaucuggggcguccaccaccccggcaccgacaaggaccagaucuuccucuacgcccaggccuccggccgcaucaccgucuccaccaagcgcucccagcagaccgccauccccaacaucggcucccgcccccgcguccgcaacauccccucccgcaucuccaucuacuggaccaucgucaagcccggcgacauccuccucaucaacuccaccggcaaccucaucgccccccgcggcuacuucaagauccgcuccggcaaguccuccaucaugcgcuccgacgcccccaucggcaagugcaacuccgagugcaucacccccaacggcuccauccccaacgacaagcccuuccagaacgucaaccgcaucaccuacggcgccugcccccgcuacgucaagcagaacacccucaagcucgccaccggcaugcgcaacguccccgagaagcagacccgcggcaucuucggcgccaucgccggcuucaucgagaacggcugggagggcauggucgacggcugguacggcuuccgccaccagaacuccgagggccgcggccaggccgccgaccucaaguccacccaggccgccaucgaccagaucaacggcaagcucaaccgccucaucggcaagaccaacgagaaguuccaccagaucgagaaggaguucuccgaggucgagggccgcauccaggaccucggcaaguacgucgaggacaccaagaucgaccucugguccuacaacgccgagcuccucgucgcccucgagaaccagcacaccaucgaccucaccgacuccgagaugaacaagcucuucgagaagaccaagaagcagcuccgcgagaacgccgaggacaugggcaacggcugcuucaagaucuaccacaagugcgacaacgccugcaucggcuccauccgcaacggcaccuacgaccacgacgucuaccgcgacgaggcccucaacaaccgcuuccagaucaagggcgucgagcucaaguccggcuacaaggacuggauccucuggaucuccuucgccaucuccugcuuccuccucugcgucgcccuccucggcuucaucaugugggccugccagaagggcaacauccgcugcaacaucugcaucuga

SEQ ID NO: 101345 - RNA, 1701 nt, Artificial Sequence
  derived and/or modified CDS sequence (opt2) from hemagglutinin__InfluenzaA__ADK87291
augaagaccaucaucgcccucuccuacauccagugccucgucuucgcccagaagcuccccggcaacgacaacuccaccgccacccucugccucggccaccacgccguccccaacggcaccaucgucaagaccaucaccaacgaccagaucgaggucaccaacgccaccgagcucguccaguccuccuccaccggcgagaucugcgacuccccccaccagauccucgacggcaagaacugcacccucaucgacgcccuccucggcgacccccagugcgacggcuuccagaacaagaagugggaccucuucgucgagcgcuccaaggccuacuccaacugcuaccccuacgacguccccgacuacgccucccuccgcucccucgucgccuccuccggcacccucgaguucaacaacgaguccuucaacuggaccggcgucacccagaacggcaccuccuccgccugcauccgccgcuccaagaacuccuucuucucccgccucaacuggcucacccaccucaacuucaaguaccccgcccucaacgucaccaugcccaacaacgagcaguucgacaagcucuacaucuggggcguccaccaccccggcaccgacaaggaccagaucucccucuacgcccaggccuccggccgcaucaccgucuccaccaagcgcucccagcagaccgccauccccaacaucggcucccgcccccgcguccgcaacauccccucccgcaucuccaucuacuggaccaucgucaagcccggcgacauccuccucaucaacuccaccggcaaccucaucgccccccgcggcuacuucaagauccgcuccggcaaguccuccaucaugcgcuccgacgcccccaucggcaagugcaacuccgagugcaucacccccaacggcuccauccccaacgacaagcccuuccagaacgucaaccgcaucaccuacggcgccugcccccgcuacgucaagcagaacacccucaagcucgccaccggcaugcgcaacguccccgagaagcagacccgcggcaucuucggcgccaucgccggcuucaucgagaacggcugggagggcauggucgacggcugguacggcuuccgccaccagaacuccgagggccgcggccaggccgccgaccucaaguccacccaggccgccaucgaccagaucaacggcaagcucaaccgccucaucggcaagaccaacgagaaguuccaccagaucgagaaggaguucuccgaggucgagggccgcauccaggaccucggcaaguacgucgaggacaccaagaucgaccucugguccuacaacgccgagcuccucgucgcccucgagaaccagcacaccaucgaccucaccgacuccgagaugaacaagcucuucgagaagaccaagaagcagcuccgcgagaacgccgaggacaugggcaacggcugcuucaagaucuaccacaagugcgacaacgccugcaucggcuccauccgcaacggcaccuacgaccacgacgucuaccgcgacgaggcccucaacaaccgcuuccagaucaagggcgucgagcucaaguccggcuacaaggacuggauccucuggaucuccuucgccaucuccugcuuccuccucugcgucgcccuccucggcuucaucaugugggccugccagaagggcaacauccgcugcaacaucugcaucuga

SEQ ID NO: 101346 - RNA, 1701 nt, Artificial Sequence
  derived and/or modified CDS sequence (opt2) from hemagglutinin__InfluenzaA__ADK87293
augaagaccaucaucgcccucuccuacauccucugccucgucuucgcccagaagcuccccggcaacgacaacuccaccgccacccucugccucggccaccacgccguccccaacggcaccaucgucaagaccaucaccaacgaccagaucgaggucaccaacgccaccgagcucguccaguccuccuccaccggcgagaucugcgacuccccccaccagauccucgacggcaagaacugcacccucaucgacgcccuccucggcgacccccagugcgacggcuuccagaacaagaagugggaccucuucgucgagcgcuccaaggccuacuccaacugcuaccccuacgacguccccgacuacgccucccuccgcucccucgucgccuccuccggcacccucgaguucaacaacgaguccuucaacuggaccggcgucacccaggacggcaccuccuccgccugcauccgccgcuccaagaacuccuucuucuccaagcucaacuggcucacccaccucaacuucaaguaccccgcccucaacgucaccaugcccaacaacgagcaguucgacaagcucuacaucuggggcguccaccaccccggcaccgacaaggaccagaccuuccucuacgcccaggccuccggccgcaucaccgucuccaccaagcgcucccagcagaccgccauccccaacaucggcucccgcccccgcguccgcaacauccccucccgcaucuccaucuacuggaccaucgucaagcccggcgacauccuccucaucaacuccaccggcaaccucaucgccccccgcggcuacuucaagauccgcuccggcaaguccuccaucaugcgcuccgacgcccccaucggcaagugcaacuccgagugcaucacccccaacggcuccauccccaacgacaagcccuuccagaacgucaaccgcaucaccuacggcgccugcccccgcuacgucaagcagaacacccucaagcucgccaccggcaugcgcaacguccccgagaagcagacccgcggcaucuucggcgccaucgccggcuucaucgagaacggcugggagggcauggucgacggcugguacggcuuccgccaccagaacuccgagggccgcggccaggccgccgaccucaaguccacccaggccgccaucgaccagaucaacggcaagcucaaccgccucaucggcaagaccaacgagaaguuccaccagaucgagaaggaguucuccgaggucgagggccgcauccaggaccucgagaaguacgucgaggacaccaagaucgaccucugguccuacaacgccgagcuccucgucgcccucgagaaccagcacaccaucgaccucaccgacuccgagauguccaagcucuucgagaagaccaagaagcagcuccgcgagaacgccgaggacaugggcaacggcugcuucaagaucuaccacaagugcgacaacgccugcaucggcuccauccgcaacggcaccuacgaccacgacgucuaccgcgacgaggcccucaacaaccgcuuccagaucaagggcgucgagcucaaguccggcuacaaggacuggauccucuggaucuccuucgccaucuccugcuuccuccucugcgucgcccuccucggcuucaucaugugggccugccagaagggcaacauccgcugcaacaucugcaucuga

SEQ ID NO: 101347 - RNA, 1701 nt, Artificial Sequence
  derived and/or modified CDS sequence (opt2) from hemagglutinin__InfluenzaA__ADK87295
augaagaccaucaucgcccucuccuacauccucugccucgucuucgcccagaagcuccccggcaacgacaacuccaccgccacccucugccucggccaccacgccguccccaacggcaccaucgucaagaccaucaccaacgaccagaucgaggucaccaacgccaccgagcucguccaguccuccuccaccggcgagaucugcgacuccccccaccagauccucgacggcaagaacugcacccucaucgacgcccuccucggcgacccccagugcgacggcuuccagaacaagaagugggaccucuucgucgagcgcuccaaggccuacuccaacugcuaccccuacgacguccccgacuacgccucccuccgcucccucgucgccuccuccggcucccucgaguucaacaacgaguccuucaacuggaccggcgucacccagaacggcaccuccuccgccugcauccgccgcuccaagaacuccuucuucucccgccucaacuggcucacccaccucaacuucaaguaccccgcccucaacgucaccaugcccaacaacgagcaguucgacaagcucuacaucuggggcguccaccaccccggcaccgacaaggaccagaucuuccucuacgcccaggccuccggccgcaucaccgucuccaccaagcgcucccagcagaccgccauccccaacaucggcucccgcccccgcguccgcaacauccccucccgcaucuccaucuacuggaccaucgucaagcccggcgacauccuccucaucaacuccaccggcaaccucaucgccccccgcggcuacuucaagauccgcuccggcaaguccuccaucaugcgcuccgacgcccccaucggcaagugcaacuccgagugcaucacccccaacggcuccauccccaacgacaagcccuuccagaacgucaaccgcaucaccuacggcgccugcccccgcuacgucaagcagaacacccucaagcucgccaccggcaugcgcaacguccccgagaagcagacccgcggcaucuucggcgccaucgccggcuucaucgagaacggcugggagggcauggucgacggcugguacggcuuccgccaccagaacuccgagggccgcggccaggccgccgaccucaaguccacccaggccgccaucgaccagaucaacggcaagcucaaccgccucaucggcaagaccaacgagaaguuccaccagaucgagaaggaguucuccgaggucgagggccgcauccaggaccucgagaaguacgucgaggacaccaagaucgaccucugguccuacaacgccgagcuccucgucgcccucgagaaccagcacaccaucgaccucaccgacuccgagaugaacaagcucuucgagaagaccaagaagcagcuccgcgagaacgccgaggacaugggcaacggcugcuucaagaucuaccacaagugcgacaacgccugcaucggcuccauccgcaacggcaccuacgaccacgacgucuaccgcgacgaggcccucaacaaccgcuuccagaucaagggcgucgagcucaaguccggcuacaaggacuggauccucuggaucuccuucgccaucuccugcuuccuccucugcgucgcccuccucggcuucaucaugugggccugccagaagggcaacauccgccgcaacaucugcaucuga

SEQ ID NO: 101348 - RNA, 1701 nt, Artificial Sequence
  derived and/or modified CDS sequence (opt2) from hemagglutinin__InfluenzaA__ADK87296
augaaggccauccucgucguccuccucuacaccuucgccaccgccaacgccgacacccucugcaucggcuaccacgccaacaacuccaccgacaccgucgacaccguccucgagaagaacgucaccgucacccacuccgucaaccuccucgaggacaagcacaacggcaagcucugcaagcuccgcggcgucgccccccuccaccucggcaagugcaacaucgccggcuggauccucggcaaccccgagugcgagucccucuccaccgccuccuccugguccuacaucgucgagaccuccuccuccgacaacggcaccugcuaccccggcgacuucaucgacuacgaggagcuccgcgagcagcucuccuccgucuccuccuucgagcgcuucgagaucuuccccaagaccuccuccuggcccaaccacgaccccaacaagggcgucaccgccgccugcccccacgccggcgccaaguccuucuacaagaaccucaucuggcucgucaagaagggcaacuccuaccccaagcucuccaaguccuacaucaacgacaagggcaaggagguccucguccucuggggcauccaccaccccuccaccuccgccgaccagcagucccucuaccagaacgccgacgccuacgucuucgucggcaccucccgcuacuccaagaaguucaagcccgagaucgccauccgccccaagguccgcgaccaggagggccgcaugaacuacuacuggacccucgucgagcccggcgacaagaucaccuucgaggccaccggcaaccucgucgucccccgcugcgccuucgccauggagcgcaacgccggcuccggcaucaucaucuccgacacccccguccacgacugcaacaccaccugccagacccccaagggcgccaucaacaccucccuccccuuccagaacauccaccccaucaccaucggcaagugccccaaguacgucaaguccaccaagcuccgccucgccaccggccuccgcaacguccccuccauccagucccgcggccucuucggcgccaucgccggcuucaucgagggcggcuggaccggcauggucgacggcugguacggcuaccaccaccagaacgagcagggcuccggcuacgccgccgaccucaaguccacccagaacgccaucgacgagaucaccaacaaggucaacuccgucaucgagaagaugaacacccaguucaccgccgucggcaaggaguucaaccaccucgagaagcgcaucgagaaccucaacaagaaggucgacgacggcuuccucgacaucuggaccuacaacgccgagcuccucguccuccucgagaacgagcgcacccucgacuaccacgacuccaacgucaagaaccucuacgagaagguccgcucccagcucaagaacaacgccaaggagaucggcaacggcugcuucgaguucuaccacaagugcgacaacaccugcauggaguccgucaagaacggcaccuacgacuaccccaaguacuccgaggaggccaagcucaaccgcgaggagaucgacggcgucaagcucgaguccacccgcaucuaccagauccucgccaucuacuccaccgucgccuccucccucguccucgucgucucccucggcgccaucuccuucuggaugugcuccaacggcucccuccagugccgcaucugcaucuga

SEQ ID NO: 101349 - RNA, 1701 nt, Artificial Sequence
  derived and/or modified CDS sequence (opt2) from hemagglutinin__InfluenzaA__ADK87298
augaaggccauccucgucguccuccucuacaccuucgccaccgccaacgccgacacccucugcaucggcuaccacgccaacaacuccaccgacaccgucgacaccguccucgagaagaacgucaccgucacccacuccgucaaccuccucgaggacaagcacaacggcaagcucugcaagcuccgcggcgucgccccccuccaccucggcaagugcaacaucgccggcuggauccucggcaaccccgagugcgagucccucuccaccgccuccuccugguccuacaucgucgagaccuccuccuccgacuccggcaccugcuaccccggcgacuucaucgacuacgaggagcuccgcgagcagcucuccuccgucuccuccuucgagcgcuucgagaucuuccccaagaccuccuccuggcccaaccacgaccccaacaagggcgucaccgccgccugcccccacgccggcgccaaguccuucuacaagaaccucaucuggcucgucaagaagggcaacuccuaccccaagcucuccaaguccuacaucaacgacaagggcaaggagguccucguccucuggggcauccaccaccccuccaccuccgccgaccagcagucccucuaccagaacgccgacgccuacgucuucgucggcaccucccgcuacuccaagaaguucaagcccgagaucgccauccgccccaagguccgcgaccaggagggccgcaugaacuacuacuggacccucgucgagcccggcgacaagaucaccuucgaggccaccggcaaccucgucgucccccgcuacgccuucgccauggagcgcaacgccggcuccggcaacaucaucuccgacacccccguccacgacugcaacaccaccugccagacccccaagggcgccaucaacaccucccuccccuuccagaacauccaccccaucaccaucggcaagugccccaaguacgucaaguccaccaagcuccgccucgccaccggccuccgcaacguccccuccauccagucccgcggccucuucggcgccaucgccggcuucaucgagggcggcuggaccggcauggucgacggcugguacggcuaccaccaccagaacgagcagggcuccggcuacgccgccgaccucaaguccacccagaacgccaucgacgagaucaccaacaaggucaaccccgucaucgagaagaugaacacccaguucaccgccgucggcaaggaguucaaccaccucgagaagcgcaucgagaaccucaacaagaaggucgacgacggcuuccucgacaucuggaccuacaacgccgagcuccucguccuccucgagaacgagcgcacccucgacuaccacgacuccaacgucaagaaccucuacgagaagguccgcucccagcucaagaacaacgccaaggagaucggcaacggcugcuucgaguucuaccacaagugcgacaacaccugcauggaguccgucaagaacggcaccuacgacuaccccaaguacuccgaggaggccaagcucaaccgcgaggagaucgacggcgucaagcucgaguccacccgcaucuaccagauccucgccaucuacuccaccgucgccuccucccucguccucgucgucucccucggcgccaucuccuucuggaugugcuccaacggcucccuccagugccgcaucugcaucuga

SEQ ID NO: 101350 - RNA, 1701 nt, Artificial Sequence
  derived and/or modified CDS sequence (opt2) from hemagglutinin__InfluenzaA__ADK87300
augaagaccaucaucgcccucuccuacauccucugcauggucuucgcccagaagcuccccggcaacgacaacuccaccgccacccucugccucggccaccacgccguccccaacggcaccaucgucaagaccaucaccaacgaccagaucgaggucaccaacgccaccgagcucguccaguccuccuccaccggcgagaucugcgacuccccccaccagauccucgacggcaagaacugcacccucaucgacgcccuccucggcgacccccagugcgacggcuuccagaacaagaagugggaccucuucgucgagcgcuccaaggccuacuccaacugcuaccccuacgacguccccgacuacgccucccuccgcucccucgucgccuccuccggcacccucgaguucaacaacgaguccuucaacuggaccggcgucacccagaacggcaccuccuccgccugcauccgccgcuccaagaacucccucuucucccgccucaacuggcucacccaccucaacuucaaguaccccgcccucaacgucaccaugcccaacaacgagcaguucgacaagcucuacaucuggggcguccaccaccccggcaccgacaaggaccagaucuuccucuacgcccaggccuccggccgcaucaccgucuccaccaagcgcucccagcagaccgccauccccaacaucggcucccgcccccgcguccgcaacauccccucccgcaucuccaucuacuggaccaucgucaagcccggcgacauccuccucaucaacuccaccggcaaccucaucgccccccgcggcuacuucaagauccgcuccggcaaguccuccaucaugcgcuccgacgcccccaucggcaagugcaacuccgagugcaucgcccccaacggcuccauccccaacgacaaguccuuccagaacgucaaccgcaucaccuacggcgccugcccccgcuacgucaagcagaacacccucaagcucgccaccggcaugcgcaacguccccgagaagcagacccgcggcaucuucggcgccaucgccggcuucaucgagaacggcugggagggcauggucgacggcugguacggcuuccgccaccagaacuccgagggccgcggccaggccgccgaccucaaguccacccaggccgccaucgaccagaucaacggcaagcucaaccgccucaucggcaagaccaacgagaaguuccaccagaucgagaaggaguucuccgaggucgagggccgcauccaggaccucgagaaguacgucgaggacaccaagaucgaccucugguccuacaacgccgagcuccucgucgcccucgagaaccagcacaccaucgaccucaccgacuccgagaugaacaagcucuucgagaagaccaagaagcagcuccgcgagaacgccgaggacaugggcaacggcugcuucaagaucuaccacaagugcgacaacgccugcaucggcuccauccgcaacggcaccuacgaccacgacgucuaccgcgacgaggcccucaacaaccgcuuccagaucaagggcgucgagcucaaguccggcuacaaggacuggauccucuggaucuccuucgccaucuccugcuuccuccucugcgucgcccuccucggcuucaucaugugggccugccagaagggcaacauccgcugcaacaucugcaucuga

SEQ ID NO: 101351 - RNA, 1701 nt, Artificial Sequence
  derived and/or modified CDS sequence (opt2) from hemagglutinin__InfluenzaA__ADK87302
augaagaccaucaucgcccucuccuacauccucugcauggucuucgcccagaagcuccccggcaacgacaacuccaccgccacccucugccucggccaccacgccguccccaacggcaccaucgucaagaccaucaccaacgaccagaucgaggucaccaacgccaccgagcucguccaguccuccuccaccggcgagaucugcgacuccccccaccagauccucgacggcaagaacugcacccucaucgacgcccuccucggcgacccccagugcgacggcuuccagaacaagaagugggaccucuucgucgagcgcuccaaggccuacuccaacugcuaccccuacgacguccccgacuacgccucccuccgcucccucgucgccuccuccggcacccucgaguucaacaacgaguccuucaacuggaccggcgucacccagaacggcaccuccuccgccugcauccgccgcuccaagaacuccuucuucucccgccucaacuggcucacccaccucaacuucaaguaccccgcccucaacgucaccaugcccaacaacgagcaguucgacaagcucuacaucuggggcguccaccaccccggcaccgacaaggaccagaucuuccucuacgcccaggccuccggccgcaucaccgucuccaccaagcgcucccagcagaccgccauccccaacaucggcucccgcccccgcguccgcaacauccccucccgcaucuccaucuacuggaccaucgucaagcccggcgacauccuccucaucaacuccaccggcaaccucaucgccccccgcggcuacuucaagauccgcuccggcaaguccuccaucaugcgcuccgacgcccccaucggcaagugcaacuccgagugcaucacccccaacggcuccauccccaacgacaagcccuuccagaacgucaaccgcaucaccuacggcgccugcccccgcuacgucaagcagaacacccucaagcucgccaccggcaugcgcaacguccccgagaagcagacccgcggcaucuucggcgccaucgccggcuucaucgagaacggcugggagggcauggucgacggcugguacggcuuccgccaccagaacuccgagggccgcggccaggccgccgaccucaaguccacccaggccgccaucgaccagaucaacggcaagcucaaccgccucaucggcaagaccaacgagaaguuccaccagaucgagaaggaguucuccgaggucgagggccgcauccaggaccucgagaaguacgucgaggacaccaagaucgaccucugguccuacaacgccgagcuccucgucgcccucgagaaccagcacaccaucgaccucaccgacuccgagaugaacaagcucuucgagaagaccaagaagcagcuccgcgagaacgccgaggacaugggcaacggcugcuucaagaucuaccacaagugcgacaacgccugcaucggcuccauccgcaacggcaccuacgaccacgacgucuaccgcgacgaggcccucaacaaccgcuuccagaucaagggcgucgagcucaaguccggcuacaaggacuggauccucuggaucuccuucgccaucuccugcuuccuccucugcgucgcccuccucggcuucaucaugugggccugccagaagggcaacauccgcugcgacaucugcaucuga

SEQ ID NO: 101352 - RNA, 1701 nt, Artificial Sequence
  derived and/or modified CDS sequence (opt2) from hemagglutinin__InfluenzaA__ADK87304
augaagaccaucaucgcccucuccuacauccucugccucgucuucgcccagaagauccccggcaacgacaacuccaccgccacccucugccucggccaccacgccguccccaacggcaccaucgucaagaccaucaccaacgaccagaucgaggucaccaacgccaccgagcucguccaguccuccuccaccggcgagaucugcgacuccccccaccagauccucgacggcaagaacugcacccucaucgacgcccuccucggcgacccccagugcgacggcuuccagaacaagaagugggaccucuucgucgagcgcuccaaggccuacuccaacugcuaccccuacgacguccccgacuacgccucccuccgcucccucgucgccuccuccggcacccucgaguucaacaacgaguccuucaacuggaccggcgucacccagaacggcaccuccuccgccugcauccgccgcuccaagaacuccuucuucucccgccucaacuggcucacccaccucaacuucaaguaccccgcccucaacgucaccaugcccaacaacgagcaguucgacaagcucuacaucuggggcguccaccaccccggcaccgacaaggaccagaucuuccucuacgcccaggccuccggccgcaucaccgucuccaccaagcgcucccagcagaccgccauccccaacaucggcucccgcccccgcguccgcaacauccccucccgcaucuccaucuacuggaccaucgucaagcccggcgacauccuccucaucaacuccaccggcaaccucaucgccccccgcggcuacuucaagauccgcuccggcaaguccuccaucaugcgcuccgacgcccccaucggcaagugcaacuccggcugcaucacccccaacggcuccauccccaacgacaagcccuuccagaacgucaaccgcaucaccuacggcgccugcccccgcuacgucaagcagaacacccucaagcucgccaccggcaugcgcaacguccccgagaagcagacccgcggcaucuucggcgccaucgccggcuucaucgagaacggcugggagggcauggucgacggcugguacggcuuccgccaccagaacuccgagggccgcggccaggccgccgaccucaaguccacccaggccgccaucgaccagaucaacggcaagcucaaccgccucaucggcaagaccaacgagaaguuccaccagaucgagaaggaguucuccgaggucgagggccgcauccaggaccucgagaaguacgucgaggacaccaagaucgaccucugguccuacaacgccgagcuccucgucgcccucgagaaccagcacaccaucgaccucaccgacuccgagaugaacaagcucuucgagaagaccaagaagcagcuccgcgagaacgccgaggacaugggcaacggcugcuucaagaucuaccacaagugcgacaacgccugcaucggcuccauccgcaacggcaccuacggccacgacgucuaccgcgacgaggcccucaacaaccgcuuccagaucaagggcgucgagcucaaguccggcuacaaggacugguuccucuggaucuccuucgccaucuccugcuuccuccucugcgucgcccuccucggcuucaucaugugggccugccagaagggcaacauccgcugcaacaucugcaucuga

SEQ ID NO: 101353 - RNA, 1701 nt, Artificial Sequence
  derived and/or modified CDS sequence (opt2) from hemagglutinin__InfluenzaA__ADK87306
augaagaccaucaucgcccucuccuacauccucugccucgucuucgcccagaagcuccccggcaacgacaacuccaccgccacccucugccucggccaccacgccguccccaacggcaccaucgucaagaccaucaccaacgaccagaucgaggucaccaacgccgccgagcucguccaguccuccuccaccggcgagaucugcgacuccccccaccagauccucgacggcaagaacugcacccucaucgacgcccuccucggcgacccccagugcgacggcuuccagaacaagaagugggaccucuucgucggccgcuccaaggccuacuccaacugcuaccccuacgacguccccgacuacgccucccuccgcucccucgucgccuccuccggcacccucgaguucaacaacgaguccuucaacuggaccggcgucacccagaacggcaccuccuccgccugcauccgccgcuccaagaacuccuucuucucccgccucaacuggcucacccaccucaacuucaaguaccccgcccucaacgucaccaugcccaacaacgagcaguucgacaagcucuacaucuggggcguccaccaccccggcaccgacaaggaccagaucuuccucuacgcccaggccuccggccgcaucaccgucuccaccaagcgcucccagcagaccgccauccccaacaucggcucccgcccccgcguccgcaacauccccucccgcaucuccaucuacuggaccaucgucaagcccggcgacauccuccucaucaacuccaccggcaaccucaucgccccccgcggcuacuucaagauccgcuccggcaaguccuccaucaugcgcuccgacgcccccaucggcaagugcaacuccgagugcaucacccccaacggcuccauccccaacgacaagcccuuccagaacgucaaccgcaucaccuacggcgccugcccccgcuacgucaagcagaacacccucaagcucgccaccggcguccgcaacguccccgagaagcagacccgcggcaucuucggcgccaucgccggcuucaucgagaacggcugggagggcauggucgacggcugguacggcuuccgccaccagaacuccgagggccgcggccaggccgccgaccucaaguccacccaggccgccauggaccagaucaacggcaagcucaaccgccucaucggcaagaccaacgagaagcuccaccagaccgagaaggaguucuccgaggucgagggccgcauccaggaccucgagaaguacgucgaggacaccaagaucgaccucugguccuacaacgccgagcuccucgucgcccucgagucccagcacaccaucgaccucaccgacuccgagaugaacaagcucuucgagaagaccaagaagcagcuccgcgagaacgccgaggacaugggcaacggcugcuucaagaucuaccacaagugcgacaacgccugcaucggcuccauccgcaacggcaccuacgaccacgacgucuaccgcgacgaggcccucaacaaccgcuuccagaucaagggcgucgagcucaaguccggcuacaaggacuggauccucuggaucuccuucgccaucuccugcuuccuccucugcgucgcccuccucggcuucaucaugugggccugccagaagggcaacauccgcugcaacaucugcaucuga

SEQ ID NO: 101354 - RNA, 1701 nt, Artificial Sequence
  derived and/or modified CDS sequence (opt2) from hemagglutinin__InfluenzaA__ADK87308
augaagaccaucaucgcccucuccuacauccucugcauggucuucgcccagaagcuccccggcaacgacaacuccaccgccacccucugccucggccaccacgccguccccaacggcaccaucgucaagaccaucaccaacgaccagaucgaggucaccaacgccaccgagcucguccaguccuccuccaccggcgagaucugcgacuccccccaccagauccucgacggcaagaacugcacccucaucgacgcccuccucggcgacccccagugcgacggcuuccagaacaagaagugggaccucuucgucgagcgcuccaaggccuacuccaacugcuaccccuacgacguccccgacuacgccucccuccgcucccucgucgccuccuccggcacccucgaguucaacaacgaguccuucaacuggaccggcgucacccagaacggcaccuccuccgccugcauccgccgcuccaagaacuccuucuucucccgccucaacuggcucacccaccucaacuucaaguaccccgcccucaacgucaccaugcccaacaacgagcaguucgacaagcucuacaucuggggcguccaccaccccggcaccgacaaggaccagaucuuccucuacgcccaggccuccggccgcaucaccgucuccaccaagcgcucccagcagaccgccauccccaacaucggcucccgcccccgcguccgcaacauccccucccgcaucuccaucuacuggaccaucgucaagcccggcgacauccuccucaucaacuccaccggcaaccucaucgccccccgcggcuacuucaagauccgcuccggcaaguccuccaucaugcgcuccgacgcccccaucggcaagugcaacuccgagugcaucacccccaacggcuccauccccaacgacaagcccuuccagaacgucaaccgcaucaccuacggcgccugcccccgcuacgucaagcagaacacccucaagcucgccaccggcaugcgcaacguccccgagaagcagacccgcggcaucuucggcgccaucgccggcuucaucgagaacggcugggagggcauggucgacggcugguacggcuuccgccaccagaacuccgagggccgcggccaggccgccgaccucaaguccacccaggccgccaucgaccagaucaacggcaagcucaaccgccucaucggcaagaccaacgagaaguuccaccagaucgagaaggaguucuccgaggucgagggccgcauccaggaccucgagaaguacgucgaggacaccaagaucgaccucugguccuacaacgccgagcuccucgucgcccucgagaaccagcacaccaucgaccucaccgacuccgagaugaacaagcucuucgagaagaccaagaagcagcuccgcgagaacgccgaggacaugggcaacggcugcuucaagaucuaccacaagugcgacaacgccugcaucggcuccauccgcaacggcaccuacgaccacgacgucuaccgcgacgaggcccucaacaaccgcuuccagaucaagggcgucgagcucaaguccggcuacaaggacuggauccucuggaucuccuucgccaucuccugcuuccuccuccgcgucgcccuccucggcuucaucaugugggccugccagaagggcaacauccgcugcaacaucugcaucuga

SEQ ID NO: 101355 - RNA, 1701 nt, Artificial Sequence
  derived and/or modified CDS sequence (opt2) from hemagglutinin__InfluenzaA__ADK87309
augaagaccaucaucgcccucuccuacauccucugccucgucuucgcccagaagcuccccggcaacgacaacuccaccgccacccucugccucggccaccacgccguccccaacggcaccaucgucaagaccaucaccaacgaccagaucgaggucaccaacgccaccgagcucguccaguccuccuccaccggcgagaucugcgacuccccccaccagauccucgacggcaagaacugcacccucaucgacgcccuccucggcgacccccagugcgacggcuuccagaacaagaagugggaccucuucgucgagcgcuccaaggccuacuccaacugcuaccccuacgacguccccgacuacgccucccuccgcucccucgucgccuccuccggcacccucgaguucaacaacgaguccuucaacuggaccggcgucacccagaacggcaccuccuccgccugcauccgccgcuccaagaacuccuucuucucccgccucaacuggcucacccaccucaacuucaaguaccccgcccucaacgucaccaugcccaacaacgagcaguucgacaagcucuacaucuggggcguccaccaccccggcaccgacaaggaccagaucuuccucuacgcccaggccuccggccgcaucaccgucuccaccaagcgcucccagcagaccgccauccccaacaucggcucccgcccccgcguccgcaacauccccucccgcaucuccaucuacuggaccaucgucaagcccggcgacauccuccucaucaacuccaccggcaaccucaucgccccccgcggcuacuucaagauccgcuccggcaaguccuccaucaugcgcuccgacgcccccaucggcaagugcaacuccgagugcaucacccccaacggcuccauccccaacgacaagcccuuccagaacgucaaccgcaucaccuacggcgccugcccccgcuacgucaagcagaacacccucaagcucgccaccggcaugcgcaacguccccgagaagcagacccgcggcaucuucggcgccaucgccggcuucaucgagaacggcugggagggcauggucgacggcugguacggcuuccgccaccagaacuccgagggccgcggccaggccgccgaccucaaguccacccaggccgccaucgaccagaucaacggcaagcucaaccgccucaucggcaagaccaacgagaaguuccaccagaucgagaaggaguucuccgaggucgagggccgcauccaggaccucgagaaguacgucgaggacaccaagaucgaccucugguccuacaacgccgagcuccucgucgcccucgagaaccagcacaccaucgaccucaccgacuccgagaugaacaagcucuucgagaagaccaagaagcagcuccgcgagaacgccgaggacaugggcaacggcugcuucaagaucuaccacaagugcgacaacgccugcaucggcuccauccgcaacggcaccuacgaccacgacgucuaccgcgacgaggcccucaacaaccgcuuccagaucaagggcgucgagcucaaguccggcuacaaggacuggauccucuggaucuccuucgccaucuccugcuuccuccucugcgucgcccucuccggcuucaucaugugggccugccagaagggcaacauccgcugcaacaucugcaucuga

SEQ ID NO: 101356 - RNA, 1701 nt, Artificial Sequence
  derived and/or modified CDS sequence (opt2) from hemagglutinin__InfluenzaA__ADK87310
augaaggccauccucgucguccuccucuacaccuucgccaccgccaacgccgacacccucugcaucggcuaccacgccaacaacuccaccgacaccgucgacaccguccucgagaagaacgucaccgucacccacuccgucaaccuccucgaggacaagcacaacggcaagcucugcaagcuccgcggcgucgccccccuccaccucggcaagugcaacaucgccggcuggauccucggcaaccccgagugcgagucccucuccaccgccuccuccugguccuacaucgucgagaccuccuccuccgacaacggcaccugcuaccccggcgacuucaucgacuacgaggagcuccgcgagcagcucuccuccgucuccuccuucgagcgcuucgagaucuuccccaagaccggcuccuggcccaaccacgaccccaacaagggcgucaccgccgccugcccccacgccggcgccaaguccuucuacaagaaccucaucuggcucgucaagaagggcaacuccuaccccaagcucuccaaguccuacaucaacgacaagggcaaggagguccucguccucuggggcauccaccaccccuccaccuccgccgaccagcagucccucuaccagaacgccgacgccuacgucuucgucggcaccucccgcuacuccaagaaguucaagcccgagaucgccauccgccccaagguccgcgaccaggagggccgcaugaacuacuacuggacccucgucgagcccggcgacaagaucaccuucgaggccaccggcaaccucgucgucccccgcuacgccuucgccauggagcgcaacgccggcuccggcaucaucaucuccgacacccccguccacgacugcaacaccaccugccagacccccaagggcgccaucaacaccucccuccccuuccagaacauccaccccaucaccaucggcaagugccccaaguacgucaaguccaccaagcuccgccucgccaccggccuccgcaacguccccuccauccagucccgcggccucuucggcgccaucgccggcuucaucgagggcggcuggaccggcauggucgacggcugguacggcuaccaccaccagaacgagcagggcuccggcuacgccgccgaccucaaguccacccagaacgccaucgacgagaucaccaacaaggucaacuccgucaucgagaagaugaacacccaguucaccgccgucggcaaggaguucaaccaccucgagaagcgcaucgagaaccucaacaagaaggucgacgacggcuuccucgacaucuggaccuacaacgccgagcuccucguccuccucgagaacgagcgcacccucgacuaccacgacuccaacgucaagaaccucuacgagaagguccgcucccagcucaagaacaacgccaaggagaucggcaacggcugcuucgaguucuaccacaagugcgacaacaccugcauggaguccgucaagaacggcaccuacgacuaccccaaguacuccgaggaggccaagcucaaccgcgaggagaucgacggcgucaagcucgaguccacccgcaucuaccagauccucgccaucuacuccaccgucgccuccucccucguccucgucgucucccucggcgccaucuccuucuggaugugcuccaacggcucccuccagugccgcaucugcaucuga

SEQ ID NO: 101357 - RNA, 1701 nt, Artificial Sequence
  derived and/or modified CDS sequence (opt2) from hemagglutinin__InfluenzaA__ADK87311
augaaggccauccucgucguccuccucuacaccuucgccaccgccaacgccgacacccucugcaucggcuaccacgccgacaacuccaccgacaccgucgacaccguccucgagcgcaacgucaccgucacccacuccgucaaccuccucgaggacaagcacaacggcaagcucugcaagcuccgcggcgucgccccccuccaccucggcaagugcaacaucgccggcuggauccucggcaaccccgagugcgagucccucuccaccgccuccuccugguccuacaucgucgagaccuccuccuccgacaacggcaccugcuaccccggcgacuucaucgacuacgaggagcuccgcgagcagcucuccuccgucuccuccuucgagcgcuucgagaucuuccccaagaccuccuccuggcccaaccacgacuccaacaagggcgucaccgccgccugcccccacgccggcgccaaguccuucuacaagaaccucaucuggcucgucaagaagggcaacuccuaccccaagcucuccaaguccuacaucaacgacaagggcaaggagguccucguccucuggggcauccaccaccccuccaccuccgccggccagcagucccucuaccagaacgccgacgccuacgucuucgucggcaccucccgcuacuccaagaaguucaagcccgagaucgccauccgccccaagguccgcgaccaggagggccgcaugaacuacuacuggacccucgucgagcccggcgacaagaucaccuucgaggccaccggcaaccucgucgucccccgcuacgccuucgccauggagcgcaacgccggcuccggcaucaucaucuccgacacccccguccacgacugcaacaccaccugccagacccccaagggcgccaucaacaccuccccccccuuccagaacauccaccccaucaccaucggcaagugccccaaguacgucaaguccaccaagcuccgccucgccaccggccuccgcaacguccccuccauccagucccgcggccucuucggcgccaucgccggcuucaucgagggcggcuggaccggcauggucgacggcugguacggcuaccaccaccagaacgagcagggcuccggcuacgccgccgaccucaaguccacccagaacgccaucgacgagaucaccaacaaggucaacuccgucaucgagaagaugaacacccaguucaccgccgucggcaaggaguucaaccaccucgagaagcgcaucgagaaccucaacaagaaggucgacgacggcuuccucgacaucuggaccuacaacgccgagcuccucguccuccucgagaacgagcgcacccucgacuaccacgacuccaacgucaagaaccucuacgagaagguccgcucccagcucaagaacaacgccaaggagaucggcaacggcugcuucgaguucuaccacaagugcgacaacaccugcauggaguccgucaagaacggcaccuacgacuaccccaaguacuccgaggaggccaagcucaaccgcgaggagaucgacggcgucaagcucgaguccacccgcaucuaccagauccucgccaucuacuccaccgucgccuccucccucguccucgucgucucccucggcgccaucuccuucuggaugugcuccaacggcucccuccagugccgcaucugcaucuga

SEQ ID NO: 101358 - RNA, 1701 nt, Artificial Sequence
  derived and/or modified CDS sequence (opt2) from hemagglutinin__InfluenzaA__ADK87313
augaagaccaucaucgcccucuccuacauccucugccucgucuucgcccagaagauccccggcaacgacaacuccaccgccacccucugccucggccaccacgccguccccaacggcaccaucgucaagaccaucaccaacgaccagaucgaggucaccaacgccaccgagcucguccaguccuccuccaccggcgagaucugcgacuccccccaccagauccucgacggcaagaacugcacccucaucgacgcccuccucggcgacccccagugcgacggcuuccagaacaagaagugggaccucuucgucgagcgcuccaaggccuacuccaacugcuaccccuacgacguccccgacuacgccucccuccgcucccucgucgccuccuccggcacccucgaguucaacaacgaguccuucaacuggaccggcgucacccagaacggcaccuccuccgccugcauccgccgcuccaagaacuccuucuucucccgccucaacuggcucacccaccucaacuucaaguaccccgcccucaacgucaccaugcccaacaacgagcaguucgacaagcucuacaucuggggcguccaccaccccggcaccgacaaggaccagaucuuccucuacgcccaggccuccggccgcaucgccgucuccaccaagcgcucccagcagaccgccauccccaacaucggcucccgcccccgcguccgcaacauccccucccgcaucuccaucuacuggaccaucgucaagcccggcgacauccuccucaucaacuccaccggcaaccucaucgccccccgcggcuacuucaagauccgcuccggcaaguccuccaucaugcgcuccgacgcccccaucggcaagugcaacuccggcugcaucacccccaacggcuccauccccaacgacaagcccuuccagaacgucaaccgcaucaccuacggcgccugcccccgcuacgucaagcagaacacccucaagcucgccaccggcaugcgcaacguccccgagaagcagacccgcggcaucuucggcgccaucgccggcuucaucgagaacggcugggagggcauggucgacggcugguacggcuuccgccaccagaacuccgagggccgcggccaggccgccgaccucaaguccacccaggccgccaucgaccagaucaacggcaagcucaaccgccucaucggcaagaccaacgagaaguuccaccagaucgagaaggaguucuccgaggucgagggccgcauccaggaccucgagaaguacgucgaggacaccaagaucgaccucugguccuacaacgccgagcuccucgucgcccucgagaaccagcacaccaucgaccucaccgacuccgagaugaacaagcucuucgagaagaccaagaagcagcuccgcgagaacgccgaggacaugggcaacggcugcuucaagaucuaccacaagugcgacaacgccugcaucggcuccauccgcaacggcaccuacgaccacgacgucuaccgcgacgaggcccucaacaaccgcuuccagaucaagggcgucgagcucaaguccggcuacaaggacugguuccucuggaucuccuucgccaucuccugcuuccuccucugcgucgcccuccucggcuucaucaugugggccugccagaagggcaacauccgcugcaacaucugcaucuga

SEQ ID NO: 101359 - RNA, 1701 nt, Artificial Sequence
  derived and/or modified CDS sequence (opt2) from hemagglutinin__InfluenzaA__ADK87315
augaaggccauccucgucguccuccucuacaccuucgccaccgccaacgccgacacccucugcaucggcuaccacgccaacaacuccaccgacaccgucgacaccguccucgagaagaacgucaccgucacccacuccgucaaccuccucgaggacaagcacaacggcaagcucugcaagcuccgcggcgucgccccccuccaccucggcaagugcaacaucgccggcuggauccucggcaaccccgagugcgagucccucuccaccgccuccuccugguccuacaucgucgagaccuccuccuccgacaacggcaccugcuaccccggcgacuucaucgacuacgaggagcuccgcgagcagcucuccuccgucuccuccuucgagcgcuucgagaucuuccccaagaccucccccuggcccaaccacgaccccaacaagggcgucaccgccgccugcccccacgccggcgccaaguccuucuacaagaaccucaucuggcucgucaagaagggcaacuccuaccccaagcucuccaaguccuacaucaacgacaagggcaaggagguccucguccucuggggcauccaccaccccuccaccuccgccgaccagcagucccucuaccagaacgccgacgccuacgucuucgucggcaccucccgcuacuccaagaaguucaagcccgagaucgccauccgccccaagguccgcgaccaggagggccgcaugaacuacuacuggacccucgucgagcccggcgacaagaucaccuucgaggccaccggcaaccucgucgucccccgcuacgccuucgccauggagcgcaacgccggcuccggcaucaucaucuccgacacccccguccacgacugcaacaccaccugccagacccccaagggcgccaucaacaccucccuccccuuccagaacauccaccccaucaccaucggcaagugccccaaguacgucaaguccaccaagcuccgccucgccaccggccuccgcaacguccccuccauccagucccgcggccucuucggcgccaucgccggcuucaucgagggcggcuggaccggcauggucgacggcugguacggcuaccaccaccagaacgagcagggcuccggcuacgccgccgaccucaaguccacccagaacgccaucgacgagaucaccaacaaggucaacuccgucaucgagaagaugaacacccaguucaccgccgucggcaaggaguccaaccaccucgagacccgcaucgagaaccucaacaagaaggucgacgacggcuuccucgacaucuggaccuacaacgccgagcuccucguccuccucgagaacgagcgcacccucgacuaccacgacuccaacgucaagaaccucuacgagaagguccgcucccagcucaagaacaacgccaaggagaucggcaacggcugcuucgaguucuaccacaagugcgacuccaccugcauggaguccgucaagaacggcaccuacgacuaccccaaguacuccgaggaggccaagcucaaccgcgaggagaucgacggcgucaagcucgaguccacccgcaucuaccagauccucgccaucuacuccaccgucgccuccucccucguccucgucgucucccucggcgccaucuccuucuggaugugcuccaacggcucccuccagugccgcaucugcaucuga

SEQ ID NO: 101360 - RNA, 1701 nt, Artificial Sequence; identical to SEQ ID NO: 99503
  derived and/or modified CDS sequence (opt2) from hemagglutinin__InfluenzaA__ADK87317

SEQ ID NO: 101361 - RNA, 1701 nt, Artificial Sequence
  derived and/or modified CDS sequence (opt2) from hemagglutinin__InfluenzaA__ADK87319
augaaggccauccucgucguccuccucuacaccuucgccaccgccaacgccgacacccucugcaucggcuaccacgccaacaacuccaccgacaccgucgacaccguccucgagaagaacgucaccgucacccacuccgucaaccuccucgaggacaagcacaacggcaagcucugcaagcuccgcggcgucgccccccuccaccucggcaagugcaacaucgccggcuggauccucggcaaccccgagugcgagucccucuccaccgccuccuccugguccuacaucgucgagaccuccuccuccgacaacggcaccugcuaccccggcgacuucaucgacuacgaggagcuccgcgagcagcucuccuccgucuccuccuucgagcgcuucgagaucuuccccaagaccuccuccuggcccaaccacgaccccaacaagggcgucaccgccgccugcccccacgccggcgccaaguccuucuacaagaaccucaucuggcucgucaagaagggcaacuccuaccccaagcucuccaaguccuacaucaacgacaagggcaaggagguccucguccucuggggcauccaccaccccuccaccuccgccgaccagcagucccucuaccagaacgccgacgccuacgucuucgucggcaccucccgcuacuccaagaaguucaagcccgagaucgccauccgccccaagguccgcgaccaggagggccgcaugaacuacuacuggacccucgucgagcccggcgacaagaucaccuucgaggccaccggcaaccucgucgucccccgcuacgccuucgccauggagcgcaacgccggcuccggcaucaucaucuccgacacccccguccacgacugcaacaccaccugccagacccccaagggcgccaucaacaccucccuccccuuccagaacauccaccccaucaccaucggcaagugccccaaguacgucaaguccaccgagcuccgccucgccaccggccuccgcaacguccccuccauccagucccgcggccucuucggcgccaucgccggcuucaucgagggcggcuggaccggcauggucgacggcugguacggcuaccaccaccagaacgagcagggcuccggcuacgccgccgaccucaaguccacccagaacgccaucgacgagaucaccaacaaggucaacuccgucaucgagaagaugaacacccaguucaccgccgucggcaaggaguucaaccaccucgagaagcgcaucgagaaccucaacaagaaggucgacgacggcuuccucgacaucuggaccuacaacgccgagcuccucguccuccucgagaacgagcgcacccucgacuaccacgacuccaacgucaagaaccucuacgagaagguccgcucccagcucaagaacaacgccaaggagaucggcaacggcugcuucgaguucuaccacaagugcgacaacaccugcauggaguccgucaagaacggcaccuacgacuaccccaaguacuccgaggaggccaagcucaaccgcgaggagaucgacggcgucaagcucgaguccacccgcaucuaccgcauccucgccaucuacuccaccgucgccuccucccucguccucgucgucucccucggcgccaucuccuucuggaugugcuccaacggcucccuccagugccgcaucugcaucuga

SEQ ID NO: 101362 - RNA, 1701 nt, Artificial Sequence
  derived and/or modified CDS sequence (opt2) from hemagglutinin__InfluenzaA__ADK87321
augaagaccaucaucgcccucuccuacauccucugccucgucuucgcccagaagauccccggcaacgacaacuccaccgccacccucugccucggccaccacgccguccccaacggcaccaucgucaagaccaucaccaacgaccagaucgaggucaccaacgccaccgagcucguccaguccuccuccaccggcgagaucugcgacuccccccaccagauccucgacggcaagaacugcacccucaucgacgcccuccucggcgacccccagugcgacggcuuccagaacaagaagugggaccucuucgucgagcgcuccaaggccuacuccaacugcuaccccuacgacguccccgacuacgccucccuccgcucccucgucgccuccuccggcacccucgaguucaacaacgaguccuucaacuggaccggcgucacccagaacggcaccuccuccgccugcaugcgccgcuccaagaacuccuucuucucccgccucaacuggcucacccaccucaacuucaaguaccccgcccucaacgucaccaugcccaacaacgagcaguucgacaagcucuacaucuggggcguccaccaccccggcaccgacaaggaccagaucuuccucuacgcccaggccuccggccgcaucaccgucuccaccaagcgcucccagcagaccgccauccccaacaucggcucccgcccccgcguccgcaacauccccucccgcaucuccgucuacuggaccaucgucaagcccggcgacauccuccucaucaacuccaccggcaaccucaucgccccccgcggcuacuucaagauccgcuccggcaaguccuccaucaugcgcuccgacgccuccaucggcaagugcaacuccggcugcaucacccccaacggcuccauccccaacgacaagcccuuccagaacgucaaccgcaucaccuacggcgccugcccccgcuacgucaagcagaacacccucaagcucgccaccggcaugcgcaacguccccgagaagcagacccgcggcaucuucggcgccaucgccggcuucaucgagaacggcugggagggcauggucgacggcugguacggcuuccgccaccagaacuccgagggccgcggccaggccgccgaccucaaguccacccaggccgccaucgaccagaucaacggcaagcucaaccgccucaucggcaagaccaacgagaaguuccaccagaucgagaaggaguuccccgaggucgagggccgcauccaggaccucgagaaguacgucgaggacaccaagaucgaccucugguccuacaacgccgagccccucgucgcccucgagaaccagcacaccaucgaccucaccgacuccgagaugaacaagcucuucgagaagaccaagaagcagcuccgcgagaacgccgaggacaugggcaacggcugcuucaagaucuaccacaagugcgacaacgccugcaucggcuccauccgcaacggcaccuacgaccacgacgucuaccgcgacgaggcccucaacaaccgcuuccagaucaagggcgucgagcucaaguccggcuacaaggacugguuccucuggaucuccuucgccaucuccugcuuccuccucugcgucgcccuccucggcuucaucaugugggccugccagaagggcaacauccgcugcaacaucugcaucuga

SEQ ID NO: 101363 - RNA, 1701 nt, Artificial Sequence
  derived and/or modified CDS sequence (opt2) from hemagglutinin__InfluenzaA__ADK87323
augaagaccaucaucgcccucuccuacauccucugccucgucuucgcccagaagcuccccggcaacgacaacuccaccgccacccucugccucggccaccacgccguccccaacggcaccaucgucaagaccaucaccaacgaccagaucgaggucaccaacgccaccgagcucguccaguccuccuccaccggcgagaucugcgacuccccccaccagauccucgacggcaagaacugcacccucaucgacgcccuccucggcgacccccagugcgacggcuuccagaacaagaagugggaccucuucgucgagcgcuccaaggccuacuccaacugcuaccccuacgacguccccgacuacgccucccuccgcucccucgucgccuccuccggcacccucgaguucaacaacgaguccuucaacuggaccggcgucacccagaacggcaccuccuccgccugcauccgccgcuccaagaacuccuucuucucccgccucaacuggcucacccaccucaacuucaaguaccccgcccucaacgucaccaugcccaacaacgagcaguucgacaagcucuacaucuggggcguccaccaccccggcaccgacaaggaccagaucuuccucuacgcccaggccuccggccgcaucaccgucuccaccaagcgcucccagcagaccgccauccccaacaucggcucccgcccccgcgucggcaacauccccucccgcaucuccaucuacuggaccaucgucaagcccggcgacauccuccucaucaacuccaccggcaaccucaucgccccccgcggcuacuucaagauccgcuccggcaaguccuccaucaugcgcuccgacgcccccaucggcaagugcaacuccgagugcaucacccccaacggcuccauccccaacgacaagcccuuccagaacgucaaccgcaucaccuacggcgccugcccccgcuacgucaagcagaacacccucaagcucgccaccggcaugcgcaacguccccgagaagcagacccgcggcaucuucggcgccaucgccggcuucaucgagaacggcugggagggcauggucgacggcugguacggcuuccgccaccagaacuccgagggccgcggccaggccgccgaccucaaguccacccaggccgccaucgaccagaucaacggcaagcucaaccgccucaucggcaagaccaacgagaaguuccaccagaucgagaaggaguucuccgaggucgagggccgcauccaggaccucgagaaguacgucgaggacaccaagaucgaccucugguccuacaacgccgagcuccucgucgcccucgagaaccagcacaccaucgaccucaccgacuccgagaugaacaagcucuucgagaagaccaagaagcagcuccgcgagaacgccgaggacaugggcaacggcugcuucaagaucuaccacaagugcgacaacgccugcaucggcuccauccgcaacggcaccuacgaccacgacgucuaccgcgacgaggcccucaacaaccgcuuccagaucaagggcgucgagcucaaguccggcuacaaggacuggauccucuggaucuccuucgccaucuccugcuuccuccucugcgucgcccuccucggcuucaucaugugggccugccagaagggcaacauccgcugcaacaucugcaucuga

SEQ ID NO: 101364 - RNA, 1701 nt, Artificial Sequence
  derived and/or modified CDS sequence (opt2) from hemagglutinin__InfluenzaA__ADK87325
augaagaccaucaucgcccucuccuacauccucugccucgucuucgcccagaagcuccccggcaacgacaacuccaccgccacccucugccucggccaccacgccguccccaacggcaccaucgucaagaccaucaccaacgaccagaucgaggucaccaacgccaccgagcucguccaguccuccuccaccggcgagaucugcgacuccccccaccagauccucgacggcaagaacugcacccucaucgacgcccuccucggcgacccccagugcgacggcuuccagaacaagaagugggaccucuucgucgagcgcuccaaggccuacuccaacugcuaccccuacgacguccccgacuacgccucccuccgcucccucgucgccuccuccggcacccucgaguucaacaacgaguccuucaacuggaccggcgucacccagaacggcaccuccuccgccugcauccgccgcuccaagaacuccuucuucucccgccucaacuggcucacccaccucaacuucaaguaccccgcccucaacgucaccaugcccaacaacgagcaguucgacaagcucuacaucuggggcguccaccaccccggcaccgacaaggaccagaucuuccucuacgcccaggccuccggccgcaucaccgucuccaccaagcgcucccagcagaccgccauccccaacaucggcucccgcccccgcguccgcaacauccccucccgcaucuccaucuacuggaccaucgucaagcccggcgacauccuccucaucaacuccaccggcaaccucaucgccccccgcggcuacuucaagauccgcuccggcaaguccuccaucaugcgcuccgacgcccccaucggcaagugcaacuccgagugcaucacccccaacggcuccauccccaacgacaagcccuuccagaacgucaaccgcaucaccuacggcgccugcccccgccacgucaagcagaacacccucaagcucgccaccggcaugcgcaacguccccgagaagcagacccgcggcaucuucggcgccaucgccggcuucaucgagaacggcugggagggcauggucgacggcugguacggcuuccgccaccagaacuccgagggccgcggccaggccgccgaccucaaguccacccaggccgccaucgaccagaucaacggcaagcucaaccgccucaucggcaagaccaacgagaaguuccaccagaucgagaaggaguucuccgaggucgagggccgcauccaggaccucgagaaguacgucgaggacaccaagaucgaccucugguccuacaacgccgagcuccucgucgcccucgagaaccagcacaccaucgaccucaccgacuccgagaugaacaagcucuucgagaagaccaagaagcagcuccgcgagaacgccgaggacaugggcaacggcugcuucaagaucuaccacaagugcgacaacgccugcaucggcuccauccgcaacggcaccuacgaccacgacgucuaccgcgacgaggcccucaacaaccgcuuccagaucaagggcgucgagcucaaguccggcuacaaggacuggauccucuggaucuccuucgccaucuccugcuuccuccucugcgucgcccuccucggcuucaucaugugggccugccagaagggcaacauccgcugcaacaucugcaucuga

SEQ ID NO: 101365 - RNA, 1701 nt, Artificial Sequence
  derived and/or modified CDS sequence (opt2) from hemagglutinin__InfluenzaA__ADK87326
augaagaccaucaucgcccucuccuacauccucugccucgucuucgcccagaagcuccccggcaacgacaacuccaccgccacccucugccucggccaccacgccguccccaacggcaccaucgucaagaccaucaccaacgaccagaucgaggucaccaacgccaccgagcucguccaguccuccuccaccggcgagaucugcgacuccccccaccagauccucgacggcaagaacugcacccucaucgacgcccuccucggcgacccccagugcgacggcuuccagaacaagaagugggaccucuucgucgagcgcuccaaggccuacuccaacugcuaccccuacgacguccccgacuacgccucccuccgcucccucgucgccuccuccggcacccucgaguucaacaacgaguccuucaacuggaccggcgucacccagaacggcaccuccuccgccugcauccgccgcuccaagaacuccuucuucucccgccucaacuggcucacccaccucaacuucaaguaccccgcccucaacgucaccaugcccaacaacgagcaguucgacaagcucuacaucuggggcguccaccaccccggcaccgacaaggaccagaucuuccucuacgcccaggccuccggccgcaucaccgucuccaccaagcgcucccagcagaccgccauccccaacaucggcucccgcccccgcguccgcaacauccccucccgcaucuccaucuacuggaccaucgucaagcccggcgacauccuccucaucaacuccaccggcaaccucaucgccccccgcggcuacuucaagauccgcuccggcaaguccuccaucaugcgcuccgacgcccccaucggcaagugcaacuccgagugcaucacccccaacggcuccauccccaacgacaagcccuuccagaacgucaaccgcaucaccuacggcgccugcccccgcuacgucaagcagaacacccucaagcucgccaccggcaugcgcaacguccccgagaagcagacccgcggcaucuucggcgccaucgccggcuucaucgagaacggcugggagggcauggucgacggcugguacggcuuccgccaccagaacuccgagggccgcggccaggccgccgaccucaaguccacccaggccgccaucgaccagaucaacggcaagcucaaccgccucaucggcaagaccaacgagaaguuccaccagaucgagaaggaguucuccgaggucgagggccgcauccaggaccucgagaaguacgucgaggacaccaagaucgaccucugguccuacaacgccgagcuccucgucgcccucgagaaccagcacaccaucgaccucaccgacuccgagaugaacaagcucuucgagaagaccaagaagcagcuccgcgagaacgccgaggacaugggcaacggcugcuucaagaucuaccacaagugcgacaacgccugcaucggcuccauccgcaacggcaccuacgaccacgacgucuaccgcgacgaggcccucaacaaccgcuuccagaucaagggcgucgagcucaaguccggcugcaaggacuggauccucuggaucuccuucgccaucuccugcuuccuccucugcgucgcccuccucggcuucaccaugugggccugccagaagggcaacauccgcugcaacaucugcaucuga

SEQ ID NO: 101366 - RNA, 1701 nt, Artificial Sequence
  derived and/or modified CDS sequence (opt2) from hemagglutinin__InfluenzaA__ADK87328
augaaggccauccucgucguccuccucuacaccuucgccaccgccaacgccgacacccucugcaucggcuaccacgccaacaacuccaccgacaccgucgacaccguccucgagaagaacgucaccgucacccacuccgucaaccuccucgaggacaagcacaacggcaagcucugcaagcuccgcggcgucgccccccuccaccucggcaagugcaacaucgccggcuggauccucggcaaccccgagugcgagucccucuccaccgccuccuccugguccuacaucgucgagaccuccuccuccgacaacggcaccugcuaccccggcgacuucaucgacuacgaggagcuccgcgagcagcucuccuccgucuccuccuucgagcgcuucgagaucuuccccaagaccuccuccuggcccaaccacgaccccaacaagggcgucaccgccgccugcccccacgccggcgccaaguccuucuacaagaaccucaucuggcucgucaagaagggcaacuccuaccccaagcucuccaaguccuacaucaacgacaagggcaaggagguccucguccucuggggcauccaccaccccuccaccuccgccgaccagcagucccucuaccagaacgccgacgccuacgucuucgucggcaccucccgcuacuccaagaaguucaagcccgagaucgccauccgccccaagguccgcgaccaggagggccgcaugaacuacuacuggacccucgucgagcccggcgacaagaucaccuucgaggccaccggcaaccucgucgucccccgcuacgccuucgccauggagcgcaacgccggcuccggcaucaucaucuccgacacccccguccacgacugcaacaccaccugccagacccccaaguccgccaucaacaccucccuccccuuccagaacauccaccccaucaccaucggcaagugccccaaguacgucaaguccaccaagcuccgccucgccaccggccuccgcaacguccccuccauccagucccgcggccucuucggcgccaucgccggcuucaucgagggcggcuggaccggcauggucgacggcugguacggcuaccaccaccagaacgagcagggcuccggcuacgccgccgaccucaaguccacccagaacgccaucgacgagaucaccaacaaggucaacuccgucaucgagaagaugaacacccaguucaccgccgucggcaaggaguucaaccaccucgagaagcgcaucgagaaccucaacaagaaggucgacgacggcuuccucgacaucuggaccuacaacgccgagcuccucguccuccucgagaacgagcgcacccucgacuaccacgacuccaacgucaagaaccucuacgagaagguccgcucccagcucaagaacaacgccaaggagaucggcaacggcugcuucgaguucuaccacaagugcgacaacaccugcauggaguccgucaagaacggcaccuacgacuaccccaaguacuccgaggaggccaagcucaaccgcgaggagaucgacggcgucaagcucgaguccacccgcaucuaccagauccucgccaucuacuccaccgucgccuccucccucguccucgucgucucccucggcgccaucuccuucuggaugugcuccaacggcucccuccagugccgcaucugcaucuga

SEQ ID NO: 101367 - RNA, 1701 nt, Artificial Sequence
  derived and/or modified CDS sequence (opt2) from hemagglutinin__InfluenzaA__ADK87334
augaagaccaucaucgcccucuccuacauccucugccucgucuucgcccagaagcuccccggcaacgacaacuccaccgccacccucugccucggccaccacgccguccccaacggcaccaucgucaagaccaucaccuccgaccagaucgaggucaccaacgccaccgagcucguccaguccuccuccaccggcgagaucugcgacuccccccaccagauccucgacggcaagaacugcacccucaucgacgcccuccucggcgacccccagugcgacggcuuccagaacaagaagugggaccucuucgucgagcgcuccaaggccuacuccaacugcuaccccuacgacguccccgacuacgccucccuccgcucccucgucgccuccuccggcacccucgaguucaacaacgaguccuucaacuggaccggcgucacccagaacggcaccuccuccgccugcauccgccgcuccaagaacuccuucuucuccaagcucaacuggcucacccaccucaacuucaaguaccccgcccucaacgucaccaugcccaacaacgagcaguucgacaagcucuacaucuggggcguccgccaccccggcaccgacaaggaccagaucuuccucuacgcccaggccuccggccgcaucaccgucuccaccaagcgcucccagcagaccgucauccccaacaucggcucccgcccccgcguccgcaacauccccucccgcaucuccaccuacuggaccaucgucaagcccggcgacauccuccucaucaacuccaccggcaaccucaucgccccccgcggcuacuucaagauccgcuccggcaaguccuccaucaugcgcuccgacacccccaucggcaagugcaacuccgagugcaucacccccaacggcuccauccccaacgacaagcccuuccagaacgucaaccgcaucaccuacggcgccugcccccgcuacgucaagcagaacacccucaagcucgccaccggcaugcgcaacguccccgagaagcagacccgcggcaucuucggcgccaucgccggcuucaucgagaacggcugggagggcauggucgacggcugguacggcuuccgccaccagaacuccgagggccgcggccaggccgccgaccucaaguccacccaggccgccaucgaccagaucaacggcaagcucaaccgccucaucggcaagaccaacgagaaguuccaccagaucgagaaggaguucuccgaggucgagggccgcauccaggaccucgagaaguacgucgaggacaccaagaucgaccucugguccuacaacgccgagcuccucgucgcccucgagaaccagcacaccaucgaccucaccgacuccgagaugaacaagcucuucgagaagaccaagaagcagcuccgcgagaacgccgaggacaugggcaacggcugcuucaagaucuaccacaagugcgacaacgccugcaucggcuccauccgcaacggcaccuacgaccacgacgucuaccgcgacgaggcccucaacaaccgcuuccagaucaagggcgucgagcucaaguccggcuacaaggacuggauccucuggaucuccuucgccaucuccugcuuccuccucugcgucgcccuccucggcuucaucaugugggccugccagaagggcaacauccgcugcaacaucugcaucuga

SEQ ID NO: 101368 - RNA, 1701 nt, Artificial Sequence
  derived and/or modified CDS sequence (opt2) from hemagglutinin__InfluenzaA__ADK87336
augaagaccaucaucgcccucuccuacauccucugccucgucuucgcccagaagcuccccggcaacgacaacuccaccgccacccucugccucggccaccacgccguccccaacggcaccaucgucaagaccaucaccaacgaccagaucgaggucaccaacgccaccgagcucguccaguccuccuccaccggcgagaucugcgacuccccccaccagauccucgacggcaagaacugcacccucaucgacgcccuccucggcgacccccagugcgacggcuuccagaacaagaagugggaccucuucgucgagcgcuccaaggccuacuccaacugcuaccccuacgacguccccgacuacgccucccuccgcucccucgucgccuccuccggcacccucgaguucaacaacgaguccuucaacuggaccggcgucacccagaacggcaccuccuccgccugcauccgccgcuccaagaacuccuucuucuccaagcucaacuggcucacccaccucaacuucaaguaccccgcccucaacgucaccaugcccaacaacgagcaguucgacaagcucuacaucuggggcguccaccaccccggcaccgaccgcgaccagaucuuccucuacgcccaggccuccggccgcaucaccgucuccaccaagcgcucccagcagaccgucauccccaacaucggcucccgcccccgcguccgcaacauccccucccgcaucuccaucuacuggaccaucgucaagcccggcgacauccuccucaucaacuccaccggcaaccucaucgccccccgcggcuacuucaagauccgcuccggcaaguccuccaucaugcgcuccgacacccccaucggcaaguccaacuccgagugcaucacccccaacggcuccauccccaacgacaagcccuuccagaacgucaaccgcaucaccuacggcgccugcccccgcuacgucaagcagaacacccucaagcucgccaccggcaugcgcaacguccccgagaagcagacccgcggcaucuucggcgccaucgccggcuucaucgagaacggcugggagggcauggucgacggcugguacggcuuccgccaccagaacuccgagggccgcggccaggccgccgaccucaaguccacccaggccgccaucgaccagaucaacggcaagcucaaccgccucaucggcaagaccaacgagaaguuccaccagaucgagaaggaguucuccgaggucgagggccgcauccaggaccucgagaaguacgucgaggacaccaagaucgaccucugguccuacaacgccgagcuccucgucgcccucgagaaccagcacaccaucgaccucaccgacuccgagaugaacaagcucuucgagaagaccaagaagcagcuccgcgaggacgccgaggacaugggcaacggcugcuucaagaucuaccacaagugcgacaacgccugcaucggcuccauccgcaacggcaccuacgaccacgacgucuaccgcgacgaggcccucaacaaccgcuuccagaucaagggcgucgagcucaaguccggcuacaaggacuggauccucuggaucuccuucgccaucuccugcuuccuccucugcgucgcccuccucggcuucaucaugugggccugccagaagggcaacauccgcugcaacaucugcaucuga

SEQ ID NO: 101369 - RNA, 1701 nt, Artificial Sequence; identical to SEQ ID NO: 98705
  derived and/or modified CDS sequence (opt2) from hemagglutinin__InfluenzaA__ADK87338

SEQ ID NO: 101370 - RNA, 1701 nt, Artificial Sequence
  derived and/or modified CDS sequence (opt2) from hemagglutinin__InfluenzaA__ADK90193
augaaggccauccucgucguccuccucuacaccuucgccaccgccaacgccgacacccucugcaucggcuaccacgccaacaacuccaccgacaccgucgacaccguccucgagaagaacgucaccgucacccacuccgucaaccuccucgaggacaagcacaacggcaagcucugcaagcuccgcggcgucgccccccuccaccucggcaagugcaacaucgccggcuggauccucggcaaccccgagugcgagucccucuccaccgccuccuccugguccuacaucgucgagaccuccuccuccgacaacggcaccugcuaccccggcgacuucaucgacuacgaggagcuccgcgagcagcucuccuccgucuccuccuucgagcgcuucgagaucuuccccaagaccuccuccuggcccaaccacgacuccaacaagggcgucaccgccgccugcccccacgccggcgccaaguccuucuacaagaaccucaucuggcucgucaagaagggcaacuccuaccccaagcucuccaaguccuacaucaacgacaagggcaaggucguccucguccucuggggcauccaccaccccuccaccuccgccgaccagcagucccucuaccagaacgccgacgccuacgucuucgucggcaccucccgcuacuccaagaaguucaagcccgagaucgccauccgccccaagguccgcgaccaggagggccgcaugaacuacuacuggacccucgucgagcccggcgacaagaucaccuucgaggccaccggcaaccucgucgucccccgcuacgccuucgccauggagcgcaacgccggcuccggcaucaucaucuccgacacccccguccacgacugcaacaccaccugccagacccccaagggcgccaucaacaccucccuccccuuccagaacauccaccccaucaccaucggcaagugccccaaguacgucaaguccaccaagcuccgccucgccaccggccuccgcaacguccccuccauccagucccgcggccucuucggcgccaucgccggcuucaucgagggcggcuggaccggcauggucgacggcugguacggcuaccaccaccagaacgagcagggcuccggcuacgccgccgaccucaaguccacccagaacgccaucgacgagaucaccaacaaggucaacuccgucaucgagaagaugaacacccaguucaccgccgucggcaaggaguucaaccaccucgagaagcgcaucgagaaccucaacaagaaggucgacgacggcuuccucgacaucuggaccuacaacgccgagcuccucguccuccucgagaacgagcgcacccucgacuaccacgacuccaacgucaagaaccucuacgagaagguccgcucccagcucaagaacaacgccaaggagaucggcaacggcugcuucgaguucuaccacaagugcgacaacaccugcauggaguccgucaagaacggcaccuacgacuaccccaaguacuccgaggaggccaagcucaaccgcgaggagaucgacggcgucaagcucgaguccacccgcaucuaccagauccucgccaucuacuccaccgucgccuccucccucguccucgucgucucccucggcgccaucuccuucuggaugugcuccaacggcucccuccagugccgcaucugcaucuga

SEQ ID NO: 101371 - RNA, 1701 nt, Artificial Sequence
  derived and/or modified CDS sequence (opt2) from hemagglutinin__InfluenzaA__ADK90194
augaaggccauccucgucguccuccucuacaccuucgccaccgccaacgccgacacccucugcaucggcuaccacgccaacaacuccaccgacaccgucgacaccguccucgagaagaacgucaccgucacccacuccgucaaccuccucgaggacaagcacaacggcaagcucugcaagcuccgcggcgucgccccccuccaccucggcaagugcaacaucgccggcuggauccucggcaaccccgagugcgagucccucuccaccgccuccuccugguccuacaucgucgagaccuccuccuccgacaacggcaccugcuaccccggcgacuucaucgacuacgaggagcuccgcgagcagcucuccuccgucuccuccuucgagcgcuucgagaucuuccccaagaccuccuccuggcccaaccacgacuccaacaagggcgucaccgccgccugcccccacgccggcgccaaguccuucuacaagaaccucaucuggcucgucaagaagggcaacuccuaccccaagcucuccaaguccuacaucaacgacaagggcaaggagguccucguccucuggggcauccaccaccccuccaccuccgccgaccagcagucccucuaccagaacgccgacgccuacgucuucgucggcaccuccaaguacuccaagaaguucaagcccgagaucgccauccgccccaagguccgcgaccaggagggccgcaugaacuacuacuggacccucgucgagcccggcgacaagaucaccuucgaggccaccggcaaccucgucgucccccgcuacgccuucgccauggagcgcaacgccggcuccggcaucaucaucuccgacacccccguccacgacugcaacaccaccugccagacccccaagggcgccaucaacaccucccuccccuuccagaacauccaccccaucaccaucggcaagugccccaaguacgucaaguccaccaagcuccgccucgccaccggccuccgcaacguccccuccauccagucccgcggccucuucggcgccaucgccggcuucaucgagggcggcuggaccggcauggucgacggcugguacggcuaccaccaccagaacgagcagggcuccggcuacgccgccgaccucaaguccacccagaacgccaucgacgagaucaccaacaaggucaacuccgucaucgagaagaugaacacccaguucaccgccgucggcaaggaguucaaccaccucgagaagcgcaucgagaaccucaacaagaagaucgacgacggcuuccucgacaucuggaccuacaacgccgagcuccucguccuccucgagaacgagcgcacccucgacuaccacgacuccaacgucaagaaccucuacgagaagguccgcucccagcucaagaacaacgccaaggagaucggcaacggcugcuucgaguucuaccacaagugcgacaacaccugcauggaguccgucaagaacggcaccuacgacuaccccaaguacuccgaggaggccaagcucaaccgcgaggagaucgacggcgucaagcucgaguccacccgcaucuaccagauccucgccaucuacuccaccgucgccuccucccucguccucgucgucucccucggcgccaucuccuucuggaugugcuccaacggcucccuccagugccgcaucugcaucuga

SEQ ID NO: 101372 - RNA, 1701 nt, Artificial Sequence
  derived and/or modified CDS sequence (opt2) from hemagglutinin__InfluenzaA__ADK90195
augaaggccauccucgucguccuccucuacaccuucgccaccgccaacgccgacacccucugcaucggcuaccacgccaacaacuccaccgacaccgucgacaccguccucgagaagaacgucaccgucacccacuccgucaaccuccucgaggacaagcacaacggcaagcucugcaagcuccgcggcgucgccccccuccaccucggcaagugcaacaucgccggcuggauccucggcaaccccgagugcgagucccucuccaccgccuccuccugguccuacaucgucgagaccuccuccuccgacaacggcaccugcuaccccggcgacuucaucgacuacgaggagcuccgcgagcagcucuccuccgucuccuccuucgagcgcuucgagaucuuccccaagaccuccuccuggcccaaccacgacuccaacaagggcgucaccgccgccugcccccacgccggcgccaaguccuucuacaagaaccucaucuggcucgucaagaagggcaacuccuaccccaagcucuccaaguccuacaucaacgacaagggcaaggagguccucguccucuggggcauccaccaccccuccaccuccgccgaccagcagucccucuaccagaacgccgacgccuacgucuucgucggcaccucccgcuacuccaagaaguucaagcccgagaucgccauccgccccaagguccgcgaccaggagggccgcaugaacuacuacuggacccucgucgagcccggcgacaagaucaccuucgaggccaccggcaaccucgucgucccccgcuacgccuucgccauggagcgcaacgccggcuccggcaucgucaucuccgacacccccguccacgacugcaacaccaccugccagacccccaagggcgccaucaacaccucccuccccuuccagaacauccaccccaucaccaucggcaagugccccaaguacgucaaguccaccaagcuccgccucgccaccggccuccgcaacguccccuccauccagucccgcggccucuucggcgccaucgccggcuucaucgagggcggcuggaccggcauggucgacggcugguacggcuaccaccaccagaacgagcagggcuccggcuacgccgccgaccucaaguccacccagaacgccaucgacgagaucaccaacaaggucaacuccgucaucgagaagaugaacacccaguucaccgccgucggcaaggaguucaaccaccucgagaagcgcaucgagaaccucaacaagaagaucgacgacggcuuccucgacaucuggaccuacaacgccgagcuccucguccuccucgagaacgagcgcacccucgacuaccacgacuccaacgucaagaaccucuacgagaagguccgcucccagcucaagaacaacgccaaggagaucggcaacggcugcuucgaguucuaccacaagugcgacaacaccugcauggaguccgucaagaacggcaccuacgacuaccccaaguacuccgaggaggccaagcucaaccgcgaggagaucgacggcgucaagcucgaguccacccgcaucuaccagauccucgccaucuacuccaccgucgccuccucccucguccucgucgucucccucggcgccaucuccuucuggaugugcuccaacggcucccuccagugccgcaucugcaucuga

SEQ ID NO: 101373 - RNA, 1701 nt, Artificial Sequence; identical to SEQ ID NO: 98692
  derived and/or modified CDS sequence (opt2) from hemagglutinin__InfluenzaA__ADK90196

SEQ ID NO: 101374 - RNA, 1701 nt, Artificial Sequence
  derived and/or modified CDS sequence (opt2) from hemagglutinin__InfluenzaA__ADK90197
augcgcgccauccucggcguccuccucuacaccuucgccaccgccaacgccgacacccucugcaucggcuaccacgccaacaacuccaccgacaccgucgacaccguccucgagaagaacgucaccgucacccacuccgucaaccuccucgaggacaagcacaacggcaagcucugcaagcuccgcggcgucgccccccuccaccucggcaagugcaacaucgccggcuggauccucggcaaccccgagugcgagucccucuccaccgccuccuccugguccuacaucgucgagaccuccuccuccgacaacggcaccugcuaccccggcgacuucaucgacuacgaggagcuccgcgagcagcucuccuccgucuccuccuucgagcgcuucgagaucuuccccaagaccuccuccuggcccaaccacgacuccaacaagggcgucaccgccgccugcccccacgccggcgccaaguccuucuacaagaaccucaucuggcucgucaagaagggcaacuccuaccccaagcucuccaaguccuacaucaacgacaagggcaaggagguccucguccucuggggcauccaccaccccuccaccuccgccgaccagcagucccucuaccagaacgccgacgccuacgucuucgucggcaccucccgcuacuccaagaaguucaagcccgagaucgccauccgccccaagguccgcgaccaggagggccgcaugaacuacuacuggacccucgucgagcccggcgacaagaucaccuucgaggccaccggcaaccucgucgucccccgcuacgccuucgccauggagcgcaacgccggcuccggcaucaucaucuccgacacccccguccacgacugcaacaccaccugccagacccccaagggcgccaucaacaccucccuccccuuccagaacauccaccccaucaccaucggcaagugccccaaguacgucaaguccaccaagcuccgccucgccaccggccuccgcaacguccccuccauccagucccgcggccucuucggcgccaucgccggcuucaucgagggcggcuggaccggcauggucgacggcugguacggcuaccaccaccagaacgagcagggcuccggcuacgccgccgaccucaaguccacccagaacgccaucgacgagaucaccaacaaggucaacuccgucaucgagaagaugaacacccaguucaccgccgucggcaaggaguucaaccaccucgagaagcgcaucgagaaccucaacaagaaggucgacgacggcuuccucgacaucuggaccuacaacgccgagcuccucguccuccucgagaacgagcgcacccucgacuaccacgacuccaacgucaagaaccucuacgagaagguccgcucccagcucaagaacaacgccaaggagaucggcaacggcugcuucgaguucuaccacaagugcgacaacaccugcauggaguccgucaagaacggcaccuacgacuaccccaaguacuccgaggaggccaagcucaaccgcgaggagaucgacggcgucaagcucgaguccacccgcaucuaccagauccucgccaucuacuccaccgucgccuccucccucguccucgucgucucccucggcgccaucuccuucuggaugugcuccaacggcucccuccagugccgcaucugcaucuga

SEQ ID NO: 101375 - RNA, 1701 nt, Artificial Sequence
  derived and/or modified CDS sequence (opt2) from hemagglutinin__InfluenzaA__ADK90198
augaaggccauccucggcguccuccucuacaccuucgccaccgccaacgccgacacccucugcaucggcuaccacgccaacaacuccaccgacaccgucgacaccguccucgagaagaacgucaccgucacccacuccgucaaccuccucgaggacaagcacaacggcaagcucugcaagcuccgcggcgucgccccccuccaccucggcaagugcaacaucgccggcuggauccucggcaaccccgagugcgagucccucuccaccgccuccuccugguccuacaucgucgagaccuccuccuccgacaacggcaccugcuaccccggcgacuucaucgacuacgaggagcuccgcgagcagcucuccuccgucuccuccuucgagcgcuucgagaucuuccccaagaccuccuccuggcccaaccacgacuccaacaagggcgucaccgccgccugcccccacgccggcgccaaguccuucuacaagaaccucaucuggcucgucaagaagggcaacuccuaccccaagcucuccaaguccuacaucaacgacaagggcaaggagguccucguccucuggggcauccaccaccccuccaccuccgccgaccagcagucccucuaccagaacgccgacgccuacgucuucgucggcaccucccgcuacuccaagaaguucaagcccgagaucgccauccgccccaagguccgcgaccaggagggccgcaugaacuacuacuggacccucgucgagcccggcgacaagaucaccuucgaggccaccggcaaccucgucgucccccgcuacgccuucgccauggagcgcaacgccggcuccggcaucaucaucuccgacacccccguccacgacugcaacaccaccugccagacccccaagggcgccaucaacaccucccuccccuuccagaacauccaccccaucaccaucggcaagugccccaaguacgucaaguccaccaagcuccgccucgccaccggccuccgcaacguccccuccauccagucccgcggccucuucggcgccaucgccggcuucaucgagggcggcuggaccggcauggucgacggcugguacggcuaccaccaccagaacgagcagggcuccggcuacgccgccgaccucaaguccacccagaacgccaucgacgagaucaccaacaaggucaacuccgucaucgagaagaugaacacccaguucaccgccgucggcaaggaguucaaccaccucgagaagcgcaucgagaaccucaacaagaaggucgacgacggcuuccucgacaucuggaccuacaacgccgagcuccucguccuccucgagaacgagcgcacccucgacuaccacgacuccaacgucaagaaccucuacgagaagguccgcucccagcucaagaacaacgccaaggagaucggcaacggcugcuucgaguucuaccacaagugcgacaacaccugcauggaguccgucaagaacggcaccuacgacuaccccaaguacuccgaggaggccaagcucaaccgcgaggagaucgacggcgucaagcucgaguccacccgcaucuaccagauccucgccaucuacuccaccgucgccuccucccucguccucgucgucucccucggcgccaucuccuucuggaugugcuccaacggcucccuccagugccgcaucugcaucuga

SEQ ID NO: 101376 - RNA, 1701 nt, Artificial Sequence; identical to SEQ ID NO: 98705
  derived and/or modified CDS sequence (opt2) from hemagglutinin__InfluenzaA__ADK90199

SEQ ID NO: 101377 - RNA, 1701 nt, Artificial Sequence
  derived and/or modified CDS sequence (opt2) from hemagglutinin__InfluenzaA__ADK90200
augaaggccauccucgucguccuccucuacaccuucgccaccgccaacgccgacacccucugcaucggcuaccacgccaacaacuccaccgacaccgucgacaccguccucgagaagaacgucaccgucacccacuccgucaaccuccucgaggacaagcacaacggcaagcucugcaagcuccgcggcgucgccccccuccaccucggcaagugcaacaucgccggcuggauccucggcaaccccgagugcgagucccucuccaccgccuccuccugguccuacaucgucgagaccuccuccuccgacaacggcaccugcuaccccggcgacuucaucgacuacgaggagcuccgcgagcagcucuccuccgucuccuccuucgagcgcuucgagaucuuccccaagaccuccuccuggcccaaccacgacuccaacaagggcgucaccgccgccugcccccacgccggcgccaaguccuucuacaagaaccucaucuggcucgucaagaagggcaacuccuaccccaagcucuccaaguccuacaucaacgacaagggcaaggagguccucguccucuggggcauccaccaccccuccaccuccgccgaccagcagucccucuaccagaacgccgacgccuacgucuucgucggcaccucccgcuacuccaagaaguucaagcccgagaucgccauccgccccaagguccgcgaccaggagggccgcaugaacuacuacuggacccucgucgagcccggcgacaagaucgccuucgaggccaccggcaaccucgucgucccccgcuacgccuucgccauggagcgcaacgccggcuccggcaucaucaucuccgacacccccguccacgacugcaacaccaccugccagacccccaagggcgccaucaacaccucccuccccuuccagaacauccaccccaucaccaucggcaagugccccaaguacgucaaguccaccaagcuccgccucgccaccggccuccgcaacguccccuccauccagucccgcggccucuucggcgccaucgccggcuucaucgagggcggcuggaccggcauggucgacggcugguacggcuaccaccaccagaacgagcagggcuccggcuacgccgccgaccucaaguccacccagaacgccaucgacgagaucaccaacaaggucaacuccgucaucgagaagaugaacacccaguucaccgccgucggcaaggaguucaaccaccucgagaagcgcaucgagaaccucaacaagaaggucgacgacggcuuccucgacaucuggaccuacaacgccgagcuccucguccuccucgagaacgagcgcacccucgacuaccacgacuccaacgucaagaaccucuacgagaagguccgcucccagcucaagaacaacgccaaggagaucggcaacggcugcuucgaguucuaccacaagugcgacaacaccugcauggaguccgucaagaacggcaccuacgacuaccccaaguacuccgaggaggccaagcucaaccgcgaggagaucgacggcgucaagcucgaguccacccgcaucuaccagauccucgccgucuacuccaccgucgccuccucccucguccucgucgucucccucggcgccaucuccuucuggaugugcuccaacggcucccuccagugccgcaucugcaucuga

SEQ ID NO: 101378 - RNA, 1701 nt, Artificial Sequence
  derived and/or modified CDS sequence (opt2) from hemagglutinin__InfluenzaA__ADK90201
augaaggccauccucgucguccuccucuacaccuucgccaccgccaacgccgacacccucugcaucggcuaccacgccaacaacuccaccgacaccgucgacaccguccucgagaagaacgucaccgucacccacuccgucaaccuccucgaggacaagcacaacggcaagcucugcaagcuccgcggcgucgccccccuccaccucggcaagugcaacaucgccggcuggauccucggcaaccccgagugcgagucccucuccaccgccuccuccugguccuacaucgucgagaccuccuccuccgacaacggcaccugcuaccccggcgacuucaucgacuacgaggagcuccgcgagcagcucuccuccgucuccuccuucgagcgcuucgagaucuuccccaagaccuccuccuggcccaaccacgacuccaacaagggcgucaccgccgccugcccccacgccggcgccaaguccuucuacaagaaccucaucuggcucgucaagaagggcaacuccuaccccaagcucuccaaguccuacaucaacgacaagggcaaggagguccucguccucuggggcauccaccaccccuccaccuccgccgaccagcagucccucuaccagaacgccgacgccuacgucuucgucggcaccucccgcuacuccaagaaguucaagcccgagaucgccguccgccccaagguccgcgaccaggagggccgcaugaacuacuacuggacccucgucgagcccggcgacaagaucaccuucgaggccaccggcaaccucgucgucccccgcuacgccuucgccauggagcgcaacgccggcuccggcaucaucaucuccgacacccccguccacgacugcaacaccaccugccagacccccaagggcgccaucaacaccucccuccccuuccagaacauccaccccaucaccaucggcaagugccccaaguacgucaaguccaccaagcuccgccucgccaccggccuccgcaacguccccuccauccagucccgcggccucuucggcgccaucgccggcuucaucgagggcggcuggaccggcauggucgacggcugguacggcuaccaccaccagaacgagcagggcuccggcuacgccgccgaccucaaguccacccagaacgccaucgacgagaucaccaacaaggucaacuccgucaucgagaagaugaacacccaguucaccgccgucggcaaggaguucaaccaccucgagaagcgcaucgagaaccucaacaagaaggucgacgacggcuuccucgacaucuggaccuacaacgccgagcuccucguccuccucgagaacgagcgcacccucgacuaccacgacuccaacgucaagaaccucuacgagaagguccgcucccagcucaagaacaacgccaaggagaucggcaacggcugcuucgaguucuaccacaagugcgacaacaccugcauggaguccgucaagaacggcaccuacgacuaccccaaguacuccgaggaggccaagcucaaccgcgaggagaucgacggcgucaagcucgaguccacccgcaucuaccagauccucgccaucuacuccaccgucgccuccucccucguccucgucgucucccucggcgccaucuccuucuggaugugcuccaacggcucccuccagugccgcaucugcaucuga

SEQ ID NO: 101379 - RNA, 1701 nt, Artificial Sequence
  derived and/or modified CDS sequence (opt2) from hemagglutinin__InfluenzaA__ADK90202
augaaggccauccucgucguccuccucuacaccuucgccaccgccaacgccgacacccucugcaucggcuaccacgccaacaacuccaccgacaccgucgacaccguccucgagaagaacgucaccgucacccacuccgucaaccuccucgaggacaagcacaacggcaagcucugcaagcuccgcggcgucgccccccuccaccucggcaagugcaacaucgccggcuggauccucggcaaccccgagugcgagccccucuccaccgccuccuccugguccuacaucgucgagaccuccuccuccgacaacggcaccugcuaccccggcgacuucaucgacuacgaggagcuccgcgagcagcucuccuccgucuccuccuucgagcgccucgagaucuuccccaagaccuccuccuggcccaaccacgacuccaacaagggcgucaccgccgccugcccccacgccggcgccaaguccuucuacaagaaccucaucuggcucgucaagaagggcaacuccuaccccaagcucuccaaguccuacaucaacgacaagggcaaggagguccucguccucuggggcauccaccaccccuccaccuccgccgaccagcagucccucuaccagaacgccgacgccuacgucuucgucggcaccucccgcuacuccaagaaguucaagcccgagaucgccauccgccccaagguccgcgaccaggagggccgcaugaacuacuacuggacccucgucgagcccggcgacaagaucaccuucgaggccaccggcaaccucgucgucccccgcuacgccuucgccauggagcgcaacgccggcuccggcaucaucaucuccgacacccccguccacgacugcaacaccaccugccagacccccaacggcgccaucaacaccucccuccccuuccagaacauccaccccaucaccaucggcaagugccccaaguacgucaaguccaccaagcuccgccucgccaccggccuccgcaacguccccuccauccagucccgcggccucuucggcgccaucgccggcuucaucgagggcggcuggaccggcauggucgacggcugguacggcuaccaccaccagaacgagcagggcuccggcuacgccgccgaccucaaguccacccagaacgccaucgacgagaucaccaacaaggucaacuccgucaucgagaagaugaacacccaguucaccgccgucggcaaggaguucaaccaccucgagaagcgcaucgagaaccucaacaagaaggucgacgacggcuuccucgacaucuggaccuacaacgccgagcuccucguccuccucgagaacgagcgcacccucgacuaccacgacuccaacgucaagaaccucuacgagaagguccgcucccagcucaagaacaacgccaaggagaucggcaacggcugcuucgaguucuaccacaagugcgacaacaccugcauggaguccgucaagaacggcaccuacgacuaccccaaguacuccgaggaggccaagcucaaccgcgaggagaucgacggcgucaagcucgaguccacccgcaucuaccagauccucgccaucuacuccaccgucgccuccucccucguccucgucgucucccucggcgccaucuccuucuggaugugcuccaacggcucccuccagugccgcaucugcaucuga

SEQ ID NO: 101380 - RNA, 1701 nt, Artificial Sequence; identical to SEQ ID NO: 98885
  derived and/or modified CDS sequence (opt2) from hemagglutinin__InfluenzaA__ADK90203

SEQ ID NO: 101381 - RNA, 1701 nt, Artificial Sequence; identical to SEQ ID NO: 99806
  derived and/or modified CDS sequence (opt2) from hemagglutinin__InfluenzaA__ADK90204

SEQ ID NO: 101382 - RNA, 1701 nt, Artificial Sequence
  derived and/or modified CDS sequence (opt2) from hemagglutinin__InfluenzaA__ADK94191
augaagaccaucaucgcccucuccuacauccucugccucgucuucgcccagaagcuccccggcaacgacaacuccaccgccacccucugccucggccaccacgccguccccaacggcaccgucgucaagaccaucaccaacgaccagaucgaggucaccaacgccaccgagcucguccaguccuccuccaccggcgagaucugcgacuccccccaccagauccucgacggcaagaacugcacccucaucgacgcccuccucggcgacccccagugcgacggcuuccagaacaagaagugggaccucuucgucgagcgcuccaaggccuacuccaacugcuaccccuacgacguccccgacuacgccucccuccgcucccucgucgccuccuccggcacccucgaguucaacaacgaguccuucaacuggaccggcgucacccagaacggcaccuccuccgccugcauccgccgcuccaagaacuccuucuucucccgccucaacuggcucacccaccucaacuucaaguaccccgcccucaacgucaccaugcccaacaacgagcaguucgacaagcucuacaucuggggcguccaccaccccggcaccgacaaggaccagaucuuccucuacgcccaggccuccggccgcaucaccgucuccaccaagcgcucccagcagaccgucauccccaacaucggcucccgcccccgcguccgcaacauccccucccgcgucuccaucuacuggaccaucgucaagcccggcgacauccuccucaucaacuccaccggcaaccucaucgccccccgcggcuacuucaagauccgcuccggcaaguccuccaucaugcgcuccgacgcccccaucggcaagugcaacuccgagugcaucacccccaacggcuccauccccaacgacaagcccuuccagaacgucaaccgcaucaccuacggcgccugcccccgcuacgucaagcagaacacccucaagcucgccaccggcaugcgcaacguccccgagaagcagacccgcggcaucuucggcgccaucgccggcuucaucgagaacggcugggagggcauggucgacggcugguacggcuuccgccaccagaacuccgagggccgcggccaggccgccgaccucaaguccacccaggccgccaucgaccagaucaacggcaagcucaaccgccucaucggcaagaccaacgagaaguuccaccagaucgagaaggaguucuccgaggucgagggccgcauccaggaccucgagaaguacgucgaggacaccaagaucgaccucugguccuacaacgccgagcuccucgucgcccucgagaaccagcacaccaucgaccucaccgacuccgagaugaacaagcucuucgagaagaccaagaagcagcuccgcgagaacgccgaggacaugggcaacggcugcuucaagaucuaccacaagugcgacaacgccugcaucggcuccauccgcaacggcaccuacgaccacgacgucuaccgcgacgaggcccucaacaaccgcuuccagaucaagggcgucgagcucaaguccggcuacaaggacuggauccucuggaucuccuucgccaucuccugcuuccuccucugcgucgcccuccucggcuucaucaugugggccugccagaagggcaacauccgcugcaacaucugcaucuga

SEQ ID NO: 101383 - RNA, 1701 nt, Artificial Sequence
  derived and/or modified CDS sequence (opt2) from hemagglutinin__InfluenzaA__ADK94202
augaagaccaucaucgcccucuccuacauccucugccucgucuucgcccagaagcuccccggcaacgacaacuccaccgccacccucugccucggccaccacgccguccccaacggcaccaucgucaagaccaucaccaacgaccagaucgaggucaccaacgccaccgagcucguccaguccuccuccaccggcgagaucugcgacuccccccaccagauccucgacggcgagaacugcacccucaucgacgcccuccucggcgacccccagugcgacggcuuccagaacaagaagugggaccucuucgucgagcgcuccaaggccuacuccaacugcuaccccuacgacguccccgacuacgccucccuccgcucccucaucgccuccuccggcacccucgaguucaacaacgaguccuucaacuggaccggcgucacccagaacggcaccuccuccgccugcauccgccgcuccaacaacuccuucuucucccgccucaacuggcucacccaccucaaguucaaguaccccgcccucaacgucaccaugcccaacaacgagcaguucgacaagcucuacaucuggggcguccaccaccccggcaccgacaacgaccagaucuuccucuacgcccaggccuccggccgcaucaccgucuccaccaagcgcucccagcagaccgucauccccaacaucggcucccgcccccgcguccgcaacauccccucccgcaucuccaucuacuggaccaucgucaagcccggcgacauccuccucaucaacuccaccggcaaccucaucgccccccgcggcuacuucaagauccgcuccggcaaguccuccaucaugcgcuccgacgcccccaucggcaagugcaacuccgagugcaucacccccaacggcuccauccccaacgacaagcccuuccagaacgucaaccgcaucaccuacggcgccugcccccgcuacgucaagcagaacacccucaagcucgccaccggcaugcgcaacguccccgagaagcagacccgcggcaucuucggcgccaucgccggcuucaucgagaacggcugggagggcauggucgacggcugguacggcuuccgccaccagaacuccgagggccgcggccaggccgccgaccucaaguccacccaggccgccaucgaccagaucaacggcaagcucaaccgccucaucggcaagaccaacgagaaguuccaccagaucgagaaggaguucuccgaggucgagggccgcauccaggaccucgagaaguacgucgaggacaccaagaucgaccucugguccuacaacgccgagcuccucgucgcccucgagaaccagcacaccaucgaccucaccgacuccgagaugaacaagcucuucgagaagaccaagaagcagcuccgcgagaacgccgaggacaugggcaacggcugcuucaagaucuaccacaagugcgacaacgccugcaucggcuccauccgcaacggcaccuacgaccacgacgucuaccgcgacgaggcccucaacaaccgcuuccagaucaagggcgucgagcucaaguccggcuacaaggacuggauccucuggaucuccuucgccaucuccugcuuccuccucugcgucgcccuccucggcuucaucaugugggccugccagaagggcaacauccgcugcaacaucugcaucuga

SEQ ID NO: 101384 - RNA, 1701 nt, Artificial Sequence; identical to SEQ ID NO: 98470
  derived and/or modified CDS sequence (opt2) from hemagglutinin__InfluenzaA__ADK94213

SEQ ID NO: 101385 - RNA, 1701 nt, Artificial Sequence; identical to SEQ ID NO: 99649
  derived and/or modified CDS sequence (opt2) from hemagglutinin__InfluenzaA__ADK94224

SEQ ID NO: 101386 - RNA, 1701 nt, Artificial Sequence
  derived and/or modified CDS sequence (opt2) from hemagglutinin__InfluenzaA__ADK94257
auggagaccaucaucgcccucuccuacauccucugccucgucuucgcccagaagcuccccggcaacgacaacuccaccgccacccucugccucggccaccacgccguccccaacggcaccaucgucaagaccaucaccaacgaccagaucgaggucaccaacgccaccgagcucguccaguccuccuccaccggcgagaucugcgacuccccccaccagauccucgacggcaagaacugcacccucaucgacgcccuccucggcgacccccagugcgacggcuuccagaacaagaagugggaccucuucgucgagcgcuccaaggccuacuccaacugcuaccccuacgacguccccgacuacgccucccuccgcucccucgucgccuccuccggcacccucgaguucaacaacgaguccuucaacuggaccggcgucacccagaacggcaccuccuccgccugcauccgccgcuccaagaacuccuucuucucccgccucaacuggcucacccaccucaacuucaaguaccccgcccucaacgucaccaugcccaacaacgagcaguucgacaagcucuacaucuggggcguccaccaccccggcaccgacaaggaccagaucuuccucuacgcccaggccuccggccgcaucaccgucuccaccaagcgcucccagcagaccgucauccccaacaucggcucccgcccccgcguccgcaacauccccucccgcaucuccaucuacuggaccaucgucaagcccggcgacauccuccucaucaacuccaccggcaaccucaucgccccccgcggcuacuucaagauccgcuccggcaaguccuccaucaugcgcuccgacgcccccaucggcaagugcaacuccgagugcaucacccccaacggcuccauccccaacgacaagcccuuccagaacgucaaccgcaucaccuacggcgccugcccccgcuacgucaagcaguccacccucaagcucgccaccggcaugcgcaacguccccgagaagcagacccgcggcaucuucggcgccaucgccggcuucaucgagaacggcugggagggcauggucgacggcugguacggcuuccgccaccagaacuccgagggccgcggccaggccgccgaccucaaguccacccaggccgccaucgaccagaucaacggcaagcucaaccgccucaucggcaagaccaacgagaaguuccaccagaucgagaaggaguucuccgaggucgagggccgcauccaggaccucgagaaguacgucgaggacaccaagaucgaccucugguccuacaacgccgagcuccucgucgcccucgagaaccagcacaccaucgaccucaccgacuccgagaugaacaagcucuucgagaagaccaagaagcagcuccgcgagaacgccgaggacaugggcaacggcugcuucaagaucuaccacaagugcgacaacgccugcaucggcuccauccgcaacggcaccuacgaccacgacgucuaccgcgacgaggcccucaacaaccgcuuccagaucaagggcgucgagcucaaguccggcuacaaggacuggauccucuggaucuccuucgccaucuccugcuuccuccucugcgucgcccuccucggcuucaucaugugggccugccagaagggcaacauccgcugcaacaucugcaucuga

SEQ ID NO: 101387 - RNA, 1701 nt, Artificial Sequence
  derived and/or modified CDS sequence (opt2) from hemagglutinin__InfluenzaA__ADK94268
augaagaccaucaucgcccucuccuacauccucugccucgucuucgcccagaagcuccccggcaacgacaacuccaccgccacccucugccucggccaccacgccguccccaacggcaccaucgucaagaccaucaccaacgaccagaucgaggucaccaacgccaccgagcucguccaguccuccuccaccggcgagaucugcgacuccccccaccagauccucgacggcaagaacugcacccucaucgacgcccuccucggcgacccccagugcgacggcuuccagaacaagaagugggaccucuucgucgagcgcuccaaggccuacuccaacugcuaccccuacgacguccccgacuacgccucccuccgcucccucgucgccuccuccggcacccucgaguucaacaacgaguccuucaacuggaccggcgucacccagaacggcaccuccuccgccugcauccgccgcuccaagaacuccuucuucucccgccucaacuggcucacccaccucaacuucaaguaccccgcccucaacgucaccaugcccaacaacgagcaguucgacaagcucuacaucuggggcguccaccaccccggcaccgacaaggaccagaucuuccucuacgcccaggccuccggccgcaucaccgucuccaccaagcgcucccagcagaccgucauccccaacaucggcucccgcccccgcguccgcaacauccccucccgcaucuccaucuacuggaccaucgucaagcccggcgacauccuccucaucaacuccaccggcaaccucaucgccccccgcggcuacuucaagauccgcuccggcaaguccuccaucaugcgcuccgacgcccccaucggcaagugcaacuccgagugcaucacccccaacggcuccauccccaacgacaagcccuuccagaacgucaaccgcaucaccuacggcgccugcccccgcuacgucaagcaguccacccucaagcucgccaccggcaugcgcaacguccccgagaagcagacccgcggcaucuucggcgccaucgccggcuucaucgagaacggcugggagggcauggucgacggcugguacggcuuccgccaccagaacuccgagggccgcggccaggccgccgaccucaaguccacccaggccgccaucgaccagaucaacggcaagcucaaccgccucaucggcaagaccaacgagaaguuccaccagaucgagaaggaguucuccgaggucgagggccgcauccaggaccucgagaaguacgucgaggacaccaagaucgaccucugguccuacaacgccgagcuccucgucgcccucgagaaccagcacaccaucgaccucaccgacuccgagaugaacaagcucuucgagaagaccaagaagcagcuccgcgagaacgccgaggacaugggcaacggcugcuucaagaucuaccacaagugcgacaacgccugcaucggcuccauccgcaacggcaccuacgaccacgacgucuaccgcgacgaggcccucaacaaccgcuuccagaucaagggcgucgagcucaaguccggcuacaaggacuggauccucuggaucuccuucgccaucuccugcuuccuccucugcgucgcccuccucggcuucaucaugugggccugccagaagggcaacauccgcugcaacaucugcaucuga

SEQ ID NO: 101388 - RNA, 1701 nt, Artificial Sequence
  derived and/or modified CDS sequence (opt2) from hemagglutinin__InfluenzaA__ADK94279
augaagaccaucaucgcccucuccuacauccucugccucgucuucgcccagaagcuccccggcaacgacaacuccaccgccacccucugccucggccaccacgccguccccaacggcaccaucgucaagaccaucaccaacgaccagaucgaggucaccaacgccaccgagcucguccaguccuccuccaccggcgagaucugcaacuccccccaccagauccucgacggcgagaacugcacccucaucgacgcccuccucggcgacccccagugcgacggcuuccagaacaagaagugggaccucuucgucgagcgcuccaaggccuacuccaacugcuaccccuacgacguccccgacuacgccucccuccgcucccucgucgccuccuccggcacccucgaguucaacaacgaguccuucaacuggaccggcgucacccagaacggcaccuccuccgccugcauccgccgcuccaacaacuccuucuucucccgccucaacuggcucacccaccucaaguucaaguaccccgcccucaacgucaccaugcccaacaacgagcaguucgacaagcucuacaucuggggcguccaccaccccggcaccgacaacgaccagaucuuccucuacgcccaggccuccggccgcaucaccgucuccaccaagcgcucccagcagaccgucauccccaacaucggcucccgcccccgcguccgcaacauccccucccgcaucuccaucuacuggaccaucgucaagcccggcgacauccuccucaucaacuccaccggcaaccucaucgccccccgcggcuacuucaagauccgcuccggcaaguccuccaucaugcgcuccgacgcccccaucggcaagugcaacuccgagugcaucacccccaacggcuccauccccaacgacaagcccuuccagaacgucaaccgcaucaccuacggcgccugcccccgcuacgucaagcagaacacccucaagcucgccaccggcaugcgcaacguccccgagaagcagacccgcggcaucuucggcgccaucgccggcuucaucgagaacggcugggagggcauggucgacggcugguacggcuuccgccaccagaacuccgagggccgcggccaggccgccgaccucaaguccacccaggccgccaucgaccagaucaacggcaagcucaaccgccucaucggcaagaccaacgagaaguuccaccagaucgagaaggaguucuccgaggucgagggccgcauccaggaccucgagaaguacgucgaggacaccaagaucgaccucugguccuacaacgccgagcuccucgucgcccucgagaaccagcacaccaucgaccucaccgacuccgagaugaacaagcucuucgagaagaccaagaagcagcuccgcgagaacgccgaggacaugggcaacggcugcuucaagaucuaccacaagugcgacaacgccugcaucggcuccauccgcaacggcaccuacgaccacgacgucuaccgcgacgaggcccucaacaaccgcuuccagaucaagggcgucgagcucaaguccggcuacaaggacuggauccucuggaucuccuucgccaucuccugcuuccuccucugcgucgcccuccucggcuucaucaugugggccugccagaagggcaacauccgcugcaacaucugcaucuga

SEQ ID NO: 101389 - RNA, 1701 nt, Artificial Sequence; identical to SEQ ID NO: 99649
  derived and/or modified CDS sequence (opt2) from hemagglutinin__InfluenzaA__ADK94290

SEQ ID NO: 101390 - RNA, 1701 nt, Artificial Sequence; identical to SEQ ID NO: 99649
  derived and/or modified CDS sequence (opt2) from hemagglutinin__InfluenzaA__ADK94301

SEQ ID NO: 101391 - RNA, 1701 nt, Artificial Sequence
  derived and/or modified CDS sequence (opt2) from hemagglutinin__InfluenzaA__ADK94323
augaagaccaucaucgcccucuccuacauccucugccucgucuucgcccagaagcuccccggcaacgacaacuccaccgccacccucugccucggccaccacgccguccccaacggcaccaucgucaagaccaucaccaacgaccagaucgaggucaccaacgccaccgagcucguccaguccuccuccaccggcgagaucugcgacuccccccaccagauccucgacggcaagaacugcacccucaucgacgcccuccucggcgacccccagugcgacggcuuccagaacaagaagugggaccucuucgucgagcgcuccaaggccuacuccaacugcuaccccuacgacguccccgacuacgccucccuccgcucccucgucgccuccuccggcacccucgaguucaacaacgaguccuucaacuggaccggcgucacccagaacggcaccuccuccgccugcauccgccgcuccaagaacuccuucuucucccgccucaacuggcucacccaccucaacuucaaguaccccgcccucaacgucaccaugcccaacaacgagcaguucgacaagcucuacaucuggggcguccaccaccccggcaccgacaaggaccagaucuuccucuacgcccaggccuccggccgcaucaccgucuccaccaagcgcucccagcagaccgucauccccaacaucggcucccgcccccgcauccgcaacauccccucccgcaucuccaucuacuggaccaucgucaagcccggcgacauccuccucaucaacuccaccggcaaccucaucgccccccgcggcuacuucaagauccgcuccggcaaguccuccaucaugcgcuccgacgcccccaucggcaagugcaacuccgagugcaucacccccaacggcuccauccccaacgacaagcccuuccagaacgucaaccgcaucaccuacggcgccugcccccgcuacgucaagcagaacacccucaagcucgccaccggcaugcgcaacguccccgagaagcagacccgcggcaucuucggcgccaucgccggcuucaucgagaacggcugggagggcauggucgacggcugguacggcuuccgccaccagaacuccgagggccgcggccaggccgccgaccucaaguccacccaggccgccaucgaccagaucaacggcaagcucaaccgccucaucggcaagaccaacgagaaguuccaccagaucgagaaggaguucuccgaggucgagggccgcauccaggaccucgagaaguacgucgaggacaccaagaucgaccucugguccuacaacgccgagcuccucgucgcccucgagaaccagcacaccaucgaccucaccgacuccgagaugaacaagcucuucgagaagaccaagaagcagcuccgcgagaacgccgaggacaugggcaacggcugcuucaagaucuaccacaagugcgacaacgccugcaucggcuccauccgcaacggcaccuacgaccacgacgucuaccgcgacgaggcccucaacaaccgcuuccagaucaagggcgucgagcucaaguccggcuacaaggacuggauccucuggaucuccuucgccaucuccugcuuccuccucugcgucgcccuccucggcuucaucaugugggccugccagaagggcaacauccgcugcaacaucugcaucuga

SEQ ID NO: 101392 - RNA, 1701 nt, Artificial Sequence; identical to SEQ ID NO: 101382
  derived and/or modified CDS sequence (opt2) from hemagglutinin__InfluenzaA__ADK94441

SEQ ID NO: 101393 - RNA, 1701 nt, Artificial Sequence
  derived and/or modified CDS sequence (opt2) from hemagglutinin__InfluenzaA__ADK94476
augaagaccaucaucgcccucuccuacauccucugccucgucuucgcccagaagcuccccggcaacgacaacuccaccgccacccucugccucggccaccacgccguccccaacggcaccaucgucaagaccaucaccaacgaccagaucgaggucaccaacgccaccgagcucguccaguccuccuccaccggcgagaucugcgacuccccccaccagauccucgacggcaagaacugcacccucaucgacgcccuccucggcgacccccagugcgacggcuuccagaacaagaagugggaccucuucgucgagcgcuccaaggcccacuccaacugcuaccccuacgacguccccgacuacgccucccuccgcucccucgucgccuccuccggcacccucgaguucaacaacgaguccuucaacuggaccggcgucacccagaacggcaccuccuccgccugcauccgccgcuccaagaacuccuucuucucccgccucaacuggcucacccaccucaacuucaaguaccccgcccucaacgucaccaugcccaacaacgagcaguucgacaagcucuacaucuggggcgcccaccaccccggcaccgacaaggaccagaucuuccucuacgcccaggccuccggccgcaucaccgucuccaccaagcgcucccagcagaccgucauccccaacaucggcucccgcccccgcguccgcaacauccccucccgcaucuccaucuacuggaccaucgucaagcccggcgacauccuccucaucaacuccaccggcaaccucaucgccccccgcggcuacuucaagauccgcuccggcaaguccuccaucaugcgcuccgacgcccccaucggcaagugcaacuccgagugcaucacccccaacggcuccauccccaacgacaagcccuuccagaacgucaaccgcaucaccuacggcgccugcccccgcuacgucaagcagaacacccucaagcucgccaccggcaugcgcaacguccccgagaagcagacccgcggcaucuucggcgccaucgccggcuucaucgagaacggcugggagggcauggucgacggcugguacggcuuccgccaccagaacuccgagggccgcggccaggccgccgaccucaaguccacccaggccgccaucgaccagaucaacggcaagcucaaccgccucaucggcaagaccaacgagaaguuccaccagaucgagaaggaguucuccgaggucgagggccgcauccaggaccucgagaaguacgucgaggacaccaagaucgaccucugguccuacaacgccgagcuccucgucgcccucgagaaccagcacaccaucgaccucaccgacuccgagaugaacaagcucuucgagaagaccaagaagcagcuccgcgagaacgccgaggacaugggcaacggcugcuucaagaucuaccacaagugcgacaacgccugcaucggcuccauccgcaacggcaccuacgaccacgacgucuaccgcgacgaggcccucaacaaccgcuuccagaucaagggcgucgagcucaaguccggcuacaaggacuggauccucuggaucuccuucgccaucuccugcuuccuccucugcgucgcccuccucggcuucaucaugugggccugccagaagggcaacauccgcugcaacaucugcaucuga

SEQ ID NO: 101394 - RNA, 1701 nt, Artificial Sequence; identical to SEQ ID NO: 99649
  derived and/or modified CDS sequence (opt2) from hemagglutinin__InfluenzaA__ADK94487

SEQ ID NO: 101395 - RNA, 1701 nt, Artificial Sequence
  derived and/or modified CDS sequence (opt2) from hemagglutinin__InfluenzaA__ADK94498
augaagaccaucaucgcccucuccuacauccucugccucgucuucgcccagaagcuccccggcaacgacaacuccaccgccacccucugccucggccaccacgccguccccaacggcaccgucgucaagaccaucaccaacgaccagaucgaggucaccaacgccaccgagcucguccaguccuccuccaccggcgagaucugcgacuccccccaccagauccucgacggcaagaacugcacccucaucgacgcccuccucggcgacccccagugcgacggcuuccagaacaagaagugggaccucuucgucgagcgcuccaaggccuacuccaacugcuaccccuacgacguccccgacuacgccucccuccgcucccucgucgccuccuccggcacccucgaguucaacaacgaguccuucaacuggaccggcgucacccagaacggcaccuccuccgccugcauccgccgcuccaagaacuccuucuucucccgccucaacuggcucacccaccucaacuucaaguaccccgcccucaacgucaccaugcccaacaacgagcaguucgacaagcucuacaucuggggcguccaccaccccggcaccgacaaggaccagaucuuccucuacgcccaggccuccggccgcaucaccgucuccaccaagcgcucccagcagaccgucauccccaacaucggcucccgcccccgcguccgcaacauccccucccgcaucuccaucuacuggaccaucgucaagcccggcgacauccuccucaucaacuccaccggcaaccucaucgccccccgcggcuacuucaagauccgcuccggcaaguccuccaucaugcgcuccgacgcccccaucggcaagugcaacuccgagugcaucacccccaacggcuccauccccaacgacaagcccuuccagaacgucaaccgcaucaccuacggcgccugcccccgcuacgucaagcagaacacccucaagcucgccaccggcaugcgcaacguccccgagaagcagacccgcggcaucuucggcgccaucgccggcuucaucgagaacggcugggagggcauggucgacggcugguacggcuuccgccaccagaacuccgagggccgcggccaggccgccgaccucaaguccacccaggccgccaucgaccagaucaacggcaagcucaaccgccucaucggcaagaccaacgagaaguuccaccagaucgagaaggaguucuccgaggucgagggccgcauccaggaccucgagaaguacgucgaggacaccaagaucgaccucugguccuacaacgccgagcuccucgucgcccucgagaaccagcacaccaucgaccucaccgacuccgagaugaacaagcucuucgagaagaccaagaagcagcuccgcgagaacgccgaggacaugggcaacggcugcuucaagaucuaccacaagugcgacaacgccugcaucggcuccauccgcaacggcaccuacaaccacgacgucuaccgcgacgaggcccucaacaaccgcuuccagaucaagggcgucgagcucaaguccggcuacaaggacuggauccucuggaucuccuucgccaucuccugcuuccuccucugcgucgcccuccucggcuucaucaugugggccugccagaagggcaacauccgcugcaacaucugcaucuga

SEQ ID NO: 101396 - RNA, 1701 nt, Artificial Sequence
  derived and/or modified CDS sequence (opt2) from hemagglutinin__InfluenzaA__ADK94509
augaagaccaucaucgcccucuccuacauccucugccucgucuucgcccagaagcuccccggcaacgacaacuccaccgccacccucugccucggccaccacgccguccccaacggcaccaucgucaagaccaucaccaacgaccagaucgaggucaccaacgccaccgagcucguccaguccuccuccaccggcgagaucugcgacuccccccaccagauccucgacggcaagaacugcacccucaucgacgcccuccucggcgacccccagugcgacggcuuccagaacaagaagugggaccucuucgucgagcgcuccaaggccuacuccaacugcuaccccuacgacguccccgacuacgccucccuccgcucccucgucgccuccuccggcacccucgaguucaacaacgaguccuucaacuggaccggcgucacccagaacggcaccuccuccgccugcauccgccgcuccaagaacuccuucuucucccgccucaacuggcucacccaccucaacuucaaguaccccgcccucaacgucaccaugcccaacaacgagcaguucgacaagcucuacaucuggggcguccaccaccccggcaccgacaaggaccagaucuuccucuacgcccaggccuccggccgcaucaccgucuccaccaagcgcucccagcagaccgccauccccaacaucggcucccgcccccgcguccgcaacauccccucccgcaucuccaucuacuggaccaucgucaagcccggcgacauccuccucaucaacuccaccggcaaccucaucgccccccgcggcuacuucaagauccgcuccggcaaguccuccaucaugcgcuccgacgcccccaucggcaagugcaacuccgagugcaucacccccaacggcuccauccccaacgacaagcccuuccagaacgucaaccgcaucaccuacggcgccugcccccgcuacaucaagcagaacacccucaagcucgccaccggcaugcgcaacguccccgagaagcagacccgcggcaucuucggcgccaucgccggcuucaucgagaacggcugggagggcauggucgacggcugguacggcuuccgccaccagaacuccgagggccgcggccaggccgccgaccucaaguccacccaggccgccaucgaccagaucaacggcaagcucaaccgccucaucggcaagaccaacgagaaguuccaccagaucgagaaggaguucuccgaggucgagggccgcauccaggaccucgagaaguacgucgaggacaccaagaucgaccucugguccuacaacgccgagcuccucgucgcccucgagaaccagcacaccaucgaccucaccgacuccgagaugaacaagcucuucgagaagaccaagaagcagcuccgcgagaacgccgaggacaugggcaacggcugcuucaagaucuaccacaagugcgacaacgccugcaucggcuccauccgcaacggcaccuacgaccacgacgucuaccgcgacgaggcccucaacaaccgcuuccagaucaagggcgucgagcucaaguccggcuacaaggacuggauccucuggaucuccuucgccaucuccugcuuccuccucugcgucgcccuccucggcuucaucaugugggccugccagaagggcaacauccgcugcaacaucugcaucuga

SEQ ID NO: 101397 - RNA, 1701 nt, Artificial Sequence
  derived and/or modified CDS sequence (opt2) from hemagglutinin__InfluenzaA__ADK94520
augaagaccaucaucgcccucuccuacauccucugccucgucuucgcccagaagcuccccggcaacgacaacuccaccgccacccucugccucggccaccacgccguccccaacggcaccaucgucaagaccaucaccaacgaccagaucgaggucaccaacgccaccgagcucguccaguccuccuccaccggcgagaucugcgacuccccccaccagauccucgacggcgagaacugcacccucaucgacgcccuccucggcgacccccagugcgacggcuuccagaacaagaagugggaccucuucgucgagcgcuccaaggccuacuccaacugcuaccccuacgacguccccgacuacgccucccuccgcucccucaucgccuccuccggcacccucgaguucaacaacgaguccuucaacuggaccggcgucacccagaacggcaccuccuccgccugcauccgccgcuccaacaacuccuucuucucccgccucaacuggcucacccaccuccgcuucaaguaccccgcccucaacgucaccaugcccaacaacgagcaguucgacaagcucuacaucuggggcguccaccaccccggcaccgacaacgaccagaucuuccucuacgcccaggccuccggccgcaucaccgucuccaccaagcgcucccagcagaccgucauccccaacaucggcucccgcccccgcguccgcaacauccccucccgcaucuccaucuacuggaccaucgucaagcccggcgacauccuccucaucaacuccaccggcaaccucaucgccccccgcggcuacuucaagauccgcuccggcaaguccuccaucaugcgcuccgacgcccccaucggcaagugcaacuccgagugcaucacccccaacggcuccauccccaacgacaagcccuuccagaacgucaaccgcaucaccuacggcgccugcccccgcuacgucaagcagaacacccucaagcucgccaccggcaugcgcaacguccccgagaagcagacccgcggcaucuucggcgccaucgccggcuucaucgagaacggcugggagggcauggucgacggcugguacggcuuccgccaccagaacuccgagggccgcggccaggccgccgaccucaaguccacccaggccgccaucgaccagaucaacggcaagcucaaccgccucaucggcaagaccaacgagaaguuccaccagaucgagaaggaguucuccgaggucgagggccgcauccaggaccucgagaaguacgucgaggacaccaagaucgaccucugguccuacaacgccgagcuccucgucgcccucgagaaccagcacaccaucgaccucaccgacuccgagaugaacaagcucuucgagaagaccaagaagcagcuccgcgagaacgccgaggacaugggcaacggcugcuucaagaucuaccacaagugcgacaacgccugcaucggcuccauccgcaacggcaccuacgaccacgacgucuaccgcgacgaggcccucaacaaccgcuuccagaucaagggcgucgagcucaaguccggcuacaaggacuggauccucuggaucuccuucgccaucuccugcuuccuccucugcgucgcccuccucggcuucaucaugugggccugccagaagggcaacaucaagugcaacaucugcaucuga

SEQ ID NO: 101398 - RNA, 1701 nt, Artificial Sequence; identical to SEQ ID NO: 99649
  derived and/or modified CDS sequence (opt2) from hemagglutinin__InfluenzaA__ADK94531

SEQ ID NO: 101399 - RNA, 1701 nt, Artificial Sequence; identical to SEQ ID NO: 98470
  derived and/or modified CDS sequence (opt2) from hemagglutinin__InfluenzaA__ADK94542

SEQ ID NO: 101400 - RNA, 1701 nt, Artificial Sequence
  derived and/or modified CDS sequence (opt2) from hemagglutinin__InfluenzaA__ADK94553
augaagaccaucaucgcccucuccuacauccucugccucgucuucgcccagaagcuccccggcaacgacaacuccaccgccacccucugccucggccaccacgccguccccaacggcaccaucgucaagaccaucaccaacgaccagaucgaggucaccaacgccaccgagcucguccaguccuccuccaccggcgagaucugcgacuccccccaccagauccucgacggcaagaacugcacccucaucgacgcccuccucggcgacccccagugcgacggcuuccagaacaagaagugggaccucuucgucgagcgcuccaaggccuacuccaacugcuaccccuacgacguccccgacuacgccucccuccgcucccucgucgccuccuccggcacccucgaguucaacaacgaguccuucaacuggaccggcgucacccagaacggcaccuccuccgccugcauccgccgcuccaagaacuccuucuucucccgccucaacuggcucacccaccucaacuucaaguaccccgcccucaacgucaccaugcccaacaacgagcaguucgacaagcucuacaucuggggcguccaccaccccggcaccgacaaggaccagaucuuccucuacgcccaggccuccggccgcaucaccgucuccaccaagcgcucccagcagaccgucauccccaacaucggcucccgcccccgcguccgcaacauccccucccgcaucuccaucuacuggaccaucgucaagcccggcgacauccuccucaucaacuccaccggcaaccucaucgccccccgcggcuacuucaagauccgcuccggcaaguccuccaucaugcgcuccgacgcccccaucggcaagugcaacuccgagugcaucacccccaacggcuccauccccaacgacaagcccuuccagaacgucaaccgcaucaccuacggcgccugcccccgcuacgucaagcaguccacccucaagcucgccaccggcaugcgcaacguccccgagaagcagacccgcggcaucuucggcgccaucgccggcuucaucgagaacggcugggagggcauggucgacggcugguacggcuuccgccaccagaacuccgagggccgcggccaggccgccgaccucaaguccacccaggccgccaucgaccagaucaacggcaagcucaaccgccucaucggcaagaccaacgagaaguuccaccagaucgagaaggaguucuccgaggucgagggccgcauccaggaccucgagaaguacgucgaggacaccaagaucgaccucugguccuacaacgccgagcuccucgucgcccucgagaaccagcacaccaucgaccucaccgacuccgagaugaacaagcucuucgagaagaccaagaagcagcuccgcgagaacgccgaggacaugggcaacggcugcuucaagaucuaccacaagugcaacaacgccugcaucggcuccauccgcaacggcaccuacgaccacgacgucuaccgcgacgaggcccucaacaaccgcuuccagaucaagggcgucgagcucaaguccggcuacaaggacuggauccucuggaucuccuucgccaucuccugcuuccuccucugcgucgcccuccucggcuucaucaugugggccugccagaagggcaacauccgcugcaacaucugcaucuga

SEQ ID NO: 101401 - RNA, 1701 nt, Artificial Sequence; identical to SEQ ID NO: 99649
  derived and/or modified CDS sequence (opt2) from hemagglutinin__InfluenzaA__ADK94564

SEQ ID NO: 101402 - RNA, 1701 nt, Artificial Sequence
  derived and/or modified CDS sequence (opt2) from hemagglutinin__InfluenzaA__ADK98501
augaaggccauccucgucguccuccucuacaccuucgccaccgccaacgccgacacccucugcaucggcuaccacgccaacaacuccaccgacaccgucgacaccguccucgagaagaacgucaccgucacccacuccgucaaccuccucgaggacaagcacaacggcaagcucugcaagcuccgcggcgucgccccccuccaccucggcaagugcaacaucgccggcuggauccucggcaaccccgagugcgagucccucuccaccgccuccuccugguccuacaucgucgagaccuccuccuccggcaacggcaccugcuaccccggcgacuucaucgacuacgaggagcuccgcgagcagcucuccuccgucuccuccuucgagcgcuucgagaucuuccccaagaccuccuccuggcccaaccacgacuccaacaagggcgucaccgccgccugcccccacgccggcgccaaguccuucuacaagaaccucaucuggcucgucaagaagggcaacuccuaccccaagcucuccaaguccuacaucaacgacaagggcaaggagguccucguccucuggggcauccaccaccccuccaccuccgccgaccagcagucccucuaccagaacgccgacgccuacgucuucgucggcaccucccgcuacuccaagaaguucaagcccgagaucgccauccgccccaagguccgcgaccaggagggccgcaugaacuacuacuggacccucgucgagcccggcgacaagaucaccuucgagaccaccggcaaccucgucgucccccgcuacgccuucgccauggagcgcaacgccggcuccggcaucaucaucuccgacacccccguccacgacugcaacaccaccugccagacccccaagggcgccaucaacaccucccuccccuuccagaacauccaccccaucaccaucggcaagugccccaaguacgucaaguccaccaagcuccgccucgccaccggccuccgcaacguccccuccauccagucccgcggccucuucggcgccaucgccggcuucaucgagggcggcuggaccggcauggucgacggcugguacggcuaccaccaccagaacgagcagggcuccggcuacgccgccgaccucaaguccacccagaacgccaucgacgagaucaccaacaaggucaacuccgucaucgagaagaugaacacccaguucaccgccgucggcaaggaguucaaccaccucgagaagcgcaucgagaaccucaacaagaaggucgacgacggcuuccucgacaucuggaccuacaacgccgagcuccucguccuccucgagaacgagcgcacccucgacuaccacgacuccaacgucaagaaccucuacgagaagguccgcucccagcucaagaacaacgccaaggagaucggcaacggcugcuucgaguucuaccacaagugcgacaacaccugcauggaguccgucaagaacggcaccuacgacuaccccaaguacuccgaggaggccaagcucaaccgcgaggagaucgacggcgucaagcucgaguccacccgcaucuaccagauccucgccaucuacuccaccgucgccuccucccucguccucgucgucucccucggcgccaucuccuucuggaugugcuccaacggcucccuccagugccgcaucugcaucuga

SEQ ID NO: 101403 - RNA, 1701 nt, Artificial Sequence
  derived and/or modified CDS sequence (opt2) from hemagglutinin__InfluenzaA__ADK98503
augaaggccauccucgucguccuccucuacaccuucgccaccgccaacgccgacacccucugcaucggcuaccacgccaacaacuccaccgacaccgucgacaccguccucgagaagaacgucaccgucacccacuccgucaaccuccucgaggacaagcacaacggcaagcucugcaagcuccgcggcgucgccccccuccaccucggcaagugcaacaucgccggcuggauccucggcaaccccgagugcgagucccucuccaccgccuccuccugguccuacaucgucgagaccuccuccuccgacaacggcaccugcuaccccggcgacuucaucgacuacgaggagcuccgcgagcagcucuccuccgucuccuccuucgagcgcuucgagaucuuccccaagaccuccuccuggcccaaccacgaccccaacaagggcgucaccgccgccugcccccacgccggcgccaaguccuucuacaagaaccucaucuggcucgucaagaagggcaacuccuaccccaagcucuccaaguccuacaucaacgacaagggcaaggagguccucguccucuggggcauccaccaccccuccaccuccgccgaccagcagucccucuaccagaacgucgacgccuacgucuucgucggcaccucccgcuacuccaagaaguucaagcccgagaucgccauccgccccaagguccgcgaccaggagggccgcaugaacuacuacuggacccucgucgagcccggcgacaagaucaccuucgaggccaccggcaaccucgucgucccccgcuacgccuucgccauggagcgcaacgccggcuccggcaucaucaucuccgacacccccguccacgacugcaacaccaccugccagacccccaagggcgccaucaacaccucccuccccuuccagaacauccaccccaucaccaucggcaagugccccaaguacgucaaguccaccaagcuccgccucgccaccggccuccgcaacguccccuccauccagucccgcggccucuucggcgccaucgccggcuucaucgagggcggcuggaccggcauggucgacggcugguacggcuaccaccaccagaacgagcagggcuccggcuacgccgccgaccucaaguccacccagaacgccaucgacgagaucaccaacaaggucaacuccgucaucgagaagaugaacacccaguucaccgccgucggcaaggaguucaaccaccucgagaagcgcaucgagaaccucaacaagaaggucgacgacggcuuccucgacaucuggaccuacaacgccgagcuccucguccuccucgagaacgagcgcacccucgacuaccacgacuccaacgucaagaaccucuacgagaagguccgcucccagcucaagaacaacgccaaggagaucggcaacggcugcuucgaguucuaccacaagugcgacaacaccugcauggaguccgucaagaacggcaccuacgacuaccccaaguacuccgaggaggccaagcucaaccgcgaggagaucgacggcgucaagcucgaguccacccgcaucuaccagauccucgccaucuacuccaccgucgccuccucccucguccucgucgucucccucggcgccaucuccuucuggaugugcuccaacggcucccuccagugccgcaucugcaucuga

SEQ ID NO: 101404 - RNA, 1701 nt, Artificial Sequence; identical to SEQ ID NO: 101387
  derived and/or modified CDS sequence (opt2) from hemagglutinin__InfluenzaA__ADK98623

SEQ ID NO: 101405 - RNA, 1701 nt, Artificial Sequence; identical to SEQ ID NO: 98470
  derived and/or modified CDS sequence (opt2) from hemagglutinin__InfluenzaA__ADK98634

SEQ ID NO: 101406 - RNA, 1701 nt, Artificial Sequence; identical to SEQ ID NO: 98470
  derived and/or modified CDS sequence (opt2) from hemagglutinin__InfluenzaA__ADK98645

SEQ ID NO: 101407 - RNA, 1701 nt, Artificial Sequence; identical to SEQ ID NO: 101333
  derived and/or modified CDS sequence (opt2) from hemagglutinin__InfluenzaA__ADK98656

SEQ ID NO: 101408 - RNA, 1701 nt, Artificial Sequence; identical to SEQ ID NO: 101400
  derived and/or modified CDS sequence (opt2) from hemagglutinin__InfluenzaA__ADK98667

SEQ ID NO: 101409 - RNA, 1701 nt, Artificial Sequence
  derived and/or modified CDS sequence (opt2) from hemagglutinin__InfluenzaA__ADK98678
augaagaccaucaucgcccucuccuacauccucugccucgucuucgcccagaagcuccccggcaacgacaacuccaccgccacccucugccucggccaccacgccguccccaacggcaccaucgucaagaccaucaccaacgaccagaucgaggucaccaacgccaccgagcucguccaguccuccuccaccggcgagaucugcgacuccccccaccagauccucgacggcgagaacugcacccucaucgacgcccuccucggcgacccccagugcgacggcuuccagaacaagaagugggaccucuucgucgagcgcuccaaggccuacuccaacugcuaccccuacgacguccccgacuacgccucccuccgcucccucgucgccuccuccggcacccucgaguucaacaacgaguccuucaacuggaccggcgucacccagaacggcaccuccuccgccugcauccgccgcuccaacaacuccuucuucucccgccucaacuggcucacccaccucaaguucaaguaccccgcccucaacgucaccaugcccaacaacgagcaguucgacaagcucuacaucuggggcguccaccaccccggcaccgacaacgaccagaucuuccucuacgcccaggccuccggccgcaucaccgucuccaccaagcgcucccagcagaccgucauccccaacaucggcucccgcccccgcguccgcaacauccccucccgcaucuccaucuacuggaccaucgucaagcccggcgacauccuccucaucaacuccaccggcaaccucaucgccccccgcggcuacuucaagauccgcuccggcaaguccuccaucaugcgcuccgacgcccccaucggcaagugcaacuccgagugcaucacccagaacggcuccauccccaacgacaagcccuuccagaacgucaaccgcaucaccuacggcgccugcccccgcuacgucaagcagaacacccucaagcucgccaccggcaugcgcaacguccccgagaagcagacccgcggcaucuucggcgccaucgccggcuucaucgagaacggcugggagggcauggucgacggcugguacggcuuccgccaccagaacuccgagggccgcggccaggccgccgaccucaaguccacccaggccgccaucgaccagaucaacggcaagcucaaccgccucaucggcaagaccaacgagaaguuccaccagaucgagaaggaguucuccgaggucgagggccgcauccaggaccucgagaaguacgucgaggacaccaagaucgaccucugguccuacaacgccgagcuccucgucgcccucgagaaccagcacaccaucgaccucaccgacuccgagaugaacaagcucuucgagaagaccaagaagcagcuccgcgagaacgccgaggacaugggcaacggcugcuucaagaucuaccacaagugcgacaacgccugcaucggcuccauccgcaacggcaccuacgaccacgacgucuaccgcgacgaggcccucaacaaccgcuuccagaucaagggcgucgagcucaaguccggcuacaaggacuggauccucuggaucuccuucgccaucuccugcuuccuccucugcgucgcccuccucggcuucaucaugugggccugccagaagggcaacauccgcugcaacaucugcaucuga

SEQ ID NO: 101410 - RNA, 1701 nt, Artificial Sequence; identical to SEQ ID NO: 98470
  derived and/or modified CDS sequence (opt2) from hemagglutinin__InfluenzaA__ADK98689

SEQ ID NO: 101411 - RNA, 1701 nt, Artificial Sequence; identical to SEQ ID NO: 98470
  derived and/or modified CDS sequence (opt2) from hemagglutinin__InfluenzaA__ADK98700

SEQ ID NO: 101412 - RNA, 1701 nt, Artificial Sequence; identical to SEQ ID NO: 98470
  derived and/or modified CDS sequence (opt2) from hemagglutinin__InfluenzaA__ADK98711

SEQ ID NO: 101413 - RNA, 1701 nt, Artificial Sequence
  derived and/or modified CDS sequence (opt2) from hemagglutinin__InfluenzaA__ADK98722
augaagaccaucaucgcccucuccuacauccucugccucgucuucgcccagaagcuccccggcaacgacaacuccaccgccacccucugccucggccaccacgccguccccaacggcaccaucgucaagaccaucaccaacgaccagaucgaggucaccaacgccaccgagcucguccaguccuccuccaccggcgagaucugcgacuccccccaccagauccucgacggcgagaacugcacccucaucgacgcccuccucggcgacccccagugcgacggcuuccagaacaagaagugggaccucuucgucgagcgcuccaaggccuacuccaacugcuaccccuacgacguccccgacuacgccucccuccgcucccucgucgccuccuccggcacccucgaguucaacaacgaguccuucaacuggaccggcgucacccagaacggcaccuccuccgccugcauccgccgcuccaacaacuccuucuucucccgccucaacuggcucacccaccucaaguucaaguaccccgcccucaacgucaccaugcccaacaacgagcaguucgacaagcucuacaucuggggcguccaccaccccggcaccgacaacgaccagaucuuccucuacgcccaggccuccggccgcaucaccgucuccaccaagggcucccagcagaccgucauccccaacaucggcucccgcccccgcguccgcaacauccccucccgcaucuccaucuacuggaccaucgucaagcccggcgacauccuccucaucaacuccaccggcaaccucaucgccccccgcggcuacuucaagauccgcuccggcaaguccuccaucaugcgcuccgacgcccccaucggcaagugcaacuccgagugcaucacccccaacggcuccauccccaacgacaagcccuuccagaacgucaaccgcaucaccuacggcgccugcccccgcuacgucaagcagaacacccucaagcucgccaccggcaugcgcaacguccccgagaagcagacccgcggcaucuucggcgccaucgccggcuucaucgagaacggcugggagggcauggucgacggcugguacggcuuccgccaccagaacuccgagggccgcggccaggccgccgaccucaaguccacccaggccgccaucgaccagaucaacggcaagcucaaccgccucaucggcaagaccaacgagaaguuccaccagaucgagaaggaguucuccgaggucgagggccgcauccaggaccucgagaaguacgucgaggacaccaagaucgaccucugguccuacaacgccgagcuccucgucgcccucgagaaccagcacaccaucgaccucaccgacuccgagaugaacaagcucuucgagaagaccaagaagcagcuccgcgagaacgccgaggacaugggcaacggcugcuucaagaucuaccacaagugcgacaacgccugcaucggcuccauccgcaacggcaccuacgaccacgacgucuaccgcgacgaggcccucaacaaccgcuuccagaucaagggcgucgagcucaaguccggcuacaaggacuggauccucuggaucuccuucgccaucuccugcuuccuccucugcgucgcccuccucggcuucaucaugugggccugccagaagggcaacauccgcugcaacaucugcaucuga

SEQ ID NO: 101414 - RNA, 1701 nt, Artificial Sequence; identical to SEQ ID NO: 101387
  derived and/or modified CDS sequence (opt2) from hemagglutinin__InfluenzaA__ADK98733

SEQ ID NO: 101415 - RNA, 1701 nt, Artificial Sequence; identical to SEQ ID NO: 98470
  derived and/or modified CDS sequence (opt2) from hemagglutinin__InfluenzaA__ADK98744

SEQ ID NO: 101416 - RNA, 1701 nt, Artificial Sequence; identical to SEQ ID NO: 98470
  derived and/or modified CDS sequence (opt2) from hemagglutinin__InfluenzaA__ADK98777

SEQ ID NO: 101417 - RNA, 1701 nt, Artificial Sequence; identical to SEQ ID NO: 98470
  derived and/or modified CDS sequence (opt2) from hemagglutinin__InfluenzaA__ADK98788

SEQ ID NO: 101418 - RNA, 1701 nt, Artificial Sequence; identical to SEQ ID NO: 99649
  derived and/or modified CDS sequence (opt2) from hemagglutinin__InfluenzaA__ADK98799

SEQ ID NO: 101419 - RNA, 1701 nt, Artificial Sequence
  derived and/or modified CDS sequence (opt2) from hemagglutinin__InfluenzaA__ADK98810
augaagaccaucaucgcccucuccuacauccucugccucgucuucgcccagaagcuccccggcaacgacaacuccaccgccacccucugccucggccaccacgccguccccaacggcaccaucgucaagaccaucaccaacgaccagaucgaggucaccaacgccaccgagcucguccaguccuccuccaccggcgagaucugcgacuccccccaccagauccucgacggcgagaacugcacccucaucgacgcccuccucggcgacccccagugcgacggcuuccagaacaagaagugggaccucuucgucgagcgcuccaaggccuacuccaacugcuaccccuacgacguccccgacuacgccucccuccgcucccucgucgccuccuccggcacccucgaguucaacaacgaguccuucaacuggaccggcgucacccagaacggcaccuccuccgccugcauccgccgcuccaacaacuccuucuucucccgccucaacuggcucacccaccucaaguucaaguaccccgcccucaacgucaccaugcccaacaacgagcaguucgacaagcucuacaucuggggcguccaccaccccggcaccgacaacgaccagaccuuccucuacgcccaggccuccggccgcaucaccgucuccaccaagcgcucccagcagaccgucauccccaacaucggcucccgcccccgcguccgcaacauccccucccgcaucuccaucuacuggaccaucgucaagcccggcgacauccuccucaucaacuccaccggcaaccucaucgccccccgcggcuacuucaagauccgcuccggcaaguccuccaucaugcgcuccgacgcccccaucggcaagugcaacuccgagugcaucacccccaacggcuccauccccaacgacaagcccuuccagaacgucaaccgcaucaccuacggcgccugcccccgcuacgucaagcagaacacccucaagcucgccaccggcaugcgcaacguccccgagaagcagacccgcggcaucuucggcgccaucgccggcuucaucgagaacggcugggagggcauggucgacggcugguacggcuuccgccaccagaacuccgagggccgcggccaggccgccgaccucaaguccacccaggccgccaucgaccagaucaacggcaagcucaaccgccucaucggcaagaccaacgagaaguuccaccagaucgagaaggaguucuccgaggucgagggccgcauccaggaccucgagaaguacgucgaggacaccaagaucgaccucugguccuacaacgccgagcuccucgucgcccucgagaaccagcacaccaucgaccucaccgacuccgagaugaacaagcucuucgagaagaccaagaagcagcuccgcgagaacgccgaggacaugggcaacggcugcuucaagaucuaccacaagugcgacaacgccugcaucggcuccauccgcaacggcaccuacgaccacaacgucuaccgcgacgaggcccucaacaaccgcuuccagaucaaggaggucgagcucaaguccggcuacaaggacuggauccucuggaucuccuucgccaucuccugcuuccuccucugcgucgcccuccucggcuucaucaugugggccugccagaagggcaacauccgcugcaacaucugcaucuga

SEQ ID NO: 101420 - RNA, 1701 nt, Artificial Sequence
  derived and/or modified CDS sequence (opt2) from hemagglutinin__InfluenzaA__ADK98821
augaagaccaucaucgcccucuccuacauccucugccucgucuucgcccagaagcuccccggcaacgacaacuccaccgccacccucugccucggccaccacgccguccccaacggcaccaucgucaagaccaucaccaacgaccagaucgaggucaccaacgccaccgagcucguccaguccuccuccaccggcgagaucugcgacuccccccaccagauccucgacggcaagaacugcacccucaucgacgcccuccucggcgacccccagugcgacggcuuccagaacaagaagugggaccucuucgucgagcgcuccaaggccuacuccaacugcuaccccuacgacguccccgacuacgccucccuccgcucccucgucgccuccuccggcacccucgaguucaacaacgaguccuucaacuggaccggcgucacccagaacggcaccuccuccgccugcauccgccgcuccaagaacuccuucuucucccgccucaacuggcucacccaccucaacuucaaguaccccgcccucaacgucaccaugcccaacaacgagcaguucgacaagcucuacaucuggggcguccaccaccccggcaccgacaaggaccagaucuuccucuacgcccaggccuccggccgcaucaccgucuccaccaagcgcucccagcagaccgccauccccaacaucggcucccgcccccgcguccgcaacauccccucccgcaucuccaucuacuggaccaucgucaagcccggcgacauccuccucaucaacuccaccggcaaccucaucgccccccgcggcuacuucaagauccgcuccggcaaguccuccaucaugcgcuccgacgcccccaucggcaagugcaacuccgagugcaucacccccaacggcuccauccccaacgacaagcccuuccagaacgucaaccgcaucaccuacggcgccugcccccgcuacgucaagcagaacacccucaagcucgccaccggcaugcgcaacguccccgagaagcagacccgcggcaucuucggcgccaucgccggcuucaucgagaacggcugggagggcauggucgacggcugguacggcuuccgccaccagaacuccgagggccgcggccaggccgccgaccucaaguccacccaggccgccaucgaccagaucaacggcaagcucaaccgccucaucggcaagaccaacgagaaguuccaccagaucgagaaggaguucuccgaggucgagggccgcauccaggaccucgagaaguacgucgaggacaccaagaucgaccucugguccuacaacgccgagcuccucgucgcccucgagaaccagcacaccaucgaccucaccgacuccgagaugaacaagcucuucgagaagacccgcaagcagcuccgcgagaacgccgaggacaugggcaacggcugcuucaagaucuaccacaagugcgacaacgccugcaucggcuccauccgcaacggcaccuacgaccacgacgucuaccgcgacgaggcccucaacaaccgcuuccagaucaagggcgucgagcucaaguccggcuacaaggacuggauccucuggaucuccuucgccaucuccugcuuccuccucugcgucgcccuccucggcuucaucaugugggccugccagaagggcaacauccgcugcaacaucugcaucuga

SEQ ID NO: 101421 - RNA, 1701 nt, Artificial Sequence; identical to SEQ ID NO: 98470
  derived and/or modified CDS sequence (opt2) from hemagglutinin__InfluenzaA__ADK98832

SEQ ID NO: 101422 - RNA, 1701 nt, Artificial Sequence; identical to SEQ ID NO: 101400
  derived and/or modified CDS sequence (opt2) from hemagglutinin__InfluenzaA__ADK98843

SEQ ID NO: 101423 - RNA, 1701 nt, Artificial Sequence
  derived and/or modified CDS sequence (opt2) from hemagglutinin__InfluenzaA__ADK98854
augaagaccaucaucgcccucuccuacauccucugccucgucuucacccagaagcuccccggcaacgacaacuccaccgccacccucugccucggccaccacgccguccccaacggcaccaucgucaagaccaucaccaacgaccagaucgaggucaccaacgccaccgagcucguccaguccuccuccaccggcgagaucugcgacuccccccaccagauccucgacggcgagaacugcacccucaucgacgcccuccucggcgacccccagugcgacggcuuccagaacaagaagugggaccucuucgucgagcgcuccaaggccuacuccaacugcuaccccuacgacguccccgacuacgccucccuccgcucccucgucgccuccuccggcacccucgaguucaacaacgaguccuucaacuggaccggcgucacccagaacggcaccuccuccgccugcauccgccgcuccaacaacuccuucuucucccgccucaacuggcucacccaccucaaguucaaguaccccgcccucaacgucaccaugcccaacaacgagcaguucgacaagcucuacaucuggggcguccaccaccccggcaccgacaacgaccagaucuuccucuacgcccaggccuccggccgcaucaccgucuccaccaagcgcucccagcagaccgucauccccaacaucggcucccgcccccgcguccgcaacauccccucccgcaucuccaucuacuggaccaucgucaagcccggcgacauccuccucaucaacuccaccggcaaccucaucgccccccgcggcuacuucaagauccgcuccggcaaguccuccaucaugcgcuccgacgcccccaucggcaagugcaacuccgagugcaucacccccaacggcuccauccccaacgacaagcccuuccagaacgucaaccgcaucaccuacggcgccugcccccgcuacgucaagcagaacacccucaagcucgccaccggcaugcgcaacguccccgagaagcagacccgcggcaucuucggcgccaucgccggcuucaucgagaacggcugggagggcauggucgacggcugguacggcuuccgccaccagaacuccgagggccgcggccaggccgccgaccucaaguccacccaggccgccaucgaccagaucaacggcaagcucaaccgccucaucggcaagaccaacgagaaguuccaccagaucgagaaggaguucuccgaggucgagggccgcauccaggaccucgagaaguacgucgaggacaccaagaucgaccucugguccuacaacgccgagcuccucgucgcccucgagaaccagcacaccaucgaccucaccgacuccgagaugaacaagcucuucgagaagaccaagaagcagcuccgcgagaacgccgaggacaugggcaacggcugcuucaagaucuaccacaagugcgacaacgccugcaucggcuccauccgcaacggcaccuacgaccacgacgucuaccgcgacgaggcccucaacaaccgcuuccagaucaagggcgucgagcucaagcccggcuacaaggacuggauccucuggaucuccuucgccaucuccugcuuccuccucugcgucgcccuccucggcuucaucaugugggccugccagaagggcaacauccgcugcaacaucugcaucuga

SEQ ID NO: 101424 - RNA, 1701 nt, Artificial Sequence
  derived and/or modified CDS sequence (opt2) from hemagglutinin__InfluenzaA__ADK98865
augaagaccaucaucgcccucuccuacauccucugccucgucuucgcccagaagcuccccggcuccgacaacuccaccgccacccucugccucggccaccacgccguccccaacggcaccaucgucaagaccaucaccaacgaccagaucgaggucaccaacgccaccgagcucguccaguccuccuccaccggcgagaucugcgacuccccccaccagauccucgacggcgagaacugcacccucaucgacgcccuccucggcgacccccagugcgacgacuuccagaacaagaagugggaccucuucgucgagcgcuccaaggccuacuccaacugcuaccccuacgacguccccgacuacgccucccuccgcucccucgucgccuccuccggcacccucgaguucaacaacgaguccuucaacuggaccggcgucacccagaacggcaccuccuccgccugcauccgccgcuccuccaacuccuucuucucccgccucaacuggcucacccaccuccgcuucaaguaccccgcccucaacgucaccaugcccaacaacgagcaguucgacaagcucuacaucuggggcguccaccaccccggcaccgacaacgaccagaucuuccucuacgcccaggccuccggccgcaucaccgucuccaccaagcgcucccagcagaccgucauccccaacaucggcucccgcccccgcguccgcaacauccccucccgcaucuccaucuacuggaccaucgucaagcccggcgacauccuccucaucaacuccaccggcaaccucaucgccccccgcggcuacuucaagauccgcuccggcaaguccuccaucaugcgcuccgacgcccccaucggcaagugcaacuccgagugcaucacccccaacggcuccauccccaacgacaagcccuuccagaacgucaaccgcaucaccuacggcgccugcccccgcuacgucaagcagaacacccucaagcucgccaccggcaugcgcaacguccccgagaagcagacccgcggcaucuucggcgccaucgccggcuucaucgagaacggcugggagggcauggucgacggcugguacggcuuccgccaccagaacuccgagggccgcggccaggccgccgaccucaaguccacccaggccgccaucgaccagaucaacggcaagcucaaccgccucaucggcaagaccaacgagaaguuccaccagaucgagaaggaguucuccgaggucgagggccgcauccaggaccucgagaaguacgucgaggacaccaagaucgaccucugguccuacaacgccgagcuccucgucgcccucgagaaccagcacaccaucgaccucaccgacuccgagaugaacaagcucuucgagaagaccaagaagcagcuccgcgagaacgccgaggacaugggcaacggcugcuucaagaucuaccacaagugcgacaacgccugcaucggcuccauccgcaacggcaccuacgaccacgacgucuaccgcgacgaggcccucaacaaccgcuuccagaucaagggcgucgagcucaaguccggcuacaaggacuggauccucuggaucuccuucgccaucuccugcuuccuccucugcgucgcccuccucggcuucaucaugugggccugccagaagggcaacauccgcugcaacaucugcaucuga

SEQ ID NO: 101425 - RNA, 1701 nt, Artificial Sequence
  derived and/or modified CDS sequence (opt2) from hemagglutinin__InfluenzaA__ADK98876
augaagaccaucaucgcccucuccuacauccucugccucgucuucgcccagaagcuccccggcaacgacaacuccaccgccacccucugccucggccaccacgccguccccaacggcaccaucgucaagaccaucaccaacgaccagaucgaggucaccaacgccaccgagcucguccagaacuccuccaccggcgagaucugcgacuccccccaccagauccucgacggcaagaacugcacccucaucgacgcccuccucggcgacccccagugcgacggcuuccagaacaagaagugggaccucuucgucgagcgcuccaaggccuacuccaacugcuaccccuacgacguccccgacuacgccucccuccgcucccucgucgccuccuccggcacccucgaguucaacaacgaguccuucaacuggaccggcgucacccagaacggcaccuccuccgccugcauccgccgcuccaagaacuccuucuucucccgccucaacuggcucacccaccucaacuucaaguaccccgcccucaacgucaccaugcccaacaacggccaguucgacaagcucuacaucuggggcguccaccaccccggcaccgacaaggaccagaucuuccucuacgcccaggccuccggccgcaucaccgucuccaccaagcgcucccagcagaccgucauccccaacaucggcucccgcccccgcguccgcaacauccccucccgcaucuccaucuacuggaccaucgucaagcccggcgacauccuccucaucaacuccaccggcaaccucaucgccccccgcggcuacuucaagauccgcuccggcaaguccuccaucaugcgcuccgacgcccccaucggcaagugcaacuccgagugcaucacccccaacggcuccauccccaacgacaagcccuuccagaacgucaaccgcaucaccuacggcgccugcccccgcuacgucaagcagaacacccucaagcucgccaccggcaugcgcaacguccccgagaagcagacccgcggcaucuucggcgccaucgccggcuucaucgagaacggcugggagggcauggucgacggcugguacggcuuccgccaccagaacuccgagggccgcggccaggccgccgaccucaaguccacccaggccgccaucgaccagaucaacggcaagcucaaccgccucaucggcaagaccaacgagaaguuccaccagaucgagaaggaguucuccgaggucgagggccgcauccaggaccucgagaaguacgucgaggacaccaagaucgaccucugguccuacaacgccgagcuccucgucgcccucgagaaccagcacaccaucgaccucaccgacuccgagaugaacaagcucuucgagaagaccaagaagcagcuccgcgagaacgccgaggacaugggcaacggcugcuucaagaucuaccacaagugcgacaacgccugcaucggcuccauccgcaacggcaccuacgaccacgacgucuaccgcgacgaggcccucaacaaccgcuuccagaucaagggcgucgagcucaaguccggcuacaaggacuggauccucuggaucuccuucgccaucuccugcuuccuccucugcgucgcccuccucggcuucaucaugugggccugccagaagggcaacauccgcugcaacaucugcaucuga

SEQ ID NO: 101426 - RNA, 1701 nt, Artificial Sequence; identical to SEQ ID NO: 101400
  derived and/or modified CDS sequence (opt2) from hemagglutinin__InfluenzaA__ADK98887

SEQ ID NO: 101427 - RNA, 1701 nt, Artificial Sequence; identical to SEQ ID NO: 98470
  derived and/or modified CDS sequence (opt2) from hemagglutinin__InfluenzaA__ADK98898

SEQ ID NO: 101428 - RNA, 1701 nt, Artificial Sequence
  derived and/or modified CDS sequence (opt2) from hemagglutinin__InfluenzaA__ADK98909
augaagaccaucaucgcccucuccuacauccucugccucgucuucgcccagaagcuccccggcaacgacaacuccaccgccacccucugccucggccaccacgccguccccaacggcaccaucgucaagaccaucaccaacgaccagaucgaggucaccaacgccaccgagcucguccagaucuccuccaccggcgagaucugcgacuccccccaccagauccucgacggcgagaacugcacccucaucgacgcccuccucggcgacccccagugcgacggcuuccagaacaagaagugggaccucuucgucgagcgcuccaaggccuacuccaacugcuaccccuacgacguccccgacuacgccucccuccgcucccucgucgccuccuccggcacccucgaguucaacaacgaguccuucaacuggaccggcgucacccagaacggcaccuccuccgccugcauccgccgcuccaacaacuccuucuucucccgccucaacuggcucacccaccucaaguucaaguaccccgcccucaacgucaccaugcccaacaacgagcaguucgacaagcucuacaucuggggcguccaccaccccggcaccgacaacgaccagaucuuccucuacgcccaggccuccggccgcaucaccgucuccaccaagcgcucccagcagaccgucauccccaacaucggcucccgcccccgcguccgcaacauccccucccgcaucuccaucuacuggaccaucgucaagcccggcgacauccuccucaucaacuccaccggcaaccucaucgccccccgcggcuacuucaagauccgcuccggcaaguccuccaucaugcgcuccgacgcccccaucggcaagugcaacuccgagugcaucacccccaacggcuccauccccaacgacaagcccuuccagaacgucaaccgcaucaccuacggcgccugcccccgcuacgucaagcagaacacccucaagcucgccaccggcaugcgcaacguccccgagaagcagacccgcggcaucuucggcgccaucgccggcuucaucgagaacggcugggagggcauggucgacggcugguacggcuuccgccaccagaacuccgagggccgcggccaggccgccgaccucaaguccacccaggccgccaucgaccagaucaacggcaagcucaaccgccucaucggcaagaccaacgagaaguuccaccagaucgagaaggaguucuccgaggucgagggccgcauccaggaccucgagaaguacgucgaggacaccaagaucgaccucugguccuacaacgccgagcuccucgucgcccucgagaaccagcacaccaucgaccucaccgacuccgagaugaacaagcucuucgagaagaccaagaagcagcuccgcgagaacgccgaggacaugggcaacggcugcuucaagaucuaccacaagugcgacaacgccugcaucggcuccauccgcaacggcaccuacgaccacgacgucuaccgcgacgaggcccucaacaaccgcuuccagaucaagggcgucgagcucaaguccggcuacaaggacuggauccucuggaucuccuucgccaucuccugcuuccuccucugcgucgcccuccucggcuucaucaugugggccugccagaagggcaacauccgcugcaacaucugcaucuga

SEQ ID NO: 101429 - RNA, 1701 nt, Artificial Sequence
  derived and/or modified CDS sequence (opt2) from hemagglutinin__InfluenzaA__ADK98920
augaagaccaucaucgcccucuccuacauccucugccucgucuucgcccagaagcuccccggcaacgacaacuccaccgccacccucugccucggccaccacgccguccccaacggcaccaucgucaagaccaucaccaacgaccagaucgaggucaccaacgccaccgagcucguccaguccuccuccaccggcgagaucugcgacuccccccaccagauccucgacggcaagaacugcacccucaucgacgcccuccucggcgacccccagugcgacggcuuccagaacaagaagugggaccucuucgucgagcgcggcaaggccuacuccaacugcuaccccuacgacguccccgacuacgccucccuccgcucccucgucgccuccuccggcacccucgaguucaacaacgaguccuucaacuggaccggcgucacccagaacggcaccuccuccgccugcauccgccgcuccaagaacuccuucuucucccgccucaacuggcucacccaccucaacuucaaguaccccgcccucaacgucaccaugcccaacaacgagcaguucgacaagcucuacaucuggggcguccaccaccccggcaccgacaaggaccagaucuuccucuacgcccaggccuccggccgcaucaccgucuccaccaagcgcucccagcagaccgucauccccaacaucggcucccgcccccgcguccgcaacauccccucccgcaucuccaucuacuggaccaucgucaagcccggcgacauccuccucaucaacuccaccggcaaccucaucgccccccgcggcuacuucaagauccgcuccggcaaguccuccaucaugcgcuccgacgcccccaucggcaagugcaacuccgagugcaucacccccaacggcuccauccccaacgacaagcccuuccagaacgucaaccgcaucaccuacggcgccugcccccgcuacgucaagcaguccacccucaagcucgccaccggcaugcgcaacguccccgagaagcagacccgcggcaucuucggcgccaucgccggcuucaucgagaacggcugggagggcauggucgacggcugguacggcuuccgccaccagaacuccgagggccgcggccaggccgccgaccucaaguccacccaggccgccaucgaccagaucaacggcaagcucaaccgccucaucggcaagaccaacgagaaguuccaccagaucgagaaggaguucuccgaggucgagggccgcauccaggaccucgagaaguacgucgaggacaccaagaucgaccucugguccuacaacgccgagcuccucgucgcccucgagaaccagcacaccaucgaccucaccgacuccgagaugaacaagcucuucgagaagaccaagaagcagcuccgcgagaacgccgaggacaugggcaacggcugcuucaagaucuaccacaagugcgacaacgccugcaucggcuccauccgcaacggcaccuacgaccacgacgucuaccgcgacgaggcccucaacaaccgcuuccagaucaagggcgucgagcucaaguccggcuacaaggacuggauccucuggaucuccuucgccaucuccugcuuccuccucugcgucgcccuccucggcuucaucaugugggccugccagaagggcaacauccgcugcaacaucugcaucuga

SEQ ID NO: 101430 - RNA, 1701 nt, Artificial Sequence; identical to SEQ ID NO: 98470
  derived and/or modified CDS sequence (opt2) from hemagglutinin__InfluenzaA__ADK98931

SEQ ID NO: 101431 - RNA, 1701 nt, Artificial Sequence
  derived and/or modified CDS sequence (opt2) from hemagglutinin__InfluenzaA__ADK98942
augaagaccaucaucgcccucuccuacauccucugccucgucuucgcccagaagcuccccggcaacgacaacuccaccgccacccucugccucggccaccacgccguccccaacggcaccaucgucaagaccaucaccaacgaccagaucgaggucaccaacgccaccgagcucguccaguccuccuccaccggcgagaucugcgacuccccccaccagauccucgacggcgagaacugcacccucaucgacgcccuccucggcgacccccagugcgacggcuuccagaacaagaagugggaccucuucgucgagcgcuccaaggccuacuccaacugcuaccccuacgacguccccgacuacgccucccuccgcucccucgucgccuccuccggcacccucgaguucaacaacgaguccuucaacuggaccggcgucacccagaacggcaccuccuccgccugcauccgccgcuccaacaacuccuucuucucccgccucaacuggcucacccaccucaaguucaaguaccccgcccucaacgucaccaugcccaacaacgagcaguucgacaagcucuacaucuggggcguccaccaccccggcaccgacaacgaccagaucuuccucuacgcccaggccuccggccgcaucaccgucuccaccaagcgcucccagcagaccgucaucuccaacaucggcucccgcccccgcguccgcaacauccccucccgcaucuccaucuacuggaccaucgucaagcccggcgacauccuccucaucaacuccaccggcaaccucaucgccccccgcggcuacuucaagauccgcuccggcaaguccuccaucaugcgcuccgacgcccccaucggcaagugcaacuccgagugcaucacccccaacggcuccauccccaacgacaagcccuuccagaacgucaaccgcaucaccuacggcgccugcccccgcuacgucaagcagaacacccucaagcucgccaccggcaugcgcaacguccccgagaagcagacccgcggcaucuucggcgccaucgccggcuucaucgagaacggcugggagggcauggucgacggcugguacggcuuccgccaccagaacuccgagggccgcggccaggccgccgaccucaaguccacccaggccgccaucgaccagaucaacggcaagcucaaccgccucaucggcaagaccaacgagaaguuccaccagaucgagaaggaguucuccgaggucgagggccgcauccaggaccucgagaaguacgucgaggacaccaagaucgaccucugguccuacaacgccgagcuccucgucgcccucgagaaccagcacaccaucgaccucaccgacuccgagaugaacaagcucuucgagaagaccaagaagcagcuccgcgagaacgccgaggacaugggcaacggcugcuucaagaucuaccacaagugcgacaacgccugcaucggcuccauccgcaacggcaccuacgaccacaacgucuaccgcgacgaggcccucaacaaccgcuuccagaucaagggcgucgagcucaaguccggcuacaaggacuggauccucuggaucuccuucgccaucuccugcuuccuccucugcgucgcccuccucggcuucaucaugugggccugccagaagggcaacauccgcugcaacaucugcaucuga

SEQ ID NO: 101432 - RNA, 1701 nt, Artificial Sequence
  derived and/or modified CDS sequence (opt2) from hemagglutinin__InfluenzaA__ADK98953
augaagaccaucaucgcccucuccuacaugcucugccucgucuucgcccagaagcuccccggcaacgacaacuccaccgccacccucugccucggccaccacgccguccccaacggcaccaucgucaagaccaucaccaacgaccagaucgaggucaccaacgccaccgagcucguccaguccuccuccaccggcgagaucugcgacuccccccaccagauccucgacggcgagaacugcacccucaucgacgcccuccucggcgacccccagugcgacggcuuccagaacaagaagugggaccucuucgucgagcgcuccaaggccuacuccaacugcuaccccuacgacguccccgacuacgccucccuccgcucccucaucgccuccuccggcacccucgaguucaacaacgaguccuucaacuggaccggcgucacccagaacggcaccuccuccgccugcauccgccgcuccaacaacuccuucuucucccgccucaacuggcucacccaccucaaguucaaguaccccgcccucaacgucaccaugcccaacaacgagcaguucgacaagcucuacaucuggggcguccaccaccccggcaccgacaacgaccagaucuuccucuacgcccaggccuccggccgcaucaccgucuccaccaagcgcucccagcagaccgucauccccaacaucggcucccgcccccgcguccgcaacauccccucccgcaucuccaucuacuggaccaucgucaagcccggcgacauccuccucaucaacuccaccggcaaccucaucgccccccgcggcuacuucaagauccgcuccggcaaguccuccaucaugcgcuccgacgcccccaucggcaagugcaacuccgagugcaucacccccaacggcuccauccccaacgacaagcccuuccagaacgucaaccgcaucaccuacggcgccugcccccgcuacgucaagcagaacacccucaagcucgccaccggcaugcgcaacguccccgagaagcagacccgcggcaucuucggcgccaucgccggcuucaucgagaacggcugggagggcauggucgacggcugguacggcuuccgccaccagaacuccgagggccgcggccaggccgccgaccucaaguccacccaggccgccaucgaccagaucaacggcaagcucaaccgccucaucggcaagaccaacgagaaguuccaccagaucgagaaggaguucuccgaggucgagggccgcauccaggaccucgagaaguacgucgaggacaccaagaucgaccucugguccuacaacgccgagcuccucgucgcccucgagaaccagcacaccaucgaccucaccgacuccgagaugaacaagcucuucgagaagaccaagaagcagcuccgcgagaacgccgaggacaugggcaacggcugcuucaagaucuaccacaagugcgacaacgccugcaucggcuccauccgcaacggcaccuacgaccacgacgucuaccgcgacgaggcccucaacaaccgcuuccagaucaagggcgucgagcucaaguccggcuacaaggacuggauccucuggaucuccuucgccaucuccugcuuccuccucugcgucgcccuccucggcuucaucaugugggccugccagaagggcaacauccgcugcaacaucugcaucuga

SEQ ID NO: 101433 - RNA, 1701 nt, Artificial Sequence; identical to SEQ ID NO: 98470
  derived and/or modified CDS sequence (opt2) from hemagglutinin__InfluenzaA__ADK98964

SEQ ID NO: 101434 - RNA, 1701 nt, Artificial Sequence; identical to SEQ ID NO: 101387
  derived and/or modified CDS sequence (opt2) from hemagglutinin__InfluenzaA__ADK98975

SEQ ID NO: 101435 - RNA, 1701 nt, Artificial Sequence; identical to SEQ ID NO: 101432
  derived and/or modified CDS sequence (opt2) from hemagglutinin__InfluenzaA__ADK98986

SEQ ID NO: 101436 - RNA, 1701 nt, Artificial Sequence; identical to SEQ ID NO: 99649
  derived and/or modified CDS sequence (opt2) from hemagglutinin__InfluenzaA__ADK98997

SEQ ID NO: 101437 - RNA, 1701 nt, Artificial Sequence; identical to SEQ ID NO: 101432
  derived and/or modified CDS sequence (opt2) from hemagglutinin__InfluenzaA__ADK99008

SEQ ID NO: 101438 - RNA, 1701 nt, Artificial Sequence
  derived and/or modified CDS sequence (opt2) from hemagglutinin__InfluenzaA__ADK99030
augaagaccaucaucgcccucuccuacauccucugccucgucuucgcccagaagcuccccggcaacgacaacuccaccgccacccucugccucggccaccacgccguccccaacggcaccaucgucaagaccaucaccaacgaccagaucgaggucaccaacgccaccgagcucguccaguccuccuccaccggcgagaucugcgacuccccccaccagauccucgacggcaagaacugcacccucaucgacgcccuccucggcgacccccagugcgacggcuuccagaacaagaagugggaccucuucgucgagcgcuccaaggccuacuccaacugcuaccccuacgacguccccgacuacgccucccuccgcucccucgucgccuccuccggcacccucgaguucaacaacgaguccuucaacuggaccggcgucacccagaacggcaccuccuccgccugcauccgccgcuccaagaacuccuucuucucccgccucaacuggcucacccaccucaacuucaaguaccccgcccucaacgucaccaugcccaacaacgagcgcuucgacaagcucuacaucuggggcguccaccaccccggcaccgacaaggaccagaucuuccucuacgcccaggccuccggccgcaucaccgucuccaccaagcgcucccagcagaccgucauccccaacaucggcucccgcccccgcguccgcaacauccccucccgcaucuccaucuacuggaccaucgucaagcccggcgacauccuccucaucaacuccaccggcaaccucaucgccccccgcggcuacuucaagauccgcuccggcaaguccuccaucaugcgcuccgacgcccccaucggcaagugcaacuccgagugcaucacccccaacggcuccauccccaacgacaagcccuuccagaacgucaaccgcaucaccuacggcgccugcccccgcuacgucaagcagaacacccucaagcucgccaccggcaugcgcaacguccccgagaagcagacccgcggcaucuucggcgccaucgccggcuucaucgagaacggcugggagggcauggucgacggcugguacggcuuccgccaccagaacuccgagggccgcggccaggccgccgaccucaaguccacccaggccgccaucgaccagaucaacggcaagcucaaccgccucaucggcaagaccaacgagaaguuccaccagaucgagaaggaguucuccgaggucgagggccgcauccaggaccucgagaaguacgucgaggacaccaagaucgaccucugguccuacaacgccgagcuccucgucgcccucgagaaccagcacaccaucgaccucaccgacuccgagaugaacaagcucuucgagaagaccaagaagcagcuccgcgagaacgccgaggacaugggcaacggcugcuucaagaucuaccacaagugcgacaacgccugcaucggcuccauccgcaacggcaccuacgaccacgacgucuaccgcgacgaggcccucaacaaccgcuuccagaucaagggcgucgagcucaaguccggcuacaaggacuggauccucuggaucuccuucgccaucuccugcuuccuccucugcgucgcccuccucggcuucaucaugugggccugccagaagggcaacauccgcugcaacaucugcaucuga

SEQ ID NO: 101439 - RNA, 1701 nt, Artificial Sequence
  derived and/or modified CDS sequence (opt2) from hemagglutinin__InfluenzaA__ADK99041
augaagaccaucaucgcccucuccuacauccucugccucgucuucgcccagaagcuccccggcaacgacaacuccaccgccacccucugccucggccaccacgccguccccaacggcaccaucgucaagaccaucgccaacgaccagaucgaggucaccaacgccaccgagcucguccaguccuccuccaccggcgagaucugcgacuccccccaccagauccucgacggcgagaacugcacccucaucgacgcccuccucggcgacccccagugcgacggcuuccagaacaagaagugggaccucuucgucgagcgcuccaaggccuacuccaacugcuaccccuacgacguccccgacuacgccucccuccgcucccucgucgccuccuccggcacccucgaguucaacaacgaguccuucaacuggaccggcgucacccagaacggcaccuccuccgccugcauccgccgcuccaacaacuccuucuucucccgccucaacuggcucacccaccucaaguucaaguaccccgcccucaacgucaccaugcccaacaacgagcaguucgacaagcucuacaucuggggcguccaccaccccggcaccgacaacgaccagaucuuccucuacgcccaggccuccggccgcaucaccgucuccaccaagcgcucccagcagaccgucauccccaacaucggcucccgcccccgcguccgcaacauccccucccgcaucuccaucuacuggaccaucgucaagcccggcgacauccuccucaucaacuccaccggcaaccucaucgccccccgcggcuacuucaagauccgcuccggcaaguccuccaucaugcgcuccgacgcccccaucggcaagugcaacuccgagugcaucacccccaacggcuccauccccaacgacaagcccuuccagaacgucaaccgcaucaccuacggcgccugcccccgcuacgucaagcagaacacccucaagcucgccaccggcaugcgcaacguccccgagaagcagacccgcggcaucuucggcgccaucgccggcuucaucgagaacggcugggagggcauggucgacggcugguacggcuuccgccaccagaacuccgagggccgcggccaggccgccgaccucaaguccacccaggccgccaucgaccagaucaacggcaagcucaaccgccucaucggcaagaccaacgagaaguuccaccagaucgagaaggaguucuccgaggucgagggccgcauccaggaccucgagaaguacgucgaggacaccaagaucgaccucugguccuacaacgccgagcuccucgucgcccucgagaaccagcacaccaucgaccucaccgacuccgagaugaacaagcucuucgagaagaccaagaagcagcuccgcgagaacgccgaggacaugggcaacggcugcuucaagaucuaccacaagugcgacaacgccugcaucggcuccauccgcaacggcaccuacgaccacgacgucuaccgcgacgaggcccucaacaaccgcuuccagaucaagggcgucgagcucaaguccggcuacaaggacuggauccucuggaucuccuucgccaucuccugcuuccuccucugcgucgcccuccucggcuucaucaugugggccugccagaagggcaacauccgcugcaacaucugcaucuga

SEQ ID NO: 101440 - RNA, 1701 nt, Artificial Sequence; identical to SEQ ID NO: 101387
  derived and/or modified CDS sequence (opt2) from hemagglutinin__InfluenzaA__ADK99063

SEQ ID NO: 101441 - RNA, 1701 nt, Artificial Sequence; identical to SEQ ID NO: 98470
  derived and/or modified CDS sequence (opt2) from hemagglutinin__InfluenzaA__ADK99085

SEQ ID NO: 101442 - RNA, 1701 nt, Artificial Sequence; identical to SEQ ID NO: 98470
  derived and/or modified CDS sequence (opt2) from hemagglutinin__InfluenzaA__ADK99096

SEQ ID NO: 101443 - RNA, 1701 nt, Artificial Sequence; identical to SEQ ID NO: 98470
  derived and/or modified CDS sequence (opt2) from hemagglutinin__InfluenzaA__ADK99107

SEQ ID NO: 101444 - RNA, 1701 nt, Artificial Sequence
  derived and/or modified CDS sequence (opt2) from hemagglutinin__InfluenzaA__ADK99118
augaagaccaucaucgcccucuccuacauccucugccucgucuucgcccagaagcuccccggcaacgacaacuccaccgccacccucugccucggccaccacgccguccccaacggcaccaucgucaagaccaucaccaacgaccagaucgaggucaccaacgccaccgagcucguccaguccuccuccaccggcgagaucugcgacaucccccaccagauccucgacggcaagaacugcacccucaucgacgcccuccucggcgacccccagugcgacggcuuccagaacaagaagugggaccucuucgucgagcgcuccaaggccuacuccaacugcuaccccuacgacguccccgacuacgccucccuccgcucccucgucgccuccuccggcacccucgaguucaacaacgaguccuucaacuggaccggcgucacccagaacggcaccuccuccgccugcauccgccgcuccaagaacuccuucuucucccgccucaacuggcucacccaccucaacuucaaguaccccgcccucaacgucaccaugcccaacaacgagcaguucgacaagcucuacaucuggggcguccaccaccccggcaccgacaaggaccagaucuuccucuacgcccaggccuccggccgcaucaccgucuccaccaagcgcucccagcagaccgucauccccaacaucggcucccgcccccgcguccgcaacauccccucccgcaucuccaucuacuggaccaucgucaagcccggcgacauccuccucaucaacuccaccggcaaccucaucgccccccgcggcuacuucaagauccgcuccggcaaguccuccaucaugcgcuccgacgcccccaucggcaagugcaacuccgagugcaucacccccaacggcuccauccccaacgacaagcccuuccagaacgucaaccgcaucaccuacggcgccugcccccgcuacgucaagcaguccacccucaagcucgccaccggcaugcgcaacguccccgagaagcagacccgcggcaucuucggcgccaucgccggcuucaucgagaacggcugggagggcauggucgacggcugguacggcuuccgccaccagaacuccgagggccgcggccaggccgccgaccucaaguccacccaggccgccaucgaccagaucaacggcaagcucaaccgccucaucggcaagaccaacgagaaguuccaccagaucgagaaggaguucuccgaggucgagggccgcauccaggaccucgagaaguacgucgaggacaccaagaucgaccucugguccuacaacgccgagcuccucgucgcccucgagaaccagcacaccaucgaccucaccgacuccgagaugaacaagcucuucgagaagaccaagaagcagcuccgcgagaacgccgaggacaugggcaacggcugcuucaagaucuaccacaagugcaacaacgccugcaucggcuccauccgcaacggcaccuacgaccacgacgucuaccgcgacgaggcccucaacaaccgcuuccagaucaagggcgucgagcucaaguccggcuacaaggacuggauccucuggaucuccuucgccaucuccugcuuccuccucugcgucgcccuccucggcuucaucaugugggccugccagaagggcaacauccgcugcaacaucugcaucuga

SEQ ID NO: 101445 - RNA, 1701 nt, Artificial Sequence
  derived and/or modified CDS sequence (opt2) from hemagglutinin__InfluenzaA__ADK99129
augaagaccaucaucgcccucuccuacauccucugccucgucuucgcccagaagcuccccggcaacgacaacuccaccgccacccucugccucggccaccacgccguccccaacggcaccaucgucaagaccaucaccaacgaccagaucgaggucaccaacgccaccgagcucguccaguccuccuccaccggcgagaucugcgacuccccccaccagauccucgacggcaagaacugcacccucaucgacgcccuccucggcgacccccagugcgacggcuuccagaacaagaagugggaccucuucgucgagcgcuccaaggccuacuccaacugcuaccccuacgacguccccgacuacgccucccuccgcucccucgucgccuccuccggcacccucgaguucaacaacgaguccuucaacuggaccggcgucacccagaacggcaccuccuccgccugcauccgccgcuccaagaacuccuucuucucccgccucaacuggcucacccaccucaacuucaaguaccccgcccucaacaugaccaugcccaacaacgagcaguucgacaagcucuacaucuggggcguccaccaccccggcaccgacaaggaccagaucuuccucuacgcccaggccuccggccgcaucaccgucuccaccaagcgcucccagcagaccgucauccccaacaucggcucccgcccccgcguccgcaacauccccucccgcaucuccaucuacuggaccaucgucaagcccggcgacauccuccucaucaacuccaccggcaaccucaucgccccccgcggcuacuucaagauccgcuccggcaaguccuccaucaugcgcuccgacgcccccaucggcaagugcaacuccgagugcaucacccccaacggcuccauccccaacgacaagcccuuccagaacgucaaccgcaucaccuacggcgccugcccccgcuacgucaagcaguccacccucaagcucgccaccggcaugcgcaacguccccgagaagcagacccgcggcaucuucggcgccaucgccggcuucaucgagaacggcugggagggcauggucgacggcugguacggcuuccgccaccagaacuccgagggccgcggccaggccgccgaccucaaguccacccaggccgccaucgaccagaucaacggcaagcucaaccgccucaucggcaagaccaacgagaaguuccaccagaucgagaaggaguucuccgaggucgagggccgcauccaggaccucgagaaguacgucgaggacaccaagaucgaccucugguccuacaacgccgagcuccucgucgcccucgagaaccagcacaccaucgaccucaccgacuccgagaugaacaagcucuucgagaagaccaagaagcagcuccgcgagaacgccgaggacaugggcaacggcugcuucaagaucuaccacaagugcaacaacgccugcaucggcuccauccgcaacggcaccuacgaccacgacgucuaccgcgacgaggcccucaacaaccgcuuccagaucaagggcgucgagcucaaguccggcuacaaggacuggauccucuggaucuccuucgccaucuccugcuuccuccucugcgucgcccuccucggcuucaucaugugggccugccagaagggcaacauccgcugcaacaucugcaucuga

SEQ ID NO: 101446 - RNA, 1701 nt, Artificial Sequence; identical to SEQ ID NO: 101387
  derived and/or modified CDS sequence (opt2) from hemagglutinin__InfluenzaA__ADK99140

SEQ ID NO: 101447 - RNA, 1701 nt, Artificial Sequence
  derived and/or modified CDS sequence (opt2) from hemagglutinin__InfluenzaA__ADK99151
augaagaccaucaucgcccucuccuacauccucugccucgucuucgcccagaagcuccccggcaacgacaacuccaccgccacccucugccucggccaccacgccguccccaacggcaccaucgucaagaccaucaccaacgaccagaucgaggucaccaacgccaccgagcucguccaguccuccuccaccggcgagaucugcgacuccccccaccagauccucgacggcaagaacugcacccucaucgacgcccuccucggcgacccccagugcgacggccuccagaacaagaagugggaccucuucgucgagcgcuccaaggccuacuccaacugcuaccccuacgacguccccgacuacgccucccuccgcucccucgucgccuccuccggcacccucgaguucaacaacgaguccuucaacuggaccggcgucacccagaacggcaccuccuccgccugcauccgccgcuccaagaacuccuucuucucccgccucaacuggcucacccaccucaacuucaaguaccccgcccucaacgucaccaugcccaacaacgagcaguucgacaagcucuacaucuggggcguccaccaccccggcaccgacaaggaccagaucuuccucuacgcccaggccuccggccgcaucaccgucuccaccaagcgcucccagcagaccgccauccccaacaucggcucccgcccccgcguccgcaacauccccucccgcaucuccaucuacuggaccaucgucaagcccggcgacauccuccucaucaacuccaccggcaaccucaucgccccccgcggcuacuucaagauccgcuccggcaaguccuccaucaugcgcuccgacgcccccaucggcaagugcaacuccaagugcaucacccccaacggcuccauccccaacgacaagcccuuccagaacgucaaccgcaucaccuacggcgccugcccccgcuacgucaagcagaacacccucaagcucgccaccggcaugcgcaacguccccgagaagcagacccgcggcaucuucggcgccaucgccggcuucaucgagaacggcugggagggcauggucgacggcugguacggcuuccgccaccagaacuccgagggccgcggccaggccgccgaccucaaguccacccaggccgccaucgaccagaucaacggcaagcucaaccgccucaucggcaagaccaacgagaaguuccaccagaucgagaaggaguucuccgaggucgagggccgcauccaggaccucgagaaguacgucgaggacaccaagaucgaccucugguccuacaacgccgagcuccucgucgcccucgagaaccagcacaccaucgaccucaccgacuccgagaugaacaagcucuucgagaagaccaagaagcagcuccgcgagaacgccgaggacaugggcaacggcugcuucaagaucuaccacaagugcgacaacgccugcaucggcuccauccgcaacggcaccuacgaccacgacgucuaccgcgacgaggcccucaacaaccgcuuccagaucaagggcgucgagcucaaguccggcuacaaggacuggauccucuggaucuccuucgccaucuccugcuuccuccucugcgucgcccuccucggcuucaucaugugggccugccagaagggcaacauccgcugcaacaucugcaucuga

SEQ ID NO: 101448 - RNA, 1701 nt, Artificial Sequence; identical to SEQ ID NO: 101387
  derived and/or modified CDS sequence (opt2) from hemagglutinin__InfluenzaA__ADK99162

SEQ ID NO: 101449 - RNA, 1701 nt, Artificial Sequence
  derived and/or modified CDS sequence (opt2) from hemagglutinin__InfluenzaA__ADK99173
augaagaccaucaucgcccucuccuacauccucugccucgucuucgcccagaagcuccccggcaacgacaacuccaccgccacccucugccucggccaccacgccguccccaacggcaccaucgucaagaccaucaccaacgaccagaucgaggucaccaacgccaccgagcucauccaguccuccuccaccggcgagaucugcgacuccccccaccagauccucgacggcgagaacugcacccucaucgacgcccuccucggcgacccccagugcgacggccuccagaacaagaagugggaccucuucgucgagcgcuccaaggccuacuccaacugcuaccccuacgacguccccgacuacgccucccuccgcucccucgucgccuccuccggcacccucgaguucaacaacgaguccuucaacuggaccggcgucacccagaacggcaccuccuccgccugcauccgccgcuccaacaacuccuucuucucccgccucaacuggcucacccaccucaaguucaaguaccccgcccucaacgucaccaugcccaacaacgagcaguucgacaagcucuacaucuggggcguccaccaccccggcaccgacaacgaccagaucuuccucuacgcccaggccuccggccgcaucaccgucuccaccaagcgcucccagcagaccgucauccccaacaucggcucccgcccccgcguccgcaacauccccucccgcaucuccaucuacuggaccaucgucaagcccggcgacauccuccucaucaacuccaccggcaaccucaucgccccccgcggcuacuucaagauccgcuccggcaaguccuccaucaugcgcuccgacgcccccaucggcaagugcaacuccgagugcaucacccccaacggcuccauccccaacgacaagcccuuccagaacgucaaccgcaucaccuacggcgccugcccccgcuacgucaagcagaacacccucaagcucgccaccggcaugcgcaacguccccgagaagcagacccgcggcaucuucggcgccaucgccggcuucaucgagaacggcugggagggcauggucgacggcugguacggcuuccgccaccagaacuccgagggccgcggccaggccgccgaccucaaguccacccaggccgccaucgaccagaucaacggcaagcucaaccgccucaucggcaagaccaacgagaaguuccaccagaucgagaaggaguucuccgaggucgagggccgcauccaggaccucgagaaguacgucgaggacaccaagaucgaccucugguccuacaacgccgagcuccucgucgcccucgagaaccagcacaccaucgaccucaccgacuccgagaugaacaagcucuucgagaagaccaagaagcagcuccgcgagaacgccgaggacaugggcaacggcugcuucaagaucuaccacaagugcgacaacgccugcaucggcuccauccgcaacggcaccuacgaccacgacgucuaccgcgacgaggcccucaacaaccgcuuccagaucaagggcgucgagcucaaguccggcuacaaggacuggauccucuggaucuccuucgccaucuccugcuuccuccucugcgucgcccuccucggcuucaucaugugggccugccagaagggcaacauccgcugcaacaucugcaucuga

SEQ ID NO: 101450 - RNA, 1701 nt, Artificial Sequence
  derived and/or modified CDS sequence (opt2) from hemagglutinin__InfluenzaA__ADK99184
augaagaccaucaucgcccucuccuacauccucugccucgucuccgcccagaagcuccccggcaacgacaacuccaccgccacccucugccucggccaccacgccguccccaacggcaccaucgucaagaccaucaccaacgaccagaucgaggucaccaacgccaccgagcucguccaguccuccuccaccggcgagaucugcaacuccccccaccagauccucgacggcgagaacugcacccucaucgacgcccuccucggcgacccccagugcgacggcuuccagaacaagaagugggaccucuucgucgagcgcuccaaggccuacuccaacugcuaccccuacgacguccccgacuacgccucccuccgcucccucgucgccuccuccggcacccucgaguucaacaacgaguccuucaacuggaccggcgucacccagaacggcaccuccuccgccugcauccgccgcuccaacaacuccuucuucucccgccucaacuggcucacccaccucaaguucaaguaccccgcccucaacgucaccaugcccaacaacgagcaguucgacaagcucuacaucuggggcguccaccaccccggcaccgacaacgaccagaucuuccucuacgcccaggccuccggccgcaucaccgucuccaccaagcgcucccagcagaccgucauccccaacaucggcucccgcccccgcguccgcaacauccccucccgcaucuccaucuacuggaccaucgucaagcccggcgacauccuccucaucaacuccaccggcaaccucaucgccccccgcggcuacuucaagauccgcuccggcaaguccuccaucaugcgcuccgacgcccccaucggcaagugcaacuccgagugcaucacccccaacggcuccauccccaacgacaagcccuuccagaacgucaaccgcaucaccuacggcgccugcccccgcuacgucaagcagaacacccucaagcucgccaccggcaugcgcaacguccccgagaagcagacccgcggcaucuucggcgccaucgccggcuucaucgagaacggcugggagggcauggucgacggcugguacggcuuccgccaccagaacuccgagggccgcggccaggccgccgaccucaaguccacccaggccgccaucgaccagaucaacggcaagcucaaccgccucaucggcaagaccaacgagaaguuccaccagaucgagaaggaguucuccgaggucgagggccgcauccaggaccucgagaaguacgucgaggacaccaagaucgaccucugguccuacaacgccgagcuccucgucgcccucgagaaccagcacaccaucgaccucaccgacuccgagaugaacaagcucuucgagaagaccaagaagcagcuccgcgagaacgccgaggacaugggcaacggcugcuucaagaucuaccacaagugcgacaacgccugcaucggcuccauccgcaacggcaccuacgaccacgacgucuaccgcgacgaggcccucaacaaccgcuuccagaucaagggcgucgagcucaaguccggcuacaaggacuggauccucuggaucuccuucgccaucuccugcuuccuccucugcgucgcccuccucggcuucaucaugugggccugccagaagggcaacauccgcugcaacaucugcaucuga

SEQ ID NO: 101451 - RNA, 1701 nt, Artificial Sequence; identical to SEQ ID NO: 98470
  derived and/or modified CDS sequence (opt2) from hemagglutinin__InfluenzaA__ADK99195

SEQ ID NO: 101452 - RNA, 1701 nt, Artificial Sequence
  derived and/or modified CDS sequence (opt2) from hemagglutinin__InfluenzaA__ADK99206
augaagaccaucaucgcccucuccuacauccucugccucgucuucgcccagaagcuccccggcaacgacaacuccaccgccacccucugccucggccaccacgccguccccaacggcaccgucgucaagaccaucaccaacgaccagaucgaggucaccaacgccaccgagcucguccaguccuccuccaccggcgagaucugcgacuccccccaccagauccucgacggcaagaacugcacccucaucgacgcccuccucggcgacccccagugcgacggcuuccagaacaagaagugggaccucuucgucgagcgcuccaaggccuacuccaacugcuaccccuacgacguccccgacuacgccucccuccgcucccucgucgccuccuccggcacccucgaguucaacaacgaguccuucaacuggaccggcgucacccagaacggcaccuccuccgccugcauccgccgcuccaagaacuccuucuucucccgccucaacuggcucacccaccucaacuucaaguaccccgcccucaacgucaccaugcccaacaacgagcaguucgacaagcucuacaucuggggcguccaccaccccggcaccgacaaggaccagaucuuccucuacgcccaggccuccggccgcaucaccgucuccaccaagcgcucccagcagaccgucauccccaacaucggcucccgcccccgcguccgcaacauccccucccgcgucuccaucuacuggaccaucgucaagcccggcgacauccuccucaucaacuccaccggcaaccucaucgccccccgcggcuacuucaagauccgcuccggcaaguccuccaucaugcgcuccgacgcccccaucggcaagugcaacuccgagugcaucacccccaacggcuccauccccaacgacaagcccuuccagaacgucaaccgcaucaccuacggcgccugcccccgcuacgucaagcagaacacccucaagcucgccaccggcaugcgcaacguccccgagaagcagacccgcggcaucuucggcgccaucgccggcuucaucgagaacggcugggagggcauggucgacggcugguacggcuuccgccaccagaacuccgagggccgcggccaggccgccgaccucaaguccacccaggccgccaucgaccagaucaacggcaagcucaaccgccucaucggcaagaccaacgagaaguuccaccagaucgagaaggaguucuccgaggucgagggccgcauccaggaccucgagaaguacgucgaggacaccaagaucgaccucugguccuacaacgccgagcuccucgucucccucgagaaccagcacaccaucgaccucaccgacuccgagaugaacaagcucuucgagaagaccaagaagcagcuccgcgagaacgccgaggacaugggcaacggcugcuucaagaucuaccacaagugcgacaacgccugcaucggcuccauccgcaacggcaccuacgaccacgacgucuaccgcgacgaggcccucaacaaccgcuuccagaucaagggcgucgagcucaaguccggcuacaaggacuggauccucuggaucuccuucgccaucuccugcuuccuccucugcgucgcccuccucggcuucaucaugugggccugccagaagggcaacauccgcugcaacaucugcaucuga

SEQ ID NO: 101453 - RNA, 1701 nt, Artificial Sequence; identical to SEQ ID NO: 101387
  derived and/or modified CDS sequence (opt2) from hemagglutinin__InfluenzaA__ADK99217

SEQ ID NO: 101454 - RNA, 1701 nt, Artificial Sequence; identical to SEQ ID NO: 101387
  derived and/or modified CDS sequence (opt2) from hemagglutinin__InfluenzaA__ADK99228

SEQ ID NO: 101455 - RNA, 1701 nt, Artificial Sequence
  derived and/or modified CDS sequence (opt2) from hemagglutinin__InfluenzaA__ADK99239
augaagaccaucaucgcccucuccuacauccucugccucgucuucgcccagaagcuccccggcaacgacaacuccaccgccacccucugccucggccaccacgccguccccaacggcaccaucgucaagaccaucaccaacgaccagaucgaggucaccaacgccaccgagcucguccaguccuccuccaccggcgagaucugcgacuccccccaccagauccucgacggcaagaacugcacccucaucgacgcccuccucggcgacccccagugcgacggcuuccagaacaagaagugggaccucuucgucgagcgcuccaaggccuacuccaacugcuaccccuacgacguccccgacuacgccucccuccgcucccucgucgccuccuccggcacccucgaguucaacaacgaguccuucaacuggaccggcgucacccagaacggcaccuccuccgccugcauccgccgcuccaagaacuccuucuucucccgccucaacuggcucacccaccucaacuucaaguaccccgcccucaacgucaccaugcccaacaacgagcaguucgacaagcucuacaucuggggcguccaccaccccggcaccgacaaggaccagaucuuccucuacgcccaggccuccggccgcaucaccgucuccaccaagcgcucccagcagaccgucauccccaacaucggcucccgcccccgcguccgcaacauccccucccgcaucuccaucuacuggaccaucgucaagcccggcgacauccuccucaucaacuccaccggcaaccucaucgccccccgcggcuacuucaagauccgcuccggcaaguccuccaucaugcgcuccgacgcccccaucggcaagugcaacuccgagugcaucacccccaacggcuccauccccaacgacaagcccuuccagaacgucaaccgcaucaccuacggcgccugcccccgcuacgucaagcagaacacccucaagcucgccaccggcaugcgcaacguccccgagaagcagacccgcggcaucuucggcgccaucgccggcuucaucgagaacggcugggagggcauggucgacggcugguacggcuuccgccaccagaacuccgagggccgcggccaggccgccgaccucaaguccacccaggccgccaucgaccagaucaacggcaagcucaaccgccucaucggcaagaccaacgagaaguuccaccagaucgagaaggaguucuccgaggucgagggccgcauccaggaccucgagaaguacgucgaggacaccaagaucgaccucugguccuacaacgccgagcuccucgucgcccucgagaaccagcacaccaucgaccucaccgacuccgagaugaacaagcucuucgagaagaccaagaagcagcuccgcgagaacgccgaggacaugggcaacggcugcuucaagaucuaccacaagugcgacaacgccugcaucggcuccauccgcaacggcaccuacgaccacgacgucuaccgcgacgaggcccucaacaaccgcuuccagaucaagggcgucgagcucaaguccggcuacaaggacuggauccucuggaucuccuucgccaucuccugcuuccuccucugcgucgcccuccucggcuucaucaugugggccugccagaagggcaacauccgcugcaacaucugcaucuga

SEQ ID NO: 101456 - RNA, 1701 nt, Artificial Sequence
  derived and/or modified CDS sequence (opt2) from hemagglutinin__InfluenzaA__ADK99250
augaagaccaucaucgcccucuccuacauccucugccucgucuucgcccagaagcuccccggcaacgacaacuccaccgccacccucugccucggccaccacgccguccccaacggcaccaucgucaagaccaucaccaacgaccagaucgaggucaccaacgccaccgagcucguccaguccuccuccaccggcgagaucugcgacuccccccaccagauccucgacggcgagaacugcacccucaucgacgcccuccucggcgacccccagugcgacggcuuccagaacaagaagugggaccucuucgucgagcgcuccaaggccuacuccaacugcuaccccuacgacguccccgacuacgccucccuccgcucccucgucgccuccuccggcacccucgaguucaacaacgaguccuucaacuggaccggcgucacccagaacggcaccuccuccgccugcauccgccgcuccaacaacuccuucuucucccgccucaacuggcucacccaccucaaguucaaguaccccgcccucaacgucaccaugcccaacaacgagcaguucgacaagcucuacaucuggggcguccaccaccccggcaccgacaacgaccagaucuuccucuacgcccaggccuccggccgcaucaccgucuccaccaagcgcucccagcagaccgucauccccaacaucggcucccgcccccgcguccgcaacauccccucccgcaucuccaucuacuggaccaucgucaagcccggcgacauccuccucaucaacuccaccggcaaccucaucgccccccgcggcuacuucaagauccgcuccggcaaguccuccaucaugcgcuccgacgcccccaucggcaagugcaacuccgagugcaucacccccaacggcuccauccccaacgacaagcccuuccagaacgucaaccgcaucaccuacggcgccugcccccgcuacgucaagcagaacacccucaagcucgccaccggcaugcgcaacguccccgagaagcagacccgcggcaucuucggcgccaucgccggcuucaucgagaacggcugggagggcauggucgacggcugguacggcuuccgccaccagaacuccgagggccgcggccaggccgccgaccucaaguccacccaggccgccaucgaccagaucaacggcaagcucaaccgccucaucggcaagaccaacgagaaguuccaccagaucgagaaggaguucuccgaggucgagggccgcauccaggacaucgagaaguacgucgaggacaccaagaucgaccucugguccuacaacgccgagcuccucgucgcccucgagaaccagcacaccaucgaccucaccgacuccgagaugaacaagcucuucgagaagaccaagaagcagcuccgcgagaacgccgaggacaugggcaacggcugcuucaagaucuaccacaagugcgacaacgccugcaucggcuccauccgcaacggcaccuacgaccacgacgucuaccgcgacgaggcccucaacaaccgcuuccagaucaagggcgucgagcucaaguccggcuacaaggacuggauccucuggaucuccuucgccaucuccugcuuccuccucugcgucgcccuccucggcuucaucaugugggccugccagaagggcaacauccgcugcaacaucugcaucuga

SEQ ID NO: 101457 - RNA, 1701 nt, Artificial Sequence; identical to SEQ ID NO: 101387
  derived and/or modified CDS sequence (opt2) from hemagglutinin__InfluenzaA__ADK99261

SEQ ID NO: 101458 - RNA, 1701 nt, Artificial Sequence
  derived and/or modified CDS sequence (opt2) from hemagglutinin__InfluenzaA__ADK99283
augaagaccaucaucgcccucuccuacauccucugccucgucuucgcccagaagcuccccggcaacgacaacuccaccgccacccucugccucggccaccacgccguccccaacggcaccaucgucaagaccaucaccaacgaccagaucgaggucaccaacgccaccgagcucguccaguccuccuccaccggcgagaucugcgacuccccccaccagauccucgacggcaagaacugcacccucaucgacgcccuccucggcgacccccagugcgacggcuuccagaacaagaagugggaccucuucgucgagcgcuccaaggccuacuccaacugcuaccccuacgacguccccgacuacgccucccuccgcucccucgucgccuccuccggcacccucgaguucaacaacgaguccuucaacuggaccggcgucacccagaacggcaccuccuccgccugcauccgccgcuccaagaacuccuucuucucccgccucaacuggcucacccaccucaacuucaaguaccccgcccucaacgucaccaugcccaacaacgagcaguucgacaagcucuacaucuggggcguccaccaccccggcaccgacaaggaccagaucuuccucuacgcccaggccuccggccgcaucaccgucuccaccaagcgcucccagcagaccgucauccccaacaucggcucccgcccccgcguccgcaacauccccucccgcaucuccaucuacuggaccaucgucaagcccggcgacauccuccucaucaacuccaccggcaaccucaucgccccccgcggcuacuucaagauccgcuccggcaaguccuccaucaugcgcuccgacgcccccaucggcaagugcaacuccgagugcaucacccccaacggcuccauccccaacgacaagcccuuccagaacgucaaccgcaucaccuacggcgccugcccccgcuacgucaagcagaacacccucaagcucgccaccggcaugcgcaacguccccgagaagcagacccgcggcaucuucggcgccaucgccggcuucaucgagaacggcugggagggcauggucgacggcugguacggcuuccgccaccagaacuccgagggccgcggccaggccgccgaccucaaguccacccaggccgccaucgaccagaucaacggcaagcucaaccgccucaucggcaagaccaacgagaaguuccaccagaucgagaaggaguucuccgaggucgagggccgcauccaggaccucgagcgcuacgucgaggacaccaagaucgaccucugguccuacaacgccgagcuccucgucgcccucgagaaccagcacaccaucgaccucaccgacuccgagaugaacaagcucuucgagaagaccaagaagcagcuccgcgagaacgccgaggacaugggcaacggcugcuucaagaucuaccacaagugcgacaacgccugcaucggcuccauccgcaacggcaccuacgaccacgacgucuaccgcgacgaggcccucaacaaccgcuuccagaucaagggcgucgagcucaaguccggcuacaaggacuggauccucuggaucuccuucgccaucuccugcuuccuccucugcgucgcccuccucggcuucaucaugugggccugccagaagggcaacauccgcugcaacaucugcaucuga

SEQ ID NO: 101459 - RNA, 1701 nt, Artificial Sequence
  derived and/or modified CDS sequence (opt2) from hemagglutinin__InfluenzaA__ADK99294
augaagaccaucaucgcccucuccuacauccucugccucgucuucgcccagaagcuccccggcaacgacaacuccaccgccacccucugccucggccaccacgccguccccaacggcaccaucgucaagaccaucaccaacgaccagaucgaggucaccaacgccaccgagcucguccaguccuccuccaccggcgagaucugcgacuccccccaccagauccucgacggcgagaacugcacccucaucgacgcccuccucggcgacccccagugcgacggcuuccaggacaagaagugggaccucuucgucgagcgcuccaaggccuacuccaacugcuaccccuacgacguccccgacuacgccucccuccgcucccucgucgccuccuccggcacccucgaguucaacaacgaguccuucaacuggaccggcgucacccagaacggcaccuccuccgccugcauccgccgcuccaacaacuccuucuucucccgccucaacuggcucacccaccucaacuucaaguaccccgcccucaacgucaccaugcccaacaacgagcaguucgacaagcucuacaucuggggcguccaccaccccggcaccgacaaggaccagaucuuccucuacgcccaggccuccggccgcaucaccgucuccaccaagcgcucccagcaggccgucauccccaacaucggcucccgcccccgcguccgcaacauccccucccgcaucuccaucuacuggaccaucgucaagcccggcgacauccuccucaucaacuccaccggcaaccucaucgccccccgcggcuacuucaagauccgcuccggcaaguccuccaucaugcgcuccgacgcccccaucggcaagugcaacuccgagugcaucacccccaacggcuccauccccaacgacaagcccuuccagaacgucaaccgcaucaccuacggcgccugcccccgcuacgucaagcagaacacccucaagcucgccaccggcaugcgcaacguccccgagaagcagacccgcggcaucuucggcgccaucgccggcuucaucgagaacggcugggagggcauggucgacggcugguacggcuuccgccaccagaacuccgagggccgcggccaggccgccgaccucaaguccacccaggccgccaucgaccagaucaacggcaagcucaaccgccucaucggcaagaccaacgagaaguuccaccagaucgagaaggaguucuccgaggucgagggccgcauccaggaccucgagaaguacgucgaggacaccaagaucgaccucugguccuacaacgccgagcuccucgucgcccucgagaaccagcacaccaucgaccucaccgacuccgagaugaacaagcucuucgagaagaccaagaagcagcuccgcgagaacgccgaggacaugggcaacggcugcuucaagaucuaccacaagugcgacaacgccugcaucggcuccauccgcaacggcaccuacgaccacgacgucuaccgcgacgaggcccucaacaaccgcuuccagaucaagggcgucgagcucaaguccggcuacaaggacuggauccucuggaucuccuucgccaucuccugcuuccuccucugcgucgcccuccucggcuucaucaugugggccugccagaagggcaacauccgcugcaacaucugcaucuga

SEQ ID NO: 101460 - RNA, 1701 nt, Artificial Sequence; identical to SEQ ID NO: 98470
  derived and/or modified CDS sequence (opt2) from hemagglutinin__InfluenzaA__ADK99305

SEQ ID NO: 101461 - RNA, 1701 nt, Artificial Sequence; identical to SEQ ID NO: 98470
  derived and/or modified CDS sequence (opt2) from hemagglutinin__InfluenzaA__ADL27989

SEQ ID NO: 101462 - RNA, 1701 nt, Artificial Sequence
  derived and/or modified CDS sequence (opt2) from hemagglutinin__InfluenzaA__ADL28000
augaagaccaucaucgcccucuccuacauccucugccucgucuucgcccagaagcuccccggcaacgacaacuccaccgccacccucugccucggccaccacgccguccccaacggcaccauggucaagaccaucaccaacgaccagaucgaggucaccaacgccaccgagcucguccaguccuccuccaccggcgagaucugcgacuccccccaccagauccucgacggcaagaacugcacccucaucgacgcccuccucggcgacccccagugcgacggcuuccagaacaagaagugggaccucuucgucgagcgcuccaaggccuacuccaacugcuaccccuacgacguccccgacuacgccucccuccgcucccucgucgccuccuccggcacccucgaguucaacaacgaguccuucaacuggaccggcgucacccagaacggcaccuccuccgccugcauccgccgcuccaagaacuccuucuucucccgccucaacuggcucacccaccucaacuucaaguaccccgcccucaacgucaccaugcccaacaacgagcaguucgacaagcucuacaucuggggcguccaccaccccggcaccgacaaggaccagaucuuccucuacgcccaggccuccgagcgcaucaccgucuccaccaagcgcucccagcagaccgucauccccaacaucggcucccgcccccgcguccgcaacauccccucccgcaucuccaucuacuggaccaucgucaagcccggcgacauccuccucaucaacuccaccggcaaccucaucgccccccgcggcuacuucaagauccgcuccggcaaguccuccaucaugcgcuccgacgcccccaucggcaagugcaacuccgagugcaucacccccaacggcuccauccccaacgacaagcccuuccagaacgucaaccgcaucaccuacggcgccugcccccgcuacgucaagcaguccacccucaagcucgccaccggcaugcgcaacguccccgagaagcagacccgcggcaucuucggcgccaucgccggcuucaucgagaacggcugggagggcauggucgacggcugguacggcuuccgccaccagaacuccgagggccgcggccaggccgccgaccucaaguccacccaggccgccaucgaccagaucaacggcaagcucaaccgccucaucggcaagaccaacgagaaguuccaccagaucgagaaggaguucuccgaggucgagggccgcauccaggaccucgagaaguacgucgaggacaccaagaucgaccucugguccuacaacgccgagcuccucgucgcccucgagaaccagcacaccaucgaccucaccgacuccgagaugaacaagcucuucgagaagaccaagaagcagcuccgcgagaacgccgaggacaugggcaacggcugcuucaagaucuaccacaagugcgacaacgccugcaucggcuccauccgcaacggcaccuacgaccacgacgucuaccgcgacgaggcccucaacaaccgcuuccagaucaagggcgucgagcucaaguccggcuacaaggacuggauccucuggaucuccuucgccaucuccugcuuccuccucugcgucgcccuccucggcuucaucaugugggccugccagaagggcaacauccgcugcaacaucugcaucuga

SEQ ID NO: 101463 - RNA, 1701 nt, Artificial Sequence
  derived and/or modified CDS sequence (opt2) from hemagglutinin__InfluenzaA__ADL28011
augaagaccaucaucgcccucuccuacauccucugccucgucuucgcccagaagcuccccggcaacgacaacuccaccgccacccucugccucggccaccacgccguccccaacggcaccaucgucaagaccaucaccaacgaccagaucgaggucaccaacgccaccgagcucguccaguccuccuccaccggcgagaucugcgacuccccccaccagauccucgacggcgagaacugcacccucaucgacgcccuccucggcgacccccagugcgacggcuuccagaacaagaagugggaccucuucgucgagcgcuccaaggccuacuccaacugcuaccccuacgacguccccgacuacgccucccuccgcucccucgucgccuccuccggcacccucgaguucaacaacgaguccuucaacuggaccggcgucacccagaacggcaccuccuccgccugcauccgccgcuccaacaacuccuucuucucccgccucaacuggcucacccaccucaaguucaaguaccccgcccucaacgucaccaugcccaacaacgagcaguucgacaagcucuacaucuggggcguccaccaccccggcaccgacaacgaccagaucuuccucuacgcccaggccuccggccgcaucaccgucuccacccgccgcucccagcagaccgucauccccaacaucggcucccgcccccgcguccgcaacauccccucccgcaucuccaucuacuggaccaucgucaagcccggcgacauccuccucaucaacuccaccggcaaccucaucgccccccgcggcuacuucaagauccgcuccggcaaguccuccaucaugcgcuccgacgcccccaucggcaagugcaacuccgagugcaucacccccaacggcuccauccccaacgacaagcccuuccagaacgucaaccgcaucaccuacggcgccugcccccgcuacgucaagcagaacacccucaagcucgccaccggcaugcgcaacguccccgagaagcagacccgcggcaucuucggcgccaucgccggcuucaucgagaacggcugggagggcauggucgacggcugguacggcuuccgccaccagaacuccgagggccgcggccaggccgccgaccucaaguccacccaggccgccaucgaccagaucaacggcaagcucaaccgccucaucggcaagaccaacgagaaguuccaccagaucgagaaggaguucuccgaggucgagggccgcauccaggaccucgagaaguacgucgaggacaccaagaucgaccucugguccuacaacgccgagcuccucgucgcccucgagaaccagcacaccaucgaccucaccgacuccgagaugaacaagcucuucgagaagaccaagaagcagcuccgcgagaacgccgaggacaugggcaacggcugcuucaagaucuaccacaagugcgacaacgccugcaucggcuccauccgcaacggcaccuacgaccacgacgucuaccgcgacgaggcccucaacaaccgcuuccagaucaagggcgucgagcucaaguccggcuacaaggacuggauccucuggaucuccuucgccaucuccugcuuccuccucugcgucgcccuccucggcuucaucaugugggccugccagaagggcaacauccgcugcaacaucugcaucuga

SEQ ID NO: 101464 - RNA, 1701 nt, Artificial Sequence; identical to SEQ ID NO: 101387
  derived and/or modified CDS sequence (opt2) from hemagglutinin__InfluenzaA__ADL28022

SEQ ID NO: 101465 - RNA, 1701 nt, Artificial Sequence; identical to SEQ ID NO: 98470
  derived and/or modified CDS sequence (opt2) from hemagglutinin__InfluenzaA__ADL28033

SEQ ID NO: 101466 - RNA, 1701 nt, Artificial Sequence; identical to SEQ ID NO: 99649
  derived and/or modified CDS sequence (opt2) from hemagglutinin__InfluenzaA__ADL28044

SEQ ID NO: 101467 - RNA, 1701 nt, Artificial Sequence
  derived and/or modified CDS sequence (opt2) from hemagglutinin__InfluenzaA__ADL28055
augaagaccaucgucgcccucuccuacauccucugccucgucuucgcccagaagcuccccggcaacgacaacuccaccgccacccucugccucggccaccacgccguccccaacggcaccaucgucaagaccaucaccaacgaccagaucgaggucaccaacgccaccgagcucguccaguccuccuccaccggcgagaucugcgacuccccccaccagauccucgacggcgagaacugcacccucaucgacgcccuccucggcgacccccagugcgacggcuuccagaacaagaagugggaccucuucgucgagcgcuccaaggccuacuccaacugcuaccccuacgacguccccgacuacgccucccuccgcucccucgucgccuccuccggcacccucgaguucaacaacgaguccuucaacuggaccggcgucacccagaacggcaccuccuccgccugcauccgccgcuccaacaacuccuucuucucccgccucaacuggcucacccaccucaaguucaaguaccccgcccucaacgucaccaugcccaacaacgagcaguucgacaagcucuacaucuggggcguccaccaccccggcaccgacaacgaccagaucuuccucuacgcccaggccuccggccgcaucaccgucuccaccaagcgcucccagcagaccgucauccccaacaucggcucccgcccccgcguccgcaacauccccucccgcaucuccaucuacuggaccaucgucaagcccggcgacauccuccucaucaacuccaccggcaaccucaucgccccccgcggcuacuucaagauccgcuccggcaaguccuccaucaugcgcuccgacgcccccaucggcaagugcaacuccgagugcaucacccccaacggcuccauccccaacgacaagcccuuccagaacgucaaccgcaucaccuacggcgccugcccccgcuacgucaagcagaacacccucaagcucgccaccggcaugcgcaacguccccgagaagcagacccgcggcaucuucggcgccaucgccggcuucaucgagaacggcugggagggcauggucgacggcugguacggcuuccgccaccagaacuccgagggccgcggccaggccgccgaccucaaguccacccaggccgccaucgaccagaucaacggcaagcucaaccgccucaucggcaagaccaacgagaaguuccaccagaucgagaaggaguucuccgaggucgagggccgcauccaggaccucgagaaguacgucgaggacaccaagaucgaccucugguccuacaacgccgagcuccucgucgcccucgagaaccagcacaccaucgaccucaccgacuccgagaugaacaagcucuucgagaagaccaagaagcagcuccgcgagaacgccgaggacaugggcaacggcugcuucaagaucuaccacaagugcgacaacgccugcaucggcuccauccgcaacggcaccuacgaccacgacgucuaccgcgacgaggcccucaacaaccgcuuccagaucaagggcgucgagcucaaguccggcuacaaggacuggauccucuggaucuccuucgccaucuccugcuuccuccucugcgucgcccuccucggcuucaucaugugggccugccagaagggcaacauccgcugcaacaucugcaucuga

SEQ ID NO: 101468 - RNA, 1701 nt, Artificial Sequence; identical to SEQ ID NO: 98470
  derived and/or modified CDS sequence (opt2) from hemagglutinin__InfluenzaA__ADL28066

SEQ ID NO: 101469 - RNA, 1701 nt, Artificial Sequence; identical to SEQ ID NO: 101387
  derived and/or modified CDS sequence (opt2) from hemagglutinin__InfluenzaA__ADL28077

SEQ ID NO: 101470 - RNA, 1701 nt, Artificial Sequence
  derived and/or modified CDS sequence (opt2) from hemagglutinin__InfluenzaA__ADL28088
augaagaccaucaucgcccucuccuacauccucugccucgucuucgcccagaagcuccccggcaacgacaacuccaccgccacccucugccucggccaccacgccguccccaacggcaccaucgucaagaccaucaccaacgaccagaucgaggucaccaacgccaccgagcucguccaguccuccuccaccggcgagaucugcgacuccccccaccagauccucgacggcgagaacugcacccucaucgacgcccuccucggcgacccccagugcgacggcuuccagaacaagaagugggaccucuucgucgagcgcuccaaggccuacuccaacugcuaccccuacgacguccccgacuacgccucccuccgcucccucgucgccuccuccggcacccucgaguucaacaacgaguccuucaacuggaccggcgucacccagaacggcaccuccuccgccugcauccgccgcuccaacaacuccuucuucucccgccucaacuggcucacccaccucaaguucaaguaccccgcccucaacgucaccaugcccaacaacgagcaguucgacaagcucuacaucuggggcguccaccaccccggcaccgacaacgaccagaucuuccucuacucccaggccuccggccgcaucaccgucuccaccaagcgcucccagcagaccgucauccccaacaucggcucccgcccccgcguccgcaacauccccucccgcaucuccaucuacuggaccaucgucaagcccggcgacauccuccucaucaacuccaccggcaaccucaucgccccccgcggcuacuucaagauccgcuccggcaaguccuccaucaugcgcuccgacgcccccaucggcaagugcaacuccgagugcaucacccccaacggcuccauccccaacgacaagcccuuccagaacgucaaccgcaucaccuacggcgccugcccccgcuacgucaagcagaacacccucaagcucgccaccggcaugcgcaacguccccgagaagcagacccgcggcaucuucggcgccaucgccggcuucaucgagaacggcugggagggcauggucgacggcugguacggcuuccgccaccagaacuccgagggccgcggccaggccgccgaccucaaguccacccaggccgccaucgaccagaucaacggcaagcucaaccgccucaucggcaagaccaacgagaaguuccaccagaucgagaaggaguucuccgaggucgagggccgcauccaggaccucgagaaguacgucgaggacaccaagaucgaccucugguccuacaacgccgagcuccucgucgcccucgagaaccagcacaccaucgaccucaccgacuccgagaugaacaagcucuucgagaagaccaagaagcagcuccgcgagaacgccgaggacaugggcaacggcugcuucaagaucuaccacaagugcgacaacgccugcaucggcuccauccgcaacggcaccuacgaccacgacgucuaccgcgacgaggcccucaacaaccgcuuccagaucaagggcgucgagcucaaguccggcuacaaggacuggauccucuggaucuccuucgccaucuccugcuuccuccucugcgucgcccuccucggcuucaucaugugggccugccagaagggcaacauccgcugcaacaucugcaucuga

SEQ ID NO: 101471 - RNA, 1701 nt, Artificial Sequence; identical to SEQ ID NO: 98470
  derived and/or modified CDS sequence (opt2) from hemagglutinin__InfluenzaA__ADL28099

SEQ ID NO: 101472 - RNA, 1701 nt, Artificial Sequence
  derived and/or modified CDS sequence (opt2) from hemagglutinin__InfluenzaA__ADL28110
augaagaccaucaucgcccucuccuacauccucugccucgucuucgcccagaagcuccccggcaacgacaacuccaccgccacccucugcaucggccaccacgccguccccaacggcaccaucgucaagaccaucaccaacgaccagaucgaggucaccaacgccaccgagcucguccagaacuccuccaccggcgagaucugcgacuccccccaccagauccucgacggcaagaacugcacccucaucgacgcccuccucggcgacccccagugcgacggcuuccagaacaagaagugggaccucuucgucgagcgcuccaaggccuacuccaacugcuaccccuacgacguccccgacuacgccucccuccgcucccucgucgccuccuccggcacccucgaguucaacaacgaguccuucaacuggaccggcgucacccagaacggcaccuccuccgccugcauccgccgcuccaagaacuccuucuucucccgccucaacuggcucacccaccucaacuucaaguaccccgcccucaacgucaccaugcccaacaacgagcaguucgacaagcucuacaucuggggcguccaccaccccggcaccgacaaggaccagaucuuccucuacgcccaggccuccggccgcaucaccgucuccaccaagcgcucccagcagaccgccauccccaacaucggcucccgcccccgcguccgcaacauccccucccgcaucuccaucuacuggaccaucgucaagcccggcgacauccuccucaucaacuccaccggcaaccucaucgccccccgcggcuacuucaagauccgcuccggcaaguccuccaucaugcgcuccgacgcccccaucgacaagugcaacuccgagugcaucacccccaacggcuccauccccaacgacaagcccuuccagaacgucaaccgcaucaccuacggcgccugcccccgcuacgucaagcagaacacccucaagcucgccaccggcaugcgcaacguccccgagaagcagacccgcggcaucuucggcgccaucgccggcuucaucgagaacggcugggagggcauggucgacggcugguacggcuuccgccaccagaacuccgagggccgcggccaggccgccgaccucaaguccacccaggccgccaucgaccagaucaacggcaagcucaaccgccucaucggcaagaccaacgagaaguuccaccagaucgagaaggaguucuccgaggucgagggccgcauccaggaccucgagaaguacgucgaggacaccaagaucgaccucugguccuacaacgccgagcuccucgucgcccucgagaaccagcacaccaucgaccucaccgacuccgagaugaacaagcucuucgagaagaccaagaagcagcuccgcgagaacgccgaggacaugggcaacggcugcuucaagaucuaccacaagugcgacaacgccugcaucggcuccauccgcaacggcaccuacgaccacgacgucuaccgcgacgaggcccucaacaaccgcuuccagaucaagggcgucgagcucaaguccggcuacaaggacuggauccucuggaucuccuucgccaucuccugcuuccuccucugcgucgcccuccucggcuucaucaugugggccugccagaagggcaacauccgcugcaacaucugcaucuga

SEQ ID NO: 101473 - RNA, 1701 nt, Artificial Sequence
  derived and/or modified CDS sequence (opt2) from hemagglutinin__InfluenzaA__ADL28126
augaagaccaucaucgcccucuccuacauccucugccucgucuucgcccagaagcuccccggcaacgacaacuccaccgccacccucugccucggccaccacgccguccccaacggcaccaucgucaagaccaucaccaacgaccagaucgaggucaccaacgccaccgagcucguccaguccuccuccaccggcgagaucugcgacuccccccaccagauccucgacggcgagaacugcacccucaucgacgcccuccucggcgacccccagugcgacggcuuccagaacaagaagugggaccucuucgucgagcgcuccaaggccuacuccaacugcuaccccuacgacguccccgacuacgccucccuccgcucccucgucgccuccuccggcacccucgaguucaacaacgaguccuucaacuggaccggcgucaaccagaacggcaccuccuccgccugcauccgccgcuccaacaacuccuucuucucccgccucaacuggcucacccaccucaaguucaaguaccccgcccucaacgucaccaugcccaacaacgagcaguucgacaagcucuacaucuggggcguccaccaccccggcaccgacaacgaccagaucuuccucuacgcccaggccuccggccgcaucaccgucuccaccaagcgcucccagcagaccgucauccccaacaucggcucccgcccccgcguccgcaacauccccucccgcaucuccaucuacuggaccaucgucaagcccggcgacauccuccucaucaacuccaccggcaaccucaucgccccccgcggcuacuucaagauccgcuccggcaaguccuccaucaugcgcuccgacgcccccaucggcaagugcaacuccgagugcaucacccccaacggcuccauccccaacgacaagcccuuccagaacgucaaccgcaucaccuacggcgccugcccccgcuacgucaagcagaacacccucaagcucgccaccggcaugcgcaacguccccgagaagcagacccgcggcaucuucggcgccaucgccggcuucaucgagaacggcugggagggcauggucgacggcugguacggcuuccgccaccagaacuccgagggccgcggccaggccgccgaccucaaguccacccaggccgccaucgaccagaucaacggcaagcucaaccgccucaucggcaagaccaacgagaaguuccaccagaucgagaaggaguucuccgaggucgagggccgcauccaggaccucgagaaguacgucgaggacaccaagaucgaccucugguccuacaacgccgagcuccucgucgcccucgagaaccagcacaccaucgaccucaccgacuccgagaugaacaagcucuucgagaagaccaagaagcagcuccgcgagaacgccgaggacaugggcaacggcugcuucaagaucuaccacaagugcgacaacgccugcaucggcuccauccgcaacggcaccuacgaccacgacgucuaccgcgacgaggcccucaacaaccgcuuccagaucaagggcgucgagcucaaguccggcuacaaggacuggauccucuggaucuccuucgccaucuccugcuuccuccucugcgucgcccuccucggcuucaucaugugggccugccagaagggcaacauccgcugcaacaucugcaucuga

SEQ ID NO: 101474 - RNA, 1701 nt, Artificial Sequence
  derived and/or modified CDS sequence (opt2) from hemagglutinin__InfluenzaA__ADL28137
augaagaccaucaucgcccucuccuacauccucugccucgucuccgcccagaagcuccccggcaacgacaacuccaccgccacccucugccucggccaccacgccguccccaacggcaccaucgucaagaccaucaccaacgaccagaucgaggucaccaacgccaccgagcucguccaguccuccuccaccggcgagaucugcgacggcccccaccagauccucgacggcgagaacugcacccucaucgacgcccuccucggcgacccccagugcgacggcuuccagaacaagaagugggaccucuucgucgagcgcuccaaggccuacuccaacugcuaccccuacgacguccccgacuacgccucccuccgcucccucgucgccuccuccggcacccucgaguucaacaacgaguccuucaacuggaccggcgucacccagaacggcaccuccuccgccugcauccgccgcuccaacaacuccuucuucucccgccucaacuggcucacccaccucaaguucaaguaccccgcccucaacgucaccaugcccaacaacgagcaguucgacaagcucuacaucuggggcguccaccaccccggcaccgacaacgaccagaucuuccucuacgcccaggccuccggccgcaucaccgucuccaccaagcgcucccagcagaccgucauccccaacaucggcucccgcccccgcguccgcaacauccccucccgcaucuccaucuacuggaccaucgucaagcccggcgacauccuccucaucaacuccaccggcaaccucaucgccccccgcggcuacuucaagauccgcuccggcaaguccuccaucaugcgcuccgacgcccccaucggcaagugcaacuccgagugcaucacccccaacggcuccauccccaacgacaagcccuuccagaacgucaaccgcaucaccuacggcgccugcccccgcuacgucaagcagaacacccucaagcucgccaccggcaugcgcaacguccccgagaagcagacccgcggcaucuucggcgccaucgccggcuucaucgagaacggcugggagggcauggucgacggcugguacggcuuccgccaccagaacuccgagggccgcggccaggccgccgaccucaaguccacccaggccgccaucgaccagaucaacggcaagcucaaccgccucaucggcaagaccaacgagaaguuccaccagaucgagaaggaguucuccgaggucgagggccgcauccaggaccucgagaaguacgucgaggacaccaagaucgaccucugguccuacaacgccgagcuccucgucgcccucgagaaccagcacaccaucgaccucaccgacuccgagaugaacaagcucuucgagaagaccaagaagcagcuccgcgagaacgccgaggacaugggcaacggcugcuucaagaucuaccacaagugcgacaacgccugcaucggcuccauccgcaacggcaccuacgaccacgacgucuaccgcgacgaggcccucaacaaccgcuuccagaucaagggcgucgagcucaaguccggcuacaaggacuggauccucuggaucuccuucgccaucuccugcuuccuccucugcgucgcccuccucggcuucaucaugugggccugccagaagggcaacauccgcugcaacaucugcaucuga

SEQ ID NO: 101475 - RNA, 1701 nt, Artificial Sequence; identical to SEQ ID NO: 98470
  derived and/or modified CDS sequence (opt2) from hemagglutinin__InfluenzaA__ADL28148

SEQ ID NO: 101476 - RNA, 1701 nt, Artificial Sequence; identical to SEQ ID NO: 101387
  derived and/or modified CDS sequence (opt2) from hemagglutinin__InfluenzaA__ADL28170

SEQ ID NO: 101477 - RNA, 1701 nt, Artificial Sequence; identical to SEQ ID NO: 98470
  derived and/or modified CDS sequence (opt2) from hemagglutinin__InfluenzaA__ADL28181

SEQ ID NO: 101478 - RNA, 1701 nt, Artificial Sequence; identical to SEQ ID NO: 101382
  derived and/or modified CDS sequence (opt2) from hemagglutinin__InfluenzaA__ADL28192

SEQ ID NO: 101479 - RNA, 1701 nt, Artificial Sequence; identical to SEQ ID NO: 101388
  derived and/or modified CDS sequence (opt2) from hemagglutinin__InfluenzaA__ADL28203

SEQ ID NO: 101480 - RNA, 1701 nt, Artificial Sequence; identical to SEQ ID NO: 99447
  derived and/or modified CDS sequence (opt2) from hemagglutinin__InfluenzaA__ADL28214

SEQ ID NO: 101481 - RNA, 1701 nt, Artificial Sequence
  derived and/or modified CDS sequence (opt2) from hemagglutinin__InfluenzaA__ADL28225
augaagaccaucaucgcccucuccuacauccucugccucgucuucgcccagaagcuccccggcaacgacaacuccaccgccacccucugccucggccaccacgccguccccaacggcaccaucgucaagaccaucaccaacgaccagaucgaggucaccaacgccaccgagcucguccaguccuccuccaccggcgagaucugcgacuccccccaccagauccucgacggcgagaacugcacccucaucgacgcccuccucggcgacccccagugcgacggcuuccagaacaagaagugggaccucuucgucgagcgcuccaaggccuacuccaacugcuaccccuacgacguccccgacuacgccucccuccgcucccucgucgccuccuccggcacccucgaguucaacaacgaguccuucaacuggaccggcgucacccagaacggcaccuccuccgccugcauccgccgcuccaacaacuccuucuucucccgccucaacuggcucacccaccucaaguucaaguaccccgcccucaacgucaccaugcccaacaacgagcaguucgacaagcucuacaucuggggcguccaccaccccggcaccgacaacgaccagaucuuccucuacucccaggccuccggccgcaucaccgucuccaccaagcgcucccagcagaccgucauccccaacaucggcucccgcccccgcguccgcaacauccccucccgcaucuccaucuacuggaccaucgucaagcccggcgacauccuccucaucaacuccaccggcaaccucaucgccccccgcggcuacuucaagauccgcuccggcaaguccuccaucaugcgcuccgacgcccccaucggcaagugcaacuccgagugcaucacccccaacggcuccauccccaacgacaagcccuuccagaacgucaaccgcaucaccuacggcgccugcccccgcuacgucaagcagaacacccucaagcucgccaccggcaugcgcaacguccccgagaagcagacccgcggcaucuucggcgccaucgccggcuucaucgagaacggcugggagggcauggucgacggcugguacggcuuccgccaccagaacuccgagggccgcggccaggccgccgaccucaaguccacccaggccgccaucgaccagaucaacggcaagcucaaccgccucaucggcaagaccaacgagaaguuccaccagaucgagaaggaguucuccgaggucgagggccgcauccaggaccucgagaaguacgucgaggacaccaagaccgaccucugguccuacaacgccgagcuccucgucgcccucgagaaccagcacaccaucgaccucaccgacuccgagaugaacaagcucuucgagaagaccaagaagcagcuccgcgagaacgccgaggacaugggcaacggcugcuucaagaucuaccacaagugcgacaacgccugcaucggcuccauccgcaacggcaccuacgaccacgacgucuaccgcgacgaggcccucaacaaccgcuuccagaucaagggcgucgagcucaaguccggcuacaaggacuggauccucuggaucuccuucgccaucuccugcuuccuccucugcgucgcccuccucggcuucaucaugugggccugccagaagggcaacauccgcugcaacaucugcaucuga

SEQ ID NO: 101482 - RNA, 1701 nt, Artificial Sequence; identical to SEQ ID NO: 101387
  derived and/or modified CDS sequence (opt2) from hemagglutinin__InfluenzaA__ADL28236

SEQ ID NO: 101483 - RNA, 1701 nt, Artificial Sequence; identical to SEQ ID NO: 98470
  derived and/or modified CDS sequence (opt2) from hemagglutinin__InfluenzaA__ADL28247

SEQ ID NO: 101484 - RNA, 1701 nt, Artificial Sequence; identical to SEQ ID NO: 101400
  derived and/or modified CDS sequence (opt2) from hemagglutinin__InfluenzaA__ADL28258

SEQ ID NO: 101485 - RNA, 1701 nt, Artificial Sequence; identical to SEQ ID NO: 98470
  derived and/or modified CDS sequence (opt2) from hemagglutinin__InfluenzaA__ADL28370

SEQ ID NO: 101486 - RNA, 1701 nt, Artificial Sequence; identical to SEQ ID NO: 98705
  derived and/or modified CDS sequence (opt2) from hemagglutinin__InfluenzaA__ADL29672

SEQ ID NO: 101487 - RNA, 1701 nt, Artificial Sequence; identical to SEQ ID NO: 98947
  derived and/or modified CDS sequence (opt2) from hemagglutinin__InfluenzaA__ADL29682

SEQ ID NO: 101488 - RNA, 1701 nt, Artificial Sequence; identical to SEQ ID NO: 98705
  derived and/or modified CDS sequence (opt2) from hemagglutinin__InfluenzaA__ADL29692

SEQ ID NO: 101489 - RNA, 1701 nt, Artificial Sequence
  derived and/or modified CDS sequence (opt2) from hemagglutinin__InfluenzaA__ADL29702
augaaggccauccucgucguccuccucuacaccuucgccaccgccaacgccgacacccucugcaucggcuaccacgccaacaacuccaccgacaccgucgacaccguccucgagaagaacgucaccgucacccacuccgucaaccuccucgaggacaagcacaacggcaagcucugcaagcuccgcggcgucgccccccuccaccucggcaagugcaacaucgccggcuggauccucggcaaccccgagugcgagucccucuccaccgccuccuccugguccuacaucgucgagaccuccuccuccgacaacggcaccugcuaccccggcgacuucaucgacuacgaggagcuccgcgagcagcucuccuccgucuccuccuucgagcgcuucgagaucuuccccaagaccuccuccuggcccaaccacgacuccaacaagggcgucaccgccgccugcccccacgccggcgccaaguccuucuacaagaaccucaucuggcucgucaagaagggcaacuccuaccccaagcucuccaaguccuacaucaacgacaagggcaaggagguccucguccucuggggcauccaccaccccuccaccuccgccgaccagcagucccucuaccagaacgccgacaccuacgucuucgucggcaccucccgcuacuccaagaaguucaagcccgagaucgccauccgccccaagguccgcgaccaggagggccgcaugaacuacuacuggacccucgucgagcccggcgacaagaucaccuucgaggccaccggcaaccucgucgucccccgcuacgccuucgccauggagcgcaacgccggcuccggcaucaucaucuccgacacccccguccacgacugcaacaccaccugccagacccccaagggcgccaucaacaccucccuccccuuccagaacauccaccccaucaccaucggcaagugccccaaguacgucaaguccaccaagcuccgccucgccaccggccuccgcaacguccccuccauccagucccgcggccucuucggcgccaucgccggcuucaucgagggcggcuggaccggcauggucgacggcugguacggcuaccaccaccagaacgagcagggcuccggcuacgccgccgaccucaaguccacccagaacgccaucgacgagaucaccaacaaggucaacuccgucaucgagaagaugaacacccaguucaccgccgucggcaaggaguucaaccaccucgagaagcgcaucgagaaccucaacaagaagaucgacgacggcuuccucgacaucuggaccuacaacgccgagcuccucguccuccucgagaacgagcgcacccucgacuaccacgacuccaacgucaagaaccucuacgagaagguccgcaaccagcucaagaacaacgccaaggagaucggcaacggcugcuucgaguucuaccacaagugcgacaacaccugcauggaguccgucaagaacggcaccuacgacuaccccaaguacuccgaggaggccaagcucaaccgcgaggagaucgacggcgucaagcucgaguccacccgcaucuaccagauccucgccaucuacuccaccgucgccuccucccucguccucgucgucucccucggcgccaucuccuucuggaugugcuccaacggcucccuccagugccgcaucugcaucuga

SEQ ID NO: 101490 - RNA, 1701 nt, Artificial Sequence; identical to SEQ ID NO: 98705
  derived and/or modified CDS sequence (opt2) from hemagglutinin__InfluenzaA__ADL29730

SEQ ID NO: 101491 - RNA, 1701 nt, Artificial Sequence; identical to SEQ ID NO: 98705
  derived and/or modified CDS sequence (opt2) from hemagglutinin__InfluenzaA__ADL29740

SEQ ID NO: 101492 - RNA, 1701 nt, Artificial Sequence; identical to SEQ ID NO: 98705
  derived and/or modified CDS sequence (opt2) from hemagglutinin__InfluenzaA__ADL29750

SEQ ID NO: 101493 - RNA, 1701 nt, Artificial Sequence
  derived and/or modified CDS sequence (opt2) from hemagglutinin__InfluenzaA__ADL29760
augaaggccauccucgucguccuccucuacaccuucgccaccgccaacgccgacacccucugcaucggcuaccacgccaacaacuccaccgacaccgucgacaccguccucgagaagaacgucaccgucacccacuccgucaaccuccucgaguacaagcacaacggcaagcucugcaagcuccgcggcgucgccccccuccaccucggcaagugcaacaucgccggcuggauccucggcaaccccgagugcgagucccucuccaccgccuccuccugguccuacaucgucgagaccuccuccuccgacaacggcaccugcuaccccggcgacuucaucgacuacgaggagcuccgcgagcagcucuccuccgucuccuccuucgagcgcuucgagaucuuccccaagaccuccuccuggcccaaccacgacuccaacaagggcgucaccgccgccugcccccacgccggcgccaaguccuucuacaagaaccucaucuggcucgucaagaagggcaacuccuaccccaagcucuccaaguccuacaucaacgacaagggcaaggagguccucguccucuggggcauccaccaccccuccaccuccgccgaccagcagucccucuaccagaacgccgacgccuacgucuucgucggcaccucccgcuacuccaagaaguucaagcccgagaucgccauccgccccaagguccgcgaccaggagggccgcaugaacuacuacuggacccucgucgagcccggcgacaagaucaccuucgaggccaccggcaaccucgucgucccccgcuacgccuucgccauggagcgcaacgccggcuccggcaucaucaucuccgacacccccguccacgacugcaacaccaccugccagacccccaagggcgccaucaacaccucccuccccuuccagaacauccaccccaucaccaucggcaagugccccaaguacgucaaguccaccaagcuccgccucgccaccggccuccgcaacguccccuccauccagucccgcggccucuucggcgccaucgccggcuucaucgagggcggcuggaccggcauggucgacggcugguacggcuaccaccaccagaacgagcagggcuccggcuacgccgccgaccucaaguccacccagaacgccaucgacgagaucaccaacaaggucaacuccgucaucgagaagaugaacacccaguucaccgccgucggcaaggaguucaaccaccucgagaagcgcaucgagaaccucaacaagaaggucgacgacggcuuccucgacaucuggaccuacaacgccgagcuccucguccuccucgagaacgagcgcacccucgacuaccacgacuccaacgucaagaaccucuacgagaagguccgcucccagcucaagaacaacgccaaggagaucggcaacggcugcuucgaguucuaccacaagugcgacaacaccugcauggaguccgucaagaacggcaccuacgacuaccccaaguacuccgaggaggccaagcucaaccgcgaggagaucgacggcgucaagcucgaguccacccgcaucuaccagauccucgccaucuacuccaccgucgccuccucccucguccucgucgucucccucggcgccaucuccuucuggaugugcuccaacggcucccuccagugccgcaucugcaucuga

SEQ ID NO: 101494 - RNA, 1701 nt, Artificial Sequence; identical to SEQ ID NO: 98705
  derived and/or modified CDS sequence (opt2) from hemagglutinin__InfluenzaA__ADL29770

SEQ ID NO: 101495 - RNA, 1701 nt, Artificial Sequence; identical to SEQ ID NO: 100205
  derived and/or modified CDS sequence (opt2) from hemagglutinin__InfluenzaA__ADL29780

SEQ ID NO: 101496 - RNA, 1701 nt, Artificial Sequence
  derived and/or modified CDS sequence (opt2) from hemagglutinin__InfluenzaA__ADL29879
augaaggccauccucgucguccuccucuacaccuucgccaccgccaacgccgacacccucugcaucggcuaccacgccaacaacuccaccgacaccgucgacaccguccucgagaagaacgucaccgucacccacuccgucaaccuccucgaggacaagcacaacggcaagcucugcaagcuccgcggcgucgccccccuccaccucggcaagugcaacaucgccggcuggauccucggcaaccccgagugcgagucccucuccaccgccuccuccugguccuacaucgucgagaccuccuccuccgacaacggcaccugcuaccccggcgacuucaucgacuacgaggagcuccgcgagcagcucuccuccgucuccuccuucgagcgcuucgagaucuuccccaagaccuccuccuggcccaaccacgacuccaacaagggcgucaccgccgccugcccccacgccggcgccaaguccuucuacaagaaccucaucuggcucgucaagaagggcaacuccuaccccaagcucuccaaguccuacaucaacgacaagggcaaggagguccucguccucuggggcauccaccaccccuccaccuccgccgaccagcagucccucuaccagaacgccgacuccuacgucuucgucggcaccuccaaguacuccaagaaguucaagcccgagaucgccauccgccccaagguccgcgaccaggagggccgcaugaacuacuacuggacccucgucgagcccggcgacaagaucaccuucgaggccaccggcaaccucgucgucccccgcuacgccuucgccauggagcgcaacgccggcuccggcaucaucaucuccgacacccccguccacgacugcaacaccaccugccagacccccaagggcgccaucaacaccucccuccccuuccagaacauccaccccaucaccaucggcaagugccccaaguacgucaaguccaccaagcuccgccucgccaccggccuccgcaacguccccuccauccagucccgcggccucuucggcgccaucgccggcuucaucgagggcggcuggaccggcauggucgacggcugguacggcuaccaccaccagaacgagcagggcuccggcuacgccgccgaccucaaguccacccagaacgccaucgacgagaucaccaacaaggucaacuccgucaucgagaagaugaacacccaguucaccgccgucggcaaggaguucaaccaccucgagaagcgcaucgagaaccucaacaagaaggucgacgacggcuuccucgacaucuggaccuacaacgccgagcuccucguccuccucgagaacgagcgcacccucgacuaccacgacuccaacgucaagaaccucuacgagaagguccgcucccagcucaagaacaacgccaaggagaucggcaacggcugcuucgaguucuaccacaagugcgacaacaccugcauggaguccgucaagaacggcaccuacgacuaccccaaguacuccgaggaggccaagcucaaccgcgaggagaucgacggcgucaagcucgaguccacccgcaucuaccagauccucgccaucuacuccaccgucgccuccucccucguccucgucgucucccucggcgccaucuccuucuggaugugcuccaacggcucccuccagugccgcaucugcaucuga

SEQ ID NO: 101497 - RNA, 1701 nt, Artificial Sequence
  derived and/or modified CDS sequence (opt2) from hemagglutinin__InfluenzaA__ADL32017
augaaggccauccucgucguccuccucuacaccuucgccaccgccaacgccgacacccucugcaucggcuaccacgccaacaacuccaccgacaccgucgacaccguccucgagaagaacgucaccgucacccacuccgucaaccuccucgaggacaagcacaacggcaagcucugccagcuccgcggcgucgccccccuccaccucggcaagugcaacaucgccggcuggauccucggcaaccccgagugcgagucccucuccaccgccuccuccugguccuacaucgucgagaccuccuccuccgacaacggcaccugcuaccccggcgacuucaucgacuacgaggagcuccgcgagcagcucuccuccgucuccuccuucgagcgcuucgagaucuuccccaagaccuccuccuggcccaaccacgacuccaacaagggcgucaccgccgccugcccccacgccggcgccaaguccuucuacaagaaccucaucuggcucgucaagaagggcaacuccuaccccaagcucuccaaguccuacaucaacgacaagggcaaggagguccucguccucuggggcauccaccaccccuccaccuccgccgaccagcagucccucuaccagaacgccgacaccuacgucuucgucggcaccucccgcuacuccaagaaguucaagcccgagaucgccauccgccccaagguccgcgaccaggagggccgcaugaacuacuacuggacccucgucgagcccggcgacaagaucaccuucgaggccaccggcaaccucgucgucccccgcuacgccuucgccauggagcgcaacgccggcuccggcaucaucaucuccgacacccccguccacgacugcaacaccaccugccagacccccaagggcgccaucaacaccucccuccccuuccagaacauccaccccaucaccaucggcaagugccccaaguacgucaaguccaccaagcuccgccucgccaccggccuccgcaacguccccuccauccagucccgcggccucuucggcgccaucgccggcuucaucgagggcggcuggaccggcauggucgacggcugguacggcuaccaccaccagaacgagcagggcuccggcuacgccgccgaccucaaguccacccagaacgccaucgacgagaucaccaacaaggucaacuccgucaucgagaagaugaacacccaguucaccgccgucggcaaggaguucaaccaccucgagaagcgcaucgagaaccucaacaagaagaucgacgacggcuuccucgacaucuggaccuacaacgccgagcuccucguccuccucgagaacgagcgcacccucgacuaccacgacuccaacgucaagaaccucuacgagaagguccgcucccagcucaagaacaacgccaaggagaucggcaacggcugcuucgaguucuaccacaagugcgacaacaccugcauggaguccgucaagaacggcaccuacgacuaccccaaguacuccgaggaggccaagcucaaccgcgaggagaucgacggcgucaagcucgaguccacccgcaucuaccagauccucgccaucuacuccaccgucgccuccucccucguccucgucgucucccucggcgccaucuccuucuggaugugcuccaacggcucccuccagugccgcaucugcaucuga

SEQ ID NO: 101498 - RNA, 1701 nt, Artificial Sequence
  derived and/or modified CDS sequence (opt2) from hemagglutinin__InfluenzaA__ADL32037
augaaggccauccucgucguccuccucuacaccuucgccaccgccaacgccgacacccucugcaucggcuaccacgccaacaacuccaccgacaccgucgacaccguccucgagaagaacgucaccgucacccacuccgucaaccuccucgaggacaagcacaacggcaagcucugcaagcuccgcggcgucgccccccuccaccucggcaagugcaacaucgccggcuggauccucggcaaccccgagugcgagucccucuccaccgccuccuccugguccuacaucgucgagaccuccuccuccgacaacggcaccugcuaccccggcgacuucaucgacuacgaggagcuccgcgagcagcucuccuccgucuccuccuucgagcgcuucgagaucuuccccaagaccuccuccuggcccaaccacgacuccaacaagggcgucaccgccgccugcccccacgccggcgccaaguccuucuacaagaaccucaucuggcucgucaagaagggcaacuccuaccccaagcucuccaaguccuacaucaacgacaagggcaaggagguccucguccucuggggcauccaccaccccuccaccuccgucgaccagcagucccucuaccagaacgccgacgccuacgucuucgucggcaccucccgcuacuccaagaaguucaagcccgagaucgccauccgccccaagguccgcgaccaggagggccgcaugaacuacuacuggacccucgucgagcccggcgacaagaucaccuucgaggccaccggcaaccucgucgucccccgcuacgccuucgccauggagcgcaacgccggcuccggcaucaucaucuccgacacccccguccacgacugcaacaccaccugccagacccccaagggcgccaucaacaccucccuccccuuccagaacauccaccccaucaccaucggcaagugccccaaguacgucaaguccaccaagcuccgccucgccaccggccuccgcaacguccccuccauccagucccgcggccucuucggcgccaucgccggcuucaucgagggcggcuggaccggcauggucgacggcugguacggcuaccaccaccagaacgagcagggcuccggcuacgccgccgaccucaaguccacccagaacgccaucgacgagaucaccaacaaggucaacuccgucaucgagaagaugaacacccaguucaccgccgucggcaaggaguucaaccaccucgagaagcgcaucgagaaccucaacaagaaggucgacgacggcuuccucgacaucuggaccuacaacgccgagcuccucguccuccucgagaacgagcgcacccucgacuaccacgacuccaacgucaagaaccucuacgagaagguccgcucccagcucaagaacaacgccaaggagaucggcaacggcugcuucgaguucuaccacaagugcgacaacaccugcauggaguccgucaagaacggcaccuacgacuaccccaaguacuccgaggaggccaagcucaaccgcgaggagaucgacggcgucaagcucgaguccacccgcaucuaccagauccucgccaucuacuccaccgucgccuccucccucguccucgucgucucccucggcgccaucuccuucuggaugugcuccaacggcucccuccagugccgcaucugcaucuga

SEQ ID NO: 101499 - RNA, 1701 nt, Artificial Sequence; identical to SEQ ID NO: 98705
  derived and/or modified CDS sequence (opt2) from hemagglutinin__InfluenzaA__ADL32047

SEQ ID NO: 101500 - RNA, 1701 nt, Artificial Sequence
  derived and/or modified CDS sequence (opt2) from hemagglutinin__InfluenzaA__ADL32057
augaaggccauccucgucguccuccucuacaccuucgccaccgccaacgccgacacccucugcaucggcuaccacgccaacaacuccaccgacaccgucgacaccguccucgagaagaacgucaccgucacccacuccgucaaccuccucgaggacaagcacaacggcaagcucugcaagcuccgcggcgucgccccccuccaccucggcaagugcaacaucgccggcuggauccucggcaaccccgagugcgagucccucuccaccgccuccuccugguccuacaucgucgagaccuccuccuccgacaacggcaccugcuaccccggcgacuucaucgacuacgaggagcuccgcgagcagcucuccuccgucuccuccuucgagcgcuucgagaucuuccccaagaccuccuccuggcccaaccacgacuccaacaagggcgucaccgccgccugcccccacgccggcgccaaguccuucuacaagaaccucaucuggcucgucaagaagggcaacuccuaccccaagcucuccaaguccuacaucaacgacaagggcaaggagguccucguccucuggggcauccaccaccccuccaccuccgccgaccagcagggccucuaccagaacgccgacgccuacgucuucgucggcaccucccgcuacuccaagaaguucaagcccgagaucgccauccgccccaagguccgcgaccaggagggccgcaugaacuacuacuggacccucgucgagcccggcgacaagaucaccuucgaggccaccggcaaccucgucgucccccgcuacgccuucgccauggagcgcaacgccggcuccggcaucaucaucuccgacacccccguccacgacugcaacaccaccugccagacccccaagggcgccaucaacaccucccuccccuuccagaacauccaccccaucaccaucggcaagugccccaaguacgucaagggcaccaagcuccgccucgccaccggccuccgcaacguccccuccauccagucccgcggccucuucggcgccaucgccggcuucaucgagggcggcuggaccggcauggucgacggcugguacggcuaccaccaccagaacgagcagggcuccggcuacgccgccgaccucaaguccacccagaacgccaucgacgagaucaccaacaaggucaacuccgucaucgagaagaugaacacccaguucaccgccgucggcaaggaguucaaccaccucgagaagcgcaucgagaaccucaacaagaaggucgacgacggcuuccucgacaucuggaccuacaacgccgagcuccucguccuccucgagaacgagcgcacccucgacuaccacgacuccaacgucaagaaccucuacgagaagguccgcucccagcucaagaacaacgccaaggagaucggcaacggcugcuucgaguucuaccacaagugcgacaacaccugcauggaguccgucaagaacggcaccuacgacuaccccaaguacuccgaggaggccaagcucaaccgcgaggagaucgacggcgucaagcucgaguccacccgcaucuaccagauccucgccaucuacuccaccgucgccuccucccucguccucgucgucucccucggcgccaucuccuucuggaugugcuccaacggcucccuccagugccgcaucugcaucuga

SEQ ID NO: 101501 - RNA, 1701 nt, Artificial Sequence; identical to SEQ ID NO: 98705
  derived and/or modified CDS sequence (opt2) from hemagglutinin__InfluenzaA__ADL32090

SEQ ID NO: 101502 - RNA, 1701 nt, Artificial Sequence; identical to SEQ ID NO: 98705
  derived and/or modified CDS sequence (opt2) from hemagglutinin__InfluenzaA__ADL32114

SEQ ID NO: 101503 - RNA, 1701 nt, Artificial Sequence; identical to SEQ ID NO: 98705
  derived and/or modified CDS sequence (opt2) from hemagglutinin__InfluenzaA__ADL32344

SEQ ID NO: 101504 - RNA, 1701 nt, Artificial Sequence; identical to SEQ ID NO: 99152
  derived and/or modified CDS sequence (opt2) from hemagglutinin__InfluenzaA__ADL32354

SEQ ID NO: 101505 - RNA, 1701 nt, Artificial Sequence
  derived and/or modified CDS sequence (opt2) from hemagglutinin__InfluenzaA__ADL32364
augaaggccauccucgucguccuccucuacaccuucgccaccgccaacgccgacacccucugcaucggcuaccacgccaacaacuccaccgacaccgucgacaccguccucgagaagaacgucaccgucacccacuccgucaaccuccucgaggacaagcacaacggcaagcucugcaagcuccgcggcgucgccccccuccaccucggcaagugcaacaucgccggcuggauccucggcaaccccgagugcgagucccucuccaccgccaucuccugguccuacaucgucgagaccuccuccuccgacaacggcaccugcuaccccggcgacuucaucgacuacgaggagcuccgcgagcagcucuccuccgucuccuccuucgagcgcuucgagaucuuccccaagaccuccuccuggcccaaccacgacuccaacaagggcgucaccgccgccugcccccacgccggcgccaaguccuucuacaagaaccucaucuggcucgucaagaagggcaacuccuaccccaagcucuccaaguccuacaucaacgacaagggcaaggagguccucguccucuggggcauccaccaccccuccaccuccgccgaccagcagucccucuaccagaacgccgacaccuacgucuucgucggcaccucccgcuacuccaagaaguucaagcccgagaucgccauccgccccaagguccgcgaccaggagggccgcaugaacuacuacuggacccucgucgagcccggcgacaagaucaccuucgaggccaccggcaaccucgucgucccccgcuacgccuucgccauggagcgcaacgccggcuccggcaucaucaucuccgacacccccguccacgacugcaacaccaccugccagacccccaagggcgccaucaacaccucccuccccuuccagaacauccaccccaucaccaucggcaagugccccaaguacgucaaguccaccaagcuccgccucgccaccggccuccgcaacguccccuccauccagucccgcggccucuucggcgccaucgccggcuucaucgagggcggcuggaccggcauggucgacggcugguacggcuaccaccaccagaacgagcagggcuccggcuacgccgccgaccucaaguccacccagaacgccaucgacgagaucaccaacaaggucaacuccgucaucgagaagaugaacacccaguucaccgccgucggcaaggaguucaaccaccucgagaagcgcaucgagaaccucaacaagaagaucgacgacggcuuccucgacaucuggaccuacaacgccgagcuccucguccuccucgagaacgagcgcacccucgacuaccacgacuccaacgucaagaaccucuacgagaagguccgcucccagcucaagaacaacgccaaggagaucggcaacggcugcuucgaguucuaccacaagugcgacaacaccugcauggaguccgucaagaacggcaccuacgacuaccccaaguacuccgaggaggccaagcucaaccgcgaggagaucgacggcgucaagcucgaguccacccgcaucuaccagauccucgccaucuacuccaccgucgccuccucccucguccucgucgucucccucggcgccaucuccuucuggaugugcuccaacggcucccuccagugccgcaucugcaucuga

SEQ ID NO: 101506 - RNA, 1701 nt, Artificial Sequence; identical to SEQ ID NO: 98705
  derived and/or modified CDS sequence (opt2) from hemagglutinin__InfluenzaA__ADL32374

SEQ ID NO: 101507 - RNA, 1701 nt, Artificial Sequence
  derived and/or modified CDS sequence (opt2) from hemagglutinin__InfluenzaA__ADL32384
augaaggccauccucgucguccuccucuacaccuucgccaccgccaccgccgacacccucugcaucggcuaccacgccaacaacuccaccgacaccgucgacaccguccucgagaagaacgucaccgucacccacuccgucaaccuccucgaggacaagcacaacggcaagcucugcaagcuccgcggcgucgccccccuccaccucggcaagugcaacaucgccggcuggauccucggcaaccccgagugcgagucccucuccaccgccuccuccugguccuacaucgucgagaccuccuccuccgacaacggcaccugcuaccccggcgacuucaucgacuacgaggagcuccgcgagcagcucuccuccgucuccuccuucgagcgcuucgagaucuuccccaagaccuccuccuggcccaaccacgacuccaacaagggcgucaccgccgccugcccccacgccggcgccaaguccuucuacaagaaccucaucuggcucgucaagaagggcaacuccuaccccaagcucuccaaguccuacaucaacgacaagggcaaggagguccucguccucuggggcauccaccaccccuccaccuccgccgaccagcagucccucuaccagaacgccgacgccuacgucuucgucggcaccucccgcuacuccaagaaguucaagcccgagaucgccauccgccccaagguccgcgaccaggagggccgcaugaacuacuacuggacccucgucgagcccggcgacaagaucaccuucgaggccaccggcaaccucgucgucccccgcuacgccuucgccauggagcgcaacgccggcuccggcaucaucaucuccgacacccccguccacgacugcaacaccaccugccagacccccaagggcgccaucaacaccucccuccccuuccagaacauccaccccaucaccaucggcaagugccccaaguacgucaaguccaccaagcuccgccucgccaccggccuccgcaacguccccuccauccagucccgcggccucuucggcgccaucgccggcuucaucgagggcggcuggaccggcauggucgacggcugguacggcuaccaccaccagaacgagcagggcuccggcuacgccgccgaccucaaguccacccagaacgccaucgacgagaucaccaacaaggucaacuccgucaucgagaagaugaacacccaguucaccgccgucggcaaggaguucaaccaccucgagaagcgcaucgagaaccucaacaagaaggucgacgacggcuuccucgacaucuggaccuacaacgccgagcuccucguccuccucgagaacgagcgcacccucgacuaccacgacuccaacgucaagaaccucuacgagaagguccgcucccagcucaagaacaacgccaaggagaucggcaacggcugcuucgaguucuaccacaagugcgacaacaccugcauggaguccgucaagaacggcaccuacgacuaccccaaguacuccgaggaggccaagcucaaccgcgaggagaucgacggcgucaagcucgaguccacccgcaucuaccagauccucgccaucuacuccaccgucgccuccucccucguccucgucgucucccucggcgccaucuccuucuggaugugcuccaacggcucccuccagugccgcaucugcaucuga

SEQ ID NO: 101508 - RNA, 1701 nt, Artificial Sequence
  derived and/or modified CDS sequence (opt2) from hemagglutinin__InfluenzaA__ADL32394
augaaggccauccucgucguccuccucuacaccuucgccaccgccaacgccgacacccucugcaucggcuaccacgccaacaacuccaccgacaccgucgacaccguccucgagaagaacgucaccgucacccacuccgucaaccuccucgaggacaagcacaacggcaagcucugcaagcuccgcggcgucgccccccuccaccucggcaagugcaacaucgccggcuggauccucggcaaccccgagugcgaguccuucuccaccaccuccuccugguccuacaucgucgagaccuccuccuccgacaacggcaccugcuaccccggcgacuucaucgacuacgaggagcuccgcgagcagcucuccuccgucuccuccuucgagcgcuucgagaucuuccccaagaccuccuccuggcccaaccacgacuccaacaagggcgucaccgccgccugcccccacgccggcgccaaguccuucuacaagaaccucaucuggcucgucaagaagggcaacuccuaccccaagcucuccaaguccuacaucaacgacaagggcaaggagguccucguccucuggggcauccaccaccccuccaccuccgccgaccagcagucccucuaccagaacgccgacaccuacgucuucgucggcaccucccgcuacuccaagaaguucaagcccgagaucgccauccgccccaagguccgcgaccaggagggccgcaugaacuacuacuggacccucgucgagcccggcgacaagaucaccuucgaggccaccggcaaccucgucgucccccgcuacgccuucgccauggagcgcaacgccggcuccggcaucaucaucuccgacacccccguccacgacugcaacaccaccugccagacccccaagggcgccaucaacaccucccuccccuuccagaacauccaccccaucaccaucggcaagugccccaaguacgucaaguccaccaagcuccgccucgccaccggccuccgcaacguccccuccauccagucccgcggccucuucggcgccaucgccggcuucaucgagggcggcuggaccggcauggucgacggcugguacggcuaccaccaccagaacgagcagggcuccggcuacgccgccgaccucaaguccacccagaacgccaucgacgagaucaccaacaaggucaacuccgucaucgagaagaugaacacccaguucaccgccgucggcaaggaguucaaccaccucgagaagcgcaucgagaaccucaacaagaagaucgacgacggcuuccucgacaucuggaccuacaacgccgagcuccucguccuccucgagaacgagcgcacccucgacuaccacgacuccaacgucaagaaccucuacgagaagguccgcucccagcucaagaacaacgccaaggagaucggcaacggcugcuucgaguucuaccacaagugcgacaacaccugcauggaguccgucaagaacggcaccuacgacuaccccaaguacuccgaggaggccaagcucaaccgcgaggagaucgacggcgucaagcucgaguccacccgcaucuaccagauccucgccaucuacuccaccgucgccuccucccucguccucgucgucucccucggcgccaucuccuucuggaugugcuccaacggcucccuccagugccgcaucugcaucuga

SEQ ID NO: 101509 - RNA, 1701 nt, Artificial Sequence; identical to SEQ ID NO: 98705
  derived and/or modified CDS sequence (opt2) from hemagglutinin__InfluenzaA__ADL32404

SEQ ID NO: 101510 - RNA, 1701 nt, Artificial Sequence
  derived and/or modified CDS sequence (opt2) from hemagglutinin__InfluenzaA__ADL32414
augaaggccauccucgucguccuccucuacaccuucgccaccgccaacgccgacacccucugcaucggcuaccacgccaacaacuccaccgacaccgucgacaccguccucgagaagaacgucaccgucacccacuccgucaaccuccucgaggacaagcacaacggcaagcucugcaagcuccgcggcgucgccccccuccaccucggcaagugcaacaucgccggcuggauccucggcaaccccgagugcgagucccucuccaccgccuccuccugguccuacaucgucgagaccuccuccuccgacaacggcaccugcuaccccggcgacuucaucgacuacgaggagcuccgcgagcagcucuccuccgucuccuccuucgagcgcuucgagaucuuccccaagaccuccuccuggcccaaccacgacuccaacaagggcgucaccgccgccugcccccacgccggcgccaaguccuucuacaagaaccucaucuggcucgucaagaagggcaacuccuaccccaagcucuccaaguccuacaucaacgacaagggcaaggagguccucguccucuggggcauccaccaccccuccaccuccgccgaccagcagucccucuaccagaacgccgacgccuacgucuucgucggcaccucccgcuacuccaagaaguucaagcccgagaucgccauccgccccaagguccgcgcccaggagggccgcaugaacuacuacuggacccucgucgagcccggcgacaagaucaccuucgaggccaccggcaaccucgucgucccccgcuacgccuucgccauggagcgcaacgccggcuccggcaucaucaucuccgacacccccguccacgacugcaacaccaccugccagacccccaagggcgccaucaacaccucccuccccuuccagaacauccaccccaucaccaucggcaagugccccaaguacgucaaguccaccaagcuccgccucgccaccggccuccgcaacguccccuccauccagucccgcggccucuucggcgccaucgccggcuucaucgagggcggcuggaccggcauggucgacggcugguacggcuaccaccaccagaacgagcagggcuccggcuacgccgccgaccucaaguccacccagcacgccaucgacgagaucaccaacaaggucaacuccgucaucgagaagaugaacacccaguucaccgccgucggcaaggaguucaaccaccucgagaagcgcaucgagaaccucaacaagaaggucgacgacggcuuccucgacaucuggaccuacaacgccgagcuccucguccuccucgagaacgagcgcacccucgacuaccacgacuccaacgucaagaaccucuacgagaagguccgcucccagcucaagaacaacgccaaggagaucggcaacggcugcuucgaguucuaccacaagugcgacaacaccugcauggaguccgucaagaacggcaccuacgacuaccccaaguacuccgaggaggccaagcucaaccgcgaggagaucgacggcgucaagcucgaguccacccgcaucuaccagauccucgccaucuacuccaccgucgccuccucccucguccucgucgucucccucggcgccaucuccuucuggaugugcuccaacggcucccuccagugccgcaucugcaucuga

SEQ ID NO: 101511 - RNA, 1701 nt, Artificial Sequence
  derived and/or modified CDS sequence (opt2) from hemagglutinin__InfluenzaA__ADL32424
augaaggccauccucgucguccuccucuacaccuucgccaucgccaacgccgacacccucugcaucggcuaccacgccaacaacuccaccgacaccgucgacaccguccucgagaagaacgucaccgucacccacuccgucaaccuccucgaggacaagcacaacggcaagcucugcaagcuccgcggcgucgccccccuccaccucggcaagugcaacaucgccggcuggauccucggcaaccccgagugcgagucccucuccaccgccuccuccugguccuacaucgucgagaccuccuccuccgacaacggcaccugcuaccccggcgacuucaucgacuacgaggagcuccgcgagcagcucuccuccgucuccuccuucgagcgcuucgagaucuuccccaagaccuccuccuggcccaaccacgacuccaacaagggcgucaccgccgccugcccccacgccggcgccaaguccuucuacaagaaccucaucuggcucgucaagaagggcaacuccuaccccaagcucuccaaguccuacaucaacgacaagggcaaggagguccucguccucuggggcauccaccaccccuccaccuccgccgaccagcagucccucuaccagaacgccgacgccuacgucuucgucggcaccucccgcuacuccaagaaguucaagcccgagaucgccauccgccccaagguccgcgaccaggagggccgcaugaacuaccacuggacccucgucgagcccggcgacaagaucaccuucgaggccaccggcaaccucgucgucccccgcuacgccuucgccauggagcgcaacgccggcuccggcaucaucaucuccgacacccccguccacgacugcaacaccaccugccagacccccaagggcgccaucaacaccucccuccccuuccagaacauccaccccaucaccaucggcaagugccccaaguacgucaaguccaccaagcuccgccucgccaccggccuccgcaacguccccuccauccagucccgcggccucuucggcgccaucgccggcuucaucgagggcggcuggaccggcauggucgacggcugguacggcuaccaccaccagaacgagcagggcuccggcuacgccgccgaccucaaguccacccagcacgccaucgacgagaucaccaacaaggucaacuccgucaucgagaagaugaacacccaguucaccgccgucggcaaggaguucaaccaccucgagaagcgcaucgagaaccucaacaagaaggucgacgacggcuuccucgacaucuggaccuacaacgccgagcuccucguccuccucgagaacgagcgcacccucgacuaccacgacuccaacgucaagaaccucuacgagaagguccgcucccagcucaagaacaacgccaaggagaucggcaacggcugcuucgaguucuaccacaagugcgacaacaccugcauggaguccgucaagaacggcaccuacgacuaccccaaguacuccgaggaggccaagcucaaccgcgaggagaucaacggcgucaagcucgaguccacccgcaucuaccagauccucgccaucuacuccaccgucgccuccucccucguccucgucgucucccucggcgccaucuccuucuggaugugcuccaacggcucccuccagugccgcaucugcaucuga

SEQ ID NO: 101512 - RNA, 1701 nt, Artificial Sequence
  derived and/or modified CDS sequence (opt2) from hemagglutinin__InfluenzaA__ADL32434
augaaggccauccucgucguccuccucuacaccuucgccaccgccaacgccgacacccucugcaucggcuaccacgccaacaacuccaccgacaccgucgacaccguccucgagaagaacgucaccgucacccacuccgucaaccuccucgaggacaagcacaacggcaagcucugcaagcuccgcggcgucgccccccuccaccucggcaagugcaacaucgccggcuggauccucggcaaccccgagugcgagucccucuccaccgccuccuccugguccuacaucgucgagaccuccuccuccgacaacggcaccugcuaccccggcgacuucaucgacuacgaggagcuccgcgagcagcucuccuccgucuccuccuucgagcgcuucgagaucuuccccaagaccuccuccuggcccauccacgacuccaacaagggcgucaccgccgccugcccccacgccggcgccaaguccuucuacaagaaccucaucuggcucgucaagaagggcaacuccuaccccaagcucuccaaguccuacaucaacgacaagggcaaggagguccucguccucuggggcauccaccaccccuccaccuccgccgaccagcagucccucuaccagaacgccgacgccuacgucuucgucggcaccucccgcuacuccaagaaguucaagcccgagaucgccauccgccccaagguccgcgaccaggagggccgcaugaacuacuacuggauccucgucgagcccggcgacaagaucaccuucgaggccaccggcaaccucgucgucccccgcuacgccuucgccauggagcgcaacgccggcuccggcaucaucaucuccgacacccccguccacgacugcaacaccaccugccagacccccaagggcgccaucaacaccucccuccccuuccagaacauccaccccaucaccaucggcaagugccccaaguacgucaaguccaccaagcuccgccucgccaccggccuccgcaacguccccuccauccagucccgcggccucuucggcgccaucgccggcuucaucgagggcggcuggaccggcauggucgacggcugguacggcuaccaccaccagaacgagcagggcuccggcuacgccgccgaccucaaguccacccagcacgccaucgacgagaucaccaacaaggucaacuccgucaucgagaagaugaacacccaguucaccgccgucggcaaggaguucaaccaccucgagaagcgcaucgagaaccucaacaagaaggucgacgacggcuuccucgacaucuggaccuacaacgccgagcuccucguccuccucgagaacgagcgcacccucgacuaccacgacuccaacgucaagaaccucuacgagaagguccgcucccagcucaagaacaacgccaaggagaucggcaacggcugcuucgaguucuaccacaagugcgacaacaccugcauggaguccgucaagaacggcaccuacgacuaccccaaguacuccgaggaggccaagcucaaccgcgaggagaucgacggcgucaagcucgaguccacccgcaucuaccagauccucgccaucuacuccaccgucgccuccucccucguccucgucgucucccucggcgccaucuccuucuggaugugcuccaacggcucccuccagugccgcaucugcaucuga

SEQ ID NO: 101513 - RNA, 1701 nt, Artificial Sequence; identical to SEQ ID NO: 100125
  derived and/or modified CDS sequence (opt2) from hemagglutinin__InfluenzaA__ADL32444

SEQ ID NO: 101514 - RNA, 1701 nt, Artificial Sequence
  derived and/or modified CDS sequence (opt2) from hemagglutinin__InfluenzaA__ADL32454
auggaggccauccucgucguccuccucuacaccuucgccaccgccaacgccgacacccucugcaucggcuaccacgccaacaacuccaccgacaccgucgacaccguccucgagaagaacgucaccgucacccacuccgucaaccuccucgaggacaagcacaacggcaagcucugcaagcuccgcggcgucgccccccuccaccucggcaagugcaacaucgccggcuggauccucggcaaccccgagugcgagucccucuccaccgccuccuccugguccuacaucgucgagaccuccuccuccgacaacggcaccugcuaccccggcgacuucaucgacuacgaggagcuccgcgagcagcucuccuccgucuccuccuucgagcgcuucgagaucuuccccaagaccuccuccuggcccaaccacgacuccaacaagggcgucaccgccgccugcccccacgccggcgccaaguccuucuacaagaaccucaucuggcucgucaagaagggcaacuccuaccccaagcucuccaaguccuacaucaacgacaagggcaaggagguccucguccucuggggcauccaccaccccuccaccuccgccgaccagcagucccucuaccagaacgccgacgccuacgucuucgucggcuccucccgcuacuccaagaaguucaagcccgagaucgccauccgccccaagguccgcgaccaggagggccgcaugaacuacuacuggacccucgucgagcccggcgacaagaucaccuucgaggccaccggcaaccucgucgucccccgcuacgccuucgccauggagcgcaacgccggcuccggcaucaucaucuccgacacccccguccacgacugcaacaccaccugccagacccccaagggcgccaucaacaccucccuccccuuccacaacauccaccccaucaccaucggcaagugccccaaguacgucaaguccaccaagcuccgccucgccaccggccuccgcaacguccccuccauccagucccgcggccucuucggcgccaucgccggcuucaucgagggcggcuggaccggcauggucgacggcugguacggcuaccaccaccagaacgagcagggcuccggcuacgccgccgaccucaaguccacccagaacgccaucgacgagaucaccaacaaggucaacuccgucaucgagaagaugaacacccaguucaccgccgucggcaaggaguucaaccaccucgagaagcgcaucgagaaccucaacaagaaggucgacgacggcuuccucgacaucuggaccuacaacgccgagcuccucguccuccucgagaacgagcgcacccucgacuaccacgacuccaacgucaagaaccucuacgagaagguccgcucccagcucaagaacaacgccaaggagcucggcaacggcugcuucgaguucuaccacaagugcgacaacaccugcauggaguccgucaagaacggcaccuacgacuaccccaaguacuccgaggaggccaagcucaaccgcgaggagaucgacggcgucaagcucgaguccacccgcaucuaccagauccucgccaucuacuccaccgucgccuccucccucguccucgucgucucccucggcgccaucuccuucuggaugugcuccaacggcucccuccagugccgcaucugcaucuga

SEQ ID NO: 101515 - RNA, 1701 nt, Artificial Sequence; identical to SEQ ID NO: 100872
  derived and/or modified CDS sequence (opt2) from hemagglutinin__InfluenzaA__ADL32464

SEQ ID NO: 101516 - RNA, 1701 nt, Artificial Sequence; identical to SEQ ID NO: 100872
  derived and/or modified CDS sequence (opt2) from hemagglutinin__InfluenzaA__ADL32484

SEQ ID NO: 101517 - RNA, 1701 nt, Artificial Sequence
  derived and/or modified CDS sequence (opt2) from hemagglutinin__InfluenzaA__ADL32504
augaaggccauccucgucguccuccucuacaccuucgccaccgccaacgccgacacccucugcaucggcuaccacgccaacaacuccaccgacaccgucgacaccguccucgagaagaacgucaccgucacccacuccgucaaccuccucgaggacaagcacaacggcaagcucugcaagcuccgcggcgucgccccccuccaccucggcaagugcaacaucgccggcuggauccucggcaaccccgagugcgagucccucuccaccgccuccuccugguccuacaucgucgagaccuccuccuccgacaacggcaugugcuaccccggcgacuucaucgacuacgaggagcuccgcgagcagcucuccuccgucuccuccuucgagcgcuucgagaucuuccccaagaccuccuccuggcccaaccacgacuccaacaagggcgucaccgccgccugcccccacgccggcgccaaguccuucuacaagaaccucaucuggcucgucaagaagggcaacuccuaccccaagcucuccaaguccuacaucaacgacaagggcaaggagguccucguccucuggggcauccaccaccccuccaccuccgccgaccagcagucccucuaccagaacgccgacgccuacgucuucgucggcaccucccgcuacuccaagaaguucaagcccgagaucgccauccgccccaagguccgcgaccaggagggccgcaugaacuacuacuggacccucgucgagcccggcgacaagaucaccuucgaggccaccggcaaccucgucgucccccgcuacgccuucgccauggagcgcaacgccggcuccggcaucaucaucuccgacacccccguccacgacugcaacaccaccugccagacccccaagggcgccaucaacaccucccuccccuuccagaacauccaccccaucaccaucggcaagugccccaaguacgucaaguccaccaagcuccgccucgccaccggccuccgcaacguccccuccauccagucccgcggccucuucggcgccaucgccggcuucaucgagggcggcuggaccggcauggucgacggcugguacggcuaccaccaccagaacgagcagggcuccggcuacgccgccgaccucaaguccacccagcacgccaucgacgagaucaccaacaaggucaacuccgucaucgagaagaugaacacccaguucaccgccgucggcaaggaguucaaccaccucgagaagcgcaucgagaaccucaacaagaaggucgacgacggcuuccucgacaucuggaccuacaacgccgagcuccucguccuccucgagaacgagcgcacccucgacuaccacgacuccaacgucaagaaccucuacgagaagguccgcucccagcucaagaacaacgccaaggagaucggcaacggcugcuucgaguucuaccacaagugcgacaacaccugcauggaguccgucaagaacggcaccuacgacuaccccaaguacuccgaggaggccaagcucaaccgcgaggagaucgacggcgucaagcucgaguccacccgcaucuaccagauccucgccaucuacuccaccgucgccuccucccucguccucgucgucucccucggcgccaucuccuucuggaugugcuccaacggcucccuccagugccgcaucugcaucuga

SEQ ID NO: 101518 - RNA, 1701 nt, Artificial Sequence; identical to SEQ ID NO: 100125
  derived and/or modified CDS sequence (opt2) from hemagglutinin__InfluenzaA__ADL32514

SEQ ID NO: 101519 - RNA, 1701 nt, Artificial Sequence; identical to SEQ ID NO: 100872
  derived and/or modified CDS sequence (opt2) from hemagglutinin__InfluenzaA__ADL32524

SEQ ID NO: 101520 - RNA, 1701 nt, Artificial Sequence
  derived and/or modified CDS sequence (opt2) from hemagglutinin__InfluenzaA__ADL32544
augaaggccauccucgucguccuccucuacaccuucgccaccuccaacgccgacacccucugcaucggcuaccacgccaacaacuccaccgacaccgucgacaccguccucgagaagaacgucaccgucacccacuccgucaaccuccucgaggacaagcacaacggcaagcucugcaagcuccgcggcgucgccccccuccaccucggcaagugcaacaucgccggcuggauccucggcaaccccgagugcgagucccucuccaccgccuccuccugguccuacaucgucgagaccuccuccuccgacaacggcaccugcuaccccggcgacuucaucgacuacgaggagcuccgcgagcagcucuccuccgucuccuccuucgagcgcuucgagaucuuccccaagaccuccuccuggcccaaccacgacuccaacaagggcgucaccgccgccugcccccacgccggcgccaaguccuucuacaagaaccucaucuggcucgucaagaagggcaacuccuaccccaagcuccgcaaguccuacaucaacgacaagggcaaggagguccucguccucuggggcauccaccaccccuccaccuccgccgaccagcagucccucuaccagaacgccgacgccuacgucuucgucggcaccucccgcuacuccaagaaguucaagcccgagaucgccauccgccccaagguccgcgaccaggagggccgcaugaacuacuacuggacccucgucgagcccggcgacaagaucaccuucgaggccaccggcaaccucgucgucccccgcuacgccuucgccauggagcgcaacgccggcuccggcaucaucaucuccgacacccccguccacgacugcaacaccaccugccagacccccaagggcgccaucaacaccucccuccccuuccagaacauccaccccaucaccaucggcaagugccccaaguacgucaaguccaccaagcuccgccucgccaccggccuccgcaacguccccuccauccagucccgcggccucuucggcgccaucgccggcuucaucgagggcggcuggaccggcauggucgacggcugguacggcuaccaccaccagaacgagcagggcuccggcuacgccgccgaccucaaguccacccagcacgccaucgacgagaucaccaacaaggucaacuccgucaucgagaagaugaacacccaguucaccgccgucggcaaggaguucaaccaccucgagaagcgcaucgagaaccucaacaagaaggucgacgacggcuuccucgacaucuggaccuacaacgccgagcuccucguccuccucgagaacgagcgcacccucgacuaccacgacuccaacgucaagaaccucuacgagaagguccgcucccagcucaagaacaacgccaaggagaucggcaacggcugcuucgaguucuaccacaagugcgacaacaccugcauggaguccgucaagaacggcaccuacgacuaccccaaguacuccgaggaggccaagcucaaccgcgaggagaucgacggcgucaagcucgaguccacccgcaucuaccagauccucgccaucuacuccaccgucgccuccucccucguccucgucgucucccucggcgccaucuccuucuggaugugcuccaacggcucccuccagugccgcaucugcaucuga

SEQ ID NO: 101521 - RNA, 1701 nt, Artificial Sequence; identical to SEQ ID NO: 101306
  derived and/or modified CDS sequence (opt2) from hemagglutinin__InfluenzaA__ADL32554

SEQ ID NO: 101522 - RNA, 1701 nt, Artificial Sequence; identical to SEQ ID NO: 100318
  derived and/or modified CDS sequence (opt2) from hemagglutinin__InfluenzaA__ADL32670

SEQ ID NO: 101523 - RNA, 1701 nt, Artificial Sequence
  derived and/or modified CDS sequence (opt2) from hemagglutinin__InfluenzaA__ADL32690
augaaggccauccucgucguccuccucuacaccuucgccaccgccaacgccgacacccucugcaucggcuaccacgccaacaacuccaccgacaccgucgacaccguccucgagaagaacgucaccgucacccacuccgucaacauccucgaggacaagcacaacggcaagcucugcaagcuccgcggcgucgccccccuccaccucggcaagugcaacaucgccggcuggauccucggcaaccccgagugcgagucccucuccaccgccuccuccugguccuacaucgucgagaccuccuccuccgacaacggcaccugcuaccccggcgacuucaucgacuacgaggagcuccgcgagcagcucuccuccgucuccuccuucgagcgcuucgagaucuuccccaagaccuccuccuggcccaaccacgacuccaacaagggcgucaccgccgccugcccccacgccggcgccaaguccuucuacaagaaccucauguggcucgucaagaagggcaacuccuaccccaagcucuccaaguccuacaucaacgacaagggcaaggagguccucguccucuggggcauccaccaccccuccaccuccgccgaccagcagucccucuaccagaacgccgacgccuacgucuucgucggcuccucccgcuacuccaagaaguucaagcccgagaucgccauccgccccaagguccgcgaccaggagggccgcaugaacuacuacuggacccucgucgagcccggcgacaagaucaccuucgaggccaccggcaaccucgucgucccccgcuacgccuucgccauggagcgcaacgccggcuccggcaucaucaucuccgacacccccguccacgacugcaacaccaccugccagacccccaagggcgccaucaacaccucccuccccuuccagaacauccaccccaucaccaucggcaagugccccaaguacgucaaguccaccaagcuccgccucgccaccggccuccgcaacguccccuccauccagucccgcggccucuucggcgccaucgccggcuucaucgagggcggcuggaccggcauggucgacggcugguacggcuaccaccaccagaacgagcagggcuccggcuacgccgccgaccucaaguccacccagaacgccaucgacgagaucaccaacaaggucaacuccgucaucgagaagaugaacacccaguucaccgccgucggcaaggaguucaaccaccucgagaagcgcaucgagaaccucaacaagaaggucgacgacggcuuccucgacaucuggaccuacaacgccgagcuccucguccuccucgagaacgagcgcacccucgacuaccacgacuccaacgucaagaaccucuacgagaagguccgcucccagcucaagaacaacgccaaggagaucggcaacggcugcuucgaguucuaccacaagugcgacaacaccugcauggaguccgucaagaacggcaccuacgacuaccccaaguacuccgaggaggccaagcucaaccgcgaggagaucgacggcgucaagcucgaguccacccgcaucuaccagauccucgccaucuacuccaccgucgccuccucccucguccucgucgucucccucggcgccaucuccuucuggaugugcuccaacggcucccuccagugccgcaucugcaucuga

SEQ ID NO: 101524 - RNA, 1701 nt, Artificial Sequence; identical to SEQ ID NO: 98885
  derived and/or modified CDS sequence (opt2) from hemagglutinin__InfluenzaA__ADL32710

SEQ ID NO: 101525 - RNA, 1701 nt, Artificial Sequence; identical to SEQ ID NO: 98705
  derived and/or modified CDS sequence (opt2) from hemagglutinin__InfluenzaA__ADL32720

SEQ ID NO: 101526 - RNA, 1701 nt, Artificial Sequence; identical to SEQ ID NO: 100477
  derived and/or modified CDS sequence (opt2) from hemagglutinin__InfluenzaA__ADL32730

SEQ ID NO: 101527 - RNA, 1701 nt, Artificial Sequence; identical to SEQ ID NO: 100477
  derived and/or modified CDS sequence (opt2) from hemagglutinin__InfluenzaA__ADL32740

SEQ ID NO: 101528 - RNA, 1701 nt, Artificial Sequence; identical to SEQ ID NO: 99649
  derived and/or modified CDS sequence (opt2) from hemagglutinin__InfluenzaA__ADL39137

SEQ ID NO: 101529 - RNA, 1698 nt, Artificial Sequence
  derived and/or modified CDS sequence (opt2) from hemagglutinin__InfluenzaA__ADL39148
augaaggucaagcuccucguccuccucugcaccuucaccgccaccuacgccgacaccaucugcaucggcuaccacgccaacaacuccaccgacaccgucgacaccguccucgagaagaacgucaccgucacccacuccgucaaccuccucgagaacucccacaacggcaagcucugccuccucaagggcaucgccccccuccagcucggcaacugcuccgucgccggcuggauccucggcaaccccgagugcgagcuccucaucuccaaggaguccugguccuacaucgucgagaagcccaaccccgagaacggcaccugcuaccccggccacuucgccgacuacgaggagcuccgcgagcagcucuccuccgucuccuccuucgagcgcuucgagaucuuccccaaggaguccuccuggcccaaccacaccgucaccggcgucuccgccuccugcucccacaacggcgaguccuccuucuaccgcaaccuccucuggcucaccggcaagaacggccucuaccccaaccucuccaaguccuacgccaacaacaaggagaaggagguccucguccucuggggcguccaccacccccccaacaucgucgaccagaagacccucuaccgcaccgagaacgccuacgucuccgucgucuccucccacuacucccgcaaguucacccccgagaucgccaagcgccccaagguccgcgaccaggagggccgcaucaacuacuacuggacccuccucgagcccggcgacaccaucaucuucgaggccaacggcaaccucaucgccccccgcuacgccuucgcccucucccgcgacuucggcuccggcaucaucaacuccaacgcccccauggacaagugcgacgccaagugccagaccccccagggcgccaucaacuccucccuccccuuccagaacguccaccccgucaccaucggcgagugccccaaguacguccgcuccgccaagcuccgcauggucaccggccuccgcaacauccccuccauccagucccgcggccucuucggcgccaucgccggcuucaucgagggcggcuggaccggcauggucgacggcugguacggcuaccaccaccagaacgagcagggcuccggcuacgccgccgaccagaaguccacccagaacgccaucaacggcaucaccaacaaggucaacuccgucaucgagaagaugaacacccaguucaccgccgucggcaaggaguucaacaagcucgagcgccgcauggagaaccucaacaagaaggucgacgacggcuucaucgacaucuggaccuacaacgccgagcuccucguccuccucgagaacgagcgcacccucgacuuccacgacuccaacgucaagaaccucuacgagaaggucaagucccagcucaagaacaacgccaaggagaucggcaacggcugcuucgaguucuaccacaagugcaacgacgagugcauggaguccgucaagaacggcaccuacgacuaccccaaguacuccgaggaguccaagcucaaccgcgagaagaucgacggcgucaagcucgaguccaugggcgucuaccagauccucgccaucuacuccaccgucgccuccucccucguccuccucgucucccucggcgccaucuccuucuggaugugcuccaacggcucccuccagugccgcaucugcaucuga

SEQ ID NO: 101530 - RNA, 1701 nt, Artificial Sequence
  derived and/or modified CDS sequence (opt2) from hemagglutinin__InfluenzaA__ADL39159
augaagaccaucaucgcccucuccuacauccucugccucgucuucgcccagaagcuccccggcaacgacaacuccaccgccacccucugccucggccaccacgccguccccaacggcaccaucgucaagaccaucaccaacgaccagaucgaggucaccaacgccaccgagcucguccaguccuccuccaccggcgagaucugcgacuccccccaccagaucaucgacggcgagaacugcacccucaucgacgcccuccucggcgacccccagugcgacggcuuccagaacaagaagugggaccucuucgucgagcgcuccaaggccuacuccaacugcuaccccuacgacguccccgacuacgccucccuccgcucccucgucgccuccuccggcacccucgaguucaacaacgaguccuucaacuggaccggcgucacccagaacggcaccuccuccgccugcauccgccgcuccaacaacuccuucuucucccgccucaacuggcucacccaccucaaguucaaguaccccgcccucaacgucaccaugcccaacaacgagcaguucgacaagcucuacaucuggggcguccaccaccccggcaccgacaacgaccagaucuuccucuacgcccaggccuccggccgcaucaccgucuccaccaagcgcucccagcagaccgucauccccaacaucggcucccgcccccgcguccgcaacauccccucccgcaucuccaucuacuggaccaucgucaagcccggcgacauccuccucaucaacuccaccggcaaccucaucgccccccgcggcuacuucaagauccgcuccggcaaguccuccaucaugcgcuccgacgcccccaucggcaagugcaacuccgagugcaucacccccaacggcuccauccccaacgacaagcccuuccagaacgucaaccgcaucaccuacggcgccugcccccgcuacgucaagcagaacacccucaagcucgccaccggcaugcgcaacguccccgagaagcagacccgcggcaucuucggcgccaucgccggcuucaucgagaacggcugggagggcauggucgacggcugguacggcuuccgccaccagaacuccgagggccgcggccaggccgccgaccucaaguccacccaggccgccaucgaccagaucaacggcaagcucaaccgccucaucggcaagaccaacgagaaguuccaccagaucgagaaggaguucuccgaggucgagggccgcauccaggaccucgagaaguacgucgaggacaccaagaucgaccucugguccuacaacgccgagcuccucgucgcccucgagaaccagcacaccaucgaccucaccgacuccgagaugaacaagcucuucgagaagaccaagaagcagcuccgcgagaacgccgaggacaugggcaacggcugcuucaagaucuaccacaagugcgacaacgccugcauccgcuccauccgcaacggcaccuacgaccacgacgucuaccgcgacgaggcccucaacaaccgcuuccagaucaagggcgucgagcucaaguccggcuacaaggacuggauccucuggaucuccuucgccaucuccugcuuccuccucugcuucgcccuccucggcuucaucaugugggccugccagaagggcaacauccgcugcaacaucugcaucuga

SEQ ID NO: 101531 - RNA, 1701 nt, Artificial Sequence
  derived and/or modified CDS sequence (opt2) from hemagglutinin__InfluenzaA__ADL39170
augaagaccaucaucgcccucuccuacauccucugccucgucuucgcccagaagcuccccggcaacgacaacuccaccgccacccucugccucggccaccacgccguccccaacggcaccaucgucaagaccaucaccaacgaccagaucgaggucaccaacgccaccgagcucguccaguccuccuccaccggcgagaucugcgacuccccccaccagauccucgacggcaagaacugcacccucaucgacgcccuccucggcgacccccagugcgacggcuuccagaacaagaagugggaccucuucgucgagcgcuccaaggccuacuccaacugcuaccccuacgacguccccgacuacgccucccuccgcucccucgucgccuccuccggcacccucgaguucaacaacgaguccuucaacuggaccggcgucacccagaacggcaccuccuccgccugcauccgccgcuccaagaacuccuucuucucccgccucaacuggcucacccaccucaacuucaaguaccccgcccucaacgucaccguccccaacaacgagcaguucgacaagcucuacaucuggggcguccaccaccccggcaccgacaaggaccagaucuuccucuacgcccaggccuccggccgcaucaccgucuccaccaagcgcucccagcagaccgucauccccaacaucggcucccgcccccgcguccgcaacauccccucccgcaucuccaucuacuggaccaucgucaagcccggcgacguccuccucaucaacuccaccggcaaccucaucgccccccgcggcuacuucaagauccgcuccggcaaguccuccaucaugcgcuccgacgcccccaucggcaagugcaacuccgagugcaucacccccaacggcuccauccccaacgacaagcccuuccagaacgucaaccgcaucaccuacggcgccugcccccgcuacgucaagcagaacacccucaagcucgccaccggcaugcgcaacguccccgagaagcagacccgcggcaucuucggcgccaucgccggcuucaucgagaacggcugggagggcauggucgacggcugguacggcuuccgccaccagaacuccgagggccgcggccaggccgccgaccucaaguccacccaggccgccaucgaccagaucaacggcaagcucaaccgccucaucggcaagaccaacgagaaguuccaccagaucgagaaggaguucuccgaggucgagggccgcauccaggaccucgagaaguacgucgaggacaccaagaucgaccucugguccuacaacgccgagcuccucgucgcccucgagaaccagcacaccaucgaccucaccgacuccgagaugaacaagcucuucgagaagaccaagaagcagcuccgcgagaacgccgaggacaugggcaacggcugcuucaagaucuaccacaagugcgacaacgccugcaucggcuccauccgcaacggcaccuacgaccacgacgucuaccgcgacgaggcccucaacaaccgcuuccagaucaagggcgucgagcucaaguccggcuacaaggacuggauccucuggaucuccuucgccaucuccugcuuccuccucugcgucgcccuccucggcuucaucaugugggccugccagaagggcaacauccgcugcaacaucugcaucuga

SEQ ID NO: 101532 - RNA, 1701 nt, Artificial Sequence; identical to SEQ ID NO: 99649
  derived and/or modified CDS sequence (opt2) from hemagglutinin__InfluenzaA__ADL39203

SEQ ID NO: 101533 - RNA, 1701 nt, Artificial Sequence; identical to SEQ ID NO: 98470
  derived and/or modified CDS sequence (opt2) from hemagglutinin__InfluenzaA__ADL39214

SEQ ID NO: 101534 - RNA, 1698 nt, Artificial Sequence
  derived and/or modified CDS sequence (opt2) from hemagglutinin__InfluenzaA__ADL39225
augaaggucaagcuccucguccuccucugcaccuucaccgccaccuacgccgacaccaucugcaucggcuaccacgccaacaacuccaccgacaccgucgacaccguccucgagaagaacgucaccgucacccacuccgucaaccuccucgagaacucccacaacggcaagcucugccuccucaagggcaucgccccccuccagcucggcaacugcuccgucgccggcuggauccucggcaaccccgagugcgagcuccucaucuccaaggaguccugguccuacaucgucgagaagcccaaccccgagaacggcaccugcuaccccggcuacuucgccgacuacgaggagcuccgcgagcagcucuccuccgucuccuccuucgagcgcuucgagaucuuccccaaggaguccuccuggcccaaccacaccgucaccggcgccuccgccuccugcucccacaacggcgagaacuccuucuaccgcaaccuccucuggcucaccggcaagaacggccucuaccccaaccucuccaaguccuacgccaacaacaaggagaaggagguccucguccucuggggcguccaccacccccccaacaucgccgaccagaagacccucuaccacaccgagaacgccuacgucuccgucgucuccucccacuacucccgcaaguucacccccgagaucgccaagcgccccaagguccgcgaccaggagggccgcaucaacuacuacuggacccuccucgagcccggcgacaccaucaucuucgaggccaacggcaaccucaucgccccccgcuacgccuucgcccucucccgcggcuucggcuccggcaucaucaacuccaacgcccccauggacaagugcgacgccaagugccagaccccccagggcgccaucaacuccucccuccccuuccagaacguccaccccgucaccaucggcgagugccccaaguacguccgcuccgccaagcuccgcauggucaccggccuccgcaacauccccuccauccagucccgcggccucuucggcgccaucgccggcuucaucgagggcggcuggaccggcauggucgacggcugguacggcuaccaccaccagaacgagcagggcuccggcuacgccgccgaccagaaguccacccagaacgccaucaacggcaucaccaacaaggucaacuccgucaucgagaagaugaacacccaguucaccgccgucggcaaggaguucaacaagcucgagcgccgcauggagaaccucaacaagaaggucgacgacggcuucaucgacaucuggaccuacaacgccgagcuccucguccuccucgagaacgagcgcacccucgacuuccacgacuccaacgucaagaaccucuacgagaaggucaagucccagcucaagaacaacgccaaggagaucggcaacggcugcuucgaguucuaccacaagugcaacgacgagugcauggaguccgucaagaacggcaccuacgacuaccccaaguacuccgaggaguccaagcucaaccgcgagaagaucgacggcgucaagcucgaguccaugggcgucuaccagauccucgccaucuacuccaccgucgccuccucccucguccuccucgucucccucggcgccaucuccuucuggaugugcuccaacggcucccuccagugccgcaucugcaucuga

SEQ ID NO: 101535 - RNA, 1698 nt, Artificial Sequence
  derived and/or modified CDS sequence (opt2) from hemagglutinin__InfluenzaA__ADL39236
augaaggucaagcuccucguccuccucugcaccuucaccgccaccuacgccgacaccaucugcaucggcuaccacgccaacaacuccaccgacaccgucgacaccguccucgagaagaacgucaccgucacccacuccgucaaccuccucgagaacucccacaacggcaagcucugccuccucaagggcaucgccccccuccagcucggcaacugcuccgucgccggcuggauccucggcaaccccgagugcgagcuccucaucuccaaggaguccugguccuacaucgucgagaagcccaaccccgagaacggcaccugcuaccccggcuacuucgccgacuacgaggagcuccgcgagcagcucuccuccgucuccuccuucgagcgcuucgagaucuuccccaaggaguccuccuggcccaaccacaccgucaccggcgucuccgccuccugcucccacaacggcgaguccuccuucuaccgcaaccuccucuggcucaccggcaagaacggccucuaccccaaccucuccaaguccuacaccaacaacaaggagaaggagguccucguccucuggggcguccaccacccccccaacaucgucgaccagaagacccucuaccgcaccgagaacgccuacgucuccgucgucuccucccacuacucccgcaaguucacccccgagaucgccaagcgccccaagguccgcgaccaggagggccgcaucaacuacuacuggacccuccucgagcccggcgacaccaucaucuucgaggccaacggcaaccucaucgccccccgcuacgccuucgcccucucccgcggcuucggcuccggcaucaucaacuccaacgcccccaugggcaagugcgacgccaagugccagaccccccagggcgccaucaacuccucccuccccuuccagaacguccaccccgucaccaucggcgagugccccaaguacguccgcuccgccaagcuccgcauggucaccggccuccgcaacauccccuccauccagucccgcggccucuucggcgccaucgccggcuucaucgagggcggcuggaccggcauggucgacggcugguacggcuaccaccaccagaacgagcagggcuccggcuacgccgccgaccagaaguccacccagaacgccaucaacggcaucaccaacaaggucaacuccgucaucgagaagaugaacacccaguucaccgccgucggcaaggaguucaacaagcucgagcgccgcauggagaaccucaacaagaaggucgacgacggcuucaucgacaucuggaccuacaacgccgagcuccucguccuccucgagaacgagcgcacccucgacuuccacgacuccaacgucaagaaccucuacgagaaggucaagucccagcucaagaacaacgccaaggagaucggcaacggcugcuucgaguucuaccacaagugcaacgacgagugcauggaguccgucaagaacggcaccuacgacuaccccaaguacuccgaggaguccaagcucaaccgcgagaagaucgacggcgucaagcucgaguccaugggcgucuaccagauccucgccaucuacuccaccgucgccuccucccucguccuccucgucucccucggcgccaucuccuucuggaugugcuccaacggcucccuccagugccgcaucugcaucuga

SEQ ID NO: 101536 - RNA, 1701 nt, Artificial Sequence
  derived and/or modified CDS sequence (opt2) from hemagglutinin__InfluenzaA__ADL39280
augaagaccaucaucgcccucuccuacauccucugccucgucuucgcccagaagcuccccggcaacgacaacuccaccgccacccucugccucggccaccacgccguccccaacggcaccaucgucaagaccaucaccaacgaccagaucgaggucaccaacgccaccgagcucguccaguccuccuccaccggcgagaucugcgacuccccccaccagauccucgacggcgagaacugcacccucaucgacgcccuccucggcgacccccagugcgacggcuuccagaacaagaagugggaccucuucgucgagcgcuccaaggccuacuccaacugcuaccccuacgacguccccgacuacgccucccuccgcucccucgucgccuccuccggcacccucgaguucaacaacgaguccuucaacuggaccggcgucacccagaacggcaccuccuccgccugcauccgccgcuccaacaacuccuucuucucccgccucaacuggcucacccaccuccgcuucaaguaccccgcccucaacgucaccaugcccaacaacgagcaguucgacaagcucuacaucuggggcguccaccaccccggcaccgacaacgaccagaucuuccucuacgcccaggccuccggccgcaucaccgucuccaccaagcgcucccagcagaccgucauccccaacaucggcucccgcccccgcguccgcaacauccccucccgcaucuccaucuacuggaccaucgucaagcccggcgacauccuccucaucaacuccaccggcaaccucaucgccccccgcggcuacuucaagauccgcuccggcaaguccuccaucaugcgcuccgacgcccccaucggcaagugcaacuccgagugcaucacccccaacggcuccauccccaacgacaagcccuuccagaacgucaaccgcaucaccuacggcgccugcccccgcuacgucaagcagaacacccucaagcucgccaccggcaugcgcaacguccccgagaagcagacccgcggcaucuucggcgccaucgccggcuucaucgagaacggcugggagggcauggucgacggcugguacggcuuccgccaccagaacuccgagggccgcggccaggccgccgaccucaaguccacccaggccgccaucgaccagaucaacggcaagcucaaccgccucaucggcaagaccaacgagaaguuccaccagaucgagaaggaguucuccgaggucgagggccgcauccaggaccucgagaaguacgucgaggacaccaagaucgaccucugguccuacaacgccgagcuccucgucgcccucgagaaccagcacaccaucgaccucaccgacuccgagaugaacaagcucuucgagaagaccaagaagcagcuccgcgagaacgccgaggacaugggcaacggcugcuucaagaucuaccacaagugcgacaacgccugcaucggcuccauccgcaacggcaccuacgaccacgacgucuaccgcgacgaggcccucaacaaccgcuuccagaucaagggcgucgagcucaaguccggcuacaaggacuggauccucuggaucuccuucgccaucuccugcuuccuccucugcgucgcccuccucggcuucaucaugugggccugccagaagggcaacauccgcugcaacaucugcaucuga

SEQ ID NO: 101537 - RNA, 1698 nt, Artificial Sequence
  derived and/or modified CDS sequence (opt2) from hemagglutinin__InfluenzaA__ADL39291
augaaggucaagcuccucguccuccucugcaccuucaccgccaccuacgccgacaccaucugcaucggcuaccacgccaacaacuccaccgacaccgucgacaccguccucgagaagaacgucaccgucacccacuccgucaaccuccucgagaacucccacaacggcaagcucugccuccucaagggcaucgccccccuccagcucggcaacugcuccgucgccggcuggauccucggcaaccccgagugcgagcuccucaucuccaaggaguccugguccuacaucgucgagaagcccaaccccgagaacggcaccugcuaccccggccacuucgccgacuacgaggagcuccgcgagcagcucuccuccgucuccuccuucgagcgcuucgagaucuuccccaaggaguccuccuggcccaaccacaccgucaccggcgucuccgccuccugcucccacaacggcgaguccuccuucuaccgcaaccuccucuggcucaccgagaagaacggccucuaccccaaccucuccaaguccuacgccaacaacaaggagaaggagguccucguccucuggggcguccaccacccccccaacaugggcgaccagaagacccucuaccacaccgagaacgccuacgucuccgucgucuccucccacuacucccgcaaguucacccccgagaucgccaagcgccccaagguccgcgaccaggagggccgcaucaacuacuacuggacccuccucgagcccggcgacaccaucaucuucgaggccaacggcaaccucaucgccccccgcuacgccuucgcccucucccgcggcuucggcuccggcaucaucaacuccaacgcccccauggacaagugcgacgccaagugccagaccccccagggcgccaucaacuccucccuccccuuccagaacguccaccccgucaccaucggcgagugccccaaguacguccgcuccgccaagcuccgcauggucaccggccuccgcaacauccccuccauccagucccgcggccucuucggcgccaucgccggcuucaucgagggcggcuggaccggcauggucgacggcugguacggcuaccaccaccagaacgagcagggcuccggcuacgccgccgaccagaaguccacccagaacgccaucaacggcaucaccaacaaggucaacuccgucaucgagaagaugaacacccaguucaccgccgucggcaaggaguucaacaagcucgagcgccgcauggagaaccucaacaagaaggucgacgacggcuucaucgacaucuggaccuacaacgccgagcuccucguccuccucgagaacgagcgcacccucgacuuccacgacuccaacgucaagaaccucuacgagaaggucaagucccagcucaagaacaacgccaaggagaucggcaacggcugcuucgaguucuaccacaagugcaacgacgagugcauggaguccgucaagaacggcaccuacgacuaccccaaguacuccgaggaguccaagcucaaccgcgagaagaucgacggcgucaagcucgaguccaugggcgucuaccagauccucgccaucuacuccaccgucgccuccucccucguccuccucgucucccucggcgccaucuccuucuggaugugcuccaacggcucccuccagugccgcaucugcaucuga

SEQ ID NO: 101538 - RNA, 1701 nt, Artificial Sequence; identical to SEQ ID NO: 98470
  derived and/or modified CDS sequence (opt2) from hemagglutinin__InfluenzaA__ADL39302

SEQ ID NO: 101539 - RNA, 1701 nt, Artificial Sequence; identical to SEQ ID NO: 101536
  derived and/or modified CDS sequence (opt2) from hemagglutinin__InfluenzaA__ADL39313

SEQ ID NO: 101540 - RNA, 1701 nt, Artificial Sequence
  derived and/or modified CDS sequence (opt2) from hemagglutinin__InfluenzaA__ADL39335
augaagaccaucaucgcccucuccuacauccucugccucgucuucgcccagaagcuccccggcaacgacaacuccaccgccacccucugccucggccaccacgccguccccaacggcaccaucgucaagaccaucaccaacgaccagaucgaggucaccaacgccaccgagcucguccaguccuccuccaccggcgagaucugcgacuccccccaccagauccucgacggcgagaacugcacccucaucgacgcccuccucggcgacccccagugcgacggcuuccagaacaagaagugggaccucuucgucgagcgcuccaaggccuacuccaacugcuaccccuacgacguccccgacuacgccucccuccgcucccucgucgccuccuccggcacccucgaguucaacaacgaguccuucaacuggaccggcgucacccagaacggcaccuccuccgccugcauccgccgcuccaacaacuccuucuucucccgccucaacuggcucacccaccuccgcuucaaguaccccgcccucaacgucaccaugcccaacaacgagcaguucgacaagcucuacaucuggggcguccaccaccccggcaccgacaacgaccagaucuuccucuacgcccaggccuccggccgcaucaccgucuccaccaagcgcucccagcagaccgucauccccaacaucggcucccgcccccgcguccgcaacauccccucccgcaucuccaucuacuggaccaucgucaagcccggcgacauccuccucaucaacuccaccggcaaccucaucgccccccgcggcuacuucaagauccgcuccggcaaguccuccaucaugcgcuccgacgcccccaucggcaagugcaacuccgagugcaucacccccaacggcuccauccccaacgacaagcccuuccagaacgucaaccgcaucaccuacggcgccugcccccgcuacgucaagcagaacacccucaagcucgccaccggcaugcgcaacguccccgagaagcagacccgcggcaucuucggcgccaucgccggcuucaucgagaacggcugggagggcauggucgacggcugguacggcuuccgccaccagaacuccgagggccgcggccaggccgccgaccucaaguccacccaggccgccaucgaccagaucaacggcaagcucaaccgccucaucggcaagaccaacgagaaguuccaccagaucgagaaggaguucuccgaggucgagggccgcauccaggaccucgagaaguacgucgaggacaccaagaucgaccucugguccuacaacgccgagcuccucgucgcccucgagaaccagcacaccauccaccucaccgacuccgagaugaacaagcucuucgagaagaccaagaagcagcuccgcgagaacgccgaggacaugggcaacggcugcuucaagaucuaccacaagugcgacaacgccugcaucggcuccauccgcaacggcaccuacgaccacgacgucuaccgcgacgaggcccucaacaaccgcuuccagaucaagggcgucgagcucaaguccggcuacaaggacuggauccucuggaucuccuucgccaucuccugcuuccuccucugcgucgcccuccucggcuucaucaugugggccugccagaagggcaacauccgcugcaacaucugcaucuga

SEQ ID NO: 101541 - RNA, 1701 nt, Artificial Sequence; identical to SEQ ID NO: 98470
  derived and/or modified CDS sequence (opt2) from hemagglutinin__InfluenzaA__ADL39368

SEQ ID NO: 101542 - RNA, 1698 nt, Artificial Sequence
  derived and/or modified CDS sequence (opt2) from hemagglutinin__InfluenzaA__ADL39390
augaaggucaagcuccucguccuccucugcaccuucaccgccaccuacgccgacaccaucugcaucggcuaccacgccaacaacuccaccgacaccgucgacaccguccucgagaagaacgucaccgucacccacuccgucaaccuccucgagaacucccacaacggcaagcucugccuccucaagggcaucgccccccuccagcucggcaacugcuccgucgccggcuggauccucggcaaccccgagugcgagcuccucaucuccaaggaguccugguccuacaucgucgagaagcccaaccccgagaacggcaccugcuaccccggccacuucgccgacuacgaggagcuccgcgagcagcucuccuccgucuccuccuucgagcgcuucgagaucuuccccaaggaguccuccuggcccaaccacaccgucaccggcgucuccgccuccugcucccacaacggcgaguccuccuucuaccgcaaccuccucuggcucaccggcaagaacggccucuaccccucccucuccaaguccuacgccaacaacaaggagaaggagguccucguccucuggggcguccaccacccccccaacaucgucgaccagaagacccucuaccgcaccgagaacgccuacgucuccgucgucuccucccacuacucccgcaaguucacccccgagaucgccaagcgccccaagguccgcgaccaggagggccgcaucaacuacuacuggacccuccucgagcccggcgacaccaucaucuucgaggccaacggcaaccucaucgccccccgcuacgccuucgcccucucccgcggcuucggcuccggcaucaucaacuccaacgcccccaugggcaagugcgacgccaagugccagaccccccagggcgccaucaacuccucccuccccuuccagaacguccaccccgucaccaucggcgagugccccaaguacguccgcuccgccaagcuccgcauggucaccggccuccgcaacauccccuccauccagucccgcggccucuucggcgccaucgccggcuucaucgagggcggcuggaccggcauggucgacggcugguacggcuaccaccaccagaacgagcagggcuccggcuacgccgccgaccagaaguccacccagaacgccaucaacggcaucaccaacaaggucaacuccgucaucgagaagaugaacacccaguucaccgccgucggcaaggaguucaacaagcucgagcgccgcauggagaaccucaacaagaaggucgacgacggcuucaucgacaucuggaccuacaacgccgagcuccucguccuccucgagaacgagcgcacccucgacuuccacgacuccaacgucaagaaccucuacgagaaggucaagucccagcucaagaacaacgccaaggagaucggcaacggcugcuucgaguucuaccacaagugcaacgacgagugcauggaguccgucaagaacggcaccuacgacuaccccaaguacuccgaggaguccaagcucaaccgcgagaagaucgacggcgucaagcucgaguccaugggcgucuaccagauccucgccaucuacuccaccgucgccuccucccucguccuccucgucucccucggcgccaucuccuucuggaugugcuccaacggcucccuccagugccgcaucugcaucuga

SEQ ID NO: 101543 - RNA, 1701 nt, Artificial Sequence
  derived and/or modified CDS sequence (opt2) from hemagglutinin__InfluenzaA__ADL39401
augaagaccaucaucgcccucuccuacauccucugccucgucuucgcccagaagcuccccggcaacgacaacuccaccgccacccucugccucggccaccacgccguccccaacggcaccaucgucaagaccaucaccaacgaccagaucgaggucaccaacgccaccgagcucguccaguccuccuccaccggcgagaucugcgacuccccccaccagauccucgacggcgagaacugcacccucaucgacgcccuccucggcgacccccagugcgacggcuuccagaacaagaagugggaccucuucgucgagcgcuccaaggccuacuccaacugcuaccccuacgacguccccgacuacgccucccuccgcucccucgucgccuccuccggcacccucgaguucaacaacgaguccuucaacuggaccggcgucacccagaacggcaccuccuccuccugcaugcgccgcuccaacaacuccuucuucucccgccucaacuggcucacccaccucaaguucaaguaccccgcccucaacgucaccaugcccaacaacgagcaguucgacaagcucuacaucuggggcguccaccaccccggcaccgacaacgaccagaucuuccucuacgcccaggccuccggccgcaucaccgucuccaccaagcgcucccagcagaccgucauccccaacaucggcucccgcccccgcguccgcaacauccccucccgcaucuccaucuacuggaccaucgucaagcccggcgacauccuccucaucaacuccaccggcaaccucaucgccccccgcggcuacuucaagauccgcuccggcaaguccuccaucaugcgcuccgacgcccccaucggcaagugcaacuccgagugcaucacccccaacggcuccauccccaacgacaagcccuuccagaacgucaaccgcaucaccuacggcgccugcccccgcuacgucaagcagaacacccucaagcucgccaccggcaugcgcaacguccccgagaagcagacccgcggcaucuucggcgccaucgccggcuucaucgagaacggcugggagggcauggucgacggcugguacggcuuccgccaccagaacuccgagggccgcggccaggccgccgaccucaaguccacccaggccgccaucgaccagaucaacggcaagcucaaccgccucaucggcaagaccaacgagaaguuccaccagaucgagaaggaguucuccgaggucgagggccgcauccaggaccucgagaaguacgucgaggacaccaagaucgaccucugguccuacaacgccgagcuccucgucgcccucgagaaccagcacaccaucgaccucaccgacuccgagaugaacaagcucuucgagaagaccaagaagcagcuccgcgagaacgccgaggacaugggcaacggcugcuucaagaucuaccacaagugcgacaacgccugcaucggcuccauccgcaacggcaccuacgaccacgacgucuaccgcgacgaggcccucaacaaccgcuuccagaucaagggcgucgagcucaaguccggcuacaaggacuggauccucuggaucuccuucgccaucuccugcuuccuccucugcgucgcccuccucggcuucaucaugugggccugccagaagggcaacauccgcugcaacaucugcaucuga

SEQ ID NO: 101544 - RNA, 1701 nt, Artificial Sequence
  derived and/or modified CDS sequence (opt2) from hemagglutinin__InfluenzaA__ADL39412
augaagaccaucaucgcccucuccuacauccucugccucgucuucgcccagaagcuccccggcaacgacaacuccaccgccacccucugccucggccaccacgccguccccaacggcaccaucgucaagaccaucaccaacgaccagaucgaggucaccaacgccaccgagcucguccaguccuccuccaccggcgagaucugcgacuccccccaccagauccucgacggcgagaacugcacccucaucgacgcccuccucggcgacccccagugcgacggcuuccagaacaagaagugggaccucuucgucgagcgcuccaaggccuacuccaacugcuaccccuacgacguccccgacuacgccucccuccgcucccucgucgccuccuccggcacccucgaguucaacaacgaguccuucaacuggaccggcgucacccagaacggcaccuccuccgccugcauccgccgcuccaacaacuccuucuucucccgccucaacuggcucacccaccucaaguucaaguaccccgcccucaacgucaccaugcccaacaacgagcaguucgacaagcucuacaucuggggcguccaccaccccggcaccgacaacgaccagaucuuccucuacgcccaggccuccggccgcaucaccgucuccaccaagcgcucccagcagaccgucauccccaacaucggcucccgcccccgcguccgcaacauccccucccgcaucuccaucuacuggaccaucgucaagcccggcgacauccuccucaucaacuccaccggcaaccucaucgccccccgcggcuacuucaagauccgcuccgagaaguccuccaucaugcgcuccgacgcccccaucggcaagugcaacuccgagugcaucacccccaacggcuccauccccaacgacaagcccuuccagaacgucaaccgcaucaccuacggcgccugcccccgcuacgucaagcagaacacccucaagcucgccaccggcaugcgcaacguccccgagaagcagacccgcggcaucuucggcgccaucgccggcuucaucgagaacggcugggagggcauggucgacggcugguacggcuuccgccaccagaacuccgagggccgcggccaggccgccgaccucaaguccacccaggccgccaucgaccagaucaacggcaagcucaaccgccucaucggcaagaccaacgagaaguuccaccagaucgagaaggaguucuccgaggucgagggccgcauccaggaccucgagaaguacgucgaggacaccaagaucgaccucugguccuacaacgccgagcuccucgucgcccucgagaaccagcacaccaucgaccucaccgacuccgagaugaacaagcucuucgagaagaccaagaagcagcuccgcgagaacgccgaggacaugggcaacggcugcuucaagaucuaccacaagugcgacaacgccugcaucggcuccauccgcaacggcaccuacgaccacgacgucuaccgcgacgaggcccucaacaaccgcuuccagaucaagggcgucgagcucaaguccggcuacaaggacuggauccucuggaucuccuucgccaucuccugcuuccuccucugcgucgcccuccucggcuucaucaugugggccugccagaagggcaacauccgcugcaacaucugcaucuga

SEQ ID NO: 101545 - RNA, 1698 nt, Artificial Sequence
  derived and/or modified CDS sequence (opt2) from hemagglutinin__InfluenzaA__ADL39423
augaaggucaagcuccucguccuccucugcaccuucaccgccaccuacgccgacaccaucugcaucggcuaccacgccaacaacuccaccgacaccgucgacaccguccucgagaagaacgucaccgucacccacuccgucaaccuccucgagaacucccacaacggcaagcucugccuccucaagggcaucgccccccuccagcucggcaacugcuccgucgccggcuggauccucggcaaccccgagugcgagcuccucaucuccaaggaguccugguccuacaucgucgagaagcccaaccccgagaacggcaccugcuaccccggccacuucgccgacuacgaggagcuccgcgagcagcucuccuccgucuccuccuucgagcgcuucgagaucuuccccaaggaguccuccuggcccucccacaccgucaccggcgucuccgccuccugcucccacaacggcgagaacuccuucuaccgcaaccuccucuggcucaccggcaagaacggccucuaccccaaccucuccaaguccuacgccaacaacaaggagaaggagguccucguccucuggggcguccaccacccccccaacaucgccgaccagaagacccucuaccacaccgagaacgccuacgucuccgucgucuccucccacuacucccgcaaguucacccccgagaucgccaagcgccccaagguccgcgaccaggagggccgcaucaacuacuacuggacccuccucgagcccggcgacaccaucaucuucgaggccaacggcaaccucaucgccccccgcuacgccuucgcccucucccgcggcuucggcuccggcaucaucaacuccaacgcccccauggacaagugcgacgccaagugccagaccccccagggcgccaucaacuccucccuccccuuccagaacguccaccccgucaccaucggcgagugccccaaguacguccgcuccgccaagcuccgcauggucaccggccuccgcaacauccccuccauccagucccgcggccucuucggcgccaucgccggcuucaucgagggcggcuggaccggcauggucgacggcugguacggcuaccaccaccagaacgagcagggcuccggcuacgccgccgaccagaaguccacccagaacgccaucaacggcaucaccaacaaggucaacuccgucaucgagaagaugaacacccaguucaccgccgucggcaaggaguucaacaagcucgagcgccgcauggagaaccucaacaagaaggucgacgacggcuucaucgacaucuggaccuacaacgccgagcuccucguccuccucgagaacgagcgcacccucgacuuccacgacuccaacgucaagaaccucuacgagaaggucaagaaccagcucaagaacaacgccaaggagaucggcaacggcugcuucgaguucuaccacaagugcaacgacgagugcauggaguccgucaagaacggcaccuacgacuaccccaaguacuccgaggaguccaagcucaaccgcgagaagaucgacggcgucaagcucgaguccaugggcgucuaccagauccucgccaucuacuccaccgucgccuccucccucguccuccucgucucccucggcgccaucuccuucuggaugugcuccaacggcucccuccagugccgcaucugcaucuga

SEQ ID NO: 101546 - RNA, 1701 nt, Artificial Sequence
  derived and/or modified CDS sequence (opt2) from hemagglutinin__InfluenzaA__ADL39434
augaagaccaucaucgcccucuccuacauccucugccucgucuucgcccagaagcuccccggcaacgacaacuccaccgccacccucugccucggccaccacgccguccccaacggcaccaucgucaagaccaucaccaacgaccagaucgaggucaccaacgccaccgagcucguccaguccuccuccaccggcgagaucugcgacuccccccaccagauccucgacggcgagaacugcacccucaucgacgcccuccucggcgacccccagugcgacggcuuccagaacaagaagugggaccucuucgucgagcgcuccaaggccuacuccaacugcuaccccuacgacguccccgacuacgccucccuccgcucccucgucgccuccuccggcacccucgaguucaacaacgaguccuucaacuggaccggcgucacccagaacggcaccuccuccgccugcauccgccgcuccaacaacuccuucuucucccgccucaacuggcucacccaccuccgcuucaaguaccccgcccucaacgucaccaugcccaacaacgagcaguucgacaagcucuacaucuggggcguccaccaccccggcaccgacaacgaccagaucuuccucuacgcccaggccuccggccgcaucaccgucuccaccaagcgcucccagcagaccgucauccccaacaucggcucccgcccccgcguccgcgacauccccucccgcaucuccaucuacuggaccaucgucaagcccggcgacauccuccucaucaacuccaccggcaaccucaucgccccccgcggcuacuucaagauccgcuccggcaaguccuccaucaugcgcuccgacgcccccaucggcaagugcaacuccgagugcaucacccccaacggcuccauccccaacgacaagcccuuccagaacgucaaccgcaucaccuacggcgccugcccccgcuacgucaagcagaacacccucaagcucgccaccggcaugcgcaacguccccgagaagcagacccgcggcaucuucggcgccaucgccggcuucaucgagaacggcugggagggcauggucgacggcugguacggcuuccgccaccagaacuccgagggccgcggccaggccgccgaccucaaguccacccaggccgccaucgaccagaucaacggcaagcucaaccgccucaucggcaagaccaacgagaaguuccaccagaucgagaaggaguucuccgaggucgagggccgcauccaggaccucgagaaguacgucgaggacaccaagaucgaccucugguccuacaacgccgagcuccucgucgcccucgagaaccagcacaccaucgaccucaccgacuccgagaugaacaagcucuucgagaagaccaagaagcagcuccgcgagaacgccgaggacaugggcaacggcugcuucaagaucuaccacaagugcgacaacgccugcaucggcuccauccgcaacggcaccuacgaccacgacgucuaccgcgacgaggcccucaacaaccgcuuccagaucaagggcgucgagcucaaguccggcuacaaggacuggauccucuggaucuccuucgccaucuccugcuuccuccucugcgucgcccuccucggcuucaucaugugggccugccagaagggcaacauccgcugcaacaucugcaucuga

SEQ ID NO: 101547 - RNA, 1698 nt, Artificial Sequence
  derived and/or modified CDS sequence (opt2) from hemagglutinin__InfluenzaA__ADL39445
augaaggucaagcuccucguccuccucugcaccuucaccgccaccuacgccgacaccaucugcaucggcuaccacgccaacaacuccaccgacaccgucgacaccguccucgagaagaacgucaccgucacccacuccgucaaccuccucgagaacucccacaacggcaagcucugccuccucaagggcaucgccccccuccagcucggcaacugcuccgucgccggcuggauccucggcaaccccgagugcgagcuccucaucuccaaggaguccugguccuacaucgucgagaagcccaaccccgagaacggcaccugcuaccccggccacuucgccgacuacgaggagcuccgcgagcagcucuccuccgucuccuccuucgagcgcuucgagaucuuccccaaggaguccuccuggcccaaccacaccgucaccggcgucuccgccuccugcucccacaacggcgaguccuccuucuaccgcaaccuccucuggcucaccggcaagaacggccucuaccccacccucuccaaguccuacgccaacaacaaggagaaggagguccucguccucuggggcguccaccacccccccaacaucgucgaccagaagacccucuaccgcaccgagaacgccuacgucuccgucgucuccucccacuacucccgcaaguucacccccgagaucgccaagcgccccaagguccgcgaccaggagggccgcaucaacuacuacuggacccuccucgagcccggcgacaccaucaucuucgaggccaacggcaaccucaucgccccccgcuacgccuucgcccucucccgcggcuucggcuccggcaucaucaacuccaacgcccccauggacaagugcgacgccaagugccagaccccccagggcgccaucaacuccucccuccccuuccagaacguccaccccgucaccaucggcgagugccccaaguacguccgcuccgccaagcuccgcauggucaccggccuccgcaacauccccuccauccagucccgcggccucuucggcgccaucgccggcuucaucgagggcggcuggaccggcauggucgacggcugguacggcuaccaccaccagaacgagcagggcuccggcuacgccgccgaccagaaguccacccagaacgccaucaacggcaucaccaacaaggucaacuccgucaucgagaagaugaacacccaguucaccgccgucggcaaggaguucaacaagcucgagcgccgcauggagaaccucaacaagaaggucgacgacggcuucaucgacaucuggaccuacaacgccgagcuccucguccuccucgagaacgagcgcacccucgacuuccacgacuccaacgucaagaaccucuacgagaaggucaagucccagcucaagaacaacgccaaggagaucggcaacggcugcuucgaguucuaccacaagugcaacgacgagugcauggaguccgucaagaacggcaccuacgacuaccccaaguacuccgaggaguccaagcucaaccgcgagaagaucgacggcgucaagcucgaguccaugggcgucuaccagauccucgccaucuacuccaccgucgccuccucccucguccuccucgucucccucggcgccaucuccuucuggaugugcuccaacggcucccuccagugccgcaucugcaucuga

SEQ ID NO: 101548 - RNA, 1698 nt, Artificial Sequence
  derived and/or modified CDS sequence (opt2) from hemagglutinin__InfluenzaA__ADL39456
augaaggucaagcuccucguccuccucugcaccuucaccgccaccuacgccgacaccaucugcaucggcuaccacgccaacaacuccaccgacaccgucgacaccguccucgagaagaacgucaccgucacccacuccgucaaccuccucgagaacucccacaacggcaagcucugccuccucaagggcaucgccccccuccagcucggcaacugcuccgucgccggcuggauccucggcaaccccgagugcgagcuccucaucuccaaggaguccugguccuacaucgucgagaagcccaaccccgagaacggcaccugcuaccccggccacuucgccgacuacgaggagcuccgcgagcagcucuccuccgucuccuccuucgagcgcuucgagaucuuccccaaggaguccuccuggcccucccacaccgucaccggcgucuccgccuccugcucccacaacggcgagaacuccuucuaccgcaaccuccucuggcucaccggcaagaacggccucuaccccaaccucuccaaguccuacgccaacaacaaggagaaggagguccucguccucuggggcguccaccacccccccaacaucgccgaccagaagacccucuaccacaccgagaacgccuacgucuccgucgucuccucccacuacucccgcaaguucacccccgagaucgccaagcgccccaagguccgcgaccaggagggccgcaucaacuacuacuggacccuccucgagcccggcgacaccaucaucuucgaggccaacggcaaccucaucgccccccgcuacgccuucgcccucucccgcggcuucggcuccggcaucaucaacuccaacgcccccauggacaagugcgacgccaagugccagaccccccagggcgccaucaacuccucccuccccuuccagaacguccaccccgucaccaucggcgagugccccaaguacguccgcuccgccaagcuccgcauggucaccggccuccgcaacauccccuccauccagucccgcggccucuucggcgccaucgccggcuucaucgagggcggcuggaccggcauggucgacggcugguacggcuaccaccaccagaacgagcagggcuccggcuacgccgccgaccagaaguccacccagaacgccaucaacggcaucaccaacaaggucaacuccgucaucgagaagaugaacacccaguucaccgccgucggcaaggaguucaacaagcucgagcgccgcauggagaaccucaacaagaaggucgacgacggcuucaucgacaucuggaccuacaacgccgagcuccucguccuccucgagaacgagcgcacccucgacuuccacgacuccaacgucaagaaccucuacgagaaggucaagucccagcucaagaacaacgccaaggagaucggcaacggcugcuucgaguucuaccacaagugcaacgacgagugcauggaguccgucaagaacggcaccuacgacuaccccaaguacuccgaggaguccaagcucaaccgcgagaagaucgacggcgucaagcucgaguccaugggcgucuaccagauccucgccaucuacuccaccgucgccuccucccucguccuccucgucucccucggcgccaucuccuucuggaugugcuccaacggcucccuccagugccgcaucugcaucuga

SEQ ID NO: 101549 - RNA, 1698 nt, Artificial Sequence
  derived and/or modified CDS sequence (opt2) from hemagglutinin__InfluenzaA__ADL39467
augaaggucaagcuccucguccuccucugcaccuucaccgccaccuacgccgacaccaucugcaucggcuaccacgccaacaacuccaccgacaccgucgacaccguccucgagaagaacgucaccgucacccacuccgucaaccuccucgagaacucccacaacggcaagcucugccuccucaagggcaucgccccccuccagcucggcaacugcuccgucgccggcuggauccucggcaaccccgagugcgagcuccucaucuccaaggaguccugguccuacaucgucgagaagcccaaccccgagaacggcaccugcuaccccggccacuucgccgacuacgaggagcuccgcgagcagcucuccuccgucuccuccuucgagcgcuucgagaucuuccccaaggaguccuccuggcccaaccacaccgucaccggcgucuccgccuccugcucccacaacggcgaguccuccuucuaccgcaaccuccucuggcucaccggcaagaacggccucuaccccaaccucuccaaguccuacgccaacaacaaggagaaggagguccucguccucuggggcguccaccacccccccaacaucgucgaccagaagacccucuaccgcaccgagaacgccuacgucuccgucgucuccucccacuacucccgcaaguucacccccgagaucgccaagcgccccaagguccgcgaccaggagggccgcaucaacuacuacuggacccuccucgagcccggcgacaccaucaucuucgaggccaacggcaaccucaucgccccccgcuacgccuucgcccucucccgcggcuucggcuccggcaucaucaacuccaacgcccccaugggcaagugcgacgccaagugccagaccccccagggcgccaucaacuccucccuccccuuccagaacguccaccccgucaccaucggcgagugccccaaguacguccgcuccgccaagcuccgcauggucaccggccuccgcaacauccccuccauccagucccgcggccucuucggcgccaucgccggcuucaucgagggcggcuggaccggcauggucgacggcugguacggcuaccaccaccagaacgagcagggcuccggcuacgccgccgaccagaaguccacccagaacgccaucaacggcaucaccaacaaggucaacuccgucaucgagaagaugaacacccaguucaccgccgucggcaaggaguucaacaagcucgagcgccgcauggagaaccucaacaagaaggucgacgacggcuucaucgacaucuggaccuacaacgccgagcuccucguccuccucgagaacgagcgcacccucgacuuccacgacuccaacgucaagaaccucuacgagaaggucaagucccagcucaagaacaacgccaaggagaucggcaacggcugcuucgaguucuaccacaagugcaacgacgagugcauggaguccgucaagaacggcaccuacgacuaccccaaguacuccgaggaguccaagcucaaccgcgagaagaucgacggcgucaagcucgaguccaugggcgucuaccagauccucgccaucuacuccaccgucgccuccucccucguccuccucgucucccucggcgccaucuccuucuggaugugcuccaacggcucccuccagugccgcaucugcaucuga

SEQ ID NO: 101550 - RNA, 1701 nt, Artificial Sequence; identical to SEQ ID NO: 98705
  derived and/or modified CDS sequence (opt2) from hemagglutinin__InfluenzaA__ADL41164

SEQ ID NO: 101551 - RNA, 1701 nt, Artificial Sequence; identical to SEQ ID NO: 98798
  derived and/or modified CDS sequence (opt2) from hemagglutinin__InfluenzaA__ADL41173

SEQ ID NO: 101552 - RNA, 1698 nt, Artificial Sequence
  derived and/or modified CDS sequence (opt2) from hemagglutinin__InfluenzaA__ADL60242
augaaggucaagcuccucguccuccucugcaccuucaccgccaccuacgccgacaccaucugcaucggcuaccacgccaacaacuccaccgacaccgucgacaccguccucgagaagaacgucaccgucacccacuccgucaaccuccucgagaacucccacaacggcaagcucugccuccucaagggcaucgccccccuccagcucggcaacugcuccgucgccggcuggauccucggcaaccccgagugcgagcuccucaucuccaaggaguccugguccuacaucgucgagaagcccaaccccgagaacggcaccugcuaccccggccacuucgccgacuacgaggagcuccgcgagcagcucuccuccgucuccuccuucgagcgcuucgagaucuuccccaaggaguccuccuggcccaaccacaccgucaccggcgucuccgccuccugcucccacaacggcgagcgcuccuucuaccgcaaccuccucuggcucaccggcaagaacggccucuaccccaaccucuccaaguccuacgccaacaacaaggagaaggagguccucguccucuggggcguccaccacccccccgacaucggcaaccagaagacccucuaccacaccgagaacgccuacgucuccgucgucuccucccacuacucccgcaaguucacccccgagaucgccaagcgccccaagguccgcgaccaggagggccgcaucaacuacuacuggacccuccucgagcccggcgacaccaucaucuucgaggccaacggcaaccucaucgccccccgcuacgccuucgcccucucccgcggcuucggcuccggcaucaucaacuccaacgcccccauggacaagugcgacgccaagugccagaccccccagggcgccaucaacuccucccuccccuuccagaacguccaccccgucaccaucggcgagugccccaaguacguccgcuccgccaagcuccgcauggucaccggccuccgcaacauccccuccauccagucccgcggccucuucggcgccaucgccggcuucaucgagggcggcuggaccggcauggucgacggcugguacggcuaccaccaccagaacgagcagggcuccggcuacgccgccgaccagaaguccacccagaacgccaucaacggcaucaccaacaaggucaacuccgucaucgagaagaugaacacccaguucaccgccgucggcaaggaguucaacaagcucgagcgccgcauggagaaccucaacaagaaggucgacgacggcuucaucgacaucuggaccuacaacgccgagcuccucguccuccucgagaacgagcgcacccucgacuuccacgacuccaacgucaagaaccucuacgagaaggucaagucccagcucaagaacaacgccaaggagaucggcaacggcugcuucgaguucuaccacaagugcaacgacgagugcauggaguccgucaagaacggcaccuacgacuaccccaaguacuccgaggaguccaagcucaaccgcgagaagaucgacggcgucaagcucgaguccaugggcgucuaccagauccucgccaucuacuccaccgucgccuccucccucguccuccucgucucccucggcgccaucuccuucuggaugugcuccaacggcucccuccagugccgcaucugcaucuga

SEQ ID NO: 101553 - RNA, 1698 nt, Artificial Sequence
  derived and/or modified CDS sequence (opt2) from hemagglutinin__InfluenzaA__ADL60253
augaaggucaagcuccucguccuccucugcaccuucaccgccaccuacgccgacaccaucugcaucggcuaccacgccaacaacuccaccgacaccgucgacaccguccucgagaagaacgucaccgucacccacuccgucaaccuccucgagaacucccacaacggcaagcucugccuccucaagggcaucgccccccuccagcucggcaacugcuccgucgccggcuggauccucggcaaccccgagugcggccuccucaucuccaaggaguccugguccuacaucgucgagaagcccaaccccgagaacggcaccugcuaccccggcuacuucgccgacuacgaggagcuccgcgagcagcucuccuccgucuccuccuucgagcgcuucgagaucuuccccaaggaguccuccuggcccaaccacaccgucaccggcgucuccgccuccugcucccacaacggcgaguccuccuucuaccgcaaccuccucuggcucaccggcaagaacggccucuaccccaaccucuccaaguccuacgccaacaacaaggagaaggagguccucguccucuggggcguccaccacccccccaacaucggcaaccagaaggcccucuaccacaccgagaacgccuacgucuccgucgucuccucccacuacucccgcaaguucacccccgagaucgccaagcgccccaagguccgcgaccaggagggccgcaucaacuacuacuggacccuccucgagcccggcgacaccaucaucuucgaggccaacggcaaccucaucgccccccgcuacgccuucgcccucucccgcggcuucggcuccggcaucaucaacuccaacgcccccauggacaagugcgacgccaagugccagaccccccagggcgccaucaacuccucccuccccuuccagaacguccaccccgucaccaucggcgagugccccaaguacguccgcuccgccaagcuccgcauggucaccggccuccgcaacauccccuccauccagucccgcggccucuucggcgccaucgccggcuucaucgagggcggcuggaccggcauggucgacggcugguacggcuaccaccaccagaacgagcagggcuccggcuacgccgccgaccagaaguccacccagaacgccaucaacggcaucaccaacaaggucaacuccgucaucgagaagaugaacacccaguucaccgccgucggcaaggaguucaacaagcucgagcgccgcauggagaaccucaacaagaaggucgacgacggcuucaucgacaucuggaccuacaacgccgagcuccucguccuccucgagaacgagcgcacccucgacuuccacgacuccaacgucaagaaccucuacgagaaggucaagucccagcucaagaacaacgccaaggagaucggcaacggcugcuucgaguucuaccacaagugcaacgacgagugcauggaguccgucaagaacggcaccuacgacuaccccaaguacuccgaggaguccaagcucaaccgcgagaagaucgacggcgucaagcucgaguccaugggcgucuaccagauccucgccaucuacuccaccgucgccuccucccucguccuccucgucucccucggcgccaucuccuucuggaugugcuccaacggcucccuccagugccgcaucugcaucuga

SEQ ID NO: 101554 - RNA, 1698 nt, Artificial Sequence; identical to SEQ ID NO: 101552
  derived and/or modified CDS sequence (opt2) from hemagglutinin__InfluenzaA__ADL60264

SEQ ID NO: 101555 - RNA, 1698 nt, Artificial Sequence; identical to SEQ ID NO: 101552
  derived and/or modified CDS sequence (opt2) from hemagglutinin__InfluenzaA__ADL60275

SEQ ID NO: 101556 - RNA, 1698 nt, Artificial Sequence
  derived and/or modified CDS sequence (opt2) from hemagglutinin__InfluenzaA__ADL60286
augaaggucaagcuccucguccuccucugcaccuucaccgccaccuacgccgacaccaucugcaucggcuaccacgccaacaacuccaccgacaccgucgacaccguccucgagaagaacgucaccgucacccacuccgucaaccuccucgagaacucccacaacggcaagcucugccuccucaagggcaucgccccccuccagcucggcaacugcuccgucgccggcuggauccucggcaaccccgagugcgagcuccucaucuccaaggaguccugguccuacaucgucgagaagcccaaccccgagaacggcaccugcuaccccggccacuucgccgacuacgaggagcuccgcgagcagcucuccuccgucuccuccuucgagcgcuucgagaucuuccccaaggaguccuccuggcccaaccacaccgucaccggcgucuccgccuccugcucccacaacggcgaguccuccuucuaccgcaaccuccucuggcucaccggcaagaacggccucuaccccaaccucuccaaguccuacgccaacaacaaggagaaggagguccucguccucuggggcguccaccacccccccuccaucuccaaccagaagacccucuaccacaccgagaacgccuacgucuccgucgucuccucccacuacucccgcaaguucacccccgaggucgccaagcgccccaagguccgcgaccaggagggccgcaucaacuacuacuggacccuccucgagcccggcgacaccaucaucuucgaggccaacggcaaccucaucgccccccgcuacgccuucgcccucucccgcggcuucggcuccggcaucaucaacuccaacgcccccauggacaagugcgacgccaagugccagaccccccagggcgccaucaacuccucccuccccuuccagaacguccaccccgucaccaucggcgagugccccaaguacguccgcuccgccaagcuccgcauggucaccggccuccgcaacauccccuccauccagucccgcggccucuucggcgccaucgccggcuucaucgagggcggcuggaccggcauggucgacggcugguacggcuaccaccaccagaacgagcagggcuccggcuacgccgccgaccagaaguccacccagaacgccaucaacggcaucaccaacaaggucaacuccgucaucgagaagaugaacacccaguucaccgccgucggcaaggaguucaacaagcucgagcgccgcauggagaaccucaacaagaaggucgacgacggcuucaucgacaucuggaccuacaacgccgagcuccucguccuccucgagaacgagcgcacccucgacuuccacgacuccaacgucaagaaccucuacgagaaggucaagucccagcucaagaacaacgccaaggagaucggcaacggcugcuucgaguucuaccacaagugcaacgacgagugcauggaguccgucaagaacggcaccuacgacuaccccaaguacuccgaggaguccaagcucaaccgcgagaagaucgacggcgucaagcucgaguccaugggcgucuaccagauccucgccaucuacuccaccgucgccuccucccucguccuccucgucucccucggcgccaucuccuucuggaugugcuccaacggcucccuccagugccgcaucugcaucuga

SEQ ID NO: 101557 - RNA, 1698 nt, Artificial Sequence
  derived and/or modified CDS sequence (opt2) from hemagglutinin__InfluenzaA__ADL60297
augaaggucaagcuccucguccuccucugcaccuucaccgccaccuacgccgacaccaucugcaucggcuaccacgccaacaacuccaccgacaccgucgacaccguccucgagaagaacgucaccgucacccacuccgucaaccuccucgagaacucccacaacggcaagcucugccuccucaagggcaucgccccccuccagcucggcaacugcuccgucgccggcuggauccucggcaaccccgagugcgagcuccucaucuccaaggaguccugguccuacaucgucgagaagcccaaccccgagaacggcaccugcuaccccggccacuucgccgacuacgaggagcuccgcgagcagcucuccuccgucuccuccuucgagcgcuucgagaucuuccccaaggaguccuccuggcccaaccacaccgucaccggcgucuccgccuccugcucccacaacggcgaguccuccuucuaccgcaaccuccucuggcucacccgcaagaacggccucuaccccaaccucuccaaguccuacgccaacaacaaggagaaggagguccucguccucuggggcguccaccacccccccaacaucggcgaccagaagacccucuaccacaccgagaacgccuacgucuccgucgucuccucccacuacucccgcaaguucacccccgagaucgccaagcgccccaagguccgcgaccaggagggccgcaucaacuacuacuggacccuccucgagcccggcgacaccaucaucuucgaggccaacggcaaccucaucgccccccgcuacgccuucgcccucucccgcggcuucggcuccggcaucaucaacuccaacgcccccauggacaagugcgacgccaagugccagaccccccagggcgccaucaacuccucccuccccuuccagaacguccaccccgucaccaucggcgagugccccaaguacguccgcuccgccaagcuccgcauggucaccggccuccgcaacauccccuccauccagucccgcggccucuucggcgccaucgccggcuucaucgagggcggcuggaccggcauggucgacggcugguacggcuaccaccaccagaacgagcagggcuccggcuacgccgccgaccagaaguccacccagaacgccaucaacggcaucaccaacaaggucaacuccgucaucgagaagaugaacacccaguucaccgccgucggcaaggaguucaacaagcucgagcgccgcauggagaaccucaacaagaaggucgacgacggcuucaucgacaucuggaccuacaacgccgagcuccucguccuccucgagaacgagcgcacccucgacucccacgacuccaacgucaagaaccucuacgagaaggucaagucccagcucaagaacaacgccaaggagaucggcaacggcugcuucgaguucuaccacaagugcaacgacgagugcauggaguccgucaagaacggcaccuacgacuaccccaaguacuccgaggaguccaagcucaaccgcgagaagaucgacggcgucaagcucgaguccaugggcgucuaccagauccucgccaucuacuccaccgucgccuccucccucguccuccucgucucccucggcgccaucuccuucuggaugugcuccaacggcucccuccagugccgcaucugcaucuga

SEQ ID NO: 101558 - RNA, 1698 nt, Artificial Sequence
  derived and/or modified CDS sequence (opt2) from hemagglutinin__InfluenzaA__ADL60308
augaaggucaagcuccucguccuccucugcaccuucgccgccaccuacgccgacaccaucugcaucggcuaccacgccaacaacuccaccgacaccgucgacaccguccucgagaagaacgucaccgucacccacuccgucaaccuccucgagaacucccacaacggcaagcucugccuccucaagggcaucgccccccuccagcucggcaacugcuccgucgccggcuggauccucggcaaccccgagugcgagcuccucaucuccaaggaguccugguccuacaucgucgagaagcccaaccccgagaacggcaccugcuaccccggccacuucgccgacuacgaggagcuccgcgagcagcucuccuccgucuccuccuucgagcgcuucgagaucuuccccaaggaguccuccuggcccaaccacaccgucaccggcgucuccgccuccugcucccacaacggcgaguccuccuucuaccgcaaccuccucuggcucaccggcaagaacggccucuaccccaaccucuccaaguccuacgccaacaacaaggagaaggagguccucguccucuggggcguccaccacccccccaacaucggcguccagaaggcccucuaccacaccgagaacgccuacgucuccgucgucuccucccacuacucccgcaaguucacccccgagaucgccaagcgccccaagguccgcgaccaggagggccgcaucaacuacuacuggacccuccucgagcccggcgacaccaucaucuucgaggccaacggcaaccucaucgccccccgcuacgccuucgcccucucccgcggcuucggcuccggcaucaucaacuccaacgcccccauggacaagugcgacgccaagugccagaccccccagggcgccaucaacuccucccuccccuuccagaacguccaccccgucaccaucggcgagugccccaaguacguccgcuccgccaagcuccgcauggucaccggccuccgcaacauccccuccauccagucccgcggccucuucggcgccaucgccggcuucaucgagggcggcuggaccggcauggucgacggcugguacggcuaccaccaccagaacgagcagggcuccggcuacgccgccgaccagaaguccacccagaacgccaucaacggcaucaccaacaaggucaacuccgucaucgagaagaugaacacccaguucaccgccgucggcaaggaguucaacaagcucgagcgccgcauggagaaccucaacaagaaggucgacgacggcuucaucgacaucuggaccuacaacgccgagcuccucguccuccucgagaacgagcgcacccucgacuuccacgacuccaacgucaagaaccucuacgagaaggucaagucccagcucaagaacaacgccaaggagaucggcaacggcugcuucgaguucuaccacaagugcaacgacgagugcauggaguccgucaagaacggcaccuacgacuaccccaaguacuccgaggaguccaagcucaaccgcgagaagaucgacggcgucaagcucgaguccaugggcgucuaccagauccucgccaucuacuccaccgucgccuccucccucguccuccucgucucccucggcgccaucuccuucuggaugugcuccaacggcucccuccagugccgcaucugcaucuga

SEQ ID NO: 101559 - RNA, 1698 nt, Artificial Sequence
  derived and/or modified CDS sequence (opt2) from hemagglutinin__InfluenzaA__ADL60341
augaaggucaagcuccucguccuccucugcaccuucaccgccaccuacgccgacaccaucugcaucggcuaccacgccaacaacuccaccgacaccgucgacaccguccucgagaagaacgucaccgucacccacuccgucaaccuccucgagaacucccacaacggcaagcucugccuccucaagggcaucgccccccuccagcucggcaacugcuccgucgccggcuggauccucggcaaccccgagugcgagcuccucaucuccaaggaguccugguccuacaucgucgagaagcccaaccccgagaacggcaccugcuaccccggccacuucgccgacuacgaggagcuccgcgagcagcucuccuccgucuccuccuucgagcgcuucgagaucuuccccaaggaguccuccuggcccaaccacaccgucaccggcgucuccgccuccugcucccacaacggcgaguccuccuucuaccgcaaccuccucuggcucaccggcaagaacggccucuaccccaaccucuccaaguccuacgccaacaacaaggagaaggagguccucguccucuggggcguccaccacccccccaacaucggcguccagaaggcccucuaccacaccgagaucgccuacgucuccgucgucuccucccacuacucccgcaaguucacccccgagaucgccaagcgccccaagguccgcgaccaggagggccgcaucaacuacuacuggaccauccucgagcccggcgacaccaucaucuucgaggccaacggcaaccucaucgccccccgcuacgccuucgcccucucccgcggcuucggcuccggcaucaucaacuccaacgcccccauggacaagugcgacgccaagugccagaccccccagggcgccaucaacuccucccuccccuuccagaacguccaccccgucaccaucggcgagugccccaaguacguccgcuccgccaagcuccgcauggucaccggccuccgcaacauccccuccauccagucccgcggccucuucggcgccaucgccggcuucaucgagggcggcuggaccggcauggucgacggcugguacggcuaccaccaccagaacgagcagggcuccggcuacgccgccgaccagaaguccacccagaacgccaucaacggcaucaccaacaaggucaacuccgucaucgagaagaugaacacccaguucaccgccgucggcaaggaguucaacaagcucgagcgccgcauggagaaccucaacaagaaggucgacgacggcuucaucgacaucuggaccuacaacgccgagcuccucguccuccucgagaacgagcgcacccucgacuuccacgacuccaacgucaagaaccucuacgagaaggucaagucccagcucaagaacaacgccaaggagaucggcaacggcugcuucgaguucuaccacaagugcaacgacgagugcauggaguccgucaagaacggcaccuacgacuaccccaaguacuccgaggaguccaagcucaaccgcgagaagaucgacggcgucaagcucgaguccaugggcgucuaccagauccucgccaucuacuccaccgucgccuccucccucguccuccucgucucccucggcgccaucuccuucuggaugugcuccaacggcucccuccagugccgcaucugcaucuga

SEQ ID NO: 101560 - RNA, 1698 nt, Artificial Sequence
  derived and/or modified CDS sequence (opt2) from hemagglutinin__InfluenzaA__ADL60352
augaaggucaagcuccucguccuccucugcaccuucaccgccaccuacgccgacaccaucugcaucggcuaccacgccaacaacuccaccgacaccgucgacaccguccucgagaagaacgucaccgucacccacuccgucaaccuccucgagaacucccacaacggcaagcucugccuccucaagggcaucgccccccuccagcucggcaacugcuccgucgccggcuggauccucggcaaccccgagugcgagcuccucaucuccaaggaguccugguccuacaucgucgagaagcccaaccccgagaacggcaccugcuaccccggccacuucgccggcuacgaggagcuccgcgagcagcucuccuccgucuccuccuucgagcgcuucgagaucuuccccaaggaguccuccuggcccaaccacaccgucaccggcgucuccgccuccugcucccacaacggcgagcgcuccuucuaccgcaaccuccucuggcucaccggcaagaacggccucuaccccaaccucuccaaguccuacgccaacaacaaggagaaggagguccucguccucuggggcguccaccacccccccgacaucggcaaccagaagacccucuaccacaccgagaacgccuacgucuccgucgucuccucccacuacucccgcaaguucacccccgagaucgccaagcgccccaagguccgcgaccaggagggccgcaucaacuacuacuggacccuccucgagcccggcgacaccaucaucuucgaggccaacggcaaccucaucgccccccgcuacgccuucgcccucucccgcggcuucggcuccggcaucaucaacuccaacgcccccauggacaagugcgacgccaagugccagaccccccagggcgccaucaacuccucccuccccuuccagaacguccaccccgucaccaucggcgagugccccaaguacguccgcuccgccaagcuccgcauggucaccggccuccgcaacauccccuccauccagucccgcggccucuucggcgccaucgccggcuucaucgagggcggcuggaccggcauggucgacggcugguacggcuaccaccaccagaacgagcagggcuccggcuacgccgccgaccagaaguccacccagaacgccaucaacggcaucaccaacaaggucaacuccgucaucgagaagaugaacacccaguucaccgccgucggcaaggaguucaacaagcucgagcgccgcauggagaaccucaacaagaaggucgacgacggcuucaucgacaucuggaccuacaacgccgagcuccucguccuccucgagaacgagcgcacccucgacuuccacgacuccaacgucaagaaccucuacgagaaggucaagucccagcucaagaacaacgccaaggagaucggcaacggcugcuucgaguucuaccacaagugcaacgacgagugcauggaguccgucaagaacggcaccuacgacuaccccaaguacuccgaggaguccaagcucaaccgcgagaagaucgacggcgucaagcucgaguccaugggcgucuaccagauccucgccaucuacuccaccgucgccuccucccucguccuccucgucucccucggcgccaucuccuucuggaugugcuccaacggcucccuccagugccgcaucugcaucuga

SEQ ID NO: 101561 - RNA, 1701 nt, Artificial Sequence
  derived and/or modified CDS sequence (opt2) from hemagglutinin__InfluenzaA__ADL60363
augaagaccaucaucgcccucuccuacauccucugccucgucuucgcccagaaguuccccggcaacgacaacuccaccgccacccucugccucggccaccacgccguccccaacggcaccaucgucaagaccaucaccaacgaccagaucgaggucaccaacgccaccgagcucguccaguccuccuccaccggcgagaucugcgacuccccccaccagauccucgacggcgagaacugcacccucaucgacgcccuccucggcgacccccagugcgacggcuuccagaacaagaacugggaccucuucgucgagcgcuccaaggccuacuccaacugcuaccccuacgacguccccgacuacgccucccuccgcucccucaucgccuccuccggcacccucgaguucaacaacgaguccuucaacuggaccggcgucacccagaacggcaccuccuccgccugcauccgccgcuccaacaacuccuucuucucccgccucaacuggcucacccacuccaaguucaaguaccccgcccucaacgucaccaugcccaacaacgagaacuucgacaagcucuacaucuggggcguccaccaccccggcaccgacaacgaccagaucuuccucuacgcccaggccuccggccgcaucaccaucuccaccaagcgcucccagcagaccgucauccccaacaucggcucccgcccccgcguccgcgacauccccucccgcaucuccaucuacuggaccaucgucaagcccggcgacauccuccucaucaacuccaccggcaaccucaucgccccccgcggcuacuucaagauccgcuccggcaaguccuccaucaugcgcuccgacgcccccaucggcaagugcaacuccgagugcaucacccccaacggcuccauccccaacgacaagcccuuccagaacgucaaccgcaucaccuacggcgccugcccccgcuacgucaagcagaacacccucaagcucgccaccggcaugcgcaacguccccgagaagcagacccgcggcaucuucggcgccaucgccggcuucaucgagaacggcugggagggcauggucgacggcugguacggcuuccgccaccagaacuccgagggcgucggccaggccgccgaccucaaguccacccaggccgccaucgaccagaucaacggcaagcucaaccgccucaucggcaagaccaacgagaaguuccaccagaucgagaaggaguucuccgaggucgagggccgcauccaggaccucgagaaguacgucgaggacaccaagaucgaccucugguccuacaacgccgagcuccucgucgcccucgagaaccagcacaccaucgaccucaccgacuccgagaugaacaagcucuucgagaagaccaagaagcagcuccgcgagaacgccgaggacaugggcaacggcugcuucaagaucuaccacaagugcgacaacgccugcaucggcuccauccgcaacggcaccuacgaccacgacgucuaccgcgacgaggcccucaacaaccgcuuccagaucaagggcgucgagcucaaguccggcuacaaggacuggauccucuggaucuccuucgccaucuccugcuuccuccucugcaucgcccuccucggcuucaucaugugggccugccagaagggcaacauccgcugcaacaucugcaucuga

SEQ ID NO: 101562 - RNA, 1698 nt, Artificial Sequence
  derived and/or modified CDS sequence (opt2) from hemagglutinin__InfluenzaA__ADL60374
augaaggucaagcuccucguccuccucugcaccuucaccgccaccuacgccgacaccaucugcaucggcuaccacgccaacaacuccaccgacaccgucgacaccguccucgagaagaacgucaccgucacccacuccgucaaccuccucgagaacucccacaacggcaagcucugccuccucaagggcaucgccccccuccagcucggcaacugcuccgucgccggcuggauccucggcaaccccgagugcgagcuccucaucuccaaggaguccugguccuacaucgucgagaagcccaaccccgagaacggcaccugcuaccccggccacuucgccgacuacgaggagcuccgcgagcagcucuccuccgucuccuccuucgagcgcuucgagaucuuccccaaggaguccuccuggcccaaccacaccgucaccggcgucuccgccuccugcucccacgacggcgaguccuccuucuaccgcaaccuccucuggcucaccggcaagaacggccucuaccccaaccucuccaaguccuacgccaacaacaaggagaaggagguccucguccucuggggcguccaccacccccccaacaucggcgaccagaaggcccucuaccacaccgagaacgccuacgucuccgucgucuccucccacuacucccgcaaguucacccccgagaucgccaagcgccccaagguccgcgaccaggagggccgcaucaacuacuacuggacccuccucgagcccggcgacaccaucaucuucgaggccaacggcaaccucaucgccccccgcuacgccuucgcccucucccgcggcuucggcuccggcaucaucaacuccaacgcccccauggacaagugcgacgccaagugccagaccccccagggcgccaucaacuccucccuccccuuccagaacguccaccccgucaccaucggcgagugccccaaguacguccgcuccgccaagcuccgcgucgucaccggccuccgcaacauccccuccauccagucccgcggccucuucggcgccaucgccggcuucaucgagggcggcuggaccggcauggucgacggcugguacggcuaccaccaccagaacgagcagggcuccggcuacgccgccgaccagaaguccacccagaacgccaucaacggcaucaccaacaaggucaacuccgucaucgagaagaugaacacccaguucaccgccgucggcaaggaguucaacaagcucgagcgccgcauggagaaccucaacaagaaggucgacgacggcuucaucgacaucuggaccuacaacgccgagcuccucguccuccucgagaacgagcgcacccucgacuuccacgacuccaacgucaagaaccucuacgagaaggucaagucccagcucaagaacaacgccaaggagaucggcaacggcugcuucgaguucuaccacaagugcaacgacgagugcauggaguccgucaagaacggcaccuacgacuaccccaaguacuccgaggaguccaagcucaaccgcgagaagaucgacggcgucaagcucgaguccaugggcgucuaccagauccucgccaucuacuccaccgucgccuccucccucguccuccucgucucccucggcgccaucuccuucuggaugugcuccaacggcucccuccagugccgcaucugcaucuga

SEQ ID NO: 101563 - RNA, 1701 nt, Artificial Sequence
  derived and/or modified CDS sequence (opt2) from hemagglutinin__InfluenzaA__ADM07135
augaaggccauccucgucguccuccucuacaccuucgccaccgccaacgccgacacccucugcaucggcuaccacgccaacaacuccaccgacaccgucgacaccguccucgagaagaacgucaccgucacccacuccgucaaccuccucgaggacaagcacaacggcaagcucugcaagcuccgcggcgucgccccccuccaccucggcaagugcaacaucgccggcuggauccucggcaaccccgagugcgagucccucuccaccgccuccuccugguccuacaucgucgagaccuccuccuccgacaacggcaccugcuaccccggcgacuucaucgacuacgaggagcuccgcgagcagcucuccuccgucuccuccuucgagcgcuucgagaucuuccccaagaccuccuccuggcccaaccacgaguccaacaagggcgucaccgccgccugcccccacgccggcgccaaguccuucuacaagaaccucaucuggcucgucaagaagggcaacuccuaccccaagcucuccaaguccuacaucaacgacaagggcaaggagguccucguccucuggggcauccaccaccccuccaccuccgccgaccagcagucccucuaccagaacgccgacgccuacgucuucgucggcaccucccgcuacuccaagaaguucaagcccgagaucgccauccgccccaagguccgcgaccaggagggccgcaugaacuacuacuggacccucgucgagcccggcgacaagaucaccuucgaggccaccggcaaccucgucgucccccgcuacgccuucgccauggagcgcaacgccggcuccggcaucaucaucuccgacacccccguccacgacugcaacaccaccugccagacccccaagggcgccaucaacaccucccuccccuuccagaacauccaccccaucaccaucggcaagugccccaaguacgucaaguccaccaagcuccgccucgccaccggccuccgcaacguccccuccauccagucccgcggccucuucggcgccaucgccggcuucaucgagggcggcuggaccggcauggucgacggcugguacggcuaccaccaccagaacgagcagggcuccggcuacgccgccgaccucaaguccacccagaacgccaucgacgagaucaccaacaaggucaacuccgucaucgagaagaugaacacccaguucaccgccgucggcaaggaguucaaccaccucgagaagcgcaucgagaaccucaacaagaaggucgacgacggcuuccucgacaucuggaccuacaacgccgagcuccucguccuccucgagaacgagcgcacccucgacuaccacgacuccaacgucaagaaccucuacgagaagguccgcucccagcucaagaacaacgccaaggagaucggcaacggcugcuucgaguucuaccacaagugcgacaacaccugcauggaguccgucaagaacggcaccuacgacuaccccaaguacuccgaggaggccaagcucaaccgcgaggagaucgacggcgucaagcucgaguccacccgcaucuaccagauccucgccaucuacuccaccgucgccuccucccucguccucgucgucucccucggcgccaucuccuucuggaugugcuccaacggcucccuccagugccgcaucugcaucuga

SEQ ID NO: 101564 - RNA, 1701 nt, Artificial Sequence; identical to SEQ ID NO: 99190
  derived and/or modified CDS sequence (opt2) from hemagglutinin__InfluenzaA__ADM07144

SEQ ID NO: 101565 - RNA, 1701 nt, Artificial Sequence
  derived and/or modified CDS sequence (opt2) from hemagglutinin__InfluenzaA__ADM07154
augaaggccauccucgucguccuccucuacaccuucgccaccgccaacgccgacacccucugcaucggcuaccacgccaacaacuccaccgacaccgucgacaccguccucgagaagaacgucaccgucacccacuccgucaaccuccucgaggacaagcacaacggcaagcucugcaagcuccgcggcgucgccccccuccaccucggcaagugcaacaucgccggcuggauccucggcaaccccgagugcgagucccucuccaccgccuccuccugguccuacaucgucgagaccuccuccuccgacaacggcaccugcuaccccggcgacuucaucgacuacgaggagcuccgcgagcagcucuccuccgucuccuccuucgagcgcuucgagaucuuccccaagaccuccuccuggcccaaccacgacuccaacaagggcgucaccgccgccugcccccacgccggcgccaaguccuucuacaagaaccucaucuggcucgucaagaagggcaacuccuaccccaagcucuccaaguccuacaucaacgacaagggcaaggagguccucguccucuggggcauccaccacccccccaccuccgccgaccagcagucccucuaccagaacgccgacgccuacgucuucgucggcaccucccgcuacuccaagaaguucaagcccgagaucgccauccgccccaagguccgcgaccaggagggccgcaugaacuacuacuggacccucgucgagcccggcgacaagaucaccuucgaggccaccggcaaccucgucgucccccgcuacgccuucgccaugguccgcaacgccggcuccggcaucaucaucuccgacacccccguccacgacugcaacaccaccugccagacccccaagggcgccaucaacaccucccuccccuuccagaacauccaccccaucaccaucggcaagugccccaaguacgucaaguccaccaagcuccgccucgccaccggccuccgcaacguccccuccauccagucccgcggccucuucggcgccaucgccggcuucaucgagggcggcuggaccggcauggucgacggcugguacggcuaccaccaccagaacgagcagggcuccggcuacgccgccgaccucaaguccacccagaacgccaucgacgagaucaccaacaaggucaacuccgucaucgagaagaugaacacccaguucaccgccgucggcaaggaguucaaccaccucgagaagcgcaucgagaaccucaacaagaaggucgacgacggcuuccucgacaucuggaccuacaacgccgagcuccucguccuccucgagaacgagcgcacccucgacuaccacgacuccaacgucaagaaccucuacgagaagguccgcucccagcucaagaacaacgccaaggagaucggcaacggcugcuucgaguucuaccacaagugcgacaacaccugcauggaguccgucaagaacggcaccuacgacuaccccaaguacuccgaggaggccaagcucaaccgcgaggagaucgacggcgucaagcucgaguccacccgcaucuaccagauccucgccaucuacuccaccgucgccuccucccucguccucgucgucucccucggcgccaucuccuucuggaugugcuccaacggcucccuccagugccgcaucugcaucuga

SEQ ID NO: 101566 - RNA, 1701 nt, Artificial Sequence; identical to SEQ ID NO: 99190
  derived and/or modified CDS sequence (opt2) from hemagglutinin__InfluenzaA__ADM07163

SEQ ID NO: 101567 - RNA, 1698 nt, Artificial Sequence; identical to SEQ ID NO: 101549
  derived and/or modified CDS sequence (opt2) from hemagglutinin__InfluenzaA__ADM07460

SEQ ID NO: 101568 - RNA, 1701 nt, Artificial Sequence
  derived and/or modified CDS sequence (opt2) from hemagglutinin__InfluenzaA__ADM07504
augaagaccaucaucgcccucuccuacauccucugccucgucuucgcccagaagcuccccggcaacgacaacuccaccgccacccucugccucggccaccacgccguccccaacggcaccaucgucaagaccaucaccaacgaccagaucgaggucaccaacgccaccgagcucguccaguccuccuccaccggcgagaucugcgacuccccccaccagauccucgacggcgagaacugcacccucaucgacgcccuccucggcgacccccagugcgacggcuuccagaacaagaagugggaccucuucgucgagcgcuccaaggccuacuccaacugcuaccccuacgacguccccgacuacgccucccuccgcucccucgucgccuccuccggcacccucgaguucaacaacgaguccuucaacuggaccggcgucacccagaacggcaccuccuccgccugcauccgccgcuccaacaacuccuucuucucccgccucaacuggcucacccaccucaacuucaaguaccccgcccucaacgucaccaugcccaacaacgagcaguucgacaagcucuacaucuggggcguccaccaccccggcaccgacaaggaccagaucuuccucuacgcccaggccuccggccgcaucaccgucuccaccaagcgcucccagcaggccgucauccccaacaucggcucccgcccccgcguccgcaacauccccucccgcaucuccaucuacuggaccaucgucaagcccggcgacauccuccucaucaacuccaccggcaaccucaucgccccccgcggcuacuucaagauccgcaacggcaaguccuccaucaugcgcuccgacgcccccaucggcaagugcaacuccgagugcaucacccccaacggcuccauccccaacgacaagcccuuccagaacgucaaccgcaucaccuacggcgccugcccccgcuacgucaagcagaacacccucaagcucgccaccggcaugcgcaacguccccgagaagcagacccgcggcaucuucggcgccaucgccggcuucaucgagaacggcugggagggcauggucgacggcugguacggcuuccgccaccagaacuccgagggccgcggccaggccgccgaccucaaguccacccaggccgccaucgaccagaucaacggcaagcucaaccgccucaucggcaagaccaacgagaaguuccaccagaucgagaaggaguucuccgaggucgagggccgcauccaggaccucgagaaguacgucgaggacaccaagaucgaccucugguccuacaacgccgagcuccucgucgcccucgagaaccagcacaccaucgaccucaccgacuccgagaugaacaagcucuucgagaagaccaagaagcagcuccgcgagaacgccgaggacaugggcaacggcugcuucaagaucuaccacaagugcgacaacgccugcaucggcuccauccgcaacggcaccuacgaccacgacgucuaccgcgacgaggcccucaacaaccgcuuccagaucaagggcgucgagcucaaguccggcuacaaggacuggauccucuggaucuccuucgccaucuccugcuuccuccucugcgucgcccuccucggcuucaucaugugggccugccagaagggcaacauccgcugcaacaucugcaucuga

SEQ ID NO: 101569 - RNA, 1701 nt, Artificial Sequence
  derived and/or modified CDS sequence (opt2) from hemagglutinin__InfluenzaA__ADM12806
augaagaccaucaucgcccucuccuacauccucugccucgucuucgcccagaagcuccccggcaacgacaacuccaccgccacccucugccucggccaccacgccguccccaacggcaccaucgucaagaccaucaccaacgaccagaucgaggucaccaacgccaccgagcucguccaguccuccuccaccggcgagaucugcgacuccccccaccagauccucgacggcgagaacugcacccucaucgacgcccuccucggcgacccccagugcgacggcuuccagaacaagaagugggaccucuucgucgagcgcuccaaggccuacuccaacugcuaccccuacgacguccccgacuacgccucccuccgcucccucgucgccuccuccggcacccucgaguucaacaacgaguccuucaacuggaccggcgucacccagaacggcaccuccuccgccugcauccgccgcuccaacaacuccuucuucucccgccucaacuggcucacccaccucaacuucaaguaccccgcccucaacgucaccaugcccaacaacgagcaguucgacaagcucuacaucuggggcguccaccaccccggcaccgacaaggaccagaucuuccucuacgcccaggccuccggccgcaucaccgucuccaccaagcgcucccagcaggccgucauccccaacaucggcucccgcccccgcguccgcaacauccccucccgcaucuccaucuacuggaccaucgucaagcccggcgacauccuccucaucaacuccaccggcaaccucaucgccccccgcggcuacuucaagauccgcuccggcaaguccuccaucaugcgcuccgacgcccccaucggcaagugcaacuccgagugcaucacccccaacggcuccauccccaacgacaagcccuuccagaacgucaaccgcaucaccuacggcgccugcccccgcuacgucaagcaguccacccucaagcucgccaccggcaugcgcaacguccccgagaagcagacccgcggcaucuucggcgccaucgccggcuucaucgagaacggcugggagggcauggucgacggcugguacggcuuccgccaccagaacuccgagggccgcggccaggccgccgaccucaaguccacccaggccgccaucgaccagaucaacggcaagcucaaccgccucaucggcaagaccaacgagaaguuccaccagaucgagaaggaguucuccgaggucgagggccgcauccaggaccucgagaaguacgucgaggacaccaagaucgaccucugguccuacaacgccgagcuccucgucgcccucgagaaccagcacaccaucgaccucaccgacuccgagaugaacaagcucuucgagaagaccaagaagcagcuccgcgagaacgccgaggacaugggcaacggcugcuucaccaucuaccacaagugcgacaacgccugcaucggcuccauccgcaacggcaccuacgaccacaacgucuaccgcgacgaggcccucaacaaccgcuuccagaucaagggcgucgagcucaaguccggcuacaaggacuggauccucuggaucuccuucgccaucuccugcuuccuccucugcgucgcccuccucggcuucaucaugugggccugccagaagggcaacauccgcugcaacaucugcaucuga

SEQ ID NO: 101570 - RNA, 1701 nt, Artificial Sequence; identical to SEQ ID NO: 101569
  derived and/or modified CDS sequence (opt2) from hemagglutinin__InfluenzaA__ADM12817

SEQ ID NO: 101571 - RNA, 1701 nt, Artificial Sequence; identical to SEQ ID NO: 101569
  derived and/or modified CDS sequence (opt2) from hemagglutinin__InfluenzaA__ADM12828

SEQ ID NO: 101572 - RNA, 1701 nt, Artificial Sequence; identical to SEQ ID NO: 101569
  derived and/or modified CDS sequence (opt2) from hemagglutinin__InfluenzaA__ADM12839

SEQ ID NO: 101573 - RNA, 1701 nt, Artificial Sequence
  derived and/or modified CDS sequence (opt2) from hemagglutinin__InfluenzaA__ADM12850
augaaggccaucaucgcccucuccuacauccucugccucgucuucgcccagaagcuccccggcaacgacaacuccaccgccacccucugccucggccaccacgccguccccaacggcaccaucgucaagaccaucaccaacgaccagaucgaggucaccaacgccaccgagcucguccaguccuccuccaccggcgagaucugcgacuccccccaccagauccucgacggcgagaacugcacccucaucgacgcccuccucggcgacccccagugcgacggcuuccagaacaagaagugggaccucuucgucgagcgcuccaaggccuacuccaacugcuaccccuacgacguccccgacuacgccucccuccgcucccucgucgccuccuccggcacccucgaguucaacaacgaguccuucaacuggaccggcgucacccagaacggcaccuccuccgccugcauccgccgcuccaacaacuccuucuucucccgccucaacuggcucacccaccucaacuucaaguaccccgcccucaacgucaccaugcccaacaacgagcaguucgacaagcucuacaucuggggcguccaccaccccggcaccgacaaggaccagaucuuccucuacgcccaggccuccggccgcaucaccgucuccaccaagcgcucccagcaggccgucauccccaacaucggcucccgcccccgcguccgcaacauccccucccgcaucuccaucuacuggaccaucgucaagcccggcgacauccuccucaucaacuccaccggcaaccucaucgccccccgcggcuacuucaagauccgcuccggcaaguccuccaucaugcgcuccgacgcccccaucggcaagugcaacuccgagugcaucacccccaacggcuccauccccaacgacaagcccuuccagaacgucaaccgcaucaccuacggcgccugcccccgcuacgucaagcaguccacccucaagcucgccaccggcaugcgcaacguccccgagaagcagacccgcggcaucuucggcgccaucgccggcuucaucgagaacggcugggagggcauggucgacggcugguacggcuuccgccaccagaacuccgagggccgcggccaggccgccgaccucaaguccacccaggccgccaucgaccagaucaacggcaagcucaaccgccucaucggcaagaccaacgagaaguuccaccagaucgagaaggaguucuccgaggucgagggccgcauccaggaccucgagaaguacgucgaggacaccaagaucgaccucugguccuacaacgccgagcuccucgucgcccucgagaaccagcacaccaucgaccucaccgacuccgagaugaacaagcucuucgagaagaccaagaagcagcuccgcgagaacgccgaggacaugggcaacggcugcuucaccaucuaccacaagugcgacaacgccugcaucggcuccauccgcaacggcaccuacgaccacaacgucuaccgcgacgaggcccucaacaaccgcuuccagaucaagggcgucgagcucaaguccggcuacaaggacuggauccucuggaucuccuucgccaucuccugcuuccuccucugcgucgcccuccucggcuucaucaugugggccugccagaagggcaacauccgcugcaacaucugcaucuga

SEQ ID NO: 101574 - RNA, 1701 nt, Artificial Sequence; identical to SEQ ID NO: 98705
  derived and/or modified CDS sequence (opt2) from hemagglutinin__InfluenzaA__ADM12861

SEQ ID NO: 101575 - RNA, 1701 nt, Artificial Sequence; identical to SEQ ID NO: 98705
  derived and/or modified CDS sequence (opt2) from hemagglutinin__InfluenzaA__ADM12871

SEQ ID NO: 101576 - RNA, 1701 nt, Artificial Sequence; identical to SEQ ID NO: 98705
  derived and/or modified CDS sequence (opt2) from hemagglutinin__InfluenzaA__ADM12881

SEQ ID NO: 101577 - RNA, 1701 nt, Artificial Sequence; identical to SEQ ID NO: 98705
  derived and/or modified CDS sequence (opt2) from hemagglutinin__InfluenzaA__ADM12891

SEQ ID NO: 101578 - RNA, 1701 nt, Artificial Sequence; identical to SEQ ID NO: 98705
  derived and/or modified CDS sequence (opt2) from hemagglutinin__InfluenzaA__ADM12901

SEQ ID NO: 101579 - RNA, 1701 nt, Artificial Sequence; identical to SEQ ID NO: 99807
  derived and/or modified CDS sequence (opt2) from hemagglutinin__InfluenzaA__ADM12911

SEQ ID NO: 101580 - RNA, 1701 nt, Artificial Sequence; identical to SEQ ID NO: 98705
  derived and/or modified CDS sequence (opt2) from hemagglutinin__InfluenzaA__ADM12921

SEQ ID NO: 101581 - RNA, 1701 nt, Artificial Sequence; identical to SEQ ID NO: 98705
  derived and/or modified CDS sequence (opt2) from hemagglutinin__InfluenzaA__ADM12931

SEQ ID NO: 101582 - RNA, 1701 nt, Artificial Sequence; identical to SEQ ID NO: 98705
  derived and/or modified CDS sequence (opt2) from hemagglutinin__InfluenzaA__ADM12941

SEQ ID NO: 101583 - RNA, 1701 nt, Artificial Sequence; identical to SEQ ID NO: 98705
  derived and/or modified CDS sequence (opt2) from hemagglutinin__InfluenzaA__ADM12951

SEQ ID NO: 101584 - RNA, 1701 nt, Artificial Sequence
  derived and/or modified CDS sequence (opt2) from hemagglutinin__InfluenzaA__ADM12961
augaaggccguccucgucguccuccucuacaccuucgccaccgccaacgccgacacccucugcaucggcuaccacgccaacaacuccaccgacaccgucgacaccguccucgagaagaacgucaccgucacccacuccgucaacauccucgaggacaagcacaacggcaagcucugcaagcucggcggcgucgccccccuccaccucggcaagugcaacaucgccggcuggauccucggcaaccccgagugcgagucccucuccaccgccuccuccugguccuacaucgucgagaccuccuccuccgacaacggcaccugcuaccccggcgacuucaucgacuacgaggagcuccgcgagcagcucuccuccgucuccuccuucgagcgcuucgagaucuuccccaagaccuccuccuggcccaaccacgacuccaacaagggcgucaccgccgccugcccccacgccggcgccaaguccuucuacaagaaccucaucuggcucgucaagaagggcaacuccuaccccaagcucuccaaguccuacaucaacgacaagggcaaggagguccucguccucuggggcauccaccaccccuccaccuccgccgaccagcagucccucuaccagaacgccgacgccuacgucuucgucggcaccucccgcuacuccaagaaguucaagcccgagaucgccauccgccccaagguccgcgaccaggagggccgcaugaacuacuacuggacccucgucgagcccggcgacaagaucaccuucgaggccaccggcaaccucgucgucccccgcuacgccuucgccauggagcgcaacgccggcuccggcaucaucaucuccgacacccccguccacgacugcaacaccaccugccagacccccaagggcgccaucaacaccucccuccccuuccagaacauccaccccaucaccaucggcaagugccccaaguacgucaaguccaccaagcuccgccucgccaccggccuccgcaacguccccuccauccagucccgcggccucuucggcgccaucgccggcuucaucgagggcggcuggaccggcauggucgacggcugguacggcuaccaccaccagaacgagcagggcuccggcuacgccgccgaccucaaguccacccagaacgccaucgacgagaucaccaacaaggucaacuccgucaucgagaagaugaacacccaguucaccgccgucggcaaggaguucaaccaccucgagaagcgcaucgagaaccucaacaagaaggucgacgacggcuuccucgacaucuggaccuacaacgccgagcuccucguccuccucgagaacgagcgcacccucgacuaccacgacuccaacgucaagaaccucuacgagaagguccgcucccagcucaagaacaacgccaaggagaucggcaacggcugcuucgaguucuaccacaagugcgacaacaccugcauggaguccgucaagaacggcaccuacgacuaccccaaguacuccgaggaggccaagcucaaccgcgaggagaucgacggcgucaagcucgaguccacccgcaucuaccagauccucgccaucuacuccaccgucgccuccucccucguccucgucgucucccucggcgccaucuccuucuggaugugcuccaacggcucccuccagugccgcaucugcaucuga

SEQ ID NO: 101585 - RNA, 1701 nt, Artificial Sequence; identical to SEQ ID NO: 100354
  derived and/or modified CDS sequence (opt2) from hemagglutinin__InfluenzaA__ADM12971

SEQ ID NO: 101586 - RNA, 1701 nt, Artificial Sequence; identical to SEQ ID NO: 99806
  derived and/or modified CDS sequence (opt2) from hemagglutinin__InfluenzaA__ADM12981

SEQ ID NO: 101587 - RNA, 1701 nt, Artificial Sequence
  derived and/or modified CDS sequence (opt2) from hemagglutinin__InfluenzaA__ADM12991
augaaggccauccucgucguccuccucuacaccuucgagaccgccaacgccgacacccucugcaucggcuaccacgccaacaacuccaccgacaccgucgacaccguccucgagaagaacgucaccgucacccacuccgucaaccuccucgaggacaagcacaacggcaagcucugcaagcuccgcggcgucgccccccuccaccucggcaagugcaacaucgccggcuggauccucggcaaccccgagugcgagucccucuccaccgccuccuccugguccuacaucgucgagaccuccuccuccgacaacggcaccugcuaccccggcgacuucaucgacuacgaggagcuccgcgagcagcucuccuccgucuccuccuucgagcgcuucgagaucuuccccaagaccuccuccuggcccaaccacgacuccaacaagggcgucaccgccgccugcccccacgccggcgccaaguccuucuacaagaaccucaucuggcucgucaagaagggcaacuccuaccccaagcucuccaaguccuacaucaacgacaagggcaaggagguccucguccucuggggcauccaccaccccuccaccuccgccgaccagcagucccucuaccagaacgccgacgccuacgucuucgucggcaccucccgcuacuccaagaaguucaagcccgagaucgccauccgccccaagguccgcgaccaggagggccgcaugaacuacuacuggacccucgucgagcccggcgacaagaucaccuucgaggccaccggcaaccucgucgucccccgcuacgccuucgccauggagcgcaacgccggcuccggcaucaucaucuccgacacccccguccacgacugcaacaccaccugccagacccccaagggcgccaucaacaccucccuccccuuccagaacauccaccccaucaccaucggcaagugccccaaguacgucaaguccaccaagcuccgccucgccaccggccuccgcaacguccccuccauccagucccgcggccucuucggcgccaucgccggcuucaucgagggcggcuggaccggcauggucgacggcugguacggcuaccaccaccagaacgagcagggcuccggcuacgccgccgaccucaaguccacccagcacgccaucgacgagaucaccaacaaggucaacuccgucaucgagaagaugaacacccaguucaccgccgucggcaaggaguucaaccaccucgagaagcgcaucgagaaccucaacaagaaggucgacgacggcuuccucgacaucuggaccuacaacgccgagcuccucguccuccucgagaacgagcgcacccucgacuaccacgacuccaacgucaagaaccucuacgagaagguccgcucccagcucaagaacaacgccaaggagaucggcaacggcugcuucgaguucuaccacaagugcgacaacaccugcauggaguccgucaagaacggcaccuacgacuaccccaaguacuccgaggaggccaagcucaaccgcgaggagaucgacggcgucaagcucgaguccacccgcaucuaccagauccucgccaucuacuccaccgucgccuccucccucguccucgucgucucccucggcgccaucuccuucuggaugugcuccaacggcucccuccagugccgcaucugcaucuga

SEQ ID NO: 101588 - RNA, 1701 nt, Artificial Sequence
  derived and/or modified CDS sequence (opt2) from hemagglutinin__InfluenzaA__ADM13001
augaaggccauccucgucguccuccucuacaccuucgccaccgccaacgccgacacccucugcaucggcuaccacgccaacaacuccaccgacaccgucgacaccguccucgagaagaacgucaccgucacccacuccgucaaccuccucgaggacaagcacaacggcaagcucugcaagcuccgcggcgucgccccccuccaccucggcaagugcaacaucgccggcuggauccucggcaaccccgagugcgagucccucuccaccgccuccuccugguccuacaucgucgagaccuccuccuccgacaacggcaccugcuaccccggcgacuucaucgacuacgaggagcuccgcgagcagcucuccuccgucuccuccuucgagcgcuucgagaucuuccccaagaccuccuccuggcccaaccacgacuccaacaagggcgucaccgccgccugcccccacgccggcgccaaguccuucuacaagaaccucaucuggcucgucaagaagggcaacuccuaccccaagcucuccaaguccuacaucaacgacaagggcaaggagguccucguccucuggggcauccaccaccccuccaccuccgccgaccagcagucccucuaccagaacgccgacgccuacgucuucgucggcaccucccgcuacuccaagaaguucaagcccgagaucgccauccgccccaagguccgcgaccaggagggccgcaugaacuacuacuggacccucgucgagcccggcgacaagaucaccuucgaggccaccggcaaccucgucgucccccgcuacgccuucgccauggagcgcaacgccggcuccggcaucaucaucuccgacacccccguccacgacugcaacaccaccugccagacccccaagggcgccaucaacaccucccuccccuuccagaacauccaccccaucaccaucggcaagugccccaaguacgucaaguccaccaagcuccgccucgccaccggccuccgcaacauccccuccauccagucccgcggccucuucggcgccaucgccggcuucaucgagggcggcuggaccggcauggucgacggcugguacggcuaccaccaccagaacgagcagggcuccggcuacgccgccgaccucaaguccacccagcacgccaucgacgagaucaccaacaaggucaacuccgucaucgagaagaugaacacccaguucaccgccgucggcaaggaguucaaccaccucgagaagcgcaucgagaaccucaacaagaaggucgacgacggcuuccucgacaucuggaccuacaacgccgagcuccucguccuccucgagaacgagcgcacccucgacuaccacgacuccaacgucaagaaccucuacgagaagguccgcucccagcucaagaacaacgccaaggagaucggcaacggcugcuucgaguucuaccacaagugcgacaacaccugcauggaguccgucaagaacggcaccuacgacuaccccaaguacuccgaggaggccaagcucaaccgcgaggagaucgacggcgucaagcucgaguccacccgcaucuaccagauccucgccaucuacuccaccgucgccuccucccucguccucgucgucucccucggcgccaucuccuucuggaugugcuccaacggcucccuccagugccgcaucugcaucuga

SEQ ID NO: 101589 - RNA, 1701 nt, Artificial Sequence; identical to SEQ ID NO: 99869
  derived and/or modified CDS sequence (opt2) from hemagglutinin__InfluenzaA__ADM13011

SEQ ID NO: 101590 - RNA, 1701 nt, Artificial Sequence
  derived and/or modified CDS sequence (opt2) from hemagglutinin__InfluenzaA__ADM13021
augaaggccauccucgucguccuccucuacaccuucgccaccgccaacgccgacacccucugcaucggcuaccacgccaacaacuccaccgacaccaucgacaccguccucgagaagaacgucaccgucacccacuccgucaaccuccucgaggacaagcacaacggcaagcucugcaagcuccgcggcgucgccccccuccaccucggcaagugcaacaucgccggcuggauccucggcaaccccgagugcgagucccucuccaccgccuccuccugguccuacaucgucgagaccuccuccuccgacaacggcaccugcuaccccggcgacuucaucgacuacgaggagcuccgcgagcagcucuccuccgucuccuccuucgagcgcuucgagaucuuccccaagaccuccuccuggcccaaccacgacuccaacaagggcgucaccgccgccugcccccacgccggcgccaaguccuucuacaagaaccucaucuggcucgucaagaagggcaacuccuaccccaagcucuccaaguccuacaucaacgacaagggcaaggagguccucguccucuggggcauccaccaccccuccaccuccgccgaccagcagucccucuaccagaacgccgacgccuacgucuucgucggcaccucccgcuacuccaagaaguucaagcccgagaucgccauccgccccaagguccgcgaccaggagggccgcaugaacuacuacuggacccucgucgagcccggcgacaagaucaccuucgaggccaccggcaaccucgucgucccccgcuacgccuucgccauggagcgcaacgccggcuccggcaucaucaucuccgacacccccguccacgacugcaacaccaccugccagacccccaagggcgccaucaacaccucccuccccuuccagaacauccaccccaucaccaucggcaagugccccaaguacgucaaguccaccaagcuccgccucgccaccggccuccgcaacguccccuccauccagucccgcggccucuucggcgccaucgccggcuucaucgagggcggcuggaccggcauggucgacggcugguacggcuaccaccaccagaacgagcagggcuccggcuacgccgccgaccucaaguccacccagaacgccaucgacaagaucaccaacaaggucaacuccgucaucgagaagaugaacacccaguucaccgccgucggcaaggaguucaaccaccucgagaagcgcaucgagaaccucaacaagaaggucgacgacggcuuccucgacaucuggaccuacaacgccgagcuccucguccuccucgagaacgagcgcacccucgacuaccacgacuccaacgucaagaaccucuacgagaagguccgcucccagcucaagaacaacgccaaggagaucggcaacggcugcuucgaguucuaccacaagugcgacaacaccugcauggaguccgucaagaacggcaccuacgacuaccccaaguacuccgaggaggccaagcucaaccgcgaggagaucgacggcgucaagcucgaguccacccgcaucuaccagauccucgccaucuacuccaccgucgccuccucccucguccucgucgucucccucggcgccaucuccuucuggaugugcuccaacggcucccuccagugccgcaucugcaucuga

SEQ ID NO: 101591 - RNA, 1701 nt, Artificial Sequence; identical to SEQ ID NO: 100051
  derived and/or modified CDS sequence (opt2) from hemagglutinin__InfluenzaA__ADM13031

SEQ ID NO: 101592 - RNA, 1701 nt, Artificial Sequence
  derived and/or modified CDS sequence (opt2) from hemagglutinin__InfluenzaA__ADM13041
augaaggccauccucgucguccuccucuacaccuucgccaccgccaacgccgacacccucugcaucggcuaccacgccaacaacuccaccgacaccgucgacaccguccucgagaagaacgucaccgucacccacuccgucaaccuccucgaggacaagcacaacggcaagcucugcaagcuccgcggcgucgccccccuccaccucggcaagugcaacaucgccggcuggauccucggcaaccccgagugcgagucccucuccaccgccuccuccugguccuacaucgucgagaccuccuccuccgacaacggcaccugcuaccccggcgacuucaucgacuacgaggagcuccgcgagcagcucuccuccgucuccuccuucgagcgcuucgagaucuuccccaagaccuccuccuggcccaaccacgacuccaacaagggcgucaccgccgccugcccccacgccggcgccaaguccuucuacaagaaccucaucuggcucgucaagaagggcaacuccuaccccaagcucuccaaguccuacaucaacgacaagggcaaggagguccucguccucuggggcauccaccaccccuccaccuccgccgaccagcagucccucuaccagaacgccgacgccuacgucuucgucggcaccucccgcuacuccaagaaguucaagcccgagaucgccauccgccccaagguccgcgagcaggagggccgcaugaacuacuacuggacccucgucgagcccggcgacaagaucaccuucgaggccaccggcaaccucgucgucccccgcuacgccuucgccauggagcgcaacgccggcuccggcaucaucaucuccgacacccccguccacgacugcaacaccaccugccagacccccaagggcgccaucaacaccucccuccccuuccagaacguccaccccaucaccaucggcaagugccccaaguacgucaaguccaccaagcuccgccucgccaccggccuccgcaacguccccuccauccagucccgcggccucuucggcgccaucgccggcuucaucgagggcggcuggaccggcauggucgacggcugguacggcuaccaccaccagaacgagcagggcuccggcuacgccgccgaccucaaguccacccagaacgccaucgacgagaucaccaacaaggucaacuccgucaucgagaagaugaacacccaguucaccgccgucggcaaggaguucaaccaccucgagaagcgcaucgagaaccucaacaagaaggucgacgacggcuuccucgacaucuggaccuacaacgccgagcuccucguccuccucgagaacgagcgcacccucgacuaccacgacuccaacgucaagaaccucuacgagaagguccgcucccagcucaagaacaacgccaaggagaucggcaacggcugcuucgaguucuaccacaagugcgacaacaccugcauggaguccgucaagaacggcaccuacgacuaccccaaguacuccgaggaggccaagcucaaccgcgaggagaucgacggcgucaagcucgaguccacccgcaucuaccagauccucgccaucuacuccaccgucgccuccucccucguccucgucgucucccucggcgccaucuccuucuggaugugcuccaacggcucccuccagugccgcaucugcaucuga

SEQ ID NO: 101593 - RNA, 1701 nt, Artificial Sequence
  derived and/or modified CDS sequence (opt2) from hemagglutinin__InfluenzaA__ADM13051
augaaggccauccucgucguccuccucuacaccuucgccaccaccaacgccgacacccucugcaucggcuaccacgccaacaacuccaccgacaccgucgacaccguccucgagaagaacgucaccgucacccacuccgucaaccuccucgaggacaagcacaacggcaagcucugcaagcuccgcggcgucgccccccuccaccucggcaagugcaacaucgccggcuggauccucggcaaccccgagugcgagucccucuccaccgccuccuccugguccuacaucgucgagaccuccuccuccgacaacggcaccugcuaccccggcgacuucaucgacuacgaggagcuccgcgagcagcucuccuccgucuccuccuucgagcgcuucgagaucuuccccaagaccuccuccuggcccaaccacgacuccaacaagggcgucaccgccgccugcccccacgccggcgccaaguccuucuacaagaaccucaucuggcucgucaagaagggcaacuccuaccccaagcucuccaaguccuacaucaacgacaagggcaaggagguccucguccucuggggcauccaccaccccuccaccuccgccgaccagcagucccucuaccagaacgccgacgccuacgucuucgucggcaccucccgcuacuccaagaaguucaagcccgagaucgccauccgccccaagguccgcgaccaggagggccgcaugaacuacuacuggacccucgucgagcccggcgacaagaucaccuucgaggccaccggcaaccucgucgucccccgcuacgccuucgccauggagcgcaacgccggcuccggcaucaucaucuccgacacccccguccacgacugcaacaccaccugccagacccccaagggcgccaucaacaccucccuccccuuccagaacauccaccccaucaccaucggcaagugccccaaguacgucaaguccaccaagcuccgccucgccaccggccuccgcaacguccccuccauccagucccgcggccucuucggcgccaucgccggcuucaucgagggcggcuggaccggcauggucgacggcugguacggcuaccaccaccagaacgagcagggcuccggcuacgccgccgaccucaaguccacccagaacgccaucgacaagaucaccaacaaggucaacuccgucaucgagaagaugaacacccaguucaccgccgucggcaaggaguucaaccaccucgagaagcgcaucgagaaccucaacaagaaggucgacgacggcuuccucgacaucuggaccuacaacgccgagcuccucguccuccucgagaacgagcgcacccucgacuaccacgacuccaacgucaagaaccucuacgagaagguccgcucccagcucaagaacaacgccaaggagaucggcaacggcugcuucgaguucuaccacaagugcgacaacaccugcauggaguccgucaagaacggcaccuacgacuaccccaaguacuccgaggaggccaagcucaaccgcgaggagaucgacggcgucaagcucgaguccacccgcaucuaccagauccucgccaucuacuccaccgucgccuccucccucguccucgucgucucccucggcgccaucuccuucuggaugugcuccaacggcucccuccagugccgcaucugcaucuga

SEQ ID NO: 101594 - RNA, 1701 nt, Artificial Sequence
  derived and/or modified CDS sequence (opt2) from hemagglutinin__InfluenzaA__ADM13061
augaaggccauccucgucguccuccucuacaccuucgccaccgccaacgccgacacccucugcaucggcuaccacgccaacaacuccaccgacaccgucgacaccguccucgagaagaacgucaccgucacccacuccgucaaccuccucgaggacaagcacaacggcaagcucugcaagcuccgcggcaucgccccccuccaccucggcaagugcaacaucgccggcuggauccucggcaaccccgagugcgagucccucuccaccgccuccuccugguccuacaucgucgagaccuccuccuccgacaacggcaccugcuaccccggcgacuucaucgacuacgaggagcuccgcgagcagcucuccuccgucuccuccuucgagcgcuucgagaucuuccccaagaccuccuccuggcccaaccacgacuccaacaagggcgucaccgccgccugcccccacgccggcgccaaguccuucuacaagaaccucaucuggcucgucaagaagggcaacuccuaccccaagcucuccaaguccuacaucaacgacaagggcaaggagguccucguccucuggggcauccaccaccccuccaccuccgccgaccagcagucccucuaccagaacgccgacgccuacgucuucgucggcaccucccgcuacuccaagaaguucaagcccgagaucgccauccgccccaagguccgcgaccaggagggccgcaugaacuacuacuggacccucgucgagcccggcgacaagaucaccuucgaggccaccggcaaccucgucgucccccgcuacgccuucgccauggagcgcaacgccggcuccggcaucaucaucuccgacacccccguccacgacugcaacaccuccugccagacccccaagggcgccaucaacaccucccuccccuuccagaacauccaccccaucaccaucggcaagugccccaaguacgucaaguccaccaagcuccgccucgccaccggccuccgcaacguccccuccauccagucccgcggccucuucggcgccaucgccggcuucaucgagggcggcuggaccggcauggucgacggcugguacggcuaccaccaccagaacgagcagggcuccggcuacgccgccgaccucaaguccacccagaacgccaucgacgagaucaccaacaaggucaacuccgucaucgagaagaugaacacccaguucaccgccgucggcaaggaguucaaccaccucgagaagcgcaucgagaaccucaacaagaaggucgacgacggcuuccucgacaucuggaccuacaacgccgagcuccucguccuccucgagaacgagcgcacccucgacuaccacgacuccaacgucaagaaccucuacgagaagguccgcucccagcucaagaacaacgccaaggagaucggcaacggcugcuucgaguucuaccacaagugcgacaacaccugcauggaguccgucaagaacggcaccuacgacuaccccaaguacuccgaggaggccaagcucaaccgcgaggagaucgacggcgucaagcucgaguccacccgcaucuaccagauccucgccaucuacuccaccgucgccuccucccucguccucgucgucucccucggcgccaucuccuucuggaugugcuccaacggcucccuccagugccgcaucugcaucuga

SEQ ID NO: 101595 - RNA, 1701 nt, Artificial Sequence; identical to SEQ ID NO: 100872
  derived and/or modified CDS sequence (opt2) from hemagglutinin__InfluenzaA__ADM13071

SEQ ID NO: 101596 - RNA, 1701 nt, Artificial Sequence
  derived and/or modified CDS sequence (opt2) from hemagglutinin__InfluenzaA__ADM13081
augaaggccauccucgucguccuccucuacaccuucgccaccgccaacgccgacacccucugcaucggcuaccacgccaacaacuccaccgacaccgucgacaccguccucgagaagaacgucaccgucacccacuccgucaaccuccucgaggacaagcacaacggcaagcucugcaagcuccgcggcaucgccccccuccaccucggcaagugcaacaucgccggcuggauccucggcaaccccgagugcgagucccucuccaccgccuccuccugguccuacaucgucgagaccuccggcuccgacaacggcaccugcuaccccggcgacuucaucgacuacgaggagcuccgcgagcagcucuccuccgucuccuccuucgagcgcuucgagaucuuccccaagaccuccuccuggcccaaccacgacuccaacaagggcgucaccgccgccugcccccacgccggcgccaaguccuucuacaagaaccucaucuggcucgucaagaagggcaacuccuaccccaagcucuccaaguccuacaucaacgacaaggagaaggagguccucguccucuggggcauccaccaccccuccaccuccgccgaccagcagucccucuaccagaacgccgacgccuacgucuucgucggcaccucccgcuacuccaagaaguucaagcccgagaucgccauccgccccaagguccgcgaccaggagggccgcaugaacuacuacuggacccucgucgagcccggcgacaagaucaccuucgaggccaccggcaaccucgucgucccccgcuacgccuucgccauggagcgcaacgccggcuccggcaucaucaucuccgacacccccguccacgacugcaacaccaccugccagacccccaagggcgccaucaacaccucccuccccuuccagaacauccaccccaucaccaucggcaagugccccaaguacgucaaguccaccaagcuccgccucgccaccggccuccgcaacguccccuccauccagucccgcggccucuucggcgccaucgccggcuucaucgagggcggcuggaccggcauggucgacggcugguacggcuaccaccaccagaacgagcagggcuccggcuacgccgccgaccucaaguccacccagaacgccaucgacgagaucaccaacaaggucaacuccgucaucgagaagaugaacacccaguucaccgccgucggcaaggaguucaaccaccucgagaagcgcaucgagaaccucaacaagaaggucgacgacggcuuccucgacaucuggaccuacaacgccgagcuccucguccuccucgagaacgagcgcacccucgacuaccacgacuccaacgucaagaaccucuacgagaagguccgcucccagcucaagaacaacgccaaggagaucggcaacggcugcuucgaguucuaccacaagugcgacaacaccugcauggaguccgucaagaacggcaccuacgacuaccccaaguacuccgaggaggccaagcucaaccgcgaggagaucgacggcgucaagcucgaguccacccgcaucuaccagauccucgccaucuacuccaccgucgccuccucccucguccucgucgucucccucggcgccaucuccuucuggaugugcuccaacggcucccuccagugccgcaucugcaucuga

SEQ ID NO: 101597 - RNA, 1701 nt, Artificial Sequence; identical to SEQ ID NO: 100125
  derived and/or modified CDS sequence (opt2) from hemagglutinin__InfluenzaA__ADM13091

SEQ ID NO: 101598 - RNA, 1701 nt, Artificial Sequence; identical to SEQ ID NO: 99869
  derived and/or modified CDS sequence (opt2) from hemagglutinin__InfluenzaA__ADM13101

SEQ ID NO: 101599 - RNA, 1701 nt, Artificial Sequence
  derived and/or modified CDS sequence (opt2) from hemagglutinin__InfluenzaA__ADM13111
augaaggccauccucgucguccuccucuacaccuucgagaccgccaacgccgacacccucugcaucggcuaccacgccaacaacuccaccgacaccgucgacaccguccucgagaagaacgucaccgucacccacuccgucaaccuccucgaggacaagcacaacggcaagcucugcaagcuccgcggcgucgccccccuccaccucggcaagugcaacaucgccggcuggauccucggcaaccccgagugcgagucccucuccaccgccuccuccugguccuacaucgucgagaccuccuccuccgacaacggcaccugcuaccccggcgacuucaucaacuacgaggagcuccgcgagcagcucuccuccgucuccuccuucgagcgcuucgagaucuuccccaagaccuccuccuggcccaaccacgacuccaacaagggcgucaccgccgccugcccccacgccggcgccaaguccuucuacaagaaccucaucuggcucgucaagaagggcaacuccuaccccaagcucuccaaguccuacaucaacgacaagggcaaggagguccucguccucuggggcauccaccaccccuccaccuccgccgaccagcagucccucuaccagaacgccgacgccuacgucuucgucggcaccucccgcuacuccaagaaguucaagcccgagaucgccauccgccccaagguccgcgaccaggagggccgcaugaacuacuacuggacccucgucgaccccggcgacaagaucaccuucgaggccaccggcaaccucgucgucccccgcuacgccuucgccauggagcgcaacgccggcuccggcaucaucaucuccgacacccccguccacgacugcaacaccaccugccagacccccaacggcgccaucaacaccucccuccccuuccagaacauccaccccaucaccaucggcaagugccccaaguacgucaaguccaccaagcuccgccucgccaccggccuccgcaacguccccuccauccagucccgcggccucuucggcgccaucgccggcuucaucgagggcggcuggaccggcauggucgacggcugguacggcuaccaccaccagaacgagcagggcuccggcuacgccgccgaccucaaguccacccagaacgccaucgacaagaucaccaacaaggucaacuccgucaucgagaagaugaacacccaguucaccgccgucggcaaggaguucaaccaccucgagaagcgcaucgagaaccucaacaagaaggucgacgacggcuuccucgacaucuggaccuacaacgccgagcuccucguccuccucgagaacgagcgcacccucgacuaccacgacuccaacgucaagaaccucuacgagaagguccgcucccagcucaagaacaacgccaaggagaucggcaacggcugcuucgaguucuaccacaagugcgacaacaccugcauggaguccgucaagaacggcaccuacgacuaccccaaguacuccgaggaggccaagcucaaccgcgaggagaucgacggcgucaagcucgaguccacccgcaucuaccagauccucgccaucuacuccaccgucgccuccucccucguccucgucgucucccucggcgccaucuccuucuggaugugcuccaacggcucccuccagugccgcaucugcaucuga

SEQ ID NO: 101600 - RNA, 1701 nt, Artificial Sequence; identical to SEQ ID NO: 98705
  derived and/or modified CDS sequence (opt2) from hemagglutinin__InfluenzaA__ADM13121

SEQ ID NO: 101601 - RNA, 1701 nt, Artificial Sequence; identical to SEQ ID NO: 99869
  derived and/or modified CDS sequence (opt2) from hemagglutinin__InfluenzaA__ADM13131

SEQ ID NO: 101602 - RNA, 1701 nt, Artificial Sequence; identical to SEQ ID NO: 100033
  derived and/or modified CDS sequence (opt2) from hemagglutinin__InfluenzaA__ADM13141

SEQ ID NO: 101603 - RNA, 1701 nt, Artificial Sequence; identical to SEQ ID NO: 100033
  derived and/or modified CDS sequence (opt2) from hemagglutinin__InfluenzaA__ADM13151

SEQ ID NO: 101604 - RNA, 1701 nt, Artificial Sequence; identical to SEQ ID NO: 99806
  derived and/or modified CDS sequence (opt2) from hemagglutinin__InfluenzaA__ADM13161

SEQ ID NO: 101605 - RNA, 1701 nt, Artificial Sequence; identical to SEQ ID NO: 100354
  derived and/or modified CDS sequence (opt2) from hemagglutinin__InfluenzaA__ADM13171

SEQ ID NO: 101606 - RNA, 1701 nt, Artificial Sequence; identical to SEQ ID NO: 100354
  derived and/or modified CDS sequence (opt2) from hemagglutinin__InfluenzaA__ADM13181

SEQ ID NO: 101607 - RNA, 1701 nt, Artificial Sequence
  derived and/or modified CDS sequence (opt2) from hemagglutinin__InfluenzaA__ADM13191
augaaggccauccucgucguccuccucuacacccucgccaccgccaacgccgacacccucugcaucggcuaccacgccaacaacuccaccgacaccgucgacaccguccucgagaagaacgucaccgucacccacuccgucaaccuccucgaggacaagcacaacggcaagcucugcaagcuccgcggcgucgccccccuccaccucggcaagugcaacaucgccggcuggauccucggcaaccccgagugcgagucccucuccaccgccuccuccugguccuacaucgucgagaccuccuccuccgacaacggcaccugcuaccccggcgacuucaucgacuacgaggagcuccgcgagcagcucuccuccgucuccuccuucgagcgcuucgagaucuuccccaagaccuccuccuggcccaaccacgacuccaacaagggcgucaccgccgccugcccccacgccggcgccaaguccuucuacaagaaccucaucuggcucgucaagaagggcaacuccuaccccaagcucuccaaguccuacaucaacgacaagggcaaggagguccucguccucuggggcauccaccaccccuccaccuccgccgaccagcagucccucuaccagaacgccgacgccuacgucuucgucggcaccucccgcuacuccaagaaguucaagcccgagaucgccauccgccccaagguccgcgaccaggagggccgcaugaacuacuacuggacccucgucgagcccggcgacaagaucaccuucgaggccaccggcaaccucgucgucccccgcuacgccuucgccauggagcgcaacgccggcuccggcaucaucaucuccgacacccccguccacgacugcaacaccaccugccagacccccaagggcgccaucaacaccucccuccccuuccagaacauccaccccaucaccaucggcaagugccccaaguacgucaaguccaccaagcuccgccucgccaccggccuccgcaacguccccuccauccagucccgcggccucuucggcgccaucgccggcuucaucgagggcggcuggaccggcauggucgacggcugguacggcuaccaccaccagaacgagcagggcuccggcuacgccgccgaccucaaguccacccagcacgccaucgacgagaucaccaacaaggucaacuccgucaucgagaagaugaacacccaguucaccgccgucggcaaggaguucaaccaccucgagaagcgcaucgagaaccucaacaagaaggucgacgacggcuuccucgacaucuggaccuacaacgccgagcuccucguccuccucgagaacgagcgcacccucgacuaccacgacuccaacgucaagaaccucuacgagaagguccgcucccagcucaagaacaacgccaaggagaucggcaacggcugcuucgaguucuaccacaagugcgacaacaccugcauggaguccgucaagaacggcaccuacgacuaccccaaguacuccgaggaggccaagcucaaccgcgaggagaucgacggcgucaagcucgaguccacccgcaucuaccagauccucgccaucuacuccaccgucgccuccucccucguccucgucgucucccucggcgccaucuccuucuggaugugcuccaacggcucccuccagugccgcaucugcaucuga

SEQ ID NO: 101608 - RNA, 1701 nt, Artificial Sequence
  derived and/or modified CDS sequence (opt2) from hemagglutinin__InfluenzaA__ADM13211
augaaggccauccucgucguccuccucuacacccucgccaccgccaacgccgacacccucugcaucggcuaccacgccaacaacuccaccgacaccgucgacaccguccucgagaagaacgucaccgucacccacuccgucaaccuccucgaggacaagcacaacggcaagcucugcaagcuccgcggcaucgccccccuccaccucggcaagugcaacaucgccggcuggauccucggcaaccccgagugcgagucccucuccaccgccuccuccugguccuacaucgucgagaccuccuccuccgacaacggcaccugcuaccccggcgacuucaucgacuacgaggagcuccgcgagcagcucuccuccgucuccuccuucgagcgcuucgagaucuuccccaagaccuccuccuggcccaaccacgacuccaacaagggcgucaccgccgccugcccccacgccggcgccaaguccuucuacaagaaccucaucuggcucgucaagaagggcaacuccuaccccaagcucuccaaguccuacaucaacgacaagggcaaggagguccucguccucuggggcauccaccaccccuccaccuccgccgaccagcagucccucuaccagaacgccgacgccuacgucuucgucggcaccucccgcuacuccaagaaguucaagcccgagaucgccauccgccccaagguccgcgaccaggagggccgcaugaacuacuacuggacccucgucgagcccggcgacaagaucaccuucgaggccaccggcaaccucgucgucccccgcuacgccuucgccauggagcgcaacgccggcuccggcaucaucaucuccgacacccccguccacgacugcaacaccaccugccagacccccaagggcgccaucaacaccucccuccccuuccagaacauccaccccaucaccaucggcaagugccccaaguacgucaaguccaccaagcuccgccucgccaccggccuccgcaacguccccuccauccagucccgcggccucuucggcgccaucgccggcuucaucgagggcggcuggaccggcauggucgacggcugguacggcuaccaccaccagaacgagcagggcuccggcuacgccgccgaccucaaguccacccagaacgccaucgacgagaucaccaacaaggucaacuccgucaucgagaagaugaacacccaguucaccgccgucggcaaggaguucaaccaccucgagaagcgcaucgagaaccucaacaagaaggucgacgacggcuuccucgacaucuggaccuacaacgccgagcuccucguccuccucgagaacgagcgcacccucgacuaccacgacuccaacgucaagaaccucuacgagaagguccgcucccagcucaagaacaacgccaaggagaucggcaacggcugcuucgaguucuaccacaagugcgacaacaccugcauggaguccgucaagaacggcaccuacgacuaccccaaguacuccgaggaggccaagcucaaccgcgaggagaucgacggcgucaagcucgaguccacccgcaucuaccagauccucgccaucuacuccaccgucgccuccucccucguccucgucgucucccucggcgccaucuccuucuggaugugcuccaacggcucccuccagugccgcaucugcaucuga

SEQ ID NO: 101609 - RNA, 1701 nt, Artificial Sequence; identical to SEQ ID NO: 101608
  derived and/or modified CDS sequence (opt2) from hemagglutinin__InfluenzaA__ADM13221

SEQ ID NO: 101610 - RNA, 1701 nt, Artificial Sequence
  derived and/or modified CDS sequence (opt2) from hemagglutinin__InfluenzaA__ADM13231
augaaggccauccucgucguccuccucuacaccuucgagaccgccaacgccgacacccucugcaucggcuaccacgccaacaacuccaccgacaccgucgacaccguccucgagaagaacgucaccgucacccacuccgucaaccuccucgaggacaagcacaacggcaagcucugcaagcuccgcggcgucgccccccuccaccucggcaagugcaacaucgccggcuggauccucggcaaccccgagugcgagucccucuccaccgccuccuccugguccuacaucgucgagaccuccuccuccgacaacggcaccugcuaccccggcgacuucaucaacuacgaggagcuccgcgagcagcucuccuccgucuccuccuucgagcgcuucgagaucuuccccaagaccuccuccuggcccaaccacgacuccaacaagggcgucaccgccgccugcccccacgccggcgccaaguccuucuacaagaaccucaucuggcucgucaagaagggcaacuccuaccccaagcucuccaaguccuacaucaacgacaagggcaaggagguccucguccucuggggcauccaccaccccuccaccuccgccgaccagcagucccucuaccagaacgccgacgccuacgucuucgucggcaccucccgcuacuccaagaaguucaagcccgagaucgccauccgccccaagguccgcgaccaggagggccgcaugaacuacuacuggacccucgucgagcccggcgacaagaucaccuucgaggccaccggcaaccucgucgucccccgcuacgccuucgccauggagcgcaacgccggcuccggcaucaucaucuccgacacccccguccacgacugcaacaccaccugccagacccccaacggcgccaucaacaccucccuccccuuccagaacauccaccccaucaccaucggcaagugccccaaguacgucaaguccaccaagcuccgccucgccaccggccuccgcaacguccccuccauccagucccgcggccucuucggcgccaucgccggcuucaucgagggcggcuggaccggcauggucgacggcugguacggcuaccaccaccagaacgagcagggcuccggcuacgccgccgaccucaaguccacccagaacgccaucgacaagaucaccaacaaggucaacuccgucaucgagaagaugaacacccaguucaccgccgucggcaaggaguucaaccaccucgagaagcgcaucgagaaccucaacaagaaggucgacgacggcuuccucgacaucuggaccuacaacgccgagcuccucguccuccucgagaacgagcgcacccucgacuaccacgacuccaacgucaagaaccucuacgagaagguccgcucccagcucaagaacaacgccaaggagaucggcaacggcugcuucgaguucuaccacaagugcgacaacaccugcauggaguccgucaagaacggcaccuacgacuaccccaaguacuccgaggaggccaagcucaaccgcgaggagaucgacggcgucaagcucgaguccacccgcaucuaccagauccucgccaucuacuccaccgucgccuccucccucguccucgucgucucccucggcgccaucuccuucuggaugugcuccaacggcucccuccagugccgcaucugcaucuga

SEQ ID NO: 101611 - RNA, 1701 nt, Artificial Sequence; identical to SEQ ID NO: 99869
  derived and/or modified CDS sequence (opt2) from hemagglutinin__InfluenzaA__ADM13241

SEQ ID NO: 101612 - RNA, 1701 nt, Artificial Sequence
  derived and/or modified CDS sequence (opt2) from hemagglutinin__InfluenzaA__ADM13251
augaaggccauccucgucguccuccucuacaccuucgccaccaccaacgccgacacccucugcaucggcuaccacgccaacaacuccaccgacaccgucgacaccguccucgagaagaacgucaccgucacccacuccgucaaccuccucgaggacaagcacaacggcaagcucugcaagcuccgcggcgucgccccccuccaccucggcaagugcaacaucgccggcuggauccucggcaaccccgagugcgagucccucuccaccgccuccuccugguccuacaucgucgagaccuccuccuccgacaacggcaccugcuaccccggcgacuucaucgacuacgaggagcuccgcgagcagcucuccuccgucuccuccuucgagcgcuucgagaucuuccccaagaccuccuccuggcccaaccacgacuccaacaagggcgucaccgccgccugcccccacgccggcgccaaguccuucuacaagaaccucaucuggcucgucaagaagggcaacuccuaccccaagcucuccaaguccuacaucaacgacaagggcaaggagguccucguccucuggggcauccaccaccccuccaccuccgccgaccagcagucccucuaccagaacgccgacgccuacgucuucgucggcaccucccgcuacuccaagaaguucaagcccgagaucgccauccgccccaagguccgcgaccaggagggccgcaugaacuacuacuggacccucgucgagcccggcgacaagaucaccuucgaggccaccggcaaccucgucgucccccgcuacgccuucgccauggagcgcgacgccggcuccggcaucaucaucuccgacacccccguccacgacugcaacaccaccugccagacccccaagggcgccaucaacaccucccuccccuuccagaacauccaccccaucaccaucggcaagugccccaaguacgucaaguccaccaagcuccgccucgccaccggccuccgcaacguccccuccauccagucccgcggccucuucggcgccaucgccggcuucaucgagggcggcuggaccggcauggucgacggcugguacggcuaccaccaccagaacgagcagggcuccggcuacgccgccgaccucaaguccacccagaacgccaucgacaagaucaccaacaaggucaacuccgucaucgagaagaugaacacccaguucaccgccgucggcaaggaguucaaccaccucgagaagcgcaucgagaaccucaacaagaaggucgacgacggcuuccucgacaucuggaccuacaacgccgagcuccucguccuccucgagaacgagcgcacccucgacuaccacgacuccaacgucaagaaccucuacgagaagguccgcucccagcucaagaacaacgccaaggagaucggcaacggcugcuucgaguucuaccacaagugcgacaacaccugcauggaguccgucaagaacggcaccuacgacuaccccaaguacuccgaggaggccaagcucaaccgcgaggagaucgacggcgucaagcucgaguccacccgcaucuaccagauccucgccaucuacuccaccgucgccuccucccucguccucgucgucucccucggcgccaucuccuucuggaugugcuccaacggcucccuccagugccgcaucugcaucuga

SEQ ID NO: 101613 - RNA, 1701 nt, Artificial Sequence
  derived and/or modified CDS sequence (opt2) from hemagglutinin__InfluenzaA__ADM13261
augaaggccauccucgucguccuccucuacaccuucgccaccgccaacgccgacacccucugcaucggcuaccacgccaacaacuccaccgacaccgucgacaccguccucgagaagaacgucaccgucacccacuccgucaaccuccucgaggacaagcacaacggcaagcucugcaagcuccgcggcaucgccccccuccaccucggcaagugcaacaucgccggcuggauccucggcaaccccgagugcgagucccucuccaccgccuccuccugguccuacaucgucgagaccuccggcuccgacaacggcaccugcuaccccggcgacuucaucgacuacgaggagcuccgcgagcagcucuccuccgucuccuccuucgagcgcuucgagaucuuccccaagaccuccuccuggcccaaccacgacuccaacaagggcgucaccgccgccugcccccacgccggcgccaaguccuucuacaagaaccucaucuggcucgucaagaagggcaacuccuaccccaagcucuccaaguccuacaucaacgacaagggcaaggagguccucguccucuggggcauccaccaccccuccaccuccgccgaccagcagucccucuaccagaacgccgacgccuacgucuucgucggcaccucccgcuacuccaagaaguucaagcccgagaucgccauccgccccaagguccgcgaccaggagggccgcaugaacuacuacuggacccucgucgagcccggcgacaagaucaccuucgaggccaccggcaaccucgucgucccccgcuacgccuucgccauggagcgcaacgccggcuccggcaucaucaucuccgacacccccguccacgacugcaacaccaccugccagacccccaagggcgccaucaacaccucccuccccuuccagaacauccaccccaucaccaucggcaagugccccaaguacgucaaguccaccaagcuccgccucgccaccggccuccgcaacguccccuccauccagucccgcggccucuucggcgccaucgccggcuucaucgagggcggcuggaccggcauggucgacggcugguacggcuaccaccaccagaacgagcagggcuccggcuacgccgccgaccucaaguccacccagaacgccaucgacgagaucaccaacaaggucaacuccgucaucgagaagaugaacacccaguucaccgccgucggcaaggaguucaaccaccucgagaagcgcaucgagaaccucaacaagaaggucgacgacggcuuccucgacaucuggaccuacaacgccgagcuccucguccuccucgagaacgagcgcacccucgacuaccacgacuccaacgucaagaaccucuacgagaagguccgcucccagcucaagaacaacgccaaggagaucggcaacggcugcuucgaguucuaccacaagugcgacaacaccugcauggaguccgucaagaacggcaccuacgacuaccccaaguacuccgaggaggccaagcucaaccgcgaggagaucgacggcgucaagcucgaguccacccgcaucuaccagauccucgccaucuacuccaccgucgccuccucccucguccucgucgucucccucggcgccaucuccuucuggaugugcuccaacggcucccuccagugccgcaucugcaucuga

SEQ ID NO: 101614 - RNA, 1701 nt, Artificial Sequence
  derived and/or modified CDS sequence (opt2) from hemagglutinin__InfluenzaA__ADM13271
augaaggccauccucgucguccuccucuacaccuucgccaccgccaacgccgacacccucugcaucggcuaccacgccaacaacuccaccgacaccgucgacaccguccucgagaagaacgucaccgucacccacuccgucaaccuccucgaggacaagcacaacggcaagcucugcaagcuccgcggcgucgccccccuccaccucggcaagugcaacaucgccggcuggauccucggcaaccccgagugcgagucccucuccaccgccuccuccugguccuacaucgucgagaccuccuccuccgacaacggcaccugcuaccccggcgacuucaucgacuacgaggagcuccgcgagcagcucuccuccgucuccuccuucgagcgcuucgagaucuuccccaagaccuccuccuggcccaaccacgacuccaacaagggcgucaccgccgccugcccccacgccggcgccaaguccuucuacaagaaccucaucuggcucgucaagaagggcaacuccuaccccaagcucuccaaguccuacaucaacgacaagggcaaggagguccucguccucuggggcauccaccaccccuccaccuccgccgaccagcagucccucuaccagaacgccgacgccuacgucuucgucggcaccucccgcuacuccaagaaguucaagcccgagaucgccauccgccccaagguccgcgaccaggagggccgcaugaacuacuacuggacccucgucgagcccggcgacaagaucaccuucgaggccaccggcaaccucgucgucccccgcuacgccuucgccauggagcgcaacgccggcuccggcaucaucaucuccgacacccccguccacgacugcaacaccaccugccagacccccaagggcgccaucaacaccucccuccccuuccagaacauccaccccaucaccaucggcaagugccccaaguacgucaaguccaccaagcuccgccucgccaccggccuccgcaacguccccuccauccagucccgcggccucuucggcgccaucgccggcuucaucgagggcggcuggaccggcauggucgacggcugguacggcuaccaccaccagaacgagcagggcuccggcuacgccgccgaccucaaguccacccagaacgccaucgacaagaucaccaacaaggucaacuccgucaucgagaagaugaacacccaguucaccgccgucggcaaggaguucaaccaccucgagaagcgcaucgagaaccucaacaagaaggucgacgacggcuuccucgacaucuggaccuacaacgccgagcuccucguccuccucgagaacgagcgcacccucgacuaccacgacuccaacgucaagaaccucuacgagaagguccgcucccagcucaagaacaacgccaaggagaucggcaacggcugcuucgaguucuaccacaagugcgacaacaccugcauggaguccgucaagaacggcaccuacgacuaccccaaguacuccgaggaggccaagcucaaccgcgaggagaucgacggcgucaagcucgaguccacccgcauccaccagauccucgccaucuacuccaccgucgccuccucccucguccucgucgucucccucggcgccaucuccuucuggaugugcuccaacggcucccuccagugccgcaucugcaucuga

SEQ ID NO: 101615 - RNA, 1701 nt, Artificial Sequence; identical to SEQ ID NO: 101610
  derived and/or modified CDS sequence (opt2) from hemagglutinin__InfluenzaA__ADM13281

SEQ ID NO: 101616 - RNA, 1701 nt, Artificial Sequence; identical to SEQ ID NO: 99806
  derived and/or modified CDS sequence (opt2) from hemagglutinin__InfluenzaA__ADM13291

SEQ ID NO: 101617 - RNA, 1701 nt, Artificial Sequence
  derived and/or modified CDS sequence (opt2) from hemagglutinin__InfluenzaA__ADM13301
augaaggccauccucgucguccuccucuacaccuucgccaccgccaacgccgacacccucugcaucggcuaccacgccaacaacuccaccgacaccgucgacaccauccucgagaagaacgucaccgucacccacuccgucaaccuccucgaggacaagcacaacggcaagcucugcaagcuccgcggcgucgccccccuccaccucggcaagugcaacaucgccggcuggauccucggcaaccccgagugcgagucccucuccaccgccuccuccugguccuacaucgucgagaccuccuccuccgacaacggcaccugcuaccccggcgacuucaucgacuacgaggagcuccgcgagcagcucuccuccgucuccuccuucgagcgcuucgagaucuuccccaagaccuccuccuggcccaaccacgacuccaacaagggcgucaccgccgccugcccccacgccggcgccaaguccuucuacaagaaccucaucuggcucgucaagaaggagaacuccuaccccaagcucuccaaguccuacaucaacgacaagggcaaggagguccucguccucuggggcauccaccaccccuccaccuccgccgaccagcagucccucuaccagaacgucgacgccuacgucuucgucggcaccucccgcuacuccaagaaguucaagcccgagaucgccauccgccccaagguccgcgaccaggagggccgcaugaacuacuacuggacccucgucgagcccggcgacaagaucaccuucgaggccaccggcaaccucgucgucccccgcuacgccuucgccauggagcgcaacgccggcuccggcaucaucaucuccgacacccccguccacgacugcaacaccaccugccagacccccaagggcgccaucaacaccucccuccccuuccagaacauccaccccaucaccaucggcaagugccccaaguacgucaaguccaccaagcuccgccucgccaccggccuccgcaacguccccuccauccagucccgcggccucuucggcgccaucgccggcuucaucgagggcggcuggaccggcauggucgacggcugguacggcuaccaccaccagaacgagcagggcuccggcuacgccgccgaccucaaguccacccagaacgccaucgacgagaucaccaacaaggucaacuccgucaucgagaagaugaacacccaguucaccgccgucggcaaggaguucaaccaccucgagaagcgcaucgagaaccucaacaagaaggucgacgacggcuuccucgacaucuggaccuacaacgccgagcuccucguccuccucgagaacgagcgcacccucgacuaccacgacuccaacgucaagaaccucuacgagaagguccgcucccagcucaagaacaacgccaaggagaucggcaacggcugcuucgaguucuaccacaagugcgacaacaccugcauggaguccgucaagaacggcaccuacgacuaccccaaguacuccgaggaggccaagcucaaccgcgaggagaucgacggcgucaagcucgaguccacccgcaucuaccagauccucgccaucuacuccaccgucgccuccucccucguccucgucgucucccucggcgccaucuccuucuggaugugcuccaacggcucccuccagugccgcaucugcaucuga

SEQ ID NO: 101618 - RNA, 1701 nt, Artificial Sequence
  derived and/or modified CDS sequence (opt2) from hemagglutinin__InfluenzaA__ADM13311
augaaggccauccucgucguccuccucuacaccuucgccaccgccaacgccgacacccucugcaucggcuaccacgccaacaacuccaccgacaccgucgacaccauccucgagaagaacgucaccgucacccacuccgucaaccuccucgagaacaagcacaacggcaagcucugcaagcuccgcggcgucuccccccuccaccucggcaagugcaacaucgccggcuggauccucggcaaccccgagugcgagucccucuccaccgccuccuccugguccuacaucgucgagaccuccuccuccgacaacggcaccugcuaccccggcgacuucaucgacuacgaggagcuccgcgagcagcucuccuccgucuccuccuucgagcgcuucgagaucuuccccaagaccuccuccuggcccaaccacgacuccaacaagggcgucaccgccgccugcccccacgccggcgccaaguccuucuacaagaaccucaucuggcucgucaagaagggcaacuccuaccccaagcucuccaaguccuacaucaacgacaagggcaaggagguccucguccucuggggcauccaccaccccuccaccuccgccgaccagcagucccucuaccagaacgccgacgccuacgucuucgucggcaccucccgcuacuccaagaaguucaagcccgagaucgccauccgccccaagguccgcgaccaggagggccgcaugaacuacuacuggacccucgucgagcccggcgacaagaucaccuucgaggccaccggcaaccucgucgucccccgcuacgccuucgccauggagcgcaacgccggcuccggcaucaucaucuccgacacccccguccacgacugcaacaccaccugccagacccccaagggcgccaucaacaccucccuccccuuccagaacauccaccccaucaccaucggcaagugccccaaguacgucaaguccaccaagcuccgccucgccaccggccuccgcaacguccccuccauccagucccgcggccucuucggcgccaucgccggcuucaucgagggcggcuggaccggcauggucgacggcugguacggcuaccaccaccagaacgagcagggcuccggcuacgccgccgaccucaaguccacccagaacgccaucgacgagaucaccaacaaggucaacuccgucaucgagaagaugaacacccaguucaccgccgucggcaaggaguucaaccaccucgagaagcgcaucgagaaccucaacaagaaggucgacgacggcuuccucgacaucuggaccuacaacgccgagcuccucguccuccucgagaacgagcgcacccucgacuaccacgacuccaacgucaagaaccucuacgagaagguccgcucccagcucaagaacaacgccaaggagaucggcaacggcugcuucgaguucuaccacaagugcgacaacaccugcauggaguccgucaagaacggcaccuacgacuaccccaaguacuccgaggaggccaagcucaaccgcgaggagaucgacggcgucaagcucgaguccacccgcaucuaccagauccucgccaucuacuccaccgccgccuccucccucguccucgucgucucccucggcgccaucuccuucuggaugugcuccaacggcucccuccagugccgcaucugcaucuga

SEQ ID NO: 101619 - RNA, 1701 nt, Artificial Sequence; identical to SEQ ID NO: 99869
  derived and/or modified CDS sequence (opt2) from hemagglutinin__InfluenzaA__ADM13321

SEQ ID NO: 101620 - RNA, 1701 nt, Artificial Sequence
  derived and/or modified CDS sequence (opt2) from hemagglutinin__InfluenzaA__ADM13331
augaaggccauccucgucguccuccucuacaccuucgccaccgccaacgccgacacccucugcaucggcuaccacgccaacaacuccaccgacaccgucgacaccguccucgagaagaacgucaccgucacccacuccgucaaccuccucgaggacaagcacaacggcaagcucugcaagcuccgcggcgucgccccccuccaccucggcaagugcaacaucgccggcuggauccucggcaaccccgagugcgagucccucuccaccgccuccuccugguccuacaucgucgagaccuccuccuccgacaacggcaccugcuaccccggcgacuucaucgacuacgaggagcuccgcgagcagcucuccuccgucuccuccuucgagcgcuucgagaucuuccccaagaccuccuccuggcccgaccacgacuccaacaagggcgucaccgccgccugcccccacgccggcgccaaguccuucuacaagaaccucaucuggcucgucaagaagggcaacuccuaccccaagcucuccaaguccuacaucaacgacaagggcaaggagguccucguccucuggggcauccaccaccccuccaccuccgccgaccagcagucccucuaccagaacgccgacgccuacgucuucgucggcaccucccgcuacuccaagaaguucaagcccgagaucgccauccgccccaagguccgcgaccaggagggccgcaugaacuacuacuggacccucgucgagcccggcgacaagaucaccuucgaggccaccggcaaccucgucgucccccgcuacgccuucgccauggagcgcaacgccggcuccggcaucaucaucuccgacacccccguccacgacugcaacaccaccugccagacccccaagggcgccaucaacaccucccuccccuuccagaacauccaccccaucaccaucggcaagugccccaaguacgucaaguccaccaagcuccgccucgccaccggccuccgcaacguccccuccauccagucccgcggccucuucggcgccaucgccggcuucaucgagggcggcuggaccggcauggucgacggcugguacggcuaccaccaccagaacgagcagggcuccggcuacgccgccgaccucaaguccacccagaacgccaucgacaagaucaccaacaaggucaacuccgucaucgagaagaugaacacccaguucaccgccgucggcaaggaguucaaccaccucgagaagcgcaucgagaaccucaacaagaaggucgacgacggcuuccucgacaucuggaccuacaacgccgagcuccucguccuccucgagaacgagcgcacccucgacuaccacgacuccaacgucaagaaccucuacgagaagguccgcucccagcucaagaacaacgccaaggagaucggcaacggcugcuucgaguucuaccacaagugcgacaacaccugcauggaguccgucaagaacggcaccuacgacuaccccaaguacuccgaggaggccaagcucaaccgcgaggagaucgacggcgucaagcucgaguccacccgcaucuaccagauccucgccaucuacuccaccgucgccuccucccucguccucgucgucucccucggcgccaucuccuucuggaugugcuccaacggcucccuccagugccgcaucugcaucuga

SEQ ID NO: 101621 - RNA, 1701 nt, Artificial Sequence; identical to SEQ ID NO: 100318
  derived and/or modified CDS sequence (opt2) from hemagglutinin__InfluenzaA__ADM13341

SEQ ID NO: 101622 - RNA, 1701 nt, Artificial Sequence; identical to SEQ ID NO: 101284
  derived and/or modified CDS sequence (opt2) from hemagglutinin__InfluenzaA__ADM13351

SEQ ID NO: 101623 - RNA, 1701 nt, Artificial Sequence; identical to SEQ ID NO: 98365
  derived and/or modified CDS sequence (opt2) from hemagglutinin__InfluenzaA__ADM13442

SEQ ID NO: 101624 - RNA, 1701 nt, Artificial Sequence; identical to SEQ ID NO: 98365
  derived and/or modified CDS sequence (opt2) from hemagglutinin__InfluenzaA__ADM13443

SEQ ID NO: 101625 - RNA, 1701 nt, Artificial Sequence; identical to SEQ ID NO: 98365
  derived and/or modified CDS sequence (opt2) from hemagglutinin__InfluenzaA__ADM13444

SEQ ID NO: 101626 - RNA, 1701 nt, Artificial Sequence; identical to SEQ ID NO: 99312
  derived and/or modified CDS sequence (opt2) from hemagglutinin__InfluenzaA__ADM13445

SEQ ID NO: 101627 - RNA, 1701 nt, Artificial Sequence; identical to SEQ ID NO: 98365
  derived and/or modified CDS sequence (opt2) from hemagglutinin__InfluenzaA__ADM13446

SEQ ID NO: 101628 - RNA, 1701 nt, Artificial Sequence
  derived and/or modified CDS sequence (opt2) from hemagglutinin__InfluenzaA__ADM13447
augaagaccaucaucgcccucuccuacaucuucugccucgcccucggccaggaccuccccggcaacgacaacuccaccgccacccucugccucggccaccacgccguccccaacggcacccucgucaagaccaucaccgacgaccagaucgaggucaccaacgccaccgagcucguccaguccuccuccaccggcaagaucugcaacaacccccaccgcauccucgacggcaucgacugcacccucaucgacgcccuccucggcgacccccacugcgacgucuuccagaacgagaccugggaccucuucgucgagcgcuccaaggccuucuccaacugcuaccccuacgacguccccgacuacgccucccuccgcucccucgucgccuccuccggcacccucgaguucaucaccgagggcuucaccuggaccggcgucacccagaacggcggcuccaacgccugcaagcgcggccccggcuccggcuucuucucccgccucaacuggcucaccaaguccggcuccaccuacuccguccucaacgucaccaugcccaacaacgacaacuucgacaagcucuacaucuggggcguccaccaccccuccaccaaccaggagcagaccucccucuacguccaggccuccggccgcgucaccgucuccacccgccgcucccagcagaccaucauccccaacaucggcucccgccccuggguccgcggccucuccucccgcaucuccaucuacuggaccaucgucaagcccggcgacguccucgucaucaacuccaacggcaaccucaucgccccccgcggcuacuucaagaugcgcaccggcaaguccuccaucaugcgcuccgacgcccccaucgacaccugcaucuccgagugcaucacccccaacggcuccauccccaacgacaagcccuuccagaacgucaacaagaucaccuacggcgccugccccaaguacgucaagcagaacacccucaagcucgccaccggcaugcgcaacguccccgagaagcagacccgcggccucuucggcgccaucgccggcuucaucgagaacggcugggagggcaugaucgacggcugguacggcuuccgccaccagaacuccgagggcaccggccaggccgccgaccucaaguccacccaggccgccaucgaccagaucaacggcaagcucaaccgcgucaucgagaagaccaacgagaaguuccaccagaucgagaaggaguucuccgaggucgagggccgcauccaggaccucgagaaguacgucgaggacaccaagaucgaccucugguccuacaacgccgagcuccucgucgcccucgagaaccagcacaccaucgaccucaccgacuccgagaugaacaagcucuucgagaagacccgccgccagcuccgcgagaacgccgaggacaugggcaacggcugcuucaagaucuaccacaagugcgacaacgccugcaucgaguccauccgcaacggcaccuacgaccacgacgucuaccgcgacgaggcccucaacaaccgcuuccagaucaagggcgucgagcucaaguccggcuacaaggacuggauccucuggaucuccuucgccaucuccugcuuccuccucugcgucguccuccucggcuucaucaugugggccugccagcgcggcaacauccgcugcaacaucugcaucuga

SEQ ID NO: 101629 - RNA, 1701 nt, Artificial Sequence; identical to SEQ ID NO: 98435
  derived and/or modified CDS sequence (opt2) from hemagglutinin__InfluenzaA__ADM13448

SEQ ID NO: 101630 - RNA, 1701 nt, Artificial Sequence
  derived and/or modified CDS sequence (opt2) from hemagglutinin__InfluenzaA__ADM13449
augaagaccaucaucgcccucuccuacaucuucugccucgccuucggccaggaccuccccggcaacgacaacuccaccgccacccucugccucggccaccacgccguccccaacggcacccucgucaagaccaucaccgacgaccagaucgaggucaccaacgccaccgagcucguccaguccuccuccaccggcaagaucugcaacaacccccaccgcauccucgacggcaucgacugcacccucaucgacgcccuccucggcgacccccacugcgacgucuuccagaacgagaccugggaccucuucgucgagcgcuccaaggccuucuccaacugcuaccccuacgacguccccgacuacgccucccuccgcucccucgucgccuccuccggcacccucgaguucaucaccgagggcuucaccuggaccggcgucacccagaacggcggcuccaacgccugcaagcgcggccccggcuccggcuucuucucccgccucaacuggcucaccaaguccggcuccaccuaccccguccucaacgucaccaugcccaacaacgacaacuucgacaagcucuacaucuggggcguccaccaccccuccaccaaccaggagcagaccucccucuacguccaggccuccggccgcgucaccgucuccacccgccgcucccagcagaccaucauccccaacaucgagucccgccccuggguccgcggccucuccucccgcaucuccaucuacuggaccaucgucaaccccggcgacguccucgucaucaacuccaacggcaaccucaucgccccccgcggcuacuucaagaugcgcaccggcaaguccuccaucaugcgcuccgacgcccccaucgacaccugcaucuccgagugcaucacccccaacggcuccauccccaacgacaagcccuuccagaacgucaacaagaucaccuacggcgccugccccaaguacgucaagcagaacacccucaagcucgccaccggcaugcgcaacguccccgagaagcagacccgcggccucuucggcgccaucgccggcuucaucgagaacggcugggagggcaugaucgacggcugguacggcuuccgccaccagaacuccgagggcaccggccaggccgccgaccucaaguccacccaggccgccaucgaccagaucaacggcaagcucaaccgcgucaucgagaagaccaacgagaaguuccaccagaucgagaaggaguucuccgaggucgagggccgcauccaggaccucgagaaguacgucgaggacaccaagaucgaccucugguccuacaacgccgagcuccucgucgcccucgagaaccagcacaccaucgaccucaccgacuccgagaugaacaagcucuucgagaagacccgccgccagcuccgcgagaacgccgaggacaugggcaacggcugcuucaagaucuaccacaagugcgacaacgccugcaucgaguccauccgcaacggcaccuacgaccacgacgucuaccgcgacgaggcccucaacaaccgcuuccagaucaagggcgucgagcucaaguccggcuacaaggacuggauccucuggaucuccuucgccaucuccugcuuccuccucugcgucguccuccucggcuucaucaugugggccugccagcgcggcaacauccgcugcaacaucugcaucuga

SEQ ID NO: 101631 - RNA, 1701 nt, Artificial Sequence; identical to SEQ ID NO: 98467
  derived and/or modified CDS sequence (opt2) from hemagglutinin__InfluenzaA__ADM13450

SEQ ID NO: 101632 - RNA, 1701 nt, Artificial Sequence
  derived and/or modified CDS sequence (opt2) from hemagglutinin__InfluenzaA__ADM13451
augaagaccaucaucgcccucuccuacaucuucugccucgcccucggccaggaccuccccggcaacgacaaccgcaccgccacccucugccucggccaccacgccguccccaacggcacccucgucaagaccaucaccgacgaccagaucgaggucaccaacgccaccgagcucguccaguccuccuccaccggcaagaucugcaacaacccccaccgcauccucgacggcaucgacugcacccucaucgacgcccuccucggcgacccccacugcgacgucuuccagaacgagaccugggaccucuucgucgagcgcuccaaggccuucuccaacugcuaccccuacgacguccccgacuacgccucccuccgcucccucgucgccuccuccggcacccucgaguucaucaccgagggcuucaccuggaccggcgucacccagaacggcggcuccaacgccugcaagcgcggccccggcuccggcuucuucucccgccucaacuggcucaccaaguccggcuccaccuaccccguccucaacgucaccaugcccaacaacgacaacuucgacaagcucuacaucuggggcguccaccaccccuccaccaaccaggagcagaccucccucuacguccaggccuccggccgcgucaccgucuccacccgccgcucccagcagaccaucauccccaacaucggcucccgccccuggguccgcggccucuccucccgcaucuccaucuacuggaccaucgucaagcccggcgacguccucgucaucaacuccaacggcaaccucaucgccccccgcggcuacuucaagaugcgcaccggcaaguccuccaucaugcgcuccgacgcccccaucgacaccugcaucuccgagugcaucacccccaacggcuccauccccaacgacaagcccuuccagaacgucaacaagaucaccuacggcgccugccccaaguacgucaagcagaacacccucaagcucgccaccggcaugcgcaacguccccgagaagcagacccgcggccucuucggcgccaucgccggcuucaucgagaacggcugggagggcaugaucgacggcugguacggcuuccgccaccagaacuccgagggcaccggccaggccgccgaccucaaguccacccaggccaccaucgaccagaucaacggcaagcucaaccgcgucaucgagaagaccaacgagaaguuccaccagaucgagaaggaguucuccgaggucgagggccgcauccaggaccucgagaaguacgucgaggacaccaagaucgaccucugguccuacaacgccgagcuccucgucgcccucgagaaccagcacaccaucgaccucaccgacuccgagaugaacaagcucuucgagaagacccgccgccagcuccgcgagaacgccgaggacaugggcaacggcugcuucaagaucuaccacaagugcgacaacgccugcaucgaguccauccgcaacggcaccuacgaccacgacgucuaccgcgacgaggcccucaacaaccgcuuccagaucaagggcgucgagcucaaguccggcuacaaggacuggauccucuggaucuccuucgccaucuccugcuuccuccucugcgucguccuccucggcuucaucaugugggccugccagcgcggcaacauccgcugcaacaucugcaucuga

SEQ ID NO: 101633 - RNA, 1701 nt, Artificial Sequence; identical to SEQ ID NO: 98352
  derived and/or modified CDS sequence (opt2) from hemagglutinin__InfluenzaA__ADM13452

SEQ ID NO: 101634 - RNA, 1701 nt, Artificial Sequence
  derived and/or modified CDS sequence (opt2) from hemagglutinin__InfluenzaA__ADM14467
augaaggccauccucgucguccuccucuacaccuucgccaccgccaacgccgacacccucugcaucggcuaccacgccaacaacuccaccgacaccgucgacaccguccucgagaagaacgucaccgucacccacuccgucaaccuccucgaggacaagcacaacggcaagcucugcaagcuccgcggcgucgccccccuccaccucggcaagugcaacaucgccggcuggauccucggcaaccccgagugcgagucccucuccaccgccuccuccugguccuacaucgucgagaccuccuccuccgacaacggcaccugcuaccccggcgacuucaucgacuacgaggagcuccgcgagcagcucuccuccgucuccuccuucgagcgcuucgagaucuuccccaagaccuccuccuggcccaaccacgacuccaacaagggcgucaccgccgccugcucccacgccggcgccaaguccuucuacaagaaccucaucuggcucgucaagaagggcaacuccuaccccaagcucuccaaguccuacaucaacgacaagggcaaggagguccucguccucuggggcauccaccaccccuccaccuccgccgaccagcagucccucuaccagaacgccgacgccuacgucuucgucggcaccucccgcuacuccaagaaguucaagcccgagaucgccauccgccccaagguccgcgaccaggagggccgcaugaacuacuacuggacccucgucgagcccggcgacaagaucaccuucgaggccaccggcaaccucgucgucccccgcuacgccuucgccauggagcgcaacgccggcuccggcaucaucaucuccgacacccccguccacgacugcaacaccaccugccagacccccaagggcgccaucaacaccucccuccccuuccaguccauccaccccaucaccaucggcaagugccccaaguacgucaaguccaccaagcuccgccucgccaccggccuccgcaacguccccuccauccagucccgcggccucuucggcgccaucgccggcuucaucgagggcggcuggaccggcauggucgacggcugguacggcuaccaccaccagaacgagcagggcuccggcuacgccgccgaccucaaguccacccagaacgccaucgacaagaucaccaacaaggucaacuccgucaucgagaagaugaacacccaguucaccgccgucggcaaggaguucaaccaccucgagaagcgcaucgagaaccucaacaagaaggucgacgacggcuuccucgacaucuggaccuacaacgccgagcuccucguccuccucgagaacgagcgcacccucgacuaccacgacuccaacgucaagaaccucuacgagaagguccgcucccagcucaagaacaacgccaaggagaucggcaacggcugcuucgaguucuaccacaagugcgacaacaccugcauggaguccgucaagaacggcaccuacgacuaccccaaguacuccgaggaggccaagcucaaccgcgaggagaucgacggcgucaagcucgaguccacccgcaucuaccagauccucgccaucuacuccaccgucgccuccucccucguccucgucgucucccucggcgccaucuccuucuggaugugcuccaacggcucccuccagugccgcaucugcaucuga

SEQ ID NO: 101635 - RNA, 1695 nt, Artificial Sequence
  derived and/or modified CDS sequence (opt2) from hemagglutinin__InfluenzaA__ADM14516
augaaggccauccucgucguccuccucuacaccuucgccaccgccaacgccgacacccucugcaucggcuaccacgccaacaacuccaccgacaccgucaacaccguccucgagaagaacgucaccgucacccacuccgucaaccuccucgaggacaagcacaacggcaagcucugcaagcuccgcggcgucgccccccuccaccucggcaagugcaacaucgccggcuggauccucggcaaccccgagugcgagucccucuccaccgccuccuccugguccuacaucgucgagaccuccuccuccgacaacggcaccugcuaccccggcgacuucaucgacuacgaggagcuccgcgagcagcucuccuccgucuccuccuucgagcgcuucgagaucuuccccaagaccuccuccuggcccaaccacgacuccaacaagggcgucaccgccgccugcccccacgccggcgccaaguccuucuacaagaaccucaucuggcucgucaagaagggcaacuccuaccccaagcucuccaaguccuacaucaacgacaagggcaaggagguccucguccucuggggcauccaccaccccuccaccuccaccgaccagcagucccucuaccagaacgccgacgccuacgucuucgucggcaccucccgcuacuccaagaaguucaagcccgagaucgccauccgccccaagguccgcgaccaggagggccgcaugaacuacuacuggacccucgucgagcccggcgacaagaucaccuucgaggccaccggcaaccucgucgucccccgcuacgccuucgccauggagcgcaacgccggcuccggcaucaucaucuccgacacccccguccacgacugcaacaccaccugccagacccccaagggcgccaucaacaccucccuccccuuccagaacauccaccccaucaccaucggcaagugccccaaguacgucaaguccaccaagcuccgccucgccaccggccuccgcaacguccccuccauccagucccgcggccucuucggcgccaucgccggcuucaucgagggcggcuggaccggcauggucgacggcugguacggcuaccaccaccagaacgagcagggcuccggcuacgccgccgaccucaaguccacccagaacgccaucgacgagaucaccaacaaggucaacuccgucaucgagaagaugaacacccaguucaccgccgucggcaaggaguucaaccaccucgagaagcgcaucgagaaccucaacaagaaggucgacgacggcuuccucgacaucuggaccuacaacgccgagcuccucguccuccucgagaacgagcgcacccucgacuaccacgacuccaacgucaagaaccucuacgagaagguccgcucccagcucaagaacaacgccaaggagaucggcaacggcugcuucgaguucuaccacaagugcgacaacaccugcauggaguccgucaagaacggcaccuacgacuaccccaaguacuccgaggaggccaagcucaaccgcgaggagaucgacggcgucaagcucgaguccacccgcaucuaccagauccucgccaucuacuccaccgucgccuccucccucguccucgucgucucccucggcgccaucuccuucuggaugugcuccggccacuccugccgcaucugcaucuga

SEQ ID NO: 101636 - RNA, 1701 nt, Artificial Sequence
  derived and/or modified CDS sequence (opt2) from hemagglutinin__InfluenzaA__ADM14525
augaaggccacccucgucguccuccucuacaccuucgccaccgccaacgccgacacccucugcaucggcuaccacgccaacaacuccaccgacaccgucgacaccguccucgagaagaacgucaccgucacccacuccgucaaccuccucgaggacaagcacaacggcaagcucugcaagcuccgcggcgucgccccccuccaccucggcaagugcaacaucgccggcuggauccucggcaaccccgagugcgagucccucuccaccgccuccuccugguccuacaucgucgagaccuccuccuccgacaacggcaccugcuaccccggcgacuucaucgacuacgaggagcuccgcgagcagcucuccucccucuccuccuucgagcgcuucgagaucuuccccaagaccuccuccuggcccaaccacgacuccaacaagggcgucaccgccgccugcccccacgccggcgccaaguccuucuacaagaaccucaucuggcucgucaagaagggcaacuccuaccccaagcucuccaaguccuacaucaacgacaagggcaaggacguccucguccucuggggcauccaccaccccuccaccuccgccgaccagcagucccucuaccagaacgccgacgccuacgucuucgucggcaccucccgcuacuccaagaaguucaagcccgagaucgccauccgccccaagguccgcgaccaggagggccgcaugaacuacuacuggacccucgucgagcccggcgacaagaucaccuucgaggccaccggcaaccucgucgucccccgcuacgccuucgccauggagcgcaacgccggcuccggcaucaucaucuccgacacccccguccacgacugcaacaccaccugccagacccccaagggcgccaucaacaccucccuccccuuccagaacauccaccccaucaccaucggcaagugccccaaguacgucaaguccaccaagcuccgccucgccaccggccuccgcaacguccccuccauccagucccgcggccucuucggcgccaucgccggcuucaucgagggcggcuggaccggcauggucgacggcugguacggcuaccaccaccagaacgagcagggcuccggcuacgccgccgaccucaaguccacccagaacgccaucgacgagaucaccaacaaggucaacuccgucaucgagaagaugaacacccaguucaccgccgucggcaaggaguucaaccaccucgagaagcgcaucgagaaccucaacaagaaggucgacgacggcuuccucgacaucuggaccuacaacgccgagcuccucguccuccucgagaacgagcgcacccucgacuaccacgacuccaacgucaagaaccucuacgagaagguccgcucccagcucaagaacaacgccaaggagaucggcaacggcugcuucgaguucuaccacaagugcgacaacaccugcauggaguccgucaagaacggcaccuacgacuaccccaaguacuccgaggaggccaagcucaaccgcgaggagaucgacggcgucaagcucgaguccacccgcaucuaccagauccucgccaucuacuccaccgucgccuccucccucguccucgucgucucccucggcgccaucuccuucuggaugugcuccaacggcucccuccagugccgcaucugcaucuga

SEQ ID NO: 101637 - RNA, 1695 nt, Artificial Sequence
  derived and/or modified CDS sequence (opt2) from hemagglutinin__InfluenzaA__ADM14553
augaaggccauccucgucguccuccucuacaccuucgccaccgccaacgccgacacccucugcaucggcuaccacgccaacaacuccaccgacaccgucgacaccauccucgagaagaacgucaccgucacccacuccgucaaccuccucgaggacaagcacaacggcaagcucugcaagcuccgcggcgucgccccccuccaccucggcaagugcaacaucgccggcuggauccucggcaaccccgagugcgagucccucuccaccgccuccuccugguccuacaucgucgagaccuccuccuccgacaacggcaccugcuaccccggcgacuucaucgacuacgaggagcuccgcgagcagcucuccuccgucuccuccuucgagcgcuucgagaucuuccccaagaccuccuccuggcccaaccacgacuccaacaagggcgucaccgccgccugcccccacgccggcgccaaguccuucuacaagaaccucaucuggcucgucaagaagggcaacuccuaccccaagcucuccaaguccuacaucaacgacaagggcaaggagguccucguccucuggggcauccaccaccccuccaccuccgccgaccagcagucccucuaccagaacgccgacgccuacgucuucgucgagaccucccgcuacuccaagaaguucaagcccgagaucgccauccgccccaagguccgcgaccaggagggccgcaugaacuacuacuggacccucgucgagcccggcgacaagaucaccuucgaggccaccggcaaccucgucgucccccgcuacgccuucgccauggagcgcaacgccggcuccggcaucaucaucuccgacaccuccguccacgacugcaacaccaccugccagacccccaagggcgccaucaacaccucccuccccuuccagaacauccaccccaucaccaucggcaagugccccaaguacgucaaguccaccaagcuccgccucgccaccggccuccgcaacguccccuccauccagucccgcggccucuucggcgccaucgccggcuucaucgagggcggcuggaccggcauggucgacggcugguacggcuaccaccaccagaacgagcagggcuccggcuacgccgccgaccucaaguccacccagaacgccaucgacgagaucaccaacaaggucaacuccgucaucgagaagaugaacacccaguucaccgccgucggcaaggaguucaaccaccucgagaagcgcaucgagaaccucaacaagaaggucgacgacggcuuccucgacaucuggaccuacaacgccgagcuccucguccuccucgagaacgagcgcacccucgacuaccacgacuccaacgucaagaaccucuacgagaagguccgcucccagcucaagaacaacgccaaggagaucggcaacggcugcuucgaguucuaccacaagugcgacaacaccugcauggaguccgucaagaacggcaccuacgacuaccccaaguacuccgaggaggccaagcucaaccgcgaggagaucgacggcgucaagcucgaguccacccgcaucuaccagauccucgccaucuacuccaccgucgccuccucccucguccucgucgucucccucggcgccaucuccuucuggaugugcuccggccacuccugccgcaucugcaucuga

SEQ ID NO: 101638 - RNA, 1701 nt, Artificial Sequence; identical to SEQ ID NO: 99152
  derived and/or modified CDS sequence (opt2) from hemagglutinin__InfluenzaA__ADM14562

SEQ ID NO: 101639 - RNA, 1701 nt, Artificial Sequence; identical to SEQ ID NO: 98705
  derived and/or modified CDS sequence (opt2) from hemagglutinin__InfluenzaA__ADM14571

SEQ ID NO: 101640 - RNA, 1701 nt, Artificial Sequence
  derived and/or modified CDS sequence (opt2) from hemagglutinin__InfluenzaA__ADM14580
augaaggccauccucgucguccuccucuacaccuucgccaccgccaacgccgacacccucugcaucggcuaccacgccaacaacuccaccgacaccgucgacaccguccucgagaagaacgucaccgucacccacuccgucaaccuccucgaggacaagcacaacggcaagcucugcaagcuccgcggcgucgccccccuccaccucggcaagugcaacaucgccggcuggauccucggcaaccccgagugcgagucccucuccaccgccuccuccugguccuacaucgucgagaccuccuccuccgacaacggcaccugcuaccccggcgacuucaucgacuacgaggagcuccgcgagcagcucuccuccgucuccuccuucgagcgcuucgagaucuuccccaagaccuccuccuggcccaaccacgacuccaacaagggcgucaccgccgccugcccccacgccggcgccaaguccuucuacaagaaccucaucuggcucgucaagaagggcaacuccuaccccaagcucuccaaguccuacaucaacgacaagggcaaggagguccucguccucuggggcauccaccaccccuccaccuccgccgaccagcagucccucuaccagaacgccgacgccuacgucuucgucggcaccucccgcuacuccaagaaguucaagcccgagaucgccauccgccccaagguccgcgaccaggagggccgcaugaacuacuacuggacccucgucgagcccggcgacaagaucaccuucgaggccaccggcaaccucgucgucccccgcuacgccuucgccauggagaagaacgccggcuccggcaucaucaucuccgacacccccguccacgacugcaacaccaccugccagacccccaagggcgccaucaacaccucccuccccuuccagaacauccaccccaucaccaucggcaagugccccaaguacgucaaguccaccaagcuccgccucgccaccggccuccgcaacguccccuccauccagucccgcggccucuucggcgccaucgccggcuucaucgagggcggcuggaccggcauggucgacggcugguacggcuaccaccaccagaacgagcagggcuccggcuacgccgccgaccucaaguccacccagaacgccaucgacgagaucaccaacaaggucaacuccgucaucgagaagaugaacacccaguucaccgccgucggcaaggaguucaaccaccucgagaagcgcaucgagaaccucaacaagaaggucgacgacggcuuccucgacaucuggaccuacaacgccgagcuccucguccuccucgagaacgagcgcacccucgacuaccacgacuccaacgucaagaaccucuacgagaagguccgcucccagcucaagaacaacgccaaggagaucggcaacggcugcuucgaguucuaccacaagugcgacaacaccugcauggaguccgucaagaacggcaccuacgacuaccccaaguacuccgaggaggccaagcucaaccgcgaggagaucaacggcgucaagcucgaguccacccgcaucuaccagauccucgccaucuacuccaccgucgccuccucccucguccucgucgucucccucggcgccaucuccuucuggaugugcuccaacggcucccuccagugccgcaucugcaucuga

SEQ ID NO: 101641 - RNA, 1701 nt, Artificial Sequence
  derived and/or modified CDS sequence (opt2) from hemagglutinin__InfluenzaA__ADM14589
augaaggccauccucgucguccuccucuacaccuucgccaccgccaacgccgacacccucugcaucggcuaccacgccaacaacuccaccgacaccgucgacaccguccucgagaagaacgucaccgucacccacuccgucaaccuccucgaggacaagcacaacggcaagcucugcaagcuccgcggcgucgccccccuccaccucggcaagugcaacaucgccggcuggauccucggcaaccccgagugcgagucccucuccaccgccuccuccugguccuacaucgucgagaccuccuccuccgacaacggcaccugcuaccccggcgacuucaucgacuacgaggagcuccgcgagcagcucuccuccgucuccuccuucgagcgcuucgagaucuuccccaagaccuccuccuggcccaaccacgacuccaacaagggcgucaccgccgccugcccccacgccggcgccaaguccuucuacaagaaccucaucuggcucgucaagaagggcaacuccuaccccaagcucuccaaguccuacaucaacgacaagggcaaggagguccucguccucuggggcauccaccaccccuccaccuccgccgaccagcagucccucuaccagaacgccgacgccuacgucuucgucggcaccucccgcuacuccaagaaguucaagcccgagaucgccauccgccccaagguccgcgaccaggagggccgcaugaacuacuacuggacccucgucgagcccggcgacaagaucaccuucgaggccaccggcaaccucgucgucccccgcuacgccuucgccauggagaagaacgccggcuccggcaucaucaucuccgacacccccguccacgacugcaacaccaccugccagacccccaagggcgccaucaacaccucccuccccuuccagaacauccaccccaucaccaucggcaagugccccaaguacgucaaguccaccaagcuccgccucgccaccggccuccgcaacguccccuccauccagucccgcggccucuucggcgccaucgccggcuucaucgagggcggcuggaccggcauggucgacggcugguacggcuaccaccaccagaacggccagggcuccggcuacgccgccgaccucaaguccacccagaacgccaucgacgagaucaccaacaaggucaacuccgucaucgagaagaugaacacccaguucaccgccgucggcaaggaguucaaccaccucgagaagcgcaucgagaaccucaacaagaaggucgacgacggcuuccucgacaucuggaccuacaacgccgagcuccucguccuccucgagaacgagcgcacccucgacuaccacgacuccaacgucaagaaccucuacgagaagguccgcucccagcucaagaacaacgccaaggagaucggcaacggcugcuucgaguucuaccacaagugcgacaacaccugcauggaguccgucaagaacggcaccuacgacuaccccaaguacuccgaggaggccaagcucaaccgcgaggagaucaacggcgucaagcucgaguccacccgcaucuaccagauccucgccaucuacuccaccgucgccuccucccucguccucgucgucucccucggcgccaucuccuucuggaugugcuccaacggcucccuccagugccgcaucugcaucuga

SEQ ID NO: 101642 - RNA, 1701 nt, Artificial Sequence
  derived and/or modified CDS sequence (opt2) from hemagglutinin__InfluenzaA__ADM14599
augaaggccauccucgucguccuccucuacaccuucgccaccgccaacgccgacacccucugcaucggcuaccacgccaacaacuccaccgacaccgucgacaccguccucgagaagaacgucaccgucacccacuccgucaaccuccucgaggacaagcacaacggcaagcucugcaagcuccgcggcgucgccccccuccaccucggcaagugcaacaucgccggcuggauccucggcaaccccgagugcgagucccucuccaccgccuccuccugguccuacaucgucgagaccuccuccuccgacaacggcaccugcuaccccggcgacuucaucgacuacgaggagcuccgcgagcagcucuccuccgucuccuccuucgagcgcuucgagaucuuccccaagaccuccuccuggcccaaccacgacuccaacaagggcgucaccgccgccugcccccacgccggcgccaaguccuucuacaagaaccucaucuggcucgucaagaagggcaacuccuaccccaagcucuccaaguccuacaucaacgacaagggcaaggagguccucguccucuggggcauccaccaccccuccaccuccgccgaccagcagucccucuaccagaacgccgacgccuacgucuucgucggcaccucccgcuacuccaagaaguucaagcccgagaucgucauccgccccaagguccgcgaccaggagggccgcaugaacuacuacuggacccucgucgagcccggcgacaagaucaccuucgaggccaccggcaaccucgucgucccccgcuacgccuucgccauggagcgcaacgccggcuccggcaucaucaucuccgacacccccguccacgacugcaacaccaccugccagacccccaagggcgccaucaacaccucccuccccuuccagaacauccaccccaucaccaucggcaagugccccaaguacgucaaguccaccaagcuccgccucgccaccggccuccgcaacguccccuccauccagucccgcggccucuucggcgccaucgccggcuucaucgagggcggcuggaccggcauggucgacggcugguacggcuaccaccaccagaacgagcagggcuccggcuacgccgccgaccucaaguccacccagaacgccaucgacgagaucaccaacaaggucaacuccgucaucgagaagaugaacacccaguucaccgccgucggcaaggaguucaaccaccucgagaagcgcaucgagaaccucaacaagaaggucgacgacggcuuccucgacaucuggaccuacaacgccgagcuccucguccuccucgagaacgagcgcacccucgacuaccacgacuccaacgucaagaaccucuacgagaagguccgcucccagcucaagaacaacgccaaggagaucggcaacggcugcuucgaguucuaccacaagugcgacaacaccugcauggaguccgucaagaacggcaccuacgacuaccccaaguacuccgaggaggccaagcucaaccgcgaggagaucgacggcgucaagcucgaguccacccgcaucuaccagauccucgccaucuacuccaccgucgccuccucccucguccucgucgucucccucggcgccaucuccuucuggaugugcuccaacggcucccuccagugccgcaucugcaucuga

SEQ ID NO: 101643 - RNA, 1701 nt, Artificial Sequence; identical to SEQ ID NO: 99865
  derived and/or modified CDS sequence (opt2) from hemagglutinin__InfluenzaA__ADM14609

SEQ ID NO: 101644 - RNA, 1701 nt, Artificial Sequence
  derived and/or modified CDS sequence (opt2) from hemagglutinin__InfluenzaA__ADM14618
augaaggccauccucgucguccuccucuacaccuucgccaccgccaacgccgacacccucugcaucggcuaccacgccaacaacuccaccgacaccgucgacaccguccucgagaagaacgucaccgucacccacuccgucaaccuccucgaggacaagcacaacggcaagcucugcaagcuccgcggcgucgccccccuccaccucggcaagugcaacaucgccggcuggauccucggcaaccccgagugcgagucccucuccaccgccuccuccugguccuacaucgucgagaccuccuccuccgacaacggcaccugcuaccccggcgacuucaucgacuacgaggagcuccgcgagcagcucuccuccgucuccuccuucgagcgcuucgagaucuuccccaagaccuccuccuggcccaaccacgacuccaacaagggcgucaccgccgccugcccccacgccggcgccaaguccuucuacaagaaccucaucuggcucgucaagaagggcaacuccuaccccaagcucuccaaguccuacaucaacgacaagggcaaggagguccucguccucuggggcauccaccaccccuccaccuccgccgaccagcagucccucuaccagaacgccgacgccuacgucuucgucggcaccucccgcuacuccaagaaguucaagcccgagaucgccauccgccccaagguccgcgaccaggagggccgcaugaacuacuacuggacccucgucgagcccggcgacaagaucaccuucgaggccaccggcaaccucgucgucccccgcuacgccuucgccauggagcgcaacgccggcuccggcaucaucaucuccgacacccccguccacgacugcaacaccaccugccagacccccaagggcgccaucaacaccucccuccccuuccagaacaaccaccccaucaccaucggcaagugccccaaguacgucaaguccaccaagcuccgccucgccaccggccuccgcaacguccccuccauccagucccgcggccucuucggcgccaucgccggcuucaucgagggcggcuggaccggcauggucgacggcugguacggcuaccaccaccagaacgagcagggcuccggcuacgccgccgaccucaaguccacccagaacgccaucgacgagaucaccaacaaggucaacuccgucaucgagaagaugaacacccaguucaccgccgucggcaaggaguucaaccaccucgagaagcgcaucgagaaccucaacaagaaggucgacgacggcuuccucgacaucuggaccuacaacgccgagcuccucguccuccucgagaacgagcgcacccucgacuaccacgacuccaacgucaagaaccucuacgagaagguccgcucccagcucaagaacaacgccaaggagaucggcaacggcugcuucgaguucuaccacaagugcgacaacaccugcauggaguccgucaagaacggcaccuacgacuaccccaaguacuccgaggaggccaagcucaaccgcgaggagaucgacggcgucaagcucgaguccacccgcaucuaccagauccucgccaucuacuccaccgucgccuccucccucguccucgucgucucccucggcgccaucuccuucuggaugugcuccaacggcucccuccagugccgcaucugcaucuga

SEQ ID NO: 101645 - RNA, 1701 nt, Artificial Sequence; identical to SEQ ID NO: 98705
  derived and/or modified CDS sequence (opt2) from hemagglutinin__InfluenzaA__ADM14627

SEQ ID NO: 101646 - RNA, 1701 nt, Artificial Sequence
  derived and/or modified CDS sequence (opt2) from hemagglutinin__InfluenzaA__ADM14655
augaaggccauccucgucguccuccucuacaccuucgccaccgccaacgccgacacccucugcaucggcuaccacgccaacaacuccaccgacaccgucgacaccguccucgagaagaacgucaccgucacccacuccgucaaccuccucgaggacaagcacaacggcaagcucugcaagcuccgcggcgucgccccccuccaccucggcaagugcaacaucgccggcuggauccucggcaaccccgagugcgagucccucuccaccgccuccuccugguccuacaucgucgagaccuccuccuccgacaacggcaccugcuaccccggcgacuucaucgacuacgaggagcuccgcgagcagcucuccuccgucuccuccuucgagcgcuucgagaucuuccccaagaccuccuccuggcccaaccacgacuccaacaagggcgucaccgccgccugcccccacgccggcgccaaguccuucuacaagaaccucaucuggcucgucaagaagggcaacuccuaccccaagcucuccaaguccuacaucaacgacaagggcaaggagguccucguccucuggggcauccaccaccccuccaccuccgccgaccagcagucccucuaccagaacgccgacgccuacgucuucgucggcaccucccgcuacuccaagaaguucaagcccgagaucgccauccgccccaagguccgcgaccaggagggccgcaugaacuacuacuggacccucgucgagcccggcgacaagaucaccuucgaggccaccggcaaccucgucgucccccgcuacgccuucgccauggagcgcaacgccggcuccggcaucaucaucuccgacacccccguccacgacugcaacaccaccugccagacccccaagggcgccaucaacaccucccuccccuuccagaacauccaccccaucaccaucggcaagugccccaaguacguccgcuccaccaagcuccgccucgccaccggccuccgcaacguccccuccauccagucccgcggccucuucggcgccaucgccggcuucaucgagggcggcuggaccggcauggucgacggcugguacggcuaccaccaccagaacgagcagggcuccggcuacgccgccgaccucaaguccacccagaacgccaucgacgagaucaccaacaaggucaacuccgucaucgagaagaugaacacccaguucaccgccgucggcaaggaguucaaccaccucgagaagcgcaucgagaaccucaacaagaaggucgacgacggcuuccucgacaucuggaccuacaacgccgagcuccucguccuccucgagaacgagcgcacccucgacuaccacgacuccaacgucaagaaccucuacgagaagguccgcucccagcucaagaacaacgccaaggagaucggcaacggcugcuucgaguucuaccacaagugcgacaacaccugcauggaguccgucaagaacggcaccuacgacuaccccaaguacuccgaggaggccaagcucaaccgcgaggagaucgacggcgucaagcucgaguccacccgcaucuaccagauccucgccaucuacuccaccgucgccuccucccucguccucgucgucucccucggcgccaucuccuucuggaugugcuccaacggcucccuccagugccgcaucugcaucuga

SEQ ID NO: 101647 - RNA, 1701 nt, Artificial Sequence
  derived and/or modified CDS sequence (opt2) from hemagglutinin__InfluenzaA__ADM14664
augaaggccauccucgucguccuccucuacaccuucgccaccgccaacgccgacacccucugcaucggcuaccacgccaacaacuccaccgacaccgucgacaccguccucgagaagaacgucaccgucacccacuccgucaaccuccucgaggacaagcacaacggcaagcucugcaagcuccgcggcgucgccccccuccaccucggcaagugcaacaucgccggcuggauccucggcaaccccgagugcgagucccucuccaccgccuccuccugguccuacaucgucgagaccuccuccuccgacaacggcaccugcuaccccggcgacuucaucgacuacgaggagcuccgcgagcagcucuccuccgucuccuccuucgagcgcuucgagaucuuccccaagaccuccuccuggcccaaccacgacuccaacaagggcgucaccgccgccugcccccacgccggcgccaaguccuucuacaagaaccucaucuggcucgucaagaagggcaacuccuaccccaagcucuccaaguccuacaucaacgacaagggcaaggagguccucguccucuggggcauccaccaccccuccaccuccgccgaccagcagucccucuaccagaacgccgacgccuacgucuucgucggcaccucccgcuacuccaagaaguucaagcccgagaucgccauccgccccaagguccgcgaccaggagggccgcaugaacuacuacuggacccucgucgagcccggcgacaagaucaccuucgaggccaccggcaaccucgucgucccccgcuacgccuucgccauggagcgcaacgccggcuccggcaucaucaucuccgacacccccguccacgacugcaacaccaccugccagacccccaacggcgccaucaacaccucccuccccuuccagaacauccaccccaucaccaucggcaagugccccaaguacgucaaguccaccaagcuccgccucgccaccggccuccgcaacauccccuccauccagucccgcggccucuucggcgccaucgccggcuucaucgagggcggcuggaccggcauggucgacggcugguacggcuaccaccaccagaacgagcagggcuccggcuacgccgccgaccucaaguccacccagaacgccaucgacgagaucaccaacaaggucaacuccgucaucgagaagaugaacacccaguucaccgccgucggcaaggaguucaaccaccucgagaagcgcaucgagaaccucaacaagaaggucgacgacggcuuccucgacaucuggaccuacaacgccgagcuccucguccuccucgagaacgagcgcacccucgacuaccacgacuccaacgucaagaaccucuacgagaagguccgcucccagcucaagaacaacgccaaggagaucggcaacggcugcuucgaguucuaccacaagugcgacaacaccugcauggaguccgucaagaacggcaccuacgacuaccccaaguacuccgaggaggccaagcucaaccgcgaggagaucgacggcgucaagcucgaguccacccgcaucuaccagauccucgccaucuacuccaccgucgccuccucccucguccucgucgucucccucggcgccaucuccuucuggaugugcuccaacggcucccuccagugccgcaucugcaucuga

SEQ ID NO: 101648 - RNA, 1701 nt, Artificial Sequence; identical to SEQ ID NO: 98705
  derived and/or modified CDS sequence (opt2) from hemagglutinin__InfluenzaA__ADM14673

SEQ ID NO: 101649 - RNA, 1701 nt, Artificial Sequence; identical to SEQ ID NO: 98705
  derived and/or modified CDS sequence (opt2) from hemagglutinin__InfluenzaA__ADM14682

SEQ ID NO: 101650 - RNA, 1701 nt, Artificial Sequence; identical to SEQ ID NO: 98705
  derived and/or modified CDS sequence (opt2) from hemagglutinin__InfluenzaA__ADM14691

SEQ ID NO: 101651 - RNA, 1701 nt, Artificial Sequence; identical to SEQ ID NO: 99869
  derived and/or modified CDS sequence (opt2) from hemagglutinin__InfluenzaA__ADM14700

SEQ ID NO: 101652 - RNA, 1695 nt, Artificial Sequence
  derived and/or modified CDS sequence (opt2) from hemagglutinin__InfluenzaA__ADM14709
augaaggccauccucgucguccuccucuacaccuucgccaccgccaacgccgacacccucugcaucggcuaccacgccaacaacuccaccgacaccgucgacaccguccucgagaagaacgucaccgucacccacuccgucaaccuccucgaggacaagcacaacggcaagcucugcaagcuccgcggcgucgccccccuccaccucggcaagugcaacaucgccggcuggauccucggcaaccccgagugcgagucccucuccaccgccuccuccugguccuacaucgucgagaccuccuccuccgacaacggcaccugcuaccccggcgacuucaucgacuacgaggagcuccgcgagcagcucuccuccgucuccuccuucgagcgcuucgagaucuuccccaagaccaacuccuggcccaaccacgacuccaacaagggcgucaccgccgccugcccccacgccggcgccaaguccuucuacaagaaccucaucuggcucgucaagaagggcaacuccuaccccaagcucuccaaguccuacaucaacgacaagggcaaggagguccucguccucuggggcauccaccaccccuccaccuccgccgaccagcagucccucuaccagaacgccgacgccuacgucuucgucggcaccuccaaguacuccaagaaguucaagcccgagaucgccauccgccccaagguccgcgaccaggagggccgcaugaacuacuacuggacccucgucgagcccggcgacaagaucaccuucgaggccaccggcaaccucgucgucccccgcuacgccuucgccauggagcgcaacgccggcuccggcaucaucaucuccgacacccccguccacgacugcaacaccaccugccagacccccaagggcgccaucaacaccucccuccccuuccagaacauccaccccaucaccaucggcaagugccccaaguacgucaaguccaccaagcuccgccucgccaccggccuccgcaacguccccuccauccagucccgcggccucuucggcgccaucgccggcuucaucgagggcggcuggaccggcauggucgacggcugguacggcuaccaccaccagaacgagcagggcuccggcuacgccgccgaccucaaguccacccagaacgccaucgacggcaucaccaacaagaucaacuccgucaucgagaagaugaacacccaguucaccgccgucggcaaggaguucaaccaccucgagaagcgcaucgagaaccucaacaagaaggucgacgacggcuuccucgacaucuggaccuacaacgccgagcuccucguccuccucgagaacgagcgcacccucaacuaccacgacuccaacgucaagaaccucuacgagaagguccgcucccagcucaagaacaacgccaaggagaucggcaacggcugcuucgaguucuaccacaagugcgacaacaccugcauggaguccgucaagaacggcaccuacgacuaccccaaguacuccgaggaggccaagcucaaccgcgaggagaucgacggcgucaagcucgaguccacccgcaucuaccagauccucgccaucuacuccaccgucgccuccucccucguccucgucgucucccucggcgccaucuccuucuggaugugcuccggccacuccugccgcaucugcaucuga

SEQ ID NO: 101653 - RNA, 1701 nt, Artificial Sequence
  derived and/or modified CDS sequence (opt2) from hemagglutinin__InfluenzaA__ADM14718
augaaggccauccucgucguccuccucuacaccuucgccaccgccaacgccgacacccucugcaucggcuaccacgccaacaacuccaccgacaccgucgacaccguccucgagaagaacgucaccgucacccacuccgucaaccuccucgaggacaagcacaacggcaagcucugcaagcuccgcggcgucgccccccuccaccucggcaagugcaacaucgccggcuggauccucggcaaccccgagugcgagucccucuccaccgccuccuccugguccuacaucgucgagaccuccuccuccgacaacggcaccugcuaccccggcgacuucaucgacuacgaggagcuccgcgagcagcucuccuccauguccuccuucgagcgcuucgagaucuuccccaagaccuccuccuggcccaaccacgacuccaacaagggcgucaccgccgccugcccccacgccggcgccaaguccuucuacaagaaccucaucuggcucgucaagaagggcaacuccuaccccaagcucuccaaguccuacaucaacgacaagggcaaggagguccucguccucuggggcauccaccaccccuccaccuccgccgaccagcagucccucuaccagaacgccgacgccuacgucuucgucggcaccucccgcuacuccaagaaguucaagcccgagaucgccauccgccccaagguccgcgaccaggagggccgcaugaacuacuacuggacccucgucgagcccggcgacaagaucaccuucgaggccaccggcaaccucgucgucccccgcuacgccuucgccauggagcgcaacgccggcuccggcaucaucaucuccgacacccccguccacgacugcaacaccaccugccagacccccaagggcgccaucaacaccucccuccccuuccagaacauccaccccaucaccaucggcaagugccccaaguacgucaaguccaccaagcuccgccucgccaccggccuccgcaacguccccuccauccagucccgcggccucuucggcgccaucgccggcuucaucgagggcggcuggaccggcauggucgacggcugguacggcuaccaccaccagaacgagcagggcuccggcuacgccgccgaccucaaguccacccagaacgccaucgacaagaucaccaacaaggucaacuccgucaucgagaagaugaacacccaguucaccgccgucggcaaggaguucaaccaccucgagaagcgcaucgagaaccucaacaagaaggucgacgacggcuuccucgacaucuggaccuacaacgccgagcuccucguccuccucgagaacgagcgcacccucgacuaccacgacuccaacgucaagaaccucuacgagaagguccgcucccagcucaagaacaacgccaaggagaucggcaacggcugcuucgaguucuaccacaagugcgacaacaccugcauggaguccgucaagaacggcaccuacgacuaccccaaguacuccgaggaggccaagcucaaccgcgaggagaucgacggcgucaagcucgaguccacccgcaucuaccagauccucgccaucuacuccaccgucgccuccucccucguccucgucgucucccucggcgccaucuccuucuggaugugcuccaacggcucccuccagugccgcaucugcaucuga

SEQ ID NO: 101654 - RNA, 1695 nt, Artificial Sequence
  derived and/or modified CDS sequence (opt2) from hemagglutinin__InfluenzaA__ADM14728
augaaggccauccucgucguccuccucuacaccuucgccaccgccaacgccgacacccucugcaucggcuaccacgccaacaacuccaccgacaccgucgacaccguccucgagaagaacgucaccgucacccacuccgucaaccuccucgaggacaagcacaacggcaagcucugcaagcuccgcggcgucgccccccuccaccucggcaagugcaacaucgccggcuggauccucggcaaccccgagugcgagucccucuccaccgccuccuccugguccuacaucgucgagaccuccuccuccgacaacggcaccugcuaccccggcgacuucaucgacuacgaggagcuccgcgagcagcucuccuccgucuccuccuucgagcgcuucgagaucuuccccaagaccuccuccuggcccaaccacgacuccaacaagggcgucaccgccgccugcccccacgccggcgccaaguccuucuacaagaaccucaucuggcucgucaagaagggcaacuccuaccccaagcucuccaacuccuacaucaacgacaagggcaaggagguccucguccucuggggcauccaccaccccuccaccuccgccgaccagcagucccucuaccagaacgccgacgccuacgucuucgucggcaccucccgcuacuccaagaaguucaagcccgagaucgccauccgccccaagguccgcgaccaggagggccgcaugaacuacuacuggacccucgucgagcccggcgacaagaucaccuucgaggccaccggcaaccucgucgucccccgcuacgccuucgccauggagcgcaacgccggcuccggcaucaucaucuccgacacccccgcccacgacugcaacaccaccugccagacccccaagggcgccaucaacaccucccuccccuuccagaacauccaccccaucaccaucggcaagugccccaaguacgucaaguccaccaagcuccgccucgccaccggccuccgcaacguccccuccauccagucccgcggccucuucggcgccaucgccggcuucaucgagggcggcuggaccggcauggucgacggcugguacggcuaccaccaccagaacgagcagggcuccggcuacgccgccgaccucaaguccacccagaacgccaucgacgagaucaccaacaaggucaacuccgucaucgagaagaugaacacccaguucaccgccgucggcaaggaguucaaccaccucgagaagcgcaucgagaaccucaacaagaaggucgacgacggcuuccucgacaucuggaccuacaacgccgagcuccucguccuccucgagaacgagcgcacccucgacuaccacgacuccaacgucaagaaccucuacgagaagguccgcucccagcucaagaacaacgccaaggagaucggcaacggcugcuucgaguucuaccacaagugcgacaacaccugcauggaguccgucaagaacggcaccuacgacuaccccaaguacuccgaggaggccaagcucaaccgcgaggagaucgacggcgucaagcucgaguccacccgcaucuaccagauccucgccaucuacuccaccgucgccuccucccucguccucgucgucucccucggcgccaucuccuucuggaugugcuccggccacuccugccgcaucugcaucuga

SEQ ID NO: 101655 - RNA, 1701 nt, Artificial Sequence
  derived and/or modified CDS sequence (opt2) from hemagglutinin__InfluenzaA__ADM14737
augaaggccauccucgucguccuccucuacaccuucgccaccgccaacgccgacacccucugcaucggcuaccacgccaacaacuccaccgacaccgucaacaccguccucgagaagaacgucaccgucacccacuccgucaaccuccucgaggacaagcacaacggcaagcucugcaagcuccgcggcgucgccccccuccaccucggcaagugcaacaucgccggcuggauccucggcaaccccgagugcgagucccucuccaccgccuccuccugguccuacaucgucgagaccuccuccuccgacaacggcaccugcuaccccggcgacuucaucgacuacgaggagcuccgcgagcagcucuccuccgucuccuccuucgagcgcuucgagaucuuccccaagaccuccuccuggcccaaccacgacuccaacaagggcgucaccgccgccugcccccacgccggcgccaaguccuucuacaagaaccucaucuggcucgucaagaagggcaacuccuaccccaagcucuccaaguccuacaucaacgacaagggcaaggagguccucguccucuggggcauccaccaccccuccaccuccgccgaccagcagucccucuaccagaacgccgacgccuacgucuucgucggcaccucccgcuacuccaagaaguucaagcccgagaucgccauccgccccaagguccgcgaccaggagggccgcaugaacuacuacuggacccucgucgagcccggcgacaagaucaccuucgaggccaccggcaaccucgucgucccccgcuacgccuucgccauggagaagaacgccggcuccggcaucaucaucuccgacacccccguccacgacugcaacaccaccugccagacccccaagggcgccaucaacaccucccuccccuuccagaacauccaccccaucaccaucggcaagugccccaaguacgucaaguccaccaagcuccgccucgccaccggccuccgcaacguccccuccauccagucccgcggccucuucggcgccaucgccggcuucaucgagggcggcuggaccggcauggucgacggcugguacggcuaccaccaccagaacgagcagggcuccggcuacgccgccgaccucaaguccacccagaacgccaucgacgagaucaccaacaaggucaacuccgucaucgagaagaugaacacccaguucaccgccgucggcaaggaguucaaccaccucgagaagcgcaucgagaaccucaacaagaaggucgacgacggcuuccucgacaucuggaccuacaacgccgagcuccucguccuccucgagaacgagcgcacccucgacuaccacgacuccaacgucaagaaccucuacgagaagguccgcucccagcucaagaacaacgccaaggagaucggcaacggcugcuucgaguucuaccacaagugcgacaacaccugcauggaguccgucaagaacggcaccuacgacuaccccaaguacuccgaggaggccaagcucaaccgcgaggagaucgacggcgucaagcucgaguccacccgcaucuaccagauccucgccaucuacuccaccgucgccuccucccucguccucgucgucucccucggcgccaucuccuucuggaugugcuccaacggcucccuccagugccgcaucugcaucuga

SEQ ID NO: 101656 - RNA, 1701 nt, Artificial Sequence
  derived and/or modified CDS sequence (opt2) from hemagglutinin__InfluenzaA__ADM14746
augaaggccauccucgucguccuccucuacaccuucgccaccgccaacgccgacacccucugcaucggcuaccacgccaacaacuccaccgacaccgucgacaccguccucgagaagaacgucaccgucacccacuccgucaaccuccucgaggacaagcacaacggcaagcucugcaagcuccgcggcgucgccccccuccaccucggcaagugcaacaucgccggcuggguccucggcaaccccgagugcgagucccucuccaccgccuccuccugguccuacaucgucgagacccccuccuccgacaacggcaccugcuaccccggcgacuucaucgacuacgaggagcuccgcgagcagcucuccuccgucuccuccuucgagcgcuucgagaucuuccccaagaccuccuccuggcccaaccacgacuccaacaagggcgucaccgccgccugcccccacgccggcgccaaguccuucuacaagaaccucaucuggcucgucaagaagggcaacuccuaccccaagcucuccaaguccuacaucaacgacaagggcaaggagguccucguccucuggggcauccaccaccccuccaccuccgccgaccagcagucccucuaccagaacgccgacgccuacgucuucgucggcaccucccgcuacuccaagaaguucaagcccgagaucgccauccgccccaagguccgcgaccaggagggccgcaugaacuacuacuggacccucgucgagcccggcgacaagaucaccuucgaggccaccggcaaccucgucgucccccgcuacgccuucgccauggagcgcaacgccggcuccggcaucaucaucuccgacacccccguccacgacugcaacaccaccugccagacccccaagggcgccaucaacaccucccuccccuuccagaacauccaccccaucaccaucggcaagugccccaaguacgucaaguccaagaagcuccgccucgccaccggccuccgcaacguccccuccauccagucccgcggccucuucggcgccaucgccggcuucaucgagggcggcuggaccggcauggucgacggcugguacggcuaccaccaccagaacgagcagggcuccggcuacgccgccgaccucaaguccacccagaacgccaucgacgagaucaccaacaaggucaacuccgucaucgagaagaugaacacccaguucaccgccgucggcaaggaguucaaccaccucgagaagcgcaucgagaaccucaacaagaaggucgacgacggcuuccucgacaucuggaccuacaacgccgagcuccucguccuccucgagaacgagcgcacccucgacuaccacgacuccaacgucaagaaccucuacgagaagguccgcucccagcucaagaacaacgccaaggagaucggcaacggcugcuucgaguucuaccacaagugcgacaacaccugcauggaguccgucaagaacggcaccuacgacuaccccaaguacuccgaggaggccaagcucaaccgcgaggagaucgacggcgucaagcucgaguccacccgcaucuaccagauccucgccaucuacuccaccgucgccuccucccucguccucgucgucucccucggcgccaucuccuucuggaugugcuccaacggcucccuccagugccgcaucugcaucuga

SEQ ID NO: 101657 - RNA, 1695 nt, Artificial Sequence
  derived and/or modified CDS sequence (opt2) from hemagglutinin__InfluenzaA__ADM14756
augaaggccauccucgucguccuccucuacaccuucgccaccgccaacgccgacacccucugcgucggcuaccacgccaacaacuccaccgacaccgucgacaccguccucgagaagaacgucaccgucacccacuccgucaaccuccucgaggacaagcacaacggcaagcucugcaagcuccgcggcgucgccccccuccaccucggcaagugcaacaucgccggcuggauccucggcaaccccgagugcgagucccucuccaccgccuccuccugguccuacaucgucgagaccuccuccuccgacaacggcaccugcuaccccggcgacuucaucgacuacgaggagcuccgcgagcagcucuccuccgucuccuccuucgagcgcuucgagaucuuccccaagaccuccuccuggcccaaccacgacuccaacaagggcgucaccgccgccugcccccacgccggcgccaaguccuucuacaagaaccucaucuggcucgucaagaagggcaacuccuaccccaagcucuccaaguccuacaucaacgacaagggcaaggagguccucguccucuggggcauccaccaccccuccaccuccgccgaccagcagucccucuaccagaacgccgacgccuacgucuucgucggcaccucccgcuacuccaagaaguucaagcccgagaucgccauccgccccaagguccgcgaccaggagggccgcaugaacuacuacuggacccucgucgagcccggcgacaagaucaccuucgaggccaccggcaaccucgucgucccccgcuacgccuucgccauggagcgcaacgccggcuccggcaucaucaucuccgacacccccguccacgacugcaacaccaccugccagacccccaagggcgccaucaacaccucccuccccuuccagaacauccaccccaucaccaucggcaagugccccaaguacgucaaguccaccaagcuccgccucgccaccggccuccgcaacguccccuccauccagucccgcggccucuucggcgccaucgccggcuucaucgagggcggcuggaccggcauggucgacggcugguacggcuaccaccaccagaacgagcagggcuccggcuacgccgccgaccucaaguccacccagaacgccaucgacaagaucaccaacaaggucaacuccgucaucgagaagaugaacacccaguucaccgccgucggcaaggaguucaaccaccucgagaagcgcaucgagaaccucaacaagaaggucgacgacggcuuccucgacaucuggaccuacaacgccgagcuccucguccuccucgagaacgagcgcacccucgacuaccacgacuccaacgucaagaaccucuacgagaagguccgcucccagcucaagaacaacgccaaggagaucggcaacggcugcuucgaguucuaccacaagugcgacaacaccugcauggaguccgucaagaacggcaccuacgacuaccccaaguacuccgaggaggccaagcucaaccgcgaggagaucgacggcgucaagcucgaguccacccgcaucuaccagauccucgccaucuacuccaccgucgccuccucccucguccucgucgucucccucggcgccaucuccuucuggaugugcuccggccacuccugccgcaucugcaucuga

SEQ ID NO: 101658 - RNA, 1701 nt, Artificial Sequence; identical to SEQ ID NO: 99869
  derived and/or modified CDS sequence (opt2) from hemagglutinin__InfluenzaA__ADM14765

SEQ ID NO: 101659 - RNA, 1695 nt, Artificial Sequence
  derived and/or modified CDS sequence (opt2) from hemagglutinin__InfluenzaA__ADM14775
augaaggccauccucgucguccuccucuacaccuucgccaccgccaacgccgacacccucugcaucggcuaccacgccaacaacuccaccgacaccgucgacaccguccucgagaagaacgucaccgucacccacuccgucaaccuccucgaggacaagcacaacggcaagcucugcaagcuccgcggcgucgccccccuccaccucggcaagugcaacaucgccggcuggauccucggcaaccccgagugcgagucccucuccaccgccuccuccugguccuacaucgucgagaccuccuccuccgacaacggcaccugcuaccccggcgacuucaucgacuacgaggagcuccgcgagcagcucuccuccgucuccuccuucgagcgcuucgagaucuuccccaagaccuccuccuggcccaaccacgacuccaacaagggcgucaccgccgccugcccccacgccggcgccaaguccuucuacaagaaccucaucuggcucgucaagaagggcaacuccuaccccaagcucaacaaguccuacaucaacgacaagggcaaggagguccucguccucuggggcauccaccaccccuccaccuccgccgaccagcagucccucuaccagaacgccgacgccuacgucuucgucggcaccucccgcuacuccaagaaguucaagcccgagaucgccauccgccccaagguccgcgaccaggagggccgcaugaacuacuacuggacccucgucgagcccggcgacaagaucaccuucgaggccaccggcaaccucgucgucccccgcuacgccuucgccauggagcgcaacgccggcuccggcaucaucaucuccgacacccccguccacgacugcaacaccaccugccagacccccaagggcgccaucaacaccucccuccccuuccagaacauccaccccaucaccaucggcgagugccccaaguacgucaaguccaccaagcuccgccucgccaccggccuccgcaacguccccuccauccagucccgcggccucuucggcgccaucgccggcuucaucgagggcggcuggaccggcauggucgacggcugguacggcuaccaccaccagaacgagcagggcuccggcuacgccgccgaccucaaguccacccagaacgccaucgacaagaucaccaacaaggucaacuccgucaucgagaagaugaacacccaguucaccgccgucggcaaggaguucaaccaccucgagaagcgcaucgagaaccucaacaagaaggucgacgacggcuuccucgacaucuggaccuacaacgccgagcuccucguccuccucgagaacgagcgcacccucgacuaccacgacuccaacgucaagaaccucuacgagaagguccgcucccagcucaagaacaacgccaaggagaucggcaacggcugcuucgaguucuaccacaagugcgacaacaccugcauggaguccgucaagaacggcaccuacgacuaccccaaguacuccgaggaggccaagcucaaccgcgaggagaucgacggcgucaagcucgaguccacccgcaucuaccagauccucgccaucuacuccaccgucgccuccucccucguccucgucgucucccucggcgccaucuccuucuggaugugcuccggccacuccugccgcaucugcaucuga

SEQ ID NO: 101660 - RNA, 1695 nt, Artificial Sequence
  derived and/or modified CDS sequence (opt2) from hemagglutinin__InfluenzaA__ADM14802
augaaggccauccucgucguccuccucuacaccuucgccaccgccaacgccgacacccucugcaucggcuaccacgccaacaacuccaccgacaccgucgacaccguccucgagaagaacgucaccgucacccacuccgucaaccuccucgaggacaagcacaacggcaagcucugcaagauccgcggcgucgccccccuccaccucggcaagugcaacaucgccggcuggauccucggcaaccccgagugcgagucccucuccaccgccuccuccugguccuacaucgucgagaccuccuccuccgacaacggcaccugcuaccccggcgacuucaucgacuacgaggagcuccgcgagcagcucuccuccgucuccuccuucgagcgcuucgagaucuuccccaagaccuccuccuggcccaaccacgacuccaacaagggcgucaccgccgccugcccccacgccggcgccaaguccuucuacaagaaccucaucuggcucgucaagaagggcaacuccuaccccaagcucuccaaguccuacaucaacgacaagggcaaggagguccucguccucuggggcauccaccaccccuccaccuccgccgaccagcagucccucuaccagaacgccgacgccuacgucuucgucggcaccucccgcuacuccaagaaguucaagcccgagaucgccauccgccccaagguccgcgaccaggagggccgcaugaacuacuacuggacccucgucgagcccggcgacaagaucaccuucgaggccaccggcaaccucgucgucccccgcuacgccuucgccauggagcgcaacgccggcuccggcaucaucaucuccgacacccccguccacgacugcaacaccaccugccagacccccaagggcgccaucaacaccucccuccccuuccagaacauccaccccaucaccaucggcaagugccccaaguacgucaaguccaccaagcuccgccucgccaccggccuccgcaacguccccuccauccagucccgcggccucuucggcgccaucgccggcuucaucgagggcggcuggaccggcauggucgacggcugguacggcuaccaccaccagaacgagcagggcuccggcuacgccgccgaccucaaguccacccagaacgccaucgacgagaucaccaacaaggucaacuccgucaucgagaagaugaacacccaguucaccgccgucggcaaggaguucaaccaccucgagaagcgcaucgagaaccucaacaagaaggucgacgacggcuuccucgacaucuggaccuacaacgccgagcuccucguccuccucgagaacgagcgcacccucgacuaccacgacuccaacgucaagaaccucuacgagaagguccgcucccagcucaagaacaacgccaaggagaucggcaacggcugcuucgaguucuaccacaagugcgacaacaccugcauggaguccgucaagaacggcaccuacgacuaccccaaguacuccgaggaggccaagcucaaccgcgaggagaucgacggcgucaagcucgaguccacccgcaucuaccagauccucgccaucuacuccaccgucgccuccucccucguccucgucgucucccucggcgccaucuccuucuggaugugcuccggccacuccugccgcaucugcaucuga

SEQ ID NO: 101661 - RNA, 1704 nt, Artificial Sequence
  derived and/or modified CDS sequence (opt2) from hemagglutinin__InfluenzaA__ADM14830
augaaggccauccucgucguccuccucuacaccuucgccaccgccaacgccgacacccucugcaucggcuaccacgccaacaacuccaccgacaccgucgacaccguccucgagaagaacgucaccgucacccacuccgucaaccuccucgaggacaagcacaacggcaagcucugcaagcuccgcggcgucgccccccuccaccucggcaagugcaacaucgccggcuggauccucggcaaccccgagugcgagcuccucuccaccgccuccuccugguccuacaucgucgagaccuccuccuccgacaacggcaccugcuaccccggcgacuucaucgacuacgaggagcuccgcgagcagcucuccuccgucuccuccuucgagcgcuucgagaucuuccccaagaccuccuccuggcccaaccacgacuccaacaagggcgucaccgccgccugcccccacgccggcgccaaguccuucuacaagaaccucaucuggcucgucaagaagggcaacuccuaccccaagcucuccaaguccuacaucaacgacaagggcaaggagguccucguccucuggggcauccaccaccccuccaccuccgccgaccagcagucccucuaccagaacgccgacgccuacgucuucgucggcaccucccgcuacuccaagaaguucaagcccgagaucgccauccgccccaagguccgcgaccaggagggccgcaugaacuacuacuggacccucgucgagcccggcgacaagaucaccuucgaggccaccggcaaccucgucgucccccgcuacgccuucgccauggagcgcaacgccgaguccggcaucaucaucuccgacacccccguccacgacugcaacaccaccugccagacccccaagggcgccaucaacaccucccuccccuuccagaacauccaccccaucaccaucggcaagugccccaaguacgucaaguccaccaagcuccgccucgccaccggccuccgcaacguccccuccauccagucccgcggccucuucggcgccaucgccggcuucaucgagggcggcuggaccggcauggucgacggcugguacggcuaccaccaccagaacgagcagggcuccggcuacgccgccgaccucaaguccacccagaacgccaucgacgagaucaccaacaaggucaacuccgucaucgagaagaugaacacccaguucaccgccgucggcaaggaguucaaccaccucgagaagcgcaucgagaaccucaacaagaaggucgacgacggcuuccucgacaucuggaccuacaacgccgagcuccucguccuccucgagaacgagcgcacccucgacuaccacgacuccaacgucaagaagcucuacgagaagguccgcucccagcucaagaacaacgccaaggagaucggcaacggcugcuucgaguucuaccacaagugcgacaacaccugcauggaguccgucaagaacggcaccuacgacuaccccaaguacuccgaggaggccaagcucaaccgcgaggagaucgacggcgucaagcucgaguccacccgcaucuaccagauccucgccaucuacuccaccgucgccuccucccucguccucgucgucucccucggcgccaucuccuucuggaugugcuccggccacuccugccuccagugccgcaucugcaucuga

SEQ ID NO: 101662 - RNA, 1695 nt, Artificial Sequence
  derived and/or modified CDS sequence (opt2) from hemagglutinin__InfluenzaA__ADM14848
augaaggccauccucgucguccuccucuacaccuucgccaccgccaacgccgacacccucugcaucggcuaccacgccaacaacuccaccgacaccgucgacaccguccucgagaagaacgucaccgucacccacuccgucaaccuccucgaggacaagcacaacggcaagcucugcaagcuccgcggcgucgccccccuccaccucggcaagugcaacaucgccggcuggauccucggcaaccccgagugcgagucccucuccaccgccuccuccugguccuacaucgucgagaccuccuccuccgacaacggcaccugcuaccccggcgacuucaucgacuacgaggagcuccgcgagcagcucuccuccgucuccuccuucgagcgcuucgagaucuuccccaagaccuccuccuggcccaaccacgacuccaacaagggcgucaccgccgccugcccccacgccggcgccaaguccuucuacaagaaccucaucuggcucgucaagaagggcaacuccuaccccaagcucuccaaguccuacaucaacgacaagggcaaggagguccucguccucuggggcauccaccaccccuccaccuccgccgaccagcagucccucuaccagaacgccgacgccuacgucuucgucggcuccucccgcuacuccaagaaguucaagcccgagaucgccauccgccccaagguccgcgaccaggagggccgcaugaacuacuacuggacccucgucgagcccggcgacaagaucaccuucgaggccaccggcaaccucgucgucccccgcuacgccuucgccauggagcgcaacgccggcuccggcaucaucaucuccgacacccccguccacgacugcaacaccaccugccagacccccaagggcgccaucaacaccucccuccccuuccagaacauccaccccaucaccaucggcaagugccccaaguacgucaaguccaccaagcuccgccucgccaccggccuccgcaacguccccuccauccagucccgcggccucuucggcgccaucgccggcuucaucgagggcggcuggaccggcauggucgacggcugguacggcuaccaccaccagaacgagcagggcuccggcuacgccgccgaccucaaguccacccagaacgccaucgacgagaucaccaacaaggucaacuccgucaucgagaagaugaacacccaguucaccgccgucggcaaggaguucaaccaccucgagaagcgcaucgagaaccucaacaagaaggucgacgacggcuuccucgacaucuggaccuacaacgccgagcuccucguccuccucgagaacgagcgcacccucgacuaccacgacuccaacgucaagaaccucuacgagaagguccgcucccagcucaagaacaacgccaaggagaucggcaacggcugcuucgaguucuaccacaagugcgacaacaccugcauggaguccgucaagaacggcaccuacgacuaccccaaguacuccgaggaggccaagcucaaccgcgaggagaucgacggcgucaagcucgaguccacccgcaucuaccagauccucgccaucuacuccaccgucgccuccucccucguccucgucgucucccucggcgccaucuccuucuggaugugcuccggccacuccugccgcaucugcaucuga

SEQ ID NO: 101663 - RNA, 1695 nt, Artificial Sequence
  derived and/or modified CDS sequence (opt2) from hemagglutinin__InfluenzaA__ADM14866
augaaggccauccucgucguccuccucuacaccuucgccaccgccaacgccgacacccucugcaucggcuaccacgccaacaacuccaccgacaccgucgacaccguccucgagaagaacgucaccgucacccacuccgucaaccuccucgaggacaagcacaacggcaagcucugcaagcuccgcggcgucgccccccuccaccucggcaagugcaacaucgccggcuggauccucggcaaccccgagugcgagucccucuccaccgccuccuccugguccuacaucgucgagaccuccuccuccgacaacggcaccugcuaccccggcgacuucaucgacuacgaggagcuccgcgagcagcucuccuccgucuccuccuucgagcgcuucgagaucuuccccaagaccuccuccuggcccaaccacgacuccgacaagggcgucaccgccgccugcccccacgccggcgccaaguccuucuacaagaaccucaucuggcucgucaagaagggcaacuccuaccccaagcucuccaaguccuacaucaacgacaagggcaaggagguccucguccucuggggcauccaccaccccuccaccuccgccgaccagcagucccucuaccagaacgccgacgccuacgucuucgucggcaccucccgcuacuccaagaaguucaagcccgagaucgccauccgccccaagguccgcgaccaggagggccgcaugaacuacuacuggacccucgucgagcccggcgacaagaucaccuucgaggccaccggcaaccucgucgucccccgcuacgccuucgccauggagcgcaacgccggcuccggcaucaucaucuccgacacccccguccacgacugcaacaccaccugccagacccccaagggcgccaucaacaccucccuccccuuccagaacauccaccccaucaccaucggcaagugccccaaguacgucaaguccaucaagcuccgccucgccaccggccuccgcaacguccccuccauccagucccgcggccucuucggcgccaucgccggcuucaucgagggcggcuggaccggcauggucgacggcugguacggcuaccaccaccagaacgagcagggcuccggcuacgccgccgaccucaaguccacccagaacgccaucgacgagaucaccaacaaggucaacuccgucaucgagaagaugaacacccaguucaccgccgucggcaaggaguucaaccaccucgagaagcgcaucgagaaccucaacaagaaggucgacgacggcuuccucgacaucuggaccuacaacgccgagcuccucguccuccucgagaacgagcgcacccucgacuaccacgacuccaacgucaagaaccucuacgagaagguccgcucccagcucaagaacaacgccaaggagaucggcaacggcugcuucgaguucuaccacaagugcgacaacaccugcauggaguccgucaagaacggcaccuacgacuaccccaaguacuccgaggaggccaagcucaaccgcgaggagaucgacggcgucaagcucgaguccacccgcaucuaccagauccucgccaucuacuccaccgucgccuccucccucguccucgucgucucccucggcgccaucuccuucuggaugugcuccggccacuccugccgcaucugcaucuga

SEQ ID NO: 101664 - RNA, 1695 nt, Artificial Sequence
  derived and/or modified CDS sequence (opt2) from hemagglutinin__InfluenzaA__ADM14876
augaaggccauccucgucguccuccucuacaccuucgccaccgccaacgccgacacccucugcaucggcuaccacgccaacaacuccaccgacaccgucgacaccguccucgagaagaacgucaccgucacccacuccgucaaccuccucgaggacaagcacaacggcaagcucugcaagcuccgcggcgucgccccccuccaccucggcaagugcaacaucgccggcuggauccucggcaaccccgagugcgagucccucuccaccgccuccuccugguccuacaucgucgagaccuccuccuccgacaacggcaccugcuaccccggcgacuucaucgacuacgaggagcuccgcgagcagcucuccuccgucuccuccuucgagcgcuucgagaucuuccccaagaccuccuccuggcccaaccacgacuccaacaagggcgucaccgccgccugcccccacgccggcgccaaguccuucuacaagaaccucaucuggcucgucaagaagggcaacuccuaccccaagcucuccaaguccuacaucaacgacaaggagaaggagguccucguccucuggggcauccaccaccccuccaccuccgccgaccagcagucccucuaccagaacgccgacgccuacgucuucgucggcaccucccgcuacuccaagaaguucaagcccgagaucgccauccgccccaagguccgcgaccaggagggccgcaugaacuacuacuggacccucgucgagcccggcgacaagaucaccuucgaggccaccggcaaccucgucgucccccgcuacgccuucgccauggagcgcaacgccggcuccggcaucaucaucuccgacacccccguccacgacugcaacaccaccugccagacccccaagggcgccaucaacaccucccuccccuuccagaacauccaccccaucaccaucggcaagugccccaaguacgucaaguccaccaagcuccgccucgccaccggccuccgcaacguccccuccauccagucccgcggccucuucggcgccaucgccggcuucaucgagggcggcuggaccggcauggucgacggcugguacggcuaccaccaccagaacgagcagggcuccggcuacgccgccgaccucaaguccacccagaacgccaucgacgagaucaccaacaaggucaacuccgucaucgagaagaugaacacccaguucaccgccgucggcaaggaguucaaccaccucgagaagcgcaucgagaaccucaacaagaaggucgacgacggcuuccucgacaucuggaccuacaacgccgagcuccucguccuccucgagaacgagcgcacccucgacuaccacgacuccaacgucaagaaccucuacgagaagguccgcucccagcucaagaacaacgccaaggagaucggcaacggcugcuucgaguucuaccacaagugcgacaacaccugcauggaguccgucaagaacggcaccuacgacuaccccaaguacuccgaggaggccaagcucaaccgcgaggagaucgacggcgucaagcucgaguccacccgcaucuaccagauccucgccaucuacuccaccgucgccuccucccucguccucgucgucucccucggcgccaucuccuucuggaugugcuccggccacuccugccgcaucugcaucuga

SEQ ID NO: 101665 - RNA, 1704 nt, Artificial Sequence
  derived and/or modified CDS sequence (opt2) from hemagglutinin__InfluenzaA__ADM14885
augaaggccauccucgucguccuccucuacaccuucgccaccgccaacgccgacacccucugcaucggcuaccacgccaacaacuccaccgacaccgucgacaccguccucgagaagaacgucaccgucacccacuccgucaaccuccucgaggacaagcacaacggcaagcucugcaagcuccgcggcgucgccccccuccaccucggcaagugcaacaucgccggcuggauccucggcaaccccgagugcgagcuccucuccaccgccuccuccugguccuacaucgucgagaccuccuccuccgacaacggcaccugcuaccccggcgacuucaucgacuacgaggagcuccgcgagcagcucuccuccgucuccuccuucgagcgcuucgagaucuuccccaagaccuccuccuggcccaaccacgacuccaacaagggcgucaccgccgccugcccccacgccggcgccaaguccuucuacaagaaccucaucuggcucgucaagaagggcaacuccuaccccaagcucuccaaguccuacaucaacgacaaggagaaggagguccucguccucuggggcauccaccaccccuccaccuccgccgaccagcagucccucuaccagaacgccgacgccuacgucuucgucggcaccucccgcuacuccaagaaguucaagcccgagaucgucauccgccccaagguccgcgaccaggagggccgcaugaacuacuacuggacccucgucgagcccggcgacaagaucaccuucgaggccaccggcaaccucgucgucccccgcuacgccuucgccauggagcgcaacgccgaguccggcaucaucaucuccgacacccccguccacgacugcaacaccaccugccagacccccaagggcgccaucaacaccucccuccccuuccagaacauccaccccaucaccaucggcaagugccccaaguacgucaaguccaccaagcuccgccucgccaccggccuccgcaacguccccuccauccagucccgcggccucuucggcgccaucgccggcuucaucgagggcggcuggaccggcauggucgacggcugguacggcuaccaccaccagaacgagcagggcuccggcuacgccgccgaccucaaguccacccagaacgccaucgacgagaucaccaacaaggucaacuccgucaucgagaagaugaacacccaguucaccgccgucggcaaggaguucaaccaccucgagaagcgcaucgagaaccucaacaagaaggucgacgacggcuuccucgacaucuggaccuacaacgccgagcuccucguccuccucgagaacgagcgcacccucgacuaccacgacuccaacgucaagaagcucuacgagaagguccgcucccagcucaagaacaacgccaaggagaucggcaacggcugcuucgaguucuaccacaagugcgacaacaccugcauggaguccgucaagaacggcaccuacgacuaccccaaguacuccgaggaggccaagcucaaccgcgaggagaucgacggcgucaagcucgaguccacccgcaucuaccagauccucgccaucuacuccaccgucgccuccucccucguccucgucgucucccucggcgccaucuccuucuggaugugcuccggccacggcucccuccagugccgcaucugcaucuga

SEQ ID NO: 101666 - RNA, 1695 nt, Artificial Sequence
  derived and/or modified CDS sequence (opt2) from hemagglutinin__InfluenzaA__ADM14894
augaaggccauccucgucguccuccucuacaccuucgccaccgccaacgccgacacccucugcaucggcuaccacgccaacaacuccaccgacaccgucgacaccguccucgagaagaacgucaccgucacccacuccgucaaccuccucgaggacaagcacaacggcaagcucugcaagcuccgcggcgucgccccccuccaccucggcaagugcaacaucgccggcuggauccucggcaaccccgagugcgagucccucuccaccgccuccuccugguccuacaucgucgagaccuccuccuccgacaacggcaccugcuaccccggcgacuucaucgacuacgaggagcuccgcgagcagcucuccuccgucuccuccuucgagcgcuucgagaucuuccccaagaccuccuccuggcccaaccacgacuccaacaagggcgucaccgccgccugcccccacgccggcgccaaguccuucuacaagaaccucaucuggcucgucaagaagggcaacuccuaccccaagcucuccaaguccuacaucaacgacaaggagaaggagguccucguccucuggggcauccaccaccccuccaccuccgccgaccagcagucccucuaccagaacgccgacgccuacgucuucgucggcaccucccgcuacuccaagaaguucaagcccgagaucgucauccgccccaagguccgcgaccaggagggccgcaugaacuacuacuggacccucgucgagcccggcgacaagaucaccuucgaggccaccggcaaccucgucgucccccgcuacgccuucgccauggagcgcaacgccggcuccggcaucgucaucuccgacacccccguccacgacugcaacaccaccugccagacccccaagggcgccaucaacaccucccuccccuuccagaacauccaccccaucaccaucggcaagugccccaaguacgucaaguccaccaagcuccgccucgccaccggccuccgcaacguccccuccauccagucccgcggccucuucggcgccaucgccggcuucaucgagggcggcuggaccggcauggucgacggcugguacggcuaccaccaccagaacgagcagggcuccggcuacgccgccgaccucaaguccacccagaacgccaucgacgagaucaccaacaaggucaacuccgucaucgagaagaugaacacccaguucaccgccgucggcaaggaguucaaccaccucgagaagcgcaucgagaaccucaacaagaaggucgacgacggcuuccucgacaucuggaccuacaacgccgagcuccucguccuccucgagaacgagcgcacccucgacuaccacgacuccaacgucaagaagcucuacgagaagguccgcucccagcucaagaacaacgccaaggagaucggcaacggcugcuucgaguucuaccacaagugcgacaacaccugcaugaaguccgucaagaacggcaccuacgacuaccccaaguacuccgaggaggccaagcucaaccgcgaggagaucgacggcgucaagcucgaguccacccgcaucuaccagauccucgccaucuacuccaccgucgccuccucccucguccucgucgucucccucggcgccaucuccuucuggaugugcuccggccacuccugccgcaucugcaucuga

SEQ ID NO: 101667 - RNA, 1695 nt, Artificial Sequence
  derived and/or modified CDS sequence (opt2) from hemagglutinin__InfluenzaA__ADM14903
augaaggccauccucgucguccuccucugcaccuucgccaccgccaacgccgacacccucugcaucggcuaccacgccaacaacuccaccgacaccgucgacaccguccucgagaagaacgucaccgucacccacuccgucaaccuccucgaggacaagcacaacggcaagcucugcaagcuccgcggcgucgccccccuccaccucggcaagugcaacaucgccggcuggauccucggcaaccccgagugcgagucccucuccaccgccuccuccugguccuacaucgucgagaccuccuccuccgacaacggcaccugcuaccccggcgacuucaucgacuacgaggagcuccgcgagcagcucuccuccgucuccuccuucgagcgcuucgagaucuuccccaagaccuccuccuggcccaaccacgacuccaacaagggcgucaccgccgccugcccccacgccggcgccaaguccuucuacaagaaccucaucuggcucgucaagaagggcaacuccuaccccaagcucuccaaguccuacaucaacgacaagggcaaggagguccucguccucuggggcauccaccaccccuccaccuccgccgaccagcagucccucuaccagaacgccgacgccuacgucuucgucggcaccucccgcuacuccaagaaguucaagcccgagaucgccauccgccccaagguccgcgaccaggagggccgcaugaacuacuacuggacccucgucgagcccggcgacaagaucaccuucgaggccaccggcaaccucgucgucccccgcuacgccuucgccauggagcgcaacgccggcuccggcaucaucaucuccgacacccccguccacgacugcaacaccaccugccagacccccaagggcgccaucaacaccucccuccccuuccagaacauccaccccaucaccaucggcaagugccccaaguacgucaaguccaccaagcuccgccucgccaccggccuccgcaacguccccuccauccagucccgcggccucuucggcgccaucgccggcuucaucgagggcggcuggaccggcauggucgacggcugguacggcuaccaccaccagaacgagcagggcuccggcuacgccgccgaccucaaguccacccagaacgccaucgacaagaucaccaacaaggucaacuccgucaucgagaagaugaacacccaguucaccgccgucggcaaggaguucaaccaccucgagaagcgcaucgagaaccucaacaagaaggucgacgacggcuuccucgacaucuggaccuacaacgccgagcuccucguccuccucgagaacgagcgcacccucgacuaccacgacuccaacgucaagaaccucuacgagaagguccgcucccagcucaagaacaacgccaaggagaucggcaacggcugcuucgaguucuaccacaagugcgacaacaccugcauggaguccgucaagaacggcaccuacgacuaccccaaguacuccgaggaggccaagcucaaccgcgaggagaucgacggcgucaagcucgaguccacccgcaucuaccagauccucgccaucuacuccaccgucgccuccucccucguccucgucgucucccucggcgccaucuccuucuggaugugcuccggccacuccugccgcaucugcaucuga

SEQ ID NO: 101668 - RNA, 1695 nt, Artificial Sequence
  derived and/or modified CDS sequence (opt2) from hemagglutinin__InfluenzaA__ADM14912
augaaggccauccucgucguccuccucuacaccuucgccaccgccaacgccgacacccucugcaucggcuaccacgccaacaacuccaccgacaccgucgacaccguccucgagaagaacgucaccgucacccacuccgucaaccuccucgaggacaagcacaacggcaagcucugcaagcuccgcggcgucgccccccuccaccucggcaagugcaacaucgccggcuggauccucggcaaccccgagugcgagucccucuccaccgccuccuccugguccuacaucgucgagaccuccuccuccgacaacggcaccugcuaccccggcgacuucaucgacuacgaggagcuccgcgagcagcucuccuccgucuccuccuucgagcgcuucgagaucuuccccaagaccuccuccuggcccaaccacgacuccaacaagggcgucaccgccgccugcccccacgccggcgccaaguccuucuacaagaaccucaucuggcucgucaagaagggcaacuccuaccccaagcucuccaaguccuacaucaacgacaagggcaaggagguccucguccucuggggcauccaccaccccuccaccuccgccgaccagcagucccucuaccagaacgccgacgccuacgucuucgucggcaccucccgcuacuccaagaaguucaagcccgagaucgccauccgccccaagguccgcgaccaggagggccgcaugaacuacuacuggacccucgucgagcccggcgacaagaucaccuucgaggccaccggcaaccucgucgucccccgcuacgccuucgccauggagcgcaacgccggcuccggcaucaucaucuccgacacccccguccacgacugcaacaccaccugccagacccccgagggcgccaucaacaccucccuccccuuccagaacauccaccccaucaccaucggcaagugccccaaguacgucaaguccaccaagcuccgccucgccaccggccuccgcaacguccccuccauccagucccgcggccucuucggcgccaucgccggcuucaucgagggcggcuggaccggcauggucgacggcugguacggcuaccaccaccagaacgagcagggcuccggcuacgccgccgaccucaaguccacccagaacgccaucgacgagaucaccaacaaggucaacuccgucaucgagaagaugaacacccaguucaccgccgucggcaaggaguucaaccaccucgagaagcgcaucgagaaccucaacaagaaggucgacgacggcuuccucgacaucuggaccuacaacgccgagcuccucguccuccucgagaacgagcgcacccucgacuaccacgacuccaacgucaagaaccucuacgagaagguccgcucccagcucaagaacaacgccaaggagaucggcaacggcugcuucgaguucuaccacaagugcgacaacaccugcauggaguccgucaagaacggcaccuacgacuaccccaaguacuccgaggaggccaagcucaaccgcgaggagaucgacggcgucaagcucgaguccacccgcaucuaccagauccucgccaucuacuccaccgucgccuccucccucguccucgucgucucccucggcgccaucuccuucuggaugugcuccggccacuccugccgcaucugcaucuga

SEQ ID NO: 101669 - RNA, 1695 nt, Artificial Sequence
  derived and/or modified CDS sequence (opt2) from hemagglutinin__InfluenzaA__ADM14921
augaaggccauccucgucguccuccucuacaccuucgccaccgccaacgccgacacccucugcaucggcuaccacgccaacaacuccaccgacaccgucgacaccguccucgagaagaacgucaccgucacccacuccgucaaccuccucgaggacaagcacaacggcaagcucugcaagcuccgcggcgucgccccccuccaccucggcaagugcaacaucgccggcuggauccucggcaaccccgagugcgagucccucuccaccgccuccuccugguccuacaucgucgagaccuccuccuccgacaacggcaccugcuaccccggcgacuucaucgacuacgaggagcuccgcgagcagcucuccuccgucuccuccuucgagcgcuucgagaucuuccccaagaccuccuccuggcccaaccacgacuccaacaagggcgucaccgccgccugcccccacgccggcgccaaguccuucuacaagaaccucaucuggcucgucaagaagggcaacuccuaccccaagcucuccaaguccuacaucaacgacaagggcaaggagguccucguccucuggggcauccaccaccccuccaccuccgccgaccagcagucccucuaccagaacgccgacgccuacgucuucgucggcaccucccgcuacuccaagaaguucaagcccgagaucgccauccgccccaagguccgcgaccaggagggccgcaugaacuacuacuggacccucgucgagcccggcgacaagaucaccuucgaggccaccggcaaccucgucgucccccgcuacgccuucgccauggagcgcaacgccggcuccggcaucaucaucuccgacacccccguccacgacugcaacaccaccugccagacccccaagggcgccaucaacaccucccuccccuuccagaacauccaccccaucaccaucggcaagugccccaaguacgucaaguccaccaagcuccgccucgccaccggccuccgcaacguccccuccauccagucccgcggccucuucggcgccaucgccggcuucaucgagggcggcuggaccggcauggucgacggcugguacggcuaccaccaccagaacgagcagggcuccggcuacgccgccgaccucaaguccacccagaacgccaucgacgagaucaccaacaaggucaacuccgucaucgagaagaugaacacccaguucaccgccgucggcaaggaguucaaccaccucgagaagcgcaucgagaaccucaacaagaaggucgacgacggcuuccucgacaucuggaccuacaacgccgagcuccucguccuccucgagaacgagcgcacccucgacuaccacgacuccaacgucaagaaccucuacgagaagguccgcucccagcucaagaacaacgccaaggagaucggcaacggcugcuucgaguucuaccacaagugcgacaacaccugcauggaguccgucaagaacggcaccuacgacuaccccaaguacuccgaggaggccaagcucaaccgcgaggagaucgacggcgucaagcucgaguccacccgcaucuaccagauccucgccaucuacuccaccgucgccuccucccucguccucgucgucucccucggcgccaucuccuucuggaugugcuccggccacuccugccgcaucugcaucuga

SEQ ID NO: 101670 - RNA, 1701 nt, Artificial Sequence; identical to SEQ ID NO: 99869
  derived and/or modified CDS sequence (opt2) from hemagglutinin__InfluenzaA__ADM14930

SEQ ID NO: 101671 - RNA, 1701 nt, Artificial Sequence
  derived and/or modified CDS sequence (opt2) from hemagglutinin__InfluenzaA__ADM14948
augaaggccauccucgucguccuccucuacaccuucgccaccgccaacgccgacacccucugcaucggcuaccacgccaacaacuccaccgacaccgucgacaccguccucgagaagaacgucaccgucacccacuccgucaaccuccucgaggacaagcacaacggcaagcucugcaagcuccgcggcgucgccccccuccaccucggcaagugcaacaucgccggcuggauccucggcaaccccgagugcgagucccucuccaccgccuccuccugguccuacaucgucgagaccuccuccuccgacaacggcaccugcuaccccggcgacuucaucgacuacgaggagcuccgcgagcagcucuccuccgucuccuccuucgagcgcuucgagaucuuccccaagaccuccuccuggcccaaccacgacuccaacaagggcgucaccgccgccugcccccacgccggcgccaagggcuucuacaagaaccucaucuggcucgucaagaagggcaacuccuaccccaagcucuccaaguccuacaucaacgacaagggcaaggagguccucguccucuggggcauccaccaccccuccaccuccgccgaccagcagucccucuaccagaacgccgacgccuacgucuucgucggcaccucccgcuacucccgcaaguucaagcccgagaucgccauccgccccaagguccgcgaccaggagggccgcaugaacuacuacuggacccucgucgagcccggcgacaagaucaccuucgaggccaccggcaaccucgucgucccccgcuacgccuucgccauggagcgcaacgccggcuccggcaucaucaucuccgacacccccguccacgacugcaacaccaccugccagacccccgagggcgccaucaacaccucccuccccuuccagaacauccaccccaucaccaucggcaagugccccaaguacgucaaguccaccaagcuccgccucgccaccggccuccgcaacguccccuccauccagucccgcggccucuucggcgccaucgccggcuucaucgagggcggcuggaccggcauggucgacggcugguacggcuaccaccaccagaacgagcagggcuccggcuacgccgccgaccucaaguccacccagaacgccaucgacgagaucaccaacaaggucaacuccgucaucgagaagaugaacacccaguucaccgccgucggcaaggaguucaaccaccucgagaagcgcaucgagaaccucaacaagaaggucgacgacggcuuccucgacaucuggaccuacaacgccgagcuccucguccuccucgagaacgagcgcacccucgacuaccacgacuccaacgucaagaaccucuacgagaagguccgcucccagcucaagaacaacgccaaggagaucggcaacggcugcuucgaguucuaccacaagugcgacaacaccugcauggaguccgucaagaacggcaccuacgacuaccccaaguacuccgaggaggccaagcucaaccgcgaggagaucgacggcgucaagcucgaguccacccgcaucuaccagauccucgccaucuacuccaccgucgccuccucccucguccucgucgucucccucggcgccaucuccuucuggaugugcuccaacggcucccuccagugccgcaucugcaucuga

SEQ ID NO: 101672 - RNA, 1695 nt, Artificial Sequence
  derived and/or modified CDS sequence (opt2) from hemagglutinin__InfluenzaA__ADM14966
augaaggccauccucgucguccuccucuacaccuucgccaccgccaacgccgacacccucugcaucggcuaccacgccaacaacuccaccgacaccgucgacaccguccucgagaagaacgucaccgucacccacuccgucaacauccucgaggacaagcacaacggcaagcucugcaagcuccgcggcgucgccccccuccaccucggcaagugcaacaucgccggcuggauccucggcaaccccgagugcgagucccucuccaccgccuccuccugguccuacaucgucgagaccuccuccuccgacaacggcaccugcuaccccggcgacuucaucgacuacgaggagcuccgcgagcagcucuccuccgucuccuccuucgagcgcuucgagaucuuccccaagaccuccuccuggcccaaccacgacuccaacaagggcgucaccgccgccugcccccacgccggcgccaaguccuucuacaagaaccucaucuggcucgucaagaagggcaacuccuaccccaagcucuccaaguccuacaucaacgacaagggcaaggagguccucguccucuggggcauccaccaccccuccaccuccgccgaccagcagucccucuaccagaacgccgacgccuacgucuucgucggcuccucccgcuacuccaagaaguucaagcccgagaucgccauccgccccaagguccgcgaccaggagggccgcaugaacuacuacuggacccucgucgagcccggcgacaagaucaccuucgaggccaccggcaaccucgucgucccccgcuacgccuucgccauggagcgcaacgccggcuccggcaucaucaucuccgacacccccguccacgacugcaacaccaccugccagacccccaagggcgccaucaacaccucccuccccuuccagaacauccaccccaucaccaucggcaagugccccaaguacgucaaguccaccaagcuccgccucgccaccggccuccgcaacguccccuccauccagucccgcggccucuucggcgccaucgccggcuucaucgagggcggcuggaccggcauggucgacggcugguacggcuaccaccaccagaacgagcagggcuccggcuacgccgccgaccucaaguccacccagaacgccaucgacgagaucaccaacaaggucaacuccgucaucgagaagaugaacacccaguucaccgccgucggcaaggaguucaaccaccucgagaagcgcaucgagaaccucaacaagaaggucgacgacggcuuccucgacaucuggaccuacaacgccgagcuccucguccuccucgagaacgagcgcacccucgacuaccacgacuccaacgucaagaaccucuacgagaagguccgcucccagcucaagaacaacgccaaggagaucggcaacggcugcuucgaguucuaccacaagugcgacaacaccugcauggaguccgucaagaacggcaccuacgacuaccccaaguacuccgaggaggccaagcucaaccgcgaggagaucgacggcgucaagcucgaguccacccgcaucuaccagauccucgccaucuacuccaccgucgccuccucccucguccucgucgucucccucggcgccaucuccuucuggaugugcuccggccacuccugccgcaucugcaucuga

SEQ ID NO: 101673 - RNA, 1701 nt, Artificial Sequence; identical to SEQ ID NO: 98885
  derived and/or modified CDS sequence (opt2) from hemagglutinin__InfluenzaA__ADM14975

SEQ ID NO: 101674 - RNA, 1701 nt, Artificial Sequence
  derived and/or modified CDS sequence (opt2) from hemagglutinin__InfluenzaA__ADM14985
augaaggccauccucgucguccuccucuacaccuucgccaccgccaacgccgacacccucugcaucggcuaccacgccaacaacuccaccgacaccgucgacaccguccucgagaagaacgucaccgucacccacuccgucaaccuccucgaggacaagcacaacggcaagcucugcaagcuccgcggcgucgccccccuccaccucggcaagugcaacaucgccggcuggauccucggcaaccccgagugcgagucccucuccaccgccuccuccugguccuacaucgucgagaccuccuccuccgacaacggcaccugcuaccccggcgacuucaucgacuacgaggagcuccgcgagcagcucuccuccgucuccuccuucgagcgcuucgagaucuuccccaagaccuccuccuggcccaaccacgacuccaacaagggcgucaccgccgccugcccccacgccggcgccaaguccuucuacaagaaccucaucuggcucgucaagaagggcaacuccuaccccaagcucuccaaguccuacaucaacgacaaggagaaggagguccucguccucuggggcauccaccaccccuccaccuccgccgaccagcagucccucuaccagaacgccgacgccuacgucuucgucggcaccucccgcuacuccaagaaguucaagcccgagaucgccauccgccccaagguccgcggccaggagggccgcaugaacuacuacuggacccucgucgagcccggcgacaagaucaccuucgaggccaccggcaaccucgucgucccccgcuacgccuucgccauggagcgcaacgccggcuccggcaucgucaucuccgacacccccguccacgacugcaacaccaccugccagacccccaagggcgccaucaacaccucccuccccuuccagaacauccacuccaucaccaucggcaagugccccaaguacgucaaguccaccaagcuccgccucgccaccggccuccgcaacguccccuccauccagucccgcggccucuucggcgccaucgccggcuucaucgagggcggcuggaccggcauggucgacggcugguacggcuaccaccaccagaacgagcagggcuccggcuacgccgccgaccucaaguccacccagaacgccaucgacgagaucaccaacaaggucaacuccgucaucgagaagaugaacacccaguucaccgccgucggcaaggaguucaaccaccucgagaagcgcaucgagaaccucaacaagaaggucgacgacggcuuccucgacaucuggaccuacaacgccgagcuccucguccuccucgagaacgagcgcacccucgacuaccacgacuccaacgucaagaaccucuacgagaagguccgcucccagcucaagaacaacgccaaggagaucggcaacggcugcuucgaguucuaccacaagugcgacaacaccugcauggaguccgucaagaacggcaccuacgacuaccccaaguacuccgaggaggccaagcucaaccgcgaggagaucgacggcgucaagcucgaguccacccgcaucuaccagauccucgccaucuacuccaccgucgccuccucccucguccucgucgucucccucggcgccaucuccuucuggaugugcuccaacggcucccuccagugccgcaucugcaucuga

SEQ ID NO: 101675 - RNA, 1701 nt, Artificial Sequence
  derived and/or modified CDS sequence (opt2) from hemagglutinin__InfluenzaA__ADM23841
augaaggccauccucgucguccuccucuacaccuucgccaccgccaacgccgacacccucugcaucggcuaccacgccaacaacuccaccgacaccgucgacaccguccucgagaagaacgucaccgucacccacuccgucaaccuccucgaggacaagcacaacggcaagcucugcaagcuccgcggcgucgccccccuccaccucggcaagugcaacaucgccggcuggauccucggcaaccccgagugcgagucccucuccaccgccuccuccugguccuacaucgucgagaccuccuccuccgacaacggcaccugcuaccccggcgacuucaucgacuacgaggagcuccgcgagcagcucuccuccgucuccuccuucgagcgcuucgagaucuuccccaagaccuccuccuggcccaaccacgacuccaacaagggcgucaccgccgccugcccccacgccggcgccaaguccuucuacaagaaccucaucuggcucgucaagaagggcaacuccuaccccaagcucuccaaguccuacaucaacgacaagggcaaggagguccucguccucuggggcauccaccaccaguccaccuccgccgaccagcagucccucuaccagaacgccgacgccuacgucuucgucggcaccucccgcuacuccaagaaguucaagcccgagaucgccauccgccccaagguccgcgaccaggagggccgcaugaacuacuacuggacccucgucgagcccggcgacaagaucaccuucgaggccaccggcaaccucgucgucccccgcuacgccuucgccauggagcgcaacgccggcuccggcaucaucaucuccgacacccccguccacgacugcaacaccaccugccagacccccaagggcgccaucaacaccucccuccccuuccagaacauccaccccaucaccaucggcaagugccccaaguacgucaaguccaccaagcuccgccucgccaccggccuccgcaacguccccuccauccagucccgcggccucuucggcgccaucgccggcuucaucgagggcggcuggaccggcauggucgacggcugguacggcuaccaccaccagaacgagcagggcuccggcuacgccgccgaccucaaguccacccagaacgccaucgacgagaucaccaacaaggucaacuccgucaucgagaagaugaacacccaguucaccgccgucggcaaggaguucaaccaccucgagaagcgcaucgagaaccucaacaagaaggucgacgacggcuuccucgacaucuggaccuacaacgccgagcuccucguccuccucgagaacgagcgcacccucgacuaccacgacuccaacgucaagaaccucuacgagaagguccgcucccagcucaagaacaacgccaaggagaucggcaacggcugcuucgaguucuaccacaagugcgacaacaccugcauggaguccgucaagaacggcaccuacgacuaccccaaguacuccgaggaggccaagcucaaccgcgaggagaucgacggcgucaagcucgaguccacccgcaucuaccagauccucgccaucuacuccaccgucgccuccucccucguccucgucgucucccucggcgccaucuccuucuggaugugcuccaacggcucccuccagugccgcaucugcaucuga

SEQ ID NO: 101676 - RNA, 1701 nt, Artificial Sequence; identical to SEQ ID NO: 99869
  derived and/or modified CDS sequence (opt2) from hemagglutinin__InfluenzaA__ADM23843

SEQ ID NO: 101677 - RNA, 1701 nt, Artificial Sequence
  derived and/or modified CDS sequence (opt2) from hemagglutinin__InfluenzaA__ADM23844
augaaggccauccucgucguccuccucuacaccuucgccaccgccaacgccgacacccucugcaucggcuaccacgccaacaacuccaccgacaccgucgacaccguccucgagaagaacgucaccgucacccacuccgucaaccuccucgaggacaagcacaacggcaagcucugcaagcuccgcggcgucgccccccuccaccucggcaagugcaacaucgccggcuggauccucggcaaccccgagugcgagucccucuccaccgccuccuccugguccuacaucgucgagaccuccaucuccgacaacggcaccugcuaccccggcgacuucaucgacuacgaggagcuccgcgagcagcucuccuccgucuccuccuucgagcgcuucgagaucuuccccaagaccuccuccuggcccaaccacgacuccaacaagggcgucaccaccgccugcccccacgccggcgccaagggcuucuacaagaaccucaucuggcucgucaagaagggcaacuccuaccccaagcucuccaaguccuacaucaacgacaagggcaaggagguccucguccucuggggcauccaccaccaguccaccuccgccgaccagcagucccucuaccagaacgccgacgccuacgucuucgucggcaccucccgcuacuccaagaaguucaagcccgagaucgccauccgccccaagguccgcgaccaggagggccgcaugaacuacuacuggacccucgucgagcccggcgacaagaucaccuucgaggccaccggcaaccucgucgucccccgcuacgccuucgccauggagcgcaacgccggcuccggcaucaucaucuccgacacccccguccacgacugcaacaccaccugccagacccccaagggcgccaucaacaccucccuccccuuccagaacauccaccccaucaccaucggcaagugccccaaguacgucaaguccaccaagcuccgccucgccaccggccuccgcaacguccccuccauccagucccgcggccucuucggcgccaucgccggcuucaucgagggcggcuggaccggcauggucgacggcugguacggcuaccaccaccagaacgagcagggcuccggcuacgccgccgaccucaaguccacccagaacgccaucgacaagaucaccaacaaggucaacuccgucaucgagaagaugaacacccaguucaccgccgucggcaaggaguucaaccaccucgagaagcgcaucgagaaccucaacaagaaggucgacgacggcuuccucgacaucuggaccuacaacgccgagcuccucguccuccucgagaacgagcgcacccucgacuaccacgacuccaacgucaagaaccucuacgagaagguccgcucccagcucaagaacaacgccaaggagaucggcaacggcugcuucgaguucuaccacaagugcgacaacaccugcauggaguccgucaagaacggcaccuacgacuaccccaaguacuccgaggaggccaagcucaaccgcgaggagaucgacggcgucaagcucgaguccacccgcaucuaccagauccucgccaucuacuccaccgucgccuccucccucguccucgucgucucccucggcgccaucuccuucuggaugugcuccaacggcucccuccagugccgcaucugcaucuga

SEQ ID NO: 101678 - RNA, 1701 nt, Artificial Sequence
  derived and/or modified CDS sequence (opt2) from hemagglutinin__InfluenzaA__ADM23845
augaaggccauccucgucguccuccucuacaccuucgccaccgccaacgccgacacccucugcaucggcuaccacgccaacaacuccaccgacaccgucgacaccguccucgagaagaacgucaccgucacccacuccgucaaccuccucgaggacaagcacaacggcaagcucugcaagcuccgcggcgucgccccccuccaccucggcaagugcaacaucgccggcuggauccucggcaaccccgagugcgagucccucuccaccgccuccuccugguccuacaucgucgagaccuccaucuccgacaacggcaccugcuaccccggcgacuucaucgacuacgaggagcuccgcgagcagcucuccuccgucuccuccuucgagcgcuucgagaucuuccccaagaccuccuccuggcccaaccacgacuccaacaagggcgucaccaccgccugcccccacgccggcgccaaguccuucuacaagaaccucaucuggcucgucaagaagggcaacuccuaccccaagcucuccaaguccuacaucaacgacaagggcaaggagguccucguccucuggggcauccaccaccaguccaccuccgccgaccagcagucccucuaccagaacgccgacgccuacgucuucgucggcaccucccgcuacuccaagaaguucaagcccgagaucgccauccgccccaagguccgcgaccaggagggccgcaugaacuacuacuggacccucgucgagcccggcgacaagaucaccuucgaggccaccggcaaccucgucgucccccgcuacgccuucgccauggagcgcaacgccggcuccggcaucaucaucuccgacacccccguccacgacugcaacaccaccugccagacccccaagggcgccaucaacaccucccuccccuuccagaacauccaccccaucaccaucggcaagugccccaaguacgucaaguccaccaagcuccgccucgccaccggccuccgcaacguccccuccauccagucccgcggccucuucggcgccaucgccggcuucaucgagggcggcuggaccggcauggucgacggcugguacggcuaccaccaccagaacgagcagggcuccggcuacgccgccgaccucaaguccacccagaacgccaucgacaagaucaccaacaaggucaacuccgucaucgagaagaugaacacccaguucaccgccgucggcaaggaguucaaccaccucgagaagcgcaucgagaaccucaacaagaaggucgacgacggcuuccucgacaucuggaccuacaacgccgagcuccucguccuccucgagaacgagcgcacccucgacuaccacgacuccaacgucaagaaccucuacgagaagguccgcucccagcucaagaacaacgccaaggagaucggcaacggcugcuucgaguucuaccacaagugcgacaacaccugcauggaguccgucaagaacggcaccuacgacuaccccaaguacuccgaggaggccaagcucaaccgcgaggagaucgacggcgucaagcucgaguccacccgcaucuaccagauccucgccaucuacuccaccgucgccuccucccucguccucgucgucucccucggcgccaucuccuucuggaugugcuccaacggcucccuccagugccgcaucugcaucuga

SEQ ID NO: 101679 - RNA, 1701 nt, Artificial Sequence
  derived and/or modified CDS sequence (opt2) from hemagglutinin__InfluenzaA__ADM23846
augaaggccauccucgucguccuccucuacaccuucgccaccgccaacgccgacacccucugcaucggcuaccacgccaacaacuccaccgacaccgucgacaccguccucgagaagaacgucaccgucacccacuccgucaaccuccucgaggacaagcacaacggcaagcucugcaagcuccgcggcgucgccccccuccaccucggcaagugcaacaucgccggcuggauccucggcaaccccgagugcgagucccucuccaccgccuccuccugguccuacaucgucgagaccuccaucuccgacaacggcaccugcuaccccggcgacuucaucgacuacgaggagcuccgcgagcagcucuccuccgucuccuccuucgagcgcuucgagaucuuccccaagaccuccuccuggcccaaccacgacuccaacaagggcgucaccaccgccugcccccacgccggcgccaaguccuucuacaagaaccucaucuggcucgucaagaagggcaacuccuaccccaagcucuccaaguccuacaucaacgacaagggcaaggagguccucguccucuggggcauccaccaccccuccaccuccgccgaccagcagucccucuaccagaacgccgacgccuacgucuucgucggcaccucccgcuacuccaagaaguucaagcccgagaucgccauccgccccaagguccgcgaccaggagggccgcaugaacuacuacuggacccucgucgagcccggcgacaagaucaccuucgaggccaccggcaaccucgucgucccccgcuacgccuucgccauggagcgcaacgccggcuccggcaucaucaucuccgacacccccguccacgacugcaacaccaccugccagacccccaagggcgccaucaacaccucccuccccuuccagaacauccaccccaucaccaucggcaagugccccaaguacgucaaguccaccaagcuccgccucgccaccggccuccgcaacguccccuccauccagucccgcggccucuucggcgccaucgccggcuucaucgagggcggcuggaccggcauggucgacggcugguacggcuaccaccaccagaacgagcagggcuccggcuacgccgccgaccucaaguccacccagaacgccaucgacaagaucaccaacaaggucaacuccgucaucgagaagaugaacacccaguucaccgccgucggcaaggaguucaaccaccucgagaagcgcaucgagaaccucaacaagaaggucgacgacggcuuccucgacaucuggaccuacaacgccgagcuccucguccuccucgagaacgagcgcacccucgacuaccacgacuccaacgucaagaaccucuacgagaagguccgcucccagcucaagaacaacgccaaggagaucggcaacggcugcuucgaguucuaccacaagugcgacaacaccugcauggaguccgucaagaacggcaccuacgacuaccccaaguacuccgaggaggccaagcucaaccgcgaggagaucgacggcgucaagcucgaguccacccgcaucuaccagauccucgccaucuacuccaccgucgccuccucccucguccucgucgucucccucggcgccaucuccuucuggaugugcuccaacggcucccuccagugccgcaucugcaucuga

SEQ ID NO: 101680 - RNA, 1701 nt, Artificial Sequence
  derived and/or modified CDS sequence (opt2) from hemagglutinin__InfluenzaA__ADM23847
augaaggccauccucgucguccuccucuacaccuucgccaccgccaacgccgacacccucugcaucggcuaccacgccaacaacuccaccgacaccgucgacaccguccucgagaagaacgucaccgucacccacuccgucaaccuccucgaggacaagcacaacggcaagcucugcaagcuccgcggcgucgccccccuccaccucggcaagugcaacaucgccggcuggauccucggcaaccccgagugcgagucccucuccaccgccuccuccugguccuacaucgucgagaccuccaucuccgacaacggcaccugcuaccccggcgacuucaucgacuacgaggagcuccgcgagcagcucuccuccgucuccuccuucgagcgcuucgagaucuuccccaagaccuccuccuggcccaaccacgacuccaacaagggcgucaccaccgccugcccccacgccggcgccaagggcuucuacaagaaccucaucuggcucgucaagaagggcaacuccuaccccaagcucuccaaguccuacaucaacgacaagggcaaggagguccucguccucuggggcauccaccaccaguccaccuccgccgaccagcagucccucuaccagaacgccgacgccuacgucuucgucggcaccucccgcuacuccaagaaguucaagcccgagaucgccauccgccccaagguccgcgaccaggagggccgcaugaacuacuacuggacccucgucgagcccggcgacaagaucaccuucgaggccaccggcaaccucgucgucccccgcuacgccuucgccauggagcgcaacgucggcuccggcaucaucaucuccgacacccccguccacgacugcaacaccaccugccagacccccaagggcgccaucaacaccucccuccccuuccagaacauccaccccaucaccaucggcaagugccccaaguacgucaaguccaccaagcuccgccucgccaccggccuccgcaacguccccuccauccagucccgcggccucuucggcgccaucgccggcuucaucgagggcggcuggaccggcauggucgacggcugguacggcuaccaccaccagaacgagcagggcuccggcuacgccgccgaccucaaguccacccagaacgccaucgacaagaucaccaacaaggucaacuccgucaucgagaagaugaacacccaguucaccgccgucggcaaggaguucaaccaccucgagaagcgcaucgagaaccucaacaagaaggucgacgacggcuuccucgacaucuggaccuacaacgccgagcuccucguccuccucgagaacgagcgcacccucgacuaccacgacuccaacgucaagaaccucuacgagaagguccgcucccagcucaagaacaacgccaaggagaucggcaacggcugcuucgaguucuaccacaagugcgacaacaccugcauggaguccgucaagaacggcaccuacgacuaccccaaguacuccgaggaggccaagcucaaccgcgaggagaucgacggcgucaagcucgaguccacccgcaucuaccagauccucgccaucuacuccaccgucgccuccucccucguccucgucgucucccucggcgccaucuccuucuggaugugcuccaacggcucccuccagugccgcaucugcaucuga

SEQ ID NO: 101681 - RNA, 1701 nt, Artificial Sequence
  derived and/or modified CDS sequence (opt2) from hemagglutinin__InfluenzaA__ADM23849
augaaggccauccucgucguccuccucuacaccuucgccaccgccaacgccgacacccucugcaucggcuaccacgccaacaacuccaccgacaccgucgacaccguccucgagaagaacgucaccgucacccacuccgucaaccuccucgaggacaagcacaacggcaagcucugcaagcuccgcggcgucgccccccuccaccucggcaagugcaacaucgccggcuggauccucggcaaccccgagugcgagucccucuccaccgccuccuccugguccuacaucgucgagaccuccuccuccgacaacggcaccugcuaccccggcgacuucaucgacuacgaggagcuccgcgagcagcucuccuccgucuccuccuucgagcgcuucgagaucuuccccaagaccuccuccuggcccaaccacgacuccaacaagggcgucaccgccgccugcccccacgccggcgccaaguccuucuacaagaaccucaucuggcucgucaagaagggcaacuccuaccccaagcucuccaaguccuacaucaacgacaagggcaaggagguccucguccucuggggcauccaccaccaguccaccuccgccgaccagcagucccucuaccagaacgccgacgccuacgucuucgucggcaccucccgcuacuccaagaaguucaagcccgagaucgccauccgccccaagguccgcgaccaggagggccgcaugaacuacuacuggacccucgucgagcccggcgacaagaucaccuucgaggccaccggcaaccucgucgucccccgcuacgccuucgccauggagcgcaacgccggcuccggcaucaucaucuccgacacccccguccacgacugcaacaccaccugccagacccccaagggcgccaucaacaccucccuccccuuccagaacauccaccccaucaccaucggcaagugccccaaguacgucaaguccaccaagcuccgccucgccaccggccuccgcaacguccccuccauccagucccgcggccucuucggcgccaucgccggcuucaucgagggcggcuggaccggcauggucgacggcugguacggcuaccaccaccagaacgagcagggcuccggcuacgccgccgaccucaaguccacccagaacgccaucgacaagaucaccaacaaggucaacuccgucaucgagaagaugaacacccaguucaccgccgucggcaaggaguucaaccaccucgagaagcgcaucgagaaccucaacaagaaggucgacgacggcuuccucgacaucuggaccuacaacgccgagcuccucguccuccucgagaacgagcgcacccucgacuaccacgacuccaacgucaagaaccucuacgagaagguccgcucccagcucaagaacaacgccaaggagaucggcaacggcugcuucgaguucuaccacaagugcgacaacaccugcauggaguccgucaagaacggcaccuacgacuaccccaaguacuccgaggaggccaagcucaaccgcgaggagaucgacggcgucaagcucgaguccacccgcaucuaccagauccucgccaucuacuccaccgucgccuccucccucguccucgucgucucccucggcgccaucuccuucuggaugugcuccaacggcucccuccagugccgcaucugcaucuga

SEQ ID NO: 101682 - RNA, 1701 nt, Artificial Sequence
  derived and/or modified CDS sequence (opt2) from hemagglutinin__InfluenzaA__ADM23851
auggaggccauccucgucguccuccucuacaccuucgccaccgccaacgccgacacccucugcaucggcuaccacgccaacaacuccaccgacaccgucgacaccguccucgagaagaacgucaccgucacccacuccgucaaccuccucgaggacaagcacaacggcaagcucugcaagcuccgcggcgucgccccccuccaccucggcaagugcaacaucgccggcuggauccucggcaaccccgagugcgagucccucuccaccgccuccuccugguccuacaucgucgagaccuccuccuccgacaacggcaccugcuaccccggcgacuucaucgacuacgaggagcuccgcgagcagcucuccuccgucuccuccuucgagcgcuucgagaucuuccccaagaccuccuccuggcccaaccacgacuccaacaagggcgucaccgccgccugcccccacgccggcgccaaguccuucuacaagaaccucaucuggcucgucaagaagggcaacuccuaccccaagcucuccaaguccuacaucaacgacaagggcaaggagguccucguccucuggggcauccaccaccaguccaccuccgccgaccagcagucccucuaccagaacgccgacgccuacgucuucgucggcuccucccgcuacuccaagaaguucaagcccgagaucgccauccgccccaagguccgcgaccaggagggccgcaugaacuacuacuggacccucgucgagcccggcgacaagaucaccuucgaggccaccggcaaccucgucgucccccgcuacgccuucgccauggagcgcaacgccggcuccggcaucaucaucuccgacacccccguccacgacugcaacaccaccugccagacccccaagggcgccaucaacaccucccuccccuuccacaacauccaccccaucaccaucggcaagugccccaaguacgucaaguccaccaagcuccgccucgccaccggccuccgcaacguccccuccauccagucccgcggccucuucggcgccaucgccggcuucaucgagggcggcuggaccggcauggucgacggcugguacggcuaccaccaccagaacgagcagggcuccggcuacgccgccgaccucaaguccacccagaacgccaucgacgagaucaccaacaaggucaacuccgucaucgagaagaugaacacccaguucaccgccgucggcaaggaguucaaccaccucgagaagcgcaucgagaaccucaacaagaaggucgacgacggcuuccucgacaucuggaccuacaacgccgagcuccucguccuccucgagaacgagcgcacccucgacuaccacgacuccaacgucaagaaccucuacgagaagguccgcucccagcucaagaacaacgccaaggagaucggcaacggcugcuucgaguucuaccacaagugcgacaacaccugcauggaguccgucaagaacggcaccuacgacuaccccaaguacuccgaggaggccaagcucaaccgcgagaagaucgacggcgucaagcucgaguccacccgcaucuaccagauccucgccaucuacuccaccgucgccuccucccucguccucgucgucucccucggcgccaucuccuucuggaugugcuccaacggcucccuccagugccgcaucugcaucuga

SEQ ID NO: 101683 - RNA, 1701 nt, Artificial Sequence
  derived and/or modified CDS sequence (opt2) from hemagglutinin__InfluenzaA__ADM23852
auggaggccauccucgucguccuccucuacaccuucgccaccgccaacgccgacacccucugcaucggcuaccacgccaacaacuccaccgacaccgucgacaccguccucgagaagaacgucaccgucacccacuccgucaaccuccucgaggacaagcacaacggcaagcucugcaagcuccgcggcgucgccccccuccaccucggcaagugcaacaucgccggcuggauccucggcaaccccgagugcgagucccucuccaccgccuccuccugguccuacaucgucgagaccuccuccuccgacaacggcaccugcuaccccggcgacuucaucgacuacgaggagcuccgcgagcagcucuccuccgucuccuccuucgagcgcuucgagaucuuccccaagaccuccuccuggcccaaccacgacuccaacaagggcgucaccgccgccugcccccacgccggcgccaaguccuucuacaagaaccucaucuggcucgucaagaagggcaacuccuaccccaagcucuccaaguccuacaucaacgacaagggcaaggagguccucguccucuggggcauccaccaccccuccaccuccgccgaccagcagucccucuaccagaacgccgacgccuacgucuucgucggcuccucccgcuacuccaagaaguucaagcccgagaucgccauccgccccaagguccgcgaccaggagggccgcaugaacuacuacuggacccucgucgagcccggcgacaagaucaccuucgaggccaccggcaaccucgucgucccccgcuacgccuucgccauggagcgcaacgccggcuccggcaucaucaucuccgacacccccguccacgacugcaacaccaccugccagacccccaagggcgccaucaacaccucccuccccuuccacaacauccaccccaucaccaucggcaagugccccaaguacgucaaguccaccaagcuccgccucgccaccggccuccgcaacguccccuccauccagucccgcggccucuucggcgccaucgccggcuucaucgagggcggcuggaccggcauggucgacggcugguacggcuaccaccaccagaacgagcagggcuccggcuacgccgccgaccucaaguccacccagaacgccaucgacgagaucaccaacaaggucaacuccgucaucgagaagaugaacacccaguucaccgccgucggcaaggaguucaaccaccucgagaagcgcaucgagaaccucaacaagaaggucgacgacggcuuccucgacaucuggaccuacaacgccgagcuccucguccuccucgagaacgagcgcacccucgacuaccacgacuccaacgucaagaaccucuacgagaagguccgcucccagcucaagaacaacgccaaggagaucggcaacggcugcuucgaguucuaccacaagugcgacaacaccugcauggaguccgucaagaacggcaccuacgacuaccccaaguacuccgaggaggccaagcucaaccgcgagaagaucgacggcgucaagcucgaguccacccgcaucuaccagauccucgccaucuacuccaccgucgccuccucccucguccucgucgucucccucggcgccaucuccuucuggaugugcuccaacggcucccuccagugccgcaucugcaucuga

SEQ ID NO: 101684 - RNA, 1701 nt, Artificial Sequence; identical to SEQ ID NO: 101683
  derived and/or modified CDS sequence (opt2) from hemagglutinin__InfluenzaA__ADM23853

SEQ ID NO: 101685 - RNA, 1701 nt, Artificial Sequence; identical to SEQ ID NO: 98947
  derived and/or modified CDS sequence (opt2) from hemagglutinin__InfluenzaA__ADM23855

SEQ ID NO: 101686 - RNA, 1701 nt, Artificial Sequence
  derived and/or modified CDS sequence (opt2) from hemagglutinin__InfluenzaA__ADM23856
augaaggccauccucgucguccuccucuacaccuucgccaccgucaacgccgacacccucugcaucggcuaccacgccaacaacuccaccgacaccgucgacaccguccucgagaagaacgucaccgucacccacuccgucaaccuccucgaggacaagcacaacggcaagcucugcaagcuccgcggcgucgccccccuccaccucggcaagugcaacaucgccggcuggauccucggcaaccccgagugcgagucccucuccaccgccuccuccugguccuacaucgucgagaccuccuccuccgacaacggcaccugcuaccccggcgacuucaucgacuacgaggagcuccgcgagcagcucuccuccgucuccuccuucgagcgcuucgagaucuuccccaagaccuccuccuggcccaaccacgacuccaacaagggcgucaccgccgccugcccccacgccggcgccaaguccuucuacaagaaccucaucuggcucgucaagaagggcaacuccuaccccaagcucuccaaguccuacaucaacgacaagcgcaaggagguccucguccucuggggcauccaccaccaguccaccuccgccgaccagcagucccucuaccagaacgccgacgccuacgucuucgucggcaccucccgcuacuccaagaaguucaagcccgagaucgccauccgccccaagguccgcgaccaggagggccgcaugaacuacuacuggacccucgucgagcccggcgacaagaucaccuucgaggccaccggcaaccucgucgucccccgcuacgccuucgccauggagcgcaacgccggcuccggcaucaucaucuccgacacccccguccacgacugcaacaccaccugccagacccccaagggcgccaucaacaccucccuccccuuccagaacauccaccccaucaccaucggcaagugccccaaguacgucaaguccaccaagcuccgccucgccaccggccuccgcaacguccccuccauccagucccgcggccucuucggcgccaucgccggcuucaucgagggcggcuggaccggcauggucgacggcugguacggcuaccaccaccagaacgagcagggcuccggcuacgccgccgaccucaaguccacccagaacgccaucgacaagaucaccaacaaggucaacuccgucaucgagaagaugaacacccaguucaccgccgucggcaaggaguucaaccaccucgagaagcgcaucgagaaccucaacaagaaggucgacgacggcuuccucgacaucuggaccuacaacgccgagcuccucguccuccucgagaacgagcgcacccucgacuaccacgacuccaacgucaagaaccucuacgagaagguccgcucccagcucaagaacaacgccaaggagaucggcaacggcugcuucgaguucuaccacaagugcgacaacaccugcauggaguccgucaagaacggcaccuacgacuaccccaaguacuccgaggaggccaagcucaaccgcgaggagaucgacggcgucaagcucgaguccacccgcaucuaccagauccucgccaucuacuccaccgucgccuccucccucguccucgucgucucccucggcgccaucuccuucuggaugugcuccaacggcucccuccagugccgcaucugcaucuga

SEQ ID NO: 101687 - RNA, 1701 nt, Artificial Sequence; identical to SEQ ID NO: 98705
  derived and/or modified CDS sequence (opt2) from hemagglutinin__InfluenzaA__ADM25945

SEQ ID NO: 101688 - RNA, 1701 nt, Artificial Sequence; identical to SEQ ID NO: 98947
  derived and/or modified CDS sequence (opt2) from hemagglutinin__InfluenzaA__ADM25948

SEQ ID NO: 101689 - RNA, 1701 nt, Artificial Sequence; identical to SEQ ID NO: 100734
  derived and/or modified CDS sequence (opt2) from hemagglutinin__InfluenzaA__ADM26264

SEQ ID NO: 101690 - RNA, 1701 nt, Artificial Sequence; identical to SEQ ID NO: 100734
  derived and/or modified CDS sequence (opt2) from hemagglutinin__InfluenzaA__ADM26265

SEQ ID NO: 101691 - RNA, 1701 nt, Artificial Sequence; identical to SEQ ID NO: 100734
  derived and/or modified CDS sequence (opt2) from hemagglutinin__InfluenzaA__ADM26266

SEQ ID NO: 101692 - RNA, 1701 nt, Artificial Sequence; identical to SEQ ID NO: 100734
  derived and/or modified CDS sequence (opt2) from hemagglutinin__InfluenzaA__ADM26267

SEQ ID NO: 101693 - RNA, 1701 nt, Artificial Sequence
  derived and/or modified CDS sequence (opt2) from hemagglutinin__InfluenzaA__ADM26268
augaaggccauccucgucguccuccucuacaccuucaccaccgccaacgccgacacccucugcaucggcuaccacgccaacaacuccaccgacaccgucgacaccguccucgagaagaacgucaccgucacccacuccgucaaccuccucgaggacaagcacaacggcaagcucugcaagcuccgcggcgucgccccccuccaccucggcaagugcaacaucgccggcuggauccucggcaaccccgagugcgagucccucuccaccgccuccuccugguccuacaucgucgagaccuccuccuccgacaacggcaccugcuaccccggcgacuucaucgacuacgaggagcuccgcgagcagcucuccuccgucuccuccuucgagcgcuucgagaucuuccccaagaccuccuccuggcccaaccacgacuccaacaagggcgucaccgccgccugcccccacgccggcgccaaguccuucuacaagaaccucaucuggcucgucaagaagggcaacuccuaccccaagcucuccaaguccuacaucaacgacaagggcaaggagguccucguccucuggggcauccaccaccccuccaccuccgccgaccagcagucccucuaccagaacgccgacgccuacgucuucgucggcaccucccgcuacuccaagaaguucaagcccgagaucgccauccgccccaagguccgcgagcaggagggccgcaugaacuacuacuggacccucgucgagcccggcgacaagaucaccuucgaggccaccggcaaccucgucgucccccgcuacgccuucgccauggagcgcaacgccggcuccggcaucaucaucuccgacacccccguccacgacugcaacaccaccugccagacccccaagggcgccaucaacaccucccuccccuuccagaacauccacuccaucaccaucggcaagugccccaaguacgucaaguccaccaagcuccgccucgccaccggccuccgcaacguccccuccauccagucccgcggccucuucggcgccaucgccggcuucaucgagggcggcuggaccggcauggucgacggcugguacggcuaccaccaccagaacgagcagggcuccggcuacgccgccgaccucaaguccacccagaacgccaucgacgagaucaccaacaaggucaacuccgucaucgagaagaugaacacccaguucaccgccgucggcaaggaguucaaccaccucgagaagcgcaucgagaaccucaacaagaaggucgacgacggcuuccucgacaucuggaccuacaacgccgagcuccucguccuccucgagaacgagcgcacccucgacuaccacgacuccaacgucaagaaccucuacgagaagguccgcucccagcucaagaacaacgccaaggagaucggcaacggcugcuucgaguucuaccacaagugcgacaacaccugcauggaguccgucaagaacggcaccuacgacuaccccaaguacuccgaggaggccaagcucaagcgcgaggagaucgacggcgucaagcucgaguccacccgcaucuaccagauccucgccaucuacuccaccgucgccuccucccucguccucgucgucucccucggcgccaucuccuucuggaugugcuccaacggcucccuccagugccgcaucugcaucuga

SEQ ID NO: 101694 - RNA, 1701 nt, Artificial Sequence
  derived and/or modified CDS sequence (opt2) from hemagglutinin__InfluenzaA__ADM26269
augaagaccauccucgucguccuccucuacaccuucaccaccgccaacgccgacacccucugcaucggcuaccacgccaacaacuccaccgacaccgucgacaccguccucgagaagaacgucaccgucacccacuccgucaaccuccucgaggacaagcacaacggcaagcucugcaagcuccgcggcgucgccccccuccaccucggcaagugcaacaucgccggcuggauccucggcaaccccgagugcgagucccucuccaccgccuccuccugguccuacaucgucgagaccuccuccuccgacaacggcaccugcuaccccggcgacuucaucgacuacgaggagcuccgcgagcagcucuccuccgucuccuccuucgagcgcuucgagaucuuccccaagaccuccuccuggcccaaccacgacuccaacaagggcgucaccgccgccugcccccacgccggcgccaaguccuucuacaagaaccucaucuggcucgucaagaagggcaacuccuaccccaagcucuccaaguccuacaucaacgacaagggcaaggagguccucguccucuggggcauccaccaccccuccaccuccgccgaccagcagucccucuaccagaacgccgacgccuacgucuucgucggcaccucccgcuacuccaagaaguucaagcccgagaucgccauccgccccaagguccgcgagcaggagggccgcaugaacuacuacuggacccucgucgagcccggcgacaagaucaccuucgaggccaccggcaaccucgucgucccccgcuacgccuucgccauggagcgcaacgccggcuccggcaucaucaucuccgacacccccguccacgacugcaacaccaccugccagacccccaagggcgccaucaacaccucccuccccuuccagaacauccacuccaucaccaucggcaagugccccaaguacgucaaguccaccaagcuccgccucgccaccggccuccgcaacguccccuccauccagucccgcggccucuucggcgccaucgccggcuucaucgagggcggcuggaccggcauggucgacggcugguacggcuaccaccaccagaacgagcagggcuccggcuacgccgccgaccucaaguccacccagaacgccaucgacgagaucaccaacaaggucaacuccgucaucgagaagaugaacacccaguucaccgccgucggcaaggaguucaaccaccucgagaagcgcaucgagaaccucaacaagaaggucgacgacggcuuccucgacaucuggaccuacaacgccgagcuccucguccuccucgagaacgagcgcacccucgacuaccacgacuccaacgucaagaaccucuacgagaagguccgcucccagcucaagaacaacgccaaggagaucggcaacggcugcuucgaguucuaccacaagugcgacaacaccugcauggaguccgucaagaacggcaccuacgacuaccccaaguacuccgaggaggccaagcucaagcgcgaggagaucgacggcgucaagcucgaguccacccgcaucuaccagauccucgccaucuacuccaccgucgccuccucccucguccucgucgucucccucggcgccaucuccuucuggaugugcuccaacggcucccuccagugccgcaucugcaucuga

SEQ ID NO: 101695 - RNA, 1701 nt, Artificial Sequence
  derived and/or modified CDS sequence (opt2) from hemagglutinin__InfluenzaA__ADM26270
augaaggccauccucgucguccuccucuacaccuucaccaccgccaacgccgacacccucugcaucggcuaccacgccaacaacuccaccgacaccgucgacaccguccucgagaagaacgucaccgucacccacuccgucaaccuccucgaggacaagcacaacggcaagcucugcaagcuccgcggcgucgccccccuccaccucggcaagugcaacaucgccggcuggauccucggcaaccccgagugcgagucccucuccaccgccuccuccugguccuacaucgucgagaccuccuccuccgacaacggcaccugcuaccccggcgacuucaucgacuacgaggagcuccgcgagcagcucuccuccgucuccuccuucgagcgcuucgagaucuuccccaagaccuccuccuggcccaaccacgacuccaacaagggcgucaccgccgccugcccccacgccggcgccaaguccuucuacaagaaccucaucuggcucgucaagaagggcaacuccuaccccaagcucuccaaguccuacaucaacgacaagggcaaggagguccucguccucuggggcauccaccaccccuccaccuccgccgaccagcagucccucuaccagaacgccgacgccuacgucuucgucggcaccucccgcuacuccaagaaguucaagcccgagaucgccauccgccccaagguccgcgagcaggagggccgcaugaacuacuacuggacccucgucgagcccggcgacaagaucaccuucgaggccaccggcaaccucgucgucccccgcuacgccuucgccauggagcgcaacgccggcuccggcaucaucaucuccgacacccccguccacgacugcaacaccaccugccagacccccaagggcgccaucaacaccucccuccccuuccagaacauccacuccaucaccaucggccgcugccccaaguacgucaaguccaccaagcuccgccucgccaccggccuccgcaacguccccuccauccagucccgcggccucuucggcgccaucgccggcuucaucgagggcggcuggaccggcauggucgacggcugguacggcuaccaccaccagaacgagcagggcuccggcuacgccgccgaccucaaguccacccagaacgccaucgacgagaucaccaacaaggucaacuccgucaucgagaagaugaacacccaguucaccgccgucggcaaggaguucaaccaccucgagaagcgcaucgagaaccucaacaagaaggucgacgacggcuuccucgacaucuggaccuacaacgccgagcuccucguccuccucgagaacgagcgcacccucgaccaccacgacuccaacgucaagaaccucuacgagaagguccgcucccagcucaagaacaacgccaaggagaucggcaacggcugcuucgaguucuaccacaagugcgacaacaccugcauggaguccgucaagaacggcaccuacgacuaccccaaguacuccgaggaggccaagcucaaccgcgaggagaucgacggcgucaagcucgaguccacccgcaucuaccagauccucgccaucuacuccaccgucgccuccucccucguccucgucgucucccucggcgccaucuccuucuggaugugcuccaacggcucccuccagugccgcaucugcaucuga

SEQ ID NO: 101696 - RNA, 1701 nt, Artificial Sequence; identical to SEQ ID NO: 100734
  derived and/or modified CDS sequence (opt2) from hemagglutinin__InfluenzaA__ADM26271

SEQ ID NO: 101697 - RNA, 1701 nt, Artificial Sequence
  derived and/or modified CDS sequence (opt2) from hemagglutinin__InfluenzaA__ADM26272
augaaggccauccucgucguccuccucuacaccuucaccaccgccaacgccgacacccucugcaucggcuaccacgccaacaacuccaccgacaccgucgacaccguccucgagaagaacgucaccgucacccacuccgucaaccuccucgaggacaagcacaacggcaagcucugcaagcuccgcggcgucgccccccuccaccucggcaagugcaacaucgccggcuggauccucggcaaccccgagugcgagucccucuccaccgccuccuccugguccuacaucgucgagaccuccuccuccgacaacggcaccugcuaccccggcgacuucaucgacuacgaggagcuccgcgagcagcucuccuccgucuccuccuucgagcgcuucgagaucuuccccaagaccuccuccuggcccaaccacgacuccaacaagggcgucaccgccgccugcccccacgccggcgccaaguccuucuacaagaaccucaucuggcucgucaagaagggcaacuccuaccccaagcucuccaaguccuacaucaacgacaagggcaaggagguccucguccucuggggcauccaccaccccuccaccuccgccgaccagcagucccucuaccagaacgccgacgccuacgucuucgucggcaccucccgcuacuccaagaaguucaagcccgagaucgccauccgccccaagguccgcgagcaggagggccgcaugaacuacuacuggacccucgucgagcccggcgacaagaucaccuucgaggccaccggcaaccucgucgucccccgcuacgccuucgccauggagcgcaacgccggcuccggcaucaucaucuccgacacccccguccacgacugcaacaccaccugccagacccccaagggcgccaucaacaccucccuccccuuccagaacauccacuccaucaccaucggccgcugccccaaguacgucaaguccaccaagcuccgccucgccaccggccuccgcaacguccccuccauccagucccgcggccucuucggcgccaucgccggcuucaucgagggcggcuggaccggcauggucgacggcugguacggcuaccaccaccagaacgagcagggcuccggcuacgccgccgaccucaaguccacccagaacgccaucgacgagaucaccaacaaggucaacuccgucaucgagaagaugaacacccaguucaccgccgucggcaaggaguucaaccaccucgagaagcgcaucgagaaccucaacaagaaggucgacgacggcuuccucgacaucuggaccuacaacgccgagcuccucguccuccucgagaacgagcgcacccucgacuaccacgacuccaacgucaagaaccucuacgagaagguccgcucccagcucaagaacaacgccaaggagaucggcaacggcugcuucgaguucuaccacaagugcgacaacaccugcauggaguccgucaagaacggcaccuacgacuaccccaaguacuccgaggaggccaagcucaaccgcgaggagaucgacggcgucaagcucgaguccacccgcaucuaccagauccucgccaucuacuccaccgucgccuccucccucguccucgucgucucccucggcgccaucuccuucuggaugugcuccaacggcucccuccagugccgcaucugcaucuga

SEQ ID NO: 101698 - RNA, 1701 nt, Artificial Sequence
  derived and/or modified CDS sequence (opt2) from hemagglutinin__InfluenzaA__ADM26274
augaaggccauccucgucguccuccucuacaccuucaccaccgccaacgccgacacccucugcaucggcuaccacgccaacaacuccaccgacaccgucgacaccguccucgagaagaacgucaccgucacccacuccgucaaccuccucgaggacaagcacaacggcaagcucugcaagcuccgcggcgucgccccccuccaccucggcaagugcaacaucgccggcuggauccucggcaaccccgagugcgagucccucuccaccgccuccuccugguccuacaucgucgagaccuccuccuccgacaacggcaccugcuaccccggcgacuucaucgacuacgaggagcuccgcgagcagcucuccuccgucuccuccuucgagcgcuucgagaucuuccccaagaccuccuccuggcccaaccacgacuccaacaagggcgucaccgccgccugcccccacgccggcgccaaguccuucuacaagaaccucaucuggcucgucaagaagggcaacuccuaccccaagcucuccaaguccuacaucaacgacaagggcaaggagguccucguccucuggggcauccaccaccccuccaccuccgccgaccagcagucccucuaccagaacgccgacgccuacgucuucgucggcaccucccgcuacuccaagaaguucaagcccgagaucgccauccgccccaagguccgcgagcaggagggccgcaugaacuacuacuggacccucgucgagcccggcgacaagaucaccuucgaggccaccggcaaccucgucgucccccgcuacgccuucgccauggagcgcaacgccggcuccggcaucaucaucuccgacacccccguccacgacugcaacaccaccugccagacccccaagggcgccaucaacaccucccuccccuuccagaacauccacuccaucaccaucggcaagugccccaaguacgucaaguccaccaagcuccgccucgccaccggccuccgcaacguccccuccauccagucccgcggccucuucggcgccaucgccggcuucaucgagggcggcuggaccggcauggucgacggcugguacggcuaccaccaccagaacgagcagggcuccggcuacgccgccgaccucaaguccacccagaacgccaucgacgagaucaccaacaaggucaacuccgucaucgagaagaugaacacccaguucaccgccgucggcaaggaguucaaccaccucgagaagcgcaucgagaaccucaacaagaaggucgacgacggcuuccucgacaucuggaccuacaacgccgagcuccucguccuccucgagaacgagcgcacccucgacuaccacgacuccaacgucaaggaccucuacgagaagguccgcucccagcucaagaacaacgccaaggagaucggcaacggcugcuucgaguucuaccacaagugcgacaacaccugcauggaguccgucaagaacggcaccuacgacuaccccaaguacuccgaggaggccaagcucaaccgcgaggagaucgacggcgucaagcucgaguccacccgcaucuaccagauccucgccaucuacuccaccgucgccuccucccucguccucgucgucucccucggcgccaucuccuucuggaugugcuccaacggcucccuccagugccgcaucugcaucuga

SEQ ID NO: 101699 - RNA, 1701 nt, Artificial Sequence; identical to SEQ ID NO: 100734
  derived and/or modified CDS sequence (opt2) from hemagglutinin__InfluenzaA__ADM26276

SEQ ID NO: 101700 - RNA, 1701 nt, Artificial Sequence
  derived and/or modified CDS sequence (opt2) from hemagglutinin__InfluenzaA__ADM26277
augaaggccauccucgucguccuccucuacaccuucaccaccgccaacgccgacacccucugcaucggcuaccacgccaacaacuccaccgacaccgucgacaccguccucgagaagaacgucaccgucacccacuccgucaaccuccucgaggacaagcacaacggcaagcucugcaagcuccgcggcgucgccccccuccaccucggcaagugcaacaucgccggcuggauccucggcaaccccgagugcgagucccucuccaccgccuccuccugguccuacaucgucgagaccuccuccuccgacaacggcaccugcuaccccggcgacuucaucgacuacgaggagcuccgcgagcagcucuccuccgucuccuccuucgagcgcuucgagaucuuccccaagaccuccuccuggcccaaccacgacuccaacaagggcgucaccgccgccugcccccacgccggcgccaaguccuucuacaagaaccucaucuggcucgucaagaagggcaacuccuaccccaagcucuccaaguccuacaucaacgacaagggcaaggagguccucguccucuggggcauccaccaccccuccaccuccgccgaccagcagucccucuaccagaacgccgacgccuacgucuucgucggcaccucccgcuacuccaagaaguucaagcccgagaucgccauccgccccaagguccgcgagcaggagggccgcaugaacuacuacuggacccucgucgagcccggcgacaagaucaccuucgaggccaccggcaaccucgucgucccccgcuacgccuucgccauggagcgcaacgccggcuccggcaucaucaucuccgacacccccguccacgacugcaacaccaccugccagacccccaagggcgccaucaacaccucccuccccuuccagaacauccacuccaucaccaucggcaagugccccaaguacgucaaguccaccaagcuccgccucgccaccggccuccgcaacguccccuccauccagucccgcggccucuucggcgccaucgccggcuucaucgagggcggcuggaccggcauggucgacggcugguacggcuaccaccaccagaacgagcagggcuccggcuacgccgccgaccucaaguccacccagaacgccaucgacgagaucaccaacaaggucaacuccgucaucgagaagaugaacacccaguucaccgccgucggcaaggaguucaaccaccucgagaagcgcaucgagaaccucaacaagaaggucgacgacggcuuccucgacaucuggaccuacaacgccgagcuccucguccuccucgagaacgagcgcacccucgacuaccacgacuccaacgucaagaaccucuacgagaagguccgcucccagcucaagaacaacgccaaggagaucggcaacggcugcuucgaguucuaccacaagugcgacaacaccugcauggaguccgucaagaacggcaccuacgacuaccccaaguacuccgaggaggccaagcucaaccgcgaggagaucgacggcgucaagcucgaguccacccgcaucuaccagauccucgccaucuacuccaccgucgccuccucccucguccucaucgucucccucggcgccaucuccuucuggaugugcuccaacggcucccuccagugccgcaucugcaucuga

SEQ ID NO: 101701 - RNA, 1701 nt, Artificial Sequence
  derived and/or modified CDS sequence (opt2) from hemagglutinin__InfluenzaA__ADM26278
augaaggccauccucgucguccuccucuacaccuucaccaccgccaacgccgacacccucugcaucggcuaccacgccaacaacuccaccgacaccgucgacaccguccucgagaagaacgucaccgucacccacuccgucaaccuccucgaggacaagcacaacggcaagcucugcaagcuccgcggcgucgccccccuccaccucggcaagugcaacaucgccggcuggauccucggcaaccccgagugcgagucccucuccaccgccuccuccugguccuacaucgucgagaccuccuccuccgacaacggcaccugcuaccccggcgacuucaucgacuacgaggagcuccgcgagcagcucuccuccgucuccuccuucgagcgcuucgagaucuuccccaagaccuccuccuggcccaaccacgacuccaacaagggcgucaccgccgccugcccccacgccggcgccaaguccuucuacaagaaccucaucuggcucgucaagaagggcaacuccuaccccaagcucuccaaguccuacaucaacgacaagggcaaggagguccucguccucuggggcauccaccaccccuccaccuccgccgaccagcagucccucuaccagaacgccgacgccuacgucuccgucggcaccucccgcuacuccaagaaguucaagcccgagaucgccauccgccccaagguccgcgagcaggagggccgcaugaacuacuacuggacccucgucgagcccggcgacaagaucaccuucgaggccaccggcaaccucgucgucccccgcuucgccuucgccauggagcgcaacgccggcuccggcaucaucaucuccgacacccccguccacgacugcaacaccaccugccagacccccaagggcgccaucaacaccucccuccccuuccagaacauccacuccaucaccaucggcaagugccccaaguacgucaaguccaccaagcuccgccucgccaccggccuccgcaacguccccuccauccagucccgcggccucuucggcgccaucgccggcuucaucgagggcggcuggaccggcauggucgacggcugguacggcuaccaccaccagaacgagcagggcuccggcuacgccgccgaccucaaguccacccagaacgccaucgacgagaucaccaacaaggucaacuccgucaucgagaagaugaacacccaguucaccgccgucggcaaggaguucaaccaccucgagaagcgcaucgagaaccucaacaagaaggucgacgacggcuuccucgacaucuggaccuacaacgccgagcuccucguccuccucgagaacgagcgcacccucgacuaccacgacuccaacgucaagaaccucuacgagaagguccgcucccagcucaagaacaacgccaaggagaucggcaacggcugcuucgaguucuaccacaagugcgacaacaccugcauggaguccgucaagaacggcaccuacgacuaccccaaguacuccgaggaggccaagcucaagcgcgaggagaucgacggcgucaagcucgaguccacccgcaucuaccagauccucgccaucuacuccaccgucgccuccucccucguccucgucgucucccucggcgccaucuccuucuggaugugcuccaacggcucccuccagugccgcaucugcaucuga

SEQ ID NO: 101702 - RNA, 1701 nt, Artificial Sequence
  derived and/or modified CDS sequence (opt2) from hemagglutinin__InfluenzaA__ADM26279
augaaggccauccucgucguccuccucuacaccuucaccaccgccaacgccgacacccucugcaucggcuaccacgccaacaacuccaccgacaccgucgacaccguccucgagaagaacgucaccgucacccacuccgucaaccuccucgaggacaagcacaacggcaagcucugcaagcuccgcggcgucgccccccuccaccucggcaagugcaacaucgccggcuggauccucggcaaccccgagugcgagucccucuccaccgccuccuccugguccuacaucgucgagaccuccuccuccgacaacggcaccugcuaccccggcgacuucaucgacuacgaggagcuccgcgagcagcucuccuccgucuccuccuucgagcgcuucgagaucuuccccaagaccuccuccuggcccaaccacgacuccaacaagggcgucaccgccgccugcccccacgccggcgccaaguccuucuacaagaaccucaucuggcucgucaagaagggcaacuccuaccccaagcucuccaaguccuacaucaacgacaagggcaaggagguccucguccucuggggcauccaccaccccuccaccuccgccgaccagcagucccucuaccagaacgccgacgccuacgucuucgucggcaccucccgcuacuccaagaaguucaagcccgagaucgccauccgccccaagguccgcggccaggagggccgcaugaacuacuacuggacccucgucgagcccggcgacaagaucaccuucgaggccaccggcaaccucgucgucccccgcuacgccuucgccauggagcgcaacgccggcuccggcaucaucaucuccgacacccccguccacgacugcaacaccaccugccagacccccaagggcgccaucaacaccucccuccccuuccagaacauccacuccaucaccaucggcaagugccccaaguacgucaaguccaccaagcuccgccucgccaccggccuccgcaacguccccuccauccagucccgcggccucuucggcgccaucgccggcuucaucgagggcggcuggaccggcauggucgacggcugguacggcuaccaccaccagaacgagcagggcuccggcuacgccgccgaccucaaguccacccagaacgccaucgacgagaucaccaacaaggucaacuccgucaucgagaagaugaacacccaguucaccgccgucggcaaggaguucaaccaccucgagaagcgcaucgagaaccucaacaagaaggucgacgacggcuuccucgacaucuggaccuacaacgccgagcuccucguccuccucgagaacgagcgcacccucgacuaccacgacuccaacgucaagaaccucuacgagaagguccgcucccagcucaagaacaacgccaaggagaucggcaacggcugcuucgaguucuaccacaagugcgacaacaccugcauggaguccgucaagaacggcaccuacgacuaccccaaguacuccgaggaggccaagcucaaccgcgaggagaucgacggcgucaagcucgaguccacccgcaucuaccagauccucgccaucuacuccaccgucgccuccucccucguccucgucgucucccucggcgccaucuccuucuggaugugcuccaacggcucccuccagugccgcaucugcaucuga

SEQ ID NO: 101703 - RNA, 1701 nt, Artificial Sequence; identical to SEQ ID NO: 100734
  derived and/or modified CDS sequence (opt2) from hemagglutinin__InfluenzaA__ADM26280

SEQ ID NO: 101704 - RNA, 1701 nt, Artificial Sequence
  derived and/or modified CDS sequence (opt2) from hemagglutinin__InfluenzaA__ADM26281
augaaggccauccucgucguccuccucuacaccuucgccaccgccaacgccgacacccucugcaucggcuaccacgccaacaacuccaccgacaccgucgacaccguccucgagaagaacgucaccgucacccacuccgucaaccuccucgaggacaagcacaacggcaagcucugcaagcuccgcggcgucgccccccuccaccucggcaagugcaacaucgccggcuggauccucggcaaccccgagugcgagucccucuccaccgccuccuccugguccuacaucgucgagaccuccuccuccgacaacggcaccugcuaccccggcgacuucaucgacuacgaggagcuccgcgagcagcucuccuccgucuccuccuucgagcgcuucgagaucuuccccaagaccuccuccuggcccaaccacgacuccaacaagggcgucaccgccgccugcccccacgccggcgccaaguccuucuacaagaaccucaucuggcucgucaagaagggcaacuccuaccccaagcucuccaaguccuacaucaacgacaagggcaaggagguccucguccucuggggcauccaccaccccuccaccuccgccgaccagcagucccucuaccagaacgccgacgccuacgucuucgucggcaccucccgcuacuccaagaaguucaagcccgagaucgccauccgccccaagguccgcgaccaggagggccgcaugaacuacuacuggacccucgucgagcccggcgacaagaucaccuucgaggccaccggcaaccucgucgucccccgcuacgccuucgccauggagcgcaacgccggcuccggcaucaucaucuccgacacccccguccacgacugcaacaccaccugccagacccccaagggcgccaucaacaccucccuccccuuccaguccauccaccccaucaccaucggcaagugccccaaguacgucaaguccaccaagcuccgccucgccaccggccuccgcaacguccccuccauccagucccgcggccucuucggcgccaucgccggcuucaucgagggcggcuggaccggcauggucgacggcugguacggcuaccaccaccagaacgagcagggcuccggcuacgccgccgaccucaaguccacccagaacgccaucgacaagaucaccaacaaggucaacuccgucaucgagaagaugaacacccaguucaccgccgucggcaaggaguucaaccaccucgagcgccgcaucgagaaccucaacaagaaggucgacgacggcuuccucgacaucuggaccuacaacgccgagcuccucguccuccucgagaacgagcgcacccucgacuaccacgacuccaacgucaagaaccucuacgagaagguccgcucccagcucaagaacaacgccaaggagaucggcaacggcugcuucgaguucuaccacaagugcgacaacaccugcauggaguccgucaagaacggcaccuacgacuaccccaaguacuccgaggaggccaagcucaaccgcgaggagaucgacggcgucaagcucgaguccacccgcgucuaccagauccucgccaucuacuccaccgucgccuccucccucguccucgucgucucccucggcgccaucuccuucuggaugugcuccaacggcucccuccagugccgcaucugcaucuga

SEQ ID NO: 101705 - RNA, 1701 nt, Artificial Sequence
  derived and/or modified CDS sequence (opt2) from hemagglutinin__InfluenzaA__ADM26282
augaaggccauccucgucguccuccucuacaccuucaccaccgccaacgccgacacccucugcaucggcuaccacgccaacaacuccaccgacaccgucgacaccguccucgagaagaacgucaccgucacccacuccgucaaccuccucgaggacaagcacaacggcaagcucugcaagcuccgcggcgucgccccccuccaccucggcaagugcaacaucgccggcuggauccucggcaaccccgagugcgagucccucuccaccgccuccuccugguccuacaucgucgagaccuccuccuccgacaacggcaccugcuaccccggcgacuucaucgacuacgaggagcuccgcgagcagcucuccuccgucuccuccuucgagcgcuucgagaucuuccccaagaccuccuccuggcccaaccacgacuccaacaagggcgucaccgccgccugcccccacgccggcgccaaguccuucuacaagaaccucaucuggcucgucaagaagggcaacuccuaccccaagcucuccaaguccuacaucaacgacaagggcaaggagguccucguccucuggggcauccaccaccccuccaccuccgccgaccagcagucccucuaccagaacgccgacgccuacgucuucgucggcaccucccgcuacuccaagaaguucaagcccgagaucgccauccgccccaagguccgcgagcaggagggccgcaugaacuacuacuggacccucgucgagcccggcgacaagaucaccuucgaggccaccggcaaccucgucgucccccgcuacgccuucgccauggagcgcaacgccggcuccggcaucaucaucuccgacacccccguccacgacugcaacaccaccugccagacccccaagggcgccaucaacaccucccuccccuuccagaacauccacuccaucaccaucggcaagugccccaaguacgucaaguccaccaagcuccgccucgccaccggccuccgcaacguccccuccauccagucccgcggccucuucggcgccaucgccggcuucaucgagggcggcuggaccggcauggucgacggcugguacggcuaccaccaccagaacgagcagggcuccggcuacgccgccgaccucaaguccacccagaacgccaucgacgagaucaccaacaaggucaacuccgucaucgagaagaugaacacccaguucaccgccgucggcaaggaguucaaccaccucgagcgccgcaucgagaaccucaacaagaaggucgacgacggcuuccucgacaucuggaccuacaacgccgagcuccucguccuccucgagaacgagcgcacccucgacuaccacgacuccaacgucaagaaccucuacgagaagguccgcucccagcucaagaacaacgccaaggagaucggcaacggcugcuucgaguucuaccacaagugcgacaacaccugcauggaguccgucaagaacggcaccuacgacuaccccaaguacuccgaggaggccaagcucaaccgcgaggagaucgacggcgucaagcucgaguccacccgcaucuaccagauccucgccaucuacuccaccgucgccuccucccucguccucgucgucucccucggcgccaucuccuucuggaugugcuccaacggcucccuccagugccgcaucugcaucuga

SEQ ID NO: 101706 - RNA, 1701 nt, Artificial Sequence
  derived and/or modified CDS sequence (opt2) from hemagglutinin__InfluenzaA__ADM26283
augaaggccauccucgucguccuccucuacaccuucaccaccgccaacgccgacacccucugcaucggcuaccacgccaacaacuccaccgacaccgucgacaccguccucgagaagaacgucaccgucacccacuccgucaaccuccucgaggacaagcacaacggcaagcucugcaagcuccgcggcgucgccccccuccaccucggcaagugcaacaucgccggcuggauccucggcaaccccgagugcgagucccucuccaccgccuccuccugguccuacaucgucgagaccuccuccuccgacaacggcaccugcuaccccggcgacuucaucgacuacgaggagcuccgcgagcagcucuccuccgucuccuccuucgagcgcuucgagaucuuccccaagaccuccuccuggcccaaccacgacuccaacaagggcgucaccgccgccugcccccacgccggcgccaaguccuucuacaagaaccucaucuggcucgucaagaagggcaacuccuaccccaagcucuccaaguccuacaucaacgacaagggcaaggagguccucguccucuggggcauccaccaccccuccaccuccgccgaccagcagucccucuaccagaacgccgacgccuacgucuucgucggcaccucccgcuacuccaagaaguucaagcccgagaucgccauccgccccaagguccgcgagcaggagggccgcaugaacuacuacuggacccucgucgagcccggcgacaagaucaccuucgaggccaccggcaaccucgucgucccccgcuacgccuucgccauggagcgcaacgccggcuccggcaucaucaucuccgacacccccguccacgacugcaacaccaccugccagacccccaagggcgccaucaacaccucccuccccuuccagaacauccacuccaucaccaucggcaagugccccaaguacgucaaguccaccaagcuccgccucgccaccggccuccgcaacguccccuccauccagucccgcggccucuucggcgccaucgccggcuucaucgagggcggcuggaccggcauggucgacggcugguacggcuaccaccaccagaacgagcagggcuccggcuacgccgccgaccucaaguccacccagaacgccaucgacgagaucaccaacaaggucaacuccgucaucgagaagaugaacacccaguucaccgccgucggcaaggaguucaaccaccucgagaagcgcaucgagaaccucaacaagaaggucgacgacggcuuccucgacaucuggaccuacaacgccgagcuccucguccuccucgagaacgagcgcacccucgacuaccacgacuccaacgucaagaaccucuacgagaagguccgcucccagcucaagaacaacgccaaggagaucggcaacggcugcuucgaguucuaccacaagugcgacaacaccugcauggaguccgucaagaacggcaccuacgacuaccccaaguacuccgaggaggccaagcucaaccgcgagaagaucgacggcgucaagcucgaguccacccgcaucuaccagauccucgccaucuacuccaccgucgccuccucccucguccucgucgucucccucggcgccaucuccuucuggaugugcuccaacggcucccuccagugccgcaucugcaucuga

SEQ ID NO: 101707 - RNA, 1701 nt, Artificial Sequence; identical to SEQ ID NO: 100734
  derived and/or modified CDS sequence (opt2) from hemagglutinin__InfluenzaA__ADM26284

SEQ ID NO: 101708 - RNA, 1701 nt, Artificial Sequence; identical to SEQ ID NO: 100734
  derived and/or modified CDS sequence (opt2) from hemagglutinin__InfluenzaA__ADM26285

SEQ ID NO: 101709 - RNA, 1701 nt, Artificial Sequence
  derived and/or modified CDS sequence (opt2) from hemagglutinin__InfluenzaA__ADM26784
augaagaccaucaucgcccucuccuacauccucugccucgucuucgcccagaagcuccccggcaacgacaacuccaccgccacccucugccucggccaccacgccguccccaacggcaccaucgucaagaccaucaccaacgaccagaucgaggucaccaacgccaccgagcucguccaguccuccuccaccggcgagaucugcgacuccccccaccagauccucgacggcgagaacugcacccucaucgacgcccuccucggcgacccccagugcgacggcuuccagaacaagaagugggaccucuucgucgagcgcuccaaggccuacuccaacugcuaccccuacgacguccccgacuacgccucccuccgcucccucgucgccuccuccggcacccucgaguucaacaacgaguccuucaacuggaccggcgucacccagaacggcaccuccuccgccugcaugcgccgcuccaacaacuccuucuucucccgccucaacuggcucacccaccucaaguucaaguaccccgcccucaacgucaccaugcccaacaacgagcaguucgacaagcucuacaucuggggcguccaccaccccggcaccgacaacgaccagaucuuccucuacgcccaggccuccggccgcaucaccgucuccaccaagcgcucccagcagaccgucauccccaacaucggcucccgcccccgcguccgcaacauccccucccgcaucuccaucuacuggaccaucgucaagcccggcgacauccuccucaucaacuccaccggcaaccucaucgccccccgcggcuacuucaagauccgcuccggcaaguccuccaucaugcgcuccgacgcccccaucggcaagugcaacuccgagugcaucacccccaacggcuccauccccaacgacaagcccuuccagaacgucaaccgcaucaccuacggcgccugcccccgcuacgucaagcagaacacccucaagcucgccaccggcaugcgcaacguccccgagaagcagacccgcggcaucuucggcgccaucgccggcuucaucgagaacggcugggagggcauggucgacggcugguacggcuuccgccaccagaacuccgagggccgcggccaggccgccgaccucaaguccacccaggccgccaucgaccagaucaacggcaagcucaaccgccucaucggcaagaccaacgagaaguuccaccagaucgagaaggaguucuccgaggucgagggccgcauccaggaccucgagaaguacgucgaggacaccaagaucgaccucugguccuacaacgccgagcuccucgucgcccucgagaaccagcacaccaucgaccucaccgacuccgagaugaacaagcucuucgagaagaccaagaagcagcuccgcgagaacgccgaggacaugggcaacggcugcuucaagaucuaccacaagugcgacaacgccugcaucggcuccauccgcaacggcaccuacgaccacgacgucuaccgcgacgaggcccucaacaaccgcuuccagaucaagggcgucgagcucaaguccggcuacaaggacuggauccucuggaucuccuucgccaucuccugcuuccuccucugcgucgcccuccucggcuucaucaugugggccugccagaagggcaacauccgcugcaacaucugcaucuga

SEQ ID NO: 101710 - RNA, 1701 nt, Artificial Sequence; identical to SEQ ID NO: 98470
  derived and/or modified CDS sequence (opt2) from hemagglutinin__InfluenzaA__ADM26795

SEQ ID NO: 101711 - RNA, 1701 nt, Artificial Sequence
  derived and/or modified CDS sequence (opt2) from hemagglutinin__InfluenzaA__ADM26817
augaagaccaccaucgcccucucccacauccucugccucgucuucgcccagaagcuccccggcaacgacaacuccaccgccacccucugccucggccaccacgccguccccaacggcaccaucgucaagaccaucaccaacgaccagaucgaggucaccaacgccaccgagcucguccaguccuccuccgccggcgagaucugcgacuccccccaccagauccucgacggcgagaacugcacccucaucgacgcccuccucggcgacccccagugcgacggcuuccagaacaagaagugggaccucuucgucgagcgccgccgcgccuacuccaacugcuaccccuacgacguccccgacuacgccucccuccgcucccucgucgccuccuccggcacccucgaguucaacaacgaguccuucaacuggaccggcgucacccagaacggcaccuccuccgccugcauccgccgcuccaacaacuccuucuucucccgccucaacuggcucacccaccucaacuucaaguaccccgcccucaacgucaccaugcccaacaacgagcaguucgacaagcucuacaucuggggcguccaccaccccggcaccgacaaggaccagaucuuccucuacgcccaggccuccggccgcaucaccgucuccaccaagcgcucccagcaggccgucauccccaacaucggcucccgcccccgcguccgcaacauccccucccgcaucuccaucuacuggaccaucgucaagcccggcgacauccuccucaucaacuccaccggcaaccucaucgccccccgcggcuacuucaagauccgcuccggcaaguccuccaucaugcgcuccgacgcccccaucggcaagugcaacuccgagugcaucacccccaacggcuccauccccaacgacaagcccuuccagaacgucaaccgcaucaccuacggcgccugcccccgcuacgucaagcaguccacccucaagcucgccaccggcaugcgcaacguccccgagaagcagacccgcggcaucuucggcgccaucgccggcuucaucgagaacggcugggagggcauggucgacggcugguacggcuuccgccaccagaacuccgagggccgcggccaggccgccgaccucaaguccacccaggccgccaucgaccagaucaacggcaagcucaaccgccucaucggcaagaccaacgagaaguuccaccagaucgagaaggaguucuccgaggucgagggccgcauccaggaccucgagaaguacgucgaggacaccaagaucgaccucugguccuacaacgccgagcuccucgucgcccucgagaaccagcacaccaucgaccucaccgacuccgagaugaacaagcucuucgagaagaccaagaagcagcuccgcgagaacgccgaggacaugggcaacggcugcuucaagaucuaccacaagugcgacaacgccugcaucggcuccauccgcaacggcaccuacgaccacgacgucuaccgcgacgaggcccucaacaaccgcuuccagaucaagggcgucgagcucaaguccggcuacaaggacuggauccucuggaucuccuucgccaucuccugcuuccuccucugcgucgcccuccucggcuucaucaugugggccugccagaagggcaacauccgcugcaacaucugcaucuga

SEQ ID NO: 101712 - RNA, 1704 nt, Artificial Sequence
  derived and/or modified CDS sequence (opt2) from hemagglutinin__InfluenzaA__ADM31424
auggagaagaucguccuccucuucaccaccaucucccucgucaaguccgaccacaucugcaucggcuaccacgccaacaacuccaccgagcaggucgacaccaucauggagaagaacgucaccgucacccacgcccaggacauccucgagaagacccacaacggcaagcucugcgaccucaacggcgucaagccccucauccucaaggacugcuccgucgccggcuggcuccucggcaacccccucugcgacgaguucaucaacguccccgagugguccuacaucgucgagaaggccaaccccgccaacgaccucugcuaccccggcaacuucaacgacuacgaggagcucaagcaccuccucucccgcaucaaccacuucgagaagauccagaucauccccaaggacuccugguccgaccacgaggccucccucggcgucuccgccgccugcuccuaccagggcaacuccuccuucuuccgcaacgucgucuggcucaucaagaaggacaacgccuaccccaccaucaagaaggacuacaacaacaccaaccaggaggaccuccucguccucuggggcauccaccaccccaacgacgaggccgagcagacccgccucuaccagaaccccaccaccuacaucuccaucggcaccuccacccucaaccagcgccucguccccaagaucgccacccgcuccaagaucaacggccaguccggccgcaucgacuucuucuggaccauccucaagcccaacgacgccauccacuucgaguccaacggcaacuucaucgcccccgaguacgccuacaagaucgucaagaagggcgacuccaccaucaugaaguccgaggucgaguacggcaacugcaacacccgcugccagacccccaucggcgccaucaacuccuccaugcccuuccacaacauccacccccucaccaucggcgagugccccaaguacgucaaguccaacaagcucguccucgccaccggccuccgcaacuccccccagcgcgagcgccgccgcaagcgcggccucuucggcgccaucgccggcuucaucgagggcggcuggcagggcauggucgacggcugguacggcuaccaccacuccaacgagcagggcuccggcuacgccgccgacaaggaguccacccagaaggccaucgacggcgucaccaacaaggucaacuccaucaucgacaagaugaacacccaguucgaggccgucggccgcgaguucaacaaccucgagcgccgcaucgagaaccucaacaagaagauggaggacggcuuccucgacgucuggaccuacaacgccgagcuccucguccucauggagaacgagcgcacccucgacuuccacgacuccaacgucaagaaccucuacgacaagguccgccuccagcucaaggacaacgccaaggagcucggcaacggcugcuucgaguucuaccacaagugcaacaacgagugcauggaguccguccgcaacggcaccuacgacuacccccaguacuccgaggaggcccgccucaagcgcgaggagaucuccggcgucaagcucgaguccaucggcaucuaccagauccucuccaucuacuccaccgucgccuccucccucguccucgccaucaugauggccggccucucccucuggaugugcuccaacggcucccuccagugccgcaucugcaucuga

SEQ ID NO: 101713 - RNA, 1701 nt, Artificial Sequence; identical to SEQ ID NO: 101306
  derived and/or modified CDS sequence (opt2) from hemagglutinin__InfluenzaA__ADM31478

SEQ ID NO: 101714 - RNA, 1701 nt, Artificial Sequence
  derived and/or modified CDS sequence (opt2) from hemagglutinin__InfluenzaA__ADM31488
augaaggccauccucgucguccuccucuacaccuucgccaccgccaacgccgacacccucugcaucggcuaccacgccaacaacuccaccgacaccgucgacaccguccucgagaagaacgucaccgucacccacuccgucaacauccucgaggacaagcacaacggcaagcucugcaagcuccgcggcgucgccccccuccaccucggcaagugcaacaucgccggcuggauccucggcaaccccgagugcgagucccucuccaccgccuccuccugguccuacaucgucgagaccuccuccuccgacaacggcaccugcuaccccggcgacuucaucgacuacgaggagcuccgcgagcagcucuccuccgucuccuccuucgagcgcuucgagaucuuccccaagaccuccuccuggcccaaccacgacuccaacaagggcgucaccgccgccugcccccacgccggcgccaaguccuucuacaagaaccucaucuggcucgucaagaagggcaacuccuaccccaagcucuccaaguccuacaucaacgacaagggcaaggagguccucguccucuggggcauccaccaccccuccaccuccgccgaccagcagucccucuaccagaacgccgacgccuacgucuucgucggcuccuccaaguacuccaagaaguucaagcccgagaucgccauccgccccaagguccgcgaccaggagggccgcaugaacuacuacuggacccucgucgagcccggcgacaagaucaccuucgaggccaccggcaaccucgucgucccccgcuacgccuucgccauggagcgcaacgccggcuccggcaucaucaucuccgacacccccguccacgacugcaacaccaccugccagacccccaagggcgccaucaacaccucccuccccuuccagaacauccaccccaucaccaucggcaagugccccaaguacgucaaguccaccaagcuccgccucgccaccggccuccgcaacguccccuccauccagucccgcggccucuucggcgccaucgccggcuucaucgagggcggcuggaccggcauggucgacggcugguacggcuaccaccaccagaacgagcagggcuccggcuacgccgccgaccucaaguccacccagaacgccaucgacgagaucaccaacaaggucaacuccgucaucgagaagaugaacacccaguucaccgccgucggcaaggaguucaaccaccucgagaagcgcaucgagaaccucaacaagaaggucgacgacggcuuccucgacaucuggaccuacaacgccgagcuccucguccuccucgagaacgagcgcacccucgacuaccacgacuccaacgucaagaaccucuacgagaagguccgcucccagcucaagaacaacgccaaggaggucggcaacggcugcuucgaguucuaccacaagugcgacaacaccugcauggaguccgucaagaacggcaccuacgacuaccccaaguacuccgaggaggccaagcucaaccgcgaggagaucgacggcgucaagcucgaguccacccgcaucuaccagauccucgccaucuacuccaccgccgccuccucccucguccucgucgucucccucggcgccaucuccuucuggaugugcuccaacggcucccuccagugccgcaucugcaucuga

SEQ ID NO: 101715 - RNA, 1701 nt, Artificial Sequence
  derived and/or modified CDS sequence (opt2) from hemagglutinin__InfluenzaA__ADM31498
augaaggccauccucgucguccuccucuacaccuucgccaccgccaacgccgacacccucugcaucggcuaccacgccaacaacuccaccgacaccgucgacaccguccucgagaagaacgucaccgucacccacuccgucaaccuccucgaggacaagcacaacggcaagcucugcaagcuccgcggcgucgccccccuccaccucggcaagugcaacaucgccggcuggauccucggcaaccccgagugcgagucccucuccaccgccuccuccugguccuacaucgucgagaccuccuccuccgacaacggcaccugcuaccccggcgacuucaucgacuacgaggagcuccgcgagcagcucuccuccgucuccuccuucgagcgcuucgagaucuuccccaagaccuccuccuggcccaaccacgacuccaacaagggcgucaccgccgccugcccccacgccggcgccaaguccuucuacaagaaccucaucuggcucgucaagaagggcaacuccuaccccaagcucuccaaguccuacaucaacgacaagggcaaggagguccucguccucuggggcauccaccaccccuccaccuccgccgaccagcagucccucuaccagaacgccgacgccuacgucuucgucggcaccucccgcuacuccaagaaguucaagcccgagaucgccauccgccccaagguccgcgaccaggagggccgcaugaacuacuacuggacccucgucaagcccggcgacaagaucaccuucgaggccaccggcaaccucgucgucccccgcuacgccuucgccauggagcgcaacgccggcuccggcaucaucaucuccgacacccccguccacgacugcaacaccaccugccagacccccaagggcgccaucaacaccucccuccccuuccagaacauccaccccaucaccaucggcaagugccccaaguacgucaaguccaccaagcuccgccucgccaccggccuccgcaacguccccuccauccagucccgcggccucuucggcgccaucgccggcuucaucgagggcggcuggaccggcauggucgacggcugguacggcuaccaccaccagaacgagcagggcuccggcuacgccgccgaccucaaguccacccagcacgccaucgacgagaucaccaacaaggucaacuccgucaucgagaagaugaacacccaguucaccgccgucggcaaggaguucaaccaccucgagaagcgcaucgagaaccucaacaagaaggucgacgacggcuuccucgacaucuggaccuacaacgccgagcuccucguccuccucgagaacgagcgcacccucgacuaccacgacuccaacgucaagaaccucuacgagaagguccgcucccagcucaagaacaacgccaaggagaucggcaacggcugcuucgaguucuaccacaagugcgacaacaccugcauggaguccgucaagaacggcaccuacgacuaccccaaguacuccgaggaggccaagcucaaccgcgaggagaucgacggcgucaagcucgaguccacccgcaucuaccagauccucgccaucuacuccaccgucgccuccucccucguccucgucgucucccucggcgccaucuccuucuggaugugcuccaacggcucccuccagugccgcaucugcaucuga

SEQ ID NO: 101716 - RNA, 1701 nt, Artificial Sequence
  derived and/or modified CDS sequence (opt2) from hemagglutinin__InfluenzaA__ADM31508
augaaggccauccucgucguccuccucuacaccuucgccaccgccaacgccgacacccucugcaucggcuaccacgccaacaacuccaccgacaccgucgacaccguccucgagaagaacgucaccgucacccacuccgucaaccuccucgaggacaagcacaacggcaagcucugcaagcuccgcggcgucgccccccuccaccucggcaagugcaacaucgccggcuggauccucggcaaccccgagugcgagucccucuccaccgccuccuccugguccuacaucgucgagaccuccuccuccgacaacggcaccugcuaccccggcgacuucaucgacuacgaggagcuccgcgagcagcucuccuccgucuccuccuucgagcgcuucgagaucuuccccaagacccgcuccuggcccaaccacgacuccaacaagggcgucaccgccgccugcccccacgccggcgccaaguccuucuacaagucccucaucuggcucgucaagaagggcaacuccuaccccaagcucuccaaguccuacaucaacgacaagggcaaggagguccucguccucuggggcauccaccaccccuccaccuccgccgaccagcagucccucuaccagaacgccgacgccuacgucuucgucggcaccucccgcuacuccaagaaguucaagcccgagaucgccauccgccccaagguccgcgaccaggagggccgcaugaacuacuacuggacccucgucgagcccggcgacaagaucaccuucgaggccaccggcaaccucgucgucccccgcuacgccuucgccauggagcgcaacgccggcuccggcaucaucaucuccgacacccccguccacgacugcaacaccaccugccagacccccaagggcgccaucaacaccucccuccccuuccagaacauccaccccaucaccaucggcaagugccccaaguacgucaaguccaccaagcuccgccucgccaccggccuccgcaacguccccuccauccagucccgcggccucuucggcgccaucgccggcuucaucgagggcggcuggaccggcauggucgacggcugguacggcuaccaccaccagaacgagcagggcuccggcuacgccgccgaccucaaguccacccagcacgccaucgacgagaucaccaacaaggucaacuccgucaucgagaagaugaacacccaguucaccgccgucggcaaggaguucaaccaccucgagaagcgcaucgagaaccucaacaagaaggucgacgacggcuuccucgacaucuggaccuacaacgccgagcuccucguccuccucgagaacgagcgcacccucgacuaccacgacuccaacgucaagaaccucuacgagaagguccgcucccagcucaagaacaacgccaaggagaucggcaacggcugcuucgaguucuaccacaagugcgacaacaccugcauggaguccgucaagaacggcaccuacgacuaccccaaguacuccgaggaggccaagcucaaccgcgaggagaucgacggcgucaagcucgaguccacccgcaucuaccagauccucgccaucuacuccaccgucgccuccucccucguccucgucgucucccucggcgccaucuccuucuggaugugcuccaacggcucccuccagugccgcaucugcaucuga

SEQ ID NO: 101717 - RNA, 1701 nt, Artificial Sequence
  derived and/or modified CDS sequence (opt2) from hemagglutinin__InfluenzaA__ADM31518
augaaggccauccucgucguccuccucuacaccuucgccaccgccaacgccgacacccucugcaucggcuaccacgccaacaacuccaccgacaccgucgacaccguccucgagaagaacgucaccgucacccacuccgucaaccuccucgaggacaagcacaacggcaagcucugcaagcuccgcggcgucgccccccuccaccucggcaagugcaacaucgccggcuggauccucggcaaccccgagugcgagucccucuccaccgccuccuccugguccuacaucgucgagaccuccuccuccgacaacggcaccugcuaccccggcgacuucaucgacuacgaggagcuccgcgagcagcucuccuccgucuccuccuucgagcgcuucgagaucuuccccaagaccuccuccuggcccaaccacgacuccaacaagggcgucaccgccgccugcccccacgccggcgccaaguccuucuacaagaaccucaucuggcucgucaagaagggcaacuccuaccccaagcucuccaaguccuacgucaacgacaagggcaaggagguccucguccucuggggcauccaccaccccuccaccuccgccgaccagcagucccucuaccagaacgccgacgccuacgucuucgucggcaccucccgcuacuccaagaaguucaagcccgagaucgccauccgccccaagguccgcgaccaggagggccgcaugaacuacuacuggacccucgucgagcccggcgacaagaucaccuucgaggccaccggcaaccucgucgucccccgcuacgccuucgccauggagcgcaacgccggcuccggcaucaucaucuccgacacccccguccacgacugcaacaccaccugccagacccccaagggcgccaucaacaccucccuccccuuccagaacauccaccccaucaccaucggcaagugccccaaguacgucaaguccaccaagcuccgccucgccaccggccuccgcaacauccccuccauccagucccgcggccucuucggcgccaucgccggcuucaucgagggcggcuggaccggcauggucgacggcugguacggcuaccaccaccagaacgagcagggcuccggcuacgccgccgaccucaaguccacccagaacgccaucgacgagaucaccaacaaggucaacuccgucaucgagaagaugaacacccaguucaccgccgucggcaaggaguucaaccaccucgagaagcgcaucgagaaccucaacaagaaggucgacgacggcuuccucgacaucuggaccuacaacgccgagcuccucguccuccucgagaacgagcgcacccucgacuaccacgacuccaacgucaagaaccucuacgagaagguccgcucccagcucaagaacaacgccaaggagaucggcaacggcugcuucgaguucuaccacaagugcgacaacaccugcauggaguccgucaagaacggcaccuacgacuaccccaaguacuccgaggaggccaagcucaaccgcgaggagaucgacggcgucaagcucgaguccacccgcaucuaccagauccucgccaucuacuccaccgucgccuccucccucguccucgucgucucccucggcgccaucuccuucuggaugugcuccaacggcucccuccagugccgcaucugcaucuga

SEQ ID NO: 101718 - RNA, 1701 nt, Artificial Sequence
  derived and/or modified CDS sequence (opt2) from hemagglutinin__InfluenzaA__ADM31528
augaaggccauccucgucguccuccucuacaccuucgccaccgccaacgccgacacccucugcaucggcuaccacgccaacaacuccaccgacaccgucgacaccguccucgagaagaacgucaccgucacccacuccgucaaccuccucgaggacaagcacaacggcaagcucugcaagcuccgcggcgucgccccccuccaccucggcaagugcaacaucgccggcuggauccucggcaaccccgagugcgagucccucuccaccgccuccuccugguccuacaucgucgagaccuccuccuccgacaacggcaccugcuaccccggcgacuucaucgacuacgaggagcuccgcgagcagcucuccuccgucuccuccuucgagcgcuucgagauguuccccaagaccuccuccuggcccaaccacgacuccaacaagggcgucaccgccgccugcccccacgccggcgccaaguccuucuacaagaaccucaucuggcucgucaagaagggcaacuccuaccccaagcucuccaaguccuacaucaacgacaagggcaaggagguccucguccucuggggcauccaccaccccuccaccuccgccgaccagcagucccucuaccagaacgccgacgccuacgucuucgucggcaccucccgcuacuccaagaaguucaagcccgagaucgccauccgccccaagguccgcgaccaggagggccgcaugaacuacuacuggacccucgucgagcccggcgacaagaucaccuucgaggccaccggcaaccucgucgucccccgcuacgccuucgccauggagcgcaacgccggcuccggcaucaucaucuccgacacccccguccacgacugcaacaccaccugccagacccccaagggcgccaucaacaccucccuccccuuccagaacauccaccccaucaccaucggcaagugccccaaguacgucaaguccaccaagcuccgccucgccaccggccuccgcaacguccccuccauccagucccgcggccucuucggcgccaucgccggcuucaucgagggcggcuggaccggcauggucgacggcugguacggcuaccaccaccagaacgagcagggcuccggcuacgccgccgaccucaaguccacccagaacgccaucgacaagaucaccaacaaggucaacuccgucaucgagaagaugaacacccaguucaccgccgucggcaaggaguucaaccaccucgagaagcgcaucgagaaccucaacaagaaggucgacgacggcuuccucgacaucuggaccuacaacgccgagcuccucguccuccucgagaacgagcgcacccucgacuaccacgacuccaacgucaagaaccucuacgagaagguccgcucccagcucaagaacaacgccaaggaggucggcaacggcugcuucgaguucuaccacaagugcgacaacaccugcauggaguccgucaagaacggcaccuacgacuaccccaaguacuccgaggaggccaagcucaaccgcgaggagaucgacggcgucaagcucgaguccacccgcaucuaccagauccucgccaucuacuccaccgucgccuccucccucguccucgucgucucccucggcgccaucuccuucuggaugugcuccaacggcucccuccagugccgcaucugcaucuga

SEQ ID NO: 101719 - RNA, 1701 nt, Artificial Sequence
  derived and/or modified CDS sequence (opt2) from hemagglutinin__InfluenzaA__ADM31538
augaaggccauccucgucguccuccucuacaccuucgccaccgccaacgccgacacccucugcaucggcuaccacgccaacaacuccaccgacaccgucgacaccguccucgagaagaacgucaccgucacccacuccgucaaccuccucgaggacaagcacgacggcaagcucugcaagcuccgcggcgucgccccccuccaccucggcaagugcaacaucgccggcuggauccucggcaaccccgagugcgagucccucuccaccgccuccuccugguccuacaucgucgagaccuccuccuccgacaacggcaccugcuaccccggcgacuucaucgacuacgaggagcuccgcgagcagcucuccuccgucuccuccuucgagcgcuucgagaucuuccccaagaccuccuccuggcccaaccacgacuccaacaagggcgucaccgccgccugcccccacgccggcgccaaguccuucuacaagaaccucaucuggcucgucaagaagggcaacuccuaccccaagcucuccaaguccuacaucaacgacaagggcaaggagguccucguccucuggggcauccaccaccccuccaccuccgccgaccagcagucccucuaccagaacgccgacgccuacgucuucgucggcaccucccgcuacuccaagaaguucaagcccgagaucgccauccgccccaagguccgcgaccaggagggccgcaugaacuacuacuggacccucgucgagcccggcgacaagaucaccuucgaggccaccggcaaccucgucgucccccgcuacgccuucgccauggagcgcaacgccggcuccggcaucaucaucuccgacacccccguccacgacugcaacaccaccugccagacccccaagggcgccaucaacaccucccuccccuuccagaacauccaccccaucaccaucggcaagugccccaaguacgucaaguccaccaagcuccgccucgccaccggccuccgcaacauccccuccauccagucccgcggccucuucggcgccaucgccggcuucaucgagggcggcuggaccggcauggucgacggcugguacggcuaccaccaccagaacgagcagggcuccggcuacgccgccgaccucaaguccacccagaacgccaucgacaagaucaccaacaaggucaacuccgucaucgagaagaugaacacccaguucaccgccgucggcaaggaguucaaccaccucgagaagcgcaucgagaaccucaacaagaaggucgacgacggcuuccucgacaucuggaccuacaacgccgagcuccucguccuccucgagaacgagcgcacccucgacuaccacgacuccaacgucaagaaccucuacgagaagguccgcucccagcucaagaacaacgccaaggagaucggcaacggcugcuucgaguucuaccacaagugcgacaacaccugcauggaguccgucaagaacggcaccuacgacuaccccaaguacuccgaggaggccaagcucaaccgcgaggagaucgacggcgucaagcucgaguccacccgcaucuaccagauccucgccaucuacuccaccgucgccuccucccucguccucgucgucucccucggcgccaucuccuucuggaugugcuccaacggcucccuccagugccgcaucugcaucuga

SEQ ID NO: 101720 - RNA, 1701 nt, Artificial Sequence
  derived and/or modified CDS sequence (opt2) from hemagglutinin__InfluenzaA__ADM31548
augaaggccauccucgucguccuccucuacaccuucgccaccgccaacgccgacacccucugcaucggcuaccacgccaacaacuccaccgacaccgucgacaccguccucgagaagaacgucaccgucacccacuccgucaaccuccucgaggacaagcacaacggcaagcucugcaagcuccgcggcgucgccccccuccaccucggcaagugcaacaucgccggcuggauccucggcaaccccgagugcgagucccucuccaccgccuccuccugguccuacaucgucgagaccuccuccuccgacaacggcaccugcuaccccggcgacuucaucgacuacgaggagcuccgcgagcagcucuccuccgucuccuccuucgagcgcuucgagaucuuccccaagaccuccuccuggcccaaccacgacuccaacaagggcgucaccgccgccugcccccacgccggcgccaaguccuucuacaagaaccucaucuggcucgucaagaagggcaacuccuaccccaagcucuccaaguccuacaucaacgacaagggcaaggagguccucguccucuggggcauccaccaccccuccaccuccgccgaccagcagucccucuaccagaacgccgacgccuacgucuucgucggcaccucccgcuacuccaagaaguucaagcccgaggucgccauccgccccaagguccgcgaccaggagggccgcaugaacuacuacuggacccucgucgagcccggcgacaagaucaccuucgaggccaccggcaaccucgucgucccccgcuacgccuucgccauggagcgcaacgccggcuccggcaucaucaucuccgacacccccguccacgacugcaacaccaccugccagacccccaagggcgccaucaacaccucccuccccuuccagaacauccaccccaucaccaucggcaagugccccaaguacgucaaguccaccaagcuccgccucgccaccggccuccgcaacauccccuccauccagucccgcggccucuucggcgccaucgccggcuucaucgagggcggcuggaccggcauggucgacggcugguacggcuaccaccaccagaacgagcagggcuccggcuacgccgccgaccucaaguccacccagaacgccaucgacgagaucaccaacaaggucaacuccgucaucgagaagaugaacacccaguucaccgccgucggcaaggaguucaaccaccucgagaagcgcaucgagaaccucaacaagaaggucgacgacggcuuccucgacaucuggaccuacaacgccgagcuccucguccuccucgagaacgagcgcacccucgacuaccacgacuccaacgucaagaaccucuacgagaagguccgcucccagcucaagaacaacgccaaggagaucggcaacggcugcuucgaguucuaccacaagugcgacaacaccugcauggaguccgucaagaacggcaccuacgacuaccccaaguacuccgaggaggccaagcucaaccgcgaggagaucgacggcgucaagcucgaguccacccgcaucuaccagauccucgccaucuacuccaccgucgccuccucccucguccucgucgucucccucggcgccaucuccuucuggaugugcuccaacggcucccuccagugccgcaucugcaucuga

SEQ ID NO: 101721 - RNA, 1701 nt, Artificial Sequence
  derived and/or modified CDS sequence (opt2) from hemagglutinin__InfluenzaA__ADM31558
augaaggccauccucgucguccuccucuacaccuucgccaccgccaacgccgacacccucugcaucggcuaccacgccaacaacuccaccgacaccgucgacaccguccucgagaagaacgucaccgucacccacuccgucaaccuccucgaggacaagcacaacggcaagcucugcaagcuccgcggcgucgccccccuccaccucggcaagugcaacaucgccggcuggauccucggcaaccccgagugcgagucccucuccaccgccuccuccugguccuacaucgucgagaccuccuccuccgacaacggcaccugcuaccccggcgacuucaucgacuacgaggagcuccgcgagcagcucuccuccgucuccuccuucgagcgcuucgagaucuuccccaagaccuccuccuggcccaaccacgacuccaacaagggcgucaccgccgccugcccccacgccggcgccaaguccuucuacaagaaccucaucuggcucgucaagaagggcaacuccuaccccaagcucuccaaguccuacaucaacgacaagggcaaggagguccucguccucuggggcauccaccaccccuccaccuccgccgaccagcagucccucuaccagaacgccgacgccuacgucuucgucggcaccucccgcuacuccaagaaguucaagcccgagaucgccauccgccccaagguccgcgaccaggagggccgcaugaacuacuacuggacccucgucgagcccggcgacaagaucaccuucgaggccaccggcaaccucgucgucccccgcuacgccuucgccauggagcgcaacgccggcuccggcaucaucaucuccgacacccccguccacgacugcaacaccaccugccagacccccaagggcgccaucaacaccucccuccccuuccagaacauccaccccaucaccaucggcaagugccccaaguacgucaaguccaccaagcuccgccucgccaccggccuccgcaacauccccuccauccagucccgcggccucuucggcgccaucgccggcuucaucgagggcggcuggaccggcauggucgacggcugguacggcuaccaccaccagaacgagcagggcuccggcuacgccgccgaccucaaguccacccagaacgccaucgacaagaucaccaacaaggucaacuccgucaucgagaagaugaacacccaguucaccgccgucggcaaggaguucaaccaccucgagaagcgcaucgagaaccucaacaagaaggucgacgacggcuuccucgacaucuggaccuacaacgccgagcuccucguccuccucgagaacgagcgcacccucgacuaccacgacuccaacgucaagaaccucuacgagaagguccgcucccagcucaagaacaacgccaaggagauccgcaacggcugcuucgaguucuaccacaagugcgacaacaccugcauggaguccgucaagaacggcaccuacgacuaccccaaguacuccgaggaggccaagcucaaccgcgaggagaucgacggcgucaagcucgaguccacccgcaucuaccagauccucgccaucuacuccaccgucgccuccucccucguccucgucgucucccucggcgccaucuccuucuggaugugcuccaacggcucccuccagugccgcaucugcaucuga

SEQ ID NO: 101722 - RNA, 1701 nt, Artificial Sequence; identical to SEQ ID NO: 100302
  derived and/or modified CDS sequence (opt2) from hemagglutinin__InfluenzaA__ADM31568

SEQ ID NO: 101723 - RNA, 1701 nt, Artificial Sequence; identical to SEQ ID NO: 98705
  derived and/or modified CDS sequence (opt2) from hemagglutinin__InfluenzaA__ADM31578

SEQ ID NO: 101724 - RNA, 1701 nt, Artificial Sequence
  derived and/or modified CDS sequence (opt2) from hemagglutinin__InfluenzaA__ADM31588
augaaggccauccucgucguccuccucuacaccuucgccaccgccaacgccgacacccucugcaucggcuaccacgccaacaacuccaccgacaccgucgacaccauccucgagaagaacgucaccgucacccacuccgucaaccuccucgaggacaagcacaacggcaagcucugcaagcuccgcggcgucgccccccuccaccucggcaagugcaacaucgccggcuggauccucggcaaccccgagugcgagucccucuccaccgccuccuccugguccuacaucgucgagaccuccuccuccgacaacggcaccugcuaccccggcgacuucaucgacuacgaggagcuccgcgagcagcucuccuccgucuccuccuucgagcgcuucgagauguuccccaagaccuccuccuggcccaaccacgacuccaacaagggcgucaccgccgccugcccccacgccggcgccaaguccuucuacaagaaccucaucuggcucgucaagaagggcaacuccuaccccaagcucaacaaguccuacaucaacgacaagggcaaggagguccucguccucuggggcauccaccaccccuccaccuccgccgaccagcagucccucuaccagaacgccgacgccuacgucuucgucggcaccucccgcuacuccaagaaguucaagaccgagaucgccauccgccccaagguccgcgaccaggagggccgcaugaacuacuacuggacccucgucgagcccggcgacaagaucaccuucgaggccaccggcaaccucgucgucccccgcuacgccuucgccauggagcgcaacgccggcuccggcaucaucaucuccgacacccccguccacgacugcaacaccaccugccagacccccaagggcgccaucaacaccucccuccccuuccagaacauccaccccaucaccaucggcaagugccccaaguacgucaaguccaccaagcuccgccucgccaccggccuccgcaacguccccuccauccagucccgcggccucuucggcgccaucgccggcuucaucgagggcggcuggaccggcauggucgacggcugguacggcuaccaccaccagaacgagcagggcuccggcuacgccgccgaccucaaguccacccagaacgccaucgacgagaucaccaacaaggucaacuccgucaucgagaagaugaacacccaguucaccgccgucggcaaggaguucaaccaccucgagaagcgcaucgagaaccucaacaagaaggucgacgacggcuuccucgacaucuggaccuacaacgccgagcuccucguccuccucgagaacgagcgcacccucgacuaccacgacuccaacgucaagaaccucuacgagaagguccgcucccagcucaagaacaacgccaaggaggucggcaacggcugcuucgaguucuaccacaagugcgacaacaccugcauggaguccgucaagaacggcaccuacgacuaccccaaguacuccgaggaggccaagcucaaccgcgaggagaucgacggcgucaagcucgaguccacccgcaucuaccagauccucgccaucuacuccaccgucgccuccucccucguccucgucgucucccucggcgccaucuccuucuggaugugcuccaacggcucccuccagugccgcaucugcaucuga

SEQ ID NO: 101725 - RNA, 1701 nt, Artificial Sequence
  derived and/or modified CDS sequence (opt2) from hemagglutinin__InfluenzaA__ADM31598
augaacgccauccucgucguccuccucuacaccuucgccaccgccaacgccgacacccucugcaucggcuaccacgccaacaacuccaccgacaccgucgacacccuccucgagaagaacgucaccgucacccacuccgucaaccuccucgaggacaagcacaacggcaagcucugcaagcuccgcggcgucgccccccuccaccucggcaagugcgacaucgccggcuggauccucggcaaccccgagugcgagucccucuccaccgccuccuccugguccuacaucgucgagaccuccuccuccgacaacggcaccugcuaccccggcgacuucaucgacuacgaggagcuccgcgagcagcucuccuccgucuccuccuucgagcgcuucgagaucuuccccaagaccuccuccuggcccgaccacgacuccaacaagggcgucaccgccgccugcccccacgccggcgccaaguccuucuacaagaaccucaucuggcucgucaagaagggcaacuccuaccccaagcucuccaaguccuacaucaacgacaagggcaaggagguccucguccucuggggcauccaccaccccuccaccuccgccgaccagcagucccucuaccagaacgccgacgccuacgucuucgucggcaccucccgcuacuccaagaaguucaagcccgagaucgccauccgccccaagguccgcgaccaggagggccgcaugaacuaccacuggacccucgucgagcccggcgacaagaucaccuucgaggccaccggcaaccucgucgucccccgcuacgccuucgccauggagcgcaacgccggcuccggcaucaucaucuccgacgcccccguccacgacugcaacaccaccugccagacccccaagggcgccaucaacaccucccuccccuuccagaacauccaccccaucaccaucggcaagugccccaaguacgucaaguccaccaagcuccgccucgccaccggccuccgcaacguccccuccauccagucccgcggccucuucggcgccaucgccggcuucaucgagggcggcuggaccggcauggucgacggcugguacggcuaccaccaccagaacgagcagggcuccggcuacgccgccgaccucaaguccacccagaacgccaucgacgagaucaccaacaagaucaacuccgucaucgagaagaugaacacccaguucaccgccgucggcaaggaguucaaccaccucgagaagcgcaucgagaaccucaacaagaaggucgacgacggcuuccucgacaucuggaccuacaacgccgagcuccucguccuccucgagaacgagcgcacccucgacuaccacgacuccaacgucaagaaccucuacgagaagguccgcucccagcucaagaacaacgccaaggagaucggcaacggcugcuucgaguucuaccacaagugcgacaacaccugcauggaguccgucaagaacggcaccuacgacuaccccaaguacuccgaggaggccaagcucaaccgcgaggagaucgacggcgucaagcucgaguccacccgcaucuaccagauccucgccaucuacuccaccgucgccuccucccucguccucgucgucucccucggcgccaucuccuucuggaugugcuccaacggcucccuccagugccgcaucugcaucuga

SEQ ID NO: 101726 - RNA, 1701 nt, Artificial Sequence
  derived and/or modified CDS sequence (opt2) from hemagglutinin__InfluenzaA__ADM31608
augaaggccauccucgucguccuccucuacaccuucgccaccgucaacgccgacacccucugcaucggcuaccacgccaacaacuccaccgacaccgucgacaccguccucgagaagaacgucaccgucacccacuccgucaaccuccucgaggacaagcacaacggcaagcucugcaagcuccgcggcgucgccccccuccaccucggcaagugcaacaucgccggcuggauccucggcaaccccgagugcgagucccucuccaccgccuccuccugguccuacaucgucgagaccuccuccuccgacaacggcaccugcuaccccggcgacuucaucgacuacgaggagcuccgcgagcagcucuccuccgucuccuccuucgagcgcuucgagaucuuccccaagaccuccuccuggcccaaccacgacuccaacaagggcgucaccgccgccugcccccacgccggcgccaaguccuucuacaagaaccucaucuggcucgucaagaagggcaacuccuaccccaagcucuccaaguccuacaucaacgacaagggcaaggagguccucguccucuggggcauccaccaccccuccaccuccgccgaccagcagucccucuaccagaacgccgacgccuacgucuucgucggcaccucccgcuacuccaagaaguucaagcccgagaucgccauccgccccaagguccgcgaccaggagggccgcaugaacuacuacuggacccucgucgagcccggcgacaagaucaccuucgaggccaccggcaaccucgucgucccccgcuacgccuucgccauggagcgcaacgccggcuccggcaucaucaucuccgacacccccguccacgacugcaacaccaccugccagacccccaagggcgccaucaacaccucccuccccuuccagaacauccaccccaucaccaucggcaagugccccaaguacgucaaguccaccaagcuccgccucgccaccggccuccgcaacguccccuccauccagucccgcggccucuucggcgccaucgccggcuucaucgagggcggcuggaccggcauggucgacggcugguacggcuaccaccaccagaacgagcagggcuccggcuacgccgccgaccucaaguccacccagaacgccaucgacaagaucaccaacaaggucaacuccgucaucgagaagaugaacacccaguucaccgccgucggcaaggaguucaaccaccucgagaagcgcaucgagaaccucaacaagaaggucgacgacggcuuccucgacaucuggaccuacaacgccgagcuccucguccuccucgagaacgagcgcacccucgacuaccacgacuccaacgucaagaaccucuacgagaagguccgcucccagcucaagaacaacgccaaggagaucggcaacggcugcuucgaguucuaccacaagugcgacaacaccugcauggaguccgucaagaacggcaccuacgacuaccccaaguacuccgaggaggccaagcucaaccgcgaggagaucgacggcgucaagcucgaguccacccgcaucuaccagauccucgccaucuacuccaccgucgccuccucccucguccucgucgucucccucggcgccaucuccuucuggaugugcuccaacggcucccuccagugccgcaucugcaucuga

SEQ ID NO: 101727 - RNA, 1701 nt, Artificial Sequence; identical to SEQ ID NO: 100257
  derived and/or modified CDS sequence (opt2) from hemagglutinin__InfluenzaA__ADM31618

SEQ ID NO: 101728 - RNA, 1701 nt, Artificial Sequence; identical to SEQ ID NO: 99869
  derived and/or modified CDS sequence (opt2) from hemagglutinin__InfluenzaA__ADM31628

SEQ ID NO: 101729 - RNA, 1701 nt, Artificial Sequence; identical to SEQ ID NO: 101608
  derived and/or modified CDS sequence (opt2) from hemagglutinin__InfluenzaA__ADM31638

SEQ ID NO: 101730 - RNA, 1701 nt, Artificial Sequence; identical to SEQ ID NO: 100125
  derived and/or modified CDS sequence (opt2) from hemagglutinin__InfluenzaA__ADM31648

SEQ ID NO: 101731 - RNA, 1701 nt, Artificial Sequence; identical to SEQ ID NO: 100872
  derived and/or modified CDS sequence (opt2) from hemagglutinin__InfluenzaA__ADM31658

SEQ ID NO: 101732 - RNA, 1701 nt, Artificial Sequence; identical to SEQ ID NO: 100125
  derived and/or modified CDS sequence (opt2) from hemagglutinin__InfluenzaA__ADM31668

SEQ ID NO: 101733 - RNA, 1701 nt, Artificial Sequence; identical to SEQ ID NO: 98705
  derived and/or modified CDS sequence (opt2) from hemagglutinin__InfluenzaA__ADM31688

SEQ ID NO: 101734 - RNA, 1701 nt, Artificial Sequence
  derived and/or modified CDS sequence (opt2) from hemagglutinin__InfluenzaA__ADM31698
augaaggccauccucgucguccuccucuacaccuucgccaccgccaacgccgacacccucugcaucggcuaccacgccaacaacuccaccgacaccgucgacaccguccucgagaagaacgucaccgucacccacuccgucaaccuccucgaggacaagcacaacggcaagcucugcaagcuccgcggcgucgccccccuccaccucggcaagugcaacaucgccggcuggauccucggcaaccccgagugcgagucccucuccaccgccuccuccugguccuacaucgucgagaccuccuccuccgacaacggcaccugcuaccccggcgacuucaucgacuacgaggagcuccgcgagcagcucuccuccgucuccuccuucgagcgcuucgagaucuuccccaagaccuccuccuggcccaaccacgacuccaacaagggcgucaccgccgccugcccccacgccggcgccaaguccuucuacaagaaccucaucuggcucgucaagaagggcaacuccuaccccaagcucuccaaguccuacaucaacgacaagggcaaggagguccucguccucuggggcauccaccaccccuccaccuccgccgaccagcagucccucuaccagaacgccgacgccuacgucuucgucggcaccucccgcuacuccaagaaguucaagcccgagaucgccauccgccccaagguccgcgaccaggagggccgcaugaacuacuacuggacccucgucgagcccggcgacaagaucaccuucgaggccaccggcaaccucgucgucccccgcuacgccuucgccauggagcgcaacgccggcuccggcaucaucaucuccgacacccccguccacgacugcaacaccaccugccagacccccaagggcgccaucaacaccucccuccccuuccagaacauccaccccaucaccaucggcaagugccccaaguacgucaaguccaccaagcuccgccucgccaccggccuccgcaacauccccuccauccagucccgcggccucuucggcgccaucgccggcuucaucgagggcggcuggaccggcauggucgacggcugguacggcuaccaccaccagaacgagcagggcuccggcuacgccgccgaccucaaguccacccagaacgccaucgacaagaucaccaacaaggucaacuccgucaucgagaagaugaacacccaguucaccgccgucggcaaggaguucaaccaccucgagaagcgcaucgagaaccucaacaagaaggucgacgacggcuuccucgacaucuggaccuacaacgccgagcuccucguccuccucgagaacgagcgcacccucgacuaccacgacuccaacgucaagaaccucuacgagaagguccgcucccagcucaagaacaacgccaaggagaucggcaacggcugcuucgaguucuaccacaagugcgacaacaccugcauggaguccgucaagaacggcaccuacgacuaccccaaguacuccgaggaggccaagcucaaccgcgaggagaucgacggcgucaagcucgaguccacccgcaucuaccagauccucgccaucuacuccaccgucgccuccucccucauccucgucgucucccucggcgccaucuccuucuggaugugcuccaacggcucccuccagugccgcaucugcaucuga

SEQ ID NO: 101735 - RNA, 1701 nt, Artificial Sequence; identical to SEQ ID NO: 101610
  derived and/or modified CDS sequence (opt2) from hemagglutinin__InfluenzaA__ADM31708

SEQ ID NO: 101736 - RNA, 1701 nt, Artificial Sequence
  derived and/or modified CDS sequence (opt2) from hemagglutinin__InfluenzaA__ADM31718
augaaggccauccucgucguccuccucuacaccuucgccaccgccaacgccgacacccucugcaucggcuaccacgccaacaacuccaccgacaccgucgacaccguccucgagaagaacgucaccgucacccacuccgucaaccuccucgaggacaagcacaacggcaagcucugcaagcuccgcggcgucgccccccuccaccucggcaagugcaacaucgccggcuggauccucggcaaccccgagugcgagucccucuccaccgccuccuccugguccuacaucgucgagaccuccuccuccgacaacggcaccugcuaccccggcgacuucaucgacuacgaggagcuccgcgagcagcucuccuccgucuccuccuucgagcgcuucgagaucuuccccaagaccuccuccuggcccaaccacgacuccaacaagggcgucaccgccgccugcccccacgccggcgccaaguccuucuacaagaaccucaucuggcucgucaagaagggcaacuccuaccccaagcucuccaaguccuacaucaacgacaagggcaaggagguccucguccucuggggcauccaccaccccuccaccuccgccgaccagcagucccucuaccagaacgccgacaccuacgucuucgucggcaccucccgcuacuccaagaaguucaagcccgagaucgccauccgccccaagguccgcgaccaggagggccgcaugaacuacuacuggacccucgucgagcccggcgacaagaucaccuucgaggccaccggcaaccucgucgucccccgcuacgccuucgccauggagcgcaacgccggcuccggcaucaucaucuccgacacccccguccacgacugcaacaccaccugccagacccccaagggcgccaucaacaccucccuccccuuccagaacauccaccccaucaccaucggcaagugccccaaguacgucaaguccaccaagcuccgccucgccaccggccuccgcaacguccccuccauccagucccgcggccucuucggcgccaucgccggcuucaucgagggcggcuggaccggcauggucgacggcugguacggcuaccaccaccagaacgagcagggcuccggcuacgccgccgaccucaaguccacccagaacgccaucgacaagaucaccaacaaggucaacuccgucaucgagaagaugaacacccaguucaccgccgucggcaaggaguucaaccaccucgagaagcgcaucgagaaccucaacaagaaggucgacgacggcuuccucgacaucuggaccuacaacgccgagcuccucguccuccucgagaacgagcgcacccucgacuaccacgacuccaacgucaagaaccucuacgagaagguccgcucccagcucaagaacaacgccaaggagaucggcaacggcugcuucgaguucuaccacaagugcgacaacaccugcauggaguccgucaagaacggcaccuacgacuaccccaaguacuccgaggaggccaagcucaaccgcgaggagaucgacggcgucaagcucgaguccacccgcaucuaccagauccucgccaucuacuccaccgucgccuccucccucguccucgucgucucccucggcgccaucuccuucuggaugugcuccaacggcucccuccagugccgcaucugcaucuga

SEQ ID NO: 101737 - RNA, 1701 nt, Artificial Sequence
  derived and/or modified CDS sequence (opt2) from hemagglutinin__InfluenzaA__ADM31728
augaaggccauccucaucguccuccucuacaccuucgccaccgccaacgccgacacccucugcaucggcuaccacgccaacaacuccaccgacaccgucgacaccguccucgagaagaacgucaccgucacccacuccgucaaccuccucgaggacaagcacaacggcaagcucugcaagcuccgcggcgucgccccccuccaccucggcaagugcaacaucgccggcuggauccucggcaaccccgagugcgagucccucuccaccgccuccuccugguccuacaucgucgagaccuccuccuccggcaacggcaccugcuaccccggcgacuucaucgacuacgaggagcuccgcgagcagcucuccuccgucuccuccuucgagcgcuucgagaucuuccccaagaccuccuccuggcccaaccacgacuccaacaagggcgucaccgccgccugcccccacgccggcgccaaguccuucuacaagaaccucaucuggcucgucaagaagggcaacuccuaccccaagcucuccaaguccuacaucaacgacaagggcaaggagguccucguccucuggggcauccaccaccccuccaccuccgccgaccagcagucccucuaccagaacgccgacgccuacgucuucgucggcaccucccgcuacuccaagaaguucaagcccgagaucgccauccgccccaagguccgcgaccaggagggccgcaugaacuacuacuggacccucgucgagcccggcgacaagaucaccuucgaggccaccggcaaccucgucgucccccgcuacgccuucgccauggagcgcaacgccggcuccggcaucaucaccuccgacacccccguccacgacugcaacaccaccugccagacccccaagggcgccaucaacaccucccuccccuuccagaacauccaccccaucaccaucggcaagugccccaaguacgucaaguccaccaagcuccgccucgccaccggccuccgcaacguccccuccauccagucccgcggccucuucggcgccaucgccggcuucaucgagggcggcuggaccggcauggucgacggcugguacggcuaccaccaccagaacgagcagggcuccggcuacgccgccgaccucaaguccacccagaacgccaucgacgagaucaccaacaaggucaacuccgucaucgagaagaugaacacccaguucaccgccgucggcaaggaguucaaccaccucgagaagcgcaucgagaaccucaacaagaaggucgacgacggcuuccucgacaucuggaccuacaacgccgagcuccucguccuccucgagaacgagcgcacccucgacuaccacgacuccaacgucaagaaccucuacgagaagguccgcucccagcucaagaacaacgccaaggagaucggcaacggcugcuucgaguucuaccacaagugcgacaacaccugcauggaguccgucaagaacggcaccuacgacuaccccaaguacuccgaggaggccaagcucaaccgcgaggagaucgacggcgucaagcucgaguccacccgcaucuaccagauccucgccaucuacuccaccgucgccuccucccucguccucgucgucucccucggcgccaucuccuucuggaugugcuccaacggcucccuccagugccgcaucugcaucuga

SEQ ID NO: 101738 - RNA, 1701 nt, Artificial Sequence
  derived and/or modified CDS sequence (opt2) from hemagglutinin__InfluenzaA__ADM31738
augaaggccauccucgucguccuccucuacaccuucgccaccgccaacgccgacacccucugcaucggcuaccacgccaacaacuccaccgacaccgucgacaccguccucgagaagaacgucaccgucacccacuccgucaacauccucgaggacaagcacaacggcaagcucugcaagcuccgcggcgucgccccccuccaccucggcaagugcaacaucgccggcuggauccucggcaaccccgagugcgagucccucuccaccgccuccuccugguccuacaucgucgagaccuccuccuccgacaacggcaccugcuaccccggcgacuucaucgacuacgaggagcuccgcgagcagcucuccuccgucuccuccuucgagcgcuucgagaucuuccccaagaccuccuccuggcccaaccacgacuccaacaagggcgucaccgccgccugcccccacgccggcgcccgcuccuucuacaagaaccucaucuggcucgucaagaagggcaacuccuaccccaagcucuccaaguccuacaucaacgacaagggcaaggagguccucguccucuggggcauccaccaccccuccaccuccgccgaccagcagucccucuaccagaacgccgacgccuacgucuucgucggcaccucccgcuacuccaagaaguucaagcccgagaucgccauccgccccaagguccgcgaccaggagggccgcaugaacuacuacuggacccucgucgagcccggcgacaagaucaccuucgaggccaccggcaaccucgucgucccccgcuacgccuucgccauggagcgcaacgccggcuccggcaucaucaucuccgacacccccguccacgacugcaacaccaccugccagacccccaagggcgccaucaacaccucccuccccuuccagaacauccaccccaucaccaucggcaagugccccaaguacgucaaguccaccaagcuccgccucgccaccggccuccgcaacguccccuccauccagucccgcggccucuucggcgccaucgccggcuucaucgagggcggcuggaccggcauggucgacggcugguacggcuaccaccaccagaacgagcagggcuccggcuacgccgccgaccucaaguccacccagaacgccaucgacgagaucaccaacaaggucaacuccgucaucgagaagaugaacacccaguucaccgccgucggcaaggaguucaaccaccucgagaagcgcaucgagaaccucaacaagaaggucgacgacggcuuccucgacaucuggaccuacaacgccgagcuccucguccuccucgagaacgagcgcacccucgacuaccacgacuccaacgucaagaaccucuacgagaagguccgcucccagcucaagaacaacgccaaggagaucggcaacggcugcuucgaguucuaccacaagugcgacaacaccugcauggaguccgucaagaacggcaccuacgacuaccccaaguacuccgaggaggccaagcucaaccgcgaggagaucgacggcgucaagcucgaguccacccgcaucuaccagauccucgccaucuacuccaccgucgccuccucccucguccucgucgucucccucggcgccaucuccuucuggaugugcuccaacggcucccuccagugccgcaucugcaucuga

SEQ ID NO: 101739 - RNA, 1701 nt, Artificial Sequence; identical to SEQ ID NO: 100354
  derived and/or modified CDS sequence (opt2) from hemagglutinin__InfluenzaA__ADM31748

SEQ ID NO: 101740 - RNA, 1701 nt, Artificial Sequence
  derived and/or modified CDS sequence (opt2) from hemagglutinin__InfluenzaA__ADM31758
augaaggccauccucgucguccuccucuacaccuucgccaccgccaacgccgacacccucugcaucggcuaccacgccaacaacuccaccgacaccgucgacaccguccucgagaagaacgucaccgucacccacuccgucaaccuccucgaggacaagcacaacggcaagcucugcaagcuccgcggcaucgccccccuccaccucggcaagugcaacaucgccggcuggauccucggcaaccccgagugcgagucccucuccaccgccuccuccugguccuacaucgucgagaccuccuccuccgacaacggcaccugcuaccccggcgacuucaucgacuacgaggagcuccgcgagcagcucuccuccgucuccuccuucgagcgcuucgagaucuuccccaagaccuccuccuggcccaaccacgacuccaacaagggcgucaccgccgccugcccccacgccggcgccaaguccuucuacaagaaccucaucuggcucgucaagaagggcaacuccuaccccaagcucuccaaguccuacaucaacgacaagggcaaggagguccucguccucuggggcauccaccaccccuccaccuccgccgaccagcagucccucuaccagaacgccgacgccuacgucuucgucggcaccucccgcuacuccaagaaguucaagcccgagaucgccauccgccccaagguccgcgaccaggagggccgcaugaacuacuacuggacccucaucgaccccggcgacaagaucaccuucgaggccaccggcaaccucgucgucccccgcuacgccuucgccauggagcgcaacgccggcuccggcaucaucaucuccgacacccccguccacgacugcaacaccaccugccagacccccaagggcgccaucaacaccucccuccccuuccagaacauccaccccaucaccaucggcaagugccccaaguacgucaaguccaccaagcuccgcauggccaccggccuccgcaacguccccuccauccagucccgcggccucuucggcgccaucgccggcuucaucgagggcggcuggaccggcauggucgacggcugguacggcuaccaccaccagaacgagcagggcuccggcuacgccgccgaccucaaguccacccagaacgccaucgacgagaucaccaacaaggucaacuccgucaucgagaagaugaacacccaguucaccgccgucggcaaggaguucaaccaccucgagaagcgcaucgagaaccucaacaagaaggucgacgacggcuuccucgacaucuggaccuacaacgccgagcuccucguccuccucgagaacgagcgcacccucgacuaccacgacuccaacgucaagaaccucuacgagaagguccgcucccagcucaagaacaacgccaaggagaucggcaacggcugcuucgaguucuaccacaagugcgacaacaccugcauggaguccgucaagaacggcaccuacgacuaccccaaguacuccgaggaggccaagcucaaccgcgaggagaucgacggcgucaagcucgaguccacccgcaucuaccagauccucgccaucuacuccaccgucgccuccucccucguccucgucgucucccucggcgccaucuccuucuggaugugcuccaacggcucccuccagugccgcaucugcaucuga

SEQ ID NO: 101741 - RNA, 1701 nt, Artificial Sequence; identical to SEQ ID NO: 99065
  derived and/or modified CDS sequence (opt2) from hemagglutinin__InfluenzaA__ADM31768

SEQ ID NO: 101742 - RNA, 1701 nt, Artificial Sequence; identical to SEQ ID NO: 98705
  derived and/or modified CDS sequence (opt2) from hemagglutinin__InfluenzaA__ADM31778

SEQ ID NO: 101743 - RNA, 1701 nt, Artificial Sequence; identical to SEQ ID NO: 100872
  derived and/or modified CDS sequence (opt2) from hemagglutinin__InfluenzaA__ADM31798

SEQ ID NO: 101744 - RNA, 1701 nt, Artificial Sequence
  derived and/or modified CDS sequence (opt2) from hemagglutinin__InfluenzaA__ADM31808
augaaggccauccucgucguccuccucuacaccuucgccaccgccaacgccgacacccucugcaucggcuaccacgccaacaacuccaccgacaccgucgacaccguccucgagaagaacgucaccgucacccacuccgucaaccuccucgaggacaagcacaacggcaagcucugcaagcuccgcggcgucgccccccuccaccucggcaagugcaacaucgccggcuggauccucggcaaccccgagugcgagucccucuccaccgccuccuccugguccuacaucgucgagaccuccuccuccggcaacggcaccugcuaccccggcgacuucaucgacuacgaggagcuccgcgagcagcucuccuccgucuccuccuucgagcgcuucgagaucuuccccaagaccuccuccuggcccaaccacgacuccaacaagggcgucaccgccgccugcccccacgccggcgccaaguccuucuacaagaaccuccucuggcucgucaagaagggcaacuccuaccccaagcucuccaaguccuacaucaacgacaagggcaaggagguccucguccucuggggcauccaccaccccuccaccuccgccgaccagcagucccucuaccagaacgccgacgccuacgucuucgucggcaccucccgcuacuccaagaaguucaagcccgagaucgccauccgccccaagguccgcgaccaggagggccgcaugaacuacuacuggacccucgucggccccggcgacaagaucaccuucgaggccaccggcaaccucgucgucccccgcuacgccuucgccauggagcgcaacgccggcuccggcaucaucaucuccgacacccccguccacgacugcaacaccaccugccagacccccaagggcgccaucaacaccucccuccccuuccagaacauccaccccaucaccaucggcaagugccccaaguacgucaaguccaccaagcuccgccucgccaccggccuccgcaacguccccuccauccagucccgcggccucuucggcgccaucgccggcuucaucgagggcggcuggaccggcauggucgacggcugguacggcuaccaccaccagaacgagcagggcuccggcuacgccgccgaccucaaguccacccagaacgccaucgacgagaucaccaacaaggucaacuccgucaucgagaagaugaacacccaguucaccgccgucggcaaggaguucaaccaccucgagaagcgcaucgagaaccucaacaagaaggucgacgacggcuuccucgacaucuggaccuacaacgccgagcuccucguccuccucgagaacgagcgcacccucgacuaccacgacuccaacgucaagaaccucuacgagaagguccgcucccagcucaagaacaacgccaaggagaucggcaacggcugcuucgaguucuaccacaagugcgacaacaccugcauggaguccgucaagaacggcaccuacgacuaccccaaguacuccgaggaggccaagcucaaccgcgaggagaucgacggcgucaagcucgaguccacccgcaucuaccagauccucgccaucuacuccaccgucgccuccucccucguccucgucgucucccucggcgccaucuccuucuggaugugcuccaacggcucccuccagugccgcaucugcaucuga

SEQ ID NO: 101745 - RNA, 1701 nt, Artificial Sequence; identical to SEQ ID NO: 100872
  derived and/or modified CDS sequence (opt2) from hemagglutinin__InfluenzaA__ADM31818

SEQ ID NO: 101746 - RNA, 1701 nt, Artificial Sequence
  derived and/or modified CDS sequence (opt2) from hemagglutinin__InfluenzaA__ADM31828
augaaggccauccucgucguccuccucuacaccuucgccaccgccaacgccgacacccucugcaucggcuaccacgccaacaacuccaccgacaccgucgacaccguccucgagcgcaacgucaccgucacccacuccgucaaccuccucgaggacaagcacaacggcaagcucugcaagcuccgcggcgucgccccccuccaccucggcaagugcaacaucgccggcuggauccucggcaaccccgagugcgagucccucuccaccgccuccuccugguccuacaucgucgagaccuccuccuccgacaacggcaccugcuaccccggcgacuucaucgacuacgaggagcuccgcgagcagcucuccuccgucuccuccuucgagcgcuucgagaucuuccccaagaccuccuccuggcccaaccacgacuccaacaagggcgucaccgccgccugcccccacgccggcgccaaguccuucuacaagaaccucaucuggcucgucaagaagggcaaguccuaccccaagcucuccaaguccuacaucaacgacaagggcaaggagguccucguccucuggggcauccaccaccccuccaccuccgccgaccagcagucccucuaccagaacgccgacgccuacgucuucgucggcaccucccgcuacuccaagaaguucaagcccgagaucgccauccgccccaagguccgcgagcaggagggccgcaugaacuacuacuggacccucgucgagcccggcgacaagaucaccuucgaggccaccggcaaccucgucgucccccgcuacgccuucgccauggagcgcaacgccggcuccggcaucaucaucuccgacacccccguccacgacugcaacaccaccugccagacccccaagggcgccaucaacaccucccuccccuuccagaacauccaccccaucaccaucggcaagugccccaaguacgucaaguccaccaagcuccgccucgccaccggccuccgcaacguccccuccauccagucccgcggccucuucggcgccaucgccggcuucaucgagggcggcuggaccggcauggucgacggcugguacggcuaccaccaccagaacgagcagggcuccggcuacgccgccgaccucaaguccacccagaacgccaucgacgagaucaccaacaaggucaacuccgucaucgagaagaugaacacccaguucaccgccgucggcaaggaguucaaccaccucgagaagcgcaucgagaaccucaacaagaaggucgacgacggcuuccucgacaucuggaccuacaacgccgagcuccucguccuccucgagaacgagcgcacccucgacuaccacgacuccaacgucaagaaccucuacgagaagguccgcucccagcucaagaacaacgccaaggagaucggcaacggcugcuucgaguucuaccacaagugcgacaacaccugcauggaguccgucaagaacggcaccuacgacuaccccaaguacuccgaggaggccaagcucaaccgcgaggagaucgacggcgucaagcucgaguccacccgcaucuaccagauccucgccaucuacuccaccgucgccuccucccucguccuccucgucucccucggcgccaucuccuucuggaugugcuccaacggcucccuccagugccgcaucugcaucuga

SEQ ID NO: 101747 - RNA, 1701 nt, Artificial Sequence; identical to SEQ ID NO: 101746
  derived and/or modified CDS sequence (opt2) from hemagglutinin__InfluenzaA__ADM31838

SEQ ID NO: 101748 - RNA, 1701 nt, Artificial Sequence; identical to SEQ ID NO: 98705
  derived and/or modified CDS sequence (opt2) from hemagglutinin__InfluenzaA__ADM31848

SEQ ID NO: 101749 - RNA, 1701 nt, Artificial Sequence
  derived and/or modified CDS sequence (opt2) from hemagglutinin__InfluenzaA__ADM31858
augaaggccauccucgucguccuccucuacaccuucgccaccgccaacgccgacacccucugcaucggcuaccacgccaacaacuccaccgacaccgucgacaccguccucgagaagaacgucaccgucacccacuccgucaaccuccucgaggacaagcacaacggcaagcucugcaagcuccgcggcgucgccccccuccaccucggcaagugcaacaucgccggcuggauccucggcaaccccgagugcgagucccucuccaccgccuccuccugguccuacaucgucgagaccuccuccuccgacaacggcaccugcuaccccggcgacuucaucgacuacgaggagcuccgcgagcagcucuccuccgucuccuccuucgagcgcuucgagaucuuccccaagaccuccuccuggcccaaccacgacuccaacaagggcgucaccgccgccugcucccacgccggcgccaaguccuucuacaagaaccucaucuggcucgucaagaagggcaacuccuaccccaagcucaacaaguccuacaucaacgacaagggcaaggagguccucguccucuggggcauccaccaccccuccaccuccgccgaccagcagucccucuaccagaacgccgacgccuacgucuucgucggcaccucccgcuacuccaagaaguucaagcccgagaucgccauccgccccaagguccgcgagcaggagggccgcaugaacuacuacuggacccucgucgagcccggcgacaagaucaccuucgaggccaccggcaaccucgucgucccccgcuacgccuucgccauggagcgcaacgccggcuccggcaucaucaucuccgacacccccguccacgacugcaacaccaccugccagacccccaagggcgccaucaacaccucccuccccuuccagaacauccaccccaucaccaucggcaagugccccaaguacgucaaguccaccaagcuccgccucgccaccggccuccgcaacguccccuccauccagucccgcggccucuucggcgccaucgccggcuucaucgagggcggcuggaccggcauggucgacggcugguacggcuaccaccaccagaacgagcagggcuccggcuacgccgccgaccucaaguccacccagaacgccaucgacgagaucaccaacaaggucaacuccgucaucgagaagaugaacacccaguucaccgccgucggcaaggaguucaaccaccucgagaagcgcaucgagaaccucaacaagaaggucgacgacggcuuccucgacaucuggaccuacaacgccgagcuccucguccuccucgagaacgagcgcacccucgacuaccacgacuccaacgucaagaaccucuacgagaagguccgcucccagcucaagaacaacgccaaggagaucggcaacggcugcuucgaguucuaccacaagugcgacaacaccugcauggaguccgucaagaacggcaccuacgacuaccccaaguacuccgaggaggccaagcucaaccgcgaggagaucgacggcgucgagcucgaguccacccgcaucuaccagauccucgccaucuacuccaccgucgccuccucccucguccucgucgucucccucggcgccaucuccuucuggaugugcuccaacggcucccuccagugccgcaucugcaucuga

SEQ ID NO: 101750 - RNA, 1701 nt, Artificial Sequence
  derived and/or modified CDS sequence (opt2) from hemagglutinin__InfluenzaA__ADM31868
augaaggccauccucgucguccuccucuacaccuucgccaccgccaacgccgacacccucugcaucggcuaccacgccaacaacuccaccgacaccgucgacaccguccucgagaagaacgucaccgucacccacuccgucaaccuccucgaggacaagcacaacggcaagcucugcaagcuccgcggcgucgccccccuccaccucggcaagugcaacaucgccggcuggauccucggcaaccccgagugcgagcuccucuccaccgccuccuccugguccuacaucgucgagaccuccuccuccgacaacggcaccugcuaccccggcgacuucaucaacuacgaggagcuccgcgagcagcucuccuccgucuccuccuucgagcgcuucgagaucuuccccaagaccuccuccuggcccaaccacgacuccaacaagggcgucaccgccgccugcccccacgccggcgccaaguccuucuacaagaaccucaucuggcucgucaagaagggcaacuccuaccccaagcucuccaaguccuacaucaacgacaagggcaaggagguccucguccucuggggcguccaccaccccuccaccuccgccgaccagcagucccucuaccagaacgccgacgccuacgucuucgucggcaccucccgcuacuccaagaaguucaagcccgagaucgccauccgccccaagguccgcgaccaggagggccgcaugaacuacuacuggacccucgucgagcccggcgacaagaucaccuucgaggccaccggcaaccucgucgucccccgcuacgccuucuccauggagcgcaacgccggcuccggcaucaucaucuccgacacccccguccacgacugcaacaccaccugccagacccccaagggcgccaucaacaccucccuccccuuccagaacauccaccccaucaccaucggcaagugccccaaguacgucaaguccaccaagcuccgccucgccaccggccuccgcaacguccccuccauccagucccgcggccucuucggcgccaucgccggcuucaucgagggcggcuggaccggcauggucgacggcugguacggcuaccaccaccagaacgagcagggcuccggcuacgccgccgaccucaaguccacccagaacgccaucgacaagaucaccaacaaggucaacuccgucaucgagaagaugaacacccaguucaccgccgucggcaaggaguucaaccaccucgagaagcgcaucgagaaccucaacaagaaggucgacgacggcuuccucgacaucuggaccuacaacgccgagcuccucguccuccucgagaacgagcgcacccucgacuaccacgacuccaacgucaagaaccucuacgagaagguccgcucccagcucaagaacaacgccaaggagaucggcaacggcugcuucgaguucuaccacaagugcgacaacaccugcauggaguccgucaagaacggcaccuacgacuaccccaaguacuccgaggaggccaagcucaaccgcgagaagaucgacggcgucaagcucgaguccacccgcaucuaccagauccucgccaucuacuccaccgucgccuccucccucguccucgucgucucccucggcgccaucuccuucuggaugugcuccaacggcucccuccagugccgcaucugcaucuga

SEQ ID NO: 101751 - RNA, 1701 nt, Artificial Sequence
  derived and/or modified CDS sequence (opt2) from hemagglutinin__InfluenzaA__ADM31878
augaaggccauccucgucguccuccucuacaccuucgccaccgccaacgccgacacccucugcaucggcuaccacgccaacaacuccaccgacaccgucgacaccguccucgagaagaacgucaccgucacccacuccgucaacauccucgaggacaagcacaacggcaagcucugcaagcuccgcggcgucgccccccuccaccucggcaagugcaacaucgccggcuggauccucggcaaccccgagugcgagucccucuccaccgccuccuccugguccuacaucgucgagaccuccuccuccgacaacggcaccugcuaccccggcgacuucaucgacuacgaggagcuccgcgagcagcucuccuccgucuccuccuucgagcgcuucgagaucuuccccaaggccuccuccuggcccaaccacgacuccaacaagggcgucaccgccgccugcccccacgccggcgccaaguccuucuacaagaaccucaucuggcucgucaagaagggcaacuccuaccccaagcucuccaaguccuacaucaacgacaagggcaaggagguccucguccucuggggcauccaccaccccuccaccuccgccgaccagcagucccucuaccagaacgccgacgccuacgucuucgucggcaccucccgcuacuccaagaaguucaagcccgagaucgccauccgccccaagguccgcgaccaggagggccgcaugaacuacuacuggacccucgucgagcccggcgacaagaucaccuucgaggccaccggcaaccucgucgucccccgcuacgccuucgccauggagcgcaacgccggcuccggcaucaucaucuccgacacccccguccacgacugcaacaccaccugccagacccccaagggcgccaucaacaccucccuccccuuccagaacauccaccccaucaccaucggcaagugccccaaguacgucaaguccaccaagcuccgccucgccaccggccuccgcaacguccccuccauccagucccgcggccucuucggcgccaucgccggcuucaucgagggcggcuggaccggcauggucgacggcugguacggcuaccaccaccagaacgagcagggcuccggcuacgccgccgaccucaaguccacccagaacgccaucgacgagaucaccaacaaggucaacuccgucaucgagaagaugaacacccaguucaccgccgucggcaaggaguucaaccaccucgagaagcgcaucgagaaccucaacaagaaggucgacgacggcuuccucgacaucuggaccuacaacgccgagcuccucguccuccucgagaacgagcgcacccucgacuaccacgacuccaacgucaagaaccucuacgagaagguccgcucccagcucaagaacaacgccaaggagaucggcaacggcugcuucgaguucuaccacaagugcgacaacaccugcauggaguccgucaagaacggcaccuacgacuaccccaaguacuccgaggaggccaagcucaaccgcgaggagaucgacggcgucaagcucgaguccacccgcaucuaccagauccucgccaucuacuccaccgucgccuccucccucguccucgucgucucccucggcgccaucuccuucuggaugugcuccaacggcucccuccagugccgcaucugcaucuga

SEQ ID NO: 101752 - RNA, 1701 nt, Artificial Sequence; identical to SEQ ID NO: 100354
  derived and/or modified CDS sequence (opt2) from hemagglutinin__InfluenzaA__ADM31888

SEQ ID NO: 101753 - RNA, 1701 nt, Artificial Sequence; identical to SEQ ID NO: 98885
  derived and/or modified CDS sequence (opt2) from hemagglutinin__InfluenzaA__ADM31898

SEQ ID NO: 101754 - RNA, 1701 nt, Artificial Sequence
  derived and/or modified CDS sequence (opt2) from hemagglutinin__InfluenzaA__ADM31908
augaaggccauccucgucguccuccucuacaccuucgccaccgccaacgccgacacccucugcaucggcuaccacgccaacaacuccaccgacaccgucgacaccguccucgagaagaacgucaccgucacccacuccgucaacauccucgaggacaagcacaacggcaagcucugcaagcuccgcggcgucgccccccuccaccucggcaagugcaacaucgccggcuggauccucggcaaccccgagugcgagucccucuccaccgccuccuccugguccuacaucgucgagaccuccuccuccgacaacggcaccugcuaccccggcgacuucaucgaccacgaggagcuccgcgagcagcucuccuccgucuccuccuucgagcgcuucgagaucuuccccaagaccuccuccuggcccaaccacgacuccaacaagggcgucaccgccgccugcccccacgccggcgccaaguccuucuacaagaaccucaucuggcucgucaagaagggcaacuccuaccccaagcucuccaaguccuacaucaacgacaagggcaaggagguccucguccucuggggcauccaccaccccuccaccuccgccgaccagcagucccucuaccagaacgccgacgccuacgucuucgucggcuccucccgcuacuccaagaaguucaagcccgagaucgccauccgccccaagguccgcgaccaggagggccgcaugaacuacuacuggacccucgucgagcccggcgacaagaucaccuucgaggccaccggcaaccucgucgucccccgcuacgccuucgccauggagcgcaacgccggcuccggcaucaucaucuccgacacccccguccacgacugcaacaccaccugccagacccccaagggcgccaucaacaccucccuccccuuccagaacauccaccccaucaccaucggcaagugccccaaguacgucaaguccaccaagcuccgccucgccaccggccuccgcaacguccccuccauccagucccgcggccucuucggcgccaucgccggcuucaucgagggcggcuggaccggcauggucgacggcugguacggcuaccaccaccagaacgagcagggcuccggcuacgccgccgaccucaaguccacccagaacgccaucgacgagaucaccaacaaggucaacuccgucaucgagaagaugaacacccaguucaccgccgucggcaaggaguucaaccaccucgagaagcgcaucgagaaccucaacaagaaggucgacgacggcuuccucgacaucuggaccuacaacgccgagcuccucguccuccucgagaacgagcgcacccucgacuaccacgacuccaacgucaagaaccucuacgagaagguccgcucccagcucaagaacaacgccaaggagaucggcaacggcugcuucgaguucuaccacaagugcgacaacaccugcauggaguccgucaagaacggcaccuacgacuaccccaaguacuccgaggaggccaagcucaaccgcgaggagaucgacggcgucaagcucgaguccacccgcaucuaccagauccucgccaucuacuccaccgucgccuccucccucguccucgucgucucccucggcgccaucuccuucuggaugugcuccaacggcucccuccagugccgcaucugcaucuga

SEQ ID NO: 101755 - RNA, 1701 nt, Artificial Sequence; identical to SEQ ID NO: 98885
  derived and/or modified CDS sequence (opt2) from hemagglutinin__InfluenzaA__ADM31918

SEQ ID NO: 101756 - RNA, 1701 nt, Artificial Sequence; identical to SEQ ID NO: 100477
  derived and/or modified CDS sequence (opt2) from hemagglutinin__InfluenzaA__ADM31928

SEQ ID NO: 101757 - RNA, 1701 nt, Artificial Sequence; identical to SEQ ID NO: 100477
  derived and/or modified CDS sequence (opt2) from hemagglutinin__InfluenzaA__ADM31948

SEQ ID NO: 101758 - RNA, 1701 nt, Artificial Sequence; identical to SEQ ID NO: 98705
  derived and/or modified CDS sequence (opt2) from hemagglutinin__InfluenzaA__ADM31958

SEQ ID NO: 101759 - RNA, 1701 nt, Artificial Sequence; identical to SEQ ID NO: 100477
  derived and/or modified CDS sequence (opt2) from hemagglutinin__InfluenzaA__ADM31968

SEQ ID NO: 101760 - RNA, 1701 nt, Artificial Sequence; identical to SEQ ID NO: 100293
  derived and/or modified CDS sequence (opt2) from hemagglutinin__InfluenzaA__ADM31978

SEQ ID NO: 101761 - RNA, 1701 nt, Artificial Sequence; identical to SEQ ID NO: 98885
  derived and/or modified CDS sequence (opt2) from hemagglutinin__InfluenzaA__ADM31998

SEQ ID NO: 101762 - RNA, 1701 nt, Artificial Sequence; identical to SEQ ID NO: 98885
  derived and/or modified CDS sequence (opt2) from hemagglutinin__InfluenzaA__ADM32008

SEQ ID NO: 101763 - RNA, 1701 nt, Artificial Sequence
  derived and/or modified CDS sequence (opt2) from hemagglutinin__InfluenzaA__ADM32018
augaaggccauccucgucguccuccucuacaccuucgccaucgccaacgccgacacccucugcaucggcuaccacgccaacaacuccaccgacaccgucgacaccguccucgagaagaacgucaccgucacccacuccgucaaccuccucgaggacaagcacaacggcaagcucugcaagcuccgcggcgucgccccccuccaccucggcaagugcgacaucgccggcuggauccucggcaaccccgagugcgagucccucuccaccgccuccuccugguccuacaucgucgagaccuccuccuccgacaacggcaccugcuaccccggcgacuucaucgacuacgaggagcuccgcgagcagcucuccuccgucuccuccuucgagcgcuucgagaucuuccccaagaccuccuccuggcccaaccacgacuccaacaagggcgucaccgccgccugcccccacgccggcgccaaguccuucuacaagaaccucaucuggcucgucaagaagggcaacuccuaccccaagcucuccaaguccuacaucaacgacaagggcaaggagguccucguccucuggggcauccaccaccccuccaccuccgccgaccagcagucccucuaccagaacgccgacgccuacgucuucgucggcaccucccgcuacuccaagaaguucaagcccgagaucgccauccgccccaagguccgcgaccaggagggccgcaugaacuacuacuggacccucgucgagcccggcgacaagaucaccuucgaggccaccggcaaccucgucgucccccgcuacgccuucgccauggagcgcaacgccggcuccggcaucaucaucuccgacacccccguccacgacugcaacaccaccugccagacccccaagggcgccaucaacaccucccuccccuuccagaacauccaccccaucaccaucggcaagugccccaaguacgucaaguccaccaagcuccgccucgccaccggccuccgcaacguccccuccauccagucccgcggccucuucggcgccaucgccggcuucaucgagggcggcuggaccggcauggucgacggcugguacggcuaccaccaccagaacgagcagggcuccggcuacgccgccgaccucaaguccacccagaacgccaucgacgagaucaccaacaaggucaacuccgucaucgagaagaugaacacccaguucaccgccgucggcaaggaguucaaccaccucgagaagcgcaucgagaaccucaacaagaaggucgacgacggcuuccucgacaucuggaccuacaacgccgagcuccucguccuccucgagaacgagcgcacccucgacuaccacgacuccaacgucaagaaccucuacgagaagguccgcucccagcucaagaacaacgccaaggagaucggcaacggcugcuucgaguucuaccacaagugcgacaacaccugcauggaguccgucaagaacggcaccuacgacuaccccaaguacuccgaggaggccaagcucaaccgcgaggagaucgacggcgucaagcucgaguccacccgcaucuaccagauccucgccaucuacuccaccgucgccuccucccucguccucgucgucucccucggcgccaucuccuucuggaugugcuccaacggcucccuccagugccgcaucugcaucuga

SEQ ID NO: 101764 - RNA, 1701 nt, Artificial Sequence
  derived and/or modified CDS sequence (opt2) from hemagglutinin__InfluenzaA__ADM32028
augaaggccauccucgucguccuccucuacaccuucgccaccgccaacgccgacacccucugcaucggcuaccacgccaacaacuccaccgacaccgucgacaccguccucgagaagaacgucaccgucacccacuccgucgaccuccucgaggacaagcacaacggcaagcucugcaagcuccgcggcgucgccccccuccaccucggcaagugcaacaucgccggcuggauccucggcaaccccgagugcgagucccucuccaccgccuccuccugguccuacaucgucgagaccuccuccuccgacaacggcaccugcuaccccggcgacuucaucgacuacgaggagcuccgcgagcagcucuccuccgucuccuccuucgagcgcuucgagaucuuccccaagaccuccuccuggcccaaccacgacuccaacaagggcgucaccgccgccugcccccacgccggcgccaaguccuucuacaagaaccucaucuggcucgucaagaagggcaacuccuaccccaagcucuccaaguccuacaucaacgacaagggcaaggagguccucguccucuggggcauccaccaccccuccaccuccgccgaccagcagucccucuaccagaacgccgacgccuacgucuucgucggcaccucccgcuacuccaagaaguucaagcccgagaucgccauccgccccaagguccgcgaccaggagggccgcaugaacuacuacuggacccucgucgagcccggcgacaagaucaccuucgaggccaccggcaaccucgucgucccccgcuacgccuucgccauggagcgcaacgccggcuccggcaucaucaucuccgacacccccguccacgacugcaacaccaccugccagacccccaagggcgccaucaacaccucccuccccuuccagaacguccaccccaucaccaucggcaagugccccaaguacgucaaguccaccaagcuccgccucgccaccggccuccgcaacguccccuccauccagucccgcggccucuucggcgccaucgccggcuucaucgagggcggcuggaccggcauggucgacggcugguacggcuaccaccaccagaacgagcagggcuccggcuacgccgccgaccucaaguccacccagaacgccaucgacgagaucaccaacaaggucaacuccgucaucgagaagaugaacacccaguucaccgccgucggcaaggaguucaaccaccucgagaagcgcaucgagaaccucaacaagaaggucgacgacggcuuccucgacaucuggaccuacaacgccgagcuccucguccuccucgagaacgagcgcacccucgacuaccacgacuccaacgucaagaaccucuacgagaagguccgcucccagcucaagaacaacgccaaggagaucggcaacggcugcuucgaguucuaccacaagugcgacaacaccugcauggaguccgucaagaacggcaccuacgacuaccccaaguacuccgaggaggccaagcucaaccgcgaggagaucgacggcgucaagcucgaguccacccgcaucuaccagauccucgccaucuacuccaccgucgccuccucccucguccucgucgucucccucggcgccaucuccuucuggaugugcuccaacggcucccuccagugccgcaucugcaucuga

SEQ ID NO: 101765 - RNA, 1701 nt, Artificial Sequence; identical to SEQ ID NO: 100477
  derived and/or modified CDS sequence (opt2) from hemagglutinin__InfluenzaA__ADM32038

SEQ ID NO: 101766 - RNA, 1701 nt, Artificial Sequence; identical to SEQ ID NO: 98885
  derived and/or modified CDS sequence (opt2) from hemagglutinin__InfluenzaA__ADM32048

SEQ ID NO: 101767 - RNA, 1701 nt, Artificial Sequence; identical to SEQ ID NO: 99869
  derived and/or modified CDS sequence (opt2) from hemagglutinin__InfluenzaA__ADM32058

SEQ ID NO: 101768 - RNA, 1701 nt, Artificial Sequence; identical to SEQ ID NO: 99869
  derived and/or modified CDS sequence (opt2) from hemagglutinin__InfluenzaA__ADM32068

SEQ ID NO: 101769 - RNA, 1701 nt, Artificial Sequence; identical to SEQ ID NO: 98705
  derived and/or modified CDS sequence (opt2) from hemagglutinin__InfluenzaA__ADM32078

SEQ ID NO: 101770 - RNA, 1701 nt, Artificial Sequence; identical to SEQ ID NO: 100293
  derived and/or modified CDS sequence (opt2) from hemagglutinin__InfluenzaA__ADM32088

SEQ ID NO: 101771 - RNA, 1701 nt, Artificial Sequence
  derived and/or modified CDS sequence (opt2) from hemagglutinin__InfluenzaA__ADM32098
augaaggccauccucgucguccuccucuacaccuucgccaucgccaacgccgacacccucugcaucggcuaccacgccaacaacuccaccgacaccgucgacaccguccucgagaagaacgucaccgucacccacuccgucaaccuccucgaggacaagcacaacggcaagcucugcaagcuccgcggcgucgccccccuccaccucggcaagugcaacaucgccggcuggauccucggcaaccccgagugcgagucccucuccaccgccuccuccugguccuacaucgucgagaccuccuccuccgacaacggcaccugcuaccccggcgacuucaucgacuacgaggagcuccgcgagcagcucuccuccgucuccuccuucgagcgcuucgagaucuuccccaagaccuccuccuggcccaaccacgacuccaacaagggcgucaccgccgccugcccccacgccggcgccaaguccuucuacaagaaccucaucuggcucgucaagaagggcaacuccuaccccaagcucuccaaguccuacaucaacgacaagggcaaggagguccucguccucuggggcauccaccaccccuccaccuccgccgaccagcagucccucuaccagaacgccgacgccuacgucuucgucggcaccucccgcuacuccaagaaguucaagcccgagaucgccauccgccccaagguccgcgaccaggagggccgcaugaacuacuacuggacccucgucgagcccggcgacaagaucaccuucgaggccaccggcaaccucgucgucccccgcuacgccuucgccauggagcgcaacgccggcuccggcaucaucaucuccgacacccccguccacgacugcaacaccaccugccagacccccaagggcgccaucaacaccucccuccccuuccagaacauccaccccaucaccaucggcaagugccccaaguacgucaaguccaccaagcuccgccucgccaccggccuccgcaacguccccuccauccagucccgcggccucuucggcgccaucgccggcuucaucgagggcggcuggaccggcauggucgacggcugguacggcuaccaccaccagaacgagcagggcuccggcuacgccgccgaccucaaguccacccagaacgccaucgacgagaucaccaacaaggucaacuccgucaucgagaagaugaacacccaguucaccgccgucggcaaggaguucaaccaccucgagaagcgcaucgagaaccucaacaagaaggucgacgacggcuuccucgacaucuggaccuacaacgccgagcuccucguccuccucgagaacgagcgcacccucgacuaccacgacuccaacgucaagaaccucuacgagaagguccgcucccagcucaagaacaacgccaaggagaucggcaacggcugcuucgaguucuaccacaagugcgacaacaccugcauggaguccgucaagaacggcaccuacgacuaccccaaguacuccgaggaggccaagcucaaccgcgaggagaucgacggcgucaagcucgaguccacccgcaucuaccagauccucgccaucuacuccaccgucgccuccucccucguccucgucgucucccucggcgccaucuccuucuggaugugcuccaacggcucccuccagugccgcaucugcaucuga

SEQ ID NO: 101772 - RNA, 1701 nt, Artificial Sequence; identical to SEQ ID NO: 98705
  derived and/or modified CDS sequence (opt2) from hemagglutinin__InfluenzaA__ADM32108

SEQ ID NO: 101773 - RNA, 1701 nt, Artificial Sequence; identical to SEQ ID NO: 100477
  derived and/or modified CDS sequence (opt2) from hemagglutinin__InfluenzaA__ADM32551

SEQ ID NO: 101774 - RNA, 1701 nt, Artificial Sequence; identical to SEQ ID NO: 98885
  derived and/or modified CDS sequence (opt2) from hemagglutinin__InfluenzaA__ADM32561

SEQ ID NO: 101775 - RNA, 1701 nt, Artificial Sequence; identical to SEQ ID NO: 98885
  derived and/or modified CDS sequence (opt2) from hemagglutinin__InfluenzaA__ADM32571

SEQ ID NO: 101776 - RNA, 1701 nt, Artificial Sequence; identical to SEQ ID NO: 98705
  derived and/or modified CDS sequence (opt2) from hemagglutinin__InfluenzaA__ADM32581

SEQ ID NO: 101777 - RNA, 1701 nt, Artificial Sequence; identical to SEQ ID NO: 100477
  derived and/or modified CDS sequence (opt2) from hemagglutinin__InfluenzaA__ADM32591

SEQ ID NO: 101778 - RNA, 1701 nt, Artificial Sequence; identical to SEQ ID NO: 98705
  derived and/or modified CDS sequence (opt2) from hemagglutinin__InfluenzaA__ADM32601

SEQ ID NO: 101779 - RNA, 1701 nt, Artificial Sequence; identical to SEQ ID NO: 98705
  derived and/or modified CDS sequence (opt2) from hemagglutinin__InfluenzaA__ADM32611

SEQ ID NO: 101780 - RNA, 1701 nt, Artificial Sequence; identical to SEQ ID NO: 99869
  derived and/or modified CDS sequence (opt2) from hemagglutinin__InfluenzaA__ADM32621

SEQ ID NO: 101781 - RNA, 1701 nt, Artificial Sequence
  derived and/or modified CDS sequence (opt2) from hemagglutinin__InfluenzaA__ADM32631
augaaggccauccucgucguccuccucuacaccuucgccaccgccaacgccgacacccucugcaucggcuaccacgccaacaacuccaccgacaccgucgacaccguccucgagaagaacgucaccgucacccacuccgucaacauccucgaggacaagcacaacggcaagcucugcaagcucaagggcgucgccccccuccaccucggcaagugcaacaucgccggcuggauccucggcaaccccgagugcgagucccucuccaccgccuccuccugguccuacaucgucgagaccuccuccuccgacaacggcaccugcuaccccggcgacuucaucgacuacgaggagcuccgcgagcagcucuccuccgucuccuccuucgagcgcuucgagaucuuccccaagaccuccuccuggcccaaccacgacuccaacaagggcgucaccgccgccugcccccacgccggcgccaaguccuucuacaagaaccucaucuggcucgucaagaagggcaaccucuaccccaagcucuccaaguccuacaucaacgacaagggcaaggagguccucguccucuggggcauccaccaccccuccaccuccgccgaccagcagucccucuaccagaacgccgacgccuacgucuucgucggcuccuccaaguacuccaagaaguucaagcccgagaucgccauccgccccaagguccgcgaccaggagggccgcaugaacuacuacuggacccucgucgagcccggcgacaagaucaccuucgaggccaccggcaaccucgucgucccccgcuacgccuucgccauggagcgcaacgccggcuccggcaucaucaucuccgacacccccguccacaacugcaacaccaccugccagacccccaagggcgccaucaacaccucccuccccuuccagaacauccaccccaucaccaucggcaagugccccaaguacgucaaguccaccaagcuccgccucgccaccggccuccgcaacguccccuccauccagucccgcggccucuucggcgccaucgccggcuucaucgagggcggcuggaccggcauggucgacggcugguacggcuaccaccaccagaacgagcagggcuccggcuacgccgccgaccucaaguccacccagaacgccaucgacgagaucaccaacaaggucaacuccgucaucgagaagaugaacacccaguucaccgccgucggcaaggaguucaaccaccucgagaagcgcaucgagaaccucaacaagaaggucgacgacggcuuccucgacaucuggaccuacaacgccgagcuccucguccuccucgagaacgagcgcacccucgacuaccacgacuccaacgucaagaaccucuacgagaagguccgcucccagcucaagaacaacgccaaggagaucggcaacggcugcuucgaguucuaccacaagugcgacaacaccugcauggaguccgucaagaacggcaccuacgacuaccccaaguacuccgaggaggccaagcucaaccgcgaggagaucgacggcgucaagcucgaguccacccgcaucuaccagauccucgccaucuacuccaccgucgccuccucccucguccucgucgucucccucggcgccaucuccuucuggaugugcuccaacggcucccuccagugccgcaucugcaucuga

SEQ ID NO: 101782 - RNA, 1701 nt, Artificial Sequence; identical to SEQ ID NO: 99869
  derived and/or modified CDS sequence (opt2) from hemagglutinin__InfluenzaA__ADM32641

SEQ ID NO: 101783 - RNA, 1701 nt, Artificial Sequence; identical to SEQ ID NO: 98705
  derived and/or modified CDS sequence (opt2) from hemagglutinin__InfluenzaA__ADM32651

SEQ ID NO: 101784 - RNA, 1701 nt, Artificial Sequence
  derived and/or modified CDS sequence (opt2) from hemagglutinin__InfluenzaA__ADM32661
augaaggccauccucgucguccuccucuacaccuucgccaucgccaacgccgacacccucugcaucggcuaccacgccaacaacuccaccgacaccgucgacaccguccucgagaagaacgucaccgucacccacuccgucaaccuccucgaggacaagcacaacggcaagcucugcaagcuccgcggcgucgccccccuccaccucggcaagugcaacaucgccggcuggauccucggcaaccccgagugcgagucccucuccaccgccuccuccugguccuacaucgucgagaccuccuccuccgacaacggcaccugcuaccccggcgacuucaacgacuacgaggagcuccgcgagcagcucuccuccgucuccuccuucgagcgcuucgagaucuuccccaagaccuccuccuggcccaaccacgacuccaacaagggcgucaccgccgccugcccccacgccggcgccaaguccuucuacaagaaccucaucuggcucgucaagaagggcaacuccuaccccaagcucuccaaguccuacaucaacgacaagggcaaggagguccucguccucuggggcauccaccaccccuccaccuccgccgaccagcagucccucuaccagaacgccgacgccuacgucuucgucggcaccucccgcuacuccaagaaguucaagcccgagaucgccauccgccccaagguccgcgaccaggagggccgcaugaacuacuacuggacccucgucgagcccggcgacaagaucaccuucgaggccaccggcaaccucgucgucccccgcuacgccuucgccauggagcgcaacgccggcuccggcaucaucaucuccgacacccccguccacgacugcaacaccaccugccagacccccaagggcgccaucaacaccucccuccccuuccagaacauccaccccaucaccaucggcaagugccccaaguacgucaaguccaccaagcuccgccucgccaccggccuccgcaacguccccuccauccagucccgcggccucuucggcgccaucgccggcuucaucgagggcggcuggaccggcauggucgacggcugguacggcuaccaccaccagaacgagcagggcuccggcuacgccgccgaccucaaguccacccagaacgccaucgacgagaucaccaacaaggucaacuccgucaucgagaagaugaacacccaguucaccgccgucggcaaggaguucaaccaccucgagaagcgcaucgagaaccucaacaagaaggucgacgacggcuuccucgacaucuggaccuacaacgccgagcuccucguccuccucgagaacgagcgcacccucgacuaccacgacuccaacgucaagaaccucuacgagaagguccgcucccagcucaagaacaacgccaaggagaucggcaacggcugcuucgaguucuaccacaagugcgacaacaccugcauggaguccgucaagaacggcaccuacgacuaccccaaguacuccgaggaggccaagcucaaccgcgaggagaucgacggcgucaagcucgaguccacccgcaucuaccagauccucgccaucuacuccaccgucgccuccucccucguccucgucgucucccucggcgccaucuccuucuggaugugcuccaacggcucccuccagugccgcaucugcaucuga

SEQ ID NO: 101785 - RNA, 1701 nt, Artificial Sequence; identical to SEQ ID NO: 100293
  derived and/or modified CDS sequence (opt2) from hemagglutinin__InfluenzaA__ADM32671

SEQ ID NO: 101786 - RNA, 1701 nt, Artificial Sequence; identical to SEQ ID NO: 98705
  derived and/or modified CDS sequence (opt2) from hemagglutinin__InfluenzaA__ADM32681

SEQ ID NO: 101787 - RNA, 1701 nt, Artificial Sequence; identical to SEQ ID NO: 98885
  derived and/or modified CDS sequence (opt2) from hemagglutinin__InfluenzaA__ADM32691

SEQ ID NO: 101788 - RNA, 1701 nt, Artificial Sequence; identical to SEQ ID NO: 98705
  derived and/or modified CDS sequence (opt2) from hemagglutinin__InfluenzaA__ADM32701

SEQ ID NO: 101789 - RNA, 1701 nt, Artificial Sequence; identical to SEQ ID NO: 98885
  derived and/or modified CDS sequence (opt2) from hemagglutinin__InfluenzaA__ADM32711

SEQ ID NO: 101790 - RNA, 1701 nt, Artificial Sequence; identical to SEQ ID NO: 98885
  derived and/or modified CDS sequence (opt2) from hemagglutinin__InfluenzaA__ADM32721

SEQ ID NO: 101791 - RNA, 1701 nt, Artificial Sequence; identical to SEQ ID NO: 98885
  derived and/or modified CDS sequence (opt2) from hemagglutinin__InfluenzaA__ADM32741

SEQ ID NO: 101792 - RNA, 1701 nt, Artificial Sequence; identical to SEQ ID NO: 98885
  derived and/or modified CDS sequence (opt2) from hemagglutinin__InfluenzaA__ADM32751

SEQ ID NO: 101793 - RNA, 1701 nt, Artificial Sequence; identical to SEQ ID NO: 100293
  derived and/or modified CDS sequence (opt2) from hemagglutinin__InfluenzaA__ADM32761

SEQ ID NO: 101794 - RNA, 1701 nt, Artificial Sequence
  derived and/or modified CDS sequence (opt2) from hemagglutinin__InfluenzaA__ADM32771
augaaggccauccucgucguccuccucuacaccuucgccaccgccaacgccgacacccucugcaucggcuaccacgccaacaacuccaccgacaccgucgacaccguccucgagaagaacgucaccgucacccacuccgucaaccuccucgaggacaagcacaacggcaagcucugcaagcuccgcggcgucgccccccuccaccucggcaagugcaacaucgccggcuggauccucggcaaccccgagugcgagucccucuccaccgccuccuccugguccuacaucgucgagaccuccuccuccgacaacggcaccugcuaccccggcgacuucaucgacuacgaggagcuccgcgagcagcucuccuccgucuccuccuucgagcgcuucgagaucuuccccaagaccuccuccuggcccaaccacgacuccaacaagggcgucaccgccgccugcccccacgccggcgccaaguccuucuacaagaaccucaucuggcucgucaagaagggcaacuccuaccccaagcucuccgaguccuacaucaacgacaagggcaaggagguccucguccucuggggcauccaccaccccuccaccuccgccgaccagcagucccucuaccagaacgccgacgccuacgucuucgucggcaccucccgcuacuccaagaaguucaagcccgagaucgccauccgccccaagguccgcgaccaggagggccgcaugaacuacuacuggacccucgucgagcccggcgacaagaucaccuucgaggccaccggcaaccucgucgucccccgcuacgccuucgccauggagcgcaacgccggcuccggcaucaucaucuccgacacccccguccacgacugcaacaccaccugccagacccccaagggcgccaucaacaccucccuccccuuccagaacauccaccccaucaccaucggcaagugccccaaguacgucaaguccaccaagcuccgccucgccaccggccuccgcaacguccccuccauccaguccaagggccucuucggcgccaucgccggcuucaucgagggcggcuggaccggcauggucgacggcugguacggcuaccaccaccagaacgagcagggcuccggcuacgccgccgaccucaaguccacccagaacgccaucgacgagaucaccaacaaggucaacuccgucaucgagaagaugaacacccaguucaccgccgucggcaaggaguucaaccaccucgagaagcgcaucgagaaccucaacaagaaggucgacgacggcuuccucgacaucuggaccuacaacgccgagcuccucguccuccucgagaacgagcgcacccucgacuaccacgacuccaacgucaagaaccucuacgagaagguccgcucccagcucaagaacaacgccaaggagaucggcaacggcugcuucgaguucuaccacaagugcgacaacaccugcauggaguccgucaagaacggcaccuacgacuaccccaaguacuccgaggaggccaagcucaaccgcgaggagaucgacggcgucaagcucgaguccacccgcaucuaccagauccucgccaucuacuccaccgucgccuccucccucguccucgucgucucccucggcgccaucuccuucuggaugugcuccaacggcucccuccagugccgcaucugcaucuga

SEQ ID NO: 101795 - RNA, 1701 nt, Artificial Sequence
  derived and/or modified CDS sequence (opt2) from hemagglutinin__InfluenzaA__ADM32781
augaaggccauccucgucguccuccucuacaccuucgccaccgccaacgccgacacccucugcaucggcuaccacgccaacaacuccaccgacaccgucgacaccguccucgagaagaacgucaccgucacccacuccgucgaccuccucgaggacaagcacaacggcaagcucugcaagcuccgcggcgucgccccccuccaccucggcaagugcaacaucgccggcuggauccucggcaaccccgagugcgagucccucuccaccgccuccuccugguccuacaucgucgagaccuccuccuccgacaacggcaccugcuaccccggcgacuucaucgacuacgaggagcuccgcgagcagcucuccuccgucuccuccuucgagcgcuucgagaucuuccccaagaccuccuccuggcccaaccacgacuccaacaagggcgucaccgccgccugcccccacgccggcgccaaguccuucuacaagaaccucaucuggcucgucaagaagggcaacuccuaccccaagcucuccaaguccuacaucaacgacaagggcaaggagguccucguccucuggggcauccaccaccccuccaccuccgccgaccagcagucccucuaccagaacgccgacgccuacgucuucgucggcaccucccgcuacuccaagaaguucaagcccgagaucgccauccgccccaagguccgcgaccaggagggccgcaugaacuacuacuggacccucgucgagcccggcgacaagaucaccuucgaggccaccggcaaccucgucgucccccgcuacgccuucgccauggagcgcaacgccggcuccggcaucaucaucuccgacacccccguccacgacugcaacaccaccugccagacccccaagggcgccaucaacaccuccuuccccuuccagaacauccaccccaucaccaucggcaagugccccaaguacgucaaguccaccaagcuccgccucgccaccggccuccgcaacguccccuccauccagucccgcggccucuucggcgccaucgccggcuucaucgagggcggcuggaccggcauggucgacggcugguacggcuaccaccaccagaacgagcagggcuccggcuacgccgccgaccucaaguccacccagaacgccaucgacgagaucaccaacaaggucaacuccgucaucgagaagaugaacacccaguucaccgccgucggcaaggaguucaaccaccucgagaagcgcaucgagaaccucaacaagaaggucgacgacggcuuccucgacaucuggaccuacaacgccgagcuccucguccuccucgagaacgagcgcacccucgacuaccacgacuccaacgucaagaaccucuacgagaagguccgcucccagcucaagaacaacgccaaggagaucggcaacggcugcuucgaguucuaccacaagugcgacaacaccugcauggaguccgucaagaacggcaccuacgacuaccccaaguacuccgaggaggccaagcucaaccgcgaggagaucgacggcgucaagcucgaguccacccgcaucuaccagauccucgccaucuacuccaccgucgccuccucccucguccucgucgucucccucggcgccaucuccuucuggaugugcuccaacggcucccuccagugccgcaucugcaucuga

SEQ ID NO: 101796 - RNA, 1701 nt, Artificial Sequence; identical to SEQ ID NO: 98885
  derived and/or modified CDS sequence (opt2) from hemagglutinin__InfluenzaA__ADM32791

SEQ ID NO: 101797 - RNA, 1701 nt, Artificial Sequence
  derived and/or modified CDS sequence (opt2) from hemagglutinin__InfluenzaA__ADM32801
augaaggccauccucgucguccuccucuacaccuucgccaccgccaacgccgacacccucugcaucggcuaccacgccaacaacuccaccgacaccgucgacaccguccucgagaagaacgucaccgucacccacuccgucaacauccucgagaacaagcacaacggcaagcucugcaagcuccgcggcgucgccccccuccaccucggcaagugcaacaucgccggcuggauccucggcaaccccgagugcgagucccucuccaccgccuccuccugguccuacaucgucgagaccuccuccuccgacaacggcaccugcuaccccggcgacuucaucgacuacgaggagcuccgcgagcagcucuccuccgucuccuccuucgagcgcuucgagaucuuccccaagaccuccuccuggcccaaccacgacuccaacaagggcgucaccgccgccugcccccacgccggcgccaaguccuucuacaagaaccucaucuggcucgucaagaagggcaacuccuaccccaagcucuccaaguccuacaucaacgacaagggcaaggagguccucguccucuggggcauccaccaccccuccaccuccgccgaccagcagucccucuaccagaacgccgacgccuacgucuucgucggcuccucccgcuacuccaagaaguucaagcccgagaucgccauccgccccaagguccgcgaccaggagggccgcaugaacuacuacuggacccucgucgagcccggcgacaagaucaccuucgaggccaccggcaaccucgucgucccccgcuacgccuucgccauggagcgcaacgccggcuccggcaucaucaucuccgacacccccguccacgacugcaacaccaccugccagacccccaagggcgccaucaacaccucccuccccuuccagaacauccaccccaucaccaucggcaagugccccaaguacgucaaguccaccaagcuccgccucgccaccggccuccgcaacguccccuccauccagucccgcggccucuucggcgccaucgccggcuucaucgagggcggcuggaccggcauggucgacggcugguacggcuaccaccaccagaacgagcagggcuccggcuacgccgccgaccucaaguccacccagaacgccaucgacgagaucaccaacaaggucaacuccgucaucgagaagaugaacacccaguucaccgccgucggcaaggaguucaaccaccucgagaagcgcaucgagaaccucaacaagaaggucgacgacggcuuccucgacaucuggaccuacaacgccgagcuccucguccuccucgagaacgagcgcacccucgacuaccacgacuccaacgucaagaaccucuacgagaagguccgcucccagcucaagaacaacgccaaggagaucggcaacggcugcuucgaguucuaccacaagugcgacaacaccugcauggaguccgucaagaacggcaccuacgacuaccccaaguacuccgaggaggccaagcucaaccgcgaggagaucgacggcgucaagcucgaguccacccgcaucuaccagauccucgccaucuacuccaccgucgccuccucccucguccucgucgucucccucggcgccaucuccuucuggaugugcuccaacggcucccuccagugccgcaucugcaucuga

SEQ ID NO: 101798 - RNA, 1701 nt, Artificial Sequence
  derived and/or modified CDS sequence (opt2) from hemagglutinin__InfluenzaA__ADM32811
augaaggccauccucgucguccuccucuacaccuucgccaccgccaacgccgacacccucugcaucggcuaccacgccaacaacuccaccgacaccgucgacaccguccucgagaagaacgucaccgucacccacuccgucaaccuccucgaggacaagcacaacggcaagcucugcaagcuccgcggcgucgccccccuccaccucggcaagugcaacaucgccggcuggauccucggcaaccccgagugcgagucccucuccaccgccuccuccugguccuacaucgucgagaccuccuccuccgacaacggcaccugcuaccccggcgacuucaucgacuacgaggagcuccgcgagcagcucuccuccgucuccuccuucgagcgcuucgagaucuuccccaagaccuccuccuggcccaaccacgacuccaacaagggcgucaccgccgccugcccccacgccggcgccaaguccuucuacaagaaccucaucuggcucgucaagaagggcaacuccuaccccaagcucuccaaguccuacaucaacgacaagggcaaggagguccucguccucuggggcauccaccaccccuccaccuccgccgaccagcagucccucuaccagaacgccgacgccuacgucuucgucggcaccucccgcuacuccaagaaguucaagcccgagaucgccauccgccccaagguccgcgaccaggagggccgcaugaacuacuacuggacccucgucgagcccggcgacaagaucaccuucgaggccaccggcaaccucgucgucccccgcuacgccuucgccauggagcgcaacgccggcuccggcaucaucaucuccgacacccccguccacgacugcaacaccaccugccagacccccaagggcgccaucaacaccucccuccccuuccacaacauccaccccaucaccaucggcaagugccccaaguacgucaaguccaccaagcuccgccucgccaccggccuccgcaacguccccuccauccagucccgcggccucuucggcgccaucgccggcuucaucgagggcggcuggaccggcauggucgacggcugguacggcuaccaccaccagaacgagcagggcuccggcuacgccgccgaccucaaguccacccagaacgccaucgacgagaucaccaacaaggucaacuccgucaucgagaagaugaacacccaguucaccgccgucggcaaggaguucaaccaccucgagaagcgcaucgagaaccucaacaagaaggucgacgacggcuuccucgacaucuggaccuacaacgccgagcuccucguccuccucgagaacgagcgcacccucgacuaccacgacuccaacgucaagaaccucuacgagaagguccgcucccagcucaagaacaacgccaaggagaucggcaacggcugcuucgaguucuaccacaagugcgacaacaccugcauggaguccgucaagaacggcaccuacgacuaccccaaguacuccgaggaggccaagcucaaccgcgaggagaucgacggcgucaagcucgaguccacccgcaucuaccagauccucgccaucuacuccaccgucgccuccucccucguccucgucgucucccucggcgccaucuccuucuggaugugcuccaacggcucccuccagugccgcaucugcaucuga

SEQ ID NO: 101799 - RNA, 1701 nt, Artificial Sequence; identical to SEQ ID NO: 98705
  derived and/or modified CDS sequence (opt2) from hemagglutinin__InfluenzaA__ADM32821

SEQ ID NO: 101800 - RNA, 1701 nt, Artificial Sequence; identical to SEQ ID NO: 100293
  derived and/or modified CDS sequence (opt2) from hemagglutinin__InfluenzaA__ADM32831

SEQ ID NO: 101801 - RNA, 1701 nt, Artificial Sequence; identical to SEQ ID NO: 98885
  derived and/or modified CDS sequence (opt2) from hemagglutinin__InfluenzaA__ADM32841

SEQ ID NO: 101802 - RNA, 1701 nt, Artificial Sequence; identical to SEQ ID NO: 100293
  derived and/or modified CDS sequence (opt2) from hemagglutinin__InfluenzaA__ADM32851

SEQ ID NO: 101803 - RNA, 1701 nt, Artificial Sequence; identical to SEQ ID NO: 98885
  derived and/or modified CDS sequence (opt2) from hemagglutinin__InfluenzaA__ADM32861

SEQ ID NO: 101804 - RNA, 1701 nt, Artificial Sequence; identical to SEQ ID NO: 99869
  derived and/or modified CDS sequence (opt2) from hemagglutinin__InfluenzaA__ADM32871

SEQ ID NO: 101805 - RNA, 1701 nt, Artificial Sequence; identical to SEQ ID NO: 100872
  derived and/or modified CDS sequence (opt2) from hemagglutinin__InfluenzaA__ADM32881

SEQ ID NO: 101806 - RNA, 1701 nt, Artificial Sequence
  derived and/or modified CDS sequence (opt2) from hemagglutinin__InfluenzaA__ADM32929
augaaggccauccucgucguccuccucuacaccuucgccaccgccaacgccgacacccucugcaucggcuaccacgccaacaacuccaccgacaccgucgacaccguccucgagaagaacgucaccgucacccacuccgucaaccuccucgaggacaagcacaacggcaagcucugcaagcuccgcggcgucgccccccuccaccucggcaagugcaacaucgccggcuggauccucggcaaccccgagugcgagucccucuccaccgccuccuccugguccuacaucgucgagaccuccuccuccgacaacggcaccugcuaccccggcgacuucaucgacuacgaggagcuccgcgagcagcucuccuccgucuccuccuucgagcgcuucgagaucuuccccaagaccuccuccuggcccaaccacgacuccaacaagggcgucaccgccgccugcccccacgccggcgccaaguccuucuacaagaaccucaucuggcucgucaagaagggcaacuccuaccccaagcucuccaaguccuacaucaacgacaagggcaaggagguccucguccucuggggcauccaccaccccuccaccuccgccgaccagcagucccucuaccagaacgccgacgccuacgucuucgucggcaccucccgcuacuccaagaaguucaagcccgagaucgccauccgccccaagguccgcgaccaggagggccgcaugaacuacuacuggacccucgucgagcccggcgacaagaucaccuucgaggccaccggcaaccucgucgucccccgcuacgccuucgccauggagcgcaacgccggcuccggcaucaucaucuccgacacccccguccacgacugcaacaccaccugccagacccccaagggcgccaucaacaccucccuccccuuccagaacauccaccccaucaccaucggcaagugccccaaguacgucaaguccaccaagcuccgccucgccaccggccuccgcaacguccccuccauccagucccgcggccucuucggcgccaucgccggcuucaucgagggcggcuggaccggcauggucgacggcugguacggcuaccaccaccagaacgagcagggcuccggcuacgccgccgaccucaaguccacccagaacgccaucgacaagaucaccaacaaggucaacuccgucaucgagaagaugaacacccaguucaccgccgucggcaaggaguucaaccaccucgagaagcgcaucgagaaccucaacaagaaggucgacgacggcuuccucgacaucuggaccuacaacgccgagcuccucguccuccucgagaacgagcgcacccucgacuaccacgacuccaacgucaagaaccucuacgagaagguccgcucccagcucaagaacaacgccaaggagaucggcaacggcugcuucgaguucuaccacaagugcgacaacaccugcauggaguccgucaagaacggcaccuacgacuaccccaaguacuccgaggaggccaagcucaaccgcgaggagaucgacggcgucaagcucgaguccacccgcaucuaccagauccucgccaucuacuccaccgucgccuccucccucguccucgucgucucccucggcgccaucuccuucuggaugugcuccaacggcucccuccgcugccgcaucugcaucuga

SEQ ID NO: 101807 - RNA, 1701 nt, Artificial Sequence
  derived and/or modified CDS sequence (opt2) from hemagglutinin__InfluenzaA__ADM32939
auggaggccauccucgucguccuccucuacaccuucgccaccgccaacgccgacacccucugcaucggcuaccacgccaacaacuccaccgacaccgucgacaccguccucgagaagaacgucaccgucacccacuccgucaaccuccucgaggacaagcacaacggcaagcucugcaagcuccgcggcgucgccccccuccaccucggcaagugcaacaucgccggcuggauccucggcaaccccgagugcgagucccucuccaccgccuccuccugguccuacaucgucgagaccuccuccuccgacaacggcaccugcuaccccggcgacuucaucgacuacgaggagcuccgcgagcagcucuccuccgucuccuccuucgagcgcuucgagaucuuccccaagaccuccuccuggcccaaccacgacuccaacaagggcgucaccgccgccugcccccacgccggcgccaaguccuucuacaagaaccucaucuggcucgucaagaagggcaacuccuaccccaagcucuccaaguccuacaucaacgacaagggcaaggagguccucguccucuggggcauccaccaccccuccaccuccgccgaccagcagucccucuaccagaacgccgacgccuacgucuucgucggcuccucccgcuacuccaagaaguucaagcccgagaucgccauccgccccaagguccgcgaccaggagggccgcaugaacuacuacuggacccucgucgagcccggcgacaagaucaccuucgaggccaccggcaaccucgucgucccccgcuacgccuucgccauggagcgcaacgccggcuccggcaucaucaucuccgacacccccguccacgacugcaacaccaccugccagacccccaagggcgccaucaacaccucccuccccuuccacaacauccaccccaucaccaucggcaagugccccaaguacgucaaguccaccaagcuccgccucgccaccggccuccgcaacauccccuccauccagucccgcggccucuucggcgccaucgccggcuucaucgagggcggcuggaccggcauggucgacggcugguacggcuaccaccaccagaacgagcagggcuccggcuacgccgccgaccucaaguccacccagaacgccaucgacgagaucaccaacaaggucaacuccgucaucgagaagaugaacacccaguucaccgccgucggcaaggaguucaaccaccucgagaagcgcaucgagaaccucaacaagaaggucgacgacggcuuccucgacaucuggaccuacaacgccgagcuccucguccuccucgagaacgagcgcacccucgacuaccacgacuccaacgucaagaaccucuacgagaagguccgcucccagcucaagaacaacgccaaggagaucggcaacggcugcuucgaguucuaccacaagugcgacaacaccugcauggaguccgucaagaacggcaccuacgacuaccccaaguacuccgaggaggccaagcucaaccgcgaggagaucgacggcgucaagcucgaguccacccgcaucuaccagauccucgccaucuacuccaccgucgccuccucccucguccucgucgucucccucggcgccaucuccuucuggaugugcuccaacggcucccuccgcugccgcaucugcaucuga

SEQ ID NO: 101808 - RNA, 1701 nt, Artificial Sequence
  derived and/or modified CDS sequence (opt2) from hemagglutinin__InfluenzaA__ADM32949
augaaggccauccucgucguccuccucuacaccuucgccaccgccaacgccgacacccucugcaucggcuaccacgccaacaacuccaccgacaccgucgacaccguccucgagaagaacgucaccgucacccacuccgucaaccuccucgaggacaagcacaacggcaagcucugcaagcuccgcggcgucgccccccuccaccucggcaagugcaacaucgccggcuggauccucggcaaccccgagugcgagucccucuccaccgccuccuccugguccuacaucgucgagaccuccuccuccgacaacggcaccugcuaccccggcgacuucaucgacuacgaggagcuccgcgagcagcucuccuccgucuccuccuucgagcgcuucgagaucuuccccaagaccuccuccuggcccaaccacgacuccaacaagggcgucaccgccgccugcccccacgccggcgccaaguccuucuacaagaaccucaucuggcucgucaagaagggcaacuccuaccccaagcucuccaaguccuacaucaacgacaagggcaaggagguccucguccucuggggcauccaccaccccuccaccuccgccgaccagcagucccucuaccagaacgccgacgccuacgucuucgucggcaccucccgcuacuccaagaaguucaagcccgagaucgccauccgccccaagguccgcgaccaggagggccgcaugaacuacuacuggacccucgucgagcccggcgacaagaucaccuucgaggccaccggcaaccucgucgucccccgcuacgccuucgccauggagcgcaacgccggcuccggcaucaucaucuccgacacccccguccacgacugcaacaccaccugccagacccccaacggcgccaucaacaccucccuccccuuccagaacauccaccccaucaccaucggcaagugccccaaguacgucaaguccaccaagcuccgccucgccaccggccuccgcaacauccccuccauccagucccgcggccucuucggcgccaucgccggcuucaucgagggcggcuggaccggcauggucgacggcugguacggcuaccaccaccagaacgagcagggcuccggcuacgccgccgaccucaaguccacccagaacgccaucgacgagaucaccaacaaggucaacuccgucaucgagaagaugaacacccaguucaccgccgucggcaaggaguucaaccaccucgagaagcgcaucgagaaccucaacaagaaggucgacgacggcuuccucgacaucuggaccuacaacgccgagcuccucguccuccucgagaacgagcgcacccucgacuaccacgacuccaacgucaagaaccucuacgagaagguccgcucccagcucaagaacaacgccaaggagaucggcaacggcugcuucgaguucuaccacaagugcgacaacaccugcauggaguccgucaagaacggcaccuacgacuaccccaaguacuccgaggaggccaagcucaaccgcgaggagaucgacggcgucaagcucgaguccacccgcaucuaccagauccucgccaucuacuccaccgucgccuccucccucguccucgucgucucccucggcgccaucuccuucuggaugugcuccaacggcucccuccgcugccgcaucugcaucuga

SEQ ID NO: 101809 - RNA, 1701 nt, Artificial Sequence
  derived and/or modified CDS sequence (opt2) from hemagglutinin__InfluenzaA__ADM32958
augaaggccauccucgucuuccuccucuacaccuucgccaccgccaacgccgacacccucugcaucggcuaccacgccaacaacuccaccgacaccgucgacaccguccucgagaagaacgucaccgucacccacuccgucaacauccucgaggacaagcacaacggcaagcucugcaagcuccgcggcgucgccccccuccaccucggcaagugcaacaucgccggcuggauccucggcaaccccgagugcgagucccucuccaccgccuccuccugguccuacaucgucgagaccuccuccuccgacaacggcaccugcuaccccggcgacuucaucgacuacgaggagcuccgcgagcagcucuccuccgucuccuccuucgagcgcuucgagaucuuccccaagaccuccuccuggcccaaccacgacuccaacaagggcgucaccgccgccugcccccacgccggcgccaaguccuucuacaagaaccucaucuggcucgucaagaagggcaacuccuaccccaagcucuccaaguccuacaucaacgacaagggcaaggagguccucguccucuggggcauccaccaccccuccaccuccgccgaccagcagucccucuaccagaacgccgacgccuacgucuucgucgaguccucccgcuacuccaagaaguucaagcccgagaucgccauccgccccaagguccgcgaccaggagggccgcaugaacuacuacuggacccucgucgagcccggcgacaagaucaccuucgaggccaccggcaaccucgucgucccccgcuacgccuucgccauggagcgcaacgccggcuccggcaucaucaucuccgacacccccguccacgacugcaacaccaccugccagacccccaagggcgccaucaacaccucccuccccuuccagaacauccaccccaucaccaucggcaagugccccaaguacgucaaguccaccaagcuccgccucgccaccggccuccgcaacguccccuccauccagucccgcggccucuucggcgccaucgccggcuucaucgagggcggcuggaccggcauggucgacggcugguacggcuaccaccaccagaacgagcagggcuccggcuacgccgccgaccucaaguccacccagaacgccaucgacgagaucaccaacaaggucaacuccgucaucgagaagaugaacacccaguucaccgccgucggcaaggaguucaaccaccucgagaagcgccucgagaaccucaacaagaaggucgacgacggcuuccucgacaucuggaccuacaacgccgagcuccucguccuccucgagaacgagcgcacccucgacuaccacgacuccaacgucaagaaccucuacgagaagguccgcucccagcucaagaacaacgccaaggaggucggcaacggcugcuucgaguucuaccacaagugcgacaacaccugcauggaguccgucaagaacggcaccuacgacuaccccaaguacuccgaggaggccaagcucaaccgcgaggagaucgacggcgucaagcucgaguccacccgcaucuaccagauccucgccaucuacuccaccgccgccuccucccucguccucgucgucucccucggcgccaucuccuucuggaugugcuccaacggcucccuccgcugccgcaucugcaucuga

SEQ ID NO: 101810 - RNA, 1701 nt, Artificial Sequence
  derived and/or modified CDS sequence (opt2) from hemagglutinin__InfluenzaA__ADM32977
augaaggccauccucgucguccuccucugcaccuucgccaccgccaacgccgacacccucugcaucggcuaccacgccaacaacuccaccgacaccgucgacaccguccucgagaagaacgucaccgucacccacuccgucaaccuccucgaggacaagcacaacggcaagcucugcaagcuccgcggcgucgccccccuccaccucggcaagugcaacaucgccggcuggauccucggcaaccccgagugcgagucccucuccaccgccuccuccugguccuacaucgucgagaccuccuccuccgacaacggcaccugcuaccccggcgacuucaucgacuacgaggagcuccgcgagcagcucuccuccgucuccuccuucgagcgcuucgagaucuuccccaagaccuccuccuggcccaaccacgacuccaacaagggcgucaccgccgccugcccccacgccggcgccaaguccuucuacaagaaccucaucuggcucgucaagaagggcaacuccuaccccaagcucuccaaguccuacaucaacgacaagggcaaggagguccucguccucuggggcauccaccaccccuccaccuccgccgaccagcagucccucuaccagaacgccgacgccuacgucuucgucggcaccuccaaguacuccaagaaguucaagcccgagaucgccauccgccccaagguccgcgaccaggagggccgcaugaacuacuacuggacccucgucgagcccggcgacaagaucaccuucgaggccaccggcaaccucgucgucccccgcuacgccuucgccauggagcgcaacgccggcuccggcaucaucaucuccgacacccccguccacgacugcaacaccaccugccagacccccaagggcgccaucaacaccucccuccccuuccagaacauccaccccaucaccaucggcaagugccccaaguacgucaaguccaccaagcuccgccucgccaccggccuccgcaacguccccuccauccagucccgcggccucuucggcgccaucgccggcuucaucgagggcggcuggaccggcauggucgacggcugguacggcuaccaccaccagaacgagcagggcuccggcuacgccgccgaccucaaguccacccagaacgccaucgacggcaucaccaacaagaucaacuccgucaucgagaagaugaacacccaguucaccgccgucggcaaggaguucaaccaccucgagaagcgcaucgagaaccucaacaagaaggucgacgacggcuuccucgacaucuggaccuacaacgccgagcuccucguccuccucgagaacgagcgcacccucgacuaccacgacuccaacgucaagaaccucuacgagaagguccgcucccagcucaagaacaacgccaaggagaucggcaacggcugcuucgaguucuaccacaagugcgacaacaccugcauggaguccgucaagaacggcaccuacgacuaccccaaguacuccgaggaggccaagcucaaccgcgaggagaucgacggcgucaagcucgaguccacccgcaucuaccagauccucgccaucuacuccaccgucgccuccucccucguccucgucgucucccucggcgccaucuccuucuggaugugcuccaacggcucccuccgcugccgcaucugcaucuga

SEQ ID NO: 101811 - RNA, 1701 nt, Artificial Sequence
  derived and/or modified CDS sequence (opt2) from hemagglutinin__InfluenzaA__ADM32986
augaaggccauccucgucguccuccucuacaccuucgccaccgccaacgccgacacccucugcaucggcuaccacgccaacaacuccaccgacaccgucgacaccguccucgagaagaacgucaccgucacccacuccgucaaccuccucgaggacaagcacaacggcaagcucugcaagcuccgcggcgucgccccccuccaccucggcaagugcaacaucgccggcuggauccucggcaaccccgagugcgagucccucuccaccgccuccuccugguccuacaucgucgagaccuccuccuccgacaacggcaccugcuaccccggcgacuucaucgacuacgaggagcuccgcgagcagcucuccuccgucuccuccuucgagcgcuucgagaucuuccccaagaccaacuccuggcccaaccacgacuccaacaagggcgucaccgccgccugcccccacgccggcgccaaguccuucuacaagaaccucaucuggcucgucaagaagggcaacuccuaccccaagcucuccaaguccuacaucaacgacaagggcaaggagguccucguccucuggggcauccaccaccccuccaccuccgccgaccagcagucccucuaccagaacgccgacgccuacgucuucgucggcaccuccaaguacuccaagaaguucaagcccgagaucgccauccgccccaagguccgcgaccaggagggccgcaugaacuacuacuggacccucgucgagcccggcgacaagaucaccuucgaggccaccggcaaccucgucgucccccgcuacgccuucgccauggagcgcaacgccggcuccggcaucaucaucuccgacacccccguccacgacugcaacaccaccugccagacccccaagggcgccaucaacaccucccuccccuuccagaacauccaccccaucaccaucggcaagugccccaaguacgucaaguccaccaagcuccgccucgccaccggccuccgcaacguccccuccauccagucccgcggccucuucggcgccaucgccggcuucaucgagggcggcuggaccggcauggucgacggcugguacggcuaccaccaccagaacgagcagggcuccggcuacgccgccgaccucaaguccacccagaacgccaucgacggcaucaccaacaagaucaacuccgucaucgagaagaugaacacccaguucaccgccgucggcaaggaguucaaccaccucgagaagcgcaucgagaaccucaacaagaaggucgacgacggcuuccucgacaucuggaccuacaacgccgagcuccucguccuccucgagaacgagcgcacccucaacuaccacgacuccaacgucaagaaccucuacgagaagguccgcucccagcucaagaacaacgccaaggagaucggcaacggcugcuucgaguucuaccacaagugcgacaacaccugcauggaguccgucaagaacggcaccuacgacuaccccaaguacuccgaggaggccaagcucaaccgcgaggagaucgacggcgucaagcucgaguccacccgcaucuaccagauccucgccaucuacuccaccgucgccuccucccucguccucgucgucucccucggcgccaucuccuucuggaugugcuccaacggcucccuccgcugccgcaucugcaucuga

SEQ ID NO: 101812 - RNA, 1701 nt, Artificial Sequence
  derived and/or modified CDS sequence (opt2) from hemagglutinin__InfluenzaA__ADM32995
augaaggccauccucgucguccuccucuacaccuucgccaccgccaacgccgacacccucugcaucggcuaccacgccaacaacuccaccgacaccgucgacaccguccucgagaagaacgucaccgucacccacuccgucaaccuccucgaggacaagcacaacggcaagcucugcaagcuccgcggcgucgccccccuccaccucggcaagugcaacaucgccggcuggauccucggcaaccccgagugcgagucccucuccaccgccuccuccugguccuacaucgucgagaccuccuccuccgacaacggcaccugcuaccccggcgacuucaucgacuacgaggagcuccgcgagcagcucuccuccgucuccuccuucgagcgcuucgagaucuuccccaagaccaacuccuggcccaaccacgacuccaacaagggcgucaccgccgccugcccccacgccggcgccaaguccuucuacaagaaccucaucuggcucgucaagaagggcaacuccuaccccaagcucuccaaguccuacaucaacgacaagggcaaggagguccucguccucuggggcauccaccaccccuccaccuccgccgaccagcagucccucuaccagaacgccgacgccuacgucuucgucggcaccuccaaguacuccaagaaguucaagcccgagaucgccauccgccccaagguccgcgaccaggagggccgcaugaacuacuacuggacccucgucgagcccggcgacaagaucaccuucgaggccaccggcaaccucgucgucccccgcuacgccuucgccauggagcgcaacgccggcuccggcaucaucaucuccgacacccccguccacgacugcaacaccaccugccagacccccaagggcgccaucaacaccucccuccccuuccagaacauccaccccaucaccaucggcaagugccccaaguacgucaaguccaccaagcuccgccucgccaccggccuccgcaacguccccuccauccagucccgcggccucuucggcgccaucgccggcuucaucgagggcggcuggaccggcauggucgacggcugguacggcuaccaccaccagaacgagcagggcuccggcuacgccgccgaccucaaguccacccagaacgccaucgacggcaucaccaacaagaucaacuccgucaucgagaagaugaacacccaguucaccgccgucggcaaggaguucaaccaccucgagaagcgcaucgagaaccucaacaagaaggucgacgacggcuuccucgacaucuggaccuacaacgccgagcuccucguccuccucgagaacgagcgcacccucgacuaccacgacuccaacgucaagaaccucuacgagaagguccgcucccagcucaagaacaacgccaaggagaucggcaacggcugcuucgaguucuaccacaagugcgacaacaccugcauggaguccgucaagaacggcaccuacgacuaccccaaguacuccgaggaggccaagcucaaccgcgaggagaucgacggcgucaagcucgaguccacccgcaucuaccagauccucgccaucuacuccaccgucgccuccucccucguccucgucgucucccucggcgccaucuccuucuggaugugcuccaacggcucccuccgcugccgcaucugcaucuga

SEQ ID NO: 101813 - RNA, 1701 nt, Artificial Sequence; identical to SEQ ID NO: 99806
  derived and/or modified CDS sequence (opt2) from hemagglutinin__InfluenzaA__ADM33004

SEQ ID NO: 101814 - RNA, 1701 nt, Artificial Sequence; identical to SEQ ID NO: 98705
  derived and/or modified CDS sequence (opt2) from hemagglutinin__InfluenzaA__ADM33023

SEQ ID NO: 101815 - RNA, 1701 nt, Artificial Sequence
  derived and/or modified CDS sequence (opt2) from hemagglutinin__InfluenzaA__ADM33040
augaaggccauccucgucguccuccucuacaccuucgccaccgccaacgccgacacccucugcaucggcuaccacgccaacaacuccaccgacaccgucgacaccguccucgagaagaacgucaccgucacccacuccgucaaccuccucgaggacaagcacaacggcaagcucugcaagcuccgcggcgucgccccccuccaccucggcaagugcaacaucgccggcuggauccucggcaaccccgagugcgagucccucuccaccgccuccuccugguccuacaucgucgagaccuccuccuccgacaacggcaccugcuaccccggcgacuucaucgacuacgaggagcuccgcgagcagcucuccuccgucuccuccuucgagcgcuucgagaucuuccccaagaccuccuccuggcccaaccacgacuccaacaagggcgucaccgccgccugcccccacgccggcgccaaguccuucuacaagaaccucaucuggcucgucaagaagggcaacuccuaccccaagcucuccaaguccuacaucaacgacaagggcaaggagguccucguccucuggggcauccaccaccccuccaccuccgccgaccagcagucccucuaccagaacgccgacgccuacgucuucgucggcuccucccgcuacuccaagaaguucaagcccgagaucgccauccgccccaagguccgcgaccaggagggccgcaugaacuacuacuggacccucgucgagcccggcgacaagaucaccuucgaggccaccggcaaccucgucgucccccgcuacgccuucgccauggagcgcaacgccggcuccggcaucaucaucuccgacacccccguccacgacugcaacaccaccugccagacccccaagggcgccaucaacaccucccuccccuuccagaacauccaccccaucaccaucggcaagugccccaaguacgucaaguccaccaagcuccgccucgccaccggccuccgcaacguccccuccauccagucccgcggccucuucggcgccaucgccggcuucaucgagggcggcuggaccggcauggucgacggcugguacggcuaccaccaccagaacgagcagggcuccggcuacgccgccgaccucaaguccacccagaacgccaucgacgagaucaccaacaaggucaacuccgucaucgagaagaugaacacccaguucaccgccgucggcaaggaguucaaccaccucgagaagcgcaucgagaaccucaacaagaaggucgacgacggcuuccucgacaucuggaccuacaacgccgagcuccucguccuccucgagaacgagcgcacccucgacuaccacgacuccaacgucaagaaccucuacgagaagguccgcucccagcucaagaacaacgccaaggagaucggcaacggcugcuucgaguucuaccacaagugcgacaacaccugcauggaguccgucaagaacggcaccuacgacuaccccaaguacuccgaggaggccaagcucaaccgcgaggagaucgacggcgucaagcucgaguccacccgcaucuaccagauccucgccaucuacuccaccgucgccuccucccucguccucgucgucucccucggcgccaucuccuucuggaugugcuccaacggcucccuccgcugccgcaucugcaucuga

SEQ ID NO: 101816 - RNA, 1701 nt, Artificial Sequence
  derived and/or modified CDS sequence (opt2) from hemagglutinin__InfluenzaA__ADM33050
augaaggccauccucgucguccuccucuacaccuucgccaccgccaacgccgacacccucugcaucggcuaccacgccaacaacuccaccgacaccgucgacaccguccucgagaagaacgucaccgucacccacuccgucaaccuccucgaggacaagcacaacggcaagcucugcaagcuccgcggcgucgccccccuccaccucggcaagugcaacaucgccggcuggauccucggcaaccccgagugcgagucccucuccaccgccuccuccugguccuacaucgucgagaccuccuccuccgacaacggcaccugcuaccccggcgacuucaucgacuacgaggagcuccgcgagcagcucuccuccgucuccuccuucgagcgcuucgagaucuuccccaagaccuccuccuggcccaaccacgacuccaacaagggcgucaccgccgccugcccccacgccggcgccaaguccuucuacaagaaccucaucuggcucgucaagaagggcaacuccuaccccaagcucaacaaguccuacaucaacgacaagggcaaggagguccucguccucuggggcauccaccaccccuccaccuccgccgaccagcagucccucuaccagaacgccgacgccuacgucuucgucggcaccucccgcuacuccaagaaguucaagcccgagaucgccauccgccccaagguccgcgaccaggagggccgcaugaacuacuacuggacccucgucgagcccggcgacaagaucaccuucgaggccaccggcaaccuccucgucccccgcuacgccuucgccauggagcgcaacgccggcuccggcaucaucaucuccgacacccccguccacgacugcaacaccaccugccagacccccaagggcgccaucaacaccucccuccccuuccagaacauccaccccaucaccaucggcaagugccccaaguacgucaaguccaccaagcuccgccucgccaccggccuccgcaacguccccuccauccagucccgcggccucuucggcgccaucgccggcuucaucgagggcggcuggaccggcauggucgacggcugguacggcuaccaccaccagaacgagcagggcuccggcuacgccgccgaccucaaguccacccagaacgccaucgacgagaucaccaacaaggucaacuccgucaucgagaagaugaacacccaguucaccgccgucggcaaggaguucaaccaccucgagaagcgcaucgagaaccucaacaagaaggucgacgacggcuuccucgacaucuggaccuacaacgccgagcuccucguccuccucgagaacgagcgcacccucgacuaccacgacuccaacgucaagaaccucuacgagaagguccgcucccagcucaagaacaacgccaaggagaucggcaacggcugcuucgaguucuaccacaagugcgacaacaccugcauggaguccgucaagaacggcaccuacgacuaccccaaguacuccgaggaggccaagcucaaccgcgaggagaucgacggcgucaagcucgaguccacccgcaucuaccagauccucgccaucuacuccaccgucgccuccucccucguccucgucgucucccucggcgccaucuccuucuggaugugcuccaacggcucccuccgcugccgcaucugcaucuga

SEQ ID NO: 101817 - RNA, 1701 nt, Artificial Sequence
  derived and/or modified CDS sequence (opt2) from hemagglutinin__InfluenzaA__ADM33069
augaaggccauccucgucguccuccucuacaccuucgccaccgccaacgccgacacccucugcaucggcuaccacgccaacaacuccaccgacaccgucgacaccguccucgagaagaacgucaccgucacccacuccgucaaccuccucgaggacaagcacaacggcaagcucugcaagcuccgcggcgucgccccccuccaccucggcaagugcaacaucgccggcuggauccucggcaaccccgagugcgagucccucuccaccgccuccuccugguccuacaucgucgagaccuccuccuccgacaacggcaccugcuaccccggcgacuucaucgacuacgaggagcuccgcgagcagcucuccuccgucuccuccuucgagcgcuucgagaucuuccccaagaccuccuccuggcccaaccacgacuccaacaagggcgucaccgccgccugcccccacgccggcgccaaguccuucuacaagaaccucaucuggcucgucaagaagggcaacuccuaccccaagcucuccaaguccuacaucaacgacaagggcaaggagguccucguccucuggggcauccaccaccccuccaccuccgccgaccagcagucccucuaccagaacgccgacgccuacgucuucgucggcaccucccgcuacuccaagaaguucaagcccgagaucgccauccgccccaagguccgcgaccaggagggccgcaugaacuacuacuggacccucgucgagcccggcgacaagaucaccuucgaggccaccggcaaccucgucgucccccgcuacgccuucgccauggagcgcaacgccggcuccggcaucaucaucuccgacacccccguccacgacugcaacaccaccugccagacccccgagggcgccaucaacaccucccuccccuuccagaacauccaccccaucaccaucggcaagugccccaaguacgucaaguccaccaagcuccgccucgccaccggccuccgcaacguccccuccauccagucccgcggccucuucggcgccaucgccggcuucaucgagggcggcuggaccggcauggucgacggcugguacggcuaccaccaccagaacgagcagggcuccggcuacgccgccgaccucaaguccacccagaacgccaucgacgagaucaccaacaaggucaacuccgucaucgagaagaugaacacccaguucaccgccgucggcaaggaguucaaccaccucgagaagcgcaucgagaaccucaacaagaaggucgacgacggcuuccucgacaucuggaccuacaacgccgagcuccucguccuccucgagaacgagcgcacccucgacuaccacgacuccaacgucaagaaccucuacgagaagguccgcucccagcucaagaacaacgccaaggagaucggcaacggcugcuucgaguucuaccacaagugcgacaacaccugcauggaguccgucaagaacggcaccuacgacuaccccaaguacuccgaggaggccaagcucaaccgcgaggagaucgacggcgucaagcucgaguccacccgcaucuaccagauccucgccaucuacuccaccgucgccuccucccucguccucgucgucucccucggcgccaucuccuucuggaugugcuccaacggcucccuccgcugccgcaucugcaucuga

SEQ ID NO: 101818 - RNA, 1701 nt, Artificial Sequence
  derived and/or modified CDS sequence (opt2) from hemagglutinin__InfluenzaA__ADM33079
augaaggccauccucgucguccuccucuacaccuucgccaccgccaacgccgacacccucugcaucggcuaccacgccaacaacuccaccgacaccgucgacaccguccucgagaagaacgucaccgucacccacuccgucaaccuccucgaggacaagcacaacggcaagcucugcaagcuccgcggcgucgccccccuccaccucggcaagugcaacaucgccggcuggauccucggcaaccccgagugcgagucccucuccaccgccuccuccugguccuacaucgucgagaccuccuccuccgacaacggcaccugcuaccccggcgacuucaucgacuacgaggagcuccgcgagcagcucuccuccgucuccuccuucgagcgcuucgagaucuuccccaagaccuccuccuggcccaaccacgacuccaacaagggcgucaccgccgccugcccccacgccggcgccaaguccuucuacaagaaccucaucuggcucgucaagaagggcaacuccuaccccaagcucuccaaguccuacaucaacgacaagggcaaggagguccucguccucuggggcauccaccaccccuccaccuccgccgaccagcagucccucuaccagaacgccgacgccuacgucuucgucggcaccucccgcuacuccaagaaguucaagcccgagaucgccauccgccccaagguccgcgaccaggagggccgcaugaacuacuacuggacccucgucgagcccggcgacaagaucaccuucgaggccaccggcaaccucgucgucccccgcuacgccuucgccauggagcgcaacgccggcuccggcaucaucaucuccgacacccccguccacgacugcaacaccaccugccagacccccaagggcgccaucaacaccucccuccccuuccagaacauccaccccaucaccaucggcaagugccccaaguacgucaaguccaccaagcuccgccucgccaccggccuccgcaacguccccuccauccagucccgcggccucuucggcgccaucgccggcuucaucgagggcggcuggaccggcauggucgacggcugguacggcuaccaccaccagaacgagcagggcuccggcuacgccgccgaccucaaguccacccagaacgccaucgacgagaucaccaacaaggucaacuccgucaucgagaagaugaacacccaguucaccgccgucggcaaggaguucaaccaccucgagaagcgcaucgagaaccucaacaagaaggucgacgacggcuuccucgacaucuggaccuacaacgccgagcuccucguccuccucgagaacgagcgcacccucgacuaccacgacuccaacgucaagaaccucuacgagaagguccgcucccagcucaagaacaacgccaaggagaucggcaacggcugcuucgaguucuaccacaagugcgacaacaccugcauggaguccgucaagaacggcaccuacgacuaccccaaguacuccgaggaggccaagcucaaccgcgaggagaucgacggcgucaagcucgaguccacccgcaucuaccagauccucgccaucuacuccaccgucgccuccucccucguccucgucgucucccucggcgccaucuccuucuggaugugcuccaacggcucccuccgcugccgcaucugcaucuga

SEQ ID NO: 101819 - RNA, 1701 nt, Artificial Sequence
  derived and/or modified CDS sequence (opt2) from hemagglutinin__InfluenzaA__ADM33099
augaaggccauccucgucguccuccucuacaccuucgccaccgccaacgccgacacccucugcaucggcuaccacgccaacaacuccaccgacaccgucgacaccguccucgagaagaacgucaccgucacccacuccgucaaccuccucgaggacaagcacaacggcaagcucugcaagcuccgcggcgucgccccccuccaccucggcaagugcaacaucgccggcuggauccucggcaaccccgagugcgagucccucuccaccgccuccuccugguccuacaucgucgagaccuccuccuccgacaacggcaccugcuaccccggcgacuucaucgacuacgaggagcuccgcgagcagcucuccuccgucuccuccuucgagcgcuucgagaucuuccccaagaccuccuccuggcccaaccacgacuccaacaagggcgucaccgccgccugcccccacgccggcgccaaguccuucuacaagaaccucaucuggcucgucaagaagggcaacuccuaccccaagcucuccaaguccuacaucaacgacaagggcaaggagguccucguccucuggggcauccaccaccccuccaccuccgccgaccagcagucccucuaccagaacgccgacgccuacgucuucgucggcaccucccgcuacuccaagaaguucaagcccgagaucgccauccgccccaagguccgcgaccaggagggccgcaugaacuacuacuggacccucgucgagcccggcgacaagaucaccuucgaggccaccggcaaccucauggucccccgcuacgccuucgccauggagcgcaacgccggcuccggcaucaucaucuccgacacccccguccacgacugcaacaccaccugccagacccccaagggcgccaucaacaccucccuccccuuccagaacauccaccccaucaccaucggcaagugccccaaguacgucaaguccaccaagcuccgccucgccaccggccuccgcaacguccccuccauccagucccgcggccucuucggcgccaucgccggcuucaucgagggcggcuggaccggcauggucgacggcugguacggcuaccaccaccagaacgagcagggcuccggcuacgccgccgaccucaaguccacccagaacgccaucgacgagaucaccaacaaggucaacuccgucaucgagaagaugaacacccaguucaccgccgucggcaaggaguucaaccaccucgagaagcgcaucgagaaccucaacaagaaggucgacgacggcuuccucgacaucuggaccuacaacgccgagcuccucguccuccucgagaacgagcgcacccucgacuaccacgacuccaacgucaagaaccucuacgagaagguccgcucccagcucaagaacaacgccaaggagaucggcaacggcugcuucgaguucuaccacaagugcgacaacaccugcauggaguccgucaagaacggcaccuacgacuaccccaaguacuccgaggaggccaagcucaaccgcgaggagaucgacggcgucaagcucgaguccacccgcaucuaccagauccucgccaucuacuccaccgucgccuccucccucguccucgucgucucccucggcgccaucuccuucuggaugugcuccaacggcucccuccgcugccgcaucugcaucuga

SEQ ID NO: 101820 - RNA, 1701 nt, Artificial Sequence; identical to SEQ ID NO: 101819
  derived and/or modified CDS sequence (opt2) from hemagglutinin__InfluenzaA__ADM33109

SEQ ID NO: 101821 - RNA, 1701 nt, Artificial Sequence
  derived and/or modified CDS sequence (opt2) from hemagglutinin__InfluenzaA__ADM33128
augaaggccauccucgucguccuccucuacaccuucgccaccgccaacgccgacacccucugcaucggcuaccacgccaacaacuccaccgacaccgucgacaccguccucgagaagaacgucaccgucacccacuccgucaaccuccucgaggacaagcacaacggcaagcucugcaagcuccgcggcgucgccccccuccaccucggcaagugcaacaucgccggcuggauccucggcaaccccgagugcgagucccucuccaccgccuccuccugguccuacaucgucgagaccuccuccuccgacaacggcaccugcuaccccggcgacuucaucgacuacgaggagcuccgcgagcagcucuccuccgucuccuccuucgagcgcuucgagaucuuccccaagaccuccuccuggcccaaccacgacuccaacaagggcgucaccgccgccugcccccacgccggcgccaaguccuucuacaagaaccucaucuggcucgucaagaagggcaacuccuaccccaagcucuccaaguccuacaucaacgacaagggcaaggagguccucguccucuggggcauccaccaccccuccaccuccgccgaccagcagucccucuaccagaacgccgacgccuacgucuucgucggcaccucccgcuacuccaagaaguucaagcccgagaucgccauccgccccaagguccgcgagcaggagggccgcaugaacuacuacuggacccucgucgagcccggcgacaagaucaccuucgaggccaccggcaaccucgucgucccccgcuacgccuucgccauggagcgcaacgccggcuccggcaucaucaucuccgacacccccguccacgacugcaacaccaccugccagacccccaagggcgccaucaacaccucccuccccuuccagaacauccaccccaucaccaucggcaagugccccaaguacgucaaguccaccaagcuccgccucgccaccggccuccgcaacguccccuccauccagucccgcggccucuucggcgccaucgccggcuucaucgagggcggcuggaccggcauggucgacggcugguacggcuaccaccaccagaacgagcagggcuccggcuacgccgccgaccucaaguccacccagaacgccaucgacgagaucaccaacaaggucaacuccgucaucgagaagaugaacacccaguucaccgccgucggcaaggaguucaaccaccucgagaagcgcaucgagaaccucaacaagaaggucgacgacggcuuccucgacaucuggaccuacaacgccgagcuccucguccuccucgagaacgagcgcacccucgacuaccacgacuccaacgucaagaaccucuacgagaagguccgcucccagcucaagaacaacgccaaggagaucggcaacggcugcuucgaguucuaccacaagugcgacaacaccugcauggaguccgucaagaacggcaccuacgacuaccccaaguacuccgaggaggccaagcucaaccgcgaggagaucgacggcgucaagcucgaguccacccgcaucuaccagauccucgccaucuacuccaccgucgccuccucccucguccucgucgucucccucggcgccaucuccuucuggaugugcuccaacggcucccuccgcugccgcaucugcaucuga

SEQ ID NO: 101822 - RNA, 1701 nt, Artificial Sequence; identical to SEQ ID NO: 101821
  derived and/or modified CDS sequence (opt2) from hemagglutinin__InfluenzaA__ADM33137

SEQ ID NO: 101823 - RNA, 1701 nt, Artificial Sequence; identical to SEQ ID NO: 101821
  derived and/or modified CDS sequence (opt2) from hemagglutinin__InfluenzaA__ADM33147

SEQ ID NO: 101824 - RNA, 1701 nt, Artificial Sequence; identical to SEQ ID NO: 101821
  derived and/or modified CDS sequence (opt2) from hemagglutinin__InfluenzaA__ADM33157

SEQ ID NO: 101825 - RNA, 1701 nt, Artificial Sequence
  derived and/or modified CDS sequence (opt2) from hemagglutinin__InfluenzaA__ADM33167
augaaggccauccucgucguccuccucuacaccuucgccaccgccaacgccgacacccucugcaucggcuaccacgccaacaacuccaccgacaccgucgacaccguccucgagaagaacgucaccgucacccacuccgucaacauccucgaggacaagcacaacggcaagcucugcaagcuccgcggcgucgccccccuccaccucggcaagugcaacaucgccggcuggauccucggcaaccccgagugcgagucccucuccaccgccuccuccugguccuacaucgucgagaccuccuccuccgacaacggcaccugcuaccccggcgacuucaucgacuacgaggagcuccgcgagcagcucuccuccgucuccuccuucgagcgcuucgagaucuuccccaagaccuccuccuggcccaaccacgacuccaacaagggcgucaccgccgccugcccccacgccggcgccaaguccuucuacaagaaccucaucuggcucgucaagaagggcaacuccuaccccaagcucuccaaguccuacaucaacgacaagggcaaggagguccucguccucuggggcauccaccaccccuccaccuccgccgaccagcagucccucuaccagaacgccgacgccuacgucuucgucggcaccucccgcuacuccaagaaguucaagcccgagaucgccauccgccccaagguccgcgaccaggagggccgcaugaacuacuacuggacccucgucgagcccggcgacaagaucaccuucgaggccaccggcaaccucgucgucccccgcuacgccuucgccauggagcgcaacgccggcuccggcaucaucaucuccgacacccccguccacgacugcaacaccaccugccagacccccaagggcgccaucaacaccucccuccccuuccagaacauccaccccaucaccaucggcaagugccccaaguacgucaaguccaccaagcuccgccucgccaccggccuccgcaacguccccuccauccagucccgcggccucuucggcgccaucgccggcuucaucgagggcggcuggaccggcauggucgacggcugguacggcuaccaccaccagaacgagcagggcuccggcuacgccgccgaccucaaguccacccagaacgccaucgacgagaucaccaacaaggucaacuccgucaucgagaagaugaacacccaguucaccgccgucggcaaggaguucaaccaccucgagaagcgcaucgagaaccucaacaagaaggucgacgacggcuuccucgacaucuggaccuacaacgccgagcuccucguccuccucgagaacgagcgcacccucgacuaccacgacuccaacgucaagaaccucuacgagaagguccgcucccagcucaagaacaacgccaaggagaucggcaacggcugcuucgaguucuaccacaagugcgacaacaccugcauggaguccgucaagaacggcaccuacgacuaccccaaguacuccgaggaggccaagcucaaccgcgagaagaucgacggcgucaagcucgaguccacccgcaucuaccagauccucgccaucuacuccaccgucgccuccucccucguccucgucgucucccucggcgccaucuccuucuggaugugcuccaacggcucccuccgcugccgcaucugcaucuga

SEQ ID NO: 101826 - RNA, 1701 nt, Artificial Sequence; identical to SEQ ID NO: 100892
  derived and/or modified CDS sequence (opt2) from hemagglutinin__InfluenzaA__ADM33177

SEQ ID NO: 101827 - RNA, 1701 nt, Artificial Sequence; identical to SEQ ID NO: 101821
  derived and/or modified CDS sequence (opt2) from hemagglutinin__InfluenzaA__ADM33186

SEQ ID NO: 101828 - RNA, 1701 nt, Artificial Sequence; identical to SEQ ID NO: 101821
  derived and/or modified CDS sequence (opt2) from hemagglutinin__InfluenzaA__ADM33195

SEQ ID NO: 101829 - RNA, 1701 nt, Artificial Sequence; identical to SEQ ID NO: 101818
  derived and/or modified CDS sequence (opt2) from hemagglutinin__InfluenzaA__ADM33204

SEQ ID NO: 101830 - RNA, 1701 nt, Artificial Sequence
  derived and/or modified CDS sequence (opt2) from hemagglutinin__InfluenzaA__ADM33222
auggaggccauccucgucguccuccucuacaccuucgccaccgccaacgccgacacccucugcaucggcuaccacgccaacaacuccaccgacaccgucgacaccguccucgagaagaacgucaccgucacccacuccgucaaccuccucgaggacaagcacaacggcaagcucugcaagcuccgcggcgucgccccccuccaccucggcaagugcaacaucgccggcuggauccucggcaaccccgagugcgagucccucuccaccgccuccuccugguccuacaucgucgagaccuccuccuccgacaacggcaccugcuaccccggcgacuucaucgacuacgaggagcuccgcgagcagcucuccuccgucuccuccuucgagcgcuucgagaucuuccccaagaccuccuccuggcccaaccacgacuccaacaagggcgucaccgccgccugcccccacgccggcgccaaguccuucuacaagaaccucaucuggcucgucaagaagggcaacuccuaccccaagcucuccaaguccuacaucaacgacaagggcaaggagguccucguccucuggggcauccaccaccccuccaccuccgccgaccagcagucccucuaccagaacgccgacgccuacgucuucgucggcuccucccgcuacuccaagaaguucaagcccgagaucgccauccgccccaagguccgcgaccaggagggccgcaugaacuacuacuggacccucgucgagcccggcgacaagaucaccuucgaggccaccggcaaccucgucgucccccgcuacgccuucgccauggagcgcaacgccggcuccggcaucaucaucuccgacacccccguccacgacugcaacaccaccugccagacccccaagggcgccaucaacaccucccuccccuuccacaacauccaccccaucaccaucggcaagugccccaaguacgucaaguccaccaagcuccgccucgccaccggccuccgcaacguccccuccauccagucccgcggccucuucggcgccaucgccggcuucaucgagggcggcuggaccggcauggucgacggcugguacggcuaccaccaccagaacgagcagggcuccggcuacgccgccgaccucaaguccacccagaacgccaucgacgagaucaccaacaaggucaacuccgucaucgagaagaugaacacccaguucaccgccgucggcaaggaguucaaccaccucgagaagcgcaucgagaaccucaacaagaaggucgacgacggcuuccucgacaucuggaccuacaacgccgagcuccucguccuccucgagaacgagcgcacccucgacuaccacgacuccaacgucaagaaccucuacgagaagguccgcaaccagcucaagaacaacgccaaggagaucggcaacggcugcuucgaguucuaccacaagugcgacaacaccugcauggaguccgucaagaacggcaccuacgacuaccccaaguacuccgaggaggccaagcucaaccgcgaggagaucgacggcgucaagcucgaguccacccgcaucuaccagauccucgccaucuacuccaccgucgccuccucccucguccucgucgucucccucggcgccaucuccuucuggaugugcuccaacggcucccuccgcugccgcaucugcaucuga

SEQ ID NO: 101831 - RNA, 1701 nt, Artificial Sequence
  derived and/or modified CDS sequence (opt2) from hemagglutinin__InfluenzaA__ADM33232
auggaggccauccucgucguccuccucuacaccuucgccaccgccaacgccgacacccucugcaucggcuaccacgccaacaacuccaccgacaccgucgacaccguccucgagaagaacgucaccgucacccacuccgucaaccuccucgaggacaagcacaacggcaagcucugcaagcuccgcggcgucgccccccuccaccucggcaagugcaacaucgccggcuggauccucggcaaccccgagugcgagucccucuccaccgccuccuccugguccuacaucgucgagaccuccuccuccgacaacggcaccugcuaccccggcgacuucaucgacuacgaggagcuccgcgagcagcucuccuccgucuccuccuucgagcgcuucgagaucuuccccaagaccuccuccuggcccaaccacgacuccaacaagggcgucaccgccgccugcccccacgccggcgccaaguccuucuacaagaaccucaucuggcucgucaagaagggcaacuccuaccccaagcucuccaaguccuacaucaacgacaagggcaaggagguccucguccucuggggcauccaccaccccuccaccuccgccgaccagcagucccucuaccagaacgccgacgccuacgucuucgucggcuccucccgcuacuccaagaaguucaagcccgagaucgccauccgccccaagguccgcgaccaggagggccgcaugaacuacuacuggacccucgucgagcccggcgacaagaucaccuucgaggccaccggcaaccucgucgucccccgcuacgccuucgccauggagcgcaacgccggcuccggcaucaucaucuccgacacccccguccacgacugcaacaccaccugccagacccccaagggcgccaucaacaccucccuccccuuccacaacauccaccccaucaccaucggcaagugccccaaguacgucaaguccaccaagcuccgccucgccaccggccuccgcaacguccccuccauccagucccgcggccucuucggcgccaucgccggcuucaucgagggcggcuggaccggcauggucgacggcugguacggcuaccaccaccagaacgagcagggcuccggcuacgccgccgaccucaaguccacccagaacgccaucgacgagaucaccaacaaggucaacuccgucaucgagaagaccaacacccaguucaccgccgucggcaaggaguucaaccaccucgagaagcgcaucgagaaccucaacaagaaggucgacgacggcuuccucgacaucuggaccuacaacgccgagcuccucguccuccucgagaacgagcgcacccucgacuaccacgacuccaacgucaagaaccucuacgagaagguccgcaaccagcucaagaacaacgccaaggagaucggcaacggcugcuucgaguucuaccacaagugcgacaacaccugcauggaguccgucaagaacggcaccuacgacuaccccaaguacuccgaggaggccaagcucaaccgcgaggagaucgacggcgucaagcucgaguccacccgcaucuaccagauccucgccaucuacuccaccgucgccuccucccucguccucgucgucucccucggcgccaucuccuucuggaugugcuccaacggcucccuccagugccgcaucugcaucuga

SEQ ID NO: 101832 - RNA, 1701 nt, Artificial Sequence
  derived and/or modified CDS sequence (opt2) from hemagglutinin__InfluenzaA__ADM33241
augaaggccauccucgucguccuccucuacaccuucgccaccgccaacgccgacacccucugcaucggcuaccacgccaacaacuccaccgacaccgucgacaccguccucgagaagaacgucaccgucacccacuccgucaacauccucgaggacaagcacaacggcaagcucugcaagcuccgcggcgucgccccccuccaccucggcaagugcaacaucgccggcuggauccucggcaaccccgagugcgagucccucuccaccgccuccuccugguccuacaucgucgagaccuccuccuccgacaacggcaccugcuaccccggcgacuucaucgacuacgaggagcuccgcgagcagcucuccuccgucuccuccuucgagcgcuucgagaucuuccccaagaccuccuccuggcccaaccacgacuccaacaagggcgucaccgccgccugcccccacgccggcgccaaguccuucuacaagaaccucaucuggcucgucaagaaggagaacuccuaccccaagcucuccaaguccuacaucaacgacaagggcaaggagguccucguccucuggggcauccaccaccccuccaccuccgccgaccagcagucccucuaccagaacgccgacgccuacgucuucgucggcuccucccgcuacuccaagaaguucaagcccgagaucaccauccgccccaagguccgcgaccaggagggccgcaugaacuacuacuggacccucgucgagcccggcgacaagaucaccuucgaggccaccggcaaccucgucgucccccgcuacgccuucgccauggagcgcaacgccggcuccggcaucaucaucuccgacacccccguccacgacugcaacaccaccugccagacccccaagggcgccaucaacaccucccuccccuuccagaacauccaccccaucaccaucggcaagugccccaaguacgucaaguccaccaagcuccgccucgccaccggccuccgcaacguccccuccauccagucccgcggccucuucggcgccaucgccggcuucaucgagggcggcuggaccggcauggucgacggcugguacggcuaccaccaccagaacgagcagggcuccggcuacgccgccgaccucaaguccacccagaacgccaucgacgagaucaccaacaaggucaacuccgucaucgagaagaugaacacccaguucaccgccgucggcaaggaguucaaccaccucgagaagcgcaucgagaaccucaacaagaaggucgacgacggcuuccucgacaucuggaccuacaacgccgagcuccucguccuccucgagaacgagcgcacccucgacuaccacgacuccaacgucaagaaccucuacgagaagguccgcucccagcucaagaacaacgccaaggagaucggcaacggcugcuucgaguucuaccacaagugcgacaacaccugcauggaguccgucaagaacggcaccuacgacuaccccaaguacuccgaggaggccaagcucaaccgcgaggagaucgacggcgucaagcucgaguccacccgcaucuaccagauccucgccaucuacuccaccgucgccuccucccucguccucgucgucucccucggcgccaucuccuucuggaugugcuccaacggcucccuccgcugccgcaucugcaucuga

SEQ ID NO: 101833 - RNA, 1701 nt, Artificial Sequence; identical to SEQ ID NO: 101830
  derived and/or modified CDS sequence (opt2) from hemagglutinin__InfluenzaA__ADM33251

SEQ ID NO: 101834 - RNA, 1701 nt, Artificial Sequence
  derived and/or modified CDS sequence (opt2) from hemagglutinin__InfluenzaA__ADM33260
augaaggccauccucgucguccuccucuacaccuucgccaccgccaacgccgacacccucugcaucggcuaccacgccaacaacuccaccgacaccgucgacaccguccucgagaagaacgucaccgucacccacuccgucaacauccucgaggacaagcacaacggcaagcucugcaagcuccgcggcgucgccccccuccaccucggcaagugcaacaucgccggcuggauccucggcaaccccgagugcgagucccucuccaccgccuccuccugguccuacaucgucgagaccuccuccuccgacaacggcaccugcuaccccggcgacuucaucgacuacgaggagcuccgcgagcagcucuccuccgucuccuccuucgagcgcuucgagaucuuccccaagaccuccuccuggcccaaccacgacuccaacaagggcgucaccgccgccugcccccacgccggcgccaaguccuucuacaagaaccucaucuggcucgucaagaagggcgacuccuaccccaagcucuccaaguccuacaucaacgacaagggcaaggagguccucguccucuggggcauccaccaccccuccaccuccgccgaccagcagucccucuaccagaacgccgacgccuacgucuucgucggcuccucccgcuacuccaagaaguucaagcccgagaucgccauccgccccaagguccgcgaccaggagggccgcaugaacuacuacuggacccucgucgagcccggcgacaagaucaccuucgaggccaccggcaaccucgucgucccccgcuacgccuucgccauggagcgcaacgccggcuccggcaucaucaucuccgacacccccguccacgacugcaacaccaccugccagacccccaagggcgccaucaacaccucccuccccuuccagaacauccaccccaucaccaucggcaagugccccaaguacgucaaguccaccaagcuccgccucgccaccggccuccgcaacguccccuccauccagucccgcggccucuucggcgccaucgccggcuucaucgagggcggcuggaccggcauggucgacggcugguacggcuaccaccaccagaacgagcagggcuccggcuacgccgccgaccucaaguccacccagaacgccaucgacgagaucaccaacaaggucaacuccgucaucgagaagaugaacacccaguucaccgccgucggcaaggaguucaaccaccucgagaagcgcaucgagaaccucaacaagaaggucgacgacggcuuccucgacaucuggaccuacaacaccgagcuccucguccuccucgagaacgagcgcacccucgacuaccacgacuccaacgucaagaaccucuacgagaagguccgcucccagcucaagaacaacgccaaggagaucggcaacggcugcuucgaguucuaccacaagugcgacaacaccugcauggaguccgucaagaacggcaccuacgacuaccccaaguacuccgaggaggccaagcucaaccgcgaggagaucgacggcgucaagcucgaguccacccgcaucuaccagauccucgccaucuacuccaccgucgccuccucccucguccucgucgucucccucggcgccaucuccuucuggaugugcuccaacggcucccuccgcugccgcaucugcaucuga

SEQ ID NO: 101835 - RNA, 1701 nt, Artificial Sequence
  derived and/or modified CDS sequence (opt2) from hemagglutinin__InfluenzaA__ADM33280
augaaggccauccucgucguccuccucuacaccuucgccaccgccaacgccgacacccucugcaucggcuaccacgccaacaacuccaccgacaccgucgacaccguccucgagaagaacgucaccgucacccacuccgucaacauccucgaggacaagcacaacggcaagcucugcaagcuccgcggcgucgccccccuccaccucggcaagugcaacaucgccggcuggauccucggcaaccccgagugcgagucccucuccaccgucuccuccugguccuacaucgucgagaccuccuccuccgacaacggcaccugcuaccccggcgacuucaucgacuacgaggagcuccgcgagcagcucuccuccgucuccuccuucgagcgcuucgagaucuuccccaagaccuccuccuggcccaaccacgacuccaacaagggcgucaccgccgccugcccccacgccggcgccaaguccuucuacaagaaccucaucuggcucgucaagaagggcaacuccuaccccaagcucuccaaguccuacaucaacgacaagggcaaggagguccucguccucuggggcauccaccaccccuccaccuccgccgaccagcagucccucuaccagaacgccgacgccuacgucuucgucggcuccucccgcuacuccaagaaguucaagcccgagaucgccauccgccccaagguccgcgaccaggagggccgcaugaacuacuacuggacccucgucgagcccggcgacaagaucaccuucgaggccaccggcaaccucgucgucccccgcuacgccuucgccauggagcgcaacgccggcuccggcaucaucaucuccgacacccccguccacgacugcaacaccaccugccagaccccccgcggcgccaucaacaccucccuccccuuccagaacauccaccccaucaccaucggcaagugccccaaguacgucaaguccaccaagcuccgccucgccaccggccuccgcaacguccccuccauccagucccgcggccucuucggcgccaucgccggcuucaucgagggcggcuggaccggcauggucgacggcugguacggcuaccaccaccagaacgagcagggcuccggcuacgccgccgaccucaaguccacccagaacgccaucgacgagaucaccaacaaggucaacuccgucaucgagaagaugaacacccaguucaccgccgucggcaaggaguucaaccaccucgagaagcgcaucgagaaccucaacaagaaggucgacgacggcuuccucgacaucuggaccuacaacgccgagcuccucguccuccucgagaacgagcgcacccucgacuaccacgacuccaacgucaagaaccucuacgagaagguccgcucccagcucaagaacaacgccaaggagaucggcaacggcugcuucgaguucuaccacaagugcgacaacaccugcauggaguccgucaagaacggcaccuacgacuaccccaaguacuccgaggaggccaagcucaaccgcgaggagaucgacggcgucaagcucgaguccacccgcaucuaccagauccucgccaucuacuccaccgucgccuccucccucguccucgucgucucccucggcgccaucuccuucuggaugugcuccaacggcucccuccagugccgcaucugcaucuga

SEQ ID NO: 101836 - RNA, 1701 nt, Artificial Sequence; identical to SEQ ID NO: 99152
  derived and/or modified CDS sequence (opt2) from hemagglutinin__InfluenzaA__ADM33290

SEQ ID NO: 101837 - RNA, 1701 nt, Artificial Sequence; identical to SEQ ID NO: 98705
  derived and/or modified CDS sequence (opt2) from hemagglutinin__InfluenzaA__ADM33300

SEQ ID NO: 101838 - RNA, 1701 nt, Artificial Sequence; identical to SEQ ID NO: 98692
  derived and/or modified CDS sequence (opt2) from hemagglutinin__InfluenzaA__ADM33310

SEQ ID NO: 101839 - RNA, 1701 nt, Artificial Sequence
  derived and/or modified CDS sequence (opt2) from hemagglutinin__InfluenzaA__ADM33320
augaaggccauccucgucgucaugcucuacaccuucgccaccgccaacgccgacacccucugcaucggcuaccacgccaacaacuccaccgacaccgucgacaccguccucgagaagaacgucaccgucacccacuccgucaaccuccucgaggacaagcacaacggcaagcucugcaagcuccgcggcgucgccccccuccaccucggcaagugcaacaucgccggcuggauccucggcaaccccgagugcgagucccucuccaccgccuccuccugguccuacaucgucgagaccuucuccuccgacaacggcaccugcuaccccggcgacuucaucgacuacgaggagcuccgcgagcagcucuccuccgucuccuccuucgagcgcuucgagaucuuccccaagaccuccuccuggcccaaccacgacuccaacaagggcgucaccgccgccugcccccacgccggcgccaaguccuucuacaagaaccucaucuggcucgucaagaagggcaacuccuaccccaagcucuccaaguccuacaucaacgacaagggcaaggagguccucguccucuggggcauccaccaccccuccaccuccgccgaccagcagucccucuaccagaacgccgacgccuacgucuucgucggcuccucccgcuacuccaagaaguucaagcccgagaucgccauccgccccaagguccgcgaccaggagggccgcaugaacuacuacuggacccucgucgagcccggcgacaagaucaccuucgaggccaccggcaaccucgucgucccccgcuacgccuucgccauggagcgcaacgccggcuccggcaucaucaucuccgacacccccguccacgacugcaacaccaccugccagacccccaagggcgccaucaacaccucccuccccuuccagaacauccaccccaucaccaucggcaagugccccaaguacgucaaguccaccaagcuccgccucgccaccggccuccgcaacguccccuccauccagucccgcggccucuucggcgccaucgccggcuucaucgagggcggcuggaccggcauggucgacggcugguacggcuaccaccaccagaacgagcagggcuccggcuacgccgccgaccucaaguccacccagaacgccaucgacgagaucaccaacaaggucaacuccgucaucgagaagaugaacacccaguucaccgccgucggcaaggaguucaaccaccucgagaagcgcaucgagaaccucaacaagaaggucgacgacggcuuccucgacaucuggaccuacaacgccgagcuccucguccuccucgagaacgagcgcacccucgacuaccacgacuccaacgucaagaaccucuacgagaagguccgcucccagcucaagaacaacgccaaggagaucggcaacggcugcuucgaguucuaccacaagugcgacaacaccugcauggaguccgucaagaacggcaccuacgacuaccccaaguacuccgaggaggccaagcucaaccgcgaggagaucgacggcgucaagcucgaguccacccgcaucuaccagauccucgccaucuacuccaccgucgccuccucccucguccucgucgucucccucggcgccaucuccuucuggaugugcuccaacggcucccuccagugccgcaucugcaucuga

SEQ ID NO: 101840 - RNA, 1701 nt, Artificial Sequence; identical to SEQ ID NO: 98731
  derived and/or modified CDS sequence (opt2) from hemagglutinin__InfluenzaA__ADM33340

SEQ ID NO: 101841 - RNA, 1701 nt, Artificial Sequence
  derived and/or modified CDS sequence (opt2) from hemagglutinin__InfluenzaA__ADM33355
augaaggccauccucgucgucaugcucuacaccuucgccaccgccaacgccgacacccucugcaucggcuaccacgccaacaacuccaccgacaccgucgacaccguccucgagaagaacgucaccgucacccacuccgucaaccuccucgaggacaagcacaacggcaagcucugcaagcuccgcggcgucgccccccuccaccucggcaagugcaacaucgccggcuggauccucggcaaccccgagugcgagucccucuccaccgccuccuccugguccuacaucgucgagaccuccuccuccgacaacggcaccugcuaccccggcgacuucaucgacuacgaggagcuccgcgagcagcucuccuccgucuccuccuucgagcgcuucgagaucuuccccaagaccuccuccuggcccaaccacgacuccaacaagggcgucaccgccgccugcccccacgccggcgccaaguccuucuacaagaaccucaucuggcucgucaagaagggcaacuccuaccccaagcucuccaaguccuacaucaacgacaagggcaaggagguccucguccucuggggcauccaccaccccuccaccuccgccgaccagcagucccucuaccagaacgccgacgccuacgucuucgucggcuccucccgcuacuccaagaaguucaagcccgagaucgccauccgccccaagguccgcgaccaggagggccgcaugaacuacuacuggacccucgucgagcccggcgacaagaucaccuucgaggccaccggcaaccucgucgucccccgcuacgccuucgccauggagcgcaacgccggcuccggcaucaucaucuccgacacccccguccacaacugcaacaccaccugccagacccccaagggcgccaucaacaccucccuccccuuccagaacauccaccccaucaccaucggcaagugccccaaguacgucaaguccaccaagcuccgccucgccaccggccuccgcaacguccccuccauccagucccgcggccucuucggcgccaucgccggcuucaucgagggcggcuggaccggcauggucgacggcugguacggcuaccaccaccagaacgagcagggcuccggcuacgccgccgaccucaaguccacccagaacgccaucgacgagaucaccaacaaggucaacuccgucaucgagaagaugaacacccaguucaccgccgucggcaaggaguucaaccaccucgagaagcgcaucgagaaccucaacaagaaggucgacgacggcuuccucgacaucuggaccuacaacgccgagcuccucguccuccucgagaacgagcgcacccucgacuaccacgacuccaacgucaagaaccucuacgagaagguccgcucccagcucaagaacaacgccaaggagaucggcaacggcugcuucgaguucuaccacaagugcgacaacaccugcauggaguccgucaagaacggcaccuacgacuaccccaaguacuccgaggaggccaagcucaaccgcgaggagaucgacggcgucaagcucgaguccacccgcaucuaccagauccucgccaucuacuccaccgucgccuccucccucguccucgucgucucccucggcgccaucuccuucuggaugugcuccaacggcucccuccagugccgcaucugcaucuga

SEQ ID NO: 101842 - RNA, 1701 nt, Artificial Sequence; identical to SEQ ID NO: 101841
  derived and/or modified CDS sequence (opt2) from hemagglutinin__InfluenzaA__ADM33365

SEQ ID NO: 101843 - RNA, 1701 nt, Artificial Sequence; identical to SEQ ID NO: 98731
  derived and/or modified CDS sequence (opt2) from hemagglutinin__InfluenzaA__ADM33375

SEQ ID NO: 101844 - RNA, 1701 nt, Artificial Sequence
  derived and/or modified CDS sequence (opt2) from hemagglutinin__InfluenzaA__ADM33385
augaaggccauccucgucgucaugcucuacaccuucgccaccgccaacgccgacacccucugcaucggcuaccacgccaacaacuccaccgacaccgucgacaccguccucgagaagaacgucaccgucacccacuccgucaaccuccucgaggacaagcacaacggcaagcucugcaagcuccgcggcgucgccccccuccaccucggcaagugcaacaucgccggcuggauccucggcaaccccgagugcgagucccucuccaccgccuccuccugguccuacaucgucgagaccuccuccuccgacaacggcaccugcuaccccggcgacuucaucgacuacgaggagcuccgcgagcagcucuccuccgucuccuccuucgagcgcuucgagaucuuccccaagaccuccuccuggcccaaccacgacuccaacaagggcgucaccgccgccugcccccacgccggcgccaaguccuucuacaagaaccucaucuggcucgucaagaagggcaacuccuaccccaagcucuccaaguccuacaucaacgacaagggcaaggagguccucguccucuggggcauccaccaccccuccaccuccgccgaccagcagucccucuaccagaacgccgacgccuacgucuucgucggcuccucccgcuacuccaagaaguucaagcccgagaucgccauccgccccaagguccgcgaccaggagggccgcaugaacuacuacuggacccucgucgagcccggcgacaagaucaccuucgaggccaccggcaaccucgucgucccccgcuacgccuucgccauggagcgcaacgccggcuccggcaucaucaucuccgacacccccguccacgacugcaacaccaccugccagaccuccaagggcgccaucaacaccucccuccccuuccagaacauccaccccaucaccaucggcaagugccccaaguacgucaaguccaccaagcuccgccucgccaccggccuccgcaacguccccuccauccagucccgcggccucuucggcgccaucgccggcuucaucgagggcggcuggaccggcauggucgacggcugguacggcuaccaccaccagaacgagcagggcuccggcuacgccgccgaccucaaguccacccagaacgccaucgacgagaucaccaacaaggucaacuccgucaucgagaagaugaacacccaguucaccgccgucggcaaggaguucaaccaccucgagaagcgcaucgagaaccucaacaagaaggucgacgacggcuuccucgacaucuggaccuacaacgccgagcuccucguccuccucgagaacgagcgcacccucgacuaccacgacuccaacgucaagaaccucuacgagaagguccgcucccagcucaagaacaacgccaaggagaucggcaacggcugcuucgaguucuaccacaagugcgacaacaccugcauggaguccgucaagaacggcaccuacgacuaccccaaguacuccgaggaggccaagcucaaccgcgaggagaucgacggcgucaagcucgaguccacccgcaucuaccagauccucgccaucuacuccaccgucgccuccucccucguccucgucgucucccucggcgccaucuccuucuggaugugcuccaacggcucccuccagugccgcaucugcaucuga

SEQ ID NO: 101845 - RNA, 1701 nt, Artificial Sequence; identical to SEQ ID NO: 99152
  derived and/or modified CDS sequence (opt2) from hemagglutinin__InfluenzaA__ADM33395

SEQ ID NO: 101846 - RNA, 1701 nt, Artificial Sequence; identical to SEQ ID NO: 99152
  derived and/or modified CDS sequence (opt2) from hemagglutinin__InfluenzaA__ADM33405

SEQ ID NO: 101847 - RNA, 1701 nt, Artificial Sequence; identical to SEQ ID NO: 101841
  derived and/or modified CDS sequence (opt2) from hemagglutinin__InfluenzaA__ADM33415

SEQ ID NO: 101848 - RNA, 1701 nt, Artificial Sequence; identical to SEQ ID NO: 99548
  derived and/or modified CDS sequence (opt2) from hemagglutinin__InfluenzaA__ADM33425

SEQ ID NO: 101849 - RNA, 1701 nt, Artificial Sequence
  derived and/or modified CDS sequence (opt2) from hemagglutinin__InfluenzaA__ADM34007
augaaggccauccucgucguccuccucuacaccuucgccaccgccaacgccgacacccucugcaucggcuaccacgccaacaacuccaccgacaccgucgacaccguccucgagaagaacgucaccgucacccacuccgucaaccuccucgaggacaagcacaacggcaagcucugcaagcuccgcggcgucgccccccuccaccucggcaagugcaacaucgccggcuggauccucggcaaccccgagugcgagucccucuccaccgccuccuccugguccuacaucgucgagaccuccuccuccgacaacggcaccugcuaccccggcgacuucaucgacuacgaggagcuccgcgagcagcucuccuccgucuccuccuucgagcgcuucgagaucuuccccaagaccuccuccuggcccaaccacgacuccaacaagggcgucaccgccgccugcccccacgccggcgccaaguccuucuacaagaaccucaucuggcucgucaagaagggcaacuccuaccccaagcucuccaaguccuacaucaacgacaagggcaaggagguccucguccucuggggcauccaccaccccuccaccuccgccgaccagcagucccucuaccagaacgccgacgccuacgucuucgucggcaccucccgcuacuccaagaaguucaagcccgagaucgccauccgccccaagguccgcgaccaggagggccgcaugaacuacuacuggacccucgaggagcccggcgacaagaucaccuucgaggccaccggcaaccucgucgucccccgcuacgccuucgccauggagcgcaacgccggcuccggcaucaucaucuccgacacccccguccacgacugcaacaccaccugccagacccccaagggcgccaucaacaccucccuccccuuccagaacauccaccccaucaccaucggcaagugccccaaguacgucaaguccaccaagcuccgccucgccaccggccuccgcaacguccccuccauccagucccgcggccucuucggcgccaucgccggcuucaucgagggcggcuggaccggcauggucgacggcugguacggcuaccaccaccagaacgagcagggcuccggcuacgccgccgaccucaaguccacccagaacgccaucgacgagaucaccaacaaggucaacuccgucaucgagaagaugaacacccaguucaccgccgucggcaaggaguucaaccaccucgagaagcgcaucgagaaccucaacaagaaggucgacgacggcuuccucgacaucuggaccuacaacgccgagcuccucguccuccucgagaacgagcgcacccucgacuaccacgacuccaacgucaagaaccucuacgagaagguccgcucccagcucaagaacaacgccaaggagaucggcaacggcugcuucgaguucuaccacaagugcgacaacaccugcauggaguccgucaagaacggcaccuacgacuaccccaaguacuccgaggaggccaagcucaaccgcgaggagaucgacggcgucaagcucgaguccacccgcaucuaccagauccucgccaucuacuccaccgucgccuccucccucguccucgucgucucccucggcgccaucuccuucuggaugugcuccaacggcucccuccagugccgcaucugcaucuga

SEQ ID NO: 101850 - RNA, 1701 nt, Artificial Sequence; identical to SEQ ID NO: 98705
  derived and/or modified CDS sequence (opt2) from hemagglutinin__InfluenzaA__ADM52443

SEQ ID NO: 101851 - RNA, 1701 nt, Artificial Sequence
  derived and/or modified CDS sequence (opt2) from hemagglutinin__InfluenzaA__ADM52453
augaaggccauccucgucguccuccucuacaccuucgccaccgccaacgccgacacccucugcaucggcuaccacgccaacaacuccaccgacaccgucgacaccguccucgagaagaacgucaccgucacccacuccgucaacauccucgaggacaagcacaacggcaagcucugcaagcuccgcggcgucgccccccuccaccucggcaagugcaacaucgccggcuggauccucggcaaccccgagugcgagucccucuccaccgccuccuccugguccuacaucgucgagaccuccuccuccgacaacggcaccugcuaccccggcgacuucaucgacuacgaggagcuccgcgagcagcucuccuccgucuccuccuucgagcgcuucgagaucuuccccaagaccuccuccuggcccaaccacgacuccaacaagggcgucaccgccgccugcccccacgccggcgccaaguccuucuacaagaaccucaucuggcucgucaagaagggcaacuccuaccccaagcucuccaaguccuacaucaacgacaagggcaaggagguccucguccucuggggcauccaccaccccuccaccuccgccgaccagcagucccucuaccagaacgccgacgccuacgucuucgucggcuccucccgcuacuccaagaaguucaagcccgagaucgccauccgccccaagguccgcgaccaggagggccgcaugaacuacuacuggacccucgucgagcccggcgacaagaucaccuucgaggccaccggcaaccucgucgucccccgcuacgccuucgccauggagcgcaacgccggcuccggcaucaucaucuccgacacccccauccacgacugcaacaccaccugccagacccccaagggcgccaucaacaccucccuccccuuccagaacguccaccccaucaccaucggcaagugccccaaguacgucaaguccaccaagcuccgccucgccaccggccuccgcaacguccccuccauccagucccgcggccucuucggcgccaucgccggcuucaucgagggcggcuggaccggcauggucgacggcugguacggcuaccaccaccagaacgagcagggcuccggcuacgccgccgaccucaaguccacccagaacgccaucgacgagaucaccaacaaggucaacuccgucaucgagaagaugaacacccaguucaccgccgucggcaaggaguucaaccaccucgagaagcgcaucgagaaccucaacaagaaggucgacgacggcuuccucgacaucuggaccuacaacgccgagcuccucguccuccucgagaacgagcgcacccucgacuaccacgacuccaacgucaagaaccucuacgagaagguccgcucccagcucaagaacaacgccaaggagaucggcaacggcugcuucgaguucuaccacaagugcgacaacaccugcauggaguccgucaagaacggcaccuacgacuaccccaaguacuccgaggaggccaagcucaaccgcgaggagaucgacggcgucaagcucgaguccacccgcaucuaccagauccucgccaucuacuccaccgucgccuccucccucguccucgucgucucccucggcgccaucuccuucuggaugugcuccaacggcucccuccagugccgcaucugcaucuga

SEQ ID NO: 101852 - RNA, 1701 nt, Artificial Sequence
  derived and/or modified CDS sequence (opt2) from hemagglutinin__InfluenzaA__ADM52473
augaaggccauccucgccguccuccucuacaccuucgccaccgccaacgccgacacccucugcaucggcuaccacgccaacaacuccaccgacaccgucgacaccguccucgagaagaacgucaccgucacccacuccgucaaccuccucgaggacaagcacaacggcaagcucugcaagcuccgcggcgucgccccccuccaccucggcaagugcaacaucgccggcuggauccucggcaaccccgagugcgagucccucuccaccgccuccuccugguccuacaucgucgagaccuccuccuccggcaacggcaccugcuaccccggcgacuucaucgacuacgaggagcuccgcgagcagcucuccuccgucuccuccuucgagcgcuucgagaucuuccccaagaccuccuccuggcccaaccacgacuccaacaagggcgucaccgccgccugcccccacgccggcgccaaguccuucuacaagaaccuccucuggcucgucaagaagggcaacuccuaccccaagcucuccaaguccuacaucaacgacaagggcaaggagguccucguccucuggggcauccaccaccccuccaccuccgccgaccagcagucccucuaccagaacgccgacgccuacgucuucgucggcaccucccgcuacuccaagaaguucaagcccgagaucgccauccgccccaagguccgcgaccaggagggccgcaugaacuacuacuggacccucgucggccccggcgacaagaucaccuucgaggccaccggcaaccucgucgucccccgcuacgccuucgccauggagcgcaacgccggcuccggcaucaucaucuccgacacccccguccacgacugcaacaccaccugccagacccccaagggcgccaucaacaccucccuccccuuccagaacauccaccccaucaccaucggcaagugccccaaguacgucaaguccaccaagcuccgccucgccaccggccuccgcaacguccccuccauccagucccgcggccucuucggcgccaucgccggcuucaucgagggcggcuggaccggcauggucgacggcugguacggcuaccaccaccagaacgagcagggcuccggcuacgccgccgaccucaaguccacccagaacgccaucgacgagaucaccaacaaggucaacuccgucaucgagaagaugaacacccaguucaccgccgucggcaaggaguucaaccaccucgagaagcgcaucgagaaccucaacaagaaggucgacgacggcuuccucgacaucuggaccuacaacgccgagcuccucguccuccucgagaacgagcgcacccucgacuaccacgacuccaacgucaagaaccucuacgagaagguccgcucccagcucaagaacaacgccaaggagaucggcaacggcugcuucgaguucuaccacaagugcgacaacaccugcauggaguccgucaagaacggcaccuacgacuaccccaaguacuccgaggaggccaagcucaaccgcgaggagaucgacggcgucaagcucgaguccacccgcaucuaccagauccucgccaucuacuccaccgucgccuccucccucguccucgucgucucccucggcgccaucuccuucuggaugugcuccaacggcucccuccagugccgcaucugcaucuga

SEQ ID NO: 101853 - RNA, 1701 nt, Artificial Sequence; identical to SEQ ID NO: 99869
  derived and/or modified CDS sequence (opt2) from hemagglutinin__InfluenzaA__ADM52483

SEQ ID NO: 101854 - RNA, 1701 nt, Artificial Sequence; identical to SEQ ID NO: 98885
  derived and/or modified CDS sequence (opt2) from hemagglutinin__InfluenzaA__ADM52493

SEQ ID NO: 101855 - RNA, 1701 nt, Artificial Sequence; identical to SEQ ID NO: 98885
  derived and/or modified CDS sequence (opt2) from hemagglutinin__InfluenzaA__ADM52513

SEQ ID NO: 101856 - RNA, 1701 nt, Artificial Sequence; identical to SEQ ID NO: 98885
  derived and/or modified CDS sequence (opt2) from hemagglutinin__InfluenzaA__ADM52524

SEQ ID NO: 101857 - RNA, 1701 nt, Artificial Sequence; identical to SEQ ID NO: 98885
  derived and/or modified CDS sequence (opt2) from hemagglutinin__InfluenzaA__ADM52534

SEQ ID NO: 101858 - RNA, 1701 nt, Artificial Sequence; identical to SEQ ID NO: 98885
  derived and/or modified CDS sequence (opt2) from hemagglutinin__InfluenzaA__ADM52554

SEQ ID NO: 101859 - RNA, 1701 nt, Artificial Sequence; identical to SEQ ID NO: 98885
  derived and/or modified CDS sequence (opt2) from hemagglutinin__InfluenzaA__ADM52564

SEQ ID NO: 101860 - RNA, 1701 nt, Artificial Sequence; identical to SEQ ID NO: 98692
  derived and/or modified CDS sequence (opt2) from hemagglutinin__InfluenzaA__ADM52574

SEQ ID NO: 101861 - RNA, 1701 nt, Artificial Sequence; identical to SEQ ID NO: 98705
  derived and/or modified CDS sequence (opt2) from hemagglutinin__InfluenzaA__ADM52584

SEQ ID NO: 101862 - RNA, 1701 nt, Artificial Sequence
  derived and/or modified CDS sequence (opt2) from hemagglutinin__InfluenzaA__ADM52594
augaaggccauccucgucguccuccucuacaccuucgccaccgccaacgccgacacccucugcaucggcuaccacgccaacaacuccaccgacaccgucgacaccguccucgagaagaacgucaccgucacccacuccgucaaccuccucgaggacaagcacaacggcaagcucugcaagcuccgcggcgucgccccccuccaccucggcaagugcaacaucgccggcuggauccucggcaaccccgagugcgagucccucuccaccgccuccuccugguccuacaucgucgagaccuccuccuccgacaacggcaccugcuaccccggcgacuucaucgacuacgaggagcuccgcgagcagcucuccuccgucuccuccuucgagcgcuucgagaucuuccccaagaccuccuccuggcccaaccacgacuccaacaagggcgucaccgccgccugcccccacgccggcgccaaguccuucuacaagaaccucaucuggcucgucaagaagggcaacuccuaccccaagcucuccaaguccuacaucaacgacaagggcaaggagguccucguccucuggggcauccaccaccccuccaccuccgccgaccagcagucccucuaccagaacgccgacgccuacgucuucgucggcaccuccaaguacuccaagaaguucaagcccgagaucgccauccgccccaagguccgcgaccaggagggccgcaugaacuacuacuggacccucgucgagcccggcgacaagaucaccuucgaggccaccggcaaccucgucgucccccgcuacgccuucgccauggagcgcaacgccggcuccggcaucaucaucuccgacacccccguccacgacugcaacaccaccugccagacccccaagggcgccaucaacaccucccuccccuuccagaacauccaccccaucaccaucggcaagugccccaaguacgucaaguccaccaagcuccgccucgccaccggccuccgcaacguccccuccauccagucccgcggccucuucggcgccaucgccggcuucaucgagggcggcuggaccggcauggucgacggcugguacggcuaccaccaccagaacgagcagggcuccggcuacgccgccgaccucaaguccacccagaacgccaucgacaagaucaccaacaaggucaacuccgucaucgagaagaugaacacccaguucaccgccgucggcaaggaguucaaccaccucgagaagcgcaucgagaaccucaacaagaaggucgacgacggcuuccucgacaucuggaccuacaacgccgagcuccucguccuccucgagaacgagcgcacccucgacuaccacgacuccaacgucaagaaccucuacgagaagguccgcucccagcucaagaacaacgccaaggagaucggcaacggcugcuucgaguucuaccacaagugcgacaacaccugcauggaguccgucaagaacggcaccuacgacuaccccaaguacuccgaggaggccaagcucaaccgcgaggagaucgacggcgucaagcucgaguccacccgcaucuaccagauccucgccaucuacuccaccgucgccuccucccucguccucgucgucucccucggcgccaucuccuucuggaugugcuccaacggcucccuccagugccgcaucugcaucuga

SEQ ID NO: 101863 - RNA, 1701 nt, Artificial Sequence; identical to SEQ ID NO: 98885
  derived and/or modified CDS sequence (opt2) from hemagglutinin__InfluenzaA__ADM52604

SEQ ID NO: 101864 - RNA, 1701 nt, Artificial Sequence; identical to SEQ ID NO: 98885
  derived and/or modified CDS sequence (opt2) from hemagglutinin__InfluenzaA__ADM52614

SEQ ID NO: 101865 - RNA, 1701 nt, Artificial Sequence; identical to SEQ ID NO: 100477
  derived and/or modified CDS sequence (opt2) from hemagglutinin__InfluenzaA__ADM52624

SEQ ID NO: 101866 - RNA, 1701 nt, Artificial Sequence; identical to SEQ ID NO: 98885
  derived and/or modified CDS sequence (opt2) from hemagglutinin__InfluenzaA__ADM52634

SEQ ID NO: 101867 - RNA, 1701 nt, Artificial Sequence; identical to SEQ ID NO: 98885
  derived and/or modified CDS sequence (opt2) from hemagglutinin__InfluenzaA__ADM52644

SEQ ID NO: 101868 - RNA, 1701 nt, Artificial Sequence; identical to SEQ ID NO: 98885
  derived and/or modified CDS sequence (opt2) from hemagglutinin__InfluenzaA__ADM52654

SEQ ID NO: 101869 - RNA, 1701 nt, Artificial Sequence; identical to SEQ ID NO: 100293
  derived and/or modified CDS sequence (opt2) from hemagglutinin__InfluenzaA__ADM52664

SEQ ID NO: 101870 - RNA, 1701 nt, Artificial Sequence; identical to SEQ ID NO: 100477
  derived and/or modified CDS sequence (opt2) from hemagglutinin__InfluenzaA__ADM52674

SEQ ID NO: 101871 - RNA, 1701 nt, Artificial Sequence; identical to SEQ ID NO: 98885
  derived and/or modified CDS sequence (opt2) from hemagglutinin__InfluenzaA__ADM52684

SEQ ID NO: 101872 - RNA, 1701 nt, Artificial Sequence; identical to SEQ ID NO: 100477
  derived and/or modified CDS sequence (opt2) from hemagglutinin__InfluenzaA__ADM52704

SEQ ID NO: 101873 - RNA, 1701 nt, Artificial Sequence; identical to SEQ ID NO: 100293
  derived and/or modified CDS sequence (opt2) from hemagglutinin__InfluenzaA__ADM52714

SEQ ID NO: 101874 - RNA, 1701 nt, Artificial Sequence
  derived and/or modified CDS sequence (opt2) from hemagglutinin__InfluenzaA__ADM86399
augaaggccauccucgucguccuccucuacaccuucgccaccgccaacgccgacacccucugcaucggcuaccacgccaacaacuccaccgacaccgucgacaccguccucgagaagaacgucaccgucacccacuccgucaacauccucgaggacaagcacaacggcaagcucugcaagcuccgcggcgucgccccccuccaccucggcaagugcaacaucgccggcuggauccucggcaaccccgagugcgagucccucuccaccgccuccuccugguccuacaucgucgagaccuccuccuccgacaacggcaccugcuaccccggcgacuucaucgacuacgaggagcuccgcgagcagcucuccuccgucuccuccuucgagcgcuucgagaucuuccccaagaccuccuccuggcccaaccacgacuccaacaagggcgucaccgccgccugcccccacgccggcgccaaguccuucuacaagaaccucaucuggcucgucaagaagggcaacuccuaccccaagcucuccaaguccuacaucaacgacaagggcaaggagguccucguccucuggggcauccaccaccccuccaccuccgccgaccagcagucccucuaccagaacgccgacgccuacgucuucgucggcuccucccgcuacuccaagaaguucaagcccgagaucgccauccgccccaagguccgcgaccaggagggccgcaugaacuacuacuggacccucgucgagcccggcgacaagaucaccuucgaggccaccggcaaccucgucgucccccgcuacgccuucgccauggagcgcaacgccggcuccggcaucaucaucuccgacacccccguccacgacugcaacaccaccugccagacccccaagggcgccgucaacaccucccuccccuuccagaacauccaccccaucaccaucggcaagugccccaaguacgucaaguccaccaagcuccgccucgccaccggccuccgcaacguccccuccauccagucccgcggccucuucggcgccaucgccggcuucaucgagggcggcuggaccggcauggucgacggcugguacggcuaccaccaccagaacgagcagggcuccggcuacgccgccgaccucaaguccacccagaacgccaucgacgagaucaccaacaaggucaacuccgucaucgagaagaugaacacccaguucaccgccgucggcaaggaguucaaccaccucgagaagcgcaucgagaaccucaacaagaaggucgacgacggcuuccucgacaucuggaccuacaacgccgagcuccucguccuccucgagaacgagcgcacccucgacuaccacgacuccaacgucaagaaccucuacgagaagguccgcucccagcucaagaacaacgccaaggaggucggcaacggcugcuucgaguucuaccacaagugcgacaacaccugcauggaguccgucaagaacggcaccuacgacuaccccaaguacuccgaggaggccaagcucaaccgcgaggagaucgacggcgucaagcucgaguccacccgcaucuaccagauccucgccaucuacuccaccgccgccuccucccucguccucgucgucucccucggcgccaucuccuucuggaugugcuccaacggcucccuccagugccgcaucugcaucuga

SEQ ID NO: 101875 - RNA, 1701 nt, Artificial Sequence; identical to SEQ ID NO: 98705
  derived and/or modified CDS sequence (opt2) from hemagglutinin__InfluenzaA__ADM86409

SEQ ID NO: 101876 - RNA, 1701 nt, Artificial Sequence; identical to SEQ ID NO: 98705
  derived and/or modified CDS sequence (opt2) from hemagglutinin__InfluenzaA__ADM86419

SEQ ID NO: 101877 - RNA, 1701 nt, Artificial Sequence; identical to SEQ ID NO: 100354
  derived and/or modified CDS sequence (opt2) from hemagglutinin__InfluenzaA__ADM86440

SEQ ID NO: 101878 - RNA, 1701 nt, Artificial Sequence; identical to SEQ ID NO: 98705
  derived and/or modified CDS sequence (opt2) from hemagglutinin__InfluenzaA__ADM86450

SEQ ID NO: 101879 - RNA, 1707 nt, Artificial Sequence
  derived and/or modified CDS sequence (opt2) from hemagglutinin__InfluenzaA__ADM95450
auggagaagaucguccuccucuucgccaucgucucccucgucaaguccgaccagaucugcaucggcuaccacgccaacaacuccaccgagcaggucgacaccaucauggagaagaacgucaccgucacccacgcccaggacauccucgagaagacccacaacggcaagcucugcgaccucgacggcgucaagccccucauccuccgcgacugcuccgucgccggcuggcuccucggcaaccccaugugcgacgaguucaucaacguccccgagugguccuacaucgucgagaaggccaaccccgucaacgaccucugcuaccccggcgacuucaacgacuacgaggagcucaagcaccuccucucccgcaucaaccacuucgagaagauccagaucauccccaaguccuccuggcccucccacgaggccucccucggcgucuccgccgccugccccuaccagggcaaguccuccuucuuccgcaacgucgucuggcucaucaagaagaacaacaccuaccccaccaucaagcgcuccuacaacaacaccaaccaggaggaccuccucgucauguggggcauccaccaccccaacgacgccgccgagcagaccaaccucuaccagaaccccaccaccuacaucuccgucggcaccuccacccucaaccagcgccucaccccccgcaucgccacccgcuccaaggucaacggccaguccggccgcauggaguucuucuggaccauccucaagcccaacgacgccaucaacuucgaguccaacggcaacuucaucgcccccgaguacgccuacaagaucgucaagaagggcgacuccaccaucaugaaguccgagcucgaguacggcaacugcaacaccaagugccagacccccaugggcgccaucaacuccuccaugcccuuccacaacauccacccccucaccaucggcgagugccccaaguacgucaaguccaaccgccucguccucgccaccggccuccgcaacuccccccagcgcgagggccgccgcaagaagcgcggccucuucggcgccaucgccggcuucaucgagggcggcuggcagggcauggucgacggcugguacggcuaccaccacuccaacgagcagggcuccggcuacgccgccgacaaggaguccacccagaaggccaucgacggcgucaccaacaaggucaacuccaucaucgacaagaugaacacccaguucgaggccgucggccgcgaguucaacaaccucgagcgccgcaucgagaaccucaacaagaagauggaggacggcuuccucgacgucuggaccuacaacgccgagcuccucguccucauggagaacgagcgcacccucgacuuccacgacuccaacgucaagaaccucuacgacaagguccgccuccagcuccgcgacaacgccaaggagcucggcaacggcugcuucgaguucuaccacaagugcgacaacgagugcauggaguccguccgcaacggcaccuacgacuacccccaguacuccgaggaggcccgccucaagcgcgaggagaucuccggcgucaagcucgaguccaucggcaucuaccagauccucuccaucuacuccaccgucgccuccucccucgcccucgccaucauggucgccggccucucccucuggaugugcuccaacggcucccuccagugccgcaucugcaucuga

SEQ ID NO: 101880 - RNA, 1701 nt, Artificial Sequence; identical to SEQ ID NO: 98705
  derived and/or modified CDS sequence (opt2) from hemagglutinin__InfluenzaA__ADM95745

SEQ ID NO: 101881 - RNA, 1701 nt, Artificial Sequence; identical to SEQ ID NO: 98705
  derived and/or modified CDS sequence (opt2) from hemagglutinin__InfluenzaA__ADM95746

SEQ ID NO: 101882 - RNA, 1701 nt, Artificial Sequence; identical to SEQ ID NO: 98705
  derived and/or modified CDS sequence (opt2) from hemagglutinin__InfluenzaA__ADM95747

SEQ ID NO: 101883 - RNA, 1701 nt, Artificial Sequence; identical to SEQ ID NO: 98705
  derived and/or modified CDS sequence (opt2) from hemagglutinin__InfluenzaA__ADM95749

SEQ ID NO: 101884 - RNA, 1701 nt, Artificial Sequence
  derived and/or modified CDS sequence (opt2) from hemagglutinin__InfluenzaA__ADM95750
augaaggccauccucgucguccuccucuacaccuucgccaccgccaacgccgacacccucugcaucggcuaccacgccaacaacuccaccgacaccgucgacaccguccucgagaagaacgucaccgucacccacuccuucaaccuccucgaggacaagcacaacggcaagcucugcaagcuccgcggcgucgccccccuccaccucggcaagugcaacaucgccggcuggauccucggcaaccccgagugcgagucccucuccaccgccuccuccugguccuacaucgucgagaccuccuccuccgacaacggcaccugcuaccccggcgacuucaucgacuacgaggagcuccgcgagcagcucuccuccgucuccuccuucgagcgcuucgagaucuuccccaagaccuccuccuggcccaaccacgacuccaacaagggcgucaccgccgccugcccccacgccggcgccaaguccuucuacaagaaccucaucuggcucgucaagaagggcuccuccuaccccaagcucuccaaguccuacaucaacgacaagggcaaggagguccucguccucuggggcauccaccaccccuccaccuccgccgaccagcagucccucuaccagaacgccgacgccuacgucuucgucggcuccucccgcuacuccaagaaguucaagcccgagaucgccauccgccccaagguccgcgaccaggagggccgcaugaacuacuacuggacccucgucgagcccggcgacaagaucaccuucgaggccaccggcaaccucgucgucccccgcuacgccuucgccauggagcgcaacgccggcuccggcaucaucaucuccgacacccccguccacgacugcaacaccaccugccagacccccaagggcgccaucaacaccucccuccccuuccagaacauccaccccaucaccaucggcaagugccccaaguacgucaaguccaccaagcuccgccucgccaccggccuccgcaacguccccuccauccagucccgcggccucuucggcgccaucgccggcuucaucgagggcggcuggaccggcauggucgacggcugguacggcuaccaccaccagaacgagcagggcuccggcuacgccgccgaccucaaguccacccagaacgccaucgacgagaucaccaacaaggucaacuccgucaucgagaagaugaacacccaguucaccgccgucggcaaggaguucaaccaccucgagaagcgcaucgagaaccucaacaagaaggucgacgacggcuuccucgacaucuggaccuacaacgccgagcuccucguccuccucgagaacgagcgcacccucgacuaccacgacuccaacgucaagaaccucuacgagaagguccgcucccagcucaagaacaacgccaaggagaucggcaacggcugcuucgaguucuaccacaagugcgacaacaccugcauggaguccgucaagaacggcaccuacgacuaccccaaguacuccgaggaggccaagcucaaccgcgaggagaucgacggcgucaagcucgaguccacccgcaucuaccagauccucgccaucuacuccaccgucgccuccucccucguccucgucgucucccucggcgccaucuccuucuggaugugcuccaacggcucccuccagugccgcaucugcaucuga

SEQ ID NO: 101885 - RNA, 1701 nt, Artificial Sequence; identical to SEQ ID NO: 98705
  derived and/or modified CDS sequence (opt2) from hemagglutinin__InfluenzaA__ADM95751

SEQ ID NO: 101886 - RNA, 1701 nt, Artificial Sequence; identical to SEQ ID NO: 98705
  derived and/or modified CDS sequence (opt2) from hemagglutinin__InfluenzaA__ADM95752

SEQ ID NO: 101887 - RNA, 1701 nt, Artificial Sequence; identical to SEQ ID NO: 98705
  derived and/or modified CDS sequence (opt2) from hemagglutinin__InfluenzaA__ADM95753

SEQ ID NO: 101888 - RNA, 1701 nt, Artificial Sequence; identical to SEQ ID NO: 98705
  derived and/or modified CDS sequence (opt2) from hemagglutinin__InfluenzaA__ADM95754

SEQ ID NO: 101889 - RNA, 1701 nt, Artificial Sequence; identical to SEQ ID NO: 98705
  derived and/or modified CDS sequence (opt2) from hemagglutinin__InfluenzaA__ADM95755

SEQ ID NO: 101890 - RNA, 1701 nt, Artificial Sequence; identical to SEQ ID NO: 98885
  derived and/or modified CDS sequence (opt2) from hemagglutinin__InfluenzaA__ADM95757

SEQ ID NO: 101891 - RNA, 1701 nt, Artificial Sequence; identical to SEQ ID NO: 98705
  derived and/or modified CDS sequence (opt2) from hemagglutinin__InfluenzaA__ADM95758

SEQ ID NO: 101892 - RNA, 1701 nt, Artificial Sequence
  derived and/or modified CDS sequence (opt2) from hemagglutinin__InfluenzaA__ADM95759
augaaggccauccucgucguccuccucuacaccuucgccaccgccaacgccgacacccucugcaucggcuaccacgccaacaacuccaccgacaccgucgacaccguccucgagaagaacgucaccgucacccacuccgucaaccuccucgaggacaagcacaacggcaagcucugcaagcuccgcggcgucgccccccuccaccucggcaagugcaacaucgccggcuggauccucggcaaccccgagugcgagucccucuccaccgccuccuccugguccuacaucgucgagaccuccuccuccgacuacggcaccugcuaccccggcgacuucaucgacuacgaggagcuccgcgagcagcucuccuccgucuccuccuucgagcgcuucgagaucuuccccaagaccuccuccuggcccaaccacgacuccaacaagggcgucaccgccgccugcccccacgccggcgccaaguccuucuacaagaaccucaucuggcucgucaagaagggcaacuccuaccccaagcucuccaaguccuacaucaacgacaagggcaaggagguccucguccucuggggcauccaccaccccuccaccuccgccgaccagcagucccucuaccagaacgccgacgccuacgucuucgucggcaccucccgcuacuccaagaaguucaagcccgagaucgccauccgccccaagguccgcgaccaggagggccgcaugaacuacuacuggacccucgucgagcccggcgacaagaucaccuucgaggccaccggcaaccucgucgucccccgcuacgccuucgccauggagcgcaacgccggcuccggcaucaucaucuccgacacccccguccacgacugcaacaccaccugccagacccccaagggcgccaucaacaccucccuccccuuccagaacauccaccccaucaccaucggcaagugccccaaguacgucaaguccaccaagcuccgccucgccaccggccuccgcaacguccccuccauccagucccgcggccucuucggcgccaucgccggcuucaucgagggcggcuggaccggcauggucgacggcugguacggcuaccaccaccagaacgagcagggcuccggcuacgccgccgaccucaaguccacccagaacgccaucgacgagaucaccaacaaggucaacuccgucaucgagaagaugaacacccaguucaccgccgucggcaaggaguucaaccaccucgagaagcgcaucgagaaccucaacaagaaggucgacgacggcuuccucgacaucuggaccuacaacgccgagcuccucguccuccucgagaacgagcgcacccucgacuaccacgacuccaacgucaagaaccucuacgagaagguccgcucccagcucaagaacaacgccaaggagaucggcaacggcugcuucgaguucuaccacaagugcgacaacaccugcauggaguccgucaagaacggcaccuacgacuaccccaaguacuccgaggaggccaagcucaaccgcgaggagaucgacggcgucaagcucgaguccacccgcaucuaccagauccucgccaucuacuccaccgucgccuccucccucguccucgucgucucccucggcgccaucuccuucuggaugugcuccaacggcucccuccagugccgcaucugcaucuga

SEQ ID NO: 101893 - RNA, 1701 nt, Artificial Sequence; identical to SEQ ID NO: 98692
  derived and/or modified CDS sequence (opt2) from hemagglutinin__InfluenzaA__ADM95760

SEQ ID NO: 101894 - RNA, 1701 nt, Artificial Sequence; identical to SEQ ID NO: 98705
  derived and/or modified CDS sequence (opt2) from hemagglutinin__InfluenzaA__ADM95761

SEQ ID NO: 101895 - RNA, 1701 nt, Artificial Sequence
  derived and/or modified CDS sequence (opt2) from hemagglutinin__InfluenzaA__ADM95763
augaaggccauccucgucguccuccucuacaccuucgccaccgccaacgccgacacccucugcaucggcuaccacgccaacaacuccaccgacaccgucgacaccguccucgagaagaacgucaccgucacccacuccgucaaccuccucgaggacaagaacaacggcaagcucugcaagcuccgcggcgucgccccccuccaccucggcaagugcaacaucgccggcuggauccucggcaaccccgagugcgagucccucuccaccgccuccuccugguccuacaucgucgagaccuccuccuccgacaacggcaccugcuaccccggcgacuucaucgacuacgaggagcuccgcgagcagcucuccuccgucuccuccuucgagcgcuucgagaucuuccccaagaccuccuccuggcccaaccacgacuccaacaagggcgucaccgccgccugcccccacgccggcgccaaguccuucuacaagaaccucaucuggcucgucaagaagggcaacuccuaccccaagcucuccaaguccuacaucaacgacaagggcaaggagguccucguccucuggggcauccaccaccccuccaccuccgccgaccagcagucccucuaccagaacgccgacgccuacgucuucgucggcuccucccgcuacuccaagaaguucaagcccgagaucgccauccgccccaagguccgcgaccaggagggccgcaugaacuacuacuggacccucgucgagcccggcgacaagaucaccuucgaggccaccggcaaccucgucgucccccgcuacgccuucgccauggagcgcaacgccggcuccggcaucaucaucuccgacacccccguccacgacugcaacaccaccugccagacccccaagggcgccaucaacaccucccuccccuuccagaacauccaccccaucaccaucggcaagugccccaaguacgucaaguccaccaagcuccgccucgccaccggccuccgcaacguccccuccauccagucccgcggccucuucggcgccaucgccggcuucaucgagggcggcuggaccggcauggucgacggcugguacggcuaccaccaccagaacgagcagggcuccggcuacgccgccgaccucaaguccacccagaacgccaucgacgagaucaccaacaaggucaacuccgucaucgagaagaugaacacccaguucaccgccgucggcaaggaguucaaccaccucgagaagcgcaucgagaaccucaacaagaaggucgacgacggcuuccucgacaucuggaccuacaacgccgagcuccucguccuccucgagaacgagcgcacccucgacuaccacgacuccaacgucaagaaccucuacgagaagguccgcucccagcucaagaacaacgccaaggagaucggcaacggcugcuucgaguucuaccacaagugcgacaacaccugcauggaguccgucaagaacggcaccuacgacuaccccaaguacuccgaggaggccaagcucaaccgcgaggagaucgacggcgucaagcucgaguccacccgcaucuaccagauccucgccaucuacuccaccgucgccuccucccucguccucgucgucucccucggcgccaucuccuucuggaugugcuccaacggcucccuccagugccgcaucugcaucuga

SEQ ID NO: 101896 - RNA, 1701 nt, Artificial Sequence; identical to SEQ ID NO: 98705
  derived and/or modified CDS sequence (opt2) from hemagglutinin__InfluenzaA__ADM95764

SEQ ID NO: 101897 - RNA, 1701 nt, Artificial Sequence; identical to SEQ ID NO: 98705
  derived and/or modified CDS sequence (opt2) from hemagglutinin__InfluenzaA__ADM95765

SEQ ID NO: 101898 - RNA, 1701 nt, Artificial Sequence; identical to SEQ ID NO: 98705
  derived and/or modified CDS sequence (opt2) from hemagglutinin__InfluenzaA__ADM95767

SEQ ID NO: 101899 - RNA, 1701 nt, Artificial Sequence; identical to SEQ ID NO: 99548
  derived and/or modified CDS sequence (opt2) from hemagglutinin__InfluenzaA__ADM95768

SEQ ID NO: 101900 - RNA, 1701 nt, Artificial Sequence; identical to SEQ ID NO: 99058
  derived and/or modified CDS sequence (opt2) from hemagglutinin__InfluenzaA__ADM95769

SEQ ID NO: 101901 - RNA, 1701 nt, Artificial Sequence; identical to SEQ ID NO: 100821
  derived and/or modified CDS sequence (opt2) from hemagglutinin__InfluenzaA__ADM95771

SEQ ID NO: 101902 - RNA, 1701 nt, Artificial Sequence; identical to SEQ ID NO: 98705
  derived and/or modified CDS sequence (opt2) from hemagglutinin__InfluenzaA__ADM95772

SEQ ID NO: 101903 - RNA, 1701 nt, Artificial Sequence; identical to SEQ ID NO: 98705
  derived and/or modified CDS sequence (opt2) from hemagglutinin__InfluenzaA__ADM95774

SEQ ID NO: 101904 - RNA, 1701 nt, Artificial Sequence; identical to SEQ ID NO: 98705
  derived and/or modified CDS sequence (opt2) from hemagglutinin__InfluenzaA__ADM95775

SEQ ID NO: 101905 - RNA, 1701 nt, Artificial Sequence; identical to SEQ ID NO: 99058
  derived and/or modified CDS sequence (opt2) from hemagglutinin__InfluenzaA__ADM95776

SEQ ID NO: 101906 - RNA, 1701 nt, Artificial Sequence; identical to SEQ ID NO: 99058
  derived and/or modified CDS sequence (opt2) from hemagglutinin__InfluenzaA__ADM95778

SEQ ID NO: 101907 - RNA, 1701 nt, Artificial Sequence
  derived and/or modified CDS sequence (opt2) from hemagglutinin__InfluenzaA__ADM95779
augaaggccauccucgucguccuccucuacaccuucgccaccgccaacgccgacacccucugcaucggcuaccacgccaacaacuccaccgacaccgucgacaccguccucgagaagaacgucaccgucacccacuccgucaaccuccucgaggacaagcacaacggcaagcucugcaagcuccgcggcgucgccccccuccaccucggcaagugcaacaucgccggcuggauccucggcaaccccgagugcgagucccucuccaccgccuccuccugguccuacaucgucgagaccuccuccuccgacaacggcaccugcuaccccggcgacuucaucgacuacgaggagcuccgcgagcagcucuccuccgucuccuccuucgagcgcuucgagaucuuccccaagaccuccuccuggcccaaccacgacuccaacaagggcgucaccgccgccugcccccacgccggcgccaaguccuucuacaagaaccucaucuggcucgucaagaagggcaacuccuaccccaagcucuccaaguccuacaucaacgacaagggcaaggagguccucguccucuggggcauccaccaccccuccaccuccgccgaccagcagucccucuaccagaacgccgacgccuacgucuucgucggcaccucccgcuacuccaagaaguucaagcccgagaucgccauccgccccaagguccgcgaccaggagggccgcaugaacuacuacuggacccucgucgagcccggcgacaagaucaccuucgaggccaccggcaaccucgucgucccccgcuacgccuucgccauggagcgcaacgccggcuccggcaucaucaucuccgacacccccguccacgacugcaacaccaccugccagacccccaagggcgccaucaacaccucccuccccuuccagaacauccaccccaucaccaucggcaagugccccaaguacgucaaguccaccaagcuccgccucgccaccggccuccgcaacauccccuccauccagucccgcggccucuucggcgccaucgccggcuucaucgagggcggcuggaccggcauggucgacggcugguacggcuaccaccaccagaacgagcagggcuccggcuacgccgccgaccucaaguccacccagaacgccaucgacgagaucaccaacaaggucaacuccgucaucgagaagaugaacacccaguucaccgccgucggcaaggaguucaaccaccucgagaagcgcaucgagaaccucaacaagaaggucgacgacggcuuccucgacaucuggaccuacaacgccgagcuccucguccuccucgagaacgagcgcacccucgacuaccacgacuccaacgucaagaaccucuacgagaagguccgcucccagcucaagaacaacgccaaggagaucggcaacggcugcuucgaguucuaccacaagugcgacaacaccugcauggaguccgucaagaacggcaccuacgacuaccccaaguacuccgaggaggccaagcucaaccgcgaggagaucgacggcgucaagcucgagcccacccgcaucuaccagauccucgccaucuacuccaccgucgccuccucccucguccucgucgucucccucggcgccaucuccuucuggaugugcuccaacggcucccuccagugccgcaucugcaucuga

SEQ ID NO: 101908 - RNA, 1701 nt, Artificial Sequence; identical to SEQ ID NO: 99058
  derived and/or modified CDS sequence (opt2) from hemagglutinin__InfluenzaA__ADM95780

SEQ ID NO: 101909 - RNA, 1701 nt, Artificial Sequence; identical to SEQ ID NO: 99548
  derived and/or modified CDS sequence (opt2) from hemagglutinin__InfluenzaA__ADM95783

SEQ ID NO: 101910 - RNA, 1701 nt, Artificial Sequence; identical to SEQ ID NO: 98705
  derived and/or modified CDS sequence (opt2) from hemagglutinin__InfluenzaA__ADM95784

SEQ ID NO: 101911 - RNA, 1701 nt, Artificial Sequence; identical to SEQ ID NO: 98705
  derived and/or modified CDS sequence (opt2) from hemagglutinin__InfluenzaA__ADM95785

SEQ ID NO: 101912 - RNA, 1701 nt, Artificial Sequence
  derived and/or modified CDS sequence (opt2) from hemagglutinin__InfluenzaA__ADM95786
augaaggccauccucgucguccuccucuacaccuucgccaccgccaacgccgacacccucugcaucggcuaccacgccaacaacuccaccgacaccgucgacaccguccucgagaagaacgucaccgucacccacuccgucaaccuccucgaggacaagcacaacggcaagcucugcaagcuccgcggcgucgccccccuccaccucggcaagugcaacaucgccggcuggauccucggcaaccccgagugcgagucccucuccaccgccuccuccugguccuacaucgucgagaccuccuccuccgacaacggcaccugcuaccccggcgacuucaucgacuacgaggagcuccgcgagcagcucuccuccgucuccuccuucgagcgcuucgagaucuuccccaagaccuccuccuggcccaaccacgacuccaacaagggcgucaccgccgccugcucccacgccggcgccaaguccuucuacaagaaccucaucuggcucgucaagaagggcaacuccuaccccaagcucuccaaguccuacaucaacgacaagggcaaggagguccucguccucuggggcauccaccaccccuccaccuccgccgaccagcagucccucuaccagaacgccgacgccuacgucuucgucggcaccucccgcuacuccaagaaguucaagcccgagaucgccauccgccccaagguccgcgagcaggagggccgcaugaacuacuacuggacccucgucgagcccggcgacaagaucaccuucgaggccaccggcaaccucgucgucccccgcuacgccuucgccauggagcgcaacgccggcuccggcaucaucaucuccgacacccccguccacgacugcaacaccaccugccagacccccaagggcgccaucaacaccucccuccccuuccagaacauccaccccaucaccaucggcaagugccccaaguacgucaaguccaccaagcuccgccucgccaccggccuccgcaacguccccuccauccagucccgcggccucuucggcgccaucgccggcuucaucgagggcggcuggaccggcauggucgacggcugguacggcuaccaccaccagaacgagcagggcuccggcuacgccgccgaccucaaguccacccagaacgccaucgacgagaucaccaacaaggucaacuccgucaucgagaagaugaacacccaguucaccgccgucggcaaggaguucaaccaccucgagaagcgcaucgagaaccucaacaagaaggucgacgacggcuuccucgacaucuggaccuacaacgccgagcuccucguccuccucgagaacgagcgcacccucgacuaccacgacuccaacgucaagaaccucuacgagaagguccgcucccagcucaagaacaacgccaaggagaucggcaacggcugcuucgaguucuaccacaagugcgacaacaccugcauggaguccgucaagaacggcaccuacgacuaccccaaguacuccgaggaggccaagcucaaccgcgaggagaucgacggcgucaagcucgaguccacccgcaucuaccagauccucgccaucuacuccaccgucgccuccucccucguccucgucgucucccucggcgccaucuccuucuggaugugcuccaacggcucccuccagugccgcaucugcaucuga

SEQ ID NO: 101913 - RNA, 1701 nt, Artificial Sequence; identical to SEQ ID NO: 99058
  derived and/or modified CDS sequence (opt2) from hemagglutinin__InfluenzaA__ADM95788

SEQ ID NO: 101914 - RNA, 1701 nt, Artificial Sequence; identical to SEQ ID NO: 99058
  derived and/or modified CDS sequence (opt2) from hemagglutinin__InfluenzaA__ADM95789

SEQ ID NO: 101915 - RNA, 1701 nt, Artificial Sequence
  derived and/or modified CDS sequence (opt2) from hemagglutinin__InfluenzaA__ADM95790
augaaggccauccucgucguccuccucuacaccuucgccaccgccaacgccgacacccucugcaucggcuaccacgccaacaacuccaccgacaccgucgacaccguccucgagaagaacgucaccgucacccacuccgucaaccuccucgaggacaagcacaacggcaagcucugcaagcuccgcggcgucgccccccuccaccucggcaagugcaacaucgccggcuggauccucggcaaccccgagugcgagucccucuccaccgccuccuccugguccuacaucgucgagaccuccuccuccgacaacggcaccugcuaccccggcgacuucaucgacuacgaggagcuccgcgagcagcucuccuccgucuccuccuucgagcgcuucgagaucuuccccaagaccuccuccuggcccaaccacgacuccaacaagggcgucaccgccgccugcccccacgccggcgccaaguccuucuacaagaaccucaucuggcucgucaagaagggcaacuccuaccccaagcuccgcaaguccuacaucaacgacaagggcaaggagguccucguccucuggggcauccaccaccccuccaccuccgccgaccagcagucccucuaccagaacgccgacgccuacgucuucgucggcaccucccgcuacuccaagaaguucaagcccgagaucgccauccgccccaagguccgcgaccaggagggccgcaugaacuacuacuggacccucgucgagcccggcgacaagaucaccuucgaggccaccggcaaccucgucgucccccgcuacgccuucgccauggagcgcaacgccggcuccggcaucaucaucuccgacacccccguccacgacugcaacaccaccugccagacccccaagggcgccaucaacaccucccuccccuuccagaacauccaccccaucaccaucggcaagugccccaaguacgucaaguccaccaagcuccgccucgccaccggccuccgcaacauccccuccauccagucccgcggccucuucggcgccaucgccggcuucaucgagggcggcuggaccggcauggucgacggcugguacggcuaccaccaccagaacgagcagggcuccggcuacgccgccgaccucaaguccacccagaacgccaucgacgagaucaccaacaaggucaacuccgucaucgagaagaugaacacccaguucaccgccgucggcaaggaguucaaccaccucgagaagcgcaucgagaaccucaacaagaaggucgacgacggcuuccucgacaucuggaccuacaacgccgagcuccucguccuccucgagaacgagcgcacccucgacuaccacgacuccaacgucaagaaccucuacgagaagguccgcucccagcucaagaacaacgccaaggagaucggcaacggcugcuucgaguucuaccacaagugcgacaacaccugcauggaguccgucaagaacggcaccuacgacuaccccaaguacuccgaggaggccaagcucaaccgcgaggagaucgacggcgucaagcucgaguccacccgcaucuaccagauccucgccaucuacuccaccgucgccuccucccucguccucgucgucucccucggcgccaucuccuucuggaugugcuccaacggcucccuccagugccgcaucugcaucuga

SEQ ID NO: 101916 - RNA, 1701 nt, Artificial Sequence; identical to SEQ ID NO: 101915
  derived and/or modified CDS sequence (opt2) from hemagglutinin__InfluenzaA__ADM95791

SEQ ID NO: 101917 - RNA, 1701 nt, Artificial Sequence; identical to SEQ ID NO: 101915
  derived and/or modified CDS sequence (opt2) from hemagglutinin__InfluenzaA__ADM95792

SEQ ID NO: 101918 - RNA, 1701 nt, Artificial Sequence; identical to SEQ ID NO: 101302
  derived and/or modified CDS sequence (opt2) from hemagglutinin__InfluenzaA__ADM95793

SEQ ID NO: 101919 - RNA, 1701 nt, Artificial Sequence; identical to SEQ ID NO: 99058
  derived and/or modified CDS sequence (opt2) from hemagglutinin__InfluenzaA__ADM95794

SEQ ID NO: 101920 - RNA, 1701 nt, Artificial Sequence; identical to SEQ ID NO: 98705
  derived and/or modified CDS sequence (opt2) from hemagglutinin__InfluenzaA__ADM95795

SEQ ID NO: 101921 - RNA, 1701 nt, Artificial Sequence; identical to SEQ ID NO: 99807
  derived and/or modified CDS sequence (opt2) from hemagglutinin__InfluenzaA__ADM95798

SEQ ID NO: 101922 - RNA, 1701 nt, Artificial Sequence
  derived and/or modified CDS sequence (opt2) from hemagglutinin__InfluenzaA__ADM95799
augaaggccauccucgucguccuccucuacaccuucgccaccgccaacgccgacacccucugcaucggcuaccacgccaacaacuccaccgacaccgucgacaccguccucgagaagaacgucaccgucacccacuccgucaaccuccucgaggacaagcacaacggcaagcucugcaagcuccgcggcgucgccccccuccaccucggcaagugcaacaucgccggcuggauccucggcaaccccgagugcgagucccucuccaccgccuccuccugguccuacaucgucgagaccuccuccuccgacaacggcaccugcuaccccggcgacuucaucgacuacgaggagcuccgcgagcagcucuccuccgucuccuccuucgagcgcuucgagaucuuccccaagaccuccuccuggcccaaccacgacuccaacaagggcgucaccgccgccugcccccacgccggcgccaaguccuucuacaagaaccucaucuggcucgucaagaagggcaacuccuaccccaagcucuccaaguccuacaucaacgacaagggcaaggagguccucguccucuggggcauccaccaccccuccaccuccgccgaccagcagucccucuaccagaacgccgacgccuacgucuucgucggcaccucccgcuacuccaagaaguucaagcccgagaucgccauccgccccaagguccgcgaccaggagggccgcaugaacuacuacuggacccucgucgagcccggcgacaagaucaccuucgaggccaccggcaaccucgucgucccccgcuacgccuucgccauggagcgcaacgccggcuccggcaucaucaucuccgacacccccguccacgacugcaacaccaccugccagacccccaagggcgccaucaacaccucccuccccuuccagaacauccaccccaucaccaucggcaagugccccaaguacgucaaguccaccaagcuccgccucgccaccggccuccgcaacguccccuccauccagucccgcggccucuucggcgccaucgccggcuucaucgagggcggcuggaccggcauggucgacggcugguacggcuaccaccaccagaacgagcagggcuccggcuacgccgccgaccucaaguccacccagaacgccaucgacgagaucaccaacaaggucaacuccgucaucgagaagaugaacacccaguucaccgccgucggcaaggaguucaaccaccucgagaagcgcaucgagaaccucaacaagaaggucgacgacggcuuccucgacaucuggaccuacaacgccgagcuccucguccuccucgagaacgagcgcacccucgacuaccacgacuccaacgucaagaaccucuacgagaagguccgcucccagcucaagaacaacgccaaggagaucgagaacggcugcuucgaguucuaccacaagugcgacaacaccugcauggaguccgucaagaacggcaccuacgacuaccccaaguacuccgaggaggccaagcucaaccgcgaggagaucgacggcgucaagcucgaguccacccgcaucuaccagauccucgccaucuacuccaccgucgccuccucccucguccucgucgucucccucggcgccaucuccuucuggaugugcuccaacggcucccuccagugccgcaucugcaucuga

SEQ ID NO: 101923 - RNA, 1701 nt, Artificial Sequence
  derived and/or modified CDS sequence (opt2) from hemagglutinin__InfluenzaA__ADM95800
augaaggccauccucgucguccuccucuacaccuucgccaccgccaacgccgacacccucugcaucggcuaccacgccaacaacuccaccgacaccgucgacaccguccucgagaagaacgucaccgucacccacuccgucaaccuccucgaggacaagcacaacggcaagcucugcaagcuccgcggcgucgccccccuccaccucggcaagugcaacaucgccggcuggauccucggcaaccccgagugcgagucccucuccaccgccuccuccugguccuacaucgucgagaccuccuccuccgacaacggcaccugcuaccccggcgacuucaucgacuacgaggagcuccgcgagcagcucuccuccgucuccuccuucgagcgcuucgagaucuuccccaagaccuccuccuggcccaaccacgacuccaacaagggcgucaccgccgccugcccccacgccggcgccaaguccuucuacaagaaccucaucuggcucgucaagaagggcaacuccuaccccaagcucuccaaguccuacaucaacgacaagggcaaggagguccucguccucuggggcauccaccaccccuccaccuccgccgaccagcagucccucuaccagaacgccgacgccuacgucuucgucggcaccucccgcuacuccaagaaguucaagcccgagaucgccauccgccccaagguccgcgaccaggagggccgcaugaacuacuacuggacccucgucgcccccggcgacaagaucaccuucgaggccaccggcaaccucgucgucccccgcuacgccuucgccauggagcgcaacgccggcuccggcaucaucaucuccgacacccccguccacgacugcaacaccaccugccagacccccaagggcgccaucaacaccucccuccccuuccagaacauccaccccaucaccaucggcaagugccccaaguacgucaaguccaccaagcuccgccucgccaccggccuccgcaacguccccuccauccagucccgcggccucuucggcgccaucgccggcuucaucgagggcggcuggaccggcauggucgacggcugguacggcuaccaccaccagaacgagcagggcuccggcuacgccgccgaccucaaguccacccagaacgccaucgacgagaucaccaacaaggucaacuccgucaucgagaagaugaacacccaguucaccgccgucggcaaggaguucaaccaccucgagaagcgcaucgagaaccucaacaagaaggucgacgacggcuuccucgacaucuggaccuacaacgccgagcuccucguccuccucgagaacgagcgcacccucgacuaccacgacuccaacgucaagaaccucuacgagaagguccgcucccagcucaagaacaacgccaaggagaucggcaacggcugcuucgaguucuaccacaagugcgacaacaccugcauggaguccgucaagaacggcaccuacgacuaccccaaguacuccgaggaggccaagcucaaccgcgaggagaucgacggcgucaagcucgaguccacccgcaucuaccagauccucgccaucuacuccaccgucgccuccucccucguccucgucgucucccucggcgccaucuccuucuggaugugcuccaacggcucccuccagugccgcaucugcaucuga

SEQ ID NO: 101924 - RNA, 1701 nt, Artificial Sequence; identical to SEQ ID NO: 99058
  derived and/or modified CDS sequence (opt2) from hemagglutinin__InfluenzaA__ADM95801

SEQ ID NO: 101925 - RNA, 1701 nt, Artificial Sequence; identical to SEQ ID NO: 99058
  derived and/or modified CDS sequence (opt2) from hemagglutinin__InfluenzaA__ADM95802

SEQ ID NO: 101926 - RNA, 1701 nt, Artificial Sequence; identical to SEQ ID NO: 101912
  derived and/or modified CDS sequence (opt2) from hemagglutinin__InfluenzaA__ADM95803

SEQ ID NO: 101927 - RNA, 1701 nt, Artificial Sequence
  derived and/or modified CDS sequence (opt2) from hemagglutinin__InfluenzaA__ADM95804
augaaggccauccucgucguccuccucuacaccuucgccaccgccaacgccgacacccucugcaucggcuaccacgccaacaacuccaccgacaccgucgacaccguccucgagaagaacgucaccgucacccacuccgucaaccuccucgaggacaagcacaacggcaagcucugcaagcuccgcggcgucgccccccuccaccucggcaagugcaacaucgccggcuggauccucggcaaccccgagugcgagucccucuccaccgccuccuccugguccuacaucgucgagaccuccuccuccgacaacggcaccugcuaccccggcgacuucaucgacuacgaggagcuccgcgagcagcucuccuccgucuccuccuucgagcgcuucgagaucuuccccaagaccuccuccuggcccaaccacgacuccaacaagggcgucaccgccgccugcccccacgccggcgccaagaacuucuacaagaaccucaucuggcucgucaagaagggcaacuccuaccccaagcucuccaaguccuacaucaacgacaagggcaaggagguccucguccucuggggcauccaccaccccuccaccuccgccgaccagcagucccucuaccagaacgccgacgccuacgucuucgucggcaccucccgcuacuccaagaaguucaagcccgagaucgccauccgccccaagguccgcgaccaggagggccgcaugaacuacuacuggacccucgucgagcccggcgacaagaucaccuucgaggccaccggcaaccucgucgucccccgcuacgccuucgccauggagcgcaacgccggcuccggcaucaucaucuccgacacccccguccacgacugcaacaccaccugccagacccccaagggcgccaucaacaccucccuccccuuccagaacauccaccccaucaccaucggcaagugccccaaguacgucaaguccaccaagcuccgccucgccaccggccuccgcaacguccccuccauccagucccgcggccucuucggcgccaucgccggcuucaucgagggcggcuggaccggcauggucgacggcugguacggcuaccaccaccagaacgagcagggcuccggcuacgccgccgaccucaaguccacccagaacgccaucgacgagaucaccaacaaggucaacuccgucaucgagaagaugaacacccaguucaccgccgucggcaaggaguucaaccaccucgagaagcgcaucgagaaccucaacaagaaggucgacgacggcuuccucgacaucuggaccuacaacgccgagcuccucguccuccucgagaacgagcgcacccucgacuaccacgacuccaacgucaagaagcucuacgagaagguccgcucccagcucaagaacaacgccaaggagaucggcaacggcugcuucgaguucuaccacaagugcgacaacaccugcauggaguccgucaagaacggcaccuacgacuaccccaaguacuccgaggaggccaagcucaaccgcgaggagaucgacggcgucaagcucgaguccacccgcaucuaccagauccucgccaucuacuccaccgucgccuccucccucguccucgucgucucccucggcgccaucuccuucuggaugugcuccaacggcucccuccagugccgcaucugcaucuga

SEQ ID NO: 101928 - RNA, 1701 nt, Artificial Sequence; identical to SEQ ID NO: 100387
  derived and/or modified CDS sequence (opt2) from hemagglutinin__InfluenzaA__ADM95805

SEQ ID NO: 101929 - RNA, 1701 nt, Artificial Sequence; identical to SEQ ID NO: 99806
  derived and/or modified CDS sequence (opt2) from hemagglutinin__InfluenzaA__ADM95808

SEQ ID NO: 101930 - RNA, 1701 nt, Artificial Sequence; identical to SEQ ID NO: 99806
  derived and/or modified CDS sequence (opt2) from hemagglutinin__InfluenzaA__ADM95809

SEQ ID NO: 101931 - RNA, 1701 nt, Artificial Sequence; identical to SEQ ID NO: 99806
  derived and/or modified CDS sequence (opt2) from hemagglutinin__InfluenzaA__ADM95810

SEQ ID NO: 101932 - RNA, 1701 nt, Artificial Sequence
  derived and/or modified CDS sequence (opt2) from hemagglutinin__InfluenzaA__ADM95812
augaaggccauccucgucguccuccucuacaccuucgccaccgccaacgccgacacccucugcaucggcuaccacgccaacaacuccaccgacaccgucgacaccguccucgagaagaacgucaccgucacccacuccgucaaccuccucgaggacaagcacaacggcaagcucugcaagcuccgcggcgucgccccccuccaccucggcaagugcaacaucgccggcuggauccucggcaaccccgagugcgagcuccucuccaccgccuccuccugguccuacaucgucgagaccuccuccuccgacaacggcaccugcuaccccggcgacuucaucgacuacgaggagcuccgcgagcagcucuccuccgucuccuccuucgagcgcuucgagaucuuccccaagaccuccuccuggcccaaccacgacuccaacaagggcgucaccgccgccugcccccacgccggcgccaaguccuucuacaagaaccucaucuggcucgucaagaagggcaacuccuaccccaagcucuccaaguccuacaucaacgacaagggcaaggagguccucguccucuggggcauccaccaccccuccaccuccgccgaccagcagucccucuaccagaacgccgacgccuacgucuucgucggcaccucccgcuacuccaagaaguucaagcccgagaucgccauccgccccaagguccgcgaccaggagggccgcaugaacuacuacuggacccucgucgagcccggcgacaagaucaccuucgaggccaccggcaaccucgucgucccccgcuacgccuucgccauggagcgcaacgccggcuccggcaucaucaucuccgacacccccguccacgacugcaacaccaccugccagacccccaagggcgccaucaacaccucccuccccuuccagaacauccaccccaucaccaucggcaagugccccaaguacgucaaguccaccaagcuccgccucgccaccggccuccgcaacguccccuccauccagucccgcggccucuucggcgccaucgccggcuucaucgagggcggcuggaccggcauggucgacggcugguacggcuaccaccaccagaacgagcagggcuccggcuacgccgccgaccucaaguccacccagaacgccaucgacgagaucaccaacaaggucaacuccgucaucgagaagaugaacacccaguucaccgccgucggcaaggaguucaaccaccucgagaagcgcaucgagaaccucaacaagaaggucgacgacggcuuccucgacaucuggaccuacaacgccgagcuccucguccuccucgagaacgagcgcacccucgacuaccacgacuccaacgucaagaaccucuacgagaagguccgcucccagcucaagaacaacgccaaggagaucggcaacggcugcuucgaguucuaccacaagugcgacaacaccugcauggaguccgucaagaacggcaccuacgacuaccccaaguacuccgaggaggccaagcucaaccgcgaggagaucgacggcgucaagcucgaguccacccgcaucuaccagauccucgccaucuacuccaccgucgccuccucccucguccucgucgucucccucggcgccaucuccuucuggaugugcuccaacggcucccuccagugccgcaucugcaucuga

SEQ ID NO: 101933 - RNA, 1701 nt, Artificial Sequence; identical to SEQ ID NO: 101302
  derived and/or modified CDS sequence (opt2) from hemagglutinin__InfluenzaA__ADM95816

SEQ ID NO: 101934 - RNA, 1701 nt, Artificial Sequence; identical to SEQ ID NO: 101302
  derived and/or modified CDS sequence (opt2) from hemagglutinin__InfluenzaA__ADM95819

SEQ ID NO: 101935 - RNA, 1701 nt, Artificial Sequence; identical to SEQ ID NO: 100387
  derived and/or modified CDS sequence (opt2) from hemagglutinin__InfluenzaA__ADM95820

SEQ ID NO: 101936 - RNA, 1701 nt, Artificial Sequence; identical to SEQ ID NO: 101302
  derived and/or modified CDS sequence (opt2) from hemagglutinin__InfluenzaA__ADM95821

SEQ ID NO: 101937 - RNA, 1701 nt, Artificial Sequence; identical to SEQ ID NO: 99806
  derived and/or modified CDS sequence (opt2) from hemagglutinin__InfluenzaA__ADM95822

SEQ ID NO: 101938 - RNA, 1701 nt, Artificial Sequence; identical to SEQ ID NO: 99806
  derived and/or modified CDS sequence (opt2) from hemagglutinin__InfluenzaA__ADM95823

SEQ ID NO: 101939 - RNA, 1701 nt, Artificial Sequence
  derived and/or modified CDS sequence (opt2) from hemagglutinin__InfluenzaA__ADM95824
augaaggccauccucgucguccuccucuacaccuucgccaccgccaacgccgacacccucugcaucggcuaccacgccaacaacuccaccgacaccgucgacaccguccucgagaagaacgucaccgucacccacuccgucaaccuccucgaggacaagcacaacggcaagcucugcaagcuccgcggcgucgccccccuccaccucggcaagugcaacaucgccggcuggauccucggcaaccccgagugcgagucccucuccaccgccuccuccugguccuacaucgucgagaccuccuccuccgacaacggcaccugcuaccccggcgacuucaucgacuacgaggagcuccgcgagcagcucuccuccgucuccuccuucgagcgcuucgagaucuuccccaagaccuccuccuggcccaaccacgacuccaacaagggcgucaccgccgccugcccccacgccggcgccaaguccuucuacaagaaccucaucuggcucgucaagaagggcaacuccuaccccaagcucuccaaguccuacaucaacgacaagggcaaggagguccucguccucuggggcauccaccaccccuccaccuccgccgaccagcagucccucuaccagaacgccgacgccuacgucuucgucggcaccucccgcuacuccaagaaguucaagcccgagaucgccauccgccccaagguccgcgaccaggagggccgcaugaacuaccacuggacccucgucgagcccggcgacaagaucaccuucgaggccaccggcaaccucgucgucccccgcuacgccuucgccauggagcgcaacgccggcuccggcaucaucaucuccgacacccccguccacgacugcaacaccaccugccagacccccaagggcgccaucaacaccucccuccccuuccagaacauccaccccaucaccaucggcaagugccccaaguacgucaaguccaccaagcuccgcauggccaccggccuccgcaacguccccuccauccagucccgcggccucuucggcgccaucgccggcuucaucgagggcggcuggaccggcauggucgacggcugguacggcuaccaccaccagaacgagcagggcuccggcuacgccgccgaccucaaguccacccagaacgccaucgacgagaucaccaacaaggucaacuccgucaucgagaagaugaacacccaguucaccgccgucggcaaggaguucaaccaccucgagaagcgcaucgagaaccucaacaagaaggucgacgacggcuuccucgacaucuggaccuacaacgccgagcuccucguccuccucgagaacgagcgcacccucgacuaccacgacuccaacgucaagaaccucuacgagaagguccgcucccagcucaagaacaacgccaaggagaucggcaacggcugcuucgaguucuaccacaagugcgacaacaccugcauggaguccgucaagaacggcaccuacgacuaccccaaguacuccgaggaggccaagcucaaccgcgaggagaucgacggcgucaagcucgaguccacccgcaucuaccagauccucgccaucuacuccaccgucgccuccucccucguccucgucgucucccucggcgccaucuccuucuggaugugcuccaacggcucccuccagugccgcaucugcaucuga

SEQ ID NO: 101940 - RNA, 1701 nt, Artificial Sequence; identical to SEQ ID NO: 101302
  derived and/or modified CDS sequence (opt2) from hemagglutinin__InfluenzaA__ADM95825

SEQ ID NO: 101941 - RNA, 1701 nt, Artificial Sequence; identical to SEQ ID NO: 101302
  derived and/or modified CDS sequence (opt2) from hemagglutinin__InfluenzaA__ADM95826

SEQ ID NO: 101942 - RNA, 1701 nt, Artificial Sequence
  derived and/or modified CDS sequence (opt2) from hemagglutinin__InfluenzaA__ADM95827
augaaggccauccucgucguccuccucuacaccuucgccaccgccaacgccgacacccucugcaucggcuaccacgccaacaacuccaccgacaccgucgacaccguccucgagaagaacgucaccgucacccacuccgucaaccuccucgaggacaagcacaacggcaagcucugcaagcucaagggcgucgccccccuccaccucggcaagugcaacaucgccggcuggauccucggcaaccccgagugcgagucccucuccaccgccuccuccugguccuacaucgucgagaccuccuccuccgacaacggcaccugcuaccccggcgacuucaucgacuacgaggagcuccgcgagcagcucuccuccgucuccuccuucgagcgcuucgagaucuuccccaagaccuccuccuggcccaaccacgacuccaacaagggcgucaccgccgccugcccccacgccggcgccaaguccuucuacaagaaccucaucuggcucgucaagaagggcaacuccuaccccaagcucuccaaguccuacaucaacgacaagggcaaggagguccucguccucuggggcauccaccaccccuccaccuccgccgaccagcagucccucuaccagaacgccgacgccuacgucuucgucggcaccucccgcuacuccaagaaguucaagcccgagaucgccauccgccccaagguccgcgaccaggagggccgcaugaacuacuacuggacccucgucgagcccggcgacaagaucaccuucgaggccaccggcaaccucgucgucccccgcuacgccuucgccauggagcgcaacgccggcuccggcaucaucaucuccgacacccccguccacgacugcaacaccaccugccagacccccaagggcgccaucaacaccucccuccccuuccagaacauccaccccaucaccaucggcaagugccccaaguacgucaaguccaccaagcuccgccucgccaccggccuccgcaacguccccuccauccagucccgcggccucuucggcgccaucgccggcuucaucgagggcggcuggaccggcauggucgacggcugguacggcuaccaccaccagaacgagcagggcuccggcuacgccgccgaccucaaguccacccagcacgccaucgacgagaucaccaacaaggucaacuccgucaucgagaagaugaacacccaguucaccgccgucggcaaggaguucaaccaccucgagaagcgcaucgagaaccucaacaagaaggucgacgacggcuuccucgacaucuggaccuacaacgccgagcuccucguccuccucgagaacgagcgcacccucgacuaccacgacuccaacgucaagaaccucuacgagaagguccgcucccagcucaagaacaacgccaaggagaucggcaacggcugcuucgaguucuaccacaagugcgacaacaccugcauggaguccgucaagaacggcaccuacgacuaccccaaguacuccgaggaggccaagcucaaccgcgaggagaucgacggcgucaagcucgaguccacccgcaucuaccagauccucgccaucuacuccaccgucgccuccucccucguccucgucgucucccucggcgccaucuccuucuggaugugcuccaacggcucccuccagugccgcaucugcaucuga

SEQ ID NO: 101943 - RNA, 1701 nt, Artificial Sequence
  derived and/or modified CDS sequence (opt2) from hemagglutinin__InfluenzaA__ADM95828
augaaggccauccucgucguccuccucuacaccuucgccaccgccaacgccgacacccucugcaucggcuaccacgccaacaacuccaccgacaccgucgacaccguccucgagaagaacgucaccgucacccacuccgucaaccuccucgaggacaagcacaacggcaagcucugcaagcuccgcggcgucgccccccuccaccucggcaagugcaacaucgccggcuggauccucggcaaccccgagugcgagucccucuccaccgccuccuccugguccuacaucgucgagaccuccuccuccgacaacggcaccugcuaccccggcgacuucaucgacuacgaggagcuccgcgagcagcucuccuccgucuccuccuucgagcgcuucgagaucuuccccaagaccuccuccuggcccaaccacgacuccaacaagggcgucaccgccgccugcccccacgccggcgccaaguccuucuacaagaaccucaucuggcucgucaagaagggcaacuccuaccccaagcucuccaaguccuacaucaacgacaagggcaaggagguccucguccucuggggcauccaccaccccuccaccuccgccgaccagcagucccucuaccagaacgccgacgccuacgucuucgucggcaccucccgcuacuccaagaaguucaagcccgagaucgccauccgccccaagguccgcgaccaggagggccgcaugaacuacuacuggacccucgucgagcccggcgacaagaucaccuucgaggccaccggcaaccucgucgucccccgcuacgccuucgccauggagcgcaacgccggcuccggcaucaucaucuccgacacccccgcccacgacugcaacaccaccugccagacccccaagggcgccaucaacaccucccuccccuuccagaacauccaccccaucaccaucggcaagugccccaaguacgucaaguccaccaagcuccgcauggccaccggccuccgcaacguccccuccauccagucccgcggccucuucggcgccaucgccggcuucaucgagggcggcuggaccggcauggucgacggcugguacggcuaccaccaccagaacgagcagggcuccggcuacgccgccgaccucaaguccacccagaacgccaucgacgagaucaccaacaaggucaacuccgucaucgagaagaugaacacccaguucaccgccgucggcaaggaguucaaccaccucgagaagcgcaucgagaaccucaacaagaaggucgacgacggcuuccucgacaucuggaccuacaacgccgagcuccucguccuccucgagaacgagcgcacccucgacuaccacgacuccaacgucaagaaccucuacgagaagguccgcucccagcucaagaacaacgccaaggagaucggcaacggcugcuucgaguucuaccacaagugcgacaacaccugcauggaguccgucaagaacggcaccuacgacuaccccaaguacuccgaggaggccaagcucaaccgcgaggagaucgacggcgucaagcucgaguccacccgcaucuaccagauccucgccaucuacuccaccgucgccuccucccucguccucgucgucucccucggcgccaucuccuucuggaugugcuccaacggcucccuccagugccgcaucugcaucuga

SEQ ID NO: 101944 - RNA, 1701 nt, Artificial Sequence
  derived and/or modified CDS sequence (opt2) from hemagglutinin__InfluenzaA__ADM95829
augaaggccauccucgucguccuccucuacaccuucgccaccgccaacgccgacacccucugcaucggcuaccacgccaacaacuccaccgacaccgucgacaccguccucgagaagaacgucaccgucacccacuccgucaaccuccucgaggacaagcacaacggcaagcucugcaagcuccgcggcgucgccccccuccaccucggcaagugcaacaucgccggcuggauccucggcaaccccgagugcgagucccucuccaccgccuccuccugguccuacaucgucgagaccuccuccuccgacaacggcaccugcuaccccggcgacuucaucgacuacgaggagcuccgcgagcagcucuccuccgucuccuccuucgagcgcuucgagaucuuccccaagaccuccuccuggcccaaccacgacuccaacaagggcgucaccgccgccugcccccacgccggcgccaaguccuucuacaagaaccucaucuggcucgucaagaagggcaacuccuaccccaagcucuccaaguccuacaucaacgacaagggcaaggagguccucguccucuggggcauccaccaccccuccaccuccgccgaccagcagucccucuaccagaacgccgacgccuacgucuucgucggcaccucccgcuacuccaagaaguucaagcccgagaucgccauccgccccaagguccgcgaccaggagggccgcaugaacuacuacuggacccucgucgagcccggcgacaagaucaccuucgaggccaccggcaaccucgucgucccccgcuacgccuucgccauggagcgcaacgccggcuccggcaucaucaucuccgacacccccguccacgacugcaacaccaccugccagacccccaagggcgccaucaacaccucccuccccuuccagaacauccaccccaucaccaucggcaagugccccaaguacgucaaguccaccaagcuccgccucgccaccggccuccgcaacguccccuccauccagucccgcggccucuucggcgccaucgccggcuucaucgagggcggcuggaccggcauggucgacggcugguacggcuaccaccaccagaacgagcagggcuccggcuacgccgccgaccucaaguccacccagaacgccaucgacgagaucaccaacaaggucaacuccgucaucgagaagaugaacacccaguucaccgccgucggcaaggaguucaaccaccucgagaagcgcaucgagaaccucaacaagaaggucgacgacggcuuccucgacaucuggaccuacaacgccgagcuccucguccuccucgagaacgagcgcacccucgacuaccacgacuccaacgucaagaagcucuacgagaagguccgcucccagcucaagaacaacgccaaggagaucggcaacggcugcuucgaguucuaccacaagugcgacaacaugugcauggaguccgucaagaacggcaccuacgacuaccccaaguacuccgaggaggccaagcucaaccgcgaggagaucgacggcgucaagcucgaguccacccgcaucuaccagauccucgccaucuacuccaccgucgccuccucccucguccucgucgucucccucggcgccaucuccuucuggaugugcuccaacggcucccuccagugccgcaucugcaucuga

SEQ ID NO: 101945 - RNA, 1701 nt, Artificial Sequence
  derived and/or modified CDS sequence (opt2) from hemagglutinin__InfluenzaA__ADM95831
augaaggccauccucgucguccuccucuacaccuucgucaccgccaacgccgacacccucugcaucggcuaccacgccaacaacuccaccgacaccgucgacaccguccucgagaagaacgucaccgucacccacuccgucaaccuccucgaggacaagcacaacggcaagcucugcaagcuccgcggcgucgccccccuccaccucggcaagugcaacaucgccggcuggauccucggcaaccccgagugcgagucccucuccaccgccuccuccugguccuacaucgucgagaccuccuccuccgacaacggcaccugcuaccccggcgacuucaucgacuacgaggagcuccgcgagcagcucuccuccgucuccuccuucgagcgcuucgagaucuuccccaagaccuccuccuggcccaaccacgacuccaacaagggcgucaccgccgccugcccccacgccggcgccaaguccuucuacaagaaccucaucuggcucgucaagaagggcaacuccuaccccaagcucuccaaguccuacaucaacgacaagggcaaggagguccucguccucuggggcauccaccaccccuccaccuccgccgaccagcagucccucuaccagaacgccgacgccuacgucuucgucggcaccucccgcuacuccaagaaguucaagcccgagaucgccauccgccccaagguccgcgaccaggagggccgcaugaacuacuacuggacccucgucgagcccggcgacaagaucaccuucgaggccaccggcaaccucgucgucccccgcuacgccuucgccauggagaagaacgccggcuccggcaucaucaucuccgacacccccguccacgacugcaacaccaccugccagacccccaagggcgccaucaacaccucccuccccuuccagaacauccaccccaucaccaucggcaagugccccaaguacgucaaguccaccaagcuccgccucgccaccggccuccgcaacguccccuccauccagucccgcggccucuucggcgccaucgccggcuucaucgagggcggcuggaccggcauggucgacggcugguacggcuaccaccaccagaacgagcagggcuccggcuacgccgccgaccucaaguccacccagcacgccaucgacgagaucaccaacaaggucaacuccgucaucgagaagaugaacacccaguucaccgccgucggcaaggaguucaaccaccucgagaagcgcaucgagaaccucaacaagaaggucgacgacggcuuccucgacaucuggaccuacaacgccgagcuccucguccuccucgagaacgagcgcacccucgacuaccacgacuccaacgucaagaaccucuacgagaagguccgcucccagcucaagaacaacgccaaggagaucggcaacggcugcuucgaguucuaccacaagugcgacaacaccugcauggaguccgucaagaacggcaccuacgacuaccccaaguacuccgaggaggccaagcucaaccgcgaggagaucgacggcgucaagcucgaguccacccgcaucuaccagauccucgccaucuacuccaccgucgccuccucccucguccucgucgucucccucggcgccaucuccuucuggaugugcuccaacggcucccuccagugccgcaucugcaucuga

SEQ ID NO: 101946 - RNA, 1701 nt, Artificial Sequence; identical to SEQ ID NO: 99806
  derived and/or modified CDS sequence (opt2) from hemagglutinin__InfluenzaA__ADM95832

SEQ ID NO: 101947 - RNA, 1701 nt, Artificial Sequence; identical to SEQ ID NO: 100387
  derived and/or modified CDS sequence (opt2) from hemagglutinin__InfluenzaA__ADM95833

SEQ ID NO: 101948 - RNA, 1701 nt, Artificial Sequence; identical to SEQ ID NO: 101932
  derived and/or modified CDS sequence (opt2) from hemagglutinin__InfluenzaA__ADM95834

SEQ ID NO: 101949 - RNA, 1701 nt, Artificial Sequence; identical to SEQ ID NO: 100387
  derived and/or modified CDS sequence (opt2) from hemagglutinin__InfluenzaA__ADM95836

SEQ ID NO: 101950 - RNA, 1701 nt, Artificial Sequence; identical to SEQ ID NO: 101302
  derived and/or modified CDS sequence (opt2) from hemagglutinin__InfluenzaA__ADM95837

SEQ ID NO: 101951 - RNA, 1701 nt, Artificial Sequence
  derived and/or modified CDS sequence (opt2) from hemagglutinin__InfluenzaA__ADM95838
augaaggccauccucgucguccuccucuacaccuucgccaccgccaacgccgacacccucugcaucggcuaccacgccaacaacuccaccgacaccgucgacaccguccucgagaagaacgucaccgucacccacuccgucaaccuccucgaggacaagcacaacggcaagcucugcaagcuccgcggcgucgccccccuccaccucggcaagugcaacaucgccggcuggauccucggcaaccccgagugcgagucccucuccaccgccuccuccugguccuacaucgucgagaccuccuccuccgacaacggcaccugcuaccccggcgacuucaucgacuacgaggagcuccgcgagcagcucuccuccgucuccuccuucgagcgcuucgagaucuuccccaagaccuccuccuggcccaaccacgacuccaacaagggcgucaccgccgccugccuccacgccggcgccaaguccuucuacaagaaccucaucuggcucgucaagaagggcaacuccuaccccaagcucuccaaguccuacaucaacgacaagggcaaggagguccucguccucuggggcauccaccaccccuccaccuccgccgaccagcagucccucuaccagaacgccgacgccuacgucuucgucggcaccucccgcuacuccaagaaguucaagcccgagaucgccauccgccccaagguccgcgaccaggagggccgcaugaacuacuacuggacccucgucgagcccggcgacaagaucaccuucgaggccaccggcaaccucgucgucccccgcuacgccuucgccauggagcgcaacgccggcuccggcaucaucaucuccgacacccccguccacgacugcaacaccaccugccagacccccaagggcgccaucaacaccucccuccccuuccagaacauccaccccaucaccaucggcaagugccccaaguacgucaaguccaccaagcuccgccucgccaccggccuccgcaacguccccuccauccagucccgcggccucuucggcgccaucgccggcuucaucgagggcggcuggaccggcauggucgacggcugguacggcuaccaccaccagaacgagcagggcuccggcuacgccgccgaccucaaguccacccagaacgccaucgacaagaucaccaacaaggucaacuccgucaucgagaagaugaacacccaguucaccgccgucggcaaggaguucaaccaccucgagaagcgcaucgagaaccucaacaagaaggucgacgacggcuuccucgacaucuggaccuacaacgccgagcuccucguccuccucgagaacgagcgcacccucgacuaccacgacuccaacgucaagaaccucuacgagaagguccgcucccagcucaagaacaacgccaaggagaucggcaacggcugcuucgaguucuaccacaagugcgacaacaccugcauggaguccgucaagaacggcaccuacgacuaccccaaguacuccgaggaggccaagcucaaccgcgaggagaucgacggcgucaagcucgaguccacccgcaucuaccagauccucgccaucuacuccaccgucgccuccucccucguccucgucgucucccucggcgccaucuccuucuggaugugcuccaacggcucccuccagugccgcaucugcaucuga

SEQ ID NO: 101952 - RNA, 1701 nt, Artificial Sequence; identical to SEQ ID NO: 100387
  derived and/or modified CDS sequence (opt2) from hemagglutinin__InfluenzaA__ADM95839

SEQ ID NO: 101953 - RNA, 1701 nt, Artificial Sequence; identical to SEQ ID NO: 101912
  derived and/or modified CDS sequence (opt2) from hemagglutinin__InfluenzaA__ADM95840

SEQ ID NO: 101954 - RNA, 1701 nt, Artificial Sequence; identical to SEQ ID NO: 101912
  derived and/or modified CDS sequence (opt2) from hemagglutinin__InfluenzaA__ADM95842

SEQ ID NO: 101955 - RNA, 1701 nt, Artificial Sequence; identical to SEQ ID NO: 101302
  derived and/or modified CDS sequence (opt2) from hemagglutinin__InfluenzaA__ADM95843

SEQ ID NO: 101956 - RNA, 1701 nt, Artificial Sequence; identical to SEQ ID NO: 101302
  derived and/or modified CDS sequence (opt2) from hemagglutinin__InfluenzaA__ADM95844

SEQ ID NO: 101957 - RNA, 1701 nt, Artificial Sequence
  derived and/or modified CDS sequence (opt2) from hemagglutinin__InfluenzaA__ADM95845
augaaggccauccucgucguccuccucuacaccuucgccaccgccaacgccgacacccucugcaucggcuaccacgccaacaacuccaccgacaccgucgacaccguccucgagaagaacgucaccgucacccacuccgucaaccuccucgaggacaagcacaacggcaagcucugcaagcuccgcggcgucgccccccuccaccucggcaagugcaacaucgccggcuggauccucggcaaccccgagugcgagucccucuccaccgccuccuccugguccuacaucgucgagaccuccuccuccgacaacggcaccugcuaccccggcgacuucaucgacuacgaggagcuccgcgagcagcucuccuccgucuccuccuucgagcgcuucgagaucuuccccaagaccuccuccuggcccaaccacgacuccaacaagggcgucaccgccgccugcccccacgccggcgccaaguccuucuacaagaaccucaucuggcucgucaagaagggcaacuccuaccccaagcucuccaaguccuacaucaacgacaagggcaaggagguccucguccucuggggcauccaccaccccuccaccuccgccgaccagcagucccucuaccagaacgccgacgccuacgucuucgucggcaccucccgcuacuccaagaaguucaagcccgagaucgccauccgccccaagguccgcgaccaggagggccgcaugaacuacuacuggacccucgucgagcccggcgacaagaucaccuucgaggccaccggcaaccucgucgucccccgcuacgccuucgccauggagcgcaacgccggcuccggcaucaucaucuccgacacccccguccacgacugcaacaccaccugccagacccccaagggcgccaucaacaccucccuccccuuccagaacauccaccccaucaccaucggcaagugccccaaguacgucaaguccaccaagcuccgcauggccaccggccuccgcaacguccccuccauccagucccgcggccucuucggcgccaucgccggcuucaucgagggcggcuggaccggcauggucgacggcugguacggcuaccaccaccagaacgagcagggcuccggcuacgccgccgaccucaaguccacccagaacgccaucgacgagaucaccaacaaggucaacuccgucaucgagaagaugaacacccaguucaccgccgucggcaaggaguucaaccaccucgagaagcgcaucgagaaccucaacaagaaggucgacgacggcuuccucgacaucuggaccuacaacgccgagcuccucguccuccucgagaacgagcgcacccucgacuaccacgacuccaacgucaagaaccucuacgagaagguccgcucccagcucaagaacaacgccaaggagaucggcaacggcugcuucgaguucuaccacaagugcgacaacaccugcauggaguccgucaagaacggcaccuacgacuaccccaaguacuccgaggagaccaagcucaaccgcgaggagaucgacggcgucaagcucgaguccacccgcaucuaccagauccucgccaucuacuccaccgucgccuccucccucguccucgucgucucccucggcgccaucuccuucuggaugugcuccaacggcucccuccagugccgcaucugcaucuga

SEQ ID NO: 101958 - RNA, 1701 nt, Artificial Sequence
  derived and/or modified CDS sequence (opt2) from hemagglutinin__InfluenzaA__ADM95846
augaaggccauccucgucguccuccucuacaccuucgccaccgccaacgccgacacccucugcaucggcuaccacgccaacaacuccaccgacaccgucgacaccguccucgagaagaacgucaccgucacccacuccgucaaccuccucgaggacaagcacaacggcaagcucugcaagcuccgcggcgucgccccccuccaccucggcaagugcaacaucgccggcuggauccucggcaaccccgagugcgagucccucuccaccgccuccuccugguccuacaucgucgaggccuccuccuccgacaacggcaccugcuaccccggcgacuucaucgacuacgaggagcuccgcgagcagcucuccuccgucuccuccuucgagcgcuucgagaucuuccccaagaccuccuccuggcccaaccacgacuccaacaagggcgucaccgccgccugcccccacgccggcgccaaguccuucuacaagaaccucaucuggcucgucaagaagggcaacuccuaccccaagcucuccaaguccuacaucaacgacaagggcaaggagguccucguccucuggggcauccaccaccccuccaccuccgccgaccagcagucccucuaccagaacgccgacgccuacgucuucgucggcaccucccgcuacuccaagaaguucaagcccgagaucgccauccgccccaagguccgcgaccaggagggccgcaugaacuacuacuggacccucgucgagcccggcgacaagaucaccuucgaggccaccggcaaccucgucgucccccgcuacgccuucgccauggagcgcaacgccggcuccggcaucaucaucuccgacacccccguccacgacugcaacaccaccugccagacccccaagggcgccaucaacaccucccuccccuuccagaacauccaccccaucaccaucggcaagugccccaaguacgucaaguccaccaagcuccgccucgccaccggccuccgcaacauccccuccauccagucccgcggccucuucggcgccaucgccggcuucaucgagggcggcuggaccggcauggucgacggcugguacggcuaccaccaccagaacgagcagggcuccggcuacgccgccgaccucaaguccacccagaacgccaucgacgagaucaccaacaaggucaacuccgucaucgagaagaugaacacccaguucaccgccgucggcaaggaguucaaccaccucgagaagcgcaucgagaaccucaacaagaaggucgacgacggcuuccucgacaucuggaccuacaacgccgagcuccucguccuccucgagaacgagcgcacccucgacuaccacgacuccaacgucaagaaccucuacgagaagguccgcucccagcucaagaacaacgccaaggagaucggcaacggcugcuucgaguucuaccacaagugcgacaacaccugcauggaguccgucaagaacggcaccuacgacuaccccaaguacuccgaggaggccaagcucaaccgcgaggagaucgacggcgucaagcucgaguccacccgcaucuaccagauccucgccaucuacuccaccgucgccuccucccucguccucgucgucucccucggcgccaucuccuucuggaugugcuccaacggcucccuccagugccgcaucugcaucuga

SEQ ID NO: 101959 - RNA, 1701 nt, Artificial Sequence; identical to SEQ ID NO: 99806
  derived and/or modified CDS sequence (opt2) from hemagglutinin__InfluenzaA__ADM95847

SEQ ID NO: 101960 - RNA, 1701 nt, Artificial Sequence; identical to SEQ ID NO: 99806
  derived and/or modified CDS sequence (opt2) from hemagglutinin__InfluenzaA__ADM95848

SEQ ID NO: 101961 - RNA, 1701 nt, Artificial Sequence
  derived and/or modified CDS sequence (opt2) from hemagglutinin__InfluenzaA__ADM95849
augaaggccauccucgucguccuccucuacaccuucgccaccgccaacgccgacacccucugcaucggcuaccacgccaacaacuccaccgacaccgucgacaccguccucgagaagaacgucaccgucacccacuccgucaaccuccucgaggacaagcacaacggcaagcucugcaagcuccgcggcgucgccccccuccaccucggcaagugcaacaucgccggcuggauccucggcaaccccgagugcgagucccucuccaccgccuccuccugguccuacaucgucgagaccuccuccuccgacaacggcaccugcuaccccggcgacuucaucgacuacgaggagcuccgcgagcagcucuccuccgucuccuccuucgagcgcuucgagaucuuccccaagaccuccuccuggcccaaccacgacuccaacaagggcgucaccgccgccugcccccacgccggcgccaaguccuucuacaagaaccucaucuggcucgucaagaagggcaacuccuaccccaagcucuccaaguccuacaucaacgacaagggcaaggagguccucguccucuggggcauccaccaccccuccaccuccgccgaccagcagucccucuaccagaacgccgacgccuacgucuucgucggcaccucccgcuacuccaagaaguucaagcccgagaucgccauccgccccaagguccgcgaccaggagggccgcaugaacuacuacuggacccucgucgagcccggcgacaagaucaccuucgaggccaccggcaaccucgucgucccccgcuacgccuucgccauggagcgcaacgccggcuccggcaucaucaucuccgacacccccguccacgacugcaacaccaccugccagacccccaagggcgccaucaacaccucccuccccuuccagaacauccaccccaucaccaucggcaagugccccaaguacgucaaguccaccaagcuccgccucgccaccggccuccgcaacguccccuccauccagucccgcggccucuucggcgccaucgccggcuucaucgagggcggcuggaccggcauggucgacggcugguacggcuaccaccaccagaacgagcagggcuccggcuacgccgccgaccucaaguccacccagaacgccaucgacgagaucaccaacaaggucaacuccgucaucgagaagaugaacacccaguucaccgccgucggcaaggaguucaaccaccucgagaagcgcaucgagaaccucaacaagaaggucgacgacggcuuccucgacaucuggaccuacaacgccgagcuccucguccuccucgagaacgagcgcacccucgacuaccacgacuccaacgucaagaagcucuacgagaagguccgcucccagcucaagaacaacgccaaggagaucggcaacggcugcuucgaguucuaccacaagugcgacaacaccugcauggaguccgucaagaacggcaccuacgacuaccccaaguacuccgaggaggccaagcucaaccgcgaggagaucgacggcgucaagcucgaguccacccgcaucuaccagauccucgccaucuacuccaccgucgccuccucccucguccucgucaucucccucggcgccaucuccuucuggaugugcuccaacggcucccuccagugccgcaucugcaucuga

SEQ ID NO: 101962 - RNA, 1701 nt, Artificial Sequence; identical to SEQ ID NO: 101302
  derived and/or modified CDS sequence (opt2) from hemagglutinin__InfluenzaA__ADM95850

SEQ ID NO: 101963 - RNA, 1701 nt, Artificial Sequence
  derived and/or modified CDS sequence (opt2) from hemagglutinin__InfluenzaA__ADM95851
augaaggccauccucgucguccuccucuacaccuucgccaccgccaacgccgacacccucugcaucggcuaccacgccaacaacuccaccgacaccgucgacaccguccucgagaagaacgucaccgucacccacuccgucaaccuccucgaggacaagcacaacggcaagcucugcaagcuccgcggcgucgccccccuccaccucggcaagugcaacaucgccggcuggauccucggcaaccccgagugcgagucccucuccaccaccuccuccugguccuacaucgucgagaccuccuccuccgacaacggcaccugcuaccccggcgacuucaucgacuacgaggagcuccgcgagcagcucuccuccgucuccuccuucgagcgcuucgagaucuuccccaagaccuccuccuggcccaaccacgacuccaacaagggcgucaccgccgccugcccccacgccggcgccaaguccuucuacaagaaccucaucuggcucgucaagaagggcaacuccuaccccaagcucuccaaguccuacaucaacgacaagggcaaggagguccucguccucuggggcauccaccaccccuccaccuccgccgaccagcagucccucuaccagaacgccgacgccuacgucuucgucggcaccucccgcuacuccaagaaguucaagcccgagaucgccauccgccccaagguccgcgaccaggagggccgcaugaacuacuacuggacccucgucgagcccggcgacaagaucaccuucgaggccaccggcaaccucgucgucccccgcuacgccuucgccauggagcgcaacgccggcuccggcaucaucaucuccgacacccccguccacgacugcaacaccaccugccagacccccaagggcgccaucaacaccucccuccccuuccagaacauccaccccaucaccaucggcaagugccccaaguacgucaaguccaccaagcuccgccucgccaccggccuccgcaacauccccuccauccagucccgcggccucuucggcgccaucgccggcuucaucgagggcggcuggaccggcauggucgacggcugguacggcuaccaccaccagaacgagcagggcuccggcuacgccgccgaccucaaguccacccagaacgccaucgacgagaucaccaacaaggucaacuccgucaucgagaagaugaacacccaguucaccgccgucggcaaggaguucaaccaccucgagaagcgcaucgagaaccucaacaagaaggucgacgacggcuuccucgacaucuggaccuacaacgccgagcuccucguccuccucgagaacgagcgcacccucgacuaccacgacuccaacgucaagaaccucuacgagaagguccgcucccagcucaagaacaacgccaaggagaucggcaacggcugcuucgaguucuaccacaagugcgacaacaccugcauggaguccgucaagaacggcaccuacgacuaccccaaguacuccgaggaggccaagcucaaccgcgaggagaucgacggcgucaagcucgaguccacccgcaucuaccagauccucgccaucuacuccaccgucgccuccucccucguccucgucgucucccucggcgccaucuccuucuggaugugcuccaacggcucccuccagugccgcaucugcaucuga

SEQ ID NO: 101964 - RNA, 1701 nt, Artificial Sequence
  derived and/or modified CDS sequence (opt2) from hemagglutinin__InfluenzaA__ADM95852
augaaggccauccucgucguccuccucuacaccuucgccaccgccaacgccgacacccucugcaucggcuaccacgccaacaacuccaccgacaccgucgacaccguccucgagaagaacgucaccgucacccacuccgucaaccuccucgaggacaagcacaacggcaagcucugcaagcuccgcggcgucgccccccuccaccucggcaagugcaacaucgccggcuggauccucggcaaccccgagugcgagucccucuccaccgccuccuccugguccuacaucgucgagaccuccuccuccgacaacggcaccugcuaccccggcgacuucaucgacuacgaggagcuccgcgagcagcucuccuccgucuccuccuucgagcgcuucgagaucuuccccaagaccuccuccuggcccaaccacgacuccaacaagggcgucaccgccgccugcccccacgccggcgccaaguccuucuacaagaaccucaucuggcucgucaagaagggcaacuccuaccccaagcucuccaaguccuacaucaacgacaagggcaaggagguccucguccucuggggcauccaccaccccuccaccuccgccgaccagcagucccucuaccagaacgccgacgccuacgucuucgucggcaccucccgcuacuccaagaaguucaagcccgagaucgccauccgccccaagguccgcgaccaggagggccgcaugaacuacuacuggacccucgucgagcccggcgacaagaucaccuucgaggccaccggcaaccucgucgucccccgcuacgccuucgccauggagcgcaacgccggcuccggcaucaucaucuccgacacccccguccacgacugcaacaccaccugccagacccccaagggcgccaucaacaccucccuccccuuccagaacauccaccccaucaccaucggcaagugccccaaguacgucaaguccaccaagcuccgccucgccaccggccuccgcaacguccccuccauccagucccgcggccucuucggcgccaucgccggcuucaucgagggcggcuggaccggcauggucgacggcugguacggcuaccaccaccagaacgagcagggcuccggcuacgccgccgaccucaaguccacccagaacgccaucgacgagaucaccaacaaggucaacuccgucaucgagaagaugaacacccaguucaccgccgucggcaaggaguucaaccaccucgagaagcgcaucgagaaccucaacaagaaggucgacgacggcuuccucgacaucuggaccuacaacgccgagcuccucguccuccucgagaacgagcgcacccucgacuaccacgacuccaacgucaagaagcucuacgagaagauccgcucccagcucaagaacaacgccaaggagaucggcaacggcugcuucgaguucuaccacaagugcgacaacaccugcauggaguccgucaagaacggcaccuacgacuaccccaaguacuccgaggaggccaagcucaaccgcgaggagaucgacggcgucaagcucgaguccacccgcaucuaccagauccucgccaucuacuccaccgucgccuccucccucguccucgucgucucccucggcgccaucuccuucuggaugugcuccaacggcucccuccagugccgcaucugcaucuga

SEQ ID NO: 101965 - RNA, 1701 nt, Artificial Sequence; identical to SEQ ID NO: 100125
  derived and/or modified CDS sequence (opt2) from hemagglutinin__InfluenzaA__ADM95854

SEQ ID NO: 101966 - RNA, 1701 nt, Artificial Sequence
  derived and/or modified CDS sequence (opt2) from hemagglutinin__InfluenzaA__ADM95855
augaaggccauccucgucguccuccucuacaccuucgccaccaccaacgccgacacccucugcaucggcuaccacgccaacaacuccaccgacaccgucgacaccguccucgagaagaacgucaccgucacccacuccgucaaccuccucgaggacaagcacaacggcaagcucugcaagcuccgcggcgucgccccccuccaccucggcaagugcaacaucgccggcuggauccucggcaaccccgagugcgagucccucuccaccgccuccuccugguccuacaucgucgagaccuccuccuccgacaacggcaccugcuaccccggcgacuucaucgacuacgaggagcuccgcgagcagcucuccuccgucuccuccuucgagcgcuucgagaucuuccccaagaccuccuccuggcccaaccacgacuccaacaagggcgucaccgccgccugcccccacgccggcgccaaguccuucuacaagaaccucaucuggcucgucaagaagggcaacuccuaccccaagcucuccaaguccuacaucaacgacaagggcaaggagguccucguccucuggggcauccaccaccccuccaccuccgccgaccagcagucccucuaccagaacgccgacgccuacgucuucgucggcaccucccgcuacuccaagaaguucaagcccgagaucgccauccgccccaagguccgcgaccaggagggccgcaugaacuacuacuggacccucgucgagcccggcgacaagaucaccuucgaggccaccggcaaccucgucgucccccgcuacgccuucgccauggagcgcaacgccggcuccggcaucaucaucuccgacacccccguccacgacugcaacaccaccugccagacccccaagggcgccaucaacaccucccuccccuuccagaacauccaccccaucaccaucggcaagugccccaaguacgucaaguccaccaagcuccgccucgccaccggccuccgcaacguccccuccauccagucccgcggccucuucggcgccaucgccggcuucaucgagggcggcuggaccggcauggucgacggcugguacggcuaccaccaccagaacgagcagggcuccggcuacgccgccgaccucaaguccacccagaacgccaucgacgagaucaccaacaaggucaacuccgucaucgagaagaugaacacccaguucaccgccgucggcaaggaguucaaccaccucgagaagcgcaucgagaaccucaacaagaaggucgacgacggcuuccucgacaucuggaccuacaacgccgagcuccucguccuccucgagaacgagcgcacccucgacuaccacgacuccaacgucaagaagcucuacgagaagguccgcucccagcucaagaacaacgccaaggagaucggcaacggcugcuucgaguucuaccacaagugcgacaacaccugcauggaguccgucaagaacggcaccuacgacuaccccaaguacuccgaggaggccaagcucaaccgcgaggagaucgacggcgucaagcucgaguccacccgcaucuaccagauccucgccaucuacuccaccgucgccuccucccucguccucgucgucucccucggcgccaucuccuucuggaugugcuccaacggcucccuccagugccgcaucugcaucuga

SEQ ID NO: 101967 - RNA, 1701 nt, Artificial Sequence
  derived and/or modified CDS sequence (opt2) from hemagglutinin__InfluenzaA__ADM95857
augaaggccauccucgucguccuccucuacaccuucgccaccgccaacgccgacacccucugcaucggcuaccacgccaacaacuccaccgacaccgucgacaccguccucgagaagaacgucaccgucacccacuccgucaaccuccucgaggacaagcacaacggcaagcucugcaagcuccgcggcgucgccccccuccaccucggcaagugcaacaucgccggcuggauccucggcaaccccgagugcgagucccucuccaccgccaacuccugguccuacaucgucgagaccuccuccuccgacaacggcaccugcuaccccggcgacuucaucgacuacgaggagcuccgcgagcagcucuccuccgucuccuccuucgagcgcuucgagaucuuccccaagaccuccuccuggcccaaccacgacuccaacaagggcgucaccgccgccugcccccacgccggcgccaaguccuucuacaagaaccucaucuggcucgucaagaagggcaacuccuaccccaagcucuccaaguccuacaucaacgacaagggcaaggagguccucguccucuggggcauccaccaccccuccaccuccgccgaccagcagucccucuaccagaacgccgacgccuacgucuucgucggcaccucccgcuacuccaagaaguucaagcccgagaucgccauccgccccaagguccgcgaccaggagggccgcaugaacuacuacuggacccucgucgagcccggcgacaagaucaccuucgaggccaccggcaaccucgucgucccccgcuacgccuucgccauggagcgcaacgccggcuccggcaucaucaucuccgacacccccguccacgacugcaacaccaccugccagacccccaagggcgccaucaacaccucccuccccuuccagaacauccaccccaucaccaucggcaagugccccaaguacgucaaguccaccaagcuccgcauggccaccggccuccgcaacguccccuccauccagucccgcggccucuucggcgccaucgccggcuucaucgagggcggcuggaccggcauggucgacggcugguacggcuaccaccaccagaacgagcagggcuccggcuacgccgccgaccucaaguccacccagaacgccaucgacgagaucaccaacaaggucaacuccgucaucgagaagaugaacacccaguucaccgccgucggcaaggaguucaaccaccucgagaagcgcaucgagaaccucaacaagaaggucgacgacggcuuccucgacaucuggaccuacaacgccgagcuccucguccuccucgagaacgagcgcacccucgacuaccacgacuccaacgucaagaaccucuacgagaagguccgcucccagcucaagaacaacgccaaggagaucggcaacggcugcuucgaguucuaccacaagugcgacaacaccugcauggaguccgucaagaacggcaccuacgacuaccccaaguacuccgaggaggccaagcucaaccgcgaggagaucgacggcgucaagcucgaguccacccgcaucuaccagauccucgccaucuacuccaccgucgccuccucccucguccucgucgucucccucggcgccaucuccuucuggaugugcuccaacggcucccuccagugccgcaucugcaucuga

SEQ ID NO: 101968 - RNA, 1701 nt, Artificial Sequence; identical to SEQ ID NO: 100387
  derived and/or modified CDS sequence (opt2) from hemagglutinin__InfluenzaA__ADM95858

SEQ ID NO: 101969 - RNA, 1701 nt, Artificial Sequence
  derived and/or modified CDS sequence (opt2) from hemagglutinin__InfluenzaA__ADM95859
augaaggccauccucgucguccuccucuacaccuucgccaccgccaacgccgacacccucugcaucggcuaccacgccaacaacuccaccgacaccgucgacaccguccucgagaagaacgucaccgucacccacuccgucaaccuccucgaggacaagcacaacgagaagcucugcaagcuccgcggcgucgccccccuccaccucggcaagugcaacaucgccggcuggauccucggcaaccccgagugcgagucccucuccaccgccuccuccugguccuacaucgucgagaccuccuccuccgacaacggcaccugcuaccccggcgacuucaucgacuacgaggagcuccgcgagcagcucuccuccgucuccuccuucgagcgcuucgagaucuuccccaagaccuccuccuggcccaaccacgacuccaacaagggcgucaccgccgccugcccccacgccggcgccaaguccuucuacaagaaccucaucuggcucgucaagaagggcaacuccuaccccaagcucuccaaguccuacaucaacgacaagggcaaggagguccucguccucuggggcauccaccaccccuccaccuccgccgaccagcagucccucuaccagaacgccgacgccuacgucuucgucggcaccucccgcuacuccaagaaguucaagcccgagaucgccauccgccccaagguccgcgaccaggagggccgcaugaacuacuacuggacccucgucgagcccggcgacaagaucaccuucgaggccaccggcaaccucgucgucccccgcuacgccuucgccauggagcgcaacgccggcuccggcaucaucaucuccgacacccccguccacgacugcaacaccaccugccagacccccaagggcgccaucaacaccucccuccccuuccagaacauccaccccaucaccaucggcaagugccccaaguacgucaaguccaccaagcuccgccucgccaccggccuccgcaacguccccuccauccagucccgcggccucuucggcgccaucgccggcuucaucgagggcggcuggaccggcauggucgacggcugguacggcuaccaccaccagaacgagcagggcuccggcuacgccgccgaccucaaguccacccagaacgccaucgacgagaucaccaacaaggucaacuccgucaucgagaagaugaacacccaguucaccgccgucggcaaggaguucaaccaccucgagaagcgcaucgagaaccucaacaagaaggucgacgacggcuuccucgacaucuggaccuacaacgccgagcuccucguccuccucgagaacgagcgcacccucgacuaccacgacuccaacgucaagaagcucuacgagaagguccgcucccagcucaagaacaacgccaaggagaucggcaacggcugcuucgaguucuaccacaagugcgacaacaccugcauggaguccgucaagaacggcaccuacgacuaccccaaguacuccgaggaggccaagcucaaccgcgaggagaucgacggcgucaagcucgaguccacccgcaucuaccagauccucgccaucuacuccaccgucgccuccucccucguccucgucgucucccucggcgccaucuccuucuggaugugcuccaacggcucccuccagugccgcaucugcaucuga

SEQ ID NO: 101970 - RNA, 1701 nt, Artificial Sequence; identical to SEQ ID NO: 100332
  derived and/or modified CDS sequence (opt2) from hemagglutinin__InfluenzaA__ADM95860

SEQ ID NO: 101971 - RNA, 1701 nt, Artificial Sequence; identical to SEQ ID NO: 101932
  derived and/or modified CDS sequence (opt2) from hemagglutinin__InfluenzaA__ADM95862

SEQ ID NO: 101972 - RNA, 1701 nt, Artificial Sequence
  derived and/or modified CDS sequence (opt2) from hemagglutinin__InfluenzaA__ADM95864
augaaggccauccucgucguccuccucuacaccuucgccaccgccaacgccgacacccucugcaucggcuaccacgccaacaacuccaccgacaccgucgacaccguccucgagaagaacgucaccgucacccacuccgucaaccuccucgaggacaagcacaacggcaagcucugcaagcuccgcggcgucgccccccuccaccucggcaagugcaacaucgccggcuggauccucggcaaccccgagugcgagucccucuccaccgccuccuccugguccuacaucgucgagaccuccuccuccgacaacggcaccugcuaccccggcgacuucaucgacuacgaggagcuccgcgagcagcucuccuccgucuccuccuucgagcgcuucgagaucuuccccaagaccuccuccuggcccaaccacgacuccaacaagggcgucaccgccgccugcccccacgccggcgccaaguccuucuacaagaaccucaucuggcucgucaagaagggcaacuccuaccccaagcucuccaaguccuacaucaacgacaagggcaaggagguccucguccucuggggcauccaccaccccuccaccuccgccgaccagcagucccucuaccagaacgccgacgccuacgucuucgucggcaccucccgcuacuccaagaaguucaagcccgagaucgccauccgcccccgcguccgcgaccaggagggccgcaugaacuaccacuggacccucgucgagcccggcgacaagaucaccuucgaggccaccggcaaccucgucgucccccgcuacgccuucgccauggagcgcaacgccggcuccggcaucaucaucuccgacacccccguccacgacugcaacaccaccugccagacccccaagggcgccaucaacaccucccuccccuuccagaacauccaccccaucaccaucggcaagugccccaaguacgucaaguccaccaagcuccgccucgccaccggccuccgcaacauccccuccauccagucccgcggccucuucggcgccaucgccggcuucaucgagggcggcuggaccggcauggucgacggcugguacggcuaccaccaccagaacgagcagggcuccggcuacgccgccgaccucaaguccacccagaacgccaucgacgagaucaccaacaaggucaacuccgucaucgagaagaugaacacccaguucaccgccgucggcaaggaguucaaccaccucgagaagcgcaucgagaaccucaacaagaaggucgacgacggcuuccucgacaucuggaccuacaacgccgagcuccucguccuccucgagaacgagcgcacccucgacuaccacgacuccaacgucaagaaccucuacgagaagguccgcucccagcucaagaacaacgccaaggagaucggcaacggcugcuucgaguucuaccacaagugcgacaacaccugcauggaguccgucaagaacggcaccuacgacuaccccaaguacuccgaggaggccaagcucaaccgcgaggagaucgacggcgucaagcucgaguccacccgcaucuaccagauccucgccaucuacuccaccgucgccuccucccucguccucgucgucucccucggcgccaucuccuucuggaugugcuccaacggcucccuccagugccgcaucugcaucuga

SEQ ID NO: 101973 - RNA, 1701 nt, Artificial Sequence; identical to SEQ ID NO: 100257
  derived and/or modified CDS sequence (opt2) from hemagglutinin__InfluenzaA__ADM95865

SEQ ID NO: 101974 - RNA, 1701 nt, Artificial Sequence
  derived and/or modified CDS sequence (opt2) from hemagglutinin__InfluenzaA__ADM95866
augaaggccauccucgucguccuccucuacaccuucgccaccaccaacgccgacacccucugcaucggcuaccacgccaacaacuccaccgacaccgucgacaccguccucgagaagaacgucaccgucacccacuccgucaaccuccucgaggacaagcacaacggcaagcucugcaagcuccgcggcgucgccccccuccaccucggcaagugcaacaucgccggcuggauccucggcaaccccgagugcgagucccucuccaccgccuccuccugguccuacaucgucgagaucuccuccuccgacaacggcaccugcuaccccggcgacuucaucgacuacgaggagcuccgcgagcagcucuccuccgucuccuccuucgagcgcuucgagaucuuccccaagaccuccuccuggcccaaccacgacuccaacaagggcgucaccgccgccugcccccacgccggcgccaaguccuucuacaagaaccucaucuggcucgucaagaagggcaacuccuaccccaagcucuccaaguccuacaucaacgacaagggcaaggagguccucguccucuggggcauccaccaccccuccaccuccgccgaccagcagucccucuaccagaacgccgacgccuacgucuucgucggcaccucccgcuacuccaagaaguucaagcccgagaucgccauccgccccaagguccgcgaccaggagggccgcaugaacuacuacuggacccucgucgagcccggcgacaagaucaccuucgaggccaccggcaaccucgucgucccccgcuacgccuucgccauggagcgcaacgccggcuccggcaucaucaucuccgacacccccguccacgacugcaacaccaccugccagacccccaagggcgccaucaacaccucccuccccuuccagaacauccaccccaucaccaucggcaagugccccaaguacgucaaguccaccaagcuccgccucgucaccggccuccgcaacguccccuccauccagucccgcggccucuucggcgccaucgccggcuucaucgagggcggcuggaccggcauggucgacggcugguacggcuaccaccaccagaacgagcagggcuccggcuacgccgccgaccucaaguccacccagaacgccaucgacaagaucaccaacaaggucaacuccgucaucgagaagaugaacacccaguucaccgccgucggcaaggaguucaaccaccucgagaagcgcaucgagaaccucaacaagaaggucgacgacggcuuccucgacaucuggaccuacaacgccgagcuccucguccuccucgagaacgagcgcacccucgacuaccacgacuccaacgucaagaaccucuacgagaagguccgcucccagcucaagaacaacgccaaggagaucggcaacggcugcuucgaguucuaccacaagugcgacaacaccugcauggaguccgucaagaacggcaccuacgacuaccccaaguacuccgaggaggccaagcucaaccgcgaggagaucgacggcgucaagcucgaguccacccgcaucuaccagauccucgccaucuacuccaccgccgccuccucccucguccucgucgucucccucggcgccaucuccuucuggaugugcuccaacggcucccuccagugccgcaucugcaucuga

SEQ ID NO: 101975 - RNA, 1698 nt, Artificial Sequence; identical to SEQ ID NO: 101549
  derived and/or modified CDS sequence (opt2) from hemagglutinin__InfluenzaA__ADN06300

SEQ ID NO: 101976 - RNA, 1698 nt, Artificial Sequence
  derived and/or modified CDS sequence (opt2) from hemagglutinin__InfluenzaA__ADN06311
augaaggucaagcuccucguccuccucugcacccucaccgccaccuacgccgacaccaucugcaucggcuaccacgccaacaacuccaccgacaccgucgacaccguccucgagaagaacgucaccgucacccacuccgucaaccuccucgagaacucccacaacggcaagcucugccuccucaagggcaucgccccccuccagcucggcaacugcuccgucgccggcuggauccucggcaaccccgagugcgagcuccucaucuccaaggaguccugguccuacaucgucgagaagcccaaccccgagaacggcaccugcuaccccggccacuucgccgacuacgaggagcuccgcgagcagcucuccuccgucuccuccuucgagcgcuucgagaucuuccccaagggcuccuccuggcccaaccacaccgucaccggcgucuccgccuccugcucccacaacggcgagaacuccuucuaccgcaaccuccucuggcucaccggcaagaacggccucuaccccaaccucuccaaguccuacgccaacaacaaggagaaggagguccucguccucuggggcguccaccacccccccaacaucgccgaccagaagacccucuaccacaccgagaacgccuacgucuccgucgucuccucccacuacucccgcaaguucacccccgagaucgccaagcgccccaagguccgcgaccaggagggccgcaucaacuacuacuggacccuccucgagcccggcgacaccaucaucuucgaggccaacggcaaccucaucgccccccgcuacgccuucgcccucucccgcggcuucggcuccggcaucaucaacuccaacgcccccauggacaagugcgacgccaagugccagaccccccagggcgccaucaacuccucccuccccuuccagaacguccaccccgucaccaucggcgagugccccaaguacguccgcuccgccaagcuccgcauggucaccggccuccgcaacauccccuccauccagucccgcggccucuucggcgccaucgccggcuucaucgagggcggcuggaccggcauggucgacggcugguacggcuaccaccaccagaacgagcagggcuccggcuacgccgccgaccagaaguccacccagaacgccaucaacggcaucaccaacaaggucaacuccgucaucgagaagaugaacacccaguucaccgccgucggcaaggaguucaacaagcucgagcgccgcauggagaaccucaacaagaaggucgacgacggcuucaucgacaucuggaccuacaacgccgagcuccucguccuccucgagaacgagcgcacccucgacuuccacgacuccaacgucaagaaccucuacgagaaggucaagucccagcucaagaacaacgccaaggagaucggcaacggcugcuucgaguucuaccacaagugcaacgacgagugcauggaguccgucaagaacggcaccuacgacuaccccaaguacuccgaggaguccaagcucaaccgcgagaagaucgacggcgucaagcucgaguccaugggcgucuaccagauccucgccaucuacuccaccgucgccuccucccucguccuccucgucucccucggcgccaucuccuucuggaugugcuccaacggcucccuccagugccgcaucugcaucuga

SEQ ID NO: 101977 - RNA, 1698 nt, Artificial Sequence
  derived and/or modified CDS sequence (opt2) from hemagglutinin__InfluenzaA__ADN06322
augaaggucaagcuccucguccuccucugcaccuucaccgccaccuacgccgacaccaucugcaucggcuaccacgccaacaacuccaccgacaccgucgacaccguccucgagaagaacgucaccgucacccacuccgucaaccuccucgagaacucccacaacggcaagcucugccuccucaagggcaucgccccccuccagcucggcaacugcuccgucgccggcuggauccucggcaaccccgagugcgagcuccucaucuccaaggaguccugguccuacaucgucgagaagcccaaccccgagaacggcaccugcuaccccggccacuucgccgacuacgaggagcuccgcgagcagcucuccuccgucuccuccuucgagcgcuucgagaucuuccccaaggaguccuccuggcccaaccacaccgucaccggcgucuccgccuccugcucccacaacggcgaguccuccuucuaccgcaaccuccucuggcucaccggcaagaacggccucuaccccaaccucuccaaguccuacgccaacaacaaggagaaggagguccucguccucuggggcguccaccacccccccaacauggucgaccagcgcacccucuaccgcaccgagaacgccuacgucuccgucgucuccucccacuacucccgcaaguucacccccgagaucgccaagcgccccaagguccgcgaccaggagggccgcaucaacuacuacuggacccuccucgagcccggcgacaccaucaucuucgaggccaacggcaaccucaucgccccccgcuacgccuucgcccucucccgcggcuucggcuccggcaucaucaacuccaacgcccccaugggcaagugcgacgccaagugccagaccccccagggcgccaucaacuccucccuccccuuccagaacguccaccccgucaccaucggcgagugccccaaguacguccgcuccgccaagcuccgcauggucaccggccuccgcaacauccccuccauccagucccgcggccucuucggcgccaucgccggcuucaucgagggcggcuggaccggcauggucgacggcugguacggcuaccaccaccagaacgagcagggcuccggcuacgccgccgaccagaaguccacccagaacgccaucaacggcaucaccaacaaggucaacuccgucaucgagaagaugaacacccaguucaccgccgucggcaaggaguucaacaagcucgagcgccgcauggagaaccucaacaagaaggucgacgacggcuucaucgacaucuggaccuacaacgccgagcuccucguccuccucgagaacgagcgcacccucgacuuccacgacuccaacgucaagaaccucuacgagaaggucaagucccagcucaagaacaacgccaaggagaucggcaacggcugcuucgaguucuaccacaagugcaacgacgagugcauggaguccgucaagaacggcaccuacgacuaccccaaguacuccgaggaguccaagcucaaccgcgagaagaucgacggcgucaagcucgaguccaugggcgucuaccagauccucgccaucuacuccaccgucgccuccucccucguccuccucgucucccucggcgccaucuccuucuggaugugcuccaacggcucccuccagugccgcaucugcaucuga

SEQ ID NO: 101978 - RNA, 1698 nt, Artificial Sequence
  derived and/or modified CDS sequence (opt2) from hemagglutinin__InfluenzaA__ADN06344
augaaggucaagcuccucguccuccucugcaccuucaccgccaccuacgccgacaccaucugcaucggcuaccacgccaacaacuccaccgacaccgucgacaccguccucgagaagaacgucaccgucacccacuccgucaaccuccucgagaacucccacaacggcaagcucugccuccucaagggcaucgccccccuccagcucggcaacugcuccgucgccggcuggauccucggcaaccccgagugcgagcuccucaucuccaaggaguccugguccuacaucgucgagaagcccaaccccgagaacggcaccugcuaccccggccacuucgccgacuacgaggagcuccgcgagcagcucuccuccgucuccuccuucgagcgcuucgagaucuuccccaaggaguccuccuggcccaaccacaccgucaccggcgucuccgccuccugcucccacaacggcgaguccuccuucuaccgcaaccuccucuggcucaccggcaagaacggccucuaccccaaccucuccaaguccuacgccaacaacaaggagaaggagguccucguccucuggggcguccaccacccccccuccaucuccgaccagaagacccucuaccacaccgagaacgccuacgucuccgucgucuccucccacuacucccgcaaguucacccccgagaucgccaagcgccccaagguccgcgaccaggagggccgcaucaacuacuacuggacccuccucgagcccggcgacaccaucaucuucgaggccaacggcaaccucaucgccccccgcuacgccuucgcccucucccgcggcuucggcuccggcaucaucaacuccaacgcccccauggacaagugcgacgccaagugccagaccccccagggcgccaucaacuccucccuccccuuccagaacguccaccccgucaccaucggcgagugccccaaguacguccgcuccgccaagcuccgcauggucaccggccuccgcaacauccccuccauccagucccgcggccucuucggcgccaucgccggcuucaucgagggcggcuggaccggcauggucgacggcugguacggcuaccaccaccagaacgagcagggcuccggcuacgccgccgaccagaaguccacccagaacgccaucaacggcaucaccaacaaggucaacuccgucaucgagaagaugaacacccaguucaccgccgucggcaaggaguucaacaagcucgagcgccgcauggagaaccucaacaagaaggucgacgacggcuucaucgacaucuggaccuacaacgccgagcuccucguccuccucgagaacgagcgcacccucgacuuccacgacuccaacgucaagaaccucuacgagaaggucaagucccagcucaagaacaacgccaaggagaucggcaacggcugcuucgaguucuaccacaagugcaacgacgagugcauggaguccgucaagaacggcaccuacgacuaccccaaguacuccgaggaguccaagcucaaccgcgagaagaucgacggcgucaagcucgaguccaugggcgucuaccagauccucgccaucuacuccaccgucgccuccucccucguccuccucgucucccucggcgccaucuccuucuggaugugcuccaacggcucccuccagugccgcaucugcaucuga

SEQ ID NO: 101979 - RNA, 1701 nt, Artificial Sequence; identical to SEQ ID NO: 101569
  derived and/or modified CDS sequence (opt2) from hemagglutinin__InfluenzaA__ADN06366

SEQ ID NO: 101980 - RNA, 1701 nt, Artificial Sequence
  derived and/or modified CDS sequence (opt2) from hemagglutinin__InfluenzaA__ADN26165
augaaggccauccucgucguccuccucuacaccuucgccaccgccaacgccgacacccucugcaucggcuaccacgccaacaacuccaccgacaccgucgacaccguccucgagaagaacgucaccgucacccacuccgucaaccuccucgagggcaagcacaacggcaagcucugcaagcuccgcggcgucgccccccuccaccucggcaagugcaacaucgccggcuggauccucggcaaccccgagugcgagucccucuccaccgccuccuccugguccuacaucgucgagaccuccuccuccgacaacggcaccugcuaccccggcgacuucaucgacuacgaggagcuccgcgagcagcucuccuccgucuccuccuucgagcgcuucgagaucuuccccaagaccuccuccuggcccaaccacgacuccaacaagggcgucaccgccgccugcccccacgccggcgccaaguccuucuacaagaaccucaucuggcucaucaagaagggcaacuccuaccccaagcucuccaaguccuacaucaacgacaagggcaaggagguccucguccucuggggcauccaccaccccuccaccuccgccgaccagcagucccucuaccagaacgccgacgccuacgucuucgucggcaccucccgcuacuccaagaaguucaagcccgagaucgccauccgccccaagguccgcgaccaggagggccgcaugaacuacuacuggacccucgucgagcccggcgacaagaucaccuucgaggccaccggcaaccucgucgucccccgcuacgccuucgccauggagcgcaacgccggcuccggcaucaucaucuccgacacccccguccacgacugcaacaccaccugccagacccccaagggcgccaucaacaccucccuccccuuccagaacauccaccccaucaccaucggcaagugccccaaguacgucaaguccaccaagcuccgccucgccaccggccuccgcaacauccccuccauccagucccgcggccucuucggcgccaucgccggcuucaucgagggcggcuggaccggcauggucgacggcugguacggcuaccaccaccagaacgagcagggcuccggcuacgccgccgaccucaaguccacccagaacgccaucgacgagaucaccaacaaggucaacuccgucaucgagaagaugaacacccaguucaccgccgucggcaaggaguucaaccaccucgagaagcgcaucgagaaccucaacaagaaggucgacgacggcuuccucgacaucuggaccuacaacgccgagcuccucguccuccucgagaacgagcgcacccucgacuaccacgacuccaacgucaagaaccucuacgagaagguccgcucccagcucaagaacaacgccaaggagaucggcaacggcugcuucgaguucuaccacaagugcgacaacaccugcauggaguccgucaagaacggcaccuacgacuaccccaaguacuccgaggaggccaagcucaaccgcgaggagaucgacggcgucaagcucgaguccgcccgcaucuaccagauccucgccaucuacuccaccgucgccuccucccucguccucgucgucucccucggcgccaucuccuucuggaugugcuccaacggcucccuccagugccgcaucugcaucuga

SEQ ID NO: 101981 - RNA, 1701 nt, Artificial Sequence; identical to SEQ ID NO: 98885
  derived and/or modified CDS sequence (opt2) from hemagglutinin__InfluenzaA__ADN26175

SEQ ID NO: 101982 - RNA, 1701 nt, Artificial Sequence
  derived and/or modified CDS sequence (opt2) from hemagglutinin__InfluenzaA__ADN78194
augaaggccauccucgucguccuccucuacaccuucgccaccaccaacgccgacacccucugcaucggcuaccacgccaacaacuccaccgacaccgucgacaccguccucgagaagaacgucaccgucacccacuccgucaaccuccucgaggacaagcacaacggcaagcucugcaagcuccgcggcgucgccccccuccaccucggcaagugcaacaucgccggcuggauccucggcaaccccgagugcgagucccucuccaccgccuccuccugguccuacaucgucgagaccuccuccuccgacaacggcaccugcuaccccggcgacuucaucgacuacgaggagcuccgcgagcagcucuccuccgucuccuccuucgagcgcuucgagaucuuccccaagaccuccuccuggcccaaccacgacuccaacaagggcgucaccgccgccugcccccacgccggcgccaaguccuucuacaagaaccucaucuggcucgucaagaagggcaacuccuaccccaagcucuccaaguccuacaucaacgacaagggcaaggagguccucguccucuggggcauccaccaccccuccaccuccgccgaccagcagucccucuaccagaacgccgacgccuacgucuucgucggcaccucccgcuacuccaagaaguucaagcccgagaucgccauccgccccaagguccgcgaccaggagggccgcaugaacuacuacuggacccucgucgagcccggcgacaagaucaccuucgaggccaccggcaaccucgucgucccccgcuacgccuucgccauggagcgcaacgccggcuccggcaucaucaucuccgacacccccguccacgacugcaacaccaccugccagacccccaagggcgccaucaacaccucccuccccuuccagaacauccaccccaucaccaucggcaagugccccaaguacgucaaguccaccaagcuccgccucgccaccggccuccgcaacguccccuccauccagucccgcggccucuucggcgccaucgccggcuucaucgagggcggcuggaccggcauggucgacggcugguacggcuaccaccaccagaacgagcagggcuccggcuacgccgccgaccucaaguccacccagaacgccaucgacaagaucaccaacaaggucaacuccgucaucgagaagaugaacacccaguucaccgccgucggcaaggaguucaaccaccucgagaagcgcaucgagaaccucaacaagaaggucgacgacggccuccucgacaucuggaccuacaacgccgagcuccucguccuccucgagaacgagcgcacccucgacuaccacgacuccaacgucaagaaccucuacgagaagguccgcucccagcucaagaacaacgccaaggagaucggcaacggcugcuucgaguucuaccacaagugcgacaacaccugcauggaguccgucaagaacggcaccuacgacuaccccaaguacuccgaggaggccaagcucaaccgcgaggagaucgacggcgucaagcucgaguccacccgcaucuaccagauccucgccaucuacuccaccgucgccuccucccucguccucgucgucucccucggcgccaucuccuucuggaugugcuccaacggcucccuccagugccgcaucugcaucuga

SEQ ID NO: 101983 - RNA, 1701 nt, Artificial Sequence; identical to SEQ ID NO: 99869
  derived and/or modified CDS sequence (opt2) from hemagglutinin__InfluenzaA__ADN78195

SEQ ID NO: 101984 - RNA, 1701 nt, Artificial Sequence; identical to SEQ ID NO: 100257
  derived and/or modified CDS sequence (opt2) from hemagglutinin__InfluenzaA__ADN78212

SEQ ID NO: 101985 - RNA, 1701 nt, Artificial Sequence; identical to SEQ ID NO: 100257
  derived and/or modified CDS sequence (opt2) from hemagglutinin__InfluenzaA__ADN78221

SEQ ID NO: 101986 - RNA, 1698 nt, Artificial Sequence; identical to SEQ ID NO: 101976
  derived and/or modified CDS sequence (opt2) from hemagglutinin__InfluenzaA__ADN89050

SEQ ID NO: 101987 - RNA, 1698 nt, Artificial Sequence
  derived and/or modified CDS sequence (opt2) from hemagglutinin__InfluenzaA__ADN89061
augaaggucaagcuccucguccuccucugcaccuucaccgccaccuacgccgacaccaucugcaucggcuaccacgccaacaacuccaccgacaccgucgacaccguccucgagaagaacgucaccgucacccacuccgucaaccuccucgagaacucccacaacggcaagcucugccuccucaagggcaucgccccccuccagcucggcaacugcuccgucgccggcuggauccucggcaaccccgagugcgagcuccucaucuccaaggaguccugguccuacaucgucgagaagcccaaccccgagaacggcaccugcuaccccggccacuucgccgacuacgaggagcuccgcgagcagcucuccuccgucuccuccuucgagcgcuucgagaucuuccccaaggaguccuccuggcccaaccacaccgucaccggcgucuccgccuccugcucccacaacggcgaguccuccuucuaccgcaaccuccucuggcucaccgagaagaacggccucuaccccaaccucuccaaguccuacgccaacaacaaggagaaggagguccucguccucuggggcguccaccacccccccuccaucuccgaccagaagacccucuaccacaccgagaacgccuacgucuccgucgucuccucccacuacucccgcaaguucacccccgagaucgccaagcgccccaagguccgcgaccaggagggccgcaucaacuacuacuggacccuccucgagcccggcgacaccaucaucuucgaggccaacggcaaccucaucgccccccgcuacgccuucgcccucucccgcggcuucggcuccggcaucaucaacuccaacgcccccauggacaagugcgacgccaagugccagaccccccagggcgccaucaacuccucccuccccuuccagaacguccaccccgucaccaucggcgagugccccaaguacguccgcuccgccaagcuccgcauggucaccggccuccgcaacauccccuccauccagucccgcggccucuucggcgccaucgccggcuucaucgagggcggcuggaccggcauggucgacggcugguacggcuaccaccaccagaacgagcagggcuccggcuacgccgccgaccagaaguccacccagaacgccaucaacgagaucaccaacaaggucaacuccgucaucgagaagaugaacacccaguucaccgccgucggcaaggaguucaacaagcucgagcgccgcauggagaaccucaacaagaaggucgacgacggcuucaucgacaucuggaccuacaacgccgagcuccucguccuccucgagaacgagcgcacccucgacuuccacgacuccaacgucaagaaccucuacgagaaggucaagaaccagcucaagaacaacgccaaggagaucggcaacggcugcuucgaguucuaccacaagugcaacgacgagugcauggaguccgucaagaacggcaccuacgacuaccccaaguacuccgaggaguccaagcucaaccgcgagaagaucgacggcgucaagcucgaguccaugggcgucuaccagauccucgccaucuacuccaccgucgccuccucccucguccuccucgucucccucggcgccaucuccuucuggaugugcuccaacggcucccuccagugccgcaucugcaucuga

SEQ ID NO: 101988 - RNA, 1698 nt, Artificial Sequence; identical to SEQ ID NO: 101978
  derived and/or modified CDS sequence (opt2) from hemagglutinin__InfluenzaA__ADN89072

SEQ ID NO: 101989 - RNA, 1698 nt, Artificial Sequence
  derived and/or modified CDS sequence (opt2) from hemagglutinin__InfluenzaA__ADN89083
augaaggucaagcuccucguccuccucugcaccuucaccgccaccuacgccgacaccaucugcaucggcuaccacgccaacaacuccaccgacaccgucgacaccguccucgagaagaacgucaccgucacccacuccgucaaccuccucgagaacucccacaacggcaagcucugccuccucaagggcaucgccccccuccagcucggcaacugcuccgucgccggcuggauccucggcaaccccgagugcgagcuccucaucuccaaggaguccugguccuacaucgucgagaagcccaaccccgagaacggcaccugcuaccccggccacuucgccgacuacgaggagcuccgcgagcagcucuccuccgucuccuccuucgagcgcuucgagaucuuccccaaggaguccuccuggcccaaccacaccgucaccggcgucuccgccuccugcucccacaacggcgagaacuccuucuaccgcaaccuccucuggcucaccggcaagaacggccucuaccccaaccucuccaaguccuacgccaacaacaaggagaaggagguccucguccucuggggcguccaccacccccccaacauggccgaccagaagacccucuaccacaccgagaacgccuacgucuccgucgucuccucccacuacucccgcaaguucacccccgagaucgccaagcgccccaagguccgcgaccaggagggccgcaucaacuacuacuggacccuccucgagcccggcgacaccaucaucuucgaggccaacggcaaccucaucgccccccgcuacgccuucgcccucucccgcggcuucggcuccggcaucaucaacuccaacgcccccauggacaagugcgacgccaagugccagaccccccagggcgccaucaacuccucccuccccuuccagaacguccaccccgucaccaucggcgagugccccaaguacguccgcuccgccaagcuccgcauggucaccggccuccgcaacauccccuccauccagucccgcggccucuucggcgccaucgccggcuucaucgagggcggcuggaccggcauggucgacggcugguacggcuaccaccaccagaacgagcagggcuccggcuacgccgccgaccagaaguccacccagaacgccaucaacggcaucaccaacaaggucaacuccgucaucgagaagaugaacacccaguucaccgccgucggcaaggaguucaacaagcucgagcgccgcauggagaaccucaacaagaaggucgacgacggcuucaucgacaucuggaccuacaacgccgagcuccucguccuccucgagaacgagcgcacccucgacuuccacgacuccaacgucaagaaccucuacgagaaggucaagucccagcucaagaacaacgccaaggagaucggcaacggcugcuucgaguucuaccacaagugcaacgacgagugcauggaguccgucaagaacggcaccuacgacuaccccaaguacuccgaggaguccaagcucaaccgcgagaagaucgacggcgucaagcucgaguccaugggcgucuaccagauccucgccaucuacuccaccgucgccuccucccucguccuccucgucucccucggcgccaucuccuucuggaugugcuccaacggcucccuccagugccgcaucugcaucuga

SEQ ID NO: 101990 - RNA, 1698 nt, Artificial Sequence
  derived and/or modified CDS sequence (opt2) from hemagglutinin__InfluenzaA__ADN89094
augaaggucaagcuccucguccuccucugcaccuucaccgccaccuacgccgacaccaucugcaucggcuaccacgccaacaacuccaccgacaccgucgacaccgcccucgagaagaacgucaccgucacccacuccgucaaccuccucgagaacucccacaacggcaagcucugccuccucaagggcaucgccccccuccagcucggcaacugcuccgucgccggcuggauccucggcaaccccgagugcgagcuccucaucuccaaggaguccugguccuacaucgucgagaagcccaaccccgagaacggcaccugcuaccccggccacuucgccgacuacgaggagcuccgcgagcagcucuccuccgucuccuccuucgagcgcuucgagaucuuccccaaggaguccuccuggcccaaccacaccgucaccggcgucuccgccuccugcucccacaacggcgagaacuccuucuaccgcaaccuccucuggcucaccggcaagaacggccucuaccccaaccucuccaaguccuacgccaacaacaagggcaaggagguccucguccucuggggcguccaccacccccccaacaucgccgaccagaagacccucuaccacaccgagaacgccuacgucuccgucgucuccucccacuacucccgcaaguucacccccgagaucgccaagcgccccaagguccgcgaccaggagggccgcaucaacuacuacuggacccuccucgagcccggcgacaccaucaucuucgaggccaacggcaaccucaucgccccccgcuacgccuucgcccucucccgcggcuucggcuccggcaucaucaacuccaacgcccccauggacaagugcgacgccaagugccagaccccccagggcgccaucaacuccucccuccccuuccagaacguccaccccgucaccaucggcgagugccccaaguacguccgcuccgccaagcuccgcauggucaccggccuccgcaacauccccuccauccagucccgcggccucuucggcgccaucgccggcuucaucgagggcggcuggaccggcauggucgacggcugguacggcuaccaccaccagaacgagcagggcuccggcuacgccgccgaccagaaguccacccagaacgccaucaacggcaucaccaacaaggucaacuccgucaucgagaagaugaacacccaguucaccgccgucggcaaggaguucaacaagcucgagcgccgcauggagaaccucaacaagaaggucgacgacggcuucaucgacaucuggaccuacaacgccgagcuccucguccuccucgagaacgagcgcacccucgacuuccacgacuccaacgucaagaaccucuacgagaaggucaagucccagcucaagaacaacgccaaggagaucggcaacggcugcuucgaguucuaccacaagugcaacgacgagugcauggaguccgucaagaacggcaccuacgacuaccccaaguacuccgaggaguccaagcucaaccgcgagaagaucgacggcgucaagcucgaguccaugggcgucuaccagauccucgccaucuacuccaccgucgccuccucccucguccuccucgucucccucggcgccaucuccuucuggaugugcuccaacggcucccuccagugccgcaucugcaucuga

SEQ ID NO: 101991 - RNA, 1698 nt, Artificial Sequence
  derived and/or modified CDS sequence (opt2) from hemagglutinin__InfluenzaA__ADN89116
augaaggucaagcuccucauccuccucugcaccuucaccgccaccuacgccgacaccaucugcaucggcuaccacgccaacaacuccaccgacaccgucgacaccguccucgagaagaacgucaccgucacccacuccgucaaccuccucgagaacucccacaacggcaagcucugccuccucaagggcaucgccccccuccagcucggcaacugcuccgucgccggcuggauccucggcaaccccgagugcgagcuccucaucuccaaggaguccugguccuacaucgucgagaagcccaaccccgagaacggcaccugcuaccccggccacuucgccgacuacgaggagcuccgcgagcagcucuccuccgucuccuccuucgagcgcuucgagaucuuccccaaggaguccuccuggcccaaccacaccgucaccggcgucuccgccuccugcucccacaacggcgaguccuccuucuaccgcaaccuccucuggcucaccgucaagaacggccucuaccccaaccucuccaaguccuacgccaacaacaaggagaaggagguccucguccucuggggcguccaccacccccccaacaucgucgaccagaagacccucuaccgcaccgagaacgccuacgucuccgucgucuccucccacuacucccgcaaguucacccccgagaucgccaagcgccccaagguccgcgaccaggagggccgcaucaacuacuacuggacccuccucgagcccggcgacaccaucaucuucgaggccaacggcaaccucaucgccccccgcuacgccuucgcccucucccgcggcuucggcuccggcaucaucaacuccaacgcccccauggacaagugcgacgccaagugccagaccccccgcggcgccaucaacuccucccuccccuuccagaacguccaccccgucaccaucggcgagugccccaaguacguccgcuccgccaagcuccgcauggucaccggccuccgcaacauccccuccauccagucccgcggccucuucggcgccaucgccggcuucaucgagggcggcuggaccggcauggucgacggcugguacggcuaccaccaccagaacgagcagggcuccggcuacgccgccgaccagaaguccacccagaacgccaucaacggcaucaccaacaaggucaacuccgucaucgagaagaugaacacccaguucaccgccgucggcaaggaguucaacaaccucgagcgccgcauggagaaccucaacaagaaggucgacgacggcuucaucgacaucuggaccuacaacgccgagcuccucguccuccucgagaacgagcgcacccucgacuuccacgacuccaacgucaagaaccucuacgagaaggucaagucccagcucaagaacaacgccaaggagaucggcaacggcugcuucgaguucuaccacaagugcaacgacgagugcauggaguccgucaagaacggcaccuacgacuaccccaaguacuccgaggaguccaagcucaaccgcgagaagaucgacggcgucaagcucgaguccaugggcgucuaccagauccucgccaucuacuccaccgucgccuccucccucguccuccucgucucccucggcgccaucuccuucuggaugugcuccaacggcucccuccagugccgcaucugcaucuga

SEQ ID NO: 101992 - RNA, 1698 nt, Artificial Sequence
  derived and/or modified CDS sequence (opt2) from hemagglutinin__InfluenzaA__ADN89127
augaaggucaagcuccucguccuccucugcacccucaccgccaccuacgccgacaccaucugcaucggcuaccacgccaacaacuccaccgacaccgucgacaccguccucgagaagaacgucaccgucacccacuccgucaaccuccucgagaacucccacaacggcaagcucugccuccucaagggcaucgccccccuccagcucggcaacugcuccgucgccggcuggauccucggcaaccccgagugcgagcuccucaucuccaaggaguccugguccuacaucgucgagaagcccaaccccgagaacggcaccugcuaccccggccacuucgccgacuacgaggagcuccgcgagcagcucuccuccgucuccuccuucgagcgcuucgagaucuuccccaagggcuccuccuggcccaaccacaccgucaccggcgucuccgccuccugcucccacaacggcgagaacuccuucuaccgcaaccuccucuggcucaccggcaagaacggccucuaccccaaccucuccaaguccuacgccaacaacaaggagaaggagguccucguccucuggggcguccaccacccccccaacaucgccgaccagaagacccucuaccacaccgagaacgccuacgucuccgucgucuccucccacuacucccgcaaguucacccccgagaucgccaagcgccccaagguccgcgaccaggagggccgcaucaacuacuacuggacccuccucgagcccggcgacaccaucaucuucgaggccaacggcaaccucaucgccccccgcuacgccuucgcccucucccgcggcuucggcuccggcaucaucaacuccaacgcccccauggacaagugcgacgccaagugccagaccccccagggcgccaucaacuccucccuccccuuccagaacguccaccccgucaccaucggcgagugccccaaguacguccgcuccgccaagcuccgcauggucaccggccuccgcaacauccccuccauccagucccgcggccucuucggcgccaucgccggcuucaucgagggcggcuggaccggcauggucgacggcugguacggcuaccaccaccagaacgagcagggcuccggcuacgccgccgaccagaaguccacccagaacgccaucaacggcaucaccaacaaggucaacuccgucaucgagaagaugaacacccaguucaccgccgucggcaaggaguucaacaagcucgagcgccgcauggagaaccucaacaagaaggucgacgacggcuucaucgacaucuggaccuacaacgccgagcuccucguccuccucgagaacgagcgcacccucgacuuccacgacuccaacgucaagaaccucuacgagaaggucaagucccagcucaagaacaacgccgaggagaucggcaacggcugcuucgaguucuaccacaagugcaacgacgagugcauggaguccgucaagaacggcaccuacgacuaccccaaguacuccgaggaguccaagcucaaccgcgagaagaucgacggcgucaagcucgaguccaugggcgucuaccagauccucgccaucuacuccaccgucgccuccucccucguccuccucgucucccucggcgccaucuccuucuggaugugcuccaacggcucccuccagugccgcaucugcaucuga

SEQ ID NO: 101993 - RNA, 1698 nt, Artificial Sequence
  derived and/or modified CDS sequence (opt2) from hemagglutinin__InfluenzaA__ADN89149
augaaggucaagcuccucguccuccucugcaccuucaccgccaccuacgccgacaccaucugcaucggcuaccacgccaacaacuccaccgacaccgucgacaccguccucgagaagaacgucaccgucacccacuccgucaaccuccucgagaacucccacaacggcaagcucugccuccucaagggcaucgccccccuccagcucggcaacugcuccgucgccggcuggauccucggcaaccccgagugcgagcuccucaucuccaaggaguccugguccuacaucgucgagaagcccaaccccgagaacggcaccugcuaccccggccacuucgccgacuacgaggagcuccgcgagcagcucuccuccgucuccuccuucgagcgcuucgagaucuuccccaaggaguccuccuggcccaaccacaccgucaccggcgucuccgccuccugcucccacaacggcgaguccuccuucuaccgcaaccuccucuggcucaccgagaagaacggccucuaccccaaccucuccaaguccuacgccaacaacaaggagaaggagguccucguccucuggggcguccaccacccccccuccaucuccgaccagaagacccucuaccacaccgagaacgccuacgucuccgucgucuccucccacuacucccgcaaguucacccccgaggucgccaagcgccccaagguccgcgaccaggagggccgcaucaacuacuacuggacccuccucgagcccggcgacaccaucaucuucgaggccaacggcaaccucaucgccccccgcuacgccuucgcccucucccgcggcuucggcuccggcaucaucaacuccaacgcccccauggacaagugcgacgccaagugccagaccccccagggcgccaucaacuccucccuccccuuccagaacguccaccccgucaccaucggcgagugccccaaguacguccgcuccgccaagcuccgcauggucaccggccuccgcaacauccccuccauccagucccgcggccucuucggcgccaucgccggcuucaucgagggcggcuggaccggcauggucgacggcugguacggcuaccaccaccagaacgagcagggcuccggcuacgccgccgaccagaaguccacccagaacgccaucaacggcaucaccaacaaggucaacuccgucaucgagaagaugaacacccaguucaccgccgucggcaaggaguucaacaagcucgagcgccgcauggagaaccucaacaagaaggucgacgacggcuucaucgacaucuggaccuacaacgccgagcuccucguccuccucgagaacgagcgcacccucgacuuccacgacuccaacgucaagaaccucuacgagaaggucaagucccagcucaagaacaacgccaaggagaucggcaacggcugcuucgaguucuaccacaagugcaacgacgagugcauggaguccgucaagaacggcaccuacgacuaccccaaguacuccgaggaguccaagcucaaccgcgagaagaucgacggcgucaagcucgaguccaugggcgucuaccagauccucgccaucuacuccaccgucgccuccucccucguccuccucgucucccucggcgccaucuccuucuggaugugcuccaacggcucccuccagugccgcaucugcaucuga

SEQ ID NO: 101994 - RNA, 1698 nt, Artificial Sequence; identical to SEQ ID NO: 101549
  derived and/or modified CDS sequence (opt2) from hemagglutinin__InfluenzaA__ADN89171

SEQ ID NO: 101995 - RNA, 1698 nt, Artificial Sequence
  derived and/or modified CDS sequence (opt2) from hemagglutinin__InfluenzaA__ADN89182
augaaggucaagcuccucguccuccucugcacccucaccgccaccuacgccgacaccaucugcaucggcuaccacgccaacaacuccaccgacaccgucgacaccguccucgagaagaacgucaccgucacccacuccgucaaccuccucgagaacucccacaacggcaagcucugccuccucaagggcaucgccccccuccagcucggcaacugcuccgucgccggcuggauccucggcaaccccgagugcgagcuccucaucuccaaggaguccugguccuacaucgucgagaagcccaaccccgagaacggcaccugcuaccccggccacuucgccgacuacgaggagcuccgcgagcagcucuccuccgucuccuccuucgagcgcuucgagaucuuccccaaggaguccuccuggcccaaccacaccgucaccggcgucuccgccuccugcucccacaacggcgaguccuccuucuaccgcaaccuccucuggcucaccggcaagaacggccucuaccccaaccucuccaaguccuacgccaacaacaaggagaaggagguccucguccucuggggcguccaccacccccccaacaucgucgaccagaagacccucuaccgcaccgagaacgccuacgucuccgucgucuccucccacuacucccgcaaguucacccccgagaucgccaagcgccccaagguccgcgaccaggagggccgcaucaacuacuacuggacccuccucgagcccggcgacaccaucaucuucgaggccaacggcaaccucaucgccccccgcuacgccuucgcccucucccgcggcuucggcuccggcaucaucaacuccaacgcccccauggacaagugcgacgccaagugccagaccccccagggcgccaucaacuccucccuccccuuccagaacguccaccccgucaccaucggcgagugccccaaguacguccgcuccgccaagcuccgcauggucaccggccuccgcaacauccccuccauccagucccgcggccucuucggcgccaucgccggcuucaucgagggcggcuggaccggcauggucgacggcugguacggcuaccaccaccagaacgagcagggcuccggcuacgccgccgaccagaaguccacccagaacgccaucaacggcaucaccaacaaggucaacuccgucaucgagaagaugaacacccaguucaccgccgucggcaaggaguucaacaagcucgagcgccgcauggagaaccucaacaagaaggucgacgacggcuucaucgacaucuggaccuacaacgccgagcuccucguccuccucgagaacgagcgcacccucgacuuccacgacuccaacgucaagaaccucuacgagaaggucaagucccagcucaagaacaacgccaaggagaucggcaacggcugcuucgaguucuaccacaagugcaacgacgagugcauggaguccgucaagaacggcaccuacgacuaccccaaguacuccgaggaguccaagcucaaccgcgagaagaucgacggcgucaagcucgaguccaugggcgucuaccagauccucgccaucuacuccaccgucgccuccucccucguccuccucgucucccucggcgccaucuccuucuggaugugcuccaacggcucccuccagugccgcaucugcaucuga

SEQ ID NO: 101996 - RNA, 1698 nt, Artificial Sequence; identical to SEQ ID NO: 101549
  derived and/or modified CDS sequence (opt2) from hemagglutinin__InfluenzaA__ADN89193

SEQ ID NO: 101997 - RNA, 1698 nt, Artificial Sequence; identical to SEQ ID NO: 101549
  derived and/or modified CDS sequence (opt2) from hemagglutinin__InfluenzaA__ADN89204

SEQ ID NO: 101998 - RNA, 1698 nt, Artificial Sequence; identical to SEQ ID NO: 101976
  derived and/or modified CDS sequence (opt2) from hemagglutinin__InfluenzaA__ADN89215

SEQ ID NO: 101999 - RNA, 1698 nt, Artificial Sequence
  derived and/or modified CDS sequence (opt2) from hemagglutinin__InfluenzaA__ADN89226
augaaggucaagcuccucguccuccucugcaccuucgccgccaccuacgccgacaccaucugcaucggcuaccacgccaacaacuccaccgacaccgucgacaccguccucgagaagaacgucaccgucacccacuccgucaaccuccucgagaacucccacaacggcaagcucugccuccucaagggcaucgccccccuccagcucggcaacugcuccgucgccggcuggauccucggcaaccccgagugcgagcuccucaucuccaaggaguccugguccuacaucgucgagaagcccaaccccgagaacggcaccugcuaccccggccacuucgccgacuacgaggagcuccgcgagcagcucuccuccgucuccuccuucgagcgcuucgagaucuuccccaaggaguccuccuggcccaaccacaccgucaccggcgucuccgccuccugcucccacaacggcgaguccuccuucuaccgcaaccuccucuggcucaccgagaagaacggccucuaccccaaccucuccaaguccuacgccaacaacaaggagaaggagguccucguccucuggggcguccaccacccccccuccaucuccgaccagaagacccucuaccacaccgagaacgccuacgucuccgucgucuccucccacuacucccgcaaguucacccccgagaucgccaagcgccccaagguccgcgaccaggagggccgcaucaacuacuacuggacccuccucgagcccggcgacaccaucaucuucgaggccaacggcaaccucaucgccccccgcuacgccuucgcccucaaccgcggcuucggcuccggcaucaucaacuccaacgcccccauggacaagugcgacgccaagugccagaccccccagggcgccaucaacuccucccuccccuuccagaacguccaccccgucaccaucggcgagugccccaaguacguccgcuccgccaagcuccgcauggucaccggccuccgcaacauccccuccguccagucccgcggccucuucggcgccaucgccggcuucaucgagggcggcuggaccggcauggucgacggcugguacggcuaccaccaccagaacgagcagggcuccggcuacgccgccgaccagaaguccacccagaacgccaucaacggcaucaccaacaaggucaacuccgucaucgagaagaugaacacccaguucaccgccgucggcaaggaguucaacaagcucgagcgccgcauggagaaccucaacaagaaggucgacgacggcuucaucgacaucuggaccuacaacgccgagcuccucguccuccucgagaacgagcgcacccucgacuuccacgacuccaacgucaagaaccucuacgagaaggucaagaaccagcucaagaacaacgccaaggagaucggcaacggcugcuucgaguucuaccacaagugcaacgacgagugcauggaguccgucaagaacggcaccuacgacuaccccaaguacuccgaggaguccaagcucaaccgcgagaagaucgacggcgucaagcucgaguccaugggcgucuaccagauccucgccaucuacuccaccgucgccuccucccucguccuccucgucucccucggcgccaucuccuucuggaugugcuccaacggcucccuccagugccgcaucugcaucuga

SEQ ID NO: 102000 - RNA, 1698 nt, Artificial Sequence; identical to SEQ ID NO: 101976
  derived and/or modified CDS sequence (opt2) from hemagglutinin__InfluenzaA__ADN89237

SEQ ID NO: 102001 - RNA, 1698 nt, Artificial Sequence
  derived and/or modified CDS sequence (opt2) from hemagglutinin__InfluenzaA__ADN89248
augaaggucaagcuccucguccuccucugcaccuucaccgccaccuacgccgacaccaucugcaucggcuaccacgccaacaacuccaccgacaccgucgacaccguccucgagaagaacgucaccgucacccacuccgucaaccuccucgagaacucccacaacggcaagcucugccuccucaagggcaucgccccccuccagcucggcaacugcuccaucgccggcuggauccucggcaaccccgagugcgagcuccucaucuccaaggaguccugguccuacaucgucgagaagcccaaccccgagaacggcaccugcuaccccggccacuucgccgacuacgaggagcuccgcgagcagcucuccuccgucuccuccuucgagcgcuucgagaucuuccccaaggaguccuccuggcccaaccacaccgucaccggcgucuccgccuccugcucccacaacggcgaguccuccuucuaccgcaaccuccucuggcucaccggcaagaacggccucuaccccaaccucuccaaguccuacgccaacaacaaggagaaggagguccucguccucuggggcguccaccacccccccuccaucuccgaccagaagacccucuaccacaccgagaacgccuacgucuccgucgucuccucccacuacucccgcaaguucacccccgagaucgccaagcgccccaagguccgcgaccaggagggccgcaucaacuacuacuggacccuccucgagcccggcgacaccaucaucuucgaggccaacggcaaccucaucgccccccgcuacgccuucgcccucucccgcggcuucggcuccggcaucaucaacuccaacgcccccauggacaagugcgacgccaagugccagaccccccagggcgccaucaacuccucccuccccuuccagaacguccaccccgucaccaucggcgagugccccaaguacguccgcuccgccaagcuccgcauggucaccggccuccgcaacauccccuccauccagucccgcggccucuucggcgccaucgccggcuucaucgagggcggcuggaccggcauggucgacggcugguacggcuaccaccaccagaacgagcagggcuccggcuacgccgccgaccagaaguccacccagaacgccaucaacggcaucaccaacaaggucaacuccgucaucgagaagaugaacacccaguucaccgccgucggcaaggaguucaacaagcucgagcgccgcauggagaaccucaacaagaaggucgacgacggcuucaucgacaucuggaccuacaacgccgagcuccucguccuccucgagaacgagcgcacccucgacuuccacgacuccaacgucaagaaccucuacgagaaggucaagucccagcucaagaacaacgccaaggagaucggcaacggcugcuucgaguucuaccacaagugcaacgacgagugcauggaguccgucaagaacggcaccuacgacuaccccaaguacuccgaggaguccaagcucaaccgcgagaagaucgacggcgucaagcucgaguccaugggcgucuaccagauccucgccaucuacuccaccgucgccuccucccucguccuccucgucucccucggcgccaucuccuucuggaugugcuccaacggcucccuccagugccgcaucugcaucuga

SEQ ID NO: 102002 - RNA, 1698 nt, Artificial Sequence; identical to SEQ ID NO: 101989
  derived and/or modified CDS sequence (opt2) from hemagglutinin__InfluenzaA__ADN89259

SEQ ID NO: 102003 - RNA, 1698 nt, Artificial Sequence
  derived and/or modified CDS sequence (opt2) from hemagglutinin__InfluenzaA__ADN89281
augaaggucaagcuccucguccuccucugcaccuucaccgccaccuacgccgacaccaucugcaucggcuaccacgccaacaacuccaccgacaccgucgacaccguccucgagaagaacgucaccgucacccacuccgucaaccuccucgagaacucccacaacggcaagcucugccuccucaagggcaucgccccccuccagcucggcaacugcuccgucgccggcuggauccucggcaaccccgagugcgagcuccucaucuccaaggaguccugguccuacaucgucgagaagcccaaccccgagaacggcaccugcuaccccggccacuucgccgacuacgaggagcuccgcgagcagcucuccuccgucuccuccuucgagcgcuucgagaucuuccccaaggaguccuccuggcccaaccacaccgucaccggcgucuccgccuccugcucccacaacggcgaguccuccuucuaccgcaaccuccucuggcucaccgagaagaacggccucuaccccaaccucuccaaguccuacgccaacaacaaggagaaggagguccucguccucuggggcguccaccacccccccuccaucuccgaccagaagacccucuaccacaccgagaacgccuacgucuccgucgucuccucccacuacucccgcaaguucacccccgagaucgccaagcgccccaagguccgcgaccaggagggccgcaucaacuacuacuggacccuccucgagcccggcgacaccaucaucuucgaggccaacggcaaccucaucgccccccgcuacgccuucgcccucucccgcggcuucggcuccggcaucaucaacuccaacgcccccauggacaagugcgacgccaagugccagaccccccagggcgccaucaacuccucccuccccuuccagaacguccaccccgucaccaucggcgagugccccaaguacguccgcuccgccaagcuccgcauggucaccggccuccgcaacauccccuccauccagucccgcggccucuucggcgccaucgccggcuucaucgagggcggcuggaccggcauggucgacggcugguacggcuaccaccaccagaacgagcagggcuccggcuacgccgccgaccagaaguccacccagaacgccaucaacggcaucaccaacaaggucaacuccgucaucgagaagaugaacacccaguucaccgccgucggcaaggaguucaacaagcucgagcgccgcauggagaaccucaacaagaaggucgacgacggcuucaucgacaucuggaccuacaacgccgagcuccucguccuccucgagaacgagcgcacccucgacuuccacgacuccaacgucaagaaccucuacgagaaggucaagaaccagcucaagaacaacgccaaggagaucggcaacggcugcuucgaguucuaccacaagugcaacgacgagugcauggaguccgucaagaacggcaccuacgacuaccccaaguacuccgaggaguccaagcucaaccgcgagaagaucgacggcgucaagcucgaguccaugggcgucuaccagauccucgccaucuacuccaccgucgccuccucccucguccuccucgucucccucggcgccaucuccuucuggaugugcuccaacggcucccuccagugccgcaucugcaucuga

SEQ ID NO: 102004 - RNA, 1698 nt, Artificial Sequence; identical to SEQ ID NO: 102003
  derived and/or modified CDS sequence (opt2) from hemagglutinin__InfluenzaA__ADN89292

SEQ ID NO: 102005 - RNA, 1698 nt, Artificial Sequence; identical to SEQ ID NO: 102003
  derived and/or modified CDS sequence (opt2) from hemagglutinin__InfluenzaA__ADN89303

SEQ ID NO: 102006 - RNA, 1698 nt, Artificial Sequence; identical to SEQ ID NO: 99662
  derived and/or modified CDS sequence (opt2) from hemagglutinin__InfluenzaA__ADN89314

SEQ ID NO: 102007 - RNA, 1698 nt, Artificial Sequence; identical to SEQ ID NO: 99167
  derived and/or modified CDS sequence (opt2) from hemagglutinin__InfluenzaA__ADN89325

SEQ ID NO: 102008 - RNA, 1698 nt, Artificial Sequence
  derived and/or modified CDS sequence (opt2) from hemagglutinin__InfluenzaA__ADN89336
augaaggucaagcuccucguccuccucugcaccuucaccgccaccuacgccgacaccaucugcaucggcuaccacgccaacaacuccaccgacaccgucgacaccguccucgagaagaacgucaccgucacccacuccgucaaccuccucgagaacucccacaacggcaagcucugccuccucaagggcaucgccccccuccagcucggcaacugcuccgucgccggcuggauccucggcaaccccgagugcgagcuccucaucuccaaggaguccugguccuacaucgucgagaagcccaaccccgagaacggcaccugcuaccccggccacuucgccgacuacgaggagcuccgcgagcagcucuccuccgucuccuccuucgagcgcuucgagaucuuccccaaggaguccuccuggcccaaccacaccgucaccggcgucuccgccuccugcucccacaacggcgagcgcuccuucuaccgcaaccuccucuggcucaccggcaagaacggccucuaccccaaccucuccaaguccuacgccaacaacaaggagaaggagguccucguccucuggggcguccaccacccccccgacaucggcgaccagaagacccucuaccacaccgagaacgccuacgucuccgucgucuccucccacuacucccgcaaguucacccccgagaucgccaagcgccccaagguccgcgaccaggagggccgcaucaacuacuacuggacccuccucgagcccggcgacaccaucaucuucgaggccaacggcaaccucaucgccccccgcuacgccuucgcccucucccgcggcuucggcuccggcaucaucaacuccaacgcccccauggacaagugcgacgccaagugccagaccccccagggcgccaucaacuccucccuccccuuccagaacguccaccccgucaccaucggcgagugccccaaguacguccgcuccgccaagcuccgcauggucaccggccuccgcaacauccccuccauccagucccgcggccucuucggcgccaucgccggcuucaucgagggcggcuggaccggcauggucgacggcugguacggcuaccaccaccagaacgagcagggcuccggcuacgccgccgaccagaaguccacccagaacgccaucaacggcaucaccaacaaggucaacuccgucaucgagaagaugaacacccaguucaccgccgucggcaaggaguucaacaagcucgagcgccgcauggagaaccucaacaagaaggucgacgacggcuucaucgacaucuggaccuacaacgccgagcuccucguccuccucgagaacgagcgcacccucgacuuccacgacuccaacgucaagaaccucuacgagaaggucaagucccagcucaagaacaacgccaaggagaucggcaacggcugcuucgaguucuaccacaagugcaacgacgagugcauggaguccgucaagaacggcaccuacgacuaccccaaguacuccgaggaguccaagcucaaccgcgagaagaucgacggcgucaagcucgaguccaugggcgucuaccagauccucgccaucuacuccaccgucgccuccucccucguccuccucgucucccucggcgccaucuccuucuggaugugcuccaacggcucccuccagugccgcaucugcaucuga

SEQ ID NO: 102009 - RNA, 1698 nt, Artificial Sequence; identical to SEQ ID NO: 101999
  derived and/or modified CDS sequence (opt2) from hemagglutinin__InfluenzaA__ADN89347

SEQ ID NO: 102010 - RNA, 1698 nt, Artificial Sequence; identical to SEQ ID NO: 99167
  derived and/or modified CDS sequence (opt2) from hemagglutinin__InfluenzaA__ADN89358

SEQ ID NO: 102011 - RNA, 1698 nt, Artificial Sequence
  derived and/or modified CDS sequence (opt2) from hemagglutinin__InfluenzaA__ADN89369
augaaggucaagcuccucguccuccucugcaccuucaccgccaccuacgccgacaccaucugcaucggcuaccacgccaacaacuccaccgacaccgucgacaccguccucgagaagaacgucaccgucacccacuccgucaaccuccucgagaacucccacaacggcaagcucugccuccucaagggcaucgccccccuccagcucggcaacugcuccgucgccggcuggauccucggcaaccccgagugcgagcuccucaucuccaaggaguccugguccuacaucgucgagaagcccaaccccgagaacggcaccugcuaccccggccacuucgccgacuacgaggagcuccgcgagcagcucuccuccgucuccuccuucgagcgcuucgagaucuuccccaaggaguccuccuggcccaaccacaccgucaccggcgucuccgccuccugcucccacaacggcgaguccuccuucuaccgcaaccuccucuggcucaccgucaagaacggccucuaccccaaccucuccaaguccuacgccaacaacaaggagaaggagguccucguccucuggggcguccaccacccccccaacaucgucgaccagaagacccucuaccgcaccgagaacgccuacgucuccgucgucuccucccacuacucccgcaaguucauccccgagaucgccaagcgccccaagguccgcgaccaggagggccgcaucaacuacuacuggacccuccucgagcccggcgacaccaucaucuucgaggccaacggcaaccucaucgccccccgcuacgccuucgcccucucccgcggcuucggcuccggcaucaucaacuccaacgcccccauggacaagugcgacgccaagugccagaccccccgcggcgccaucaacuccucccuccccuuccagaacguccaccccgucaccaucggcgagugccccaaguacguccgcuccgccaagcuccgcauggucaccggccuccgcaacauccccuccauccagucccgcggccucuucggcgccaucgccggcuucaucgagggcggcuggaccggcauggucgacggcugguacggcuaccaccaccagaacgagcagggcuccggcuacgccgccgaccagaaguccacccagaacgccaucaacggcaucaccaacaaggucaacuccgucaucgagaagaugaacacccaguucaccgccgucggcaaggaguucaacaagcucgagcgccgcauggagaaccucaacaagaaggucgacgacggcuucaucgacaucuggaccuacaacgccgagcuccucguccuccucgagaacgagcgcacccucgacuuccacgacuccaacgucaagaaccucuacgagaaggucaagucccagcucaagaacaacgccaaggagaucggcaacggcugcuucgaguucuaccacaagugcaacgacgagugcauggaguccgucaagaacggcaccuacgacuaccccaaguacuccgaggaguccaagcucaaccgcgagaagaucgacggcgucaagcucgaguccaugggcgucuaccagauccucgccaucuacuccaccgucgccuccucccucguccuccucgucucccucggcgccaucuccuucuggaugugcuccaacggcucccuccagugccgcaucugcaucuga

SEQ ID NO: 102012 - RNA, 1698 nt, Artificial Sequence
  derived and/or modified CDS sequence (opt2) from hemagglutinin__InfluenzaA__ADN89380
augaaggucaagcuccucguccuccucugcacccucaccgccaccuacgccgacaccaucugcaucggcuaccacgccaacaacuccaccgacaccgucgacaccguccucgagaagaacgucaccgucacccacuccgucaaccuccucgagaacucccacaacggcaagcucugccuccucaagggcaucgccccccuccagcucggcaacugcuccgucgccggcuggauccucggcaaccccgagugcgagcuccucaucuccaaggaguccugguccuacaucgucgagaagcccaaccccgagaacggcaccugcuaccccggccacuucgccgacuacgaggagcuccgcgagcagcucuccuccgucuccuccuucgagcgcuucgagaucuuccccaaggaguccuccuggcccaaccacaccgucaccggcgucuccgccuccugcucccacaacggcgaguccuccuucuaccgcaaccuccucuggcucaccggcaagaacggccucuaccccaaccucuccaaguccuacgccaacaacaaggagaaggagguccucguccucuggggcguccaccacccccccaacaucgucgaccagaagacccucuaccgcaccgagaacgccuacgucuccgucgucuccucccacuacucccgcaaguucacccccgagaucgccaagcgccccaagguccgcgaccaggagggccgcaucaacuacuacuggacccuccucgagcccggcgacaccaucaucuucgaggccaacggcaaccucaucgccccccgcuacgccuucgcccucucccgcggcuucggcuccggcaucaucaacuccaacgcccccauggacaagugcgacgccaagugccagaccccccagggcgccaucaacuccucccuccccuuccagaacguccaccccgucaccaucggcgagugccccaaguacguccgcuccgccaagcuccgcauggucaccggccuccgcaacauccccuccauccagucccgcggccucuucggcgccaucgccggcuucaucgagggcggcuggaccggcauggucgacggcugguacggcuaccaccaccagaacgagcagggcuccggcuacgccgccgaccagaaguccacccagaacgccaucaacggcaucaccaacaaggucaacuccgucaucgagaagaugaacacccaguucaccgccgucggcaaggaguucaacaagcucgagcgccgcauggagaaccucaacaagaaggucgacgacggcuucaucgacaucuggaccuacaacgccgagcuccucguccuccucgagaacgagcgcacccucgacuuccacgacuccaacgucaagaaccucuacgagaaggucaagucccagcucaagaacaacgccaaggagaucggcaacggcugcuucgaguucuaccacaagugcaacaacgagugcauggaguccgucaagaacggcaccuacgacuaccccaaguacuccgaggaguccaagcucaaccgcgagaagaucgacggcgucaagcucgaguccaugggcgucuaccagauccucgccaucuacuccaccgucgccuccucccucguccuccucgucucccucggcgccaucuccuucuggaugugcuccaacggcucccuccagugccgcaucugcaucuga

SEQ ID NO: 102013 - RNA, 1698 nt, Artificial Sequence
  derived and/or modified CDS sequence (opt2) from hemagglutinin__InfluenzaA__ADN89391
augaaggucaagcuccucguccuccucugcaccuucaccgccaccuacgccgacaccaucugcaucggcuaccacgccaacaacuccaccgacaccgucgacaccguccucgagaagaacgucaccgucacccacuccgucaaccuccucgagaacucccacaacggcaagcucugccuccucaagggcaucgccccccuccagcucggcaacugcuccgucgccggcuggauccucggcaaccccgagugcgagcuccucaucuccaaggaguccugguccuacaucgucgagaagcccaaccccgagaacggcaccugcuaccccggccacuucgccgacuacgaggagcuccgcgagcagcucuccuccgucuccuccuucgagcgcuucgagaucuuccccaaggaguccuccuggcccaaccacaccgucaccggcgucuccgccuccugcucccacaacggcgagcgcuccuucuacaagaaccuccucuggcucaccggcaagaacggccucuaccccaaccucuccaaguccuacgccaacaacaaggagaaggagguccucguccucuggggcguccaccacccccccgacaucggcgaccagaagacccucuaccacaccgagaacgccuacgucuccgucgucuccucccacuacucccgcaaguucacccccgagaucgccaagcgccccaagguccgcgaccaggagggccgcaucaacuacuacuggacccuccucgagcccggcgacaccaucaucuucgaggccaacggcaaccucaucgccccccgcuacgccuucgcccucucccgcggcuucggcuccggcaucaucaacuccaacgcccccauggacaagugcgacgccaagugccagaccccccagggcgccaucaacuccucccuccccuuccagaacguccaccccgucaccaucggcgagugccccaaguacguccgcuccgccaagcuccgcauggucaccggccuccgcaacauccccuccauccagucccgcggccucuucggcgccaucgccggcuucaucgagggcggcuggaccggcauggucgacggcugguacggcuaccaccaccagaacgagcagggcuccggcuacgccgccgaccagaaguccacccagaacgccaucaacggcaucaccaacaaggucaacuccgucaucgagaagaugaacacccaguucaccgccgucggcaaggaguucaacaagcucgagcgccgcauggagaaccucaacaagaaggucgacgacggcuucaucgacaucuggaccuacaacgccgagcuccucguccuccucgagaacgagcgcacccucgacuuccacgacuccaacgucaagaaccucuacgagaaggucaagucccagcucaagaacaacgccaaggagaucggcaacggcugcuucgaguucuaccacaagugcaacgacgagugcauggaguccgucaagaacggcaccuacgacuaccccaaguacuccgaggaguccaagcucaaccgcgagaagaucgacggcgucaagcucgaguccaugggcgucuaccagauccucgccaucuacuccaccgucgccuccucccucguccuccucgucucccucggcgccaucuccuucuggaugugcuccaacggcucccuccagugccgcaucugcaucuga

SEQ ID NO: 102014 - RNA, 1698 nt, Artificial Sequence
  derived and/or modified CDS sequence (opt2) from hemagglutinin__InfluenzaA__ADN89402
augaaggucaagcuccucguccuccucugcaccuucaccgccaccuacgccgacaccaucugcaucggcuaccacgccaacaacuccaccgacaccgucgacaccguccucgagaagaacgucaccgucacccacuccgucaaccuccucgagaacucccacaacggcaagcucugccuccucaagggcaucgccccccuccagcucggcaacugcuccgucgccggcuggauccucggcaaccccgagugcgagcuccucaucuccaagaaguccugguccuacaucgucgagaagcccaaccccgagaacggcaccugcuaccccggccacuucgccgacuacgaggagcucaaggagcagcucuccuccgucuccuccuucgagcgcuucgagaucuuccccaaggaguccuccuggcccaaccacaccgucaccggcgucuccgccuccugcucccacaacggcgaguccuccuucuaccgcaaccuccucuggcucaccggcaagaacggccucuaccccaaccucuccaaguccuacgccaacaacaaggagaaggagguccucguccucuggggcguccaccacccccccaacaucgucgaccagaagacccucuaccgcaccgagaacgccuacgucuccgucgucuccucccacuacucccgcaaguucacccccgagaucgccaagcgccccaagguccgcgaccaggagggccgcaucaacuacuacuggacccuccucgagcccggcgacaccaucaucuucgaggccaacggcaaccucaucgccccccgcuacgccuucgcccucucccgcggcuucggcuccggcaucaucaacuccaacgcccccaugggcaagugcgacgccaagugccagaccccccagggcgccaucaacuccucccuccccuuccagaacguccaccccgucaccaucggcgagugccccaaguacguccgcuccgccaagcuccgcauggucaccggccuccgcaacauccccuccauccagucccgcggccucuucggcgccaucgccggcuucaucgagggcggcuggaccggcauggucgacggcugguacggcuaccaccaccagaacgagcagggcuccggcuacgccgccgaccagaaguccacccagaacgccaucaacggcaucaccaacaaggucaacuccgucaucgagaagaugaacacccaguucaccgccgucggcaaggaguucaacaagcucgagcgccgcauggagaaccucaacaagaaggucgacgacggcuucaucgacaucuggaccuacaacgccgagcuccucguccuccucgagaacgagcgcacccucgacuuccacgacuccaacgucaagaaccucuacgagaaggucaagucccagcucaagaacaacgccaaggagaucggcaacggcugcuucgaguucuaccacaagugcaacgacgagugcauggaguccgucaagaacggcaccuacgacuaccccaaguacuccgaggaguccaagcucaaccgcgagaagaucgacggcgucaagcucgaguccaugggcgucuaccagauccucgccaucuacuccaccgucgccuccucccucguccuccucgucucccucggcgccaucuccuucuggaugugcuccaacggcucccuccagugccgcaucugcaucuga

SEQ ID NO: 102015 - RNA, 1698 nt, Artificial Sequence; identical to SEQ ID NO: 101976
  derived and/or modified CDS sequence (opt2) from hemagglutinin__InfluenzaA__ADN89413

SEQ ID NO: 102016 - RNA, 1698 nt, Artificial Sequence; identical to SEQ ID NO: 101549
  derived and/or modified CDS sequence (opt2) from hemagglutinin__InfluenzaA__ADN89424

SEQ ID NO: 102017 - RNA, 1698 nt, Artificial Sequence
  derived and/or modified CDS sequence (opt2) from hemagglutinin__InfluenzaA__ADN89435
augaaggucaagcuccucguccuccucugcaccuucaccgccaccuacgccgacaccaucugcaucggcuaccacgccaacaacuccaccgacaccgucgacaccguccucgagaagaacgucaccgucacccacuccgucaaccuccucgagaacucccacaacggcaagcucugccuccucaagggcaucgccccccuccagcucggcaacugcuccgucgccggcuggauccucggcaaccccgagugcgagcuccucaucuccaaggaguccugguccuacaucgucgagaagcccaaccccgagaacggcaccugcuaccccggccacuucgccgacuacgaggagcuccgcgagcagcucuccuccgucuccuccuucgagcgcuucgagaucuuccccaaggaguccuccuggcccaaccacaccgucaccggcgucuccgccuccugcucccacaacggcgagaacuccuucuaccgcaaccuccucuggcucaccggcaagaacggccucuaccccaaccucuccaaguccuacgccaacaacaaggagaaggagguccucguccucuggggcguccaccacccccccaacaucgccgaccagaagacccucuaccacaccgagaacgccuacgucuccgucgucuccucccacuacucccgcaaguucacccccgagaucgccaagcgccccaagguccgcgaccaggagggccgcaucaacuacuacuggacccuccucgagcccggcgacaccaucaucuucgaggccaacggcaaccucaucgccccccgcuacgccuucgcccucucccgcggcuucggcuccggcaucaucaacuccaacgcccccauggacaagugcgacgccaagugccagaccccccagggcgccaucaacuccucccuccccuuccagaacguccaccccgucaccaucggcgagugccccaaguacguccgcuccgccaagcuccgcauggucaccggccuccgcaacauccccuccauccagucccgcggccucuucggcgccaucgccggcuucaucgagggcggcuggaccggcauggucgacggcugguacggcuaccaccaccagaacgagcagggcuccggcuacgccgccgaccagaaguccacccagaacgccaucaacggcaucaccaacaaggucaacuccgucaucgagaagaugaacacccaguucaccgccgucggcaaggaguucaacaagcucgagcgccgcauggagaaccucaacaagaaggucgacgacggcuucaucgacaucuggaccuacaacgccgagcuccucguccuccucgagaacgagcgcacccucgacuuccacgacuccaacgucaagaaccucuacgagaaggucaagucccagcucaagaacaacgccaaggagaucggcaacggcugcuucgaguucuaccacaagugcaacgacgagugcauggaguccgucaagaacggcaccuacgacuaccccaaguacuccgaggagucccgccucaaccgcgagaagaucgacggcgucaagcucgaguccaugggcgucuaccagauccucgccaucuacuccaccgucgccuccucccucguccuccucgucucccucggcgccaucuccuucuggaugugcuccaacggcucccuccagugccgcaucugcaucuga

SEQ ID NO: 102018 - RNA, 1698 nt, Artificial Sequence
  derived and/or modified CDS sequence (opt2) from hemagglutinin__InfluenzaA__ADN89446
augaaggccaagcuccucguccuccucugcaccuucaccgccaccuacgccgacaccaucugcaucggcuaccacgccaacaacuccaccgacaccgucgacaccguccucgagaagaacgucaccgucacccacuccgucaaccuccucgagaacucccacaacggcaagcucugccuccucaagggcaucgccccccuccagcucggcaacugcuccgucgccggcuggauccucggcaaccccgagugcgagcuccucaucuccaaggaguccugguccuacaucgucgagaagcccaaccccgagaacggcaccugcuaccccggccacuucgccgacuacgaggagcuccgcgagcagcucuccuccgucuccuccuucgagcgcuucgagaucuuccccaaggaguccuccuggcccaaccacaccgucaccggcgucuccgccuccugcucccacaacggcgagaacuccuucuaccgcaaccuccucuggcucaccggcaagaacggccucuaccccaaccucuccaaguccuacgccaacaacaaggagaaggagguccucguccucuggggcguccaccacccccccaacaucgccgaccagaagacccucuaccacaccgagaacgccuacgucuccgucgucuccucccacuacucccgcaaguucacccccgagaucgccaagcgccccaagguccgcgaccaggagggccgcaucaacuacuacuggacccuccucgagcccggcgacaccaucaucuucgaggccaacggcaaccucaucgccccccgcuacgccuucgcccucucccgcggcuucggcuccggcaucaucaacuccaacgcccccauggacaagugcgacgccaagugccagaccccccagggcgccaucaacuccucccuccccuuccagaacguccaccccgucaccaucggcgagugccccaaguacguccgcuccgccaagcuccgcauggucaccggccuccgcaacauccccuccauccagucccgcggccucuucggcgccaucgccggcuucaucgagggcggcuggaccggcauggucgacggcugguacggcuaccaccaccagaacgagcagggcuccggcuacgccgccgaccagaaguccacccagaacgccaucaacggcaucaccaacaaggucaacuccgucaucgagaagaugaacacccaguucaccgccgucggcaaggaguucaacaagcucgagcgccgcauggagaaccucaacaagaaggucgacgacggcuucaucgacaucuggaccuacaacgccgagcuccucguccuccucgagaacgagcgcacccucgacuuccacgacuccaacgucaagaaccucuacgagaaggucaagucccagcucaagaacaacgccaaggagaucggcaacggcugcuucgaguucuaccacaagugcaacgacgagugcauggaguccgucaagaacggcaccuacgacuaccccaaguacuccgaggaguccaagcucaaccgcgagaagaucgacggcgucaagcucgaguccaugggcgucuaccagauccucgccaucuacuccaccgucgccuccucccucguccuccucgucucccucggcgccaucuccuucuggaugugcuccaacggcucccuccagugccgcaucugcaucuga

SEQ ID NO: 102019 - RNA, 1698 nt, Artificial Sequence; identical to SEQ ID NO: 101549
  derived and/or modified CDS sequence (opt2) from hemagglutinin__InfluenzaA__ADN89457

SEQ ID NO: 102020 - RNA, 1698 nt, Artificial Sequence
  derived and/or modified CDS sequence (opt2) from hemagglutinin__InfluenzaA__ADN89468
augaaggucaagcuccucguccuccucugcaccuucaccgccaccuacgccgacaccaucugcaucggcuaccacgccaacaacuccaccgacaccgucgacaccguccucgagaagaacgucaccgucacccacuccgucaaccuccucgagaacucccacaacggcaagcucugccuccucaagggcaucgccccccuccagcucggcaacugcuccgucgccggcuggauccucggcaaccccgagugcgagcuccucaucuccaaggaguccugguccuacaucgucgagaagcccaaccccgagaacggcaccugcuaccccggccacuucgccgacuacgaggagcuccgcgagcagcucuccuccgucuccuccuucgagcgcuucgagaucuuccccaaggacuccuccuggcccaaccacaccgucaccggcgucuccgccuccugcucccacaacggcgaguccuccuucuaccgcaaccuccucuggcucaccggcaagaacggccucuaccccaaccucuccaaguccuacgccaacaacaaggagaaggagguccucguccucuggggcguccaccacccccccuccaucaacgaccagaagacccucuaccacaccgagaacgccuacgucuccgucgucuccucccacuacucccgcaaguucacccccgagaucgccaagcgccccaagguccgcgaccaggagggccgcaucaacuacuacuggacccuccucgagcccggcgacaccaucaucuucgaggccaacggcaaccucaucgccccccgcuacgccuucgcccucucccgcggcuucggcuccggcaucaucaacuccaacgcccccauggacaagugcgacgccaagugccagaccccccagggcgccaucaacuccucccuccccuuccagaacguccaccccgucaccaucggcgagugccccaaguacguccgcuccgccaagcuccgcauggucaccggccuccgcaacauccccuccauccagucccgcggccucuucggcgccaucgccggcuucaucgagggcggcuggaccggcauggucgacggcugguacggcuaccaccaccagaacgagcagggcuccggcuacgccgccgaccagaaguccacccagaacgccaucaacggcaucaccaacaaggucaacuccgucaucgagaagaugaacacccaguucaccgccgucggcaaggaguucuccaagcucgagcgccgcauggagaaccucaacaagaaggucgacgacggcuucaucgacaucuggaccuacaacgccgagcuccucguccuccucgagaacgagcgcacccucgacuuccacgacuccaacgucaagaaccucuacgagaaggucaagucccagcucaagaacaacgccaaggagaucggcaacggcugcuucgaguucuaccacaagugcaacgacgagugcauggaguccgucaagaacggcaccuacgacuaccccaaguacuccgaggaguccaagcucaaccgcgagaagaucgacggcgucaagcucgaguccaugggcgucuaccagauccucaccaucuacuccaccgucgccuccucccucguccuccucaucucccucggcgccaucuccuucuggaugugcuccaacggcucccuccagugccgcaucugcaucuga

SEQ ID NO: 102021 - RNA, 1698 nt, Artificial Sequence; identical to SEQ ID NO: 101978
  derived and/or modified CDS sequence (opt2) from hemagglutinin__InfluenzaA__ADN89479

SEQ ID NO: 102022 - RNA, 1698 nt, Artificial Sequence; identical to SEQ ID NO: 101978
  derived and/or modified CDS sequence (opt2) from hemagglutinin__InfluenzaA__ADN89490

SEQ ID NO: 102023 - RNA, 1698 nt, Artificial Sequence; identical to SEQ ID NO: 102001
  derived and/or modified CDS sequence (opt2) from hemagglutinin__InfluenzaA__ADN89501

SEQ ID NO: 102024 - RNA, 1698 nt, Artificial Sequence; identical to SEQ ID NO: 101989
  derived and/or modified CDS sequence (opt2) from hemagglutinin__InfluenzaA__ADN89512

SEQ ID NO: 102025 - RNA, 1698 nt, Artificial Sequence; identical to SEQ ID NO: 102003
  derived and/or modified CDS sequence (opt2) from hemagglutinin__InfluenzaA__ADN89523

SEQ ID NO: 102026 - RNA, 1698 nt, Artificial Sequence; identical to SEQ ID NO: 102012
  derived and/or modified CDS sequence (opt2) from hemagglutinin__InfluenzaA__ADN89534

SEQ ID NO: 102027 - RNA, 1698 nt, Artificial Sequence; identical to SEQ ID NO: 102017
  derived and/or modified CDS sequence (opt2) from hemagglutinin__InfluenzaA__ADN89545

SEQ ID NO: 102028 - RNA, 1698 nt, Artificial Sequence; identical to SEQ ID NO: 99662
  derived and/or modified CDS sequence (opt2) from hemagglutinin__InfluenzaA__ADN89556

SEQ ID NO: 102029 - RNA, 1698 nt, Artificial Sequence; identical to SEQ ID NO: 101978
  derived and/or modified CDS sequence (opt2) from hemagglutinin__InfluenzaA__ADN89567

SEQ ID NO: 102030 - RNA, 1698 nt, Artificial Sequence
  derived and/or modified CDS sequence (opt2) from hemagglutinin__InfluenzaA__ADN89578
augaaggucaagcuccucguccuccucugcacccucaccgccaccuacgccgacaccaucugcaucggcuaccacgccaacaacuccaccgacaccgucgacaccguccucgagaagaacgucaccgucacccacuccgucaaccuccucgagaacucccacaacggcaagcucugccuccucaagggcaucgccccccuccagcucggcaacugcuccgucgccggcuggauccucggcaaccccgagugcgagcuccucaucuccaaggaguccugguccuacaucgucgagaagcccaaccccgagaacggcaccugcuaccccggccacuucgccgacuacgaggagcuccgcgagcagcucuccuccgucuccuccuucgagcgcuucgagaucuuccccaagggcuccuccuggcccaaccacaccgucaccggcgucuccgccuccugcucccacaacggcgagaacuccuucuaccgcaaccuccucuggcucaccggcaagaacggccucuaccccaaccucuccaaguccuacgccaacaacaaggagaaggagguccuccuccucuggggcguccaccacccccccaacaucgccgaccagaagacccucuaccacaccgagaacgccuacgucuccgucgucuccucccacuacucccgcaaguucacccccgagaucgccaagcgccccaagguccgcgaccaggagggccgcaucaacuacuacuggacccuccucgagcccggcgacaccaucaucuucgaggccaacggcaaccucaucgccccccgcuacgccuucgcccucucccgcggcuucggcuccggcaucaucaacuccaacgcccccauggacaagugcgacgccaagugccagaccccccagggcgccaucaacuccucccuccccuuccagaacguccaccccgucaccaucggcgagugccccaaguacguccgcuccgccaagcuccgcauggucaccggccuccgcaacauccccuccauccagucccgcggccucuucggcgccaucgccggcuucaucgagggcggcuggaccggcauggucgacggcugguacggcuaccaccaccagaacgagcagggcuccggcuacgccgccgaccagaaguccacccagaacgccaucaacggcaucaccaacaaggucaacuccgucaucgagaagaugaacacccaguucaccgccgucggcaaggaguucaacaagcucgagcgccgcauggagaaccucaacaagaaggucgacgacggcuucaucgacaucuggaccuacaacgccgagcuccucguccuccucgagaacgagcgcacccucgacuuccacgacuccaacgucaagaaccucuacgagaaggucaagucccagcucaagaacaacgccaaggagaucggcaacggcugcuucgaguucuaccacaagugcaacgacgagugcauggaguccgucaagaacggcaccuacgacuaccccaaguacuccgaggaguccaagcucaaccgcgagaagaucgacggcgucaagcucgaguccaugggcgucuaccagauccucgccaucuacuccaccgucgccuccucccucguccuccucgucucccucggcgccaucuccuucuggaugugcuccaacggcucccuccagugccgcaucugcaucuga

SEQ ID NO: 102031 - RNA, 1698 nt, Artificial Sequence; identical to SEQ ID NO: 101549
  derived and/or modified CDS sequence (opt2) from hemagglutinin__InfluenzaA__ADN89589

SEQ ID NO: 102032 - RNA, 1698 nt, Artificial Sequence
  derived and/or modified CDS sequence (opt2) from hemagglutinin__InfluenzaA__ADN89600
augaaggucaagcuccucguccuccucugcaccuucaccgccaccuacgccgacaccaucugcaucggcuaccacgccaacaacuccaccgacaccgucgacaccguccucgagaagaacgucaccgucacccacuccgucaaccuccucgagaacucccacaacggcaagcucugccuccucaagggcaucgccccccuccagcucggcaacugcuccgucgccggcuggauccucggcaaccccgagugcgagcuccucaucuccaaggaguccugguccuacaucgucgagaagcccaaccccgagaacggcaccugcuaccccggccacuucgccgacuacgaggagcuccgcgagcagcucuccuccgucuccuccuucgagcgcuucgagaucuuccccaaggaguccuccuggcccaaccacaccgucaccggcgucuccgccuccugcucccacaacggcgaguccuccuucuaccgcaaccuccucuggcucacccgcaagaacggccucuaccccaaccucuccaaguccuacgccaacaacaaggagaaggagguccucguccucuggggcguccaccacccccccaacauggucgaccagaagacccucuaccgcaccgagaacgccuacgucuccgucgucuccucccacuacucccgcaaguucacccccgagaucgccaagcgccccaagguccgcgaccaggagggccgcaucaacuacuacuggacccuccucgagcccggcgacaccaucaucuucgaggccaacggcaaccucaucgccccccgcuacgccuucgcccucucccgcggcuucggcuccggcaucaucaacuccaacgcccccaugggcaagugcgacgccaagugccagaccccccagggcgccaucaacuccucccuccccuuccagaacguccaccccgucaccaucggcgagugccccaaguacguccgcuccgccaagcuccgcauggucaccggccuccgcaacauccccuccauccagucccgcggccucuucggcgccaucgccggcuucaucgagggcggcuggaccggcauggucgacggcugguacggcuaccaccaccagaacgagcagggcuccggcuacgccgccgaccagaaguccacccagaacgccaucaacggcaucaccaacaaggucaacuccgucaucgagaagaugaacacccaguucaccgccgucggcaaggaguucaacaagcucgagcgccgcauggagaaccucaacaagaaggucgacgacggcuucaucgacaucuggaccuacaacgccgagcuccucguccuccucgagaacgagcgcacccucgacuuccacgacuccaacgucaagaaccucuacgagaaggucaagucccagcucaagaacaacgccaaggagaucggcaacggcugcuucgaguucuaccacaagugcaacgacgagugcauggaguccgucaagaacggcaccuacgacuaccccaaguacuccgaggaguccaagcucaaccgcgagaagaucgacggcgucaagcucgaguccaugggcgucuaccagauccucgccaucuacuccaccgucgccuccucccucguccuccucgucucccucggcgccaucuccuucuggaugugcuccaacggcucccuccagugccgcaucugcaucuga

SEQ ID NO: 102033 - RNA, 1698 nt, Artificial Sequence; identical to SEQ ID NO: 101549
  derived and/or modified CDS sequence (opt2) from hemagglutinin__InfluenzaA__ADN89611

SEQ ID NO: 102034 - RNA, 1698 nt, Artificial Sequence; identical to SEQ ID NO: 101976
  derived and/or modified CDS sequence (opt2) from hemagglutinin__InfluenzaA__ADN89622

SEQ ID NO: 102035 - RNA, 1698 nt, Artificial Sequence; identical to SEQ ID NO: 102017
  derived and/or modified CDS sequence (opt2) from hemagglutinin__InfluenzaA__ADN89633

SEQ ID NO: 102036 - RNA, 1698 nt, Artificial Sequence; identical to SEQ ID NO: 102001
  derived and/or modified CDS sequence (opt2) from hemagglutinin__InfluenzaA__ADN89644

SEQ ID NO: 102037 - RNA, 1698 nt, Artificial Sequence; identical to SEQ ID NO: 102017
  derived and/or modified CDS sequence (opt2) from hemagglutinin__InfluenzaA__ADN89655

SEQ ID NO: 102038 - RNA, 1698 nt, Artificial Sequence; identical to SEQ ID NO: 101549
  derived and/or modified CDS sequence (opt2) from hemagglutinin__InfluenzaA__ADN89666

SEQ ID NO: 102039 - RNA, 1698 nt, Artificial Sequence; identical to SEQ ID NO: 101989
  derived and/or modified CDS sequence (opt2) from hemagglutinin__InfluenzaA__ADN89677

SEQ ID NO: 102040 - RNA, 1698 nt, Artificial Sequence; identical to SEQ ID NO: 101989
  derived and/or modified CDS sequence (opt2) from hemagglutinin__InfluenzaA__ADN89688

SEQ ID NO: 102041 - RNA, 1698 nt, Artificial Sequence; identical to SEQ ID NO: 101976
  derived and/or modified CDS sequence (opt2) from hemagglutinin__InfluenzaA__ADN89699

SEQ ID NO: 102042 - RNA, 1698 nt, Artificial Sequence; identical to SEQ ID NO: 101978
  derived and/or modified CDS sequence (opt2) from hemagglutinin__InfluenzaA__ADN89710

SEQ ID NO: 102043 - RNA, 1698 nt, Artificial Sequence; identical to SEQ ID NO: 102001
  derived and/or modified CDS sequence (opt2) from hemagglutinin__InfluenzaA__ADN89721

SEQ ID NO: 102044 - RNA, 1698 nt, Artificial Sequence; identical to SEQ ID NO: 101978
  derived and/or modified CDS sequence (opt2) from hemagglutinin__InfluenzaA__ADN89732

SEQ ID NO: 102045 - RNA, 1698 nt, Artificial Sequence; identical to SEQ ID NO: 101978
  derived and/or modified CDS sequence (opt2) from hemagglutinin__InfluenzaA__ADN89743

SEQ ID NO: 102046 - RNA, 1698 nt, Artificial Sequence; identical to SEQ ID NO: 102003
  derived and/or modified CDS sequence (opt2) from hemagglutinin__InfluenzaA__ADN89765

SEQ ID NO: 102047 - RNA, 1698 nt, Artificial Sequence
  derived and/or modified CDS sequence (opt2) from hemagglutinin__InfluenzaA__ADN89776
augaaggucaagcuccucguccuccucugcaccuucaccgccaccuacgccgacaccaucugcaucggcuaccacgccaacaacuccaccgacaccgucgacaccguccucgagaagaacgucaccgucacccacuccgucaaccuccucgagaacucccacaacggcaagcucugccuccucaagggcaucgccccccuccagcucggcaacugcuccgucgccggcuggauccucggcaaccccgagugcgagcuccucaucuccaaggaguccugguccuacaucgucgagaagcccaaccccgagaacggcaccugcuaccccggccacuucgccgacuacgaggagcuccgcgagcagcucuccuccgucuccuccuucgagcgcuucgagaucuuccccaaggaguccuccuggcccaaccacaccgucaccggcgucuccgccuccugcucccacaacggcgaguccuccuucuaccgcaaccuccucuggcucaccggcaagaacggccucuaccccaaccucuccaaguccuacgccaacaacaaggagaaggagguccucguccucuggggcguccaccacccccccuccaucuccgaccagaagacccucuaccacaccgagaacgccuacgucuccgucgucuccucccacuacucccgcaaguucacccccgaggucgccaagcgccccaagguccgcgaccaggagggccgcaucaacuacuacuggacccuccucgagcccggcgacaccaucaucuucgaggccaacggcaaccucaucgccccccgcuacgccuucgcccucucccgcggcuucggcuccggcaucaucaacuccaacgcccccauggacaagugcgacgccaagugccagaccccccagggcgccaucaacuccucccuccccuuccagaacguccaccccgucaccaucggcgagugccccaaguacguccgcuccgccaagcuccgcauggucaccggccuccgcaacauccccuccauccagucccgcggccucuucggcgccaucgccggcuucaucgagggcggcuggaccggcauggucgacggcugguacggcuaccaccaccagaacgagcagggcuccggcuacgccgccgaccagaaguccacccagaacgccaucaacggcaucaccaacaaggucaacuccgucaucgagaagaugaacacccaguucaccgccgucggcaaggaguucaacaagcucgagcgccgcauggagaaccucaacaagaaggucgacgacggcuucaucgacaucuggaccuacaacgccgagcuccucguccuccucgagaacgagcgcacccucgacuuccacgacuccaacgucaagaaccucuacgagaaggucaagucccagcucaagaacaacgccaaggagaucggcaacggcugcuucgaguucuaccacaagugcaacgacgagugcauggaguccgucaagaacggcaccuacgacuaccccaaguacuccgaggaguccaagcucaaccgcgagaagaucgacggcgucaagcucgaguccaugggcgucuaccagauccucgccaucuacuccaccgucgccuccucccucguccuccucgucucccucggcgccaucuccuucuggaugugcuccaacggcucccuccagugccgcaucugcaucuga

SEQ ID NO: 102048 - RNA, 1698 nt, Artificial Sequence; identical to SEQ ID NO: 101989
  derived and/or modified CDS sequence (opt2) from hemagglutinin__InfluenzaA__ADN89787

SEQ ID NO: 102049 - RNA, 1698 nt, Artificial Sequence; identical to SEQ ID NO: 102003
  derived and/or modified CDS sequence (opt2) from hemagglutinin__InfluenzaA__ADN89798

SEQ ID NO: 102050 - RNA, 1698 nt, Artificial Sequence; identical to SEQ ID NO: 101549
  derived and/or modified CDS sequence (opt2) from hemagglutinin__InfluenzaA__ADN89809

SEQ ID NO: 102051 - RNA, 1698 nt, Artificial Sequence; identical to SEQ ID NO: 101549
  derived and/or modified CDS sequence (opt2) from hemagglutinin__InfluenzaA__ADN89820

SEQ ID NO: 102052 - RNA, 1698 nt, Artificial Sequence; identical to SEQ ID NO: 101549
  derived and/or modified CDS sequence (opt2) from hemagglutinin__InfluenzaA__ADN89831

SEQ ID NO: 102053 - RNA, 1698 nt, Artificial Sequence
  derived and/or modified CDS sequence (opt2) from hemagglutinin__InfluenzaA__ADN89842
augaaggucaagcuccucguccuccucugcaccuucaccgccaccuacgccgacaccaucugcaucggcuaccacgccaacaacuccaccgacaccgucgacaccguccucgagaagaacgucaccgucacccacuccgucaaccuccucgagaaccgccacaacggcaagcucugccuccucaagggcaucgccccccuccagcucggcaacugcuccgucgccggcuggauccucggcaaccccgagugcgagcuccucaucuccaaggaguccugguccuacaucgucgagaagcccaaccccgagaacggcaccugcuaccccggccacuucgccgacuacgaggagcuccgcgagcagcucuccuccgucuccuccuucgagcgcuucgagaucuuccccaaggaguccuccuggcccaaccacaccgucaccggcgucuccgccuccugcucccacaacggcgaguccuccuucuaccgcaaccuccucuggcucaccggcaagaacggccucuaccccaaccucuccaaguccuacgccaacaacaaggagaaggagguccucguccucuggggcguccaccacccccccaacaucgucgaccagaagacccucuaccgcaccgagaacgccuacgucuccgucgucuccucccacuacucccgcaaguucacccccgagaucgccaagcgccccaagguccgcgaccaggagggccgcaucaacuacuacuggacccuccucgagcccggcgacaccaucaucuucgaggccaacggcaaccucaucgccccccgcuacgccuucgcccucucccgcggcuucggcuccggcaucaucaacuccaacgcccccauggacaagugcgacgccaagugccagaccccccagggcgccaucaacuccucccuccccuuccagaacguccaccccgucaccaucggcgagugccccaaguacguccgcuccgccaagcuccgcauggucaccggccuccgcaacauccccuccauccagucccgcggccucuucggcgccaucgccggcuucaucgagggcggcuggaccggcauggucgacggcugguacggcuaccaccaccagaacgagcagggcuccggcuacgccgccgaccagaaguccacccagaacgccaucaacggcaucaccaacaaggucaacuccgucaucgagaagaugaacacccaguucaccgccgucggcaaggaguucaacaagcucgagcgccgcauggagaaccucaacaagaaggucgacgacggcuucaucgacaucuggaccuacaacgccgagcuccucguccuccucgagaacgagcgcacccucgacuuccacgacuccaacgucaagaaccucuacgagaaggucaagucccagcucaagaacaacgccaaggagaucggcaacggcugcuucgaguucuaccacaagugcaacgacgagugcauggaguccgucaagaacggcaccuacgacuaccccaaguacuccgaggaguccaagcucaaccgcgagaagaucgacggcgucaagcucgaguccaugggcgucuaccagauccucgccaucuacuccaccgucgccuccucccucguccuccucgucucccucggcgccaucuccuucuggaugugcuccaacggcucccuccagugccgcaucugcaucuga

SEQ ID NO: 102054 - RNA, 1701 nt, Artificial Sequence; identical to SEQ ID NO: 101569
  derived and/or modified CDS sequence (opt2) from hemagglutinin__InfluenzaA__ADN89864

SEQ ID NO: 102055 - RNA, 1701 nt, Artificial Sequence; identical to SEQ ID NO: 101569
  derived and/or modified CDS sequence (opt2) from hemagglutinin__InfluenzaA__ADN89875

SEQ ID NO: 102056 - RNA, 1701 nt, Artificial Sequence
  derived and/or modified CDS sequence (opt2) from hemagglutinin__InfluenzaA__ADN89886
augaagaccaucaucgcccucuccuacauccucugccucgucuucgcccagaagcuccccggcaacgacaacuccaccgccacccucugccucggccaccacgccguccccaacggcaccaucgucaagaccaucaccaacgaccagaucgaggucaccaacgccaccgagcucguccaguccuccuccaccggcgagaucugcgacuccccccaccagauccucgacggcgagaacugcacccucaucgacgcccuccucggcgacccccagugcgacggcuuccagaacaagaagugggaccucuucgucgagcgcuccaaggccuacuccaacugcuaccccuacgacguccccgacuacgccucccuccgcucccucgucgccuccuccggcacccucgaguucaacaacgaguccuucaacuggaccggcgucacccagaacggcaccuccuccgccugcauccgccgcuccaacaacuccuucuucucccgccucaacuggcucacccaccucaacuucaaguaccccgcccucaacgucaccaugcccaacaacgagcaguucgacaagcucuacaucuggggcguccaccaccccggcaccgacaaggaccagaucuuccucuacgcccaggccuccggccgcaucaccgucuccaccaagcgcucccagcaggccgucauccccaacaucggcucccgcccccgcguccgcaacauccccucccgcaucuccaucuacuggaccaucgucaagcccggcgacauccuccucaucaacuccaccggcaaccucaucgccccccgcggcuacuucaagauccgcuccggcaaguccuccaucaugcgcuccgacgcccccaucggcaagugcaacuccgagugcaucacccccaacggcuccauccccaacgacaagcccuuccagaacgucaaccgcaucaccuacggcgccugcccccgcuacgucaagcaguccacccucaagcucgccaccggcaugcgcaacguccccgagaagcagacccgcggcaucuucggcgccaucgccggcuucaucgagaacggcugggagggcauggucgacggcugguacggcuuccgccaccagaacuccgagggccgcggccaggccgccgaccucaaguccacccaggccgccaucgaccagaucaacggcaagcucaaccgccucaucggcaagaccaacgagaaguuccaccagaucgagaaggaguucuccgaggucgagggccgcauccaggaccucgagaaguacgucgaggacaccaagaucgaccucugguccuacaacgccgagcuccucgucgcccucgagaaccagcacaccaucgaccucaccgacuccgagaugaacaagcucuucgagaagacccgcaagcagcuccgcgagaacgccgaggacaugggcaacggcugcuucaccaucuaccacaagugcgacaacgccugcaucggcuccauccgcaacggcaccuacgaccacaacgucuaccgcgacgaggcccucaacaaccgcuuccagaucaagggcgucgagcucaaguccggcuacaaggacuggauccucuggaucuccuucgccaucuccugcuuccuccucugcgucgcccuccucggcuucaucaugugggccugccagaagggcaacauccgcugcaacaucugcaucuga

SEQ ID NO: 102057 - RNA, 1701 nt, Artificial Sequence; identical to SEQ ID NO: 101569
  derived and/or modified CDS sequence (opt2) from hemagglutinin__InfluenzaA__ADN89897

SEQ ID NO: 102058 - RNA, 1701 nt, Artificial Sequence; identical to SEQ ID NO: 101569
  derived and/or modified CDS sequence (opt2) from hemagglutinin__InfluenzaA__ADN89908

SEQ ID NO: 102059 - RNA, 1701 nt, Artificial Sequence; identical to SEQ ID NO: 101569
  derived and/or modified CDS sequence (opt2) from hemagglutinin__InfluenzaA__ADN89919

SEQ ID NO: 102060 - RNA, 1701 nt, Artificial Sequence; identical to SEQ ID NO: 101569
  derived and/or modified CDS sequence (opt2) from hemagglutinin__InfluenzaA__ADN89930

SEQ ID NO: 102061 - RNA, 1701 nt, Artificial Sequence; identical to SEQ ID NO: 101569
  derived and/or modified CDS sequence (opt2) from hemagglutinin__InfluenzaA__ADN89941

SEQ ID NO: 102062 - RNA, 1701 nt, Artificial Sequence; identical to SEQ ID NO: 101569
  derived and/or modified CDS sequence (opt2) from hemagglutinin__InfluenzaA__ADN89952

SEQ ID NO: 102063 - RNA, 1701 nt, Artificial Sequence; identical to SEQ ID NO: 101569
  derived and/or modified CDS sequence (opt2) from hemagglutinin__InfluenzaA__ADN89963

SEQ ID NO: 102064 - RNA, 1701 nt, Artificial Sequence
  derived and/or modified CDS sequence (opt2) from hemagglutinin__InfluenzaA__ADN89974
augaagaccaucaucgcccucuccuacauccucugccucgucuucgcccagaagcuccccggcaacgacaacuccaccgccacccucugccucggccaccacgccguccccaacggcaccaucgucaagaccaucaccaacgaccagaucgaggucaccaacgccaccgagcucguccaguccuccuccaccggcgagaucugcgacuccccccaccagauccucgacggcgagaacugcacccucaucgacgcccuccucggcgacccccagugcgacggcuuccagaacaagaagugggaccucuucgucgagcgcuccaaggccuacuccaacugcuaccccuacgacguccccgacuacgccucccuccgcucccucgucgccuccuccggcacccucgaguucaacaacgaguccuucaacuggaccggcgucacccagaacggcaccuccuccgccugcauccgccgcuccaacaacuccuucuucucccgccucaacuggcucacccaccucaacuucaaguaccccgcccucaacgucaccaugcccaacaacgagcaguucgacaagcucuacaucuggggcguccaccaccccggcaccgacaaggaccagaucuuccucuacgcccaggccuccggccgcaucaccgucuccaccaagcgcucccagcaggccgucauccccaacaucggcucccgcccccgcguccgcaacauccccucccgcaucuccaucuacuggaccaucgucaagcccggcgacauccuccucaucaacuccaccggcaaccucaucgccccccgcggcuacuucaagauccaguccggcaaguccuccaucaugcgcuccgacgcccccaucggcaagugcaacuccgagugcaucacccccaacggcuccauccccaacgacaagcccuuccagaacgucaaccgcaucaccuacggcgccugcccccgcuacgucaagcaguccacccucaagcucgccaccggcaugcgcaacguccccgagaagcagacccgcggcaucuucggcgccaucgccggcuucaucgagaacggcugggagggcauggucgacggcugguacggcuuccgccaccagaacuccgagggccgcggccaggccgccgaccucaaguccacccaggccgccaucgaccagaucaacggcaagcucaaccgccucaucggcaagaccaacgagaaguuccaccagaucgagaaggaguucuccgaggucgagggccgcauccaggaccucgagaaguacgucgaggacaccaagaucgaccucugguccuacaacgccgagcuccucgucgcccucgagaaccagcacaccaucgaccucaccgacuccgagaugaacaagcucuucgagaagaccaagaagcagcuccgcgagaacgccgaggacaugggcaacggcugcuucaccaucuaccacaagugcgacaacgccugcaucggcuccauccgcaacggcaccuacgaccacaacgucuaccgcgacgaggcccucaacaaccgcuuccagaucaagggcgucgagcucaaguccggcuacaaggacuggauccucuggaucuccuucgccaucuccugcuuccuccucugcgucgcccuccucggcuucaucaugugggccugccagaagggcaacauccgcugcaacaucugcaucuga

SEQ ID NO: 102065 - RNA, 1701 nt, Artificial Sequence; identical to SEQ ID NO: 101569
  derived and/or modified CDS sequence (opt2) from hemagglutinin__InfluenzaA__ADN89985

SEQ ID NO: 102066 - RNA, 1701 nt, Artificial Sequence; identical to SEQ ID NO: 101569
  derived and/or modified CDS sequence (opt2) from hemagglutinin__InfluenzaA__ADN89996

SEQ ID NO: 102067 - RNA, 1701 nt, Artificial Sequence; identical to SEQ ID NO: 101569
  derived and/or modified CDS sequence (opt2) from hemagglutinin__InfluenzaA__ADN90007

SEQ ID NO: 102068 - RNA, 1701 nt, Artificial Sequence; identical to SEQ ID NO: 101569
  derived and/or modified CDS sequence (opt2) from hemagglutinin__InfluenzaA__ADN90018

SEQ ID NO: 102069 - RNA, 1701 nt, Artificial Sequence; identical to SEQ ID NO: 101569
  derived and/or modified CDS sequence (opt2) from hemagglutinin__InfluenzaA__ADN90040

SEQ ID NO: 102070 - RNA, 1701 nt, Artificial Sequence; identical to SEQ ID NO: 101569
  derived and/or modified CDS sequence (opt2) from hemagglutinin__InfluenzaA__ADN90051

SEQ ID NO: 102071 - RNA, 1701 nt, Artificial Sequence; identical to SEQ ID NO: 101569
  derived and/or modified CDS sequence (opt2) from hemagglutinin__InfluenzaA__ADN90062

SEQ ID NO: 102072 - RNA, 1701 nt, Artificial Sequence; identical to SEQ ID NO: 101569
  derived and/or modified CDS sequence (opt2) from hemagglutinin__InfluenzaA__ADN90073

SEQ ID NO: 102073 - RNA, 1701 nt, Artificial Sequence; identical to SEQ ID NO: 101569
  derived and/or modified CDS sequence (opt2) from hemagglutinin__InfluenzaA__ADN90084

SEQ ID NO: 102074 - RNA, 1701 nt, Artificial Sequence; identical to SEQ ID NO: 101569
  derived and/or modified CDS sequence (opt2) from hemagglutinin__InfluenzaA__ADN90095

SEQ ID NO: 102075 - RNA, 1701 nt, Artificial Sequence; identical to SEQ ID NO: 101569
  derived and/or modified CDS sequence (opt2) from hemagglutinin__InfluenzaA__ADN90106

SEQ ID NO: 102076 - RNA, 1701 nt, Artificial Sequence; identical to SEQ ID NO: 101569
  derived and/or modified CDS sequence (opt2) from hemagglutinin__InfluenzaA__ADN90117

SEQ ID NO: 102077 - RNA, 1701 nt, Artificial Sequence; identical to SEQ ID NO: 101569
  derived and/or modified CDS sequence (opt2) from hemagglutinin__InfluenzaA__ADN90128

SEQ ID NO: 102078 - RNA, 1701 nt, Artificial Sequence; identical to SEQ ID NO: 101569
  derived and/or modified CDS sequence (opt2) from hemagglutinin__InfluenzaA__ADN90139

SEQ ID NO: 102079 - RNA, 1701 nt, Artificial Sequence; identical to SEQ ID NO: 101569
  derived and/or modified CDS sequence (opt2) from hemagglutinin__InfluenzaA__ADN90150

SEQ ID NO: 102080 - RNA, 1701 nt, Artificial Sequence; identical to SEQ ID NO: 101569
  derived and/or modified CDS sequence (opt2) from hemagglutinin__InfluenzaA__ADN90161

SEQ ID NO: 102081 - RNA, 1701 nt, Artificial Sequence; identical to SEQ ID NO: 101569
  derived and/or modified CDS sequence (opt2) from hemagglutinin__InfluenzaA__ADN90172

SEQ ID NO: 102082 - RNA, 1701 nt, Artificial Sequence; identical to SEQ ID NO: 101569
  derived and/or modified CDS sequence (opt2) from hemagglutinin__InfluenzaA__ADN90183

SEQ ID NO: 102083 - RNA, 1701 nt, Artificial Sequence; identical to SEQ ID NO: 101569
  derived and/or modified CDS sequence (opt2) from hemagglutinin__InfluenzaA__ADN90194

SEQ ID NO: 102084 - RNA, 1701 nt, Artificial Sequence; identical to SEQ ID NO: 101569
  derived and/or modified CDS sequence (opt2) from hemagglutinin__InfluenzaA__ADN90205

SEQ ID NO: 102085 - RNA, 1701 nt, Artificial Sequence; identical to SEQ ID NO: 101569
  derived and/or modified CDS sequence (opt2) from hemagglutinin__InfluenzaA__ADN90216

SEQ ID NO: 102086 - RNA, 1701 nt, Artificial Sequence; identical to SEQ ID NO: 99466
  derived and/or modified CDS sequence (opt2) from hemagglutinin__InfluenzaA__ADN92467

SEQ ID NO: 102087 - RNA, 1701 nt, Artificial Sequence
  derived and/or modified CDS sequence (opt2) from hemagglutinin__InfluenzaA__ADN92478
augaagaccaucaucgcccucucccacauccucugccucgucuucgcccagaagcuccccggcaacgacaacuccaccgccacccucugccucggccaccacgccguccccaacggcaccaucgucaagaccaucaccaacgaccagaucgaggucaccaacgccaccgagcucguccaguccuccuccaccggcgagaucugcgacuccccccaccagauccucgacggcaagaacugcacccucaucgacgcccuccucggcgacccccagugcgacggcuuccagaacaagaagugggaccucuucgucgagcgcuccaaggccuacuccaacugcuaccccuacgacguccccgacuacgccucccuccgcucccucgucgccuccuccggcacccucgaguucaacaacgaguccuucaacuggaccggcgucacccagaacggcaccuccuccgccugcauccgccgcuccaagaacuccuucuucucccgccucaacuggcucacccaccucaacuucaaguaccaggcccucaacgucaccaugcccaacaacgagcaguucgacaagcucuacaucuggggcguccaccaccccggcaccgacaaggaccagaucuuccucuacgcccaggccuccggccgcaucaccgucuccaccaagcgcucccagcagaccgucauccccaacaucggcucccgcccccgcguccgcaacauccccucccgcaucuccaucuacuggaccaucgucaagcccggcgacauccuccucaucaacuccaccggcaaccucaucgccccccgcggcuacuucaagauccaguccggcaaguccuccaucaugcgcuccgacgcccccaucggcaagugcaacuccgagugcaucacccccaacggcuccauccccaacgacaagcccuuccagaacgucaaccgcaucaccuacggcgccugcccccgcuacgucaagcagaacacccucaagcucgccaccggcaugcgcaacguccccgagaagcagacccgcggcaucuucggcgccaucgccggcuucaucgagaacggcugggagggcauggucgacggcugguacggcuuccgccaccagaacuccgagggccgcggccaggccgccgaccucaaguccacccaggccgccaucgaccagaucaacggcaagcucaaccgccucaucggcaagaccaacgagaaguuccaccagaucgagaaggaguucuccgaggucgagggccgcauccaggaccucgagaaguacgucgaggacaccaagaucgaccucugguccuacaacgccgagcuccucgucgcccucgagaaccagcacaccaucgaccucaccgacuccgagaugaacaagcucuucgagaagaccaagaagcagcuccgcgagaacgccgaggacaugggcaacggcugcuucaagaucuaccacaagugcgacaacgccugcaucggcuccauccgcaacggcaccuacgaccacgacgucuaccgcgacgaggcccucaacaaccgcuuccagaucaagggcgucgagcucaaguccggcuacaaggacuggauccucuggaucuccuucgccaucuccugcuuccuccucugcgucgcccuccucggcuucaucaugugggccugccagaagggcaacauccgcugcaacaucugcaucuga

SEQ ID NO: 102088 - RNA, 1701 nt, Artificial Sequence
  derived and/or modified CDS sequence (opt2) from hemagglutinin__InfluenzaA__ADN92489
augaagaccaucaucgcccucuccuacauccucugccucgucuucgcccagaagcuccccggcaacgacaacuccaccgccacccucugccucggccaccacgccguccccaacggcaccaucgucaagaccaucaccaacgaccagaucgaggucaccaacgccaccgagcucguccaguccuccuccaccggcgagaucugcgacuccccccaccagauccucgacggcaagaacugcacccucaucgacgcccuccucggcgacccccagugcgacggcuuccagaacaagaagugggaccucuucgucgagcgcuccaaggccuacuccaacugcuaccccuacgacguccccgacuacgccucccuccgcucccucgucgccuccuccggcacccucgaguucaacaacgagaacuucaacuggaccggcgucacccagaacggcaccuccuccgccugcauccgccgcuccaagaacuccuucuucucccgccucaacuggcucacccaccucaacuucaaguaccaggcccucaacgucaccaugcccaacaacgagcaguucgacaagcucuacaucuggggcguccaccaccccggcaccgacaaggaccagaucuuccucuacgcccaggccuccggccgcaucaccgucuccaccaagcgcucccagcagaccgucauccccaacaucggcucccgcccccgcguccgcaacauccccucccgcaucuccaucuacuggaccaucgucaagcccggcgacauccuccucaucaacuccaccggcaaccucaucgccccccgcggcuacuucaagauccaguccggcaaguccuccaucaugcgcuccgacgcccccaucggcaagugcaacuccgagugcaucacccccaacggcuccauccccaacgacaagcccuuccagaacgucaaccgcaucaccuacggcgccugcccccgcuacgucaagcagaacacccucaagcucgccaccggcaugcgcaacguccccgagaagcagacccgcggcaucuucggcgccaucgccggcuucaucgagaacggcugggagggcauggucgacggcugguacggcuuccgccaccagaacuccgagggccgcggccaggccgccgaccucaaguccacccaggccgccaucgaccagaucaacggcaagcucaaccgccucaucggcaagaccaacgagaaguuccaccagaucgagaaggaguucuccgaggucgagggccgcauccaggaccucgagaaguacgucgaggacaccaagaucgaccucugguccuacaacgccgagcuccucgucgcccucgagaaccagcacaccaucgaccucaccgacuccgagaugaacaagcucuucgagaagaccaagaagcagcuccgcgagaacgccgaggacaugggcaacggcugcuucaagaucuaccacaagugcgacaacgccugcaucggcuccauccgcaacggcaccuacgaccacgacgucuaccgcgacgaggcccucaacaaccgcuuccagaucaagggcgucgagcucaaguccggcuacaaggacuggauccucuggaucuccuucgccaucuccugcuuccuccucugcgucgcccuccucggcuucaucaugugggccugccagaagggcaacauccgcugcaacaucugcaucuga

SEQ ID NO: 102089 - RNA, 1701 nt, Artificial Sequence; identical to SEQ ID NO: 99466
  derived and/or modified CDS sequence (opt2) from hemagglutinin__InfluenzaA__ADN92500

SEQ ID NO: 102090 - RNA, 1701 nt, Artificial Sequence; identical to SEQ ID NO: 98705
  derived and/or modified CDS sequence (opt2) from hemagglutinin__InfluenzaA__ADN92510

SEQ ID NO: 102091 - RNA, 1701 nt, Artificial Sequence; identical to SEQ ID NO: 98705
  derived and/or modified CDS sequence (opt2) from hemagglutinin__InfluenzaA__ADN92520

SEQ ID NO: 102092 - RNA, 1701 nt, Artificial Sequence; identical to SEQ ID NO: 99807
  derived and/or modified CDS sequence (opt2) from hemagglutinin__InfluenzaA__ADN92530

SEQ ID NO: 102093 - RNA, 1701 nt, Artificial Sequence; identical to SEQ ID NO: 98947
  derived and/or modified CDS sequence (opt2) from hemagglutinin__InfluenzaA__ADN92540

SEQ ID NO: 102094 - RNA, 1701 nt, Artificial Sequence; identical to SEQ ID NO: 98705
  derived and/or modified CDS sequence (opt2) from hemagglutinin__InfluenzaA__ADN92550

SEQ ID NO: 102095 - RNA, 1701 nt, Artificial Sequence; identical to SEQ ID NO: 98705
  derived and/or modified CDS sequence (opt2) from hemagglutinin__InfluenzaA__ADN92560

SEQ ID NO: 102096 - RNA, 1701 nt, Artificial Sequence
  derived and/or modified CDS sequence (opt2) from hemagglutinin__InfluenzaA__ADO00730
augaaggccauccucgucguccuccucuacaccuucgccaccgccaacgccgacacccucugcaucggcuaccacgccaacaacuccaccgacaccgucgacaccguccucgagaagaacgucaccgucacccacuccgucaaccuccucgaggacaagcacaacggcaagcucugcaagcuccgcggcgucgccccccuccaccucggcaagugcaacaucgccggcuggauccucggcaaccccgagugcggcucccucuccaccgccuccuccugguccuacaucgucgagaccuccuccuccgacaacggcaccugcuaccccggcgacuucaucgacuacgaggagcuccgcgagcagcucuccuccgucuccuccuucgagcgcuucgagaucuuccccaagaccuccuccuggcccaaccacgacuccaacaagggcgucaccgccgccugcccccacgccggcgccaaguccuucuacaagaaccucaucuggcucgucaagaagggcaacuccuaccccaagcucuccaaguccuacaucaacgacaagggcaaggagguccucguccucuggggcauccaccaccccuccaccuccgccgaccagcagucccucuaccagaacgccgacgccuacgucuucgucggcaccucccgcuacuccaagaaguucaagcccgagaucgccauccgccccaagguccgcgaccaggagggccgcaugaacuacuacuggacccucgucgagcccggcgacaagaucaccuucgaggccaccggcaaccucgucgucccccgcuacgccuucgccauggagcgcaacgccggcuccggcaucaucaucuccgacacccccguccacgacugcaacaccaccugccagacccccaagggcgccaucaacaccucccuccccuuccagaacauccaccccaucaccaucggcaagugccccaaguacgucaaguccaccaagcuccgccucgccaccggccuccgcaacguccccuccauccagucccgcggccucuucggcgccaucgccggcuucaucgagggcggcuggaccggcauggucgacggcugguacggcuaccaccaccagaacgagcagggcuccggcuacgccgccgaccucaaguccacccagaacgccaucgacggcaucaccaacaaggucaacuccgucaucgagaagaugaacacccaguucaccgccgucggcaaggaguucaaccaccucgagaagcgcaucgagaaccucaacaagaaggucgacgacggcuuccucgacaucuggaccuacaacgccgagcuccucguccuccucgagaacgagcgcacccucgacuaccacgacuccaacgucaagaaccucuacgagaagguccgcucccagcucaagaacaacgccaaggagaucggcaacggcugcuucgaguucuaccacaagugcgacaacaccugcauggaguccgucaagaacggcaccuacgacuaccccaaguacuccgaggaggccaagcucaaccgcgaggagaucgacggcgucaagcucgaguccacccgcaucuaccagauccucgccaucuacuccaccgucgccuccucccucguccucgucgucucccucggcgccaucuccuucuggaugugcuccaacggcucccuccagugccgcaucugcaucuga

SEQ ID NO: 102097 - RNA, 1701 nt, Artificial Sequence; identical to SEQ ID NO: 100125
  derived and/or modified CDS sequence (opt2) from hemagglutinin__InfluenzaA__ADO00740

SEQ ID NO: 102098 - RNA, 1701 nt, Artificial Sequence; identical to SEQ ID NO: 99869
  derived and/or modified CDS sequence (opt2) from hemagglutinin__InfluenzaA__ADO00750

SEQ ID NO: 102099 - RNA, 1701 nt, Artificial Sequence; identical to SEQ ID NO: 98705
  derived and/or modified CDS sequence (opt2) from hemagglutinin__InfluenzaA__ADO12143

SEQ ID NO: 102100 - RNA, 1701 nt, Artificial Sequence; identical to SEQ ID NO: 98705
  derived and/or modified CDS sequence (opt2) from hemagglutinin__InfluenzaA__ADO12153

SEQ ID NO: 102101 - RNA, 1701 nt, Artificial Sequence; identical to SEQ ID NO: 98705
  derived and/or modified CDS sequence (opt2) from hemagglutinin__InfluenzaA__ADO12163

SEQ ID NO: 102102 - RNA, 1701 nt, Artificial Sequence; identical to SEQ ID NO: 98705
  derived and/or modified CDS sequence (opt2) from hemagglutinin__InfluenzaA__ADO12173

SEQ ID NO: 102103 - RNA, 1701 nt, Artificial Sequence; identical to SEQ ID NO: 98705
  derived and/or modified CDS sequence (opt2) from hemagglutinin__InfluenzaA__ADO12183

SEQ ID NO: 102104 - RNA, 1701 nt, Artificial Sequence; identical to SEQ ID NO: 98705
  derived and/or modified CDS sequence (opt2) from hemagglutinin__InfluenzaA__ADO12193

SEQ ID NO: 102105 - RNA, 1701 nt, Artificial Sequence; identical to SEQ ID NO: 98705
  derived and/or modified CDS sequence (opt2) from hemagglutinin__InfluenzaA__ADO12203

SEQ ID NO: 102106 - RNA, 1701 nt, Artificial Sequence; identical to SEQ ID NO: 98705
  derived and/or modified CDS sequence (opt2) from hemagglutinin__InfluenzaA__ADO12213

SEQ ID NO: 102107 - RNA, 1701 nt, Artificial Sequence; identical to SEQ ID NO: 98705
  derived and/or modified CDS sequence (opt2) from hemagglutinin__InfluenzaA__ADO12223

SEQ ID NO: 102108 - RNA, 1701 nt, Artificial Sequence; identical to SEQ ID NO: 98705
  derived and/or modified CDS sequence (opt2) from hemagglutinin__InfluenzaA__ADO12233

SEQ ID NO: 102109 - RNA, 1701 nt, Artificial Sequence; identical to SEQ ID NO: 98705
  derived and/or modified CDS sequence (opt2) from hemagglutinin__InfluenzaA__ADO12243

SEQ ID NO: 102110 - RNA, 1701 nt, Artificial Sequence; identical to SEQ ID NO: 98705
  derived and/or modified CDS sequence (opt2) from hemagglutinin__InfluenzaA__ADO12253

SEQ ID NO: 102111 - RNA, 1701 nt, Artificial Sequence; identical to SEQ ID NO: 98705
  derived and/or modified CDS sequence (opt2) from hemagglutinin__InfluenzaA__ADO12263

SEQ ID NO: 102112 - RNA, 1701 nt, Artificial Sequence; identical to SEQ ID NO: 98705
  derived and/or modified CDS sequence (opt2) from hemagglutinin__InfluenzaA__ADO12273

SEQ ID NO: 102113 - RNA, 1701 nt, Artificial Sequence; identical to SEQ ID NO: 98705
  derived and/or modified CDS sequence (opt2) from hemagglutinin__InfluenzaA__ADO12283

SEQ ID NO: 102114 - RNA, 1701 nt, Artificial Sequence; identical to SEQ ID NO: 98705
  derived and/or modified CDS sequence (opt2) from hemagglutinin__InfluenzaA__ADO12293

SEQ ID NO: 102115 - RNA, 1701 nt, Artificial Sequence; identical to SEQ ID NO: 98705
  derived and/or modified CDS sequence (opt2) from hemagglutinin__InfluenzaA__ADO12303

SEQ ID NO: 102116 - RNA, 1701 nt, Artificial Sequence; identical to SEQ ID NO: 98705
  derived and/or modified CDS sequence (opt2) from hemagglutinin__InfluenzaA__ADO12313

SEQ ID NO: 102117 - RNA, 1701 nt, Artificial Sequence; identical to SEQ ID NO: 98705
  derived and/or modified CDS sequence (opt2) from hemagglutinin__InfluenzaA__ADO12323

SEQ ID NO: 102118 - RNA, 1701 nt, Artificial Sequence; identical to SEQ ID NO: 98705
  derived and/or modified CDS sequence (opt2) from hemagglutinin__InfluenzaA__ADO12333

SEQ ID NO: 102119 - RNA, 1701 nt, Artificial Sequence; identical to SEQ ID NO: 98705
  derived and/or modified CDS sequence (opt2) from hemagglutinin__InfluenzaA__ADO12343

SEQ ID NO: 102120 - RNA, 1701 nt, Artificial Sequence; identical to SEQ ID NO: 98705
  derived and/or modified CDS sequence (opt2) from hemagglutinin__InfluenzaA__ADO12353

SEQ ID NO: 102121 - RNA, 1701 nt, Artificial Sequence; identical to SEQ ID NO: 98705
  derived and/or modified CDS sequence (opt2) from hemagglutinin__InfluenzaA__ADO12363

SEQ ID NO: 102122 - RNA, 1701 nt, Artificial Sequence
  derived and/or modified CDS sequence (opt2) from hemagglutinin__InfluenzaA__ADO12373
augaaggccauccucgucguccuccucuacaccuucgccaccgccaacgccgacacccucugcaucggcuaccacgccaacaacuccaccgacaccgucgacaccguccucgagaagaacgucaccgucacccacuccgucaaccuccucgaggacaagcacaacggcaagcucugcaagcuccgcggcgucgccccccuccaccucggcaagugcaacaucgccggcuggauccucggcaaccccgagugcgagucccucuccaccgccuccuccugguccuacaucgucgagaccuccuccuccgacaacggcaccugcuaccccggcgacuucaucgacuacgaggagcuccgcgagcagcucuccuccgucuccuccuucgagcgcuucgagaucuuccccaagaccuccuccuggcccaaccacgacuccaacaagggcgucaccgccgccugcccccacgccggcgccaaguccuucuacaagaaccucaucuggcucgucaagaagggcaacuccuaccccaagcucuccaaguccuacaucaacaacaagggcaaggagguccucguccucuggggcauccaccaccccuccaccuccgccgaccagcagucccucuaccagaacgccgacgccuacgucuucgucggcaccucccgcuacuccaagaaguucaagcccgagaucgccauccgccccaagguccgcgaccaggagggccgcaugaacuacuacuggacccucgucgagcccggcgacaagaucaccuucgaggccaccggcaaccucgucgucccccgcuacgccuucgccauggagcgcaacgccggcuccggcaucaucaucuccgacacccccguccacgacugcaacaccaccugccagacccccaagggcgccaucaacaccucccuccccuuccagaacauccaccccaucaccaucggcaagugccccaaguacgucaaguccaccaagcuccgccucgccaccggccuccgcaacguccccuccauccagucccgcggccucuucggcgccaucgccggcuucaucgagggcggcuggaccggcauggucgacggcugguacggcuaccaccaccagaacgagcagggcuccggcuacgccgccgaccucaaguccacccagaacgccaucgacgagaucaccaacaaggucaacuccgucaucgagaagaugaacacccaguucaccgccgucggcaaggaguucaaccaccucgagaagcgcaucgagaaccucaacaagaaggucgacgacggcuuccucgacaucuggaccuacaacgccgagcuccucguccuccucgagaacgagcgcacccucgacuaccacgacuccaacgucaagaaccucuacgagaagguccgcucccagcucaagaacaacgccaaggagaucggcaacggcugcuucgaguucuaccacaagugcgacaacaccugcauggaguccgucaagaacggcaccuacgacuaccccaaguacuccgaggaggccaagcucaaccgcgaggagaucgacggcgucaagcucgaguccacccgcaucuaccagauccucgccaucuacuccaccgucgccuccucccucguccucgucgucucccucggcgccaucuccuucuggaugugcuccaacggcucccuccagugccgcaucugcaucuga

SEQ ID NO: 102123 - RNA, 1701 nt, Artificial Sequence; identical to SEQ ID NO: 100190
  derived and/or modified CDS sequence (opt2) from hemagglutinin__InfluenzaA__ADO12383

SEQ ID NO: 102124 - RNA, 1701 nt, Artificial Sequence
  derived and/or modified CDS sequence (opt2) from hemagglutinin__InfluenzaA__ADO12403
augaaggccauccucgucguccuccucuacaccuucgccaccgccaacgccgacacccucugcaucggcuaccacgccaacaacuccaccgacaccgucgacaccguccucgagaagaacgucaccgucacccacuccgucaaccuccucgaggacaagcacaacggcaagcucugcaagcuccgcggcgucgccccccuccaccucggcaagugcaacaucgccggcuggauccucggcaaccccgagugcgagucccucuccaccgccuccuccugguccuacaucgucgagaccuccuccuccgacaacggcaccugcuaccccggcgacuucaucgacuacgaggagcuccgcgagcagcucuccuccgucuccuccuucgagcgcuucgagaucuuccccaagaccuccuccuggcccaaccacgacuccaacaagggcgucaccgccgccugcccccacgccggcgccaaguccuucuacaagaaccucaucuggcucgucaagaagggcaacuccuaccccaagcucuccaaguccuacaucaacgacaagggcaaggagguccucguccucuggggcauccaccaccccuccaccuccgccgaccagcagucccucuaccagaacgccgacgccuacgucuucgucggcaccucccgcuacuccaagaaguucaagcccgagaucgccauccgccccaagguccgcgaccaggagggccgcaugaacuacuacuggacccucgucgagcccggcgacaagaucaccuucgaggccaccggcaaccucgucgucccccgcuacgccuucgccauggagcgcaacgccggcuccggcaucaucaucuccgacacccccguccacgacugcaacaccaccugccagacccccaagggcgccaucaacaccucccuccccuuccagaacguccaccccaucaccaucggcaagugccccaaguacgucaaguccaccaagcuccgccucgccaccggccuccgcaacguccccuccauccagucccgcggccucuucggcgccaucgccggcuucaucgagggcggcuggaccggcauggucgacggcugguacggcuaccaccaccagaacgagcagggcuccggcuacgccgccgaccucaaguccacccagaacgccaucgacgagaucaccaacaaggucaacuccgucaucgagaagaugaacacccaguucaccgccgucggcaaggaguucaaccaccucgagaagcgcaucgagaaccucaacaagaaggucgacgacggcuuccucgacaucuggaccuacaacgccgagcuccucguccuccucgagaacgagcgcacccucgacuaccacgacuccaacgucaagaaccucuacgagaagguccgcucccagcucaagaacaacgccaaggagaucggcaacggcugcuucgaguucuaccacaagugcgacaacaccugcauggaguccgucaagaacggcaccuacgacuaccccaaguacuccgaggaggccaagcucaaccgcgaggagaucgacggcgucaagcucgaguccacccgcaucuaccagauccucgccaucuacuccaccgucgccuccucccucguccucgucgucucccucggcgccaucuccuucuggaugugcuccaacggcucccuccagugccgcaucugcaucuga

SEQ ID NO: 102125 - RNA, 1701 nt, Artificial Sequence; identical to SEQ ID NO: 100341
  derived and/or modified CDS sequence (opt2) from hemagglutinin__InfluenzaA__ADO12413

SEQ ID NO: 102126 - RNA, 1701 nt, Artificial Sequence; identical to SEQ ID NO: 98705
  derived and/or modified CDS sequence (opt2) from hemagglutinin__InfluenzaA__ADO12423

SEQ ID NO: 102127 - RNA, 1701 nt, Artificial Sequence; identical to SEQ ID NO: 98705
  derived and/or modified CDS sequence (opt2) from hemagglutinin__InfluenzaA__ADO12433

SEQ ID NO: 102128 - RNA, 1701 nt, Artificial Sequence; identical to SEQ ID NO: 98705
  derived and/or modified CDS sequence (opt2) from hemagglutinin__InfluenzaA__ADO12443

SEQ ID NO: 102129 - RNA, 1701 nt, Artificial Sequence; identical to SEQ ID NO: 98705
  derived and/or modified CDS sequence (opt2) from hemagglutinin__InfluenzaA__ADO12453

SEQ ID NO: 102130 - RNA, 1701 nt, Artificial Sequence; identical to SEQ ID NO: 98705
  derived and/or modified CDS sequence (opt2) from hemagglutinin__InfluenzaA__ADO12463

SEQ ID NO: 102131 - RNA, 1701 nt, Artificial Sequence
  derived and/or modified CDS sequence (opt2) from hemagglutinin__InfluenzaA__ADO12473
augaaggccauccucgucguccuccucuacaccuucgccaccgccaacgccgacacccucugcaucggcuaccacgccaacaacuccaccgacaccgucgacaccguccucgagaagaacgucaccgucacccacuccgucaaccuccucgaggacaagcagaacggcaagcucugcaagcuccgcggcgucgccccccuccaccucggcaagugcaacaucgccggcuggauccucggcaaccccgagugcgagucccucuccaccgccuccuccugguccuacaucgucgagaccuccuccuccgacaacggcaccugcuaccccggcgacuucaucgacuacgaggagcuccgcgagcagcucuccuccgucuccuccuucgagcgcuucgagaucuuccccaagaccuccuccuggcccaaccacgacuccaacaagggcgucaccgccgccugcccccacgccggcgccaaguccuucuacaagaaccucaucuggcucgucaagaagggcaacuccuaccccaagcucuccaaguccuacaucaacgacaagggcaaggagguccucguccucuggggcauccaccaccccuccaccuccgccgaccagcagucccucuaccagaacgccgacgccuacgucuucgucggcaccucccgcuacuccaagaaguucaagcccgagaucgccauccgccccaagguccgcgaccaggagggccgcaugaacuacuacuggacccucgucgagcccggcgacaagaucaccuucgaggccaccggcaaccucgucgucccccgcuacgccuucgccauggagcgcaacgccggcuccggcaucaucaucuccgacacccccguccacgacugcaacaccaccugccagacccccaagggcgccaucaacaccucccuccccuuccagaacauccaccccaucaccaucggcaagugccccaaguacgucaaguccaccaagcuccgccucgccaccggccuccgcaacguccccuccauccagucccgcggccucuucggcgccaucgccggcuucaucgagggcggcuggaccggcauggucgacggcugguacggcuaccaccaccagaacgagcagggcuccggcuacgccgccgaccucaaguccacccagaacgccaucgacgagaucaccaacaaggucaacuccgucaucgagaagaugaacacccaguucaccgccgucggcaaggaguucaaccaccucgagaagcgcaucgagaaccucaacaagaaggucgacgacggcuuccucgacaucuggaccuacaacgccgagcuccucguccuccucgagaacgagcgcacccucgacuaccacgacuccaacgucaagaaccucuacgagaagguccgcucccagcucaagaacaacgccaaggagaucggcaacggcugcuucgaguucuaccacaagugcgacaacaccugcauggaguccgucaagaacggcaccuacgacuaccccaaguacuccgaggaggccaagcucaaccgcgaggagaucgacggcgucaagcucgaguccacccgcaucuaccagauccucgccaucuacuccaccgucgccuccucccucguccucgucgucucccucggcgccaucuccuucuggaugugcuccaacggcucccuccagugccgcaucugcaucuga

SEQ ID NO: 102132 - RNA, 1701 nt, Artificial Sequence; identical to SEQ ID NO: 98705
  derived and/or modified CDS sequence (opt2) from hemagglutinin__InfluenzaA__ADO12493

SEQ ID NO: 102133 - RNA, 1701 nt, Artificial Sequence
  derived and/or modified CDS sequence (opt2) from hemagglutinin__InfluenzaA__ADO12503
augaaggccauccucgucguccuccucuacaccuucgccaccgccaacgccgacacccucugcaucggcuaccacgccaacaacuccaccgacaccgucgacaccguccucgagaagaacgucaccgucacccacuccgucaaccuccucgaggacaagcacaacggcaagcucugcaagcuccgcggcgucgccccccuccaccucggcaagugcaacaucgccggcuggauccucggcaaccccgagugcgagucccucuccaccgccuccuccugguccuacaucgucgagaccuccuccuccgacaacggcaccugcuaccccggcgacuucaucgacuacgaggagcuccgcgagcagcucuccuccgucuccuccuucgagcgcuucgagaucuuccccaagaccuccuccuggcccaaccacgacuccaacaagggcgucaccgccgccugcccccacgccggcgccaaguccuucuacaagaaccucaucuggcucgucaagaagggcaacuccuaccccaagcucuccaaguccuacaucaacgacaagggcaaggagguccucguccucuggggcauccaccaccccuccaccuccgccgaccagcagucccucuaccagaacgccgacgccuacgucuucgucggcaccucccgcuacuccaagaaguucaagcccgagaucgccauccgccccaagguccgcgaccaggagggccgcaugaacuacuacuggacccucgucgagcccggcgacaagaucaccuucgaggccaccggcaaccucgucgucccccgcuacgccuucgccauggagcgcaacgccggcuccggcaucaucaucuccgacacccccguccacgacugcaacaccaccugccagacccccaagggcgccaucaacaccucccuccccuuccagaacauccaccccaucaccaucggcaagugccccaaguacgucaaguccaccaagcuccgccucgccaccggccuccgcaacguccccuccauccagucccgcggccucuucggcgccaucgccggcuucaucgagggcggcuggaccggcauggucgacggcugguacggcuaccaccaccagaacgagcagggcuccggcuacgccgccgaccucaaguccacccagaacgccaucgacgagaucaccaacaaggucaacuccgucaucgagaagaugaacacccaguucaccgccgucggcaaggaguucaaccaccucgagaagcgcaucgagaaccucaacaagaaggucgacgacggcuuccucgacaucuggaccuacaacgccgagcuccucguccuccucgagaacgagcgcacccucgacuaccacgacuccaacgucaagaaccucuacgagaagguccgcucccagcucaagaacaacgccaaggagaucggcaacggcugcuucgaguucuaccacaagugcgacaacaccugcauggaguccgucaagaacggcaccuacgacuaccccaaguacuccgaggaggccaagcucaaccgcgaggagaucgacggcgucaagcucgaguccacccgcaucuaccagauccucgccaucuacuccaccgucgccuccucccucguccucgucgucucccucggcgccaucaacuucuggaugugcuccaacggcucccuccagugccgcaucugcaucuga

SEQ ID NO: 102134 - RNA, 1701 nt, Artificial Sequence
  derived and/or modified CDS sequence (opt2) from hemagglutinin__InfluenzaA__ADO12513
augaaggccauccucgucguccuccucuacaccuucgccaccgccaacgccgacacccucugcaucggcuaccacgccaacaacuccaccgacaccgucgacaccguccucgagaagaacgucaccgucacccacuccgucaaccuccucgaggacaagcacaacggcaagcucugcaagcuccgcgaggucgccccccuccaccucggcaagugcaacaucgccggcuggauccucggcaaccccgagugcgagucccucuccaccgccuccuccugguccuacaucgucgagaccuccuccuccgacaacggcaccugcuaccccggcgacuucaucgacuacgaggagcuccgcgagcagcucuccuccgucuccuccuucgagcgcuucgagaucuuccccaagaccuccuccuggcccaaccacgacuccaacaagggcgucaccgccgccugcccccacgccggcgccaaguccuucuacaagaaccucaucuggcucgucaagaagggcaacuccuaccccaagcucuccaaguccuacaucaacgacaagggcaaggagguccucguccucuggggcauccaccaccccuccaccuccgccgaccagcagucccucuaccagaacgccgacgccuacgucuucgucggcaccucccgcuacuccaagaaguucaagcccgagaucgccauccgccccaagguccgcgaccaggagggccgcaugaacuacuacuggacccucgucgagcccggcgacaagaucaccuucgaggccaccggcaaccucgucgucccccgcuacgccuucgccauggagcgcaacgccggcuccggcaucaucaucuccgacacccccguccacgacugcaacaccaccugccagacccccaagggcgccaucaacaccucccuccccuuccagaacauccaccccaucaccaucggcaagugccccaaguacgucaaguccaccaagcuccgccucgccaccggccuccgcaacguccccuccauccagucccgcggccucuucggcgccaucgccggcuucaucgagggcggcuggaccggcauggucgacggcugguacggcuaccaccaccagaacgagcagggcuccggcuacgccgccgaccucaaguccacccagaacgccaucgacgagaucaccaacaaggucaacuccgucaucgagaagaugaacacccaguucaccgccgucggcaaggaguucaaccaccucgagaagcgcaucgagaaccucaacaagaaggucgacgacggcuuccucgacaucuggaccuacaacgccgagcuccucguccuccucgagaacgagcgcacccucgacuaccacgacuccaacgucaagaaccucuacgagaagguccgcucccagcucaagaacaacgccaaggagaucggcaacggcugcuucgaguucuaccacaagugcgacaacaccugcauggaguccgucaagaacggcaccuacgacuaccccaaguacuccgaggaggccaagcucaaccgcgaggagaucgacggcgucaagcucgaguccacccgcaucuaccagauccucgccaucuacuccaccgucgccuccucccucguccucgucgucucccucggcgccaucuccuucuggaugugcuccaacggcucccuccagugccgcaucugcaucuga

SEQ ID NO: 102135 - RNA, 1701 nt, Artificial Sequence; identical to SEQ ID NO: 98705
  derived and/or modified CDS sequence (opt2) from hemagglutinin__InfluenzaA__ADO12523

SEQ ID NO: 102136 - RNA, 1701 nt, Artificial Sequence
  derived and/or modified CDS sequence (opt2) from hemagglutinin__InfluenzaA__ADO12533
augaaggccauccucgucguccuccucuacaccuucgccaccgccaacgccgacacccucugcaucggcuaccacgccaacaacuccaccgacaccgucgacaccguccucgagaagaacgucaccgucacccacuccgucaaccuccucgaggacaagcacaacggcaagcucugcaagcuccgcggcgucgccccccuccaccucggcaagugcaacaucgccggcuggauccucggcaaccccgagugcgagucccucuccaccgccuccuccugguccuacaucgucgagaccuccuccuccgacaacggcaccugcuaccccggcgacuucaucgacuacgaggagcuccgcgagcagcucuccuccgucuccuccuucgagcgcuucgagaucuuccccaagaccuccuccuggcccaaccacgacuccaacaagggcgucaccgccgccugcccccacgccggcgccaaguccuucuacaagaaccucaucuggcucgucaagaagggcaacuccuaccccaagcucuccaaguccuacaucaacgacaagggcaaggagguccucguccucuggggcauccaccaccccuccaccuccgccgaccagcagucccucuaccagaacgccgacgccuacgucuucgucggcaccucccgcuacuccaagaaguucaagcccgagaucgccauccgccccaagguccgcgaccaggagggccgcaugaacuacuacuggacccucgucgagcccggcgacaagaucaccuucgaggccaccggcaaccucgucgucccccgcuacgccuucgccauggagcgcaacgccggcuccggcaucaucaucuccgacacccccguccacgacugcaacaccaccugccagacccccaagggcgccaucaacaccucccuccccuuccagaacauccaccccaucaccaucggcaagugccccaaguacgucaaguccacccgccuccgccucgccaccggccuccgcaacguccccuccauccagucccgcggccucuucggcgccaucgccggcuucaucgagggcggcuggaccggcauggucgacggcugguacggcuaccaccaccagaacgagcagggcuccggcuacgccgccgaccucaaguccacccagaacgccaucgacgagaucaccaacaaggucaacuccgucaucgagaagaugaacacccaguucaccgccgucggcaaggaguucaaccaccucgagaagcgcaucgagaaccucaacaagaaggucgacgacggcuuccucgacaucuggaccuacaacgccgagcuccucguccuccucgagaacgagcgcacccucgacuaccacgacuccaacgucaagaaccucuacgagaagguccgcucccagcucaagaacaacgccaaggagaucggcaacggcugcuucgaguucuaccacaagugcgacaacaccugcauggaguccgucaagaacggcaccuacgacuaccccaaguacuccgaggaggccaagcucaaccgcgaggagaucgacggcgucaagcucgaguccacccgcaucuaccagauccucgccaucuacuccaccgucgccuccucccucguccucgucgucucccucggcgccaucuccuucuggaugugcuccaacggcucccuccagugccgcaucugcaucuga

SEQ ID NO: 102137 - RNA, 1701 nt, Artificial Sequence; identical to SEQ ID NO: 98705
  derived and/or modified CDS sequence (opt2) from hemagglutinin__InfluenzaA__ADO12543

SEQ ID NO: 102138 - RNA, 1701 nt, Artificial Sequence; identical to SEQ ID NO: 98705
  derived and/or modified CDS sequence (opt2) from hemagglutinin__InfluenzaA__ADO12553

SEQ ID NO: 102139 - RNA, 1701 nt, Artificial Sequence; identical to SEQ ID NO: 98705
  derived and/or modified CDS sequence (opt2) from hemagglutinin__InfluenzaA__ADO12563

SEQ ID NO: 102140 - RNA, 1701 nt, Artificial Sequence; identical to SEQ ID NO: 98705
  derived and/or modified CDS sequence (opt2) from hemagglutinin__InfluenzaA__ADO12573

SEQ ID NO: 102141 - RNA, 1701 nt, Artificial Sequence
  derived and/or modified CDS sequence (opt2) from hemagglutinin__InfluenzaA__ADO12593
augaaggccauccucgucguccuccucuacaccuucgccaccgccaacgccgacacccucugcaucggcuaccacgccaacaacuccaccgacaucgucgacaccguccucgagaagaacgucaccgucacccacuccgucaaccuccucgaggacaagcacaacggcaagcucugcaagcuccgcggcgucgccccccuccaccucggcaagugcaacaucgccggcuggauccucggcaaccccgagugcgagucccucuccaccgccuccuccugguccuacaucgucgagaccuccuccuccgacaacggcaccugcuaccccggcgacuucaucgacuacgaggagcuccgcgagcagcucuccuccgucuccuccuucgagcgcuucgagaucuuccccaagaccuccuccuggcccaaccacgacuccaacaagggcgucaccgccgccugcccccacgccggcgccaaguccuucuacaagaaccucaucuggcucgucaagaagggcaacuccuaccccaagcucuccaaguccuacaucaacgacaagggcaaggagguccucguccucuggggcauccaccaccccuccaccuccgccgaccagcagucccucuaccagaacgccgacgccuacgucuucgucggcaccucccgcuacuccaagaaguucaagcccgagaucgccauccgccccaagguccgcgaccaggagggccgcaugaacuacuacuggacccucgucgagcccggcgacaagaucaccuucgaggccaccggcaaccucgucgucccccgcuacgccuucgccauggagcgcaacgccggcuccggcaucaucaucuccgacacccccguccacgacugcaacaccaccugccagacccccaagggcgccaucaacaccucccuccccuuccagaacauccaccccaucaccaucggcaagugccccaaguacgucaaguccaccaagcuccgccucgccaccggccuccgcaacguccccuccauccagucccgcggccucuucggcgccaucgccggcuucaucgagggcggcuggaccggcauggucgacggcugguacggcuaccaccaccagaacgagcagggcuccggcuacgccgccgaccucaaguccacccagaacgccaucgacgagaucaccaacaaggucaacuccgucaucgagaagaugaacacccaguucaccgccgucggcaaggaguucaaccaccucgagaagcgcaucgagaaccucaacaagaaggucgacgacggcuuccucgacaucuggaccuacaacgccgagcuccucguccuccucgagaacgagcgcacccucgacuaccacgacuccaacgucaagaaccucuacgagaagguccgcucccagcucaagaacaacgccaaggagaucggcaacggcugcuucgaguucuaccacaagugcgacaacaccugcauggaguccgucaagaacggcaccuacgacuaccccaaguacuccgaggaggccaagcucaaccgcgaggagaucgacggcgucaagcucgaguccacccgcaucuaccagauccucgccaucuacuccaccgucgccuccucccucguccucgucgucucccucggcgccaucuccuucuggaugugcuccaacggcucccuccagugccgcaucugcaucuga

SEQ ID NO: 102142 - RNA, 1701 nt, Artificial Sequence; identical to SEQ ID NO: 98705
  derived and/or modified CDS sequence (opt2) from hemagglutinin__InfluenzaA__ADO12603

SEQ ID NO: 102143 - RNA, 1701 nt, Artificial Sequence; identical to SEQ ID NO: 98705
  derived and/or modified CDS sequence (opt2) from hemagglutinin__InfluenzaA__ADO12613

SEQ ID NO: 102144 - RNA, 1701 nt, Artificial Sequence; identical to SEQ ID NO: 98705
  derived and/or modified CDS sequence (opt2) from hemagglutinin__InfluenzaA__ADO12623

SEQ ID NO: 102145 - RNA, 1701 nt, Artificial Sequence
  derived and/or modified CDS sequence (opt2) from hemagglutinin__InfluenzaA__ADO14349
augaaggccauccucgucguccuccucuacaccuucgccaccgccaacgccgacacccucugcaucggcuaccacgccaacaacuccaccgacaccgucgacaccguccucgagaagaacgucaccgucacccacuccgucaaccuccucgaggacaagcacaagggcaagcucugcaagcuccgcggcgucgccccccuccaccucggcaagugcaacaucgccggcuggauccucggcaaccccgagugcgagucccucuccaccgccuccuccugguccuacaucgucgagaccuccuccuccgacaagggcaccugcuaccccggcgacuucaucgacuacgaggagcuccgcgagcagcucuccuccgucuccuccuucgagcgcuucgagaucuuccccaagaccuccuccuggcccaaccacgacuccaacaagggcgucaccgccgccugcccccacgccggcgccaaguccuucuacaagaaccucaucuggcucgucaagaagggcaacuccuaccccaagcucuccaaguccuacaucaacgacaagggcaaggagguccucguccucuggggcauccaccaccccuccaccuccgccgaccagcagucccucuaccagaacgccgacgccuacgucuucgucggcaccucccgcuacuccaagaaguucaagcccgagaucgccauccgccccaagguccgcgaccaggagggccgcaugaacuacuacuggacccucgucgagcccggcgacaagaucaccuucgaggccaccggcaaccucgucgucccccgcuacgccuucgccauggagcgcaacgccggcuccggcaucaucaucuccgacacccccguccacgacugcaacaccaccugccagacccccaagggcgccaucaacaccucccuccccuuccagaacauccaccccaucaccaucggcaagugccccaaguacgucaaguccaccaagcuccgccucgccaccggccuccgcaacauccccuccauccagucccgcggccucuucggcgccaucgccggcuucaucgagggcggcuggaccggcauggucgacggcugguacggcuaccaccaccagaacgagcagggcuccggcuacgccgccgaccucaaguccacccagaacgccaucgacgagaucaccaacaaggucaacuccgucaucgagaagaugaacacccaguucaccgccgucggcaaggaguucaaccaccucgagaagcgcaucgagaaccucaacaagaaggucgacgacggcuuccucgacaucuggaccuacaacgccgagcuccucguccuccucgagaacgagcgcacccucgacuaccacgacuccaacgucaagaaccucuacgagaagguccgcucccagcucaagaacaacgccaaggagaucggcaacggcugcuucgaguucuaccacaagugcgacaacaccugcauggaguccgucaagaacggcaccuacgacuaccccaaguacuccgaggaggccaagcucaaccgcgaggagaucgacggcgucaagcucgaguccacccgcaucuaccagauccucgccaucuacuccaccgucgccuccucccucguccucgucgucucccucggcgccaucuccuucuggaugugcuccaacggcucccuccagugccgcaucugcaucuga

SEQ ID NO: 102146 - RNA, 1701 nt, Artificial Sequence; identical to SEQ ID NO: 100969
  derived and/or modified CDS sequence (opt2) from hemagglutinin__InfluenzaA__ADO14351

SEQ ID NO: 102147 - RNA, 1701 nt, Artificial Sequence
  derived and/or modified CDS sequence (opt2) from hemagglutinin__InfluenzaA__ADO14353
augaaggccauccucgucguccuccucuacaccuucgccaccgccaacgccgacacccucugcaucggcuaccacgccaacaacuccaccgacaccgucgacaccguccucgagaagaacgucaccgucacccacuccgucaaccuccucgaggacaagcacaacggcaagcucugcaagcuccgcggcgucgccccccuccaccucggcaagugcaacaucgccggcuggauccucggcaaccccgagugcgagucccucuccaccgccuccuccugguccuacaucgucgagaccuccuccuccgacaacggcaccugcuaccccggcgacuucaucgacuacgaggagcuccgcgagcagcucuccuccgucuccuccuucgagcgcuucgagaucuuccccaagaccuccuccuggcccaaccacgacuccaacaagggcgucaccgccgccugcccccacgccgaggccaaguccuucuacaagaaccucaucuggcucgucaagaagggcaacuccuaccccaagcucuccaaguccuacaucaacgacaagggcaaggagguccucguccucuggggcauccaccaccccuccaccuccgccgaccagcagucccucuaccagaacgccgacgccuacgucuucgucggcaccucccgcuacuccaagaaguucaagcccgagaucgccauccgccccaagguccgcgaccaggagggccgcaugaacuacuacuggacccucgucgagcccggcgacaagaucaccuucgaggccaccggcaaccucgucgucccccgcuacgccuucgccauggagcgcaacgccggcuccggcaucaucaucuccgacacccccguccacgacugcaacaccaccugccagacccccaagggcgccaucaacaccucccuccccuuccagaacauccaccccaucaccaucggcaagugccccaaguacgucaaguccaccaagcuccgccucgccaccggccuccgcaacauccccuccauccagucccgcggccucuucggcgccaucgccggcuucaucgagggcggcuggaccggcauggucgacggcugguacggcuaccaccaccagaacgagcagggcuccggcuacgccgccgaccucaaguccacccagaacgccaucgacgagaucaccaacaaggucaacuccgucaucgagaagaugaacacccaguucaccgccgucggcaaggaguucaaccaccucgagaagcgcaucgagaaccucaacaagaaggucgacgacggcuuccucgacaucuggaccuacaacgccgagcuccucguccuccucgagaacgagcgcacccucgacuaccacgacuccaacgucaagaaccucuacgagaagguccgcucccagcucaagaacaacgccaaggagaucggcaacggcugcuucgaguucuaccacaagugcgacaacaccugcauggaguccgucaagaacggcaccuacgacuaccccaaguacuccgaggaggccaagcucaaccgcgaggagaucgacggcgucaagcucgaguccacccgcaucuaccagauccucgccaucuacuccaccgucgccuccucccucguccucgucgucucccucggcgccaucuccuucuggaugugcuccaacggcucccuccagugccgcaucugcaucuga

SEQ ID NO: 102148 - RNA, 1701 nt, Artificial Sequence
  derived and/or modified CDS sequence (opt2) from hemagglutinin__InfluenzaA__ADO14354
augaaggccauccucgucguccuccucuacaccuucgccaccgccaacgccgacacccucugcaugggcuaccacgccaacaacuccaccgacaccgucgacaccguccucgagaagaacgucaccgucacccacuccgucaaccuccucgaggacaagcacaacggcaagcucugcaagcuccgcggcgucgccccccuccaccucggcaagugcaacaucgccggcuggauccucggcaaccccgagugcgagucccucuccaccgccuccuccugguccuacaucgucgagaccuccuccuccgacaacggcaccugcuaccccggcgacuucaucgacuacgaggagcuccgcgagcagcucuccuccgucuccuccuucgagcgcuucgagaucuuccccaagaccuccuccuggcccaaccacgacuccaacaagggcgucaccgccgccugcccccacgccggcgccaaguccuucuacaagaaccucaucuggcucgucaagaagggcaacuccuaccccaagcucuccaaguccuacaucaacgacaagggcaaggagguccucguccucuggggcauccaccaccccuccaccuccgccgaccagcagucccucuaccagaacgccgacgccuacgucuucgucggcaccucccgcuacuccaagaaguucaagcccgagaucgccauccgccccaagguccgcgagcaggagggccgcaugaacuacuacuggacccucgucgagcccggcgacaagaucaccuucgaggccaccggcaaccucgucgucccccgcuacgccuucgccauggagcgcaacgccggcuccggcaucaucaucuccgacacccccguccacgacugcaacaccaccugccagacccccaagggcgccaucaacaccucccuccccuuccagaacauccaccccaucaccaucggcaagugccccaaguacgucaaguccaccaagcuccgccucgccaccggccuccgcaacguccccuccauccagucccgcggccucuucggcgccaucgccggcuucaucgagggcggcuggaccggcauggucgacggcugguacggcuaccaccaccagaacgagcagggcuccggcuacgccgccgaccucaaguccacccagaacgccaucgacgagaucaccaacaaggucaacuccgucaucgagaagaugaacacccaguucaccgccgucggcaaggaguucaaccaccucgagaagcgcaucgagaaccucaacaagaaggucgacgacggcuuccucgacaucuggaccuacaacgccgagcuccucguccuccucgagaacgagcgcacccucgacuaccacgacuccaacgucaagaaccucuacgagaagguccgcucccagcucaagaacaacgccaaggagaucggcaacggcugcuucgaguucuaccacaagugcgacaacaccugcauggaguccgucaagaacggcaccuacgacuaccccaaguacuccgaggaggccaagcucaaccgcgaggagaucgacggcgucaagcucgaguccacccgcaucuaccagauccucgccaucuacuccaccgucgccuccucccucguccucgucgucucccucggcgccaucuccuucuggaugugcuccaacggcucccuccagugccgcaucugcaucuga

SEQ ID NO: 102149 - RNA, 1701 nt, Artificial Sequence
  derived and/or modified CDS sequence (opt2) from hemagglutinin__InfluenzaA__ADO14356
augaaggccauccucgucguccuccucuacaccuucgccaccgccaacgccgacacccucugcaucggcuaccacgccaacaacuccaccgacaccgucgacaccguccucgagaagaacgucaccgucacccacuccgucaaccuccucgaggacaagcacaacggcaagcucugcaagcuccgcggcgucgccccccuccaccucggcaagugcaacaucgccggcuggauccucggcaaccccgagugcgagucccucuccaccgccuccuccugguccuacaucgucgagaccuccuccuccgacaacggcaccugcuaccccggcgacuucaucgacuacgaggagcuccgcgagcagcucuccuccgucuccuccuucgagcgcuucgagaucuuccccaagaccuccuccuggcccaaccacgacuccaacaagggcgucaccgccgccugcccccacgccggcgccaaguccuucuacaagaaccucaucuggcucgucaagaagggcaacuccuaccccaagcucuccaaguccuacaucaacgacaagggcaaggagguccucguccucuggggcauccaccaccccuccaccuccgccgaccagcagucccucuaccagaacgccgacgccuacgucuucgucggcaccucccgcuacuccaagaaguucaagcccgagaucgccauccgccccaagguccgcggccaggagggccgcaugaacuacuacuggacccucgucgagcccggcgacaagaucaccuucgaggccaccggcaaccucgucgucccccgcuacgccuucgccauggagcgcaacgccggcuccggcaucaucaucuccgacacccccguccacgacugcaacaccaccugccagacccccaagggcgccaucaacaccucccuccccuuccagaacauccaccccaucaccaucggcaagugccccaaguacgucaaguccaccaagcuccgccucgccaccggccuccgcaacauccccuccauccagucccgcggccucuucggcgccaucgccggcuucaucgagggcggcuggaccggcauggucgacggcugguacggcuaccaccaccagaacgagcagggcuccggcuacgccgccgaccucaaguccacccagaacgccaucgacgagaucaccaacaaggucaacuccgucaucgagaagaugaacacccaguucaccgccgucggcaaggaguucaaccaccucgagaagcgcaucgagaaccucaacaagaaggucgacgacggcuuccucgacaucuggaccuacaacgccgagcuccucguccuccucgagaacgagcgcacccucgacuaccacgacuccaacgucaagaaccucuacgagaagguccgcucccagcucaagaacaacgccaaggagaucggcaacggcugcuucgaguucuaccacaagugcgacaacaccugcauggaguccgucaagaacggcaccuacgacuaccccgaguacuccgaggaggccaagcucaaccgcgaggagaucgacggcgucaagcucgaguccacccgcaucuaccagauccucgccaucuacuccaccgucgccuccucccucguccucgucgucucccucggcgccaucuccuucuggaugugcuccaacggcucccuccagugccgcaucugcaucuga

SEQ ID NO: 102150 - RNA, 1701 nt, Artificial Sequence; identical to SEQ ID NO: 100969
  derived and/or modified CDS sequence (opt2) from hemagglutinin__InfluenzaA__ADO14357

SEQ ID NO: 102151 - RNA, 1701 nt, Artificial Sequence
  derived and/or modified CDS sequence (opt2) from hemagglutinin__InfluenzaA__ADO14359
augaaggccauccucgucguccuccucuacaccuucgccaccgccaacgccgacacccucugcaucggcuaccacgccaacaacuccaccgacaccgucgacaccguccucgagaagaacgucaccgucacccacuccgucaaccuccucgaggacaagcacaacggcaagcucugcaagcuccgcggcgucgccccccuccaccucggcaagugcaacaucgccggcuggauccucggcaaccccgagugcgagucccucuccaccgccuccuccugguccuacaucgucgagaccuccuccuccgacaacggcaccugcuaccccggcgacuucaucgacuacgaggagcuccgcgagcagcucuccuccgucuccuccuucgagcgcuucgagaucuuccccaagaccuccuccuggcccaaccacgacuccaacaagggcgucaccgccgccugcccccacgccggcgccaaguccuucuacaagaaccucaucuggcucgucaagaagggcaacuccuaccccaagcucuccaaguccuacaucaacgacaagggcaaggagguccucguccucuggggcauccaccacccccccaccuccgccgaccagcagucccucuaccagaacgccgacgccuacgucuucgucggcaccucccgcuacuccaagaaguucaagcccgagaucgccauccgccccaagguccgcgaccaggagggccgcaugaacuacuacuggacccucgucgagcccggcgacaagaucaccuucgaggccaccggcaaccucgucgucccccgcuacgccuucgccauggagcgcaacgccggcuccggcaucaucaucuccgacacccccguccacgacugcaacaccaccugccagacccccaagggcgccaucaacaccucccuccccuuccagaacauccaccccaucaccaucggcaagugccccaaguacgucaaguccaccaagcuccgccucgccaccggccuccgcaacguccccuccauccagucccgcggccucuucggcgccaucgccggcuucaucgagggcggcuggaccggcauggucgacggcugguacggcuaccaccaccagaacgagcagggcuccggcuacgccgccgaccucaaguccacccagaacgccaucgacaagaucaccaacaaggucaacuccgucaucgagaagaugaacacccaguucaccgccgucggcaaggaguucaaccaccucgagaagcgcaucgagaaccucaacaagaaggucgacgacggcuuccucgacaucuggaccuacaacgccgagcuccucguccuccucgagaacgagcgcacccucgacuaccacgacuccaacgucaagaaccucuacgagaagguccgcucccagcucaagaacaacgccaaggagaucggcaacggcugcuucgaguucuaccacaagugcgacaacaccugcauggaguccgucaagaacggcaccuacgacuaccccaaguacuccgaggaggccaagcucaaccgcgaggagaucgacggcgucaagcucgaguccacccgcaucuaccagauccucgccaucuacuccaccgucgccuccucccucguccucgucgucucccucggcgccaucuccuucuggaugugcuccaacggcucccuccagugccgcaucugcaucuga

SEQ ID NO: 102152 - RNA, 1701 nt, Artificial Sequence
  derived and/or modified CDS sequence (opt2) from hemagglutinin__InfluenzaA__ADO14361
augaaggccauccucgucguccuccucuacaccuucgccaccgccaacgccgacacccucugcaucggcuaccacgccaacaacuccaccgacaccgucgacaccguccucgagaagaacgucaccgucacccacuccgucaaccuccucgaggacaagcacaacggcaagcucugcaagcuccgcggcgucgccccccuccaccucggcaagugcaacaucgccggcuggauccucggcaaccccgagugcgagucccucuccaccgccuccuccugguccuacaucgucgagaccuccuccuccgacaagggcaccugcuaccccggcgacuucaucgacuacgaggagcuccgcgagcagcucuccuccgucuccuccuucgagcgcuucgagaucuuccccaagaccuccuccuggcccaaccacgacuccaacaagggcgucaccgccgccugcccccacgccggcgccaaguccuucuacaagaaccucaucuggcucgucaagaagggcaacuccuaccccaagcucuccaaguccuacaucaacgacaagggcaaggagguccucguccucuggggcauccaccaccccuccaccuccgccgaccagcagucccucuaccagaacgccgacgccuacgucuucgucggcaccucccgcuacuccaagaaguucaagcccgagaucgccauccgccccaagguccgcgaccaggagggccgcaugaacuacuacuggacccucgucgagcccggcgacaagaucaccuucgaggccaccggcaaccucgucgucccccgcuacgccuucgccauggagcgcaacgccggcuccggcaucaucaucuccgacacccccguccacgacugcaacaccaccugccagacccccaagggcgccaucaacaccucccuccccuuccagaacauccaccccaucaccaucggcaagugccccaaguacgucaaguccaccaagcuccgccucgccaccggccuccgcaacauccccuccauccagucccgcggccucuucggcgccaucgccggcuucaucgagggcggcuggaccggcauggucgacggcugguacggcuaccaccaccagaacgagcagggcuccggcuacgccgccgaccucaaguccacccagaacgccaucgacgagaucaccaacaaggucaacuccgucaucgagaagaugaacacccaguucaccgccgucggcaaggaguucaaccaccucgagaagcgcaucgagaaccucaacaagaaggucgacgacggcuuccucgacaucuggaccuacaacgccgagcuccucguccuccucgagaacgagcgcacccucgacuaccacgacuccaacgucaagaaccucuacgagaagguccgcucccagcucaagaacaacgccaaggagaucggcaacggcugcuucgaguucuaccacaagugcgacaacaccugcauggaguccgucaagaacggcaccuacgacuaccccaaguacuccgaggaggccaagcucaaccgcgaggagaucgacggcgucaagcucgaguccacccgcaucuaccagauccucgccaucuacuccaccgucgccuccucccucguccucgucgucucccucggcgccaucuccuucuggaugugcuccaacggcucccuccagugccgcaucugcaucuga

SEQ ID NO: 102153 - RNA, 1701 nt, Artificial Sequence
  derived and/or modified CDS sequence (opt2) from hemagglutinin__InfluenzaA__ADO14362
augaaggccauccucgucguccuccucuacaccuucgccaccgccaacgccgacacccucugcaucggcuaccacgccaacaacuccaccgacaccgucgacaccguccucgagaagaacgucaccgucacccacuccgucaaccuccucgaggacaagcacaacggcaagcucugcaagcuccgcggcgucgccccccuccaccucggcaagugcaacaucgccggcuggauccucggcaaccccgagugcgagucccucuccaccgccuccuccugguccuacaucgucgagaccuccuccuccgacaacggcaccugcuaccccggcgacuucaucgacuacgaggagcuccgcgagcagcucuccuccgucuccuccuucgagcgcuucgagaucuuccccaagaccuccuccuggcccaaccacgacuccaacaagggcgucaccgccgccugcccccacgccggcgccaaguccuucuacaagaaccucaucuggcucgucaagaagggcaacuccuaccccaagcucuccaaguccuacaucaacgacaagggcaaggagguccucguccucuggggcauccaccaccccuccaacuccgccgaccagcagucccucuaccagaacgccgacgccuacgucuucgucggcaccucccgcuacuccaagaaguucaagcccgagaucgccauccgccccaagguccgcgaccaggagggccgcaugaacuacuacuggacccucgucgagcccggcgacaagaucaccuucgaggccaccggcaaccucgucgucccccgcuacgccuucgccauggagcgcaacgccggcuccggcaucaucaucuccgacacccccguccacgacugcaacaccaccugccagacccccaagggcgccaucaacaccucccuccccuuccagaacauccaccccaucaccaucggcaagugccccaaguacgucaaguccaccaagcuccgccucgccaccggccuccgcaacguccccuccauccagucccgcggccucuucggcgccaucgccggcuucaucgagggcggcuggaccggcauggucgacggcugguacggcuaccaccaccagaacgagcagggcuccggcuacgccgccgaccucaaguccacccagaacgccaucgacgagaucaccaacaaggucaacuccgucaucgagaagaugaacacccaguucaccgccgucggcaaggaguucaaccaccucgagaagcgcaucgagaaccucaacaagaaggucgacgacggcuuccucgacaucuggaccuacaacgccgagcuccucguccuccucgagaacgagcgcacccucgacuaccacgacuccaacgucaagaaccucuacgagaagguccgcucccagcucaagaacaacgccaaggagaucggcaacggcugcuucgaguucuaccacaagugcgacaacaccugcauggaguccgucaagaacggcaccuacgacuaccccaaguacuccgaggaggccaagcucaaccgcgaggagaucgacggcgucaagcucgaguccacccgcaucuaccagauccucgccaucuacuccaccgucgccuccucccucguccucgucgucucccucggcgccaucuccuucuggaugugcuccaacggcucccuccagugccgcaucugcaucuga

SEQ ID NO: 102154 - RNA, 1683 nt, Artificial Sequence
  derived and/or modified CDS sequence (opt2) from hemagglutinin__InfluenzaA__ADO21015
auggaggucgucucccucaucaccauccuccuccucgucaccgucuccaacgccgacaagaucugcaucggcuaccaguccaccaacuccaccgagaccgucgacacccucaccgagaacaacguccccgucgcccacgccaaggagcuccuccacaccgagcacaacggcaugcucugcgccaccaaccucggccacccccucauccucgacaccugcaccaucgagggccucaucuacggcaaccccuccugcgaccuccuccucggcggccgcgagugguccuacaucgucgagcgccccuccgccgucaacggccucugcuaccccggcaacgucgagaaccucgaggagcuccgcucccucuucuccuccgccuccuccuaccagcgcauccagaucuuccccggcaccaucuggaacgucuccuacggcggcaccuccaaggccugcuccgacuccuucuacaaguccaugcgcuggcucacccagaagaacaacgccuaccccauccaggacgcccaguacaccaacaaccgcggcaagaacauccucuucauguggggcaucaaccacccccccaccgacaccacccagaccaaccucuacacccgcaccgacaccaccaccuccgucgccaccgaggacaucaaccgcaccuucaagccccucaucggcccccgcccccucgucaacggccagcagggccgcaucgacuacuacugguccguccucaagcccggccagacccuccgcguccgcuccaacggcaaccucaucgcccccugguacggccacauccucuccggcgagucccacggccgcauccucaagaccgaccucaacuccggcaacugcgucguccagugccagaccgagcgcggcggccucaacaccacccuccccuuccacaacgucuccaaguacgccuucggcaacugccccaaguacgucggcgucaagucccucaagcucgccgucggccuccgcaacguccccgcccgcuccucccgcggccucuucggcgccaucgccggcuucaucgagggcggcugguccggccucgucgccggcugguacggcuuccagcacuccaacgaccagggcgucggcauggccgccgaccgcgacuccacccagaaggccaucgacaagaucaccuccaaggucaacaacaucgucgacaagaugaacaagcaguacgagaucaucgaccacgaguucuccgaggucgagacccgccucaacaugaucaacaacaagaucgacgaccagauccaggacaucugggccuacaacgccgagcuccucguccuccucgagaaccagaagacccucgacgagcacgacgccaacgucaacaaccucuacaacaaggucaagcgcgcccucggcuccaacgccgucgaggacggcaagggcugcuucgagcucuaccacaagugcgacgaccagugcauggagaccauccgcaacggcaccuacaaccgccgcaaguacaaggaggagucccgccucgagcgccagaagaucgagggcgucaagcucgaguccgagggcaccuacaagauccucaccaucuacuccaccgucgccuccucccucgucaucgccaugggcuucgccgccuuccucuucugggccauguccaacggcuccugccgcugcaacaucugcaucuga

SEQ ID NO: 102155 - RNA, 1683 nt, Artificial Sequence
  derived and/or modified CDS sequence (opt2) from hemagglutinin__InfluenzaA__ADO21026
auggaggucgucucccucaucaccauccuccuccucgucaccgucuccaacgccgacaagaucugcaucggcuaccaguccaccaacuccaccgagaccgucgacacccucaccgagaacaacguccccgucgcccacgccaaggagcuccuccacaccgagcacaacggcaugcucugcgccaccaaccucggccacccccucauccucgacaccugcaccaucgagggccucaucuacggcaaccccuccugcgaccuccuccucggcggccgcgagugguccuacaucgucgagcgccccuccgccgucaacggccucugcuaccccggcaacgucgagaaccucgaggagcuccgcucccucuucuccuccgccuccuccuaccagcgcauccagaucuuccccggcaccaucuggaacgucuccuacggcggcaccuccaaggccugcuccgacuccuucuacaaguccaugcgcuggcucacccagaagaacaacgccuaccccauccaggacgcccaguacaccaacaaccgcggcaagaacauccucuucauguggggcaucaaccacccccccaccgacaccacccagaccaaccucuacacccgcaccgacaccaccaccuccgucgccaccgaggacaucaaccgcaccuucaacccccucaucggcccccgcccccucgucaacggccagcagggccgcaucgacuacuacugguccguccucaagcccggccagacccuccgcguccgcuccaacggcaaccucaucgcccccugguacggccacauccucuccggcgagucccacggccgcauccucaagaccgaccucaacuccggcaacugcgucguccagugccagaccgagcgcggcggccucaacaccacccuccccuuccacaacgucuccaaguacgccuucggcaacugccccaaguacgucggcgucaagucccucaagcucgccgucggccuccgcaacguccccgcccgcuccucccgcggccucuucggcgccaucgccggcuucaucgagggcggcugguccggccucgucgccggcugguacggcuuccagcacuccaacgaccagggcgucggcauggccgccgaccgcgacuccacccagaaggccaucgacaagaucaccuccaaggucaacaacaucgucgacaagaugaacaagcaguacgagaucaucgaccacgaguucuccgaggucgagacccgccucaacaucaucaacaacaagaucgacgaccagauccaggacaucugggccuacaacgccgagcuccucguccuccucgagaaccagaagacccucgacgagcacgacgccaacgucaacaaccucuacaacaaggucaagcgcgcccucggcuccaacgccgucgaggacggcaagggcugcuucgagcucuaccacaagugcgacgaccagugcauggagaccauccgcaacggcaccuacaaccgccgcaaguacaaggaggagucccgccucgagcgccagaagaucgagggcgucaagcucgaguccgagggcaccuacaagauccucaccaucuacuccaccgucgccuccucccucgucaucgccaugggcuucgccgccuuccucuucugggccauguccaacggcuccugccgcugcaacaucugcaucuga

SEQ ID NO: 102156 - RNA, 1683 nt, Artificial Sequence
  derived and/or modified CDS sequence (opt2) from hemagglutinin__InfluenzaA__ADO21037
auggaggucgucucccucaucaccauccuccuccucgucaccgucuccaacgccgacaagaucugcaucggcuaccaguccaccaacuccaccgagaccgucgacacccucaccgagaacaacguccccgucgcccacgccaaggagcuccuccacaccgagcacaacggcaugcucugcgccaccaaccucggccacccccucauccucgacaccugcaccaucgagggccucaucuacggcaaccccuccugcgaccuccuccucggcggccgcgagugguccuacaucgucgagcgccccuccgccgucaacggccucugcuaccccggcaacgucgagaaccucgaggagcuccgcucccucuucuccuccgccuccuccuaccagcgcauccagaucuuccccggcaccaucuggaacgucuccuacggcggcaccuccaaggccugcuccgacuccuucuacaaguccaugcgcuggcucacccagaagaacaacgccuaccccauccaggacgcccaguacaccaacaaccgcggcaagaacauccucuucauguggggcaucaaccacccccccaccgacaccacccagaccaaccucuacacccgcaccgacaccaccaccuccgucgccaccgaggacaucaaccgcaccuucaagcccuacaucggcccccgcccccucgucaacggccagcagggccgcaucgacuacuacugguccguccucaagcccggccagacccuccgcguccgcuccaacggcaaccucaucgcccccugguacggccacauccucuccggcgagucccacggccgcauccucaagaccgaccucaacuccggcaacugcgucguccagugccagaccgagcgcggcggccucaacaccacccuccccuuccacaacgucuccaaguacgccuucggcaacugccccaaguacgucggcgucaagucccucaagcucgccgucggccuccgcaacguccccgcccgcuccucccgcggccucuucggcgccaucgccggcuucaucgagggcggcugguccggccucgucgccggcugguacggcuuccagcacuccaacgaccagggcgucggcauggccgccgaccgcgaccucacccagaaggccaucgacaagaucaccuccaaggucaacaacaucgucgacaagaugaacaagcaguacgagaucaucgaccacgaguucuccgaggucgagacccgccucaacaugaucaacaacaagaucgacgaccagauccaggacaucugggccuacaacgccgagcuccucguccuccucgagaaccagaagacccucgacgagcacgacgccaacgucaacaaccucuacaacaaggucaagcgcgcccucggcuccaacgccgucgaggacggcaagggcugcuucgagcucuaccacaagugcgacgaccagugcauggagaccauccgcaacggcaccuacaaccgccgcaaguacaaggaggagucccgccucgagcgccagaagaucgagggcgucaagcucgaguccgagggcaccuacaagauccucaccaucuacuccaccgucgccuccucccucgucaucgccaugggcuucgccgccuuccucuucugggccauguccaacggcuccugccgcugcaacaucugcaucuga

SEQ ID NO: 102157 - RNA, 1683 nt, Artificial Sequence
  derived and/or modified CDS sequence (opt2) from hemagglutinin__InfluenzaA__ADO21048
auggaggucgucucccucaucaccauccuccuccucgucaccgucuccaacgccgacaagaucugcaucggcuaccaguccaccaacuccaccgagaccgucgacacccucaccgagaacaacguccccgucgcccacgccaaggagcuccuccacaccgagcacaacggcaugcucugcgccaccaaccucggccacccccucauccucgacaccugcaccaucgagggccucaucuacggcaaccccuccugcgaccuccuccucggcggccgcgagugguccuacaucgucgagcgccccuccgccgucaacggccucugcuaccccggcaacgucgagaaccucgaggagcuccgcucccucuucuccuccgccuccuccuaccagcgcauccagaucuuccccggcaccaucuggaacgucuccuacggcggcaccuccaaggccugcuccgacuccuucuacaaguccaugcgcuggcucacccagaagaacaacgccuaccccauccaggacgcccaguacaccaacaaccgcggcaagaacauccacuucauguggggcaucaaccacccccccaccgacaccacccagaccaaccucuacacccgcaccgacaccaccaccuccgucgccaccgaggacaucaaccgcaccuucaagccccucaucggcccccgcccccucgucaacggccagcagggccgcaucgacuacuacugguccguccucaagcccggccagacccuccgcguccgcuccaacggcaaccucaucgcccccugguacggccacauccucuccggcgagucccacggccgcauccucaagaccgaccucaacuccggcaacugcgucguccagugccagaccgagcgcggcggccucaacaccacccuccccuuccacaacgucuccaaguacgccuucggcaacugccccaaguacgucggcgucaagucccucaagcucgccgucggccuccgcaacguccccgcccgcuccucccgcggccucuucggcgccaucgccggcuucaucgagggcggcugguccggccucgucgccggcugguacggcuuccagcacuccaacgaccagggcgucggcauggccgccgaccgcgucuccacccagaaggccaucgacaagaucaccuccaaggucaacaacaucgucgacaagaugaacaagcaguacgagaucaucgaccacgaguucuccgaggucgagacccgccucaacaugaucaacaacaagaucgacgaccagauccaggacaucugggccuacaacgccgagcuccucguccuccucgagaaccagaagacccucgacgagcacgacgccaacgucaacaaccucuacaacaaggucaagcgcgcccucggcuccaacgccgucgaggacggcaagggcugcuucgagcucuaccacaagugcgacgaccagugcauggagaccauccgcaacggcaccuacaaccgccgcaaguacaaggaggagucccgccucgagcgccagaagaucgagggcgucaagcucgaguccgagggcaccuacaagauccucaccaucuacuccaccgucgccuccucccucgucaucgccaugggcuucgccgccuuccucuucugggccauguccaacggcuccugccgcugcaacaucugcaucuga

SEQ ID NO: 102158 - RNA, 1701 nt, Artificial Sequence
  derived and/or modified CDS sequence (opt2) from hemagglutinin__InfluenzaA__ADO25092
augaaggccauccucgucguccuccucuacaccuucgccaccgccaacgccgacacccucugcaucggcuaccacgccaacaacuccaccgacaccgucgacaccguccucgagaagaacgucaccgucacccacuccgucaaccuccucgaggacaagcacaacggcaagcucugcaagcuccgcggcgucgccccccuccaccucggcaagugcaacaucgccggcuggauccucggcaaccccgagugcgagucccucuccaccgccuccuccugguccuacaucgucgagaccuccuccuccgacaacggcaccugcuaccccggcgacuucaucgacuacgaggagcuccgcgagcagcucuccuccgucuccuccuucgagcgcuucgagaucuuccccaagaccuccuccuggcccaaccacgacuccaacaagggcgucaccgccgccugcccccacgccggcgccaaguccuucuacaagaaccucaucuggcucgucaagaagggcaacuccuaccccaagcucuccaacuccuacaucaacgacaagggcaaggagguccucguccucuggggcauccaccaccccuccaccuccgccgaccagcagucccucuaccagaacgccgacgccuacgucuucgucggcaccucccgcuacuccaagaaguucaagcccgagaucgccauccgccccaagguccgcgaccaggagggccgcaugaacuacuacuggacccucgucgagcccggcgacaagaucaccuucgaggccaccggcaaccucgucgucccccgcuacgccuucgccauggagcgcaacgccggcuccggcaucaucaucuccgacacccccgcccacgacugcaacaccaccugccagacccccaagggcgccaucaacaccucccuccccuuccagaacauccaccccaucaccaucggcaagugccccaaguacgucaaguccaccaagcuccgccucgccaccggccuccgcaacguccccuccauccagucccgcggccucuucggcgccaucgccggcuucaucgagggcggcuggaccggcauggucgacggcugguacggcuaccaccaccagaacgagcagggcuccggcuacgccgccgaccucaaguccacccagaacgccaucgacgagaucaccaacaaggucaacuccgucaucgagaagaugaacacccaguucaccgccgucggcaaggaguucaaccaccucgagaagcgcaucgagaaccucaacaagaaggucgacgacggcuuccucgacaucuggaccuacaacgccgagcuccucguccuccucgagaacgagcgcacccucgacuaccacgacuccaacgucaagaaccucuacgagaagguccgcucccagcucaagaacaacgccaaggagaucggcaacggcugcuucgaguucuaccacaagugcgacaacaccugcauggaguccgucaagaacggcaccuacgacuaccccaaguacuccgaggaggccaagcucaaccgcgaggagaucgacggcgucaagcucgaguccacccgcaucuaccagauccucgccaucuacuccaccgucgccuccucccucguccucgucgucucccucggcgccaucuccuucuggaugugcuccaacggcucccuccagugccgcaucugcaucuga

SEQ ID NO: 102159 - RNA, 1701 nt, Artificial Sequence; identical to SEQ ID NO: 100577
  derived and/or modified CDS sequence (opt2) from hemagglutinin__InfluenzaA__ADO25112

SEQ ID NO: 102160 - RNA, 1701 nt, Artificial Sequence; identical to SEQ ID NO: 100577
  derived and/or modified CDS sequence (opt2) from hemagglutinin__InfluenzaA__ADO25122

SEQ ID NO: 102161 - RNA, 1701 nt, Artificial Sequence
  derived and/or modified CDS sequence (opt2) from hemagglutinin__InfluenzaA__ADO25132
augaacgccauccucgucguccuccucuacaccuucgccaccgccaacgccgacacccucugcaucggcuaccacgccaacaacuccaccgacaccgucgacacccuccucgagaagaacgucaccgucacccacuccgucaaccuccucgaggacaagcacaacggcaagcucugcaagcuccgcggcgucgccccccuccaccucggcaagugcaacaucgccggcuggauccucggcaaccccgagugcgagucccucuccaccgccuccuccugguccuacaucgucgagaccuccuccuccgacaacggcaccugcuaccccggcgacuucaucgacuacgaggagcuccgcgagcagcucuccuccgucuccuccuucgagcgcuucgagaucuuccccaagaccuccuccuggcccaaccacgacuccaacaagggcgucaccgccgccugcccccacgccggcgccaaguccuucuacaagaaccucaucuggcucgucaagaagggcaacuccuaccccaagcucuccaaguccuacaucaacgacaagggcaaggagguccucguccucuggggcauccaccaccccuccaccuccgccgaccagcagucccucuaccagaacgccgacgccuacgucuucgucggcaccucccgcuacuccaagaaguucaagcccgagaucgccauccgccccaagguccgcgaccaggagggccgcaugaacuacuacuggacccucgucgagcccggcgacaagaucaccuucgaggccaccggcaaccucgucgucccccgcuacgccuucgccauggagcgcaacgccggcuccgacaucaucaucuccgacacccccguccacgacugcaacaccaccugccagacccccaagggcgccaucaacaccucccuccccuuccagaacauccaccccaucaccaucggcaagugccccaaguacgucaaguccaccaagcuccgccucgccaccggccuccgcaacguccccuccauccagucccgcggccucuucggcgccaucgccggcuucaucgagggcggcuggaccggcauggucgacggcugguacggcuaccaccaccagaacgagcagggcuccggcuacgccgccgaccucaaguccacccagaacgccaucgacgagaucaccaacaagaucaacuccgucaucgagaagaugaacacccaguucaccgccgucggcaaggaguucaaccaccucgagaagcgcaucgagaaccucaacaagaaggucgacgacggcuuccucgacaucuggaccuacaacgccgagcuccucguccuccucgagaacgagcgcacccucgacuaccacgacuccaacgucaagaaccucuacgagaagguccgcucccagcucaagaacaacgccaaggagaucggcaacggcugcuucgaguucuaccacaagugcgacaacaccugcauggaguccgucaagaacggcaccuacgacuaccccaaguacuccgaggaggccaagcucaaccgcgaggagaucgacggcgucaagcucgaguccacccgcaucuaccagauccucgccaucuacuccaccgucgccuccucccucguccucgucgucucccucggcgccaucuccuucuggaugugcuccaacggcucccuccagugccgcaucugcaucuga

SEQ ID NO: 102162 - RNA, 1701 nt, Artificial Sequence; identical to SEQ ID NO: 100318
  derived and/or modified CDS sequence (opt2) from hemagglutinin__InfluenzaA__ADO25142

SEQ ID NO: 102163 - RNA, 1701 nt, Artificial Sequence
  derived and/or modified CDS sequence (opt2) from hemagglutinin__InfluenzaA__ADO25152
augaaggccauccucgucguccuccucuacaccuucgccgccgccaacgccgacacccucugcaucggcuaccacgccaacaacuccaccgacaccgucgacaccguccucgagaagaacgucaccgucacccacuccgucaaccuccucgaggacaagcacaacggcaagcucugcaagcuccgcggcgucgccccccuccaccucggcaagugcaacaucgccggcuggauccucggcaaccccgagugcgagucccucuccaccgccuccuccugguccuacaucgucgagaccuccuccuccgacaacggcaccugcuaccccggcgacuucaucaacuacgaggagcuccgcgagcagcucuccuccgucucccucuucgagcgcuucgagaucuuccccaagaccuccuccuggcccaaccacgacuccaacaagggcgucaccgccgccugcccccacgccggcgccaaguccuucuacaagaaccucaucuggcucgucaagaagggcaacuccuaccccaagcucuccaaguccuacaucaacgacaagggcaaggagguccucguccucuggggcauccaccaccccuccaccuccgccgaccagcagucccucuaccagaacgccgacgccuacgucuucgucggcaccucccgcuacuccaagaaguucaagcccgagaucgccauccgccccaagguccgcgaccaggagggccgcaugaacuacuacuggacccucgucgagcccggcgacaagaucaccuucgaggccaccggcaaccucgucgucccccgcuacgccuucgccauggagcgcaacgccggcuccggcaucaucaucuccgacacccccguccacgacugcaacaccaccugccagacccccaagggcgccaucaacaccucccuccccuuccagaacauccaccccaucaccaucggcaagugccccaaguacgucaaguccaccaagcuccgccucgccaccggccuccgcaacguccccuccauccagucccgcggccucuucggcgccaucgccggcuucaucgagggcggcuggaccggcauggucgacggcugguacggcuaccaccaccagaacgagcagggcuccggcuacgccgccgaccucaaguccacccagaacgccaucgacaagaucaccaacaaggucaacuccgucaucgagaagaugaacacccaguucaccgccgucggcaaggaguucaaccaccucgagaagcgcaucgagaaccucaacaagaaggucgacgacggcuuccucgacaucuggaccuacaacgccgagcuccucguccuccucgagaacgagcgcacccucgacuaccacgacuccaacgucaagaaccucuacgagaagguccgcucccagcucaagaacaacgccaaggagaucggcaacggcugcuucgaguucuaccacaagugcgacaacaccugcauggaguccgucaagaacggcaccuacgacuaccccaaguacuccgaggaggccaagcucaaccgcgaggagaucgacggcgucaagcucgaguccacccgcaucuaccagauccucgccaucuacuccaccgucgccuccucccucguccucgucgucucccucggcgccaucuccuucuggaugugcuccaacggcucccuccagugccgcaucugcaucuga

SEQ ID NO: 102164 - RNA, 1701 nt, Artificial Sequence; identical to SEQ ID NO: 100257
  derived and/or modified CDS sequence (opt2) from hemagglutinin__InfluenzaA__ADO25162

SEQ ID NO: 102165 - RNA, 1701 nt, Artificial Sequence; identical to SEQ ID NO: 100257
  derived and/or modified CDS sequence (opt2) from hemagglutinin__InfluenzaA__ADO25172

SEQ ID NO: 102166 - RNA, 1701 nt, Artificial Sequence; identical to SEQ ID NO: 100257
  derived and/or modified CDS sequence (opt2) from hemagglutinin__InfluenzaA__ADO25182

SEQ ID NO: 102167 - RNA, 1701 nt, Artificial Sequence; identical to SEQ ID NO: 98705
  derived and/or modified CDS sequence (opt2) from hemagglutinin__InfluenzaA__ADO25192

SEQ ID NO: 102168 - RNA, 1701 nt, Artificial Sequence; identical to SEQ ID NO: 98705
  derived and/or modified CDS sequence (opt2) from hemagglutinin__InfluenzaA__ADO25202

SEQ ID NO: 102169 - RNA, 1701 nt, Artificial Sequence
  derived and/or modified CDS sequence (opt2) from hemagglutinin__InfluenzaA__ADO25212
augaaggccauccucgucguccuccucuacaccuucgccaccgccaacgccgacacccucugcaucggcuaccacgccaacaacuccaccgacaccgucgacaccguccucgagaagaacgucaccgucacccacuccgucaaccuccucgaggacaagcacaacggcaagcucugcaagcuccgcggcgucgccccccuccaccucggcaagugcaacaucgccggcuggauccucggcaaccccgagugcgagucccucuccaccgccuccuccugguccuacaucgucgagaccuccuccuccgacaacggcaccugcuaccccggcgacuucaucgacuacgaggagcuccgcgagcagcucuccuccgucuccuccuucgagcgcuucgagaucuuccccaagaccuccuccuggcccaaccacgacuccaacaagggcgucaccgccgccugcccccacgccggcgccaaguccuucuacaagaaccucaucuggcucgucaagaagggcaacuccuaccccaagcucuccaaguccuacaucaacgacaagcgcaaggagguccucguccucuggggcauccaccaccccuccaccuccgccgaccagcagucccucuaccagaacgccgacuccuacgucuucgucggcaccucccgcuacuccaagaaguucaagcccgagaucgccauccgccccaagguccgcgaccaggagggccgcaugaacuacuacuggacccucgucgagcccggcgacaagaucaccuucgaggccaccggcaaccucgucgucccccgcuacgccuucgccauggagcgcaacgccggcuccggcaucaucaucuccgacacccccguccacgacugcaacaccaccugccagacccccgagggcgccaucaacaccucccuccccuuccagaacauccaccccaucaccaucggcaagugccccaaguacgucaaguccaccaagcuccgccucgccaccggccuccgcaacguccccuccauccagucccgcggccucuucggcgccaucgccggcuucaucgagggcggcuggaccggcauggucgacggcugguacggcuaccaccaccagaacgagcagggcuccggcuacgccgccgaccucaaguccacccagaacgccaucgacgagaucaccaacaaggucaacuccgucaucgagaagaugaacacccaguucaccgccgucggcaaggaguucaaccaccucgagaagcgcaucgagaaccucaacaagaaggucgacgacggcuuccucgacaucuggaccuacaacgccgagcuccucguccuccucgagaacgagcgcacccucgacuaccacgacuccaacgucaagaaccucuacgagaagguccgcucccagcucaagaacaacgccaaggagaucggcaacggcugcuucgaguucuaccacaagugcgacaacaccugcauggaguccgucaagaacggcaccuacgacuaccccaaguacuccgaggaggccaagcucaaccgcgaggagaucgacggcgucaagcucgaguccacccgcaucuaccagauccucgccaucuacuccaccgucgccuccucccucguccucgucgucucccucggcgccaucuccuucuggaugugcuccaacggcucccuccagugccgcaucugcaucuga

SEQ ID NO: 102170 - RNA, 1701 nt, Artificial Sequence
  derived and/or modified CDS sequence (opt2) from hemagglutinin__InfluenzaA__ADO25222
augaaggccauccucgucguccuccucuacaccuucgccaccgccaacgccgacacccucugcaucggcuaccacgccaacaacuccaccgacaccgucgacaccguccucgagaagaacgucaccgucacccacuccgucaaccuccucgaggacaagcacaacggcaagcucugcaagcuccgcggcgucgccccccuccaccucggcaagugcaacaucgccggcuggauccucggcaaccccgagugcgagucccucuccaccgccuccuccugguccuacaucgucgagaccuccuccuccgacaacggcaccugcuaccccggcgacuucaucgacuacgaggagcuccgcgagcagcucuccuccgucuccuccuucgagcgcuucgagaucuuccccaagaccuccuccuggcccaaccacgacuccaacaagggcgucaccgccgccugcccccacgccggcgccaaguccuucuacaagaaccucaucuggcucgucaagaagggcaacuccuaccccaagcucaacaaguccuacaucaacgacaagggcaaggagguccucguccucuggggcauccaccaccccuccaccuccgccgaccagcagucccucuaccagaacgccgacgccuacgucuucgucggcaccucccgcuacuccaagaaguucaagcccgagaucgccauccgccccaagguccgcgaccaggagggccgcaugaacuacuacuggacccucgucgagcccggcgacaagaucaccuucgaggccaccggcaaccucgucgucccccgcuacgccuucgccauggagcgcaacgccggcuccggcaucaucaucuccgacacccccguccacgacugcaacaccaccugccagacccccaagggcgccaucaacaccucccuccccuuccagaacauccaccccaucaccaucggcaagugccccaaguacgucaaguccaccaagcuccgccucgccaccggccuccgcaacguccccuccauccagucccgcggccucuucggcgccaucgccggcuucaucgagggcggcuggaccggcauggucgacggcugguacggcuaccaccaccagaacgagcagggcuccggcuacgccgccgaccucaaguccacccagaacgccaucgacaagaucaccaacaaggucaacuccgucaucgagaagaugaacacccaguucaccgccgucggcaaggaguucaaccaccucgagaagcgcaucgagaaccucaacaagaaggucgacgacggcuuccucgacaucuggaccuacaacgccgagcuccucguccuccucgagaacgagcgcacccucgacuaccacgacuccaacgucaagaaccucuacgagaagguccgcucccagcucaagaacaacgccaaggagaucggcaacggcugcuucgaguucuaccacaagugcgacaacaccugcauggaguccgucaagaacggcaccuacgacuaccccaaguacuccgaggaggccaagcucaaccgcgaggagaucgacggcgucaagcucgaguccacccgcaucuaccagauccucgccaucuacuccaccgucgccuccucccucguccucgucgucucccucggcgccaucuccuucuggaugugcuccaacggcucccuccagugccgcaucugcaucuga

SEQ ID NO: 102171 - RNA, 1701 nt, Artificial Sequence; identical to SEQ ID NO: 100318
  derived and/or modified CDS sequence (opt2) from hemagglutinin__InfluenzaA__ADO25232

SEQ ID NO: 102172 - RNA, 1701 nt, Artificial Sequence; identical to SEQ ID NO: 100257
  derived and/or modified CDS sequence (opt2) from hemagglutinin__InfluenzaA__ADO25242

SEQ ID NO: 102173 - RNA, 1701 nt, Artificial Sequence; identical to SEQ ID NO: 100335
  derived and/or modified CDS sequence (opt2) from hemagglutinin__InfluenzaA__ADO25252

SEQ ID NO: 102174 - RNA, 1701 nt, Artificial Sequence; identical to SEQ ID NO: 100577
  derived and/or modified CDS sequence (opt2) from hemagglutinin__InfluenzaA__ADO25262

SEQ ID NO: 102175 - RNA, 1701 nt, Artificial Sequence
  derived and/or modified CDS sequence (opt2) from hemagglutinin__InfluenzaA__ADO25272
augaaggccauccucgucguccuccucuacaccuucgccaccgccaacgccgacacccucugcaucggcuaccacgccaacaacuccaccgacaccgucgacaccguccucgagaagaacgucaccgucacccacuccgucaaccuccucgaggacaagcacaacggcaagcucugcaagcuccgcggcgucgccccccuccaccucggcaagugcaacaucgccggcuggauccucggcaaccccgagugcgagucccucuccaccgccuccuccugguccuacaucgucgagaccuccuccuccgacaacggcaccugcuaccccggcgacuucaucgacuacgaggagcuccgcgagcagcucuccuccgucuccuccuucgagcgcuucgagauguuccccaagaccuccuccuggcccaaccacgacuccaacaagggcgucaccgccgccugcccccacgccggcgucaaguccuucuacaagaaccucaucuggcucgucaagaagggcaacuccuaccccaagcucuccaaguccuacaucaacgacaagggcaaggagguccucguccucuggggcauccaccaccccuccaccuccgccgaccagcagucccucuaccagaacgccgacgccuacgucuucgucggcaccucccgcuacuccaagaaguucaagcccgagaucgccauccgccccaagguccgcgaccaggagggccgcaugaacuacuacuggacccucgucgagcccggcgacaagaucaccuucgaggccaccggcaaccucgucgucccccgcuacgccuucgccauggagcgcaacgccggcuccggcaucaucaucuccgacacccccguccacgacugcaacaccaccugccagacccccaagggcgccaucaacaccucccuccccuuccagaacauccaccccaucaccaucggcaagugccccaaguacgucaaguccaccaagcuccgccucgccaccggccuccgcaacguccccuccauccagucccgcggccucuucggcgccaucgccggcuucaucgagggcggcuggaccggcauggucgacggcugguacggcuaccaccaccagaacgagcagggcuccggcuacgccgccgaccucaaguccacccagaacgccaucgacgagaucaccaacaaggucaacuccgucaucgagaagaugaacacccaguucaccgccgucggcaaggaguucaaccaccucgagaagcgcaucgagaaccucaacaagaaggucgacgacggcuuccucgacaucuggaccuacaacgccgagcuccucguccuccucgagaacgagcgcacccucgacuaccacgacuccaacgucaagaaccucuacgagaagguccgcucccagcucaagaacaacgccaaggagaucggcaacggcugcuucgaguucuaccacaagugcgacaacaccugcauggaguccgucaagaacggcaccuacgacuaccccaaguacuccgaggaggccaagcucaaccgcgaggagaucgacggcgucaagcucgaguccacccgcaucuaccagauccucgccaucuacuccaccgucgccuccucccucguccucgucgucucccucggcgccaucuccuucuggaugugcuccaacggcucccuccagugccgcaucugcaucuga

SEQ ID NO: 102176 - RNA, 1701 nt, Artificial Sequence; identical to SEQ ID NO: 100318
  derived and/or modified CDS sequence (opt2) from hemagglutinin__InfluenzaA__ADO25282

SEQ ID NO: 102177 - RNA, 1698 nt, Artificial Sequence; identical to SEQ ID NO: 98524
  derived and/or modified CDS sequence (opt2) from hemagglutinin__InfluenzaA__ADO27622

SEQ ID NO: 102178 - RNA, 1701 nt, Artificial Sequence; identical to SEQ ID NO: 98705
  derived and/or modified CDS sequence (opt2) from hemagglutinin__InfluenzaA__ADO29887

SEQ ID NO: 102179 - RNA, 1701 nt, Artificial Sequence
  derived and/or modified CDS sequence (opt2) from hemagglutinin__InfluenzaA__ADO29888
augaaggccauccucgucguccuccucuacaccuucgccaccgccaacgccgacacccucugcaucggcuaccacgccaacaacuccaccgacaccgucgacaccguccucgagaagaacgucaccgucacccacuccgucaaccuccucgaggacaagcacaacggcaagcucugccgccuccgcggcgucgccccccuccaccucggcaagugcaacaucgccggcuggauccucggcaaccccgagugcgagucccucuccaccgccuccuccugguccuacaucgucgagaccuccuccuccgacaacggcaccugcuaccccggcgacuucaucgacuacgaggagcuccgcgagcagcucuccuccgucuccuccuucgagcgcuucgagaucuuccccaagaccuccuccuggcccaaccacgaccccaacaagggcgucaccgccgccugcccccacgccggcgccaaguccuucuacaagaaccucaucuggcucgucaagaagggcaacuccuaccccaagcucuccaaguccuacaucaacgacaagggcaaggagguccucguccucuggggcauccaccaccccuccaccuccgccgaccagcagucccucuaccagaacgccgacgccuacgucuucgucggcaccucccgcuacuccaagaaguucaagcccgagaucgccauccgccccaagguccgcgaccaggagggccgcaugaacuacuacuggacccucgucgagcccggcgacaagaucaccuucgaggccaccggcaaccucgucgucccccgcuacgccuucgccauggagcgcaacgccggcuccggcaucaucaucuccgacacccccguccacgacugcaacaccaccugccagacccccaagggcgccaucaacaccucccuccccuuccagaacauccaccccaucaccaucggcaagugccccaaguacgucaaguccaccaagcuccgccucgccaccggccuccgcaacguccccuccauccagucccgcggccucuucggcgccaucgccggcuucaucgagggcggcuggaccggcauggucgacggcugguacggcuaccaccaccagaacgagcagggcuccggcuacgccgccgaccucaaguccacccagaacgccaucgacgagaucaccaacaaggucaacuccgucaucgagaagaugaacacccaguucaccgccgucggcaaggaguucaaccaccucgagaagcgcaucgagaaccucaacaagaaggucgacgacggcuuccucgacaucuggaccuacaacgccgagcuccucguccuccucgagaacgagcgcacccucgacuaccacgacuccaacgucaagaaccucuacgagaagguccgcucccagcucaagaacaacgccaaggagaucggcaacggcugcuucgaguucuaccacaagugcgacaacaccugcauggaguccgucaagaacggcaccuacgacuaccccaaguacuccgaggaggccaagcucaaccgcgaggagaucgacggcgucaagcucgaguccacccgcaucuaccagauccucgccaucuacuccaccgucgccuccucccucguccucgucgucucccucggcgccaucuccuucuggaugugcuccaacggcucccuccagugccgcaucugcaucuga

SEQ ID NO: 102180 - RNA, 1701 nt, Artificial Sequence
  derived and/or modified CDS sequence (opt2) from hemagglutinin__InfluenzaA__ADO29889
augaaggccauccucgucguccuccucuacaccuucgccaccgccaacgccgacauccucugcaucggcuaccacgccaacaacuccaccgacaccgucgacaccguccucgagaagaacgucaccgucacccacuccgucaaccuccucgaggacaagcacaacggcaagcucugcaagcuccgcggcgucgccccccuccaccucggcaagugcaacaucgccggcuggauccucggcaaccccgagugcgaguccuucuccaccuccuccuccugguccuacaucgucgagaccuccuccuccgacaacggcaccugcuaccccggcgacuucaucgacuacgaggagcuccgcgagcagcucuccuccgucuccuccuucgagcgcuucgagaucuuccccaagaccuccuccuggcccaaccacgacuccaacaagggcgucaccgccgccugcccccacgccggcgccaaguccuucuacaagaaccucaucuggcucgucaagaagggcaacuccuaccccaagcucuccaaguccuacaucaacgacaagggcaaggagguccucguccucuggggcauccaccaccccuccaccuccgccgaccagcagucccucuaccagaacgccgacgccuacgucuucgucggcaccucccgcuacuccaagaaguucaagcccgagaucgccauccgccccaagguccgcgaccaggagggccgcaugaacuacuacuggacccucgucgagcccggcgacaagaucaccuucgaggccaccggcaaccucgucgucccccgcuacgccuucgccauggagcgcaacgccggcuccggcaucaucaucuccgacacccccguccacgacugcaacaccaccugccagacccccaagggcgccaucaacaccucccuccccuuccagaacauccaccccaucaccaucggcaagugccccaaguacgucaaguccaccaagcuccgccucgccaccggccuccgcaacguccccuccauccagucccgcggccucuucggcgccaucgccggcuucaucgagggcggcuggaccggcauggucgacggcugguacggcuaccaccaccagaacgagcagggcuccggcuacgccgccgaccucaaguccacccagaacgccaucgacgagaucaccaacaaggucaacuccgucaucgagaagaugaacacccaguucaccgccgucggcaaggaguucaaccaccucgagaagcgcaucgagaaccucaacaagaaggucgacgacggcuuccucgacaucuggaccuacaacgccgagcuccucguccuccucgagaacgagcgcacccucgacuaccacgacuccaacgucaagaaccucuacgagaagguccgcucccagcucaagaacaacgccaaggagaucggcaacggcugcuucgaguucuaccacaagugcgacaacaccugcauggaguccgucaagaacggcaccuacgacuaccccaaguacuccgaggaggccaagcucaaccgcgaggagaucgacggcgucaagcucgaguccacccgcaucuaccagauccucgccaucuacuccaccgucgccuccucccucguccucgucgucucccucggcgccaucuccuucuggaugugcuccaacggcucccuccagugccgcaucugcaucuga

SEQ ID NO: 102181 - RNA, 1701 nt, Artificial Sequence
  derived and/or modified CDS sequence (opt2) from hemagglutinin__InfluenzaA__ADO29890
augaaggccauccucgucguccuccucuacaccuucgccaccgccaaggccgacacccucugcaucggcuaccacgccaacaacuccgccgacaccgucgacaccguccucgagaagaacgucaccgucacccacuccgucaaccuccucgaggacaagcacaacggcaagcucugcaagcuccgcggcgucgccccccuccaccucggcaagugcaacaucgccggcuggauccucggcaaccccgagugcgagucccucuccaccgccuccuccugguccuacaucgucgagaccuccuccuccgacaacggcaccugcuaccccggcgacuucaucgacuacgaggagcuccgcgagcagcucuccuccgucuccuccuucgagcgcuucgagaucuuccccaagaccuccuccuggcccaaccacgaccccaacaagggcgucaccgccgccugcccccacgccggcgccaaguccuucuacaagaaccucaucuggcucgucaagaagggcaacuccuaccccaagcucuccaaguccuacaucaacgacaagggcaaggagguccucguccucuggggcauccaccaccccuccaccuccgucgaccagcagucccucuaccagaacgccgacgccuacgucuucgucggcaccucccgcuacuccaagaaguucaagcccgagaucgccauccgccccaagguccgcgaccaggagggccgcaugaacuacuacuggacccucgucgagcccggcgacaagaucaccuucgaggccaccggcaaccucgucgucccccgcuacgccuucgccauggagcgcaacgccggcuccggcaucaucaucuccgacacccccguccacgacugcaacaccaccugccagacccccaagggcgccaucaacaccucccuccccuuccagaacauccaccccaucaccaucggcaagugccccaaguacgucaaguccaccaagcuccgccucgccaccggccuccgcaacguccccuccauccagucccgcggccucuucggcgccaucgccggcuucaucgagggcggcuggaccggcauggucgacggcugguacggcuaccaccaccagaacgagcagggcuccggcuacgccgccgaccucaaguccacccagaacgccaucgacgagaucaccaacaaggucaacuccgucaucgagaagaugaacacccaguucaccgccgucggcaaggaguucaaccaccucgagaagcgcaucgagaaccucaacaagaaggucgacgacggcuuccucgacaucuggaccuacaacgccgagcuccucguccuccucgagaacgagcgcacccucgacuaccacgacuccaacgucaagaaccucuacgagaagguccgcucccagcucaagaacaacgccaaggagaucggcaacggcugcuucgaguucuaccacaagugcgacaacaccugcauggaguccgucaagaacggcaccuacgacuaccccaaguacuccgaggaggccaagcucaaccgcgaggagaucgacggcgucaagcucgaguccacccgcaucuaccagauccucgccaucuacuccaccgucgccuccucccucguccucgucgucucccucggcgccaucuccuucuggaugugcuccaacggcucccuccagugccgcaucugcaucuga

SEQ ID NO: 102182 - RNA, 1701 nt, Artificial Sequence
  derived and/or modified CDS sequence (opt2) from hemagglutinin__InfluenzaA__ADO29891
augaaggccauccucgucguccuccucuacaccuucgccaccgccaacgccgacacccucugcaucggcuaccacgccaacaacuccaccgacaccgucgacaccguccucgagaagaacgucaccgucacccacuccgucaaccuccucgaggacaagcacaacggcaagcucugcaagcuccgcggcgucgccccccuccaccucggcaagugcaacaucgccggcuggauccucggcaaccccgagugcgagucccucuccaccgccuccuccugguccuacaucgucgagaccuccuccuccgacaacggcaccugcuaccccggcgacuucaucgacuacgaggagcuccgcgagcagcucuccuccgucuccuccuucgagcgcuucgagaucuuccccaagaccuccuccuggcccaaccacgacuccaacaagggcgucaccgccgccugcccccacgccggcgccaaguccuucuacaagaaccucaucuggcucgucaagaagggcaacuccuaccccaagcucuccaaguccuacaucaacgacaagggcaaggagguccucguccucuggggcauccaccaccccuccaccuccgccgaccagcagucccucuaccagaacgccgacgccuacgucuucgucggcaccucccgcuacuccaagaaguucaagcccgagaucgccauccgccccaagguccgcgaccaggagggccgcaugaacuacuacuggacccucgucgagcccggcgacaagaccaccuucgaggccaccggcaaccucgucgucccccgcuacgccuucgccauggagcgcaacgccggcuccggcaucaucaucuccgacacccccguccacgacugcaacaccaccugccagacccccaagggcgccaucaacaccucccuccccuuccagaacauccaccccaucaccaucggcaagugccccaaguacgucaaguccaccaagcuccgccucgccaccggccuccgcaacguccccuccauccagucccgcggccucuucggcgccaucgccggcuucaucgagggcggcuggaccggcauggucgacggcugguacggcuaccaccaccagaacgagcagggcuccggcuacgccgccgaccucaaguccacccagaacgccaucgacaagaucaccaacaaggucaacuccgucaucgagaagaugaacacccaguucaccgccgucggcaaggaguucaaccaccucgagaagcgcaucgagaaccucaacaagaaggucgacgacggcuuccucgacaucuggaccuacaacgccgagcuccucguccucuccgagaacgagcgcacccucgacuaccacgacuccaacgucaagaaccucuacgagaagguccgcucccagcucaagaacaacgccaaggagaucggcaacggcugcuucgaguucuaccacaagugcgacaacaccugcauggaguccgucaagaacggcaccuacgacuaccccaaguacuccgaggaggccaagcucaaccgcgaggagaucgacggcgucaagcucgaguccacccgcaucuaccagauccucgccaucuacuccaccgucgccuccucccucguccucgucgucucccucggcgccaucuccuucuggaugugcuccaacggcucccuccagugccgcaucugcaucuga

SEQ ID NO: 102183 - RNA, 1701 nt, Artificial Sequence
  derived and/or modified CDS sequence (opt2) from hemagglutinin__InfluenzaA__ADO29892
augaaggccauccucgucguccuccucuacaccuucgccaccgccaaggccgacacccucugcaucggcuaccacgccaacaacuccaccgacaccgucgacaccguccucgagaagaacgucaccgucacccacuccgucaaccuccucgaggacaagcacaacggcaagcucugcaagcuccgcggcgucgccccccuccaccucggcaagugcaacaucgccggccgcauccucggcaaccccgagugcgagucccucuccaccgccuccuccugguccuacaucgucgagaccuccuccuccgacaacggcaccugcuaccccggcgacuucaucgacuacgaggagcuccgcgagcagcucuccuccgucuccuccuucgagcgcuucgagaucuuccccaagaccuccuccuggcccaaccacgaccccaacaagggcgucaccgccgccugcccccacgccggcgccaaguccuucuacaagaaccucaucuggcucgucaagaagggcaacuccuaccccaagcucuccaaguccuacaucaacgacaagggcaaggagguccucguccucuggggcauccaccaccccuccaccuccgucgaccagcagucccucuaccagaacgccgacgccuacgucuucgucggcaccucccgcuacuccaagaaguucaagcccgagaucgccauccgccccaagguccgcgaccaggagggccgcaugaacuacuacuggacccucgucgagcccggcgacaagaucaccuucgaggccaccggcaaccucgucgucccccgcuacgccuucgccauggagcgcaacgccggcuccggcaucaucaucuccgacacccccguccacgacugcaacaccaccugccagacccccaagggcgccaucaacaccucccuccccuuccagaacauccaccccaucaccaucggcaagugccccaaguacgucaaguccaccaagcuccgccucgccaccggccuccgcaacguccccuccauccagucccgcggccucuucggcgccaucgccggcuucaucgagggcggcuggaccggcauggucgacggcugguacggcuaccaccaccagaacgagcagggcuccggcuacgccgccgaccucaaguccacccagaacgccaucgacgagaucaccaacaaggucaacuccgucaucgagaagaugaacacccaguucaccgccgucggcaaggaguucaaccaccucgagaagcgcaucgagaaccucaacaagaaggucgacgacggcuuccucgacaucuggaccuacaacgccgagcuccucguccuccucgagaacgagcgcacccucgacuaccacgacuccaacgucaagaaccucuacgagaagguccgcucccagcucaagaacaacgccaaggagaucggcaacggcugcuucgaguucuaccacaagugcgacaacaccugcauggaguccgucaagaacggcaccuacgacuaccccaaguacuccgaggaggccaagcucaaccgcgaggagaucgacggcgucaagcucgaguccacccgcaucuaccagauccucgccaucuacuccaccgucgccuccucccucguccucgucgucucccucggcgccaucuccuucuggaugugcuccaacggcucccuccagugccgcaucugcaucuga

SEQ ID NO: 102184 - RNA, 1701 nt, Artificial Sequence; identical to SEQ ID NO: 99503
  derived and/or modified CDS sequence (opt2) from hemagglutinin__InfluenzaA__ADO29893

SEQ ID NO: 102185 - RNA, 1701 nt, Artificial Sequence
  derived and/or modified CDS sequence (opt2) from hemagglutinin__InfluenzaA__ADO29894
augaaggccauccucgucguccuccucuacaccuucgccaccgccaacgccgacacccucugcaucggcuaccacgccaacaacuccaccgacaccgucgacaccguccucgagaugaacgucaccgucacccacuccgucaaccuccucgaggacaagcacaacggcaagcucugcaagcuccgcggcgucgccccccuccaccucggcaagugcaacaucgccggcuggauccucggcaaccccgagugcgaguccuucuccaccuccuccuccugguccuacaucgucgagaccuccuccuccgacaacggcaccugcuaccccggcgacuucaucgacuacgaggagcuccgcgagcagcucuccuccgucuccuccuucgagcgcuucgagaucuuccccaagaccuccuccuggcccaaccacgacuccaacaagggcgucaccgccgccugcccccacgccggcgccaaguccuucuacaagaaccucaucuggcucgucaagaagggcuccuccuaccccaagcucuccaaguccuacaucaacgacaagggcaaggagguccucguccucuggggcauccaccaccccuccaccuccgccgaccagcagucccucuaccagaacgccgacgccuacgucuucgucggcaccucccgcuacuccaagaaguucaagcccgagaucgccauccgccccaagguccgcgaccaggagggccgcaugaacuacuacuggacccucgucgagcccggcgacaagaucaccuucgaggccaccggcaaccucgucgucccccgcuacgccuucgccauggagcgcaacgccggcuccggcaucaucaucuccgacacccccguccacgacugcaacaccaccugccagacccccaagggcgccaucaacaccucccuccccuuccagaacauccaccccaucaccaucggcaagugccccaaguacgucaaguccaccaagcuccgccucgccaccggccuccgcaacguccccuccauccagucccgcggccucuucggcgccaucgccggcuucaucgagggcggcuggaccggcauggucgacggcugguacggcuaccaccaccagaacgagcagggcuccggcuacgccgccgaccucaaguccacccagaacgccaucgacgagaucaccaacaaggucaacuccgucaucgagaagaugaacacccaguucaccgccgucggcaaggaguucaaccaccucgagaagcgcaucgagaaccucaacaagaaggucgacgacggcuuccucgacaucuggaccuacaacgccgagcuccucguccuccucgagaacgagcgcacccucgacuaccacgacuccaacgucaagaaccucuacgagaagguccgcucccagcucaagaacaacgccaaggagaucggcaacggcugcuucgaguucuaccacaagugcgacaacaccugcauggaguccgucaagaacggcaccuacgacuaccccaaguacuccgaggaggccaagcucaaccgcgaggagaucgacggcgucaagcucgaguccacccgcaucuaccagauccucgccaucuacuccaccgucgccuccucccucguccucgucgucucccucggcgccaucuccuucuggaugugcuccaacggcucccuccagugccgcaucugcaucuga

SEQ ID NO: 102186 - RNA, 1701 nt, Artificial Sequence
  derived and/or modified CDS sequence (opt2) from hemagglutinin__InfluenzaA__ADO29895
augaaggccauccucgucgcccuccucuacaccuucgccaccgccaacgccgacacccucugcaucggcuaccacgccaacaacuccaccgacaccgucgacaccguccucgagaagaacgucaccgucacccacuccgucaaccuccucgaggacaagcacaacggcaagcucugcaagcuccgcggcgucgccccccuccaccucggcaagugcaacaucgccggcuggauccucggcaaccccgagugcgaguccuucuccaccuccuccuccugguccuacaucgucgagaccuccuccuccgacaacggcaccugcuaccccggcgacuucaucgacuacgaggagcuccgcgagcagcucuccuccgucuccuccuucgagcgcuucgagaucuuccccaagaccuccuccuggcccaaccacgacuccaacaagggcgucaccgccgccugcccccacgccggcgccaaguccuucuacaagaaccucaucuggcucgucaagaagggcuccuccuaccccaagcucuccaaguccuacaucaacgacaagggcaaggagguccucguccucuggggcauccaccaccccuccaccuccgccgaccagcagucccucuaccagaacgccgacgccuacgucuucgucggcaccucccgcuacuccaagaaguucaagcccgagaucgccauccgccccaagguccgcgaccaggagggccgcaugaacuacuacuggacccucgucgagcccggcgacaagaucaccuucgaggccaccggcaaccucgucgucccccgcuacgccuucgccauggagcgcaacgccggcuccggcaucaucaucuccgacacccccguccacgacugcaacaccaccugccagacccccaagggcgccaucaacaccucccuccccuuccagaacauccaccccaucaccaucggcaagugccccaaguacgucaagggcaccaagcuccgccucgccaccggccuccgcaacguccccuccauccagucccgcggccucuucggcgccaucgccggcuucaucgagggcggcuggaccggcauggucgacggcugguacggcuaccaccaccagaacgagcagggcuccggcuacgccgccgaccucaaguccacccagaacgccaucgacgagaucaccaacaaggucaacuccgucaucgagaagaugaacacccaguucaccgccgucggcaaggaguucaaccaccucgagaagcgcaucgagaaccucaacaagaaggucgacgacggcuuccucgacaucuggaccuacaacgccgagcuccucguccuccucgagaacgagcgcacccucgacuaccacgacuccaacgucaagaaccucuacgagaagguccgcucccagcucaagaacaacgccaaggagaucggcaacggcugcuucgaguucuaccacaagugcgacaacaccugcauggagcgcgucaagaacggcaccuacgacuaccccaaguacuccgaggaggccaagcucaaccgcgaggagaucgacggcgucaagcucgaguccacccgcaucuaccagauccucgccaucuacuccaccgucgccuccucccucguccucgucgucucccucggcgccaucuccuucuggaugugcuccaacggcucccuccagugccgcaucugcaucuga

SEQ ID NO: 102187 - RNA, 1701 nt, Artificial Sequence
  derived and/or modified CDS sequence (opt2) from hemagglutinin__InfluenzaA__ADO29897
augaaggccauccucgucguccuccucuacaccuucgccaccgccaacgccgacauccucugcaucggcuaccacgccaacaacuccaccgacaccgucgacaccguccucgagaagaacgucaccgucacccacuccgucaaccuccucgaggacaagcacaacggcaagcucugcaagcuccgcggcgucgccccccuccaccucggcaagugcaacaucgccggcuggauccucggcaaccccgagugcgaguccuucuccaccuccuccuccugguccuacaucgucgagaccuccuccuccgacaacggcaagugcuaccccggcgacuucaucgacuacgaggagcuccgcgagcagcucuccuccgucuccuccuucgagcgcuucgagaucuuccccaagaccuccuccuggcccaaccacgacuccaacaagggcgucaccaccgccugcccccacgccggcgccaaguccuucuacaagaaccucaucuggcucgucaagaagggcaacuccuacccccgccucuccaaguccuacaucaacgacaagggcaaggagguccucguccucuggggcauccaccaccccuccaccuccgccgaccagcagucccucuaccagaacgccgacgccuacgucuucgucggcaccucccgcuacuccaagaaguucaagcccgagaucgccauccgccccaagguccgcgaccaggagggccgcaugaacuacuacuggacccucgucgagcccggcgacaagaucaccuucgaggccaccggcaaccucgucgucccccgcuacgccuucgccauggagcgcaacgccggcuccggcaucaucaucuccgacacccccguccacggcugcaacaccaccugccagacccccaagggcgccaucaacaccucccuccccuuccagaacauccaccccaucaccaucggcaagugccccaaguacgucaaguccaccaagcuccgccucgccaccggccuccgcaacguccccuccauccagucccgcggccucuucggcgccgucgccggcuucaucgagggcggcuggaccggcauggucgacggcugguacggcuaccaccaccagaacgagcagggcuccggcuacgccgccgaccucaaguccacccagaacgccaucgacgagaucaccaacaaggucaacuccgucaucgagaagaugaacacccaguucaccgccgucggcaaggaguucaaccaccucgagaagcgcaucgagaaccucaacaagaaggucgacgacggcuuccucgacaucuggaccuacaacgccgagcuccucguccuccucgagaacgagcgcacccucgacuaccacgacuccaacgucaagaaccucuacgagaagguccgcucccagcucaagaacaacgccaaggagaucggcaacggcugcuucgaguucuaccacaagugcgacaacaccugcauggaguccgucaagaacggcaccuacgacuaccccaaguacuccgaggaggccaagcucaaccgcgaggagaucgacggcgucaagcucgaguccacccgcaucuaccagauccucgccaucuacuccaccgucgccuccucccucguccucgucgucucccucggcgccaucuccuucuggaugugcuccaacggcucccuccagugccgcaucugcaucuga

SEQ ID NO: 102188 - RNA, 1701 nt, Artificial Sequence; identical to SEQ ID NO: 99503
  derived and/or modified CDS sequence (opt2) from hemagglutinin__InfluenzaA__ADO29898

SEQ ID NO: 102189 - RNA, 1701 nt, Artificial Sequence
  derived and/or modified CDS sequence (opt2) from hemagglutinin__InfluenzaA__ADO29899
augaaggccauccucgucguccuccucuacaccuucgccaccgccaacgccgacacccucugcaucggcuaccacgccaacaacuccaccgacaccgucgacaccguccucgagaagaacgucaccgucacccacuccgucaaccuccucgaggacaagcacaacggcaagcucugcaagcuccgcggcgucgccccccuccaccucggcaagugcaacaucgccggcuggauccucggcaaccccgagugcgagucccucuccaccgccuccuccugguccuacaucgucgagaccuccuccuccgacaacggcaccugcuaccccggcgacuucaucgacuacgaggagcuccgcgagcagcucuccuccgucuccuccuucgagcgcuucgagaucuuccccaagaccuccuccuggcccaaccacgacuccaacaagggcgucaccgccgccugcccccacgccggcgccaaguccuucuacaagaaccucaucuggcucgucaagaagggcaacuccuaccccaagcucuccaaguccuacaucaacgacaagggcaaggagguccucguccucuggggcauccaccaccccuccaccuccgccgaccagcagucccucuaccagaacgccgacgccuacgucuucgucggcaccucccgcuacuccaagaaguucaagcccgagaucgccauccgccccaagguccgcgaccaggagggccgcaugaacuacuacuggacccucgucgagcccggcgacaagaucaccuucgaggccaccggcaaccucgucgucccccgcuacgccuucgccauggagcgcaacgccggcuccggcaucaucaucuccgacacccccguccacgacugcaacaccaccugccagacccccaagggcgccaucaacaccucccuccccuuccagaacauccaccccaucaccaucggcaagugccccaaguacgucaaguccaccaagcuccgccucgccaccggccuccgcaacguccccuccauccagucccgcggccucuucggcgccaucgccggcuucaucgagggcggcuggaccggcauggucgacggcugguacggcuaccaccaccagaacgagcagggcuccggcuacgccgccgaccucaaguccacccagaacgccaucgacaagaucaccaacaaggucaacuccgucaucgagaagaugaacacccaguucaccgccgucggcaaggaguucaaccaccucgagaagcgcaucgagaaccucaacaagaaggucgacgacggcuuccucgacaucuggaccuacaacgccgagcuccucguccuccucgagaacgagcgcacccucgacuaccacgacuccaacgucaagaaccucuacgagaagguccgcucccagcucaagaacaacgccaaggagaucggcaacggcugcuucgaguucuaccacaagugcgacaacaccugcauggaguccgucaagaacggcaccuacgacuaccccaaguacuccgaggaggccaagcucaaccgcgaggagaucgacggcgucaagcucgaguccacccgcaucuaccagauccucgccaucuacuccaccgucgccuccucccucguccucgucgucucccucggcgccaucuccuucuggaugugcuccaacggcucccuccagugccgcaccugcaucuga

SEQ ID NO: 102190 - RNA, 1701 nt, Artificial Sequence
  derived and/or modified CDS sequence (opt2) from hemagglutinin__InfluenzaA__ADO29900
augaaggccauccucgucguccuccucuacaccuucgccaccgccaacgccgacacccucugcaucggcuaccacgccaacaacuccaccgacaccgucgacaccguccucgagaagaacgucaccgucacccacuccgucaaccuccucgaggacaagcacaacggcaagcucugcaagcuccgcggcgucgccccccuccaccucggcaagugcaacaucgccggcuggauccucggcaaccccgagugcgagucccucuccaccgccuccuccugguccuacaucgucgagaccuccuccuccgacaacggcaccugcuaccccggcgaccucaucgacuacgaggagcuccgcgagcagcucuccuccgucuccuccuucgagcgcuucgagaucuuccccaagaccuccuccuggcccaaccacgaccucaacaagggcgucaccgccgccugcccccacgccggcgccaaguccuucuacaagaaccucaucuggcucgucaagaagggcaacuccuaccccaagcucuccaaguccuacaucaacgacaagggcaaggagguccucguccucuggggcauccaccaccccuccaccuccgccgaccagcagucccucuaccagaacgccgacgccuacgucuucgucggcaccucccgcuacuccaagaaguccaagcccgagaucgccauccgccccaagguccgcgaccaggagggccgcaugaacuacuacuggacccucgucgagcccggcgacaagaucaccuucgaggccaccggcaaccucgucgucccccgcuacgccuucgccauggagcgcaacgccggcuccggcaucaucaucuccgacacccccguccacgacugcaacaccaccugccagacccccaagggcgccaucaacaccucccuccccuuccagaacauccaccccaucaccaucggcaagugccccaaguacguccgcuccaccaagcuccgccucgccaccggccuccgcaacguccccuccauccagucccgcggccucuucggcgccaucgccggcuucaucgagggcggcuggaccggcauggucgacggcugguacggcuaccaccaccagaacgagcagggcuccggcuacgccgccgaccucaaguccacccagaacgccaucgacgagaucaccaacaaggucaacuccgucaucgagaagaugaacacccaguucaccgccgucggcaaggaguucaaccaccucgagaagcgcaucgagaaccucaacaagaaggucgacgacggcuuccucgacaucugggccuacaacgccgagcuccucguccuccucgagaacgagcgcacccucgacuaccacgacuccaacgucaagaaccucuacgagaagguccgcucccagcucaagaacaacgccaaggagaucggcaacggcugcuucgaguucuaccacaagugcgacaacaccugcauggaguccgucaagaacggcaccuacgacuaccccaaguacuccgaggaggccaagcucaaccgcgaggagaucgacggcgucaagcucgaguccacccgcaucuaccagauccucgccaucuacuccaccgucgccuccucccucguccucgucgucucccucggcgccaucuccuucuggaugugcuccaacggcucccuccagugccgcaucugcaucuga

SEQ ID NO: 102191 - RNA, 1701 nt, Artificial Sequence
  derived and/or modified CDS sequence (opt2) from hemagglutinin__InfluenzaA__ADO29901
augaaggccauccucgucguccuccucuacaccuucgccaccgccaacgccgacacccucugcaucggcuaccacgccaacaacuccaccgacaccgucgacaccguccucgagaagaacgucaccgucacccacuccgucaaccuccucgaggacaagcacaacgagaagcucugcaagcuccgcggcgucgccccccuccaccucggcaagugcaacaucgccggcuggauccucggcaaccccgagugcgagucccucuccaccgccuccuccugguccuacaucgucgagaccuccuccuccgacaacggcaccugcuaccccggcgacuucaucgacuacgaggagcuccgcgagcagcucuccuccgucuccuccuucgagcgcuucgagaucuuccccaagaccuccuccuggcccaaccacgacuccaacaagggcgucaccgccgccugcccccacgccggcgccaaguccuucuacaagaaccucaucuggcucgccaagaagggcaacuccuaccccaaggucuccaaguccuacaucaacgacaagggcaaggagguccucguccucuggggcauccaccaccccuccaccuccgccgaccagcagucccucuaccagaacgccgacgccuacgucuucgucggcaccucccgcuacuccaagaaguucaagcccgagaucgccauccgccccaagguccgcgaccaggagggccgcaugaacuacuacuggacccucgucgagcccggcgacaagaucaccuucgaggccaccggcaaccucgucgucccccgcuacgccuucgccauggagcgcaacgccggcuccggcaucaucaucuccgacacccccguccacgacugcaacaccaccugccagacccccaagggcgccaucaacaccucccuccccuuccagaacauccaccccaucaccaucggcaagugccccaaguacgucaaguccaccaagcuccgccucgccaccggccuccgcaacguccccuccauccagucccgcggccucuucggcgccaucgccggcuucaucgagggcggcuggaccggcauggucgacggcugguacggcuaccaccaccagaacgagcagggcuccggcuacgccgccgaccucaaguccacccagaacgccaucgacgagaucaccaacaaggucaacuccgucaucgagaagaugaacacccaguucaccgccgucggcaaggaguucaaccaccucgagaagcgcaucgagaaccucaacaagaaggucgacgacggcuuccucgacaucuggaccuacaacgccgagcuccucguccuccucgagaacgagcgcacccucgacuaccacgacuccaacgucaagaaccucuacgagaagguccgcucccagcucaagaacaacgccaaggagaucggcaacggcugcuucgaguucuaccacaagugcgacaacaccugcauggaguccgucaagaacggcaccuacgacuaccccaaguacuccgaggaggccaagcucaaccgcgaggagaucgacggcgucaagcucgaguccacccgcaucuaccagauccucgccaucuacuccaccgucgccuccucccucguccucgucgucucccucggcgccaucuccuucuggaugugcuucaacggcucccuccagugccgcaucugcaucuga

SEQ ID NO: 102192 - RNA, 1701 nt, Artificial Sequence
  derived and/or modified CDS sequence (opt2) from hemagglutinin__InfluenzaA__ADO29902
augaaggccauccucgucguccuccucuacaccuucgccaccgccaacgccgacacccucugcaucggcuaccacgccaacaacuccaccgacaccgucgacaccguccucgagaagaacgucaccgucacccacuccgucaaccuccucgaggacaagcacaacggcaagcucugcaagcuccgcggcgucgccccccuccaccucggcaagugcaacaucgccggcuggauccucggcaaccccgagugcgagucccucuccaccgccuccuccugguccuacaucgucgagaccuccuccuccgacaacggcaccugcuaccccggcgacuucaucgacuacgaggagcuccgcgagcagcucuccuccgucuccuccuucgagcgcuucgagaucuuccccaagaccuccuccuggcccaaccacgacuccaacaagggcgucaccgccgccugcccccacgccggcgccaaguccuucuacaagaaccucaucuggcucgucaagaagggcaacuccuaccccaagcucuccaaguccuacaucaacgacaagggcaaggagguccucguccucuggggcauccaccaccccuccaccuccgccgaccagcagucccucuaccagaacgccgacgccuacgucuucgucggcaccucccgcuacuccaagaaguucaagcccgagaucgccauccgccccaagguccgcgaccaggagggccgcaugaacuacuacuggacccucgucgagcccggcgacaagaucaccuucgaggccaccggcaaccucgucgucccccgcuacgccuucgccauggagcgcaacgccggcuccggcaucaucaucuccgacacccccguccacgacugcaacaccaccugccagacccccaagggcgccaucaacaccucccuccccuuccagaacauccaccccaucaccaucggcaagugccccaaguacgucaaguccaccaagcuccgccucgccaccggccuccgcaacguccccuccauccagucccgcggccucuucggcgccaucgccggcuucaucgagggcggcuggaccggcauggucgacggcugguacggcuaccaccaccagaacgagcagggcuccggcuacgccgccgaccucaaguccacccagaacgccaucgacaagaucaccaacaaggucaacuccgucaucgagaagaugaacacccaguucaccgccgucggcaaggaguucaaccaccucgagaagcgcaucgagaaccucaacaagaaggucgacgacggcuuccucgacaucuggaccuacaacgccgagcuccucguccuccucgagaacgagcgcacccucgacuaccacgacuccaacgucaagaaccucuacgagaagguccgcucccagcucaagaacaacgccaaggagaucggcaacggcugcuucgaguucuaccacaagugcgacaacaccugcauggagggcgucaagaacggcaccuacgacuaccccaaguacuccgaggaggccaagcucaaccgcgaggagaucgacggcgucaagcucgaguccacccgcaucuaccagauccucgccaucuacuccaccgucgccuccucccucguccucgucgucucccucggcgccaucuccuucuggaugugcuccaacggcucccuccagugccgcaucugcaucuga

SEQ ID NO: 102193 - RNA, 1701 nt, Artificial Sequence
  derived and/or modified CDS sequence (opt2) from hemagglutinin__InfluenzaA__ADO29903
augaaggccauccucgucguccuccucuacaccuucgccaccgccaacgccgacacccucugcaucggcuaccacgccaacaacuccaccgacaccgucgacaccguccucgagaagaacgucaccgucacccacuccgucaaccuccucgaggacaagcacaacggcaagcucugcaagcuccgcggcgucgccccccuccaccucggcaagugcaacaccgccggcuggauccucggcaaccccgagugcgagucccucuccaccgccuccuccugguccuacaucgucgagaccuccuccuccgacaacggcaccugcuaccccggcgacuucaucgacuacgaggagcuccgcgagcagcucuccuccgucuccuccuucgagcgcuucgagaucuuccccaagaccuccuccuggcccaaccacgaccccaacaagggcgucaccgccgccugcccccacgccggcgccaaguccuucuacaagaaccucaucuggcucgucaagaagggcaacuccuaccccaagcucuccaaguccuacaucaacgacaagggcaaggagguccucguccucuggggcauccaccaccccuccaccuccgccgaccagcagucccucuaccagaacgccgacgccuacgucuucgucggcaccucccgcuacuccaagaaguucaagcccgagaucgccauccgccccaagguccgcgaccaggagggccgcaugaacuacuacuggacccucgucgagcccggcgacaagaucaccuucgaggccaccggcaaccucgucgucccccgcuacgccuucgccauggagcgcaacgccggcuccggcaucaucaucuccgacacccccguccacgacugcaacaccaccugccagacccccaagggcgccaucaacaccucccuccccuuccagaacauccaccccaucaccaucggcaagugccccaaguacgucaaguccaccaagcuccgccucgccaccggccuccgcaacguccccuccauccagucccgcggccucuucggcgccaucgccggcuucaucgagggcggcuggaccggcauggucgacggcugguacggcuaccaccaccagaacgagcagggcuccggcuacgccgccgaccucaaguccacccagaacgccaucgacgagaucaccaacaaggucaacuccgucaucgagaagaugaacacccaguucaccgccgucggcaaggaguucaaccaccucgagaagcgcaucgagaaccucaacaagaaggucgacgacggcuuccucgacaucuggaccuacaacgccgagcuccucguccuccucgagaacgagcgcacccucgacuaccacgacuccaacgucaagaaccucuacgagaagguccgcucccagcucaagaacaacgccaaggagaucggcaacggcugcuucgaguucuaccacaagugcgacaacaccugcauggaguccgucaagaacggcaccuacgacuaccccaaguacuccgaggaggccaagcucaaccgcgaggagaucgacggcgucaagcucgaguccacccgcaucuaccagauccucgccaucuacuccaccgucgccuccucccucguccucgucgucucccucggcgccaucuccuucuggaugugcuccaacggcucccuccagugccgcaucugcaucuga

SEQ ID NO: 102194 - RNA, 1701 nt, Artificial Sequence
  derived and/or modified CDS sequence (opt2) from hemagglutinin__InfluenzaA__ADO29904
augaaggccauccucgucguccuccucuacaccuucgccaccgccaacgccgacacccucugcaucggcuaccacgccaacaacuccaccgacaccgucgacaccguccucgagaagaacgucaccgucacccacuccgucaaccuccucgaggacaagcacaacggcaagcucugcaagcuccgcggcgucgccccccuccaccucggccgcugcaacaucgccggcuggauccucggcaaccccgagugcgagucccucuccaccgccuccuccugguccuacaucgucgagaccuccuccuccgacaacggcaccugcuaccccggcgacuucaucgacuacgaggagcuccgcgagcagcucuccuccgucuccuccuucgagcgcuucgagaucuuccccaagaccuccuccuggcccaaccacgaccccaacaagggcgucaccgccgccugcccccacgccggcgccaaguccuucuacaagaaccucaucuggcucgucaagaagggcaacuccuaccccaagcucuccaaguccuacaucaacgacaagggcaaggagguccucguccucuggggcauccaccgccccuccaccuccgccgaccagcagucccucuaccagaacgccgacgccuacgucuucgucggcaccucccgcuacuccaagaaguucaagcccgagaucgccauccgccccaaggucggcgaccaggagggccgcaugaacuacuacuggacccucgucgagcccggcgacaagaucaccuucgaggccaccggcaaccucgucgucccccgcuacgccuucgccauggagcgcaacgccggcuccggcaucaucaucuccaacacccccguccacgacugcaacaccaccugccagacccccaagggcgccaucaacaccucccuccccuuccagaacauccaccccaucaccaucggcaagugccccaaguacgucaaguccaccaagcuccgccucgccaccggccuccgcaacguccccuccauccagucccgcggccucuucggcgccaucgccggcuucaucgagggcggcuggaccggcauggucgacggcugguacggcuaccaccaccagaacgagcagggcuccggcuacgccgccgaccucaaguccacccagaacgccaucgacgagaucaccaacaaggucaacuccgucaucgagaagaugaacacccaguucaccgccgucggcaaggaguucaaccaccucgagaagcgcaucgagaaccucaacaagaaggucgacgacggcuuccucgacaucuggaccuacaacgccgagcuccucguccuccucgagaacgagcgcacccucgacuaccacgacuccaacgucaagaaccucuacgagaagguccgcucccagcucaagaacaacgccaaggagaucggcaacggcugcuucgaguucuaccacaagugcgacaacaccugcauggaguccgucaagaacggcaccuacgacuaccccaaguacuccgaggaggccaagcucaaccgcgaggagaucgacggcgucaagcucgaguccacccgcaucuaccagauccucgccaucuacuccaccgucgccuccucccucguccucgucgucucccucggcgccaucuccuucuggaugugcuccaacggcucccuccagugccgcaucugcaucuga

SEQ ID NO: 102195 - RNA, 1701 nt, Artificial Sequence
  derived and/or modified CDS sequence (opt2) from hemagglutinin__InfluenzaA__ADO29905
augaaggccauccucgucguccuccucuacaccuucgccaccgccaacgccgacacccucugcaucggcuaccacgccaacaacuccaccgacaccgucgacaccguccucgagaagaacgucaccgucacccgcuccgucaaccuccucgaggacaagcacaacggcaagcucugcaagcuccgcggcgucgccccccuccaccucggcaagugcaacaucgccggcuggauccucggcaaccccgagugcgagucccucuccaccgccuccuccugguccuacaucgucgagaccuccuccuccgacaacggcaccugcuaccccggcgacuucaucgacuacgaggagcuccgcgagcagcucuccuccgucuccuccuucgagcgcuucgagaucuuccccaagaccuccuccuggcccaaccacgaccccaacaagggcgucaccgccgccugcccccacgccggcgccaaguccuucuacaagaaccucaucuggcucgucaagaagggcaacuccuaccccaagcucuccaaguccuacaucaacgacaagggcaaggagguccucguccucuggggcauccaccaccccuccaccuccgccgaccagcagucccucuaccagaacgccgacgccuacgucuucgucggcaccucccgcuacuccaagaaguucaagcccgagaucgccauccgccccaagguccgcgaccaggagggccgcaugaacuacuacuggacccucgucgagcccggcgacaagaucaccuucgaggccaccggcaaccucgucgucccccgcuacgccuucgccauggagcgcaacgccggcuccggcaucaucaucuccaacacccccguccacgacugcaacaccaccugccagacccccaagggcgccaucaacaccucccuccccuuccagaacauccaccccaucaccaucggcaagugccccaaguacgucaaguccaccaagcuccgccucgccaccggccuccgcaacguccccuccauccagucccgcggccucuucggcgccaucgccggcuucaucgagggcggcuggaccggcauggucgacggcugguacggcuaccaccaccagaacgagcagggcuccggcuacgccgccgaccucaaguccacccagaacgccaucgacgagaucaccaacaaggucaacuccgucaucgagaagaugaacacccaguucaccgccgucggcaaggaguucaaccaccucgagaagcgcaucgagaaccucaacaagaaggucgacgacggcuuccucgacaucuggaccuacaacgccgagcuccucguccuccucgagaacgagcgcacccucgacuaccacgacuccaacgucaagaaccucuacgagaagguccgcucccagcucaagaacaacgccaaggagaucggcaacggcugcuucgaguucuaccacaagugcgacaacaccugcauggaguccgucaagaacggcaccuacgacuaccccaaguacuccgaggaggccaagcucaaccgcgaggagaucgacggcgucaagcucgaguccacccgcaucuaccagauccucgccaucuacuccaccgucgccuccucccucguccucgucgucucccucggcgccaucuccuucuggaugugcuccaacggcucccuccagugccgcaucugcaucuga

SEQ ID NO: 102196 - RNA, 1701 nt, Artificial Sequence
  derived and/or modified CDS sequence (opt2) from hemagglutinin__InfluenzaA__ADO29906
augaaggccauccucgucguccuccucuacaccuucgccaccgccaacgccgacacccucugcaucggcuaccacgccaacaacuccaccgacaccgucgacaccguccucgagaagaacgucaccgucacccacuccgucaaccuccucgaggacaagcacaaccgcaagcucugcaagcuccgcggcgucgccccccuccaccucggcaagugcaacaucgccggcuggauccucggcaaccccgagugcgagucccucuccaccgccuccuccugguccuacaucgucgagaccuccuccuccgacaacggcaccugcuaccccggcgacuucaucgacuacgaggagcuccgcgagcagcucuccuccgucuccuccuucgagcgcuucgagaucuuccccaagaccuccuccuggcccaaccacgaccccaacaagggcgucaccgccgccugcccccacgccggcgccaaguccuucuacaagaaccucaucuggcucgucaagaagggcaacuccuaccccaagcucuccaaguccuacaucaacgacaagggcaaggagguccucguccucuggggcauccaccaccccuccaccuccgccgaccagcagucccucuaccagaacgccgacgccuacgucuucgucggcaccucccgcuacuccaagaaguucaagcccgagaucgccauccgccccaagguccgcgaccaggagggccgcaugaacuacuacuggacccucgucgagcccggcgacaagaucaccuucgaggccaccggcaaccucgucgucccccgcuacgccuucgccauggagcgcaacgccggcuccggcaucaucaucuccgacacccccguccacgacugcaacaccaccugccagacccccaagggcgccaucaacaccucccuccccuuccagaacauccaccccaucaccaucggcaagugccccaaguacgucaaguccaccaagcuccgccucgccaccggccuccgcaacguccccuccauccagucccgcggccucuucggcgccaucgccggcuucaucgagggcggcuggaccggcauggucgacggcugguacggcuaccaccaccagaacgagcagggcuccggcuacgccgccgaccucaaguccacccagaacgccaucgacgagaucaccaacaaggucaacuccgucaucgagaagaugaacacccaguucaccgccgucggcaaggaguucaaccaccucgagaagcgcaucgagaaccucaacaagaaggucgacgacggcuuccucgacaucuggaccuacaacgccgagcuccucguccuccucgagaacgagcgcacccucgacuaccacgacuccaacgucaagaaccucuacgagaagguccgcucccagcucaagaacaacgccaaggagaucggcaacggcugcuucgaguucuaccacaagugcgacaacaccugcauggaguccgucaagaacggcaccuacgacuaccccaaguacuccgaggaggccaagcucaaccgcgaggagaucgacggcgucaagcucgaguccacccgcaucuaccagauccucgccaucuacuccaccgucgccuccucccucguccucgucgucucccucggcgccaucuccuucuggaugugcuccaacggcucccuccagugccgcaucugcaucuga

SEQ ID NO: 102197 - RNA, 1701 nt, Artificial Sequence
  derived and/or modified CDS sequence (opt2) from hemagglutinin__InfluenzaA__ADO29907
augaaggccauccucgucguccuccucuacaccuucgccaccgccaacgccgacacccucugcaucggcuaccacgccaacaacuccaccgacaccgucgacaccguccucgagaagaacgucaccgucacccacuccgucaaccuccucgaggacaagcacaacggcaagcucugcaagcuccgcggcgucgccccccuccaccucggcaagugcaacaucgccggcuggauccucggcaaccccgagugcgagucccucuccaccgccuccuccugguccuacaucgucgagaccuccuccuccgacaacggcaccugcuaccccggcgacuucaucgacuacgaggagcuccgcgagcagcucuccuccgucuccuccuucgagcgcuucgagaucuuccccaagaccuccuccuggcccaaccacgaccccaacaagggcgucaccgccgccugcccccacgccggcgccaaguccuucuacaagaaccucaucuggcucgucaagaagggcaacuccuaccccaagcucuccaaguccuacaucaacgacaagggcaaggagguccucguccucuggggcauccaccaccccuccaccuccgccgaccagcagucccucuaccagaacgccgacgccuacgucuucgucggcaccucccgcuacuccaagaagcucaagcccgagaucgccauccgccccaagguccgcgaccaggagggccgcaugaacuaccacuggacccucgucgagcccggcgacaagaucaccuucgaggccaccggcaaccucgucgucccccgcuacgccuucgccauggagcgcaacgccggcuccggcaucaucaucuccgacacccccguccacgacugcaacaccaccugccagacccccaagggcgccaucaacaccucccuccccuuccagaacauccaccccaucaccaucggcaagugccccaaguacgucaaguccaccaagcuccgccucgccaccggccuccgcaacguccccuccauccagucccgcggccucuucggcgccaucgccggcuucaucgagggcggcuggaccggcauggucgacggcugguacggcuaccaccaccagaacgagcagggcuccggcuacgccgccgaccucaaguccacccagaacgccaucgacgagaucaccaacaaggucaacuccgucaucgagaagaugaacacccaguucaccgccgucggcaaggaguucaaccaccucgagaagcgcaucgagaaccucaacaagaaggucgacgacggcuuccucgacaucuggaccuacaacgccgagcuccucguccuccucgagaacgagcgcacccucgacuaccacgacuccaacgucaagaaccucuacgagaagguccgcucccagcucaagaacaacgccaaggagaucggcaacggcugcuucgaguucuaccacaagugcgacaacaccugcauggaguccgucaagaacggcaccuacgacuaccccaaguacuccgaggaggccaagcucaaccgcgaggagaucgacggcgucaagcucgaguccacccgcaucuaccagauccucgccaucuacuccaccgucgccuccucccucguccucgucgucucccucggcgccaucuccuucuggaugugcuccaacggcucccuccagugccgcaucugcaucuga

SEQ ID NO: 102198 - RNA, 1701 nt, Artificial Sequence
  derived and/or modified CDS sequence (opt2) from hemagglutinin__InfluenzaA__ADO29908
augaaggccauccucgucguccuccucuacaccuucgccaccgccaacgccgacacccucugcaucggcuaccacgccaacaacuccaccgacaccgucgacaccguccucgagaagaacgucaccgucacccacuccgucaaccuccucgaggacaagcacaacggcaagcucugcaagcuccgcggcgucgccccccuccaccucggcaagugcaacaucgccggcuggauccucggcaaccccgagugcgagucccucuccaccgccuccuccugguccuacaucgucgagaccuccuccuccgacaacggcaccugcuaccccggcgacuucaucgacuacgaggagcuccgcgagcagcucuccuccgucuccuccuucgagcgcuucgagaucuuccccaagaccuccuccuggcccaaccacgaccccaacaagggcgucaccgccgccugcccccacgccggcgccaaguccuucuacaagaaccucaucuggcucgucaagaagggcaacuccuaccccaagcucuccaaguccuacaucaacgacaagggcaaggagguccucguccucuggggcauccaccaccccuccaccuccgccgaccagcagucccucuaccagaacgccgacgccuacgucuucgucggcaccucccgcuacuccaagaaguucaagcccgagaucgccauccgccccaagguccgcgaccaggaguggcgcaugaacuacuacuggacccucgucgagcccggcgacaagaucaccuucgaggccaccggcaaccucgucgucccccgcuacgccuucgccauggagcgcaacgccggcuccggcaucaucaucuccgacacccccguccacgacugcaacaccaccugccagacccccaagggcgccaucaacaccucccuccccuuccagaacauccaccccaucaccaucggcaagugccccaaguacgucaaguccaccaagcuccgccucgccaccggccuccgcaacguccccuccauccagucccgcggccucuucggcgccaucgccggcuucaucgagggcggcuggaccggcauggucgacggcugguacggcuaccaccaccagaacgagcagggcuccggcuacgccgccgaccucaaguccacccagaacgccaucgacgagaucaccaacaaggucaacuccgucaucgagaagaugaacacccaguucaccgccgucggcaaggaguucaaccaccucgagaagcgcaucgagaaccucaacaagaaggucgacgacggcuuccucgacaucuggaccuacaacgccgagcuccucguccuccucgagaacgagcgcacccucgacuaccacgacuccaacgucaagaaccucuacgagaagguccgcucccagcucaagaacaacgccaaggagaucggcaacggcugcuucgaguucuaccacaagugcgacaacaccugcauggaguccgucaagaacggcaccuacgacuaccccaaguacuccgaggaggccaagcucaaccgcgaggagaucgacggcgucaagcucgaguccacccgcgucuaccagauccucgccaccuacuccaccgucgccuccucccucguccucgucgucucccucggcgccaucuccuucuggaugugcuccaacggcucccuccagugccgcaucugcaucuga

SEQ ID NO: 102199 - RNA, 1701 nt, Artificial Sequence
  derived and/or modified CDS sequence (opt2) from hemagglutinin__InfluenzaA__ADO29909
augaaggccauccucgucguccuccucuacaccuucgccaccgccaacgccgacacccuccgcaucggcuaccacgccaacaacuccaccgacaccgucgacaccguccucgagaagaacgucaccgucacccacuccgucaaccuccucgaggacaagcacaacggcaagcucugcaagcuccgcggcgucgccccccuccaccucggcaagugcaacaucgccggcuggauccucggcaaccccgagugcgagucccucuccaccgccuccuccugguccuacaucgucgagaccuccuccuccgacaacggcaccugcuaccccggcgacuucaucgacuacgaggagcuccgcgagcagcucuccuccgucuccuccuucgagcgcuucgagaucuuccccaagaccuccuccuggcccaaccacgaccccaacaagggcgucaccgccgccugcccccacgccggcgccaaguccuucuacaagaaccucaucuggcucgucaagaagggcaacuccuaccccaagcucuccaaguccuacaucaacgacaagggcaaggagguccucguccucuggggcauccaccaccccuccaccuccgccgaccagcagucccucuaccagaacgccgacgccuacgucuucgucggcaccucccgcuacuccaagaaguucaagcccgagaucgccauccgccccaagguccgcgaccaggagggccgcaugaacuacuacuggacccucgucgagcccggcgacaagaucaccuucgaggccaccggcaaccucgucgucccccgcuacgccuucgccauggagcgcaacgccggcuccggcaucaucaucuccgacacccccguccacgacugcaacaccaccugccagacccccaagggcgccaucaacaccucccuccccuuccagaacauccaccccaucaccaucggcaagugccccaaguacgucaaguccaccaagcuccgccucgccaccggccuccgcaacguccccuccauccagucccgcggccucuucggcgccaucgccggcuucaucgagggcggcuggaccggcauggucgacggcugguacggcuaccaccaccagaacgagcagggcuccggcuacgccgccgaccucaaguccauccagaacgccaucgacgagaucaccaacaaggucaacuccgucaucgagaagaugaacacccaguucaccgccgucggcaaggaguucaaccaccucgagaagcgcaucgagaaccucaacaagaaggucgacgacggcuuccucgacaucuggaccuacaacgccgagcuccucguccuccucgagaacgagcgcacccucgacuaccacgacuccaacgucaagaaccucuacgagaagguccgcucccagcucaagaacaacgccaaggagaucggcaacggcugcuucgaguucuaccacaagugcgacaacaccugcauggaguccgucaagaacggcaccuacgacuaccccaaguacuccgaggaggccaagcucaaccgcgaggagaucgacggcgucaagcucgaguccacccgcaucuaccagauccucgccaucuacuccaccgucgccuccucccucauccucgucgucucccucggcgccaucuccuucuggaugugcuccaacggcucccuccagugccgcaucugcaucuga

SEQ ID NO: 102200 - RNA, 1701 nt, Artificial Sequence
  derived and/or modified CDS sequence (opt2) from hemagglutinin__InfluenzaA__ADO29910
augaaggccauccucgucguccuccucuacaccuucgccaccgccaacgccgacacccucugcaucggcuaccacgccaacaacuccaccgacaccgucgacaccguccucgagaagaacgucaccgucacccacuccgucaaccuccucgaggacaagcacaacggcaagcucugcaagccccgcggcgucgccccccuccaccucggcaagugcaacaucgccggcuggauccucggcaaccccgagugcgagucccucuccaccgccuccuccugguccuacaucgucgagaccuccuccuccgacaacggcaccugcuaccccggcgacuucaucgacuacgaggagcuccgcgagcagcucuccuccgucuccuccuucgagcgcuucgagaucuuccccaagaccuccuccuggcccaaccacgaccccaacaagggcgucaccgccgccugcccccacgccggcgccaaguccuucuacaagaaccucaucuggcucgucaagaagggcaacuccuaccccaagcucuccaaguccuacaucaacgacaagggcaaggagguccucguccucuggggcauccaccaccccuccaccuccgccgaccagcagucccucuaccagaacgccgacgccuacgucuucgucggcaccucccgcuacuccaagaaguucaagcccgagaucgccauccgccccaagguccgcgaccaggagggccgcaugaacuacuacuggacccucgucgagcccggcgacaagaucaccuucgaggccaucggcaaccucgucgucccccgcuacgccuucgccauggagcgcaacgccggcuccggcaucaucaucuccgacacccccguccacgacugcaacaccaccugccagacccccaagggcgccaucaacaccucccuccccuuccagaacauccaccccaucaccaucggcaagugccccaaguacgucaaguccaccaagcuccgccucgccaccggccuccgcaacguccccuccauccagucccgcggccucuucggcgccaucgccggcuucaucgagggcggcuggaccggcauggucgacggcugguacggcuaccaccaccagaacgagcagggcuccggcuacgccgccgaccucaaguccacccagaacgccaucgacgagaucaccaacaaggucaacuccgucaucgagaagaugaacacccaguucaccgccgucggcaaggaguucaaccaccucgagaagcgcaucgagaaccucaacaagaaggucgacgacggcuuccucgacaucuggaccuacaacgccgagcuccucguccuccucgagaacgagcgcacccucgacuaccacgacuccaacgucaagaaccucuacgagaagguccgcucccagcucaagaacaacgccaaggagaucggcaacggcugcuucgaguucuaccacaagugcgacaacaccugcauggaguccgucaagaacggcaccuacgacuaccccaaguacuccgaggaggccaagcucaaccgcggcgagaucgacggcgucaagcucgaguccacccgcaucuaccagauccucgccaucuacuccaccgucgccuccucccucguccucgucgucucccucggcgccaucuccuucuggaugugcuccaacggcucccuccagugccgcaucugcaucuga

SEQ ID NO: 102201 - RNA, 1701 nt, Artificial Sequence; identical to SEQ ID NO: 100427
  derived and/or modified CDS sequence (opt2) from hemagglutinin__InfluenzaA__ADO30407

SEQ ID NO: 102202 - RNA, 1701 nt, Artificial Sequence; identical to SEQ ID NO: 100318
  derived and/or modified CDS sequence (opt2) from hemagglutinin__InfluenzaA__ADO30417

SEQ ID NO: 102203 - RNA, 1701 nt, Artificial Sequence; identical to SEQ ID NO: 100040
  derived and/or modified CDS sequence (opt2) from hemagglutinin__InfluenzaA__ADO33202

SEQ ID NO: 102204 - RNA, 1701 nt, Artificial Sequence; identical to SEQ ID NO: 99548
  derived and/or modified CDS sequence (opt2) from hemagglutinin__InfluenzaA__ADO33240

SEQ ID NO: 102205 - RNA, 1701 nt, Artificial Sequence; identical to SEQ ID NO: 98705
  derived and/or modified CDS sequence (opt2) from hemagglutinin__InfluenzaA__ADO33247

SEQ ID NO: 102206 - RNA, 1701 nt, Artificial Sequence; identical to SEQ ID NO: 99548
  derived and/or modified CDS sequence (opt2) from hemagglutinin__InfluenzaA__ADO33254

SEQ ID NO: 102207 - RNA, 1701 nt, Artificial Sequence; identical to SEQ ID NO: 99548
  derived and/or modified CDS sequence (opt2) from hemagglutinin__InfluenzaA__ADO33261

SEQ ID NO: 102208 - RNA, 1701 nt, Artificial Sequence; identical to SEQ ID NO: 99548
  derived and/or modified CDS sequence (opt2) from hemagglutinin__InfluenzaA__ADO33269

SEQ ID NO: 102209 - RNA, 1701 nt, Artificial Sequence; identical to SEQ ID NO: 100040
  derived and/or modified CDS sequence (opt2) from hemagglutinin__InfluenzaA__ADO33277

SEQ ID NO: 102210 - RNA, 1701 nt, Artificial Sequence; identical to SEQ ID NO: 99548
  derived and/or modified CDS sequence (opt2) from hemagglutinin__InfluenzaA__ADO33285

SEQ ID NO: 102211 - RNA, 1701 nt, Artificial Sequence; identical to SEQ ID NO: 100040
  derived and/or modified CDS sequence (opt2) from hemagglutinin__InfluenzaA__ADO33293

SEQ ID NO: 102212 - RNA, 1701 nt, Artificial Sequence; identical to SEQ ID NO: 100040
  derived and/or modified CDS sequence (opt2) from hemagglutinin__InfluenzaA__ADO33307

SEQ ID NO: 102213 - RNA, 1701 nt, Artificial Sequence; identical to SEQ ID NO: 99548
  derived and/or modified CDS sequence (opt2) from hemagglutinin__InfluenzaA__ADO33313

SEQ ID NO: 102214 - RNA, 1701 nt, Artificial Sequence; identical to SEQ ID NO: 101798
  derived and/or modified CDS sequence (opt2) from hemagglutinin__InfluenzaA__ADO33329

SEQ ID NO: 102215 - RNA, 1701 nt, Artificial Sequence; identical to SEQ ID NO: 99548
  derived and/or modified CDS sequence (opt2) from hemagglutinin__InfluenzaA__ADO33337

SEQ ID NO: 102216 - RNA, 1701 nt, Artificial Sequence; identical to SEQ ID NO: 99548
  derived and/or modified CDS sequence (opt2) from hemagglutinin__InfluenzaA__ADO33345

SEQ ID NO: 102217 - RNA, 1701 nt, Artificial Sequence; identical to SEQ ID NO: 100040
  derived and/or modified CDS sequence (opt2) from hemagglutinin__InfluenzaA__ADO33352

SEQ ID NO: 102218 - RNA, 1701 nt, Artificial Sequence; identical to SEQ ID NO: 98705
  derived and/or modified CDS sequence (opt2) from hemagglutinin__InfluenzaA__ADO33360

SEQ ID NO: 102219 - RNA, 1701 nt, Artificial Sequence; identical to SEQ ID NO: 99548
  derived and/or modified CDS sequence (opt2) from hemagglutinin__InfluenzaA__ADO33368

SEQ ID NO: 102220 - RNA, 1701 nt, Artificial Sequence; identical to SEQ ID NO: 99548
  derived and/or modified CDS sequence (opt2) from hemagglutinin__InfluenzaA__ADO33376

SEQ ID NO: 102221 - RNA, 1701 nt, Artificial Sequence; identical to SEQ ID NO: 98692
  derived and/or modified CDS sequence (opt2) from hemagglutinin__InfluenzaA__ADO33384

SEQ ID NO: 102222 - RNA, 1701 nt, Artificial Sequence; identical to SEQ ID NO: 98705
  derived and/or modified CDS sequence (opt2) from hemagglutinin__InfluenzaA__ADO33391

SEQ ID NO: 102223 - RNA, 1701 nt, Artificial Sequence
  derived and/or modified CDS sequence (opt2) from hemagglutinin__InfluenzaA__ADO79917
augaaggccauccucgucguccuccucuacaccuucgccaccgccaacgccgacacccucugcaucggcuaccacgccaacaacuccaccgacaccgucgacaccguccucgagaagaacgucaccgucacccacuccgucaaccuccucgaggacaagcacaacggcaagcucugcaagcuccgcggcgucgccccccuccaccucggcaagugcaacaucgccggcuggauccucggcaaccccgagugcgagucccucuccaccgccuccuccugguccuacaucgucgagaccuccuccuccgacaacggcaccugcuaccccggcgacuucaucgacuacgaggagcuccgcgagcagcucuccuccgucuccuccuucgagcgcuucgagaucuuccccaagaccuccuccuggcccaaccacgacuccaacaagggcgucaccgccgccugcccccacgccggcgccaaguccuucuacaagaaccucaucuggcucgucaagaagggcaacuccuaccccaagcucuccaaguccuacaucaacgacaagggcaaggagguccucguccucuggggcauccaccaccccuccaccuccgccgaccagcagucccucuaccagaacgccgacgccuacgucuucgucggcaccucccgcuacuccaagaaguucaagcccgagaucgccauccgccccaagguccgcgaccgcgagggccgcaugaacuacuacuggacccucgucgagcccggcgacaagaucaccuucgaggccaccggcaaccucgucgucccccgcuacgccuucgccauggagcgcaacgccggcuccggcaucaucaucuccgacacccccguccacaacugcaacaccaccugccagacccccaagggcgccaucaacaccucccuccccuuccagaacauccaccccaucaccaucggcaagugccccaaguacgucaaguccaccaagcuccgccucgccaccggccuccgcaacguccccuccauccagucccgcggccucuucggcgccaucgccggcuucaucgagggcggcuggaccggcauggucgacggcugguacggcuaccaccaccagaacgagcagggcuccggcuacgccgccgaccucaaguccacccagaacgccaucgacgagaucaccaacaaggucaacuccgucaucgagaagaugaacacccaguucaccgccgucggcaaggaguucaaccaccucgagaagcgcaucgagaaccucaacaagaaggucgacgacggcuuccucgacaucuggaccuacaacgccgagcuccucguccuccucgagaacgagcgcacccucgacuaccacgacuccaacgucaagaaccucuacgagaagguccgcucccagcucaagaacaacgccaaggagaucggcaacggcugcuucgaguucuaccacaagugcgacaacaccugcauggaguccgucaagaacggcaccuacgacuaccccaaguacuccgaggaggccaagcucaaccgcgaggagaucgacggcgucaagcucgaguccacccgcaucuaccagauccucgccaucuacuccaccgucgccuccucccucguccucgucgucucccucggcgccaucuccuucuggaugugcuccaacggcucccuccagugccgcaucugcaucuga

SEQ ID NO: 102224 - RNA, 1701 nt, Artificial Sequence
  derived and/or modified CDS sequence (opt2) from hemagglutinin__InfluenzaA__ADO79923
augaaggccauccucgucguccuccucuacaccuucgccaccgccaacgccgacacccucugcaucggcuaccacgccaacaacuccaccgacaccgucgacaccguccucgagaagaacgucaccgucacccacuccgucaaccuccucgaggacaagcacaacggcaagcucugcaagcuccgcggcgucgccccccuccaccucggcaagugcaacaucgccggcuggauccucggcaaccccgagugcgagucccucuccaccgccuccuccugguccuacaucgucgagaccuccuccaccgacaaguggaccugcuaccccggcgacuucaucgacuacgaggagcuccgcgagcagcucuccuccgucuccuccuucgagcgcuucgagaucuuccccaagaccuccuccuggcccaaccacgacuccaacaagggcgucaccgccgccugcccccacgccggcgccaaguccuucuacaagaaccucaucuggcucgucaagaagggcaacuccuaccccaagcucuccaaguccuacaucaacgacaagggcaaggagguccucguccucuggggcauccaccaccccuccaccuccgccgaccagcagucccucuaccagaacgccgacgccuacgucuucgucggcaccucccgcuacuccaagaaguucaagcccgagaucgccauccgccccaagguccgcgaccaggagcgccgcaugaacuacuacuggacccucguccagcccggcgacaagaucaccuuccaggccaccggcaaccucgucgucccccgcuacgccuucgccauggagcgcaacgccggcuccggcaucaucaucuccgacacccccguccacaacugcaacaccaccugccagacccccaagggcgccaucaacaccucccuccccuuccagaacauccaccccaucaccaucggcaagugccccaaguacgucaaguccaccaagcuccgccucgccaccggccuccgcaacguccccuccauccagucccgcggccucuucggcgccaucgccggcuucaucgagggcggcuggaccggcauggucgacggcugguacggcuaccaccaccagaacgagcagggcuccggcuacgccgccgaccucaaguccacccagaacgccaucgacgagaucaccaacaaggucaacuccgucaucgagaagaugaacacccaguucaccgccgucggcaaggaguucaaccaccucgagaagcgcaucgagaaccucaacaagaaggucgacgacggcuuccucgacaucuggaccuacaacgccgagcuccucguccuccucgagaacgagcgcacccucgacuaccacgacuccaacgucaagaaccucuacgagaagguccgcucccagcucaagaacaacgccaaggagaucggcaacggcugcuucgaguucuaccacaagugcgacaacaccugcauggaguccgucaagaacggcaccuacgacuaccccaaguacuccgaggaggccaagcucaaccgcgaggagaucgacggcgucaagcucgaguccacccgcaucuaccagauccucgccaucuacuccaccgucgccuccucccucguccucgucgucucccucggcgccaucuccuucuggaugugcuccaacggcucccuccagugccgcaucugcaucuga

SEQ ID NO: 102225 - RNA, 1701 nt, Artificial Sequence
  derived and/or modified CDS sequence (opt2) from hemagglutinin__InfluenzaA__ADO79924
augaaggccauccucgucguccuccucuacaccuucgccaccgccaacgccgacacccucugcaucggcuaccacgccaacaacuccaccgacaccgucgacaccguccucgagaagaacgucaccgucacccacuccgucaaccuccucgaggacaagcacaacggcaagcucugcaagcuccgcggcgucgccccccuccaccucggcaagugcaacaucgccggcuggauccucggcaaccccgagugcgagucccucuccaccgccuccuccugguccuacaucgucgagaccuccuccaccgacaaguggaccugcuaccccggcgacuucaucgacuacgaggagcuccgcgagcagcucuccuccgucuccuccuucgagcgcuucgagaucuuccccaagaccuccuccuggcccaaccacgacuccaacaagggcgucaccgccgccugcccccacgccggcgccaaguccuucuacaagaaccucaucuggcucgucaagaagggcaacuccuaccccaagcucuccaaguccuacaucaacgacaagggcaaggagguccucguccucuggggcauccaccaccccuccaccuccgccgaccagcagucccucuaccagaacgccgacgccuacgucuucgucggcaccucccgcuacuccaagaaguucaagcccgagaucgccauccgccccaagguccgcgaccgcgagggccgcaugaacuacuacuggacccucaucgagcccggcgacaagaucaccuucgagcccaccggcaaccucgucgucccccgcuacgccuucgccauggagcgcaacgccggcuccggcaucaucaucuccgacacccccguccacaacugcaacaccaccugccagacccccaagggcgccaucaacaccucccuccccuuccagaacauccaccccaucaccaucggcaagugccccaaguacgucaaguccaccaagcuccgccucgccaccggccuccgcaacguccccuccauccagucccgcggccucuucggcgccaucgccggcuucaucgagggcggcuggaccggcauggucgacggcugguacggcuaccaccaccagaacgagcagggcuccggcuacgccgccgaccucaaguccacccagaacgccaucgacgagaucaccaacaaggucaacuccgucaucgagaagaugaacacccaguucaccgccgucggcaaggaguucaaccaccucgagaagcgcaucgagaaccucaacaagaaggucgacgacggcuuccucgacaucuggaccuacaacgccgagcuccucguccuccucgagaacgagcgcacccucgacuaccacgacuccaacgucaagaaccucuacgagaagguccgcucccagcucaagaacaacgccaaggagaucggcaacggcugcuucgaguucuaccacaagugcgacaacaccugcauggaguccgucaagaacggcaccuacgacuaccccaaguacuccgaggaggccaagcucaaccgcgaggagaucgacggcgucaagcucgaguccacccgcaucuaccagauccucgccaucuacuccaccgucgccuccucccucguccucgucgucucccucggcgccaucuccuucuggaugugcuccaacggcucccuccagugccgcaucugcaucuga

SEQ ID NO: 102226 - RNA, 1701 nt, Artificial Sequence
  derived and/or modified CDS sequence (opt2) from hemagglutinin__InfluenzaA__ADO79925
augaaggccauccucgucguccuccucuacaccuucgccaccgccaacgccgacacccucugcaucggcuaccacgccaacaacuccaccgacaccgucgacaccguccucgagaagaacgucaccgucacccacuccgucaaccuccucgaggacaagcacaacggcaagcucugcaagcuccgcggcgucgccccccuccaccucggcaagugcaacaucgccggcuggauccucggcaaccccgagugcgagucccucuccaccgccuccuccugguccuacaucgucgagaccuccuccacccacgaguggaccugcuaccccggcgacuucaucgacuacgaggagcuccgcgagcagcucuccuccgucuccuccuucgagcgcuucgagaucuuccccaagaccuccuccuggcccaaccacgacuccaacaagggcgucaccgccgccugcccccacgccggcgccaaguccuucuacaagaaccucaucuggcucgucaagaagggcaacuccuaccccaagcucuccaaguccuacaucaacgacaagggcaaggagguccucguccucuggggcauccaccaccccuccaccuccgccgaccagcagucccucuaccagaacgccgacgccuacgucuucgucggcaccucccgcuacuccaagaaguucaagcccgagaucgccauccgccccaagguccgcgaccgcgagggccgcaugaacuacuacuggacccucgucgagcccggcgacaagaucaccuucgaggcccccggcaaccucgucgucccccgcuacgccuucgccauggagcgcaacgccggcuccggcaucaucaucuccgacacccccguccacaacugcaacaccaccugccagacccccaagggcgccaucaacaccucccuccccuuccagaacauccaccccaucaagaucggcaagugcuccaaguacgucaaguccaccaagcuccgccucgccaccggccuccgcaacguccccuccauccagucccgcggccucuucggcgccaucgccggcuucaucgagggcggcuggaccggcauggucgacggcugguacggcuaccaccaccagaacgagcagggcuccggcuacgccgccgaccucaaguccacccagaacgccaucgacgagaucaccaacaaggucaacuccgucaucgagaagaugaacacccaguucaccgccgucggcaaggaguucaaccaccucgagaagcgcaucgagaaccucaacaagaaggucgacgacggcuuccucgacaucuggaccuacaacgccgagcuccucguccuccucgagaacgagcgcacccucgacuaccacgacuccaacgucaagaaccucuacgagaagguccgcucccagcucaagaacaacgccaaggagaucggcaacggcugcuucgaguucuaccacaagugcgacaacaccugcauggaguccgucaagaacggcaccuacgacuaccccaaguacuccgaggaggccaagcucaaccgcgaggagaucgacggcgucaagcucgaguccacccgcaucuaccagauccucgccaucuacuccaccgucgccuccucccucguccucgucgucucccucggcgccaucuccuucuggaugugcuccaacggcucccuccagugccgcaucugcaucuga

SEQ ID NO: 102227 - RNA, 1701 nt, Artificial Sequence
  derived and/or modified CDS sequence (opt2) from hemagglutinin__InfluenzaA__ADO79926
augaaggccauccucgucguccuccucuacaccuucgccaccgccaacgccgacacccucugcaucggcuaccacgccaacaacuccaccgacaccgucgacaccguccucgagaagaacgucaccgucacccacuccgucaaccuccucgaggacaagcacaacggcaagcucugcaagcuccgcggcgucgccccccuccaccucggcaagugcaacaucgccggcuggauccucggcaaccccgagugcgagucccucuccaccgccuccuccugguccuacaucgucgagaccuccuccaccgacaaguggaccugcuaccccggcgacuucaucgacuacgaggagcuccgcgagcagcucuccuccgucuccuccuucgagcgcuucgagaucuuccccaagaccuccuccuggcccaaccacgacuccaacaagggcgucaccgccgccugcccccacgccggcgccaaguccuucuacaagaaccucaucuggcucgucaagaagggcaacuccuucuccaagcucuccaagaccuaccucaacgacaagggcaaggagguccucguccucuggggcauccaccaccccuccaccuccgccgaccagcagucccucuaccagaacgccgacgccuacgucuucgucggcaccucccgcuacuccaagaaguucaagcccgagaucgccauccgccccaagguccgcgaccaggagggccgcaugaacuacuacuggacccucgucgagcccggcgacaagaucaccuucgaggccaccggcaaccucgucgucccccgcuacgccuucgccauggagcgcaacgucggcuccggcaucaucaucuccgacacccccguccacgacugcaacaccaccugccagacccccaagggcgccaucaacaccucccuccccuuccagaacauccaccccaucaccaucggcaagugccccaaguacgucaaguccaccaagcuccgccucgccaccggccuccgcaacguccccuccauccagucccgcggccucuucggcgccaucgccggcuucaucgagggcggcuggaccggcauggucgacggcugguacggcuaccaccaccagaacgagcagggcuccggcuacgccgccgaccucaaguccacccagaacgccaucgacaagaucaccaacaaggucaacuccgucaucgagaagaugaacacccaguucaccgccgucggcaaggaguucaaccaccucgagaagcgcaucgagaaccucaacaagaaggucgacgacggcuuccucgacaucuggaccuacaacgccgagcuccucguccuccucgagaacgagcgcacccucgacuaccacgacuccaacgucaagaaccucuacgagaagguccgcucccagcucaagaacaacgccaaggagaugaagaacggcugcuucgaguucuaccacaagugcgacaacaccugcauggaguccgucaagaacggcaccuacgacuaccccaaguacuccgaggaggccaagcucaaccgcgaggagaucgacggcgucaagcucgaguccacccgcaucuaccagauccucgccaucuacuccaccgucgccuccucccucguccucgucgucucccucggcgccaucuccuucuggaugugcuccaacggcucccuccagugccgcaucugcaucuga

SEQ ID NO: 102228 - RNA, 1701 nt, Artificial Sequence
  derived and/or modified CDS sequence (opt2) from hemagglutinin__InfluenzaA__ADO79927
augaaggccauccucgucguccuccucuacaccuucgccaccgccaacgccgacacccucugcaucggcuaccacgccaacaacuccaccgacaccgucgacaccguccucgagaagaacgucaccgucacccacuccgucaaccuccucgaggacaagcacaacggcaagcucugcaagcuccgcggcgucgccccccuccaccucggcaagugcaacaucgccggcuggauccucggcaaccccgagugcgagucccucuccaccgccuccuccugguccuacaucgucgagaccuccuccaccgacaaguggaccugcuaccccggcgacuucaucgacuacgaggagcuccgcgagcagcucuccuccgucuccuccuucgagcgcuucgagaucuuccccaagaccuccuccuggcccaaccacgacuccaacaagggcgucaccgccgccugcccccacgccgccgccaaguccuucuacaagaaccucaucuggcucgucaagaagggcaacuccuaccccaagcucuccaaguccuacaucaacgacaagggcaaggagguccucguccucuggggcauccaccaccccuccaccuccgccgaccagcagucccucuaccagaacgccgacgccuacgucuucgucggcaccucccgcuacuccaagaaguucaagcccgagaucgccauccgccccaagguccgcgaccaggagggccgcaugaacuacuacuggacccucgucgagcccggcgacaagaucaccuucgaggccaccggcaaccucgucgucccccgcuacgccuucgccauggagcgcaacgccggcuccggcaucaucaucuccgacacccccguccacgacugcaacaccaccugccagacccccaagggcgccaucaacaccucccuccccuuccagaacauccaccccaucaccaucggcaagugccccaaguacgucaaguccaccaagcuccgccucgccaccggccuccgcaacauccccuccguccagucccgcggccucuucggcgccaucgccggcuucaucgagggcggcuggaccggcauggucgacggcugguacggcuaccaccaccagaacgagcagggcuccggcuacgccgccgaccucaaguccacccagaacgccaucgacaagaucaccaacaaggucaacuccgucaucgagaagaugaacacccaguucaccgccgucggcaaggaguucaaccaccucgagaagcgcaucgagaaccucaacaagaaggucgacgacggcuuccucgacaucuggaccuacaacgccgagcuccucguccuccucgagaacgagcgcacccucgacuaccacgacuccaacgucaagaaccucuacgagaagguccgcucccagcucaagaacaacgccaaggagaugaagaacggcugcuucgaguucuaccacaagugcgacaacaccugcauggaguccgucaagaacggcaccuacgacuaccccaaguacuccgaggaggccaagcucaaccgcgaggagaucgacggcgucaagcucgaguccacccgcaucuaccagauccucgccaucuacuccaccgucgccuccucccucguccucgucgucucccucggcgccaucuccuucuggaugugcuccaacggcucccuccagugccgcaucugcaucuga

SEQ ID NO: 102229 - RNA, 1701 nt, Artificial Sequence
  derived and/or modified CDS sequence (opt2) from hemagglutinin__InfluenzaA__ADO79928
augaaggccauccucgucguccuccucuacaccuucgccaccgccaacgccgacacccucugcaucggcuaccacgccaacaacuccaccgacaccgucgacaccguccucgagaagaacgucaccgucacccacuccgucaaccuccucgaggacaagcacaacggcaagcucugcaagcuccgcggcgucgccccccuccaccucggcaagugcaacaucgccggcuggauccucggcaaccccgagugcgagucccucuccaccgccuccuccugguccuacaucgucgagaccuccuccaccgacaaguggaccugcuaccccggcgacuucaucgacuacgaggagcuccgcgagcagcucuccuccgucuccuccuucgagcgcuucgagaucuuccccaagaccaacuccuggcccaaccacgacuccaacaagggcgucaccgccgccugcccccacgccggcgccaaguccuucuacaagaaccucaucuggcucgucaagaagggcaacuccuaccccaagcucuccaaguccuacaucaacgacaagggcaaggagguccucguccucuggggcauccaccaccccuccaccuccgccgaccagcagucccucuaccagaacgccgacgccuacgucuucgucggcaccuccaaguacuccaagaaguucaagcccgagaucgccauccgccccaagguccgcgaccaggagggccgcaugaacuacuacuggacccucgucgagcccggcgacaagaucaccuucgaggccaccggcaaccucgucgucccccgcuacgccuucgccauggagcgcaacgccggcuccggcaucaucaucuccgacacccccguccacgacugcaacaccaccugccagacccccaagggcgccaucaacaccucccuccccuuccagaacauccaccccaucaccaucggcaagugccccaaguacgucaaguccaccaagcuccgccucgccaccggccuccgcaacguccccuccauccagucccgcggccucuucggcgccaucgccggcuucaucgagggcggcuggaccggcauggucgacggcugguacggcuaccaccaccagaacgagcagggcuccggcuacgccgccgaccucaaguccacccagaacgccaucgacgagaucaccaacaaggucaacuccgucaucgagaagaugaacacccaguucaccgccgucggcaaggaguucaaccaccucgagaagcgcaucgagaaccucaacaagaaggucgacgacggcuuccucgacaucuggaccuacaacgccgagcuccucguccuccucgagaacgagcgcacccucgacuaccacgacuccaacgucaagaaccucuacgagaagguccgcucccagcucaagaacaacgccaaggagaucggcaacggcugcuucgaguucuaccacaagugcgacaacaccugcauggaguccgucaagaacggcaccuacgacuaccccaaguacuccgaggaggccaagcucaaccgcgaggagaucgacggcgucaagcucgaguccacccgcaucuaccagauccucgccaucuacuccaccgucgccuccucccucguccucgucgucucccucggcgccaucuccuucuggaugugcuccaacggcucccuccagugccgcaucugcaucuga

SEQ ID NO: 102230 - RNA, 1701 nt, Artificial Sequence
  derived and/or modified CDS sequence (opt2) from hemagglutinin__InfluenzaA__ADO79929
augaaggccauccucgucguccuccucuacaccuucgccaccgccaacgccgacacccucugcaucggcuaccacgccaacaacuccaccgacaccgucgacaccguccucgagaagaacgucaccgucacccacuccgucaaccuccucgaggacaagcacaacggcaagcucugcaagcuccgcggcgucgccccccuccaccucggcaagugcaacaucgccggcuggauccucggcaaccccgagugcgagucccucuccaccgccuccuccugguccuacaucgucgagaccuccuccaccgacaaguggaccugcuaccccggcgacuucaucgacuacgaggagcuccgcgagcagcucuccuccgucuccuccuucgagcgcuucgagaucuuccccaagaccuccuccuggcccaaccacgacuccaacaagggcgucaccgccgccugcccccacgccggcgccaaguccuucuacaagaaccucaucuggcucgucaagaagggcaacuccuaccccaagcucuccaaguccuacaucaacgacaagggcaaggagguccucguccucuggggcauccaccaccccuccaccuccgccgaccagcagucccucuaccagaacgccgacgccuacgucuucgucggcaccucccgcuacuccaagaaguucaagcccgagaucgccauccgccccaagguccgcggccaggagggccgcaugaacuacuacuggacccucgucgagcccggcgacaagaucaccuucgaggccaccggcaaccucgucgucccccgcuacgccuucgccauggagcgcaacgccggcuccggcaucaucaucuccgacacccccguccacgacugcaacaccaccugccagacccccaagggcgccaucaacaccucccuccccuuccagaacauccaccccaucaccaucggcaagugccccaaguacgucaaguccaccaagcuccgccucgccaccggccuccgcaacauccccuccauccagucccgcggccucuucggcgccaucgccggcuucaucgagggcggcuggaccggcauggucgacggcugguacggcuaccaccaccagaacgagcagggcuccggcuacgccgccgaccucaaguccacccagaacgccaucgacgagaucaccaacaaggucaacuccgucaucgagaagaugaacacccaguucaccgccgucggcaaggaguucaaccaccucgagaagcgcaucgagaaccucaacaagaaggucgacgacggcuuccucgacaucuggaccuacaacgccgagcuccucguccuccucgagaacgagcgcacccucgacuaccacgacuccaacgucaagaaccucuacgagaagguccgcucccagcucaagaacaacgccaaggagaucggcaacggcugcuucgaguucuaccacaagugcgacaacaccugcauggaguccgucaagaacggcaccuacgacuaccccaaguacuccgaggaggccaagcucaaccgcgaggagaucgacggcgucaagcucgaguccacccgcaucuaccagauccucgccaucuacuccaccgucgccuccucccucguccucgucgucucccucggcgccaucuccuucuggaugugcuccaacggcucccuccagugccgcaucugcaucuga

SEQ ID NO: 102231 - RNA, 1701 nt, Artificial Sequence
  derived and/or modified CDS sequence (opt2) from hemagglutinin__InfluenzaA__ADO79930
augaaggccauccucgucguccuccucuacaccuucgccaccgccaacgccgacacccucugcaucggcuaccacgccaacaacuccaccgacaccgucgacaccguccucgagaagaacgucaccgucacccacuccgucaaccuccucgaggacaagcacaacggcaagcucugcaagcuccgcggcgucgccccccuccaccucggcaagugcaacaucgccggcuggauccucggcaaccccgagugcgagucccucuccaccgccuccuccugguccuacaucgucgagaccuccuccaccgacaaguggaccugcuaccccggcgacuucaucgacuacgaggagcuccgcgagcagcucuccuccgucuccuccuucgagcgcuucgagaucuuccccaagaccuccuccuggcccaaccacgacuccaacaagggcgucaccgccgccugcccccacgccggcgccaaguccuucuacaagaaccucaucuggcucgucaagaagggcaacuccuaccccaagcucuccaaguccuacaucaacgacaagggcaaggagguccucguccucuggggcauccaccaccccuccaccuccgccgaccagcagucccucuaccagaacgccgacgccuacgucuucgucggcaccucccgcuacuccaagaaguucaagcccgagaucgccauccgccccaagguccgcgaccgcgagggccgcaugaacuacuacuggacccucgucgagcccggcgacaagaucaccuucgaggccaccggcaaccucgucgucccccgcuacgccuucgccauggagcgcaacgccggcuccggcaucaucaucuccgacacccccguccacaacugcaacaccaccugccagacccccaagggcgccaucaacaccucccuccccuuccagaacauccaccccaucaccaucggcaagugccccaaguacgucaaguccaccaagcuccgccucgccaccggccuccgcaacguccccuccauccagucccgcggccucuucggcgccaucgccggcuucaucgagggcggcuggaccggcauggucgacggcugguacggcuaccaccaccagaacgagcagggcuccggcuacgccgccgaccucaaguccacccagaacgccaucgacgagaucaccaacaaggucaacuccgucaucgagaagaugaacacccaguucaccgccgucggcaaggaguucaaccaccucgagaagcgcaucgagaaccucaacaagaaggucgacgacggcuuccucgacaucuggaccuacaacgccgagcuccucguccuccucgagaacgagcgcacccucgacuaccacgacuccaacgucaagaaccucuacgagaagguccgcucccagcucaagaacaacgccaaggagaucggcaacggcugcuucgaguucuaccacaagugcgacaacaccugcauggaguccgucaagaacggcaccuacgacuaccccaaguacuccgaggaggccaagcucaaccgcgaggagaucgacggcgucaagcucgaguccacccgcaucuaccagauccucgccaucuacuccaccgucgccuccucccucguccucgucgucucccucggcgccaucuccuucuggaugugcuccaacggcucccuccagugccgcaucugcaucuga

SEQ ID NO: 102232 - RNA, 1701 nt, Artificial Sequence
  derived and/or modified CDS sequence (opt2) from hemagglutinin__InfluenzaA__ADO84715
augaaggccauccucgucguccuccucuacaccuucgccaccgccaacgccggcacccucugcaucggcuaccacgccaacaacuccaccgacaccgucgacaccguccucgagaagaacgucaccgucacccacuccgucaaccuccucgaggacaagcacaacggcaagcucugcaagcuccgcggcgucgccccccuccaccucggcaagugcaacaucgccggcuggauccucggcaaccccgagugcgagucccucuccaccgccuccuccugguccuacaucgucgagaccuucuccuccgacaacggcaccugcuaccccggcgacuucaucgacuacgaggagcuccgcgagcagcucuccuccgucuccuccuucgagcgcuucgagaucuuccccaagaccuccuccuggcccaaccacgacuccaacaagggcgucaccgccgccugcccccacgccggcgccaaguccuucuacaagaaccucaucuggcucgucaagaagggcaacuccuaccccaagcucuccaaguccuacaucaacgacaagggcaaggagguccucguccucuggggcauccaccaccccuccaccuccgccgaccagcagucccucuaccagaacgccgacgccuacgucuucgucggcaccucccgcuacuccaagaaguucaagcccgagaucgccauccgccccaagguccgcgaccaggagggccgcaugaacuacuacuggacccucgucgagcccggcgacaagaucaccuucgaggccaccggcaaccucgucgucccccgcuacgccuucgccauggagcgcaacgccggcuccggcaucaucaucuccgacacccccguccacgacugcaacaccaccugccagacccccaagggcgccaucaacaccucccuccccuuccagaacauccaccccaucaccaucggcaagugccccaaguacgucaaguccaccaagcuccgccucgccaccggccuccgcaacguccccuccauccagucccgcggccucuucggcgccaucgccggcuucaucgagggcggcuggaccggcauggucgacggcugguacggcuaccaccaccagaacgagcagggcuccggcuacgccgccgaccucaaguccacccagaacgccaucgacgagaucaccaacaaggucaacuccgucaucgagaagaugaacacccaguucaccgccgucggcaaggaguucaaccaccucgagaagcgcaucgagaaccucaacaagaaggucgacgacggcuuccucgacaucuggaccuacaacgccgagcuccucguccuccucgagaacgagcgcacccucgacuaccacgacuccaacgucaagaaccucuacgagaagguccgcucccagcucaagaacaacgccaaggagaucggcaacggcugcuucgaguucuaccacaagugcgacaacaccugcauggaguccgucaagaacggcaccuacgacuaccccaaguacuccgaggaggccaagcucaaccgcgaggagaucgacggcgucaagcucgaguccacccgcaucuaccagauccucgccaucuacuccaccgucgccuccucccucguccucgucgucucccucggcgccaucuccuucuggaugugcuccaacggcucccuccagugccgcaucugcaucuga

SEQ ID NO: 102233 - RNA, 1701 nt, Artificial Sequence; identical to SEQ ID NO: 98885
  derived and/or modified CDS sequence (opt2) from hemagglutinin__InfluenzaA__ADP95341

SEQ ID NO: 102234 - RNA, 1701 nt, Artificial Sequence; identical to SEQ ID NO: 98692
  derived and/or modified CDS sequence (opt2) from hemagglutinin__InfluenzaA__ADP95351

SEQ ID NO: 102235 - RNA, 1701 nt, Artificial Sequence; identical to SEQ ID NO: 98692
  derived and/or modified CDS sequence (opt2) from hemagglutinin__InfluenzaA__ADP95361

SEQ ID NO: 102236 - RNA, 1701 nt, Artificial Sequence; identical to SEQ ID NO: 98692
  derived and/or modified CDS sequence (opt2) from hemagglutinin__InfluenzaA__ADP95371

SEQ ID NO: 102237 - RNA, 1701 nt, Artificial Sequence; identical to SEQ ID NO: 98692
  derived and/or modified CDS sequence (opt2) from hemagglutinin__InfluenzaA__ADP95381

SEQ ID NO: 102238 - RNA, 1701 nt, Artificial Sequence; identical to SEQ ID NO: 98692
  derived and/or modified CDS sequence (opt2) from hemagglutinin__InfluenzaA__ADP95391

SEQ ID NO: 102239 - RNA, 1701 nt, Artificial Sequence; identical to SEQ ID NO: 98947
  derived and/or modified CDS sequence (opt2) from hemagglutinin__InfluenzaA__ADQ28007

SEQ ID NO: 102240 - RNA, 1701 nt, Artificial Sequence; identical to SEQ ID NO: 98705
  derived and/or modified CDS sequence (opt2) from hemagglutinin__InfluenzaA__ADQ28008

SEQ ID NO: 102241 - RNA, 1701 nt, Artificial Sequence; identical to SEQ ID NO: 100556
  derived and/or modified CDS sequence (opt2) from hemagglutinin__InfluenzaA__ADQ28009

SEQ ID NO: 102242 - RNA, 1701 nt, Artificial Sequence
  derived and/or modified CDS sequence (opt2) from hemagglutinin__InfluenzaA__ADQ28010
augaaggccauccucgucguccuccucuacaccuucgccaccgccaacgccgacacccucugcaucggcuaccacgccaacaacuccaccgacaccgucgacaccguccucgagaagaacgucaccgucacccacuccgucaaccuccucgaggacaagcacaacggcaagcucugcaagcuccgcggcgucgccccccuccaccucggcaagugcaacaucgccggcuggauccucggcaaccccgagugcgagucccucuccaccgccuccuccugguccuacaucgucgagaccuccuccuccgacaacggcaccugcuaccccggcgacuucaucaacuacgaggagcuccgcgagcagcucuccuccgucuccuccuucgagcgcuucgagaucuuccccaagaccuccuccuggcccaaccacgacuccaacaagggcgucaccgccgccugcccccacgccggcgccaaguccuucuacaagucccucaucuggcucgucaagaagggcaacuccuaccccaagcucuccaaguccuacaucaacgacaagggcaaggagguccucguccucuggggcauccaccaccccuccaccuccgccgaccagcagucccucuaccagaacgccgacgccuacgucuucgucggcaccucccgcuacuccaagaaguucaagcccgagaucgccauccgccccaagguccgcgaccaggagggccgcaugaacuacuacuggacccucgucgagcccggcgacaagaucaccuucgaggccaccggcaaccucgucgucccccgcuacgccuucgccauggagcgcaacgccggcuccggcaucaucaucuccgacacccccguccacgacugcaacaccaccugccagacccccaagggcgccaucaacaccucccuccccuuccagaacauccaccccaucaccaucggcaagugccccaaguacgucaaguccaccaagcuccgccucgccaccggccuccgcaacguccccuccauccagucccgcggccucuucggcgccaucgccggcuucaucgagggcggcuggaccggcauggucgacggcugguacggcuaccaccaccagaacgagcagggcuccggcuacgccgccgaccucaaguccacccagaacgccaucgacgagaucaccaacaaggucaacuccgucaucgagaagaugaacacccaguucaccgccgucggcaaggaguucaaccaccucgagaagcgcaucgagaaccucaacaagaaggucgacgacggcuuccucgacaucuggaccuacaacgccgagcuccucguccuccucgagaacgagcgcacccucgacuaccacgacuccaacgucaagaaccucuacgagaagguccgcucccagcucaagaacaacgccaaggagaucggcaacggcugcuucgaguucuaccacaagugcgacaacaccugcauggaguccgucaagaacggcaccuacgacuaccccaaguacuccgaggaggccaagcucaaccgcgaggagaucgacggcgucaagcucgaguccacccgcaucuaccagauccucgccaucuacuccaccgucgccuccucccucguccucgucgucucccucggcgccaucuccuucuggaugugcuccaacggcucccuccagugccgcaucugcaucuga

SEQ ID NO: 102243 - RNA, 1701 nt, Artificial Sequence; identical to SEQ ID NO: 98705
  derived and/or modified CDS sequence (opt2) from hemagglutinin__InfluenzaA__ADQ28011

SEQ ID NO: 102244 - RNA, 1701 nt, Artificial Sequence; identical to SEQ ID NO: 98705
  derived and/or modified CDS sequence (opt2) from hemagglutinin__InfluenzaA__ADQ28012

SEQ ID NO: 102245 - RNA, 1701 nt, Artificial Sequence; identical to SEQ ID NO: 98705
  derived and/or modified CDS sequence (opt2) from hemagglutinin__InfluenzaA__ADQ28013

SEQ ID NO: 102246 - RNA, 1701 nt, Artificial Sequence; identical to SEQ ID NO: 98947
  derived and/or modified CDS sequence (opt2) from hemagglutinin__InfluenzaA__ADQ28014

SEQ ID NO: 102247 - RNA, 1701 nt, Artificial Sequence; identical to SEQ ID NO: 98947
  derived and/or modified CDS sequence (opt2) from hemagglutinin__InfluenzaA__ADQ28015

SEQ ID NO: 102248 - RNA, 1701 nt, Artificial Sequence; identical to SEQ ID NO: 98705
  derived and/or modified CDS sequence (opt2) from hemagglutinin__InfluenzaA__ADQ28016

SEQ ID NO: 102249 - RNA, 1701 nt, Artificial Sequence; identical to SEQ ID NO: 98705
  derived and/or modified CDS sequence (opt2) from hemagglutinin__InfluenzaA__ADQ28017

SEQ ID NO: 102250 - RNA, 1701 nt, Artificial Sequence; identical to SEQ ID NO: 100951
  derived and/or modified CDS sequence (opt2) from hemagglutinin__InfluenzaA__ADQ28018

SEQ ID NO: 102251 - RNA, 1701 nt, Artificial Sequence; identical to SEQ ID NO: 98947
  derived and/or modified CDS sequence (opt2) from hemagglutinin__InfluenzaA__ADQ28019

SEQ ID NO: 102252 - RNA, 1701 nt, Artificial Sequence
  derived and/or modified CDS sequence (opt2) from hemagglutinin__InfluenzaA__ADQ28020
auggaggccauccucgucguccuccucuacaccuucgccaccgccaacgccgacacccucugcaucggcuaccacgccaacaacuccaccgacaccgucgacaccguccucgagaagaacgucaccgucacccacuccgucaaccuccucgaggacaagcacaacggcaagcucugcaagcuccgcggcgucgccccccuccaccucggcaagugcaacaucgccggcuggauccucggcaaccccgagugcgagucccucuccaccgccuccuccugguccuacaucgucgagaccuccuccuccgacaacggcaccugcuaccccggcgacuucaucgacuacgaggagcuccgcgagcagcucuccuccgucuccuccuucgagcgcuucgagaucuuccccaagaccuccuccuggcccaaccacgacuccaacaagggcgucaccgccgccugcccccaggccggcgccaaguccuucuacaagaaccucaucuggcucgucaagaagggcaacuccuaccccaagcucuccaaguccuacaucaacgacaagggcaaggagguccucguccucuggggcauccaccaccccuccaccuccgccgaccagcagucccucuaccagaacgccgacgccuacgucuucgucggcuccucccgcuacuccaagaaguucaagcccgagaucgccauccgccccaagguccgcgaccaggagggccgcaugaacuacuacuggacccucgucgagcccggcgacaagaucaccuucgaggccaccggcaaccucgucgucccccgcuacgccuucgccauggagcgcaacgccggcuccggcaucaucaucuccgacacccccguccacgacugcaacaccaccugccagacccccaagggcgccaucaacaccucccuccccuuccacaacauccaccccaucaccaucggcaagugccccaaguacgucaaguccaccaagcuccgccucgccaccggccuccgcaacguccccuccauccagucccgcggccucuucggcgccaucgccggcuucaucgagggcggcuggaccggcauggucgacggcugguacggcuaccaccaccagaacgagcagggcuccggcuacgccgccgaccucaaguccacccagaacgccaucgacgagaucaccaacaaggucaacuccgucaucgagaagaugaacacccaguucaccgccgucggcaaggaguucaaccaccucgagaagcgcaucgagaaccucaacaagaaggucgacgacggcuuccucgacaucuggaccuacaacgccgagcuccucguccuccucgagaacgagcgcacccucgacuaccacgacuccaacgucaagaaccucuacgagaagguccgcucccagcucaagaacaacgccaaggagaucggcaacggcugcuucgaguucuaccacaagugcgacaacaccugcauggaguccgucaagaacggcaccuacgacuaccccaaguacuccgaggaggccaagcucaaccgcgaggagaucgacggcgucaagcucgaguccacccgcaucuaccagauccucgccaucuacuccaccgucgccuccucccucguccucgucgucucccucggcgccaucuccuucuggaugugcuccaacggcucccuccagugccgcaucugcaucuga

SEQ ID NO: 102253 - RNA, 1701 nt, Artificial Sequence; identical to SEQ ID NO: 99899
  derived and/or modified CDS sequence (opt2) from hemagglutinin__InfluenzaA__ADQ28021

SEQ ID NO: 102254 - RNA, 1701 nt, Artificial Sequence
  derived and/or modified CDS sequence (opt2) from hemagglutinin__InfluenzaA__ADQ28022
augaaggccauccucgucguccuccucuacaccuucgccaccgccaacgccgacacccucugcaucggcuaccacgccaacaacuccaccgacaccgucgacaccguccucgagaagaacgucaccgucacccacuccgucaaccuccucgaggacaagcacaacggcaagcucugcaagcuccgcggcgucgccccccuccaccucggcaagugcaacaucgccggcuggauccucggcaaccccgagugcgagucccucuccaccgccuccuccugguccuacaucgucgagaccuccuccuccgacaacggcaccugcuaccccggcaacuucaucgacuacgaggagcuccgcgagcagcucuccuccgucuccuccuucgagcgcuucgagaucuuccccaagaccuccuccuggcccaaccacgacuccaacaagggcgucaccgccgccugcccccacgccggcgccaaguccuucuacaagaaccucaucuggcucgucaagaagggcaacuccuaccccaagcucuccaaguccuacaucaacgacaagggcaaggagguccucguccucuggggcauccaccaccccuccaccuccgccgaccagcagucccucuaccagaacgccgacgccuacgucuucgucggcaccucccgcuacuccaagaaguucaagcccgagaucgccauccgccccaagguccgcggccaggagggccgcaugaacuacuacuggacccucgucgagcccggcgacaagaucaccuucgaggccaccggcaaccucgucgucccccgcuacgccuucgccauggagcgcaacgccggcuccggcaucaucaucuccgacacccccguccacgacugcaacaccaccugccagacccccaagggcgccaucaacaccucccuccccuuccagaacauccaccccaucaccaucggcaagugccccaaguacgucaaguccaccaagcuccgccucgccaccggccuccgcaacguccccuccauccagucccgcggccucuucggcgccaucgccggcuucaucgagggcggcuggaccggcauggucgacggcugguacggcuaccaccaccagaacgagcagggcuccggcuacgccgccgaccucaaguccacccagaacgccaucgacgagaucaccaacaaggucaacuccgucaucgagaagaugaacacccaguucaccgccgucggcaaggaguucaaccaccucgagaagcgcaucgagaaccucaacaagaaggucgacgacggcuuccucgacaucuggaccuacaacgccgagcuccucguccuccucgagaacgagcgcacccucgacuaccacgacuccaacgucaagaaccucuacgagaagguccgcucccagcucaagaacaacgccaaggagaucggcaacggcugcuucgaguucuaccacaagugcgacaacaccugcauggaguccgucaagaacggcaccuacgacuaccccaaguacuccgaggaggccaagcucaaccgcgaggagaucgacggcgucaagcucgaguccacccgcaucuaccagauccucgccaucuacuccaccgucgccuccucccucguccucgucgucucccucggcgccaucuccuucuggaugugcuccaacggcucccuccagugccgcaucugcaucuga

SEQ ID NO: 102255 - RNA, 1701 nt, Artificial Sequence; identical to SEQ ID NO: 98705
  derived and/or modified CDS sequence (opt2) from hemagglutinin__InfluenzaA__ADQ28023

SEQ ID NO: 102256 - RNA, 1701 nt, Artificial Sequence; identical to SEQ ID NO: 98947
  derived and/or modified CDS sequence (opt2) from hemagglutinin__InfluenzaA__ADQ28024

SEQ ID NO: 102257 - RNA, 1701 nt, Artificial Sequence; identical to SEQ ID NO: 98947
  derived and/or modified CDS sequence (opt2) from hemagglutinin__InfluenzaA__ADQ28025

SEQ ID NO: 102258 - RNA, 1701 nt, Artificial Sequence; identical to SEQ ID NO: 99450
  derived and/or modified CDS sequence (opt2) from hemagglutinin__InfluenzaA__ADQ28028

SEQ ID NO: 102259 - RNA, 1701 nt, Artificial Sequence; identical to SEQ ID NO: 100930
  derived and/or modified CDS sequence (opt2) from hemagglutinin__InfluenzaA__ADQ28029

SEQ ID NO: 102260 - RNA, 1701 nt, Artificial Sequence
  derived and/or modified CDS sequence (opt2) from hemagglutinin__InfluenzaA__ADQ28030
augaaggccauccucgucguccuccucuacaccuucgccaccgccaacgccgacacccucugcaucggcuaccacgccaacaacuccaccgacaccgucgacaccguccucgagaagaacgucaccgucacccacuccgucaaccuccucgaggacaagcacaacggcaagcucugcaagcuccgcggcgucgccccccuccaccucggcaagugcaacaucgccggcuggauccucggcaaccccgagugcgagucccucuccaccgccuccuccugguccuacaucgucgagaccuccuccuccgacaacggcaccugcuaccccggcgacuucaucaacuacgaggagcuccgcgagcagcucuccuccgucuccuccuucgagcgcuucgagaucuuccccaagaccuccuccuggcccaaccacgacuccaacaagggcaucaccgccgccugcccccacgccggcgccaaguccuucuacaagaaccucaucuggcucgucaagaagggcaacuccuaccccaagcucuccaaguccuacaucaacgacaagggcaaggagguccucguccucuggggcauccaccaccccuccaccuccgccgaccagcagucccucuaccagaacgccgacgccuacgucuucgucggcaccucccgcuacuccaagaaguucaagcccgagaucgccauccgccccaagguccgcgaccaggagggccgcaugaacuacuacuggacccucgucgagcccggcgacaagaucaccuucgaggccaccggcaaccucgucgucccccgcuacgccuucgccauggagcgcaacgccggcuccggcaucaucaucuccgacacccccguccacgacugcaacaccaccugccagacccccaagggcgccaucaacaccucccuccccuuccagaacauccaccccaucaccaucggcaagugccccaaguacgucaaguccaccaagcuccgccucgccaccggccuccgcaacguccccuccauccagucccgcggccucuucggcgccaucgccggcuucaucgagggcggcuggaccggcauggucgacggcugguacggcuaccaccaccagaacgagcagggcuccggcuacgccgccgaccucaaguccacccagaacgccaucgacgagaucaccaacaaggucaacuccgucaucgagaagaugaacacccaguucaccgccgucggcaaggaguucaaccaccucgagaagcgcaucgagaaccucaacaagaaggucgacgacggcuuccucgacaucuggaccuacaacgccgagcuccucguccuccucgagaacgagcgcacccucgacuaccacgacuccaacgucaagaaccucuacgagaagguccgcucccagcucaagaacaacgccaaggagaucggcaacggcugcuucgaguucuaccacaagugcgacaacaccugcauggaguccgucaagaacggcaccuacgacuaccccaaguacuccgaggaggccaagcucaaccgcgaggagaucgacggcgucaagcucgaguccacccgcaucuaccagauccucgccaucuacuccaccgucgccuccucccucguccucgucgucucccucggcgccaucuccuucuggaugugcuccaacggcucccuccagugccgcaucugcaucuga

SEQ ID NO: 102261 - RNA, 1701 nt, Artificial Sequence; identical to SEQ ID NO: 99899
  derived and/or modified CDS sequence (opt2) from hemagglutinin__InfluenzaA__ADQ28031

SEQ ID NO: 102262 - RNA, 1701 nt, Artificial Sequence; identical to SEQ ID NO: 98947
  derived and/or modified CDS sequence (opt2) from hemagglutinin__InfluenzaA__ADQ28032

SEQ ID NO: 102263 - RNA, 1701 nt, Artificial Sequence
  derived and/or modified CDS sequence (opt2) from hemagglutinin__InfluenzaA__ADQ28034
augaaggccauccucgucguccuccucuacaccuucgccaccgccaacgccgacacccucugcaucggcuaccacgccaacaacuccaccgacaccgucgacaccguccucgagaagaacgucaccgucacccacuccgucaaccuccucgaggacaagcacaacggcaagcucugcaagcuccgcggcgucgccccccuccaccucggcaagugcaacaucgccggcuggauccucggcaaccccgagugcgagucccucuccaccgccuccuccugguccuacaucgucgagaccuccuccuccgacaacggcaccugcuaccccggcgacuucaucaacuacgaggagcuccgcgagcagcucuccuccgucuccuccuucgagcgcuucgagaucuuccccaagaccuccuccuggcccaaccacgacuccaacaagggcgucaccgccgccugcccccacgccggcgccaaguccuucuacaagaaccucaucuggcucgucaagaagggcaacuccuaccccaagcucuccaaguccuacaucaacgacaagggcaaggagguccucguccucuggggcauccaccaccccuccaccuccgccgaccagcagucccucuaccagaacgccgacgccuacgucuucgucggcaccucccgcuacuccaagaaguucaagcccgagaucgccauccgccccaagguccgcggccaggagggccgcaugaacuacuacuggaccaucgucgagcccggcgacaagaucaccuucgaggccaccggcaaccucgucgucccccgcuacgccuucgccauggagcgcaacgccggcuccggcaucaucaucuccgacacccccguccacgacugcaacaccaccugccagacccccaagggcgccaucaacaccucccuccccuuccagaacauccaccccaucaccaucggcaagugccccaaguacgucaaguccaccaagcuccgccucgccaccggccuccgcaacguccccuccauccagucccgcggccucuucggcgccaucgccggcuucaucgagggcggcuggaccggcauggucgacggcugguacggcuaccaccaccagaacgagcagggcuccggcuacgccgccgaccucaaguccacccagaacgccaucgacgagaucaccaacaaggucaacuccgucaucgagaagaugaacacccaguucaccgccgucggcaaggaguucaaccaccucgagaagcgcaucgagaaccucaaccgcaaggucgacgacggcuuccucgacaucuggaccuacaacgccgagcuccucguccuccucgagaacgagcgcacccucgacuaccacgacuccaacgucaagaaccucuacgagaagguccgcucccagcucaagaacaacgccaaggagaucggcaacggcugcuucgaguucuaccacaagugcgacaacaccugcauggaguccgucaagaacggcaccuacgacuaccccaaguacuccgaggaggccaagcucaaccgcgaggagaucgacggcgucaagcucgaguccacccgcaucuaccagauccucgccaucuacuccaccgucgccuccucccucguccucgucgucucccucggcgccaucuccuucuggaugugcuccaacggcucccuccagugccgcaucugcaucuga

SEQ ID NO: 102264 - RNA, 1701 nt, Artificial Sequence
  derived and/or modified CDS sequence (opt2) from hemagglutinin__InfluenzaA__ADQ28035
augaaggccauccucgucguccuccucuacaccuucgccaccgccaacgccgacacccucugcaucggcuaccacgccaacaacuccaccgacaccgucgacaccguccucgagaagaacgucaccgucacccacuccgucaaccuccucgaggacaagcacaacggcaagcucugccgccuccgcggcgucgccccccuccaccucggcaagugcaacaucgccggcuggauccucggcaaccccgagugcgagucccucuccaccgccuccuccugguccuacaucgucgagaccuccuccuccgacaacggcaccugcuaccccggcgacuucaucgacuacgaggagcuccgcgagcagcucuccuccgucuccuccuucgagcgcuucgagaucuuccccaagaccuccuccuggcccaaccacgacuccaacaagggcgucaccgccgccugcccccacgccggcgccaaguccuucuacaagaaccucaucuggcucgucaagaagggcaacuccuaccccaagcucuccaaguccuacaucaacgacaagggcaaggagguccucguccucuggggcauccaccaccccuccaccuccgccgaccagcagucccucuaccagaacgccgacgccuacgucuucgucggcaccucccgcuacuccaagaaguucaagcccgagaucgccauccgccccaagguccgcggccaggagggccgcaugaacuacuacuggacccucgucgagcccggcgacaagaucaccuucgaggccaccggcaaccucgucgucccccgcuacgccuucgccauggagcgcaacgccggcuccggcaucaucaucuccgacacccccguccacgacugcaacaccaccugccagacccccaagggcgccaucaacaccucccuccccuuccagaacauccaccccaucaccaucggcaagugccccaaguacgucaaguccaccaagcuccgccucgccaccggccuccgcaacguccccuccauccagucccgcggccucuucggcgccaucgccggcuucaucgagggcggcuggaccggcauggucgacggcugguacggcuaccaccaccagaacgagcagggcuccggcuacgccgccgaccucaaguccacccagaacgccaucgacgagaucaccaacaaggucaacuccgucaucgagaagaugaacacccaguucaccgccgucggcaaggaguucaaccaccucgagaagcgcaucgagaaccucaacaagaaggucgacgacggcuuccucgacaucuggaccuacaacgccgagcuccucguccuccucgagaacgagcgcacccucgacuaccacgacuccaacgucaagaaccucuacgagaagguccgcucccagcucaagaacaacgccaaggagaucggcaacggcugcuucgaguucuaccacaagugcgacaacaccugcauggaguccgucaagaacggcaccuacgacuaccccaaguacuccgaggaggccaagcucaaccgcgaggagaucgacggcgucaagcucgaguccacccgcaucuaccagauccucgccaucuacuccaccgucgccuccucccucguccucgucgucucccucggcgccaucuccuucuggaugugcuccaacggcucccuccagugccgcaucugcaucuga

SEQ ID NO: 102265 - RNA, 1701 nt, Artificial Sequence; identical to SEQ ID NO: 98705
  derived and/or modified CDS sequence (opt2) from hemagglutinin__InfluenzaA__ADQ28036

SEQ ID NO: 102266 - RNA, 1701 nt, Artificial Sequence; identical to SEQ ID NO: 98705
  derived and/or modified CDS sequence (opt2) from hemagglutinin__InfluenzaA__ADQ28037

SEQ ID NO: 102267 - RNA, 1701 nt, Artificial Sequence; identical to SEQ ID NO: 98947
  derived and/or modified CDS sequence (opt2) from hemagglutinin__InfluenzaA__ADQ28038

SEQ ID NO: 102268 - RNA, 1701 nt, Artificial Sequence; identical to SEQ ID NO: 98705
  derived and/or modified CDS sequence (opt2) from hemagglutinin__InfluenzaA__ADQ28039

SEQ ID NO: 102269 - RNA, 1701 nt, Artificial Sequence; identical to SEQ ID NO: 98947
  derived and/or modified CDS sequence (opt2) from hemagglutinin__InfluenzaA__ADQ28040

SEQ ID NO: 102270 - RNA, 1701 nt, Artificial Sequence; identical to SEQ ID NO: 98947
  derived and/or modified CDS sequence (opt2) from hemagglutinin__InfluenzaA__ADQ28041

SEQ ID NO: 102271 - RNA, 1701 nt, Artificial Sequence
  derived and/or modified CDS sequence (opt2) from hemagglutinin__InfluenzaA__ADQ28043
auggaggccauccucgucguccuccucuacaccuucgccaccgccaacgccgacacccucugcaucggcuaccacgccaacaacuccaccgacaccgucgacaccguccucgagaagaacgucaccgucacccacuccgucaaccuccucgaggacaagcacaacggcaagcucugcaagcuccgcggcgucgccccccuccaccucggcaagugcaacaucgccggcuggauccucggcaaccccgagugcgagucccucuccaccgccuccuccugguccuacaucgucgagaccuccuccuccgacaacggcaccugcuaccccggcgacuucaucgacuacgaggagcuccgcgagcagcucuccuccgucuccuccuucgagcgcuucgagaucuuccccaagaccuccuccuggcccaaccacgacuccaacaagggcgucaccgccgccugcccccacgacggcgccaaguccuucuacaagaaccucaucuggcucgucaagaagggcaacuccuaccccaagcucuccaaguccuacaucaacgacaagggcaaggagguccucguccucuggggcauccaccaccccuccaccuccgccgaccagcagucccucuaccagaacgccgacgccuacgucuucgucggcuccucccgcuacuccaagaaguucaagcccgagaucgccauccgccccaagguccgcgaccaggagggccgcaugaacuacuacuggacccucgucgagcccggcgacaagaucaccuucgaggccaccggcaaccucgucgucccccgcuacgccuucgccauggagcgcaacgccggcuccggcaucaucaucuccgacacccccguccacgacugcaacaccaccugccagacccccaagggcgccaucaacaccucccuccccuuccacaacauccaccccaucaccaucggcaagugccccaaguacgucaaguccaccaagcuccgccucgccaccggccuccgcaacguccccuccauccagucccgcggccucuucggcgccaucgccggcuucaucgagggcggcuggaccggcauggucgacggcugguacggcuaccaccaccagaacgagcagggcuccggcuacgccgccgaccucaaguccacccagaacgccaucgacgagaucaccaacaaggucaacuccgucaucgagaagaugaacacccaguucaccgccgucggcaaggaguucaaccaccucgagaagcgcaucgagaaccucaacaagaaggucgacgacggcuuccucgacaucuggaccuacaacgccgagcuccucguccuccucgagaacgagcgcacccucgacuaccacgacuccaacgucaagaaccucuacgagaagguccgcucccagcucaagaacaacgccaaggagaucggcaacggcugcuucgaguucuaccacaagugcgacaacaccugcauggaguccgucaagaacggcaccuacgacuaccccaaguacuccgaggaggccaagcucaaccgcgaggagaucgacggcgucaagcucgaguccacccgcaucuaccagauccucgccaucuacuccaccgucgccuccucccucguccucgucgucucccucggcgccaucuccuucuggaugugcuccaacggcucccuccagugccgcaucugcaucuga

SEQ ID NO: 102272 - RNA, 1701 nt, Artificial Sequence; identical to SEQ ID NO: 98947
  derived and/or modified CDS sequence (opt2) from hemagglutinin__InfluenzaA__ADQ28044

SEQ ID NO: 102273 - RNA, 1701 nt, Artificial Sequence
  derived and/or modified CDS sequence (opt2) from hemagglutinin__InfluenzaA__ADQ28045
augaaggccauccucgucguccuccucuacaccuucgccaccgccaacgccgacacccucugcaucggcuaccacgccaacaacuccaccgacaccgucgacaccguccucgagaagaacgucaccgucacccacuccgucaaccuccucgaggacaagcacaacggcaagcucugcaagcuccgcggcgucgccccccuccaccucggcaagugcaacaucgccggcuggauccucggcaaccccgagugcgagucccucuccaccgccuccuccugguccuacaucgucgagaccuccuccuccgacaacggcaccugcuaccccggcgacuucaucgacuacgaggagcuccgcgagcagcucuccuccgucuccuccuucgagcgcuucgagaucuuccccaagaccuccuccuggcccaaccacgacuccaacaagggcgucaccgccgccugcucccacgccggcgccaaguccuucuacaagaaccucaucuggcucgucaagaagggcaacuccuaccccaagcucuccaaguccuacaucaacgacaagggcaaggagguccucguccucuggggcauccaccaccccuccaccuccgccgaccagcagucccucuaccagaacgccgacgccuacgucuucgucggcaccucccgcuacuccaagaaguucaagcccgagaucgccauccgccccaagguccgcgaccaggagggccgcaugaacuacuacuggacccucgucgagcccggcgacaagaucaccuucgaggccaccggcaaccucgucgucccccgcuacgccuucgccauggagcgcaacgccggcuccggcaucaucaucuccgacacccccguccacgacugcaacaccaccugccagacccccaagggcgccaucaacaccucccuccccuuccagaacauccaccccaucaccaucggcaagugccccaaguacgucaaguccaccaagcuccgccucgccaccggccuccgcaacguccccuccauccagucccgcggccucuucggcgccaucgccggcuucaucgagggcggcuggaccggcauggucgacggcugguacggcuaccaccaccagaacgagcagggcuccggcuacgccgccgaccucaaguccacccagaacgccaucgacgagaucaccaacaaggucaacuccgucaucgagaagaugaacacccaguucaccgccgucggcaaggaguucaaccaccucgagaagcgcaucgagaaccucaacaagaaggucgacgacggcuuccucgacaucuggaccuacaacgccgagcuccucguccuccucgagaacgagcgcacccucgacuaccacgacuccaacgucaagaaccucuacgagaagguccgcaaccagcucaagaacaacgccaaggagaucggcaacggcugcuucgaguucuaccacaagugcgacaacaccugcauggaguccgucaagaacggcaccuacgacuaccccaaguacuccgaggaggccaagcucaaccgcgaggagaucgacggcgucaagcucgaguccacccgcaucuaccagauccucgccaucuacuccaccgucgccuccucccucguccucgucgucucccucggcgccaucuccuucuggaugugcuccaacggcucccuccagugccgcaucugcaucuga

SEQ ID NO: 102274 - RNA, 1701 nt, Artificial Sequence; identical to SEQ ID NO: 99175
  derived and/or modified CDS sequence (opt2) from hemagglutinin__InfluenzaA__ADQ28047

SEQ ID NO: 102275 - RNA, 1701 nt, Artificial Sequence; identical to SEQ ID NO: 98705
  derived and/or modified CDS sequence (opt2) from hemagglutinin__InfluenzaA__ADQ28048

SEQ ID NO: 102276 - RNA, 1701 nt, Artificial Sequence; identical to SEQ ID NO: 98947
  derived and/or modified CDS sequence (opt2) from hemagglutinin__InfluenzaA__ADQ28049

SEQ ID NO: 102277 - RNA, 1701 nt, Artificial Sequence; identical to SEQ ID NO: 98705
  derived and/or modified CDS sequence (opt2) from hemagglutinin__InfluenzaA__ADQ28050

SEQ ID NO: 102278 - RNA, 1701 nt, Artificial Sequence
  derived and/or modified CDS sequence (opt2) from hemagglutinin__InfluenzaA__ADQ28051
augaaggccauccucgucguccuccucuacaccuucgccaccgccaacgccgacacccucugcaucggcuaccacgccaacaacuccaccgacaccgucgacaccguccucgagaagaacgucaccgucacccacuccgucaaccuccucgaggacaagcacgacggcaagcucugcaagcuccgcggcgucgccccccuccaccucggcaagugcaacaucgccggcuggauccucggcaaccccgagugcgagucccucuccaccgccuccuccugguccuacaucgucgagaccuccuccuccgacaacggcaccugcuaccccggcgacuucaucaacuacgaggagcuccgcgagcagcucuccuccgucuccuccuucgagcgcuucgagaucuuccccaagaccuccuccuggcccaaccacgacuccaacaagggcgucaccgccgccugcccccacgccggcgccaaguccuucuacaagaaccucaucuggcucgucaagaagggcaacuccuaccccaagcucuccaaguccuacaucaacgacaagggcaaggagguccucguccucuggggcauccaccaccccuccaccuccgccgaccagcagucccucuaccagaacgccgacgccuacgucuucgucggcaccucccgcuacuccaagaaguucaagcccgagaucgccauccgccccaagguccgcgaccaggagggccgcaugaacuacuacuggacccucgucgagcccggcgacaagaucaccuucgaggccaccggcaaccucgucgucccccgcuacgccuucgccauggagcgcaacgccggcuccggcaucaucaucuccgacacccccguccacgacugcaacaccaccugccagacccccaagggcgccaucaacaccucccuccccuuccagaacauccaccccaucaccaucggcaagugccccaaguacgucaaguccaccaagcuccgccucgccaccggccuccgcaacguccccuccauccagucccgcggccucuucggcgccaucgccggcuucaucgagggcggcuggaccggcauggucgacggcugguacggcuaccaccaccagaacgagcagggcuccggcuacgccgccgaccucaaguccacccagaacgccaucgacgagaucaccaacaaggucaacuccgucaucgagaagaugaacacccaguucaccgccgucggcaaggaguucaaccaccucgagaagcgcaucgagaaccucaacaagaaggucgacgacggcuuccucgacaucuggaccuacaacgccgagcuccucguccuccucgagaacgagcgcacccucgacuaccacgacuccaacgucaagaaccucuacgagaagguccgcucccagcucaagaacaacgccaaggagaucggcaacggcugcuucgaguucuaccacaagugcgacaacaccugcauggaguccgucaagaacggcaccuacgacuaccccaaguacuccgaggaggccaagcucaaccgcgaggagaucgacggcgucaagcucgaguccacccgcaucuaccagauccucgccaucuacuccaccgucgccuccucccucguccucgucgucucccucggcgccaucuccuucuggaugugcuccaacggcucccuccagugccgcaucugcaucuga

SEQ ID NO: 102279 - RNA, 1701 nt, Artificial Sequence; identical to SEQ ID NO: 98705
  derived and/or modified CDS sequence (opt2) from hemagglutinin__InfluenzaA__ADQ28053

SEQ ID NO: 102280 - RNA, 1701 nt, Artificial Sequence; identical to SEQ ID NO: 98947
  derived and/or modified CDS sequence (opt2) from hemagglutinin__InfluenzaA__ADQ28055

SEQ ID NO: 102281 - RNA, 1701 nt, Artificial Sequence
  derived and/or modified CDS sequence (opt2) from hemagglutinin__InfluenzaA__ADQ28056
auggaggccauccucgucguccuccucuacaccuucgccaccgccgacgccgacacccucugcaucggcuaccacgccaacaacuccaccgacaccgucgacaccguccucgagaagaacgucaccgucacccacuccgucaaccuccucgaggacaagcacaacggcaagcucugcaagcuccgcggcgucgccccccuccaccucggcaagugcaacaucgccggcuggauccucggcaaccccgagugcgagucccucuccaccgccuccuccugguccuacaucgucgagaccuccuccuccgacaacggcaccugcuaccccggcgacuucaucgacuacgaggagcuccgcgagcagcucuccuccgucuccuccuucgagcgcuucgagaucuuccccaagaccuccuccuggcccaaccacgacuccaacaagggcgucaccgccgccugcccccacgccggcgccaaguccuucuacaagaaccucaucuggcucgucaagaagggcaacuccuaccccaagcucuccaaguccuacaucaacgacaagggcaaggagguccucguccucuggggcauccaccaccccuccaccuccgccgaccagcagucccucuaccagaacgccgacgccuacgucuucgucggcuccucccgcuacuccaagaaguucaagcccgagaucgccauccgccccaagguccgcgaccaggagggccgcaugaacuacuacuggacccucgucgagcccggcgacaagaucaccuucgaggccaccggcaaccucgucgucccccgcuacgccuucgccauggagcgcaacgccggcuccggcaucaucaucuccgacacccccguccacgacugcaacaccaccugccagacccccaagggcgccaucaacaccucccuccccuuccacaacauccaccccaucaccaucggcaagugccccaaguacgucaaguccaccaagcuccgccucgccaccggccuccgcaacguccccuccauccagucccgcggccucuucggcgccaucgccggcuucaucgagggcggcuggaccggcauggucgacggcugguacggcuaccaccaccagaacgagcagggcuccggcuacgccgccgaccucaaguccacccagaacgccaucgacgagaucaccaacaaggucaacuccgucaucgagaagaugaacacccaguucaccgccgucggcaaggaguucaaccaccucgagaagcgcaucgagaaccucaacaagaaggucgacgacggcuuccucgacaucuggaccuacaacgccgagcuccucguccuccucgagaacgagcgcacccucgacuaccacgacuccaacgucaagaaccucuacgagaagguccgcucccagcucaagaacaacgccaaggagaucggcaacggcugcuucgaguucuaccacaagugcgacaacaccugcauggaguccgucaagaacggcaccuacgacuaccccaaguacuccgaggaggccaagcucaaccgcgaggagaucgacggcgucaagcucgaguccacccgcaucuaccagauccucgccaucuacuccaccgucgccuccucccucguccucgucgucucccucggcgccaucuccuucuggaugugcuccaacggcucccuccagugccgcaucugcaucuga

SEQ ID NO: 102282 - RNA, 1701 nt, Artificial Sequence; identical to SEQ ID NO: 98705
  derived and/or modified CDS sequence (opt2) from hemagglutinin__InfluenzaA__ADQ28057

SEQ ID NO: 102283 - RNA, 1701 nt, Artificial Sequence; identical to SEQ ID NO: 98705
  derived and/or modified CDS sequence (opt2) from hemagglutinin__InfluenzaA__ADQ28058

SEQ ID NO: 102284 - RNA, 1701 nt, Artificial Sequence
  derived and/or modified CDS sequence (opt2) from hemagglutinin__InfluenzaA__ADQ28059
augaaggccauccucgucguccuccucuacacccucgccaccgccaacgccgacacccucugcaucggcuaccacgccaacaacuccaccgacaccgucgacaccguccucgagaagaacgucaccgucacccacuccgucaaccuccucgaggacaagcacaacggcaagcucugcaagcuccgcggcgucgccccccuccaccucggcaagugcaacaucgccggcuggauccucggcaaccccgagugcgagucccucuccaccgccuccuccugguccuacaucgucgagaccuccuccuccgacaacggcaccugcuaccccggcgacuucaucgacuacgaggagcuccgcgagcagcucuccuccgucuccuccuucgagcgcuucgagaucuuccccaagaccuccuccuggcccaaccacgacuccaacaagggcgucaccgccgccugcccccacgccggcgccaaguccuucuacaagaaccucaucuggcucgucaagaagggcaacuccuaccccaagcucuccaaguccuacaucaacgacaagggcaaggagguccucguccucuggggcauccaccaccccuccaccuccgccgaccagcagucccucuaccagaacgccgacgccuacgucuucgucggcaccuccaaguacuccaagaaguucaagcccgagaucgccauccgccccaagguccgcgaccaggagggccgcaugaacuacuacuggacccucgucgagcccggcgacaagaucaccuucgaggccaccggcaaccucgucgucccccgcuacgccuucgccauggagcgcaacgccggcuccggcaucaucaucuccgacacccccguccacgacugcaacaccaccugccagacccccaagggcgccaucaacaccucccuccccuuccagaacauccaccccaucaccaucggcaagugccccaaguacgucaaguccaccaagcuccgccucgccaccggccuccgcaacguccccuccauccagucccgcggccucuucggcgccaucgccggcuucaucgagggcggcuggaccggcauggucgacggcugguacggcuaccaccaccagaacgagcagggcuccggcuacgccgccgaccucaaguccacccagaacgccaucgacgagaucaccaacaaggucaacuccgucaucgagaagaugaacacccaguucaccgccgucggcaaggaguucaaccaccucgagaagcgcaucgagaaccucaacaagaaggucgacgacggcuuccucgacaucuggaccuacaacgccgagcuccucguccuccucgagaacgagcgcacccucgacuaccacgacuccaacgucaagaaccucuacgagaagguccgcucccagcucaagaacaacgccaaggagaucggcaacggcugcuucgaguucuaccacaagugcgacaacaccugcauggaguccgucaagaacggcaccuacgacuaccccaaguacuccgaggaggccaagcucaaccgcgaggagaucgacggcgucaagcucgaguccacccgcaucuaccagauccucgccaucuacuccaccgucgccuccucccucguccucgucgucucccucggcgccaucuccuucuggaugugcuccaacggcucccuccagugccgcaucugcaucuga

SEQ ID NO: 102285 - RNA, 1701 nt, Artificial Sequence; identical to SEQ ID NO: 98705
  derived and/or modified CDS sequence (opt2) from hemagglutinin__InfluenzaA__ADQ28060

SEQ ID NO: 102286 - RNA, 1701 nt, Artificial Sequence
  derived and/or modified CDS sequence (opt2) from hemagglutinin__InfluenzaA__ADQ28061
augaaggccauccucgucguccuccucuacaccuucgccaccgccaacgccgacacccucugcaucggcuaccacgccaacaacuccaccgacaccgucgacaccguccucgagaagaacgucaccgucacccacuccgucaaccuccucgaggacaagcacaacggcaagcucugcaagcuccgcggcgucgccccccuccaccucggccgcugcaacaucgccggcuggauccucggcaaccccgagugcgagucccucuccaccgccuccuccugguccuacaucgucgagaccuccuccuccgacaacggcaccugcuaccccggcgacuucaucgacuacgaggagcuccgcgagcagcucuccuccgucuccuccuucgagcgcuucgagaucuuccccaagaccuccuccuggcccaaccacgacuccaacaagggcgucaccgccgccugcccccacgccggcgccaaguccuucuacaagaaccucaucuggcucgucaagaagggcaacuccuaccccaagcucuccaaguccuacaucaacgacaagggcaaggagguccucguccucuggggcauccaccaccccuccaccuccgccgaccagcagucccucuaccagaacgccgacgccaacgucuucgucggcaccucccgcuacuccaagaaguucaagcccgagaucgccauccgccccaagguccgcgaccaggagggccgcaugaacuacuacuggacccucgucgagcccggcgacaagaucaccuucgaggccaccggcaaccucgucgucccccgcuacgccuucgccauggagcgcaacgccggcuccggcaucaucaucuccgacacccccguccacgacugcaacaccaccugccagacccccaagggcgccaucaacaccucccuccccuuccagaacauccaccccaucaccaucggcaagugccccaaguacgucaaguccaccaagcuccgccucgccaccggccuccgcaacguccccuccauccagucccgcggccucuucggcgccaucgccggcuucaucgagggcggcuggaccggcauggucgacggcugguacggcuaccaccaccagaacgagcagggcuccggcuacgccgccgaccucaaguccacccagaacgccaucgacgagaucaccaacaaggucaacuccgucaucgagaagaugaacacccaguucaccgccgucggcaaggaguucaaccaccucgagaagcgcaucgagaaccucaacaagaaggucgacgacggcuuccucgacaucuggaccuacaacgccgagcuccucguccuccucgagaacgagcgcacccucgacuaccacgacuccaacgucaagaaccucuacgagaagguccgcucccagcucaagaacaacgccaaggagaucggcaacggcugcuucgaguucuaccacaagugcgacaacaccugcauggaguccgucaagaacggcaccuacgacuaccccaaguacuccgaggaggccaagcucaaccgcgaggagaucgacggcgucaagcucgaguccacccgcaucuaccagauccucgccaucuacuccaccgucgccuccucccucguccucgucgucucccucggcgccaucuccuucuggaugugcuccaacggcucccuccagugccgcaucugcaucuga

SEQ ID NO: 102287 - RNA, 1701 nt, Artificial Sequence
  derived and/or modified CDS sequence (opt2) from hemagglutinin__InfluenzaA__ADQ28063
augaaggccauccucgucguccuccucuacaccuucgccaccgccaacgccgacacccucugcaucggcuaccacgccaacaacuccaccgacaccgucgacaccguccucgagaagaacgucaccgucacccacuccgucaaccuccucgaggacaagcacaacggcaagcucugcaagcuccgcggcgucgccccccuccaccucggcaagugcaacaucgccggcuggauccucggcaaccccgagugcgagucccucuccaccgccuccuccugguccuacaucgucgagaccuccuccuccgacaacggcaccugcuaccccggcgacuucaucaacuacgaggagcuccgcgagcagcucuccuccgucuccuccuucgagcgcuucgagaucuuccccaagaccuccuccuggcccaaccacgacuccaacaagggcgucaccgccgccugcccccacgccggcgccaaguccuucuacaagaaccucaucuggcucgucaagaagggcaacuccuaccccaagcucuccaaguccuacaucaacgacaagggcaaggagguccucguccucuggggcauccaccaccccuccaccuccgccgaccagcagucccucuaccagaacgccgacgccuacgucuucgucggcaccucccgcuacuccaagaaguucaagcccgagaucgccauccgccccaagguccgcaaccaggagggccgcaugaacuaccacuggacccucgucaagcccggcgacaagaucaccuucgaggccaccggcaaccucgucgucccccgcuacgccuucgccgucgagcgcaacgccggcuccggcaucaucaucuccgacacccccguccacgacugcaacaccaccugccagacccccaagggcgccaucaacaccucccuccccuuccagaacauccaccccaucaccaucggcaagugccccaaguacgucaaguccaccaagcuccgccucgccaccggccuccgcaacguccccuccauccagucccgcggccucuucggcgccaucgccggcuucaucgagggcggcuggaccggcauggucgacggcugguacggcuaccaccaccagaacgagcagggcuccggcuacgccgccgaccucaaguccacccagaacgccaucgacgagaucaccaacaaggucaacuccgucaucgagaagaugaacacccaguucaccgccgucggcaaggaguucaaccaccucgagaagcgcaucgagaaccucaacaagaaggucgacgacggcuuccucgacaucuggaccuacaacgccgagcuccucguccuccucgagaacgagcgcacccucgacuaccacgacuccaacgucaagaaccucuacgagaagguccgcucccagcucaagaacaacgccaaggagaucggcaacggcugcuucgaguucuaccacaagugcgacaacaccugcauggaguccgucaagaacggcaccuacgacuaccccaaguacuccgaggaggccaagcucaaccgcgaggagaucgacggcgucaagcucgaguccacccgcaucuaccagauccucgccaucuacuccaccgucgccuccucccucguccucgucgucucccucggcgccaucuccuucuggaugugcuccaacggcucccuccagugccgcaucugcaucuga

SEQ ID NO: 102288 - RNA, 1701 nt, Artificial Sequence; identical to SEQ ID NO: 99453
  derived and/or modified CDS sequence (opt2) from hemagglutinin__InfluenzaA__ADQ28064

SEQ ID NO: 102289 - RNA, 1701 nt, Artificial Sequence
  derived and/or modified CDS sequence (opt2) from hemagglutinin__InfluenzaA__ADQ28065
augaaggccauccucgucguccuccucuacaccuucgccaccgccaacgccgacacccucugcaucggcuaccacgccaacaacuccaccgacaccgucgacaccguccucgagaagaacgucaccgucacccacuccgucaaccuccucgaggacaagcacaacggcaagcucugcaagcuccgcggcgucgccccccuccaccucggcaagugcaacaucgccggcuggauccucggcaaccccgagugcgagucccucuccaccgccuccuccugguccuacaucgucgagaccuccuccuccgacaacggcaccugcuaccccggcgacuucaucgacuacgaggagcuccgcgagcagcucuccuccgucuccuccuucgagcgcuucgagaucuuccccaagaccuccuccuggcccaaccacgacuccaacaagggcgucaccgccgccugcccccacgccggcgccaaguccuucuacaagaaccucaucuggcucgucaagaagggcaacuccuaccccaagcucuccaaguccuacaucaacgacaagggcaaggagguccucguccucuggggcauccaccaccccuccaccuccgccggccagcagucccucuaccagaacgccgacgccuacgucuucgucggcaccucccgcuacuccaagaaguucaagcccgagaucgccauccgccccaagguccgcgaccaggagggccgcaugaacuacuacuggacccucgucgagcccggcgacaagaucaccuucgaggccaccggcaaccucgucgucccccgcuacgccuucgccauggagcgcaacgccggcuccggcaucaucaucuccgacacccagguccacgacugcaacaccaccugccagacccccaagggcgccaucaacaccucccuccccuuccagaacauccaccccaucaccaucggcaagugccccaaguacgucaaguccaccaagcuccgccucgccaccggccuccgcaacguccccuccauccagucccgcggccucuucggcgccaucgccggcuucaucgagggcggcuggaccggcauggucgacggcugguacggcuaccaccaccagaacgagcagggcuccggcuacgccgccgaccucaaguccacccagaacgccaucgacaagaucaccaacaaggucaacuccgucaucgagaagaugaacacccaguucaccgccgucggcaaggaguucaaccaccucgagaagcgcaucgagaaccucaacaagaaggucgacgacggcuuccucgacaucuggaccuacaacgccgagcuccucguccuccucgagaacgagcgcacccucgacuaccacgacuccaacgucaagaaccucuacgagaagguccgcucccagcucaagaacaacgccaaggagaucggcaacggcugcuucgaguucuaccacaagugcgacaacaccugcauggaguccgucaagaacggcaccuacgacuaccccaaguacuccgaggaggccaagcucaaccgcgaggagaucgacggcgucaagcucgaguccacccgcaucuaccagauccucgccaucuacuccaccgucgccuccucccucguccucgucgucucccucggcgccaucuccuucuggaugugcuccaacggcucccuccagugccgcaucugcaucuga

SEQ ID NO: 102290 - RNA, 1701 nt, Artificial Sequence
  derived and/or modified CDS sequence (opt2) from hemagglutinin__InfluenzaA__ADQ28066
augaaggccauccucgucguccuccucuacaccuucgccaccgccaacgccgacacccucugcaucggcuaccacgccaacaacuccaccgacaccgucgacaccguccucgagaagaacgucaccgucacccacuccgucaaccuccucgaggacaagcacaacggcaagcucugcaagcuccgcggcgucgccccccuccaccucggcaagugcaacaucgccggcuggauccucggcaaccccgagugcgagucccucuccaccgccuccuccugguccuacaucgucgagaccuccuccuccgacaacggcaccugcuaccccggcgacuucaucgacuacgaggagcuccgcgagcagcucuccuccgucuccuccuucgagcgcuucgagaucuuccccaagaccuccuccuggcccaaccacgacuccaacaagggcgucaccgccgccugcccccacgccggcgccaaguccuucuacaagaaccucaucuggcucgucaagaagggcaacuccuaccccaagcucuccaaguccuacaucaacgacaagggcaaggagguccucguccucuggggcauccaccaccccuccaccuccgccgaccagcagucccucuaccagaacgccgacgccuacgucuucgucggcaccucccgcuacuccaagaaguucaagcccgagaucgccauccgcccccgcguccgcgaccaggagggccgcaugaacuacuacuggacccucgucgagcccggcgacaagaucaccuucgaggccaccggcaaccucgucgucccccgcuacgccuucgccauggagcgcaacgccggcuccggcaucaucaucuccgacacccccguccacgacugcaacaccaccugccagacccccaagggcgccaucaacaccucccuccccuuccagaacauccaccccaucaccaucggcaagugccccaaguacgucaaguccaccaagcuccgccucgccaccggccuccgcaacguccccuccauccagucccgcggccucuucggcgccaucgccggcuucaucgagggcggcuggaccggcauggucgacggcugguacggcuaccaccaccagaacgagcagggcuccggcuacgccgccgaccucaaguccacccagaacgccaucgacaagaucaccaacaaggucaacuccgucaucgagaagaugaacacccaguucaccgccgucggcaaggaguucaaccaccucgagaagcgcaucgagaaccucaacaagaaggucgacgacggcuuccucgacaucuggaccuacaacgccgagcuccucguccuccucgagaacgagcgcacccucgacuaccacgacuccaacgucaagaaccucuacgagaagguccgcucccagcucaagaacaacgccaaggagaucggcaacggcugcuucgaguucuaccacaagugcgacaacaccugcauggaguccgucaagaacggcaccuacgacuaccccaaguacuccgaggaggccaagcucaaccgcgaggagaucgacggcgucaagcucgaguccacccgcaucuaccagauccucgccaucuacuccaccgucgccuccucccucguccucgucgucucccucggcgccaucuccuucuggaugugcuccaacggcucccuccagugccgcaucugcaucuga

SEQ ID NO: 102291 - RNA, 1701 nt, Artificial Sequence
  derived and/or modified CDS sequence (opt2) from hemagglutinin__InfluenzaA__ADQ28067
augaaggccauccucgucguccuccucuacaccuucgccaccgccaacgccgacacccucugcaucggcuaccacgccaacaacuccaccgacaccgucgacaccguccucgagaagaacgucaccgucacccacuccgucaaccuccucgaggacaagcacaacggcaagcucugcaagcuccgcggcgucgccccccuccaccucggcaagugcaacaucgccggcuggauccucggcaaccccgagugcgagucccucuccaccgccuccuccugguccuacaucgucgagaccuccuccuccgacaacggcaccugcuaccccggcgacuucaucgacuacgaggagcuccgcgagcagcucuccuccgucuccuccuucgagcgcuucgagaucuuccccaagaccuccuccuggcccaaccacgacuccaacaagggcgucaccgccgccugcccccacgccggcgccaaguccuucuacaagaaccucaucuggcucgucaagaagggcaacuccuaccccaagcucuccaaguccuacaucaacgacaagggcaaggagguccucguccucuggggcauccaccaccccuccaccuccgccgaccagcagucccucuaccagaacgccgacgccuacgucuucgucggcaccucccgcuacuccaagaaguucaagcccgagaucgccauccgccccaagguccgcgaccaggagggccgcaugaacuacuacuggacccucgucgagcccggcgacaagaucaccuucgaggccaccggcaaccucgucgucccccgcuacgccuucgccauggagcgcaacgccggcuccggcaucaucaucuccgacacccccguccacgacugcaacaccaccugccagacccccaagggcgccaucaacaccucccuccccuuccagaacauccaccccaucaccaucggcaagugccccaaguacgucaaguccaccaagcuccgccucgccaccggccuccgcaacguccccuccauccagucccgcggccucuucggcgccaucgccggcuucaucgagggcggcuggaccggcauggucgacggcugguacggcuaccaccaccagaacgagcagggcuccggcuacgccgccgaccucaaguccacccagaacgccaucgacaagaucaccaacaaggucaacuccgucaucgagaagaugaacacccaguucaccgccgucggcaaggaguucaaccaccucgagaagcgcaucgagaaccucaacaagaaggucgacgacggcuuccucgacaucuggaccuacaacgccgagcuccucguccuccucgagaacgagcgcacccucgacuaccacgacuccaacgucaagaaccucuacgagaagguccgcucccagcucaagaacaacgccaaggagaucggcaacggcugcuucgaguucuaccacaagugcgacaacaccugcauggaguccgucaagaacggcaccuacgacuaccccaaguacuccgaggaggccaagcucaaccgcgaggagaucaacggcgucaagcucgaguccacccgcaucuaccagauccucgccaucuacuccaccgucgccuccucccucguccucgucgucucccucggcgccaucuccuucuggaugugcuccaacggcucccuccagugccgcaucugcaucuga

SEQ ID NO: 102292 - RNA, 1701 nt, Artificial Sequence
  derived and/or modified CDS sequence (opt2) from hemagglutinin__InfluenzaA__ADQ28068
augaaggccauccucgucguccuccucuacaccuucaccaccgccaacgccgacacccucugcaucggcuaccacgccaacaacuccaccgacaccgucgacaccguccucgagaagaacgucaccgucacccacuccgucaaccuccucgaggacaagcacaacggcaagcucugcaagcuccgcggcgucgccccccuccaccucggcaagugcaacaucgccggcuggauccucggcaaccccgagugcgagucccucuccaccgccuccuccugguccuacaucgucgagaccuccuccuccgacaacggcaccugcuaccccggcgacuucaucaacuacgaggagcuccgcgagcagcucuccuccgucuccuccuucgagcgcuucgagaucuuccccaagaccuccuccuggcccaaccacgacuccaacaagggcgucaccgccgccugcccccacgccggcgagaaguccuucuacaagaaccucaucuggcucgucaagaagggcaacuccuaccccaagcucuccaaguccuacaucaacgacaagggcaaggagguccucguccucuggggcauccaccaccccuccaccuccgccgaccagcagucccucuaccagaacgccgacgccuacgucuucgucggcaccucccgcuacuccaagaaguucaagcccgagaucgccauccgccccaagguccgcgaccaggagggccgcaugaacuaccacuggacccucgucaagcccggcgacaagaucaccuucgaggccaccggcaaccucgucgucccccgcuacgccuucgccauggagcgcaacgccggcuccggcaucaucaucuccgacacccccguccacgacugcaacaccaccugccagacccccaagggcgccaucaacaccucccuccccuuccagaacauccaccccaucaccaucggcaagugccccaaguacgucaaguccaccaagcuccgccucgccaccggccuccgcaacguccccuccauccagucccgcggccucuucggcgccaucgccggcuucaucgagggcggcuggaccggcauggucgacggcugguacggcuaccaccaccagaacgagcagggcuccggcuacgccgccgaccucaaguccacccagaacgccaucgacgagaucaccaacaaggucaacuccgucaucgagaagaugaacacccaguucaccgccgucggcaaggaguucaaccaccucgagaagcgcaucgagaaccucaacaagaaggucgacgacggcuuccucgacaucuggaccuacaacgccgagcuccucguccuccucgagaacgagcgcacccucgacuaccacgacuccaacgucaagaaccucuacgagaagguccgcucccagcucaagaacaacgccaaggagaucggcaacggcugcuucgaguucuaccacaagugcgacaacaccugcauggaguccgucaagaacggcaccuacgacuaccccaaguacuccgaggaggccaagcucaaccgcgaggagaucgacggcgucaagcucgaguccacccgcaucuaccagauccucgccaucuacuccaccgucgccuccucccucguccucgucgucucccucggcgccaucuccuucuggaugugcuccaacggcucccuccagugccgcaucugcaucuga

SEQ ID NO: 102293 - RNA, 1701 nt, Artificial Sequence; identical to SEQ ID NO: 102291
  derived and/or modified CDS sequence (opt2) from hemagglutinin__InfluenzaA__ADQ28069

SEQ ID NO: 102294 - RNA, 1701 nt, Artificial Sequence
  derived and/or modified CDS sequence (opt2) from hemagglutinin__InfluenzaA__ADQ28070
augaaggccauccucgucguccuccucuacaccuucgccaccgccaacgccgacacccucugcaucggcuaccacgccaacaacuccaccgacaccgucgacaccguccucgagaagaacgucaccgucacccacuccgucaaccuccucgaggacaagcacaacggcaagcucugcaagcuccgcggcgucgccccccuccaccucggcaagugcaacaucgccggcuggauccucggcaaccccgagugcgagucccucuccaccgccuccuccugguccuacaucgucgagaccuccuccuccgacaacggcaccugcuaccccggcgacuucaucgacuacgaggagcuccgcgagcagcucuccuccgucuccuccuucgagcgcuucgagaucuuccccaagaccuccuccuggcccaaccacgacuccaacaagggcgucaccgccgccugcccccacgccggcgccaaguccuucuacaagaaccucaucuggcucgucaagaagggcaacuccuaccccaagcucuccaaguccuacaucaacgacaagggcaaggagguccucguccucuggggcauccaccaccccuccaccuccgccgaccagcagucccucuaccagaacgccgacgccuacgucuucgucggcaccucccgcuacuccaagaaguucaagcccgagaucgccauccgccccaagguccgcgaccaggagggccgcaugaacuacuacuggacccucgucgagcccggcgacaagaucaccuucgaggccaccggcaaccucgucgucccccgcuacgccuucgccauggagcgcaacgccggcuccggcaucaucaucuccgacacccccguccacgacugcaacaccaccugccagacccccaagggcgccaucaacaccucccuccccuuccagaacauccaccccaucaccaucggcaagugccccaaguacgucaaguccaccaagcuccgccucgccaccggccuccgcaacguccccuccauccagucccgcggccucuucggcgccaucgccggcuucaucgagggcggcuggaccggcauggucgacggcugguacggcuaccaccaccagaacgagcagggcuccggcuacgccgccgaccucaaguccacccagaacgccaucgacaagaucaccaacaaggucaacuccgucaucgagaagaugaacacccaguucaccgccgucggcaaggaguucaaccaccucgagaagcgcaucgagaaccucaacaagaaggucgacgacggcuuccucgacaucuggaccuacaacgccgagcuccucguccuccucgagaacgagcgcacccucgacuaccacgacuccaacgucaagaaccucuacgagaagguccgccgccagcucaagaacaacgccaaggagaucggcaacggcugcuucgaguucuaccacaagugcgacaacaccugcauggaguccgucaagaacggcaccuacgacuaccccaaguacuccgaggaggccaagcucaaccgcgaggagaucgacggcgucaagcucgaguccacccgcaucuaccagauccucgccaucuacuccaccgucgccuccucccucguccucgucgucucccucggcgccaucuccuucuggaugugcuccaacggcucccuccagugccgcaucugcaucuga

SEQ ID NO: 102295 - RNA, 1701 nt, Artificial Sequence
  derived and/or modified CDS sequence (opt2) from hemagglutinin__InfluenzaA__ADQ28071
augaaggccauccucgucguccuccucuacacccucgccaccgccaacgccgacacccucugcaucggcuaccacgccaacaacuccaccgacaccgucgacaccguccucgagaagaacgucaccgucacccacuccgucaaccuccucgaggacaagcacaacggcaagcucugcaagcuccgcggcgucgccccccuccaccucggcaagugcaacaucgccggcuggauccucggcaaccccgagugcgagucccucuccaccgccuccuccugguccuacaucgucgagaccuccuccuccgacaacggcaccugcuaccccggcgacuucaucgacuacgaggagcuccgcgagcagcucuccuccgucuccuccuucgagcgcuucgagaucuuccccaagaccuccuccuggcccaaccacgacuccaacaagggcgucaccgccgccugcccccacgccggcgccaaguccuucuacaagaaccucaucuggcucgucaagaagggcaacuccuaccccaagcucuccaaguccuacaucaacgacaagggcaaggagguccucguccucuggggcauccaccaccccuccaccuccgccgaccagcagucccucuaccagaacgccgacgccuacgucuucgucggcaccucccgcuacuccaagaaguucaagcccgagaucgccauccgccccaagguccgcgaccaggagggccgcaugaacuacuacuggacccucgucgagcccggcgacaagaucaccuucgaggccaccggcaaccucgucgucccccgcuacgccuucgccauggagcgcaacgccggcuccggcaucaucaucuccgacacccccguccacgacugcaacaccaccugccagacccccaagggcgccaucaacaccucccuccccuuccagaacauccaccccaucaccaucggcaagugccccaaguacgucaaguccaccaagcuccgccucgccaccggccuccgcaacguccccuccauccagucccgcggccucuucggcgccaucgccggcuucaucgagggcggcuggaccggcauggucgacggcugguacggcuaccaccaccagaacgagcagggcuccggcuacgccgccgaccucaaguccacccagaacgccaucgacaagaucaccaacaaggucaacuccgucaucgagaagaugaacacccaguucaccgccgucggcaaggaguucaaccaccucgagaagcgcaucgagaaccucaacaagaaggucgacgacggcuuccucgacaucuggaccuacaacgccgagcuccucguccuccucgagaacgagcgcacccucgacuaccacgacuccaacgucaagaaccucuacgagaagguccgcucccagcucaagaacaacgccaaggagaucggcaacggcugcuucgaguucuaccacaagugcgacaacaccugcauggaguccgucaagaacggcaccuacgacuaccccaaguacuccgaggaggccaagcucaaccgcgaggagaucgacggcgucaagcucgaguccacccgcaucuaccagauccucgccaucuacuccaccgucgccuccucccucguccucgucgucucccucggcgccaucuccuucuggaugugcuccaacggcucccuccagugccgcaucugcaucuga

SEQ ID NO: 102296 - RNA, 1701 nt, Artificial Sequence; identical to SEQ ID NO: 99649
  derived and/or modified CDS sequence (opt2) from hemagglutinin__InfluenzaA__ADR32361

SEQ ID NO: 102297 - RNA, 1689 nt, Artificial Sequence
  derived and/or modified CDS sequence (opt2) from hemagglutinin__InfluenzaA__ADT78887
auggcccucaucuaccucauccuccucuucaccuccguccgcggcgaccagaucugcaucggcuaccacgccaacaacuccaccgagaaggucgacaccauccucgagcgcaacgucaccgucacccacgccaaggacauccucgagaagacccacaacggcaagcucugcaagcucaacggcauccccccccucgagcucggcgacugcuccaucgccggcuggcuccucggcaaccccgagugcgaccgccuccuccgcguccccgagugguccuacaucauggagaaggagaaccccaaguacucccucugcuaccccggcuccuucaacgacuacgaggagcucaagcaccucaucuccuccgucaagcacuucgagaaggucaagauccuccccaaggacggcuggacccagcacaccaccaccggcggcucccgcgccugcgccgucuccggcaaccccuccuucuuccgcaacauggucuggcucaccaagaagggccccaacuaccccgucgccaagggcuccuacaacaacaccuccggcgagcagaugcucaucaucuggggcguccaccaccccaacgacgaggccgagcagcgcgcccucuaccagaaggucggcaccuacgucuccgccuccaccuccacccucaacaagcgcuccacccccgagaucgccgcccgccccgaggucaacggccucggcucccgcauggaguucuccuggacccuccucgacaugugggacaccaucaacuucgaguccaccggcaaccucgucgcccccgaguacggcuucaagaucuccaagcgcggcuccuccggcgucaugaagaccgagggcacccucgagaacugcgagaccaagugccagaccccccucggcgccaucaacaccacccuccccuuccacaacguccacccccucaccaucggcgagugccccaaguacgucaaguccgagaagcucguccucgccaccggccuccgcaacgucccccagaucgagucccgcggccucuucggcgccaucgccggcuucaucgagggcggcuggcagggcauggucgacggcugguacggcuaccaccacuccaacgaccagggcuccggcuacgccgccgacaaggaguccacccagaaggccuucgacggcaucaccaacaaggucaacuccgucaucgagaagaugaacacccaguucgaggccgucggcaaggaguucuccaaccucgagaagcgccucgagaaccucaacaagaagauggaggacggcuuccucgacgucuggaccuacaacgccgagcuccucguccucauggagaacgagcgcacccucgacuuccacgacuccaacgucaagaaccucuacgacaagguccgcaugcagcuccgcgacaacgucaaggagcucggcaacggcugcuucgaguucuaccacaagugcgacgacgagugcauggacuccgucaagaacggcaccuacgacuaccccaaguacgaggaggaguccaagcucaaccgcaacgagaucaagggcgucaagcucuccuccaugggcgucuaccagauccucgccaucuacgccaccgucgccggcucccucucccucgccaucaugauggccggcaucuccuucuggaugugcuccaacggcucccuccagugccgcaucugcaucuga

SEQ ID NO: 102298 - RNA, 1701 nt, Artificial Sequence
  derived and/or modified CDS sequence (opt2) from hemagglutinin__InfluenzaA__ADT78908
augaaggccaagcuccucauccuccucugcgcccucuccgccaccgacgccgacaccaucugcaucggcuaccacgccaacaacuccaccgacaccgucgacaccguccucgagaagaacgucaccgucacccacuccgucaaccuccucgaggacucccacaacggcaagcucugccgccucaagggcaaggccccccuccagcucggcaagugcaacaucgccggcuggguccucggcaaccccgagugcgagucccuccucuccaaccgcuccugguccuacaucgccgagacccccaacuccgagaacggcaccugcuaccccggcgacuucgccgacuacgaggagcuccgcgagcagcucuccuccgucuccuccuucgagcgcuucgagaucuuccccaaggagcgcuccuggcccaagcacaacaccacccgcggcgucaccgccgccugcucccacgcccgcaaguccuccuucuacaagaaccucgucuggcucaccgaggccaacggcuccuaccccaaccucuccaaguccuacgucaacaaccaggagaaggagguccucguccucuggggcguccaccaccccuccaacaucgaggaccagcgcacccucuaccgcaaggacaacgccuacgucuccgucgucuccuccaacuacaaccgccgcuucacccccgagaucgccaagcgccccaagguccgcgaccagcccggccgcaugaacuacuacuggacccuccucgagcccggcgacaccaucaucuucgaggccaccggcaaccucaucgcccccugguacgccuucgcccucucccgcggccccggcuccggcaucaucaccuccaacgcccccauggacgagugcgacaccaagugccagaccccccagggcgccaucaacuccucccuccccuuccagaacauccaccccgucaccaucggcgagugccccaaguacguccgcuccaccaagcuccgcauggucaccggccuccgcaacauccccuccauccagucccgcggccucuucggcgccaucgccggcuucaucgagggcggcuggaccggcaugauggacggcugguacggcuaccaccaccagaacgagcagggcuccggcuacgccgccgaccagaaguccacccagaacgccaucaacggcaucaccaacaaggucaacuccgucaucgagaagaugaacacccaguucaccgccgucggcaaggaguucaacaagcucgagaagcgcauggagaaccucaacaagaaggucgacgacggcuuccucgacaucuggaccuacaacgccgagcuccucguccuccucgagaacgagcgcacccucgacuuccacgacuccaacgucaagaaccucuacgagaaggucaagaaccagcuccgcaacaacgccaaggagcucggcaacggcugcuucgaguucuaccacaagugcgacaacgagugcauggaguccgucaagaacggcaccuacgacuaccccaaguacuccgaggaguccaagcucaaccgcgagaagaucgacggcgucaagcucgaguccaugggcgucuaccgcauccucgccaucuacuccaccgucgccuccucccucguccuccucgucucccucggcgccaucuccuucuggaugugcuccaacggcucccuccagugccgcaucugcaucuga

SEQ ID NO: 102299 - RNA, 1701 nt, Artificial Sequence
  derived and/or modified CDS sequence (opt2) from hemagglutinin__InfluenzaA__ADT78929
augaaggccaagcuccucauccuccucugcgcccucuccgccaccgacgccgacaccaucugcaucggcuaccacgccaacaacuccaccgacaccgucgacaccguccucgagaagaacgucaccgucacccacuccgucaaccuccucgaggacucccacaacggcaagcucugccgccucaagggcaucgccccccuccagcucggcaagugcaacaucgccggcuggauccucggcaaccccgagugcgagucccuccucuccaagcgcuccugguccuacaucgccgagacccccaacuccgagaacggcaccugcuaccccggcgacuucgccgacuacgaggagcuccgcgagcagcucuccuccgucuccuccuucgagcgcuucgagaucuuccccaaggagcgcuccuggcccaagcacaacaucacccgcggcgucaccgccgccugcucccacgccggcaaguccuccuucuacaagaaccuccucuggcucaccgagaccaagggcuccuaccccaaccucuccaaguccuacgucaacaacaaggagaaggagguccucguccucuggggcguccaccaccccuccaacaucgaggaccagaagacccucuaccgcaaggagaacgccuacgucuccgucgucuccuccaacuacaaccgccgcuucacccccgagaucgccgagcgccccaagguccgcggccaggccggccgcaugaacuacuacuggacccuccucgagcccggcgacaccaucaucuucgaggccaacggcaaccucaucgcccccugguacgccuucgcccucucccgcggccucggcuccggcaucaucaccuccaacgccuccauggacgagugcgacaccaagugccagaccccccagggcgccaucaacuccucccuccccuuccagaacauccaccccgucaccaucggcgagugccccaaguacgucaaguccaccaagcuccgcauggucaccggccuccgcaacauccccuccauccagucccgcggccucuucggcgccaucgccggcuucaucgagggcggcuggaccggcaugaucgacggcugguacggcuaccaccaccagaacgagcagggcuccggcuacgccgccgaccagaaguccacccagaacgccaucaacggcaucaccaacaaggucaacuccgucaucgagaagaugaacacccaguucaccgccgucggcaaggaguucaacaagcucgagaagcgcauggagaaccucaacaagaaggucgacgacggcuuccucgacaucuggaccuacaacgccgagcuccucguccuccucgagaacgagcgcacccucgacuuccacgacuccaacgucaagaaccucuacgagaaggucaagaaccagcuccgcaacaacgccaaggagaucggcaacggcugcuucgaguucuaccacaagugcaacaacgagugcauggaguccgucaagaacggcaccuacgacuaccccaaguacuccgaggaguccaagcucaaccgcgagaagaucgacggcgucaagcucgaguccaugggcgucuaccagauccucgccaucuacuccaccgucgccuccucccucguccuccucgucucccucggcgccaucuccuucuggaugugcuccaacggcucccuccagugccgcaucugcaucuga

SEQ ID NO: 102300 - RNA, 1701 nt, Artificial Sequence
  derived and/or modified CDS sequence (opt2) from hemagglutinin__InfluenzaA__ADT78936
augaaggccaagcuccucguccuccucugcgcccucuccgccaccuacgccgacaccaucugcaucggcuaccacgccaacaacuccaccgacaccgucgacaccguccucgagaagaacgucaccgucacccacuccgucaaccuccucgaggacucccacaacggcaagcucugccgccucaagggcaaggccccccuccagcucggcaagugcaacaucgccggcuggauccucggcaaccccgagugcgagucccuccucuccaagcgcuccugguccuacaucgccgagacccccaacuccgagaacggcaccugcuaccccggcgacuucgccgacuacgaggagcuccgcgagcagcucuccuccgucuccuccuucgagcgcuucgagaucuuccccaaggaguccuccuggcccaagcacaacaccacccgcggcgucaccgccgccugcucccacgcccgcaaguccuccuucuacaagaaccuccucuggcucaccgaggccaacggcuccuaccccaaccucuccaaguccuacgucaacaaccaggagaaggagguccucguccucuggggcguccaccaccccuccaacaucgaggaccagcgcacccucuaccgcaaggagaacgccuacgucuccgucgucuccuccaacuacaaccgccgcuucacccccgagaucgccgagcgccccaagguccgcaaccaggccggccgcaugaacuacuacuggacccuccucgagcccggcgacaccaucaucuucgaggccaacggcaaccucaucgcccccugguacgccuucgcccucucccgcggccucggcuccggcaucaucaccuccaacgccuccauggacgagugcgacaccaagugccagaccccccagggcgccaucaacuccucccuccccuuccagaacauccaccccgucaccaucggcgagugccccaaguacgucaaguccaccaagcuccgcauggucaccggccuccgcaacauccccuccauccagucccgcggccucuucggcgccaucgccggcuucaucgagggcggcuggaccggcaugauggacggcugguacggcuaccaccaccagaacgagcagggcuccggcuacgccgccgaccagaaguccacccagaacgccaucaacggcaucaccaacaaggucaacuccgucaucgagaagaugaacacccaguucaccgccgucggcaaggaguucaacaagcucgagaagcgcauggagaaccucaacaagaaggucgacgacggcuuccucgacaucuggaccuacaacgccgagcuccucguccuccucgagaacgagcgcacccucgacuuccacgacuccaacgucaagaaccucuacgagaaggucaagaaccagcuccgcaacaacgccaaggagcucggcaacggcugcuucgaguucuaccacaagugcgacaacgagugcauggaguccgucaagaacggcaccuacgacuaccccaaguacuccgaggaguccaagcucaaccgcgagaagaucgacggcgucaagcucgaguccaugggcgucuaccgcauccucgccaucuacuccaccgucgccuccucccucguccuccucgucucccucggcgccaucuccuucuggaugugcuccaacggcucccuccagugccgcaucugcaucuga

SEQ ID NO: 102301 - RNA, 1689 nt, Artificial Sequence
  derived and/or modified CDS sequence (opt2) from hemagglutinin__InfluenzaA__ADT78961
auggccaucaucugccucauccuccucuucaccgccguccgcggcgaccagaucugcaucggcuaccacgccaacaacuccaccgagaaggucgacaccauccucgagcgcaacgucaccgucacccacgccaaggacauccucgagaagacccacaacggcaagcucugcaagcucaacggcauccccccccucgagcucggcgacugcuccaucgccggcuggcuccucggcaaccccgagugcgaccgccuccucuccguccccgagugguccuacaucauggagaaggagaacccccgcgacggccucugcuaccccggcuccuucaacgacuacgaggagcucaagcaccuccucuccuccgucaagcacuucgagaaggucaagauccuccccaagaaccgcuggacccagcacaccaccaccggcggcucccgcgccugcgccgucuccggcaaccccuccuucuuccgcaacauggucuggcucaccaagaagggcuccaacuaccccgucgccaagggcuccuacaacaacaccuccggcgagcagaugcucaucaucuggggcguccaccaccccaacgacgagaccgagcagcgcacccucuaccagaacgucgagaccuacgucuccgucuccaccuccacccucaacaagcgcuccacccccaagaucgccacccgccccgaggucaacggccucggcucccgcauggaguucuccuggacccuccucgacaugugggacaccaucaacuucgaguccaccggcaaccucaucgcccccgaguacggcuucaagaucuccaagcgcggcuccuccggcaucaugaagaccgagggcacccucgagaacugcgagaccaagugccagaccccccucggcgccaucaacaccacccuccccuuccacaacguccacccccucaccaucggcgagugccccaaguacgucaaguccgagaagcucguccucgccaccggcccccgcaacgucccccagaucgagucccgcggccucuucggcgccaucgccggcuucaucgagggcggcuggcagggcauggucgacggcugguacggcuaccaccacuccaacgaccagggcuccggcuacgccgccgacaaggaguccacccagaaggccuucgacggcaucaccaacaaggucaacuccgucaucgagaagaugaacacccaguucgaggccgucggcaaggaguucuccaaccucgagcgccgccucgagaaccucaacaagaagauggaggacggcuuccucgacgucuggaccuacaacgccgagcuccucguccucauggagaacgagcgcacccucgacuuccacgacuccaacgucaagaaccucuacgacaagguccgcaugcagcuccgcgacaacgucaaggagcucggcaacggcugcuucgaguucuaccacaagugcgacgacgagugcaugaacuccgucaagaacggcaccuacgacuaccccaaguacgaggaggaguccaagcucaaccgcaacgagaucaagggcgucaagcucuccuccaugggcgucuaccagauccucgucaucuacgccaccgucgccggcucccucucccucgccaucaugauggccggcaucuccuucuggaugugcuccaacggcucccuccagugccgcaucugcaucuga

SEQ ID NO: 102302 - RNA, 1701 nt, Artificial Sequence; identical to SEQ ID NO: 96800
  derived and/or modified CDS sequence (opt2) from hemagglutinin__InfluenzaA__ADT78971

SEQ ID NO: 102303 - RNA, 1701 nt, Artificial Sequence; identical to SEQ ID NO: 96341
  derived and/or modified CDS sequence (opt2) from hemagglutinin__InfluenzaA__ADT79010

SEQ ID NO: 102304 - RNA, 1701 nt, Artificial Sequence; identical to SEQ ID NO: 96800
  derived and/or modified CDS sequence (opt2) from hemagglutinin__InfluenzaA__ADT79030

SEQ ID NO: 102305 - RNA, 1701 nt, Artificial Sequence; identical to SEQ ID NO: 97378
  derived and/or modified CDS sequence (opt2) from hemagglutinin__InfluenzaA__ADT79050

SEQ ID NO: 102306 - RNA, 1701 nt, Artificial Sequence
  derived and/or modified CDS sequence (opt2) from hemagglutinin__InfluenzaA__ADT79108
augaaggcccgccuccucauccuccucugcgcccucuccgccaccgacgccgacaccaucugcaucggcuaccacgccaacaacuccaccgacaccgucgacaccguccucgagaagaacgucaccgucacccacuccgucaaccuccucgaggacucccacaacggcaagcucugccgccucaagggcaucgccccccuccagcucggcaagugcaacaucgccggcuggauccucggcaaccccgagugcgagucccuccucuccaaccgcuccugguccuacaucgccgagacccccaacuccgagaacggcaccugcuaccccggcgacuucgccgacuacgaggagcuccgcgagcagcucuccuccgucuccuccuucgagcgcuucgagaucuuccccaaggagcgcuccuggcccaagcacaacaucacccgcggcgucaccgccgccugcucccacgccaagaaguccuccuucuacaagaaccuccucuggcucaccgaggccaacggcuccuaccccaaccucaucaaguccuacgucaacaacaaggagaaggagguccucguccucuggggcguccaccaccccuccaacaucgaggaccagcgcacccucuaccgcaaggagaacgccuacgucuccgucgucuccuccaacuacaaccgccgcuucacccccgagaucgccgagcgccccaagguccgcggccaggccggccgcaugaacuacuacuggacccuccucgagcccggcgacaagaucaucuucgaggccaacggcaaccucaucgcccccugguacgccuucgcccucucccgcggccucggcuccggcaucaucaccuccaacgccuccauggacgagugcgacaccaagugccagaccccccagggcgccaucaacuccucccuccccuuccagaacauccaccccgucaccaucggcgagugccccaaguacguccgcuccaccaagcuccgcauggucaccggccuccgcaacauccccuccauccagucccgcggccucuucggcgccaucgccggcuucaucgagggcggcuggaccggcauggucgacggcugguacggcuaccaccaccagaacgagcagggcuccggcuacgccgccgaccagaaguccacccagaacgccaucaacggcaucaccaacaaggucaacuccgucaucgagaagaugaacacccaguucaccgccgucggcaaggaguucaacaagcucgagaagcgcauggagaaccucaacaagaaggucgacgacggcuuccucgacaucuggaccuacaacgccgagcuccucguccuccucgagaacgagcgcacccucgacuuccacgacuccaacgucaagaaccucuacgagaaggucaagaaccagcuccgcaacaacgccaaggagaucggcaacggcugcuucgaguucuaccacaagugcgacaacgagugcauggaguccgucaagaacggcaccuacgacuaccccaaguacuccgaggaguccaagcucaaccgcgagaagaucgacggcgucaagcucgaguccaugggcgucuaccagauccucgccaucuacuccaccgucgccuccucccucguccuccucgucucccucggcgccaucuccuucuggaugugcuccaacggcucccuccagugccgcaucugcaucuga

SEQ ID NO: 102307 - RNA, 1689 nt, Artificial Sequence
  derived and/or modified CDS sequence (opt2) from hemagglutinin__InfluenzaA__ADT79119
auggccaucaucuaccucauccuccucuucaccgccguccgcggcgaccagaucugcaucggcuaccacgccaacaacuccaccgagaaggucgacaccauccucgagcgcaacgucaccgucacccacgccaaggacauccucgagaagacccacaacggcaagcucugcaagcucaacggcauccccccccucgagcucggcgacugcuccaucgccggcuggcuccucggcaaccccgagugcgaccgccuccucuccguccccgagugguccuacaucauggagaaggagaacccccgcgacggccucugcuaccccggcuccuucaacgacuacgaggagcucaagcaccuccucuccuccgucaagcacuucgagaaggucaagauccuccccaaggaccgcuggacccagcacaccaccaccggcggcucccgcgccugcgccgucuccggcaaccccuccuucuuccgcaacauggucuggcucaccaagaagggcuccaacuaccccgucgccaagggcuccuacaacaacaccuccggcgagcagaugcucaucaucuggggcguccaccaccccaacgacgagaccgagcagcgcacccucuaccagaacgucggcaccuacgucuccgucggcaccuccacccucaacaagcgcuccacccccgacaucgccacccgccccaaggucaacggccucggcggccgcauggaguucuccuggacccuccucgacaugugggacaccaucaacuucgaguccaccggcaaccucaucgcccccgaguacggcuucaagaucuccaagcgcggcuccuccggcaucaugaagaccgagggcacccucggcaacugcgagaccaagugccagaccccccucggcgccaucaacaccacccuccccuuccacaacguccacccccucaccaucggcgagugccccaaguacgucaaguccgagaagcucguccucgccaccggccuccgcaacgucccccagaucgagucccgcggccucuucggcgccaucgccggcuucaucgagggcggcuggcagggcauggucgacggcugguacggcuaccaccacuccaacgaccagggcuccggcuacgccgccgacaaggaguccacccagaaggccuucgacggcaucaccaacaaggucaacuccgucaucgagaagaugaacacccaguucgaggccgucggcaaggaguucuccaaccucgagcgccgccucgagaaccucaacaagaagauggaggacggcuuccucgacgucuggaccuacaacgccgagcuccucguccucauggagaacgagcgcacccucgacuuccacgacuccaacgucaagaaccucuacgacaagguccgcaugcagcuccgcgacaacgucaaggagcucggcaacggcugcuucgaguucuaccacaagugcgacgacgagugcaugaacuccgucaagaacggcaccuacgacuaccccaaguacgaggaggaguccaagcucaaccgcaacgagaucaagggcgucaagcucuccuccaugggcgucuaccagauccucgccaucuacgccaccgucgccggcucccucucccucgccaucaugauggccggcaucuccuucuggaugugcuccaacggcucccuccagugccgcaucugcaucuga

SEQ ID NO: 102308 - RNA, 1689 nt, Artificial Sequence
  derived and/or modified CDS sequence (opt2) from hemagglutinin__InfluenzaA__ADT79129
auggccaucaucuaccucauccuccucuucaccgccguccgcggcgaccagaucugcaucggcuaccacgccaacaacuccaccgagaaggucgacaccauccucgagcgcaacgucaccgucacccacgccaaggacauccucgagaagacccacaacggcaagcucugcaagcucaacggcauccccccccucgagcucggcgacugcuccaucgccggcuggcuccucggcaaccccgagugcgaccgccuccuccgcguccccgagugguccuacaucauggagaaggagaacccccgcgacggccucugcuaccccggcuccuucaacgacuacgaggagcucaagcaccuccucuccuccgucaagcacuucgagaaggucaagauccuccccaaggaccgcuggacccagcacaccaccaccggcggcucccgcgccugcgccgucuccggcaaccccuccuucuuccgcaacaugaucuggcucaccaagaagggcuccaacuaccccgucgccaagggcuccuacaacaacaccuccggcgagcagaugcucaucaucuggggcguccaccaccccaacgacgagaccgagcagcgcacccucuaccagaacgucggcaccuacgucuccgucgucaccuccacccucaacaagcgcuccacccccaagaucgccacccgccccaaggucaacggccucggcggccgcauggaguucuccuggacccuccucgacaugugggacaccaucaacuucgaguccaccggcaaccucaucgcccccgaguacggcuucaagaucuccaagcgcggcuccuccggcaucaugaagaccgagggcacccucgagaacugcgagaccaagugccagaccccccucggcgccaucaacaccacccuccccuuccacaacguccacccccucgccaucggcgagugccccaaguacgucaaguccgagaagcucguccucgccaccggccuccgcaacgucccccagaucgagucccgcggccucuucggcgccaucgccggcuucaucgagggcggcuggcagggcauggucgacggcugguacggcuaccaccacuccaacgaccagggcuccggcuacgccgccgacaaggaguccacccagcgcgccuucgacggcaucaccaacaaggucaacuccgucaucgagaagaugaacacccaguucgaggccgucggcaaggaguucuccaaccucgagcgccgccucgagaaccucaacaagaagauggaggacggcuuccucgacgucuggaccuacaacgccgagcuccucguccucauggagaacgagcgcacccucgacuuccacgacuccaacgucaagaaccucuacgacaagguccgcaugcagcuccgcgacaacgucaaggagcucggcaacggcugcuucgaguucuaccacaagugcgacgacgagugcaugaacuccgucaagaacggcaccuacgacuaccccaaguacgaggaggaguccaagcucaaccgcaacgagaucaagggcgucaagcucuccuccaugggcgucuaccagauccucgccaucuacgccaccgucgccggcucccucucccucgccaucaugauggccggcaucuccuucuggaugugcuccaacggcucccuccagugccgcaucugcaucuga

SEQ ID NO: 102309 - RNA, 1701 nt, Artificial Sequence
  derived and/or modified CDS sequence (opt2) from hemagglutinin__InfluenzaA__ADT79232
augaaggccauccucgucguccuccucuacaccuucgccaccgccaacgccgacacccucugcaucggcuaccacgccaacaacuccaccgacaccgucgacaccguccucgagaagaacgucaccgucacccacuccgucaaccuccucgaggacaagcacaacggcaagcucugcaagcuccgcggcgucgccccccuccaccucggcaagugcaacaucgccggcuggauccucggcaaccccgagugcgagucccucuccaccgccuccuccugguccuacaucgucgagaccuccuccuccgacaacggcaccugcuaccccggcgacuucaucgacuacgaggagcuccgcgagcagcucuccuccgucuccuccuucgagcgcuucgagaucuuccccaagaccuccuccuggcccaaccacgacuccaacaagggcgucaccgccgccugcccccacgccggcgccaaguccuucuacaagaaccucaucuggcucgucaagaagggcaacuccuaccccaagcucuccaaguccuacaucaacgacaagggcaaggagguccucguccucuggggcauccaccaccccuccaccuccgccgaccagcagucccucuaccagaacgccgacgccuacgucuucgucggcuccucccgcuacuccaagaaguucaagcccgagaucgccauccgccccaagguccgcgaccaggagggccgcaugaacuacuacuggacccucgucgagcccggcgacaagaucaccuucgaggccaccggcaaccucgucgucccccgcuacgccuucgccauggagcgcaacgccggcuccggcaucaucaucuccgacacccccguccacgacugcaacaccaccugccagacccccaagggcgccaucaacaccucccuccccuuccagaacaagcaccccaucaccaucggcaagugccccaaguacgucaaguccaccaagcuccgccucgccaccggccuccgcaacguccccuccauccagucccgcggccucuucggcgccaucgccggcuucaucgagggcggcuggaccggcauggucgacggcugguacggcuaccaccaccagaacgagcagggcuccggcuacgccgccgacgucaaguccacccagaacgccaucgacgagaucaccaacaaggucaacuccgucaucgagaagaugaacacccaguucaccgccgucggcaaggaguucaaccaccucgagaagcgcaucgagaaccucaacaagaaggucgacgacggcuuccucgacaucuggaccuacaacgccgagcuccucguccuccucgagaacgagcgcacccucgacuaccacgacuccaacgucaagaaccucuacgagaagguccgcucccagcucaagaacaacgccaaggagaucggcaacggcugcuucgaguucuaccacaagugcgacaacaccugcauggaguccgucaagaacggcaccuacgacuaccccaaguacuccgaggaggccaagcucaaccgcgaggagaucgacggcgucaagcucgaguccacccgcaucuaccagauccucgccaucuacuccaccgucgccuccucccucguccucgucgucucccucggcgccaucuccuucuggaugugcuccaacggcucccuccagugccgcaucugcaucuga

SEQ ID NO: 102310 - RNA, 1701 nt, Artificial Sequence
  derived and/or modified CDS sequence (opt2) from hemagglutinin__InfluenzaA__ADT79242
augaaggccauccucgucguccuccucuacaccuucgccaccgccaacgccgacacccucugcaucggcuaccacgccaacaacuccaccgacaccgucgacaccguccucgagaagaacgucaccgucacccacuccgucaaccuccucgaggacaagcacaacggcaagcucugcaagcuccgcggcgucgccccccuccaccucggcaagugcaacaucgccggcuggauccucggcaaccccgagugcgagucccucuccaccgccuccuccugguccuacaucgucgagacccccuccuccgacaacggcaccugcuaccccggcgacuucaucgacuacgaggagcuccgcgagcagcucuccuccgucuccuccuucgagcgcuucgagaucuuccccaagaccuccuccuggcccaaccacgacuccaacaagggcgucaccgccgccugcccccacgccggcgccaaguccuucuacaagaaccucaucuggcucgucaagaagggcaacuccuaccccaagcucuccaaguccuacaucaacgacaagggcaaggagguccucguccucuggggcauccaccaccccuccaccuccgccgaccagcagucccucuaccagaacgccgacgccuacgucuucgucggcuccucccgcuacuccaagaaguucaagcccgagaucgccauccgccccaagguccgcgaccaggagggccgcaugaacuacuacuggacccucgucgagcccggcgacaagaucaccuucgaggccaccggcaaccucgucgucccccgcuacgccuucgccauggagcgcaacgccggcuccggcaucaucaucuccgacacccccguccacgacugcaacaccaccugccagacccccaagggcgccaucaacaccucccuccccuuccagaacauccaccccaucaccaucggcaagugccccaaguacgucaaguccaccaagcuccgccucgccaccggccuccgcaacguccccuccauccagucccgcggccucuucggcgccaucgccggcuucaucgagggcggcuggaccggcauggucgacggcugguacggcuaccaccaccagaacgagcagggcuccggcuacgccgccgaccucaaguccacccagaacgccaucgacgagaucaccaacaaggucaacuccgucaucgagaagaugaacacccaguucaccgccgucggcaaggaguucaaccaccucgagaagcgcaucgagaaccucaacaagaaggucgacgacggcuuccucgacaucuggaccuacaacgccgagcuccucguccuccucgagaacgagcgcacccucgacuaccacgacuccaacgucaagaaccucuacgagaagguccgcucccagcucaagaacaacgccaaggagaucggcaacggcugcuucgaguucuaccacaagugcgacaacaccugcauggaguccgucaagaacggcaccuacgacuaccccaaguacuccgaggaggccaagcucaaccgcgaggagaucgacggcgucaagcucgaguccacccgcaucuaccagauccucgccaucuacuccaccgucgccuccucccucguccucgucgucucccucggcgccaucuccuucuggaugugcuccaacggcucccuccagugccgcaucugcaucuga

SEQ ID NO: 102311 - RNA, 1701 nt, Artificial Sequence
  derived and/or modified CDS sequence (opt2) from hemagglutinin__InfluenzaA__ADT91182
augaaggccauccucgucguccuccucuacaccuucgccaccgccaacgccgacacccucugcaucggcuaccacgccaacaacuccaccgacaccgucgacaccguccucgagaagaacgucaccgucacccacuccgucaaccuccucgaggacaagcacaacggcaagcucugcaagcuccgcggcgucgccccccuccaccucggcaagugcaacaucgccggcuggauccucggcaaccccgagugcgagccccucuccaccgccuccuccugguccuacaucgucgagaccuccuccuccgacaacggcaccugcuaccccggcgacuucaucgacuacgaggagcuccgcgagcagcucuccuccgucuccuccuucgagcgcuucgagaucuuccccaagaccuccuccuggcccaaccacgacuccaacaagggcgucaccaccgccugcccccacgccggcgccaaguccuucuacaagaaccucaucuggcucgucaagaagggcaacuccuaccccaagcucuccaaguccuacaucaacgacaagggcaaggagguccucguccucuggggcauccaccacccccccaccuccgccgaccagcagucccucuaccagaacgccgacgccuacgucuucgucggcaccucccgcuacuccaagaaguucaagcccgagaucgccauccgccccaagguccgcgaccaggagggccgcaugaacuacuacuggacccucgucgagcccggcgacaagaucaccuucgaggccaccggcaaccucgucgucccccgcuacgccuucgccauggagcgcaacgccggcuccggcaucaucaucuccgacacccccguccacgacugcaacaccaccugccagacccccaagggcgccaucaacaccucccuccccuuccagaacauccaccccaucaccaucggcaagugccccaaguacgucaaguccaccaagcuccgccucgccaccggccuccgcaacguccccuccauccagucccgcggccucuucggcgccaucgccggcuucaucgagggcggcuggaccggcauggucgacggcugguacggcuaccaccaccagaacgagcagggcuccggcuacgccgccgaccucaaguccacccagaacgccaucgacggcaucaccaacaaggucaacuccgucaucgagaagaugaacacccaguucaccgccgucggcaaggaguucaaccaccucgagaagcgcaucgagaaccucaacaagaaggucgacgacggcuuccucgacaucuggaccuacaacgccgagcuccucguccuccucgagaacgagcgcacccucgacuaccacgacuccaacgucaagaaccucuacgagaagguccgcucccagcucaagaacaacgccaaggagaucggcaacggcugcuucgaguucuaccacaagugcgacaacaccugcauggaguccgucaagaacggcaccuacgacuaccccaaguacuccgaggaggccaagcucaaccgcgaggagaucgacggcgucaagcucgaguccacccgcaucuaccagauccucgccaucuacuccaccgucgccuccucccucguccucgucgucucccucggcgccaucuccuucuggaugugcuccaacggcucccuccagugccgcaucugcaucuga

SEQ ID NO: 102312 - RNA, 1701 nt, Artificial Sequence
  derived and/or modified CDS sequence (opt2) from hemagglutinin__InfluenzaA__ADU20561
augaaggccauccucgucguccuccucuacaccuucgccaccgccaacgccgacacccucugcaucggcuaccacgccaacaacuccaccgacaccgucgacaccguccucgagaagaacgucaccgucacccacuccgucaaccuccucgaggacaagcacaacggcaagcucugcaagcucggcggcgucgccccccuccaccucggcaagugcaacaucgccggcuggauccucggcaaccccgagugcgagucccucuccaccgccuccuccugguccuacaucgucgagaccuccuccuccgacaacggcaccugcuaccccggcgacuucaucgacuacgaggagcuccgcgagcagcucuccuccgucuccuccuucgagcgcuucgagaucuuccccaagaccuccuccuggcccaaccacgacuccaacaagggcgucaccgccgccugcccccacgccggcgccaaguccuucuacaagaaccucaucuggcucgucaagaagggcaacuccuaccccaagcucuccaaguccuacaucaacgacaagggcaaggagguccucguccucuggggcauccaccaccccuccaccuccgccgaccagcagucccucuaccagaacgccgacgccuacgucuucgucggcaccucccgcuacuccaagaaguucaagcccgagaucgccauccgccccaagguccgcgaccaggagggccgcaugaacuacuacuggacccucgucgagcccggcgacaagaucaccuucgaggccaccggcaaccucgucgucccccgcuacgccuucgccauggagcgcaacgccggcuccggcaucaucaucuccgacacccccguccacgacugcaacaccaccugccagacccccaagggcgccaucaacaccucccuccccuuccagaacauccaccccaucaccaucggcaagugccccaaguacgucaaguccaccaagcuccgccucgccaccggccuccgcaacguccccuccauccagucccgcggccucuucggcgccaucgccggcuucaucgagggcggcuggaccggcauggucgacggcugguacggcuaccaccaccagaacgagcagggcuccggcuacgccgccgaccucaaguccacccagaacgccaucgacaagaucaccaacaaggucaacuccgucaucgagaagaugaacacccaguucaccgccgucggcaaggaguucaaccaccucgagaagcgcaucgagaaccucaacaagaaggucgacgacggcuuccucgacaucuggaccuacaacgccgagcuccucguccuccucgagaacgagcgcacccucgacuaccacgacuccaacgucaagaaccucuacgagaagguccgcucccagcucaagaacaacgccaaggagaucggcaacggcugcuucgaguucuaccacaagugcgacaacaccugcauggaguccgucaagaacggcaccuacgacuaccccaaguacuccgaggaggccaagcucaaccgcgaggagaucgacggcgucaagcucgaguccacccgcaucuaccagauccucgccaucuacuccaccgucgccuccucccucguccucgucgucucccucggcgccaucuccuucuggaugugcuccaacggcucccuccagugccgcaucugcaucuga

SEQ ID NO: 102313 - RNA, 1701 nt, Artificial Sequence
  derived and/or modified CDS sequence (opt2) from hemagglutinin__InfluenzaA__ADU20562
augaaggccauccucgucguccuccucuacaccuucgccaccgccaacgccgacacccucugcaucggcuaccacgccaacaacuccaccgacaccgucgacaccguccucgagaagaacgucaccgucacccacuccgucaaccuccucgaggacaagcacaacggcaagcucugcaagcuccgcggcgucgccccccuccaccucggcaagugcaagaucgccggcuggauccucggcaaccccgagugcgagucccucuccaccgccuccuccugguccuacaucgucgagaccuccuccuccgacaacggcaccugcuaccccggcgacuucaucgacuacgaggagcuccgcgagcagcucuccuccgucuccuccuucgagcgcuucgagaucuuccccaagaccuccuccuggcccaaccacgacuccaacaagggcgucaccgccgccugcccccacgccggcgccaaguccuucuacaagaaccucaucuggcucgucaagaagggcaacuccuaccccaagcucuccaaguccuacaucaacgacaagggcaaggagguccucguccucuggggcauccaccaccccuccaccuccgccgaccagcagucccucuaccagaacgccgacgccuacgucuucgucggcaccucccgcuacuccaagaaguucaagcccgagaucgccauccgccccaagguccgcgaccaggagggccgcaugaacuacuacuggacccucgucgagcccggcgacaagaucaccuucgaggccaccggcaaccucgucgucccccgcuacgccuucgccauggagcgcaacgccggcuccggcaucaucaucuccgacacccccguccacgacugcaacaccaccugccagacccccaagggcgccaucaacaccucccuccccuuccagaacauccaccccaucaccaucggcaagugccccaaguacgucaaguccaccaagcuccgccucgccaccggccuccgcaacguccccuccauccagucccgcggccucuucggcgccaucgccggcuucaucgagggcggcuggaccggcauggucgacggcugguacggcuaccaccaccagaacgagcagggcuccggcuacgccgccgaccucaaguccacccagaacgccaucgacaagaucaccaacaaggucaacuccgucaucgagaagaugaacacccaguucaccgccgucggcaaggaguucaaccaccucgagaagcgcaucgagaaccucaacaagaaggucgacgacggcuuccucgacaucuggaccuacaacgccgagcuccucguccuccucgagaacgagcgcacccucgacuaccacgacuccaacgucaagaaccucuacgagaagguccgcucccagcucaagaacaacgccaaggagaucggcaacggcugcuucgaguucuaccacaagugcgacaacaccugcauggaguccgucaagaacggcaccuacgacuaccccaaguacuccgaggaggccaagcucaaccgcgaggagaucgacggcgucaagcucgaguccacccgcaucuaccagauccucgccaucuacuccaccgucgccuccucccucguccucgucgucucccucggcgccaucuccuucuggaugugcuccaacggcucccuccagugccgcaucugcaucuga

SEQ ID NO: 102314 - RNA, 1701 nt, Artificial Sequence
  derived and/or modified CDS sequence (opt2) from hemagglutinin__InfluenzaA__ADU25478
auggaggccaagcucuucguccucuucugcgccuucaccgcccucaaggccgacaccaucugcgucggcuaccacgccaacaacuccaccgacaccgucgacaccauccucgagcgcaacgucaccgucacccacuccgucaaccuccucgaguccucccacaacggcaagcucugcucccucaacggcaaggccccccuccagcucggcaacugcaacgucgccggcuggauccucggcaaccccgagugcgaccuccuccucaccgucaacuccugguccuacaucaucgagaccuccaccuccaagaacggcgccugcuaccccggcgaguucgccgacuacgaggagcuccgcgagcagcucuccaccgucuccuccuucgagcgcuucgagaucuuccccaaggccaccuccuggcccaaccacgagaccaccaagggcaccaccgucgccugcucccacuccggcgccaacuccuucuaccgcaaccuccucuggaucgucaagaagggcaacuccuaccccaagcucuccaaguccuacaccaacaacaagggcaaggagguccucgucaucuggggcguccaccacccccccaccgacuccgaccagcagacccucuaccagaacaaccacaccuacgucuccgucggcuccuccaaguacuaccagcgcuucacccccgagaucgucacccgccccaagguccgcgagcaggccggccgcaugaacuacuacuggacccuccucgaccagggcgacaccaucaccuucgaggccaccggcaaccucaucgcccccuggcacgccuucgcccucaacaagggcuccuccuccggcaucaugauguccgacgcccacguccacaacugcaccaccaagugccagaccccccacggcgcccucaaguccaaccuccccuuccagaacguccaccccaucaccaucggcgagugccccaaguacgucaaguccacccagcuccgcauggccaccggccuccgcaacauccccuccauccagucccgcggccucuucggcgccaucgccggcuucaucgagggcggcuggaccggcaugaucgacggcugguacggcuaccaccaccagaacgagcagggcuccggcuacgccgccgaccagaaguccacccagaucgccaucgacggcaucuccaacaaggucaacuccgucaucgagaagaugaacguccaguucaccuccgucggcaaggaguucaacaaccucgagaagcgcaucgagaaccucaacaagaaggucgacgacggcuuccucgacaucuggaccuacaacgccgagcuccucauccuccucgagaacgagcgcacccucgacuuccacgacuucaacgucaagaaccucuacgagcgcgucaagucccagcuccgcaacaacgccaaggagaucggcaacggcugcuucgaguucuaccacaagugcaacaacgagugcauggaguccgucaagaacggcaccuacaacuacccccgcuacuccgaggaguccaagcucaaccgcgaggagaucgacggcgucaagcucgaguccgucggcguccaccagauccucgccaucuacuccaccgucgccuccucccucguccuccucgucucccucggcgccaucuccuucuggaugugcuccaacggcucccuccagugccgcaucugcaucuga

SEQ ID NO: 102315 - RNA, 1701 nt, Artificial Sequence
  derived and/or modified CDS sequence (opt2) from hemagglutinin__InfluenzaA__ADU59558
augaaggccauccucgucguccuccucuacaccuucgccaccgccaacgccgacacccucugcaucggcuaccacgccaacaacuccaccgacaccgucgacaccguccucgagaagaacgucaccgucacccacuccgucaaccuccucgaggacaagcacaacggcaagcucugcaagcuccgcggcgucgccccccuccaccucggcaagugcaacaucgccggcuggauccucggcaaccccgagugcgagucccucuccaccgccuccuccugguccuacaucgucgagaccuccuccuccgacaacggcaccugcuaccccggcgacuucaucgacuacgaggagcuccgcgagcagcucuccuccgucuccuccuucgagcgcuucgagaucuuccccaagaccuccuccuggcccaaccacgacuccaacaagggcgucaccgccgccugcccccacgccggcgccaaguccuucuacaagaaccucaucuggcucgucaagaagggcaacuccuaccccaagcucuccaaguccuacaucaacgacaagggcaaggagguccucguccucuggggcauccaccaccccuccaccuccgccgaccagcagucccucuaccagaacgccgacgccuacgucuucgucggcaccucccgcuacuccaagaaguucaagcccgagaucgccauccgccccaagguccgcggccaggagggccgcaugaacuacuacuggacccucgucgagcccggcgacaagaucaccuucgaggccaccggcaaccucgucgucccccgcuacgccuucgccauggagcgcaacgccggcuccggcaucaucaucuccgacacccccguccacgacugcaacaccaccugccagacccccaagggcgccaucaacaccucccuccccuuccagaacauccaccccaucaccaucggcaagugccccaaguacgucaaguccaccaagcuccgccucgccaccggccuccgcaacguccccuccauccagucccgcggccucuucggcgccaucgccggcuucaucgagggcggcuggaccggcauggucgacggcugguacggcuaccaccaccagaacgagcagggcuccggcuacgccgccgaccucaaguccacccagaacgccaucgacaagaucaccaacaaggucaacuccgucaucgagaagaugaacacccaguucaccgccgucggcaaggaguucaaccaccucgagaagcgcaucgagaaccucaacaagaaggucgacgacggcuuccucgacaucuggaccuacaacgccgagcuccucguccuccucgagaacgagcgcacccucgacuaccacgacuccaacgucaagaaccucuacgagaagguccgcucccagcucaagaacaacgccaaggagaucggcaacggcugcuucgaguucuaccacaagugcgacaacaccugcauggaguccgucaagaacggcaccuacgacuaccccaaguacuccgaggaggccaagcucaaccgcgaggagaucgacggcgucaagcucgaguccacccgcaucuaccagauccucgccaucuacuccaccgucgccuccucccucguccucgucgucucccucggcgccaucuccuucuggaugugcuccaacggcucccuccagugccgcaucugcaucuga

SEQ ID NO: 102316 - RNA, 1701 nt, Artificial Sequence; identical to SEQ ID NO: 98705
  derived and/or modified CDS sequence (opt2) from hemagglutinin__InfluenzaA__ADU59579

SEQ ID NO: 102317 - RNA, 1701 nt, Artificial Sequence; identical to SEQ ID NO: 98705
  derived and/or modified CDS sequence (opt2) from hemagglutinin__InfluenzaA__ADU59590

SEQ ID NO: 102318 - RNA, 1701 nt, Artificial Sequence; identical to SEQ ID NO: 98705
  derived and/or modified CDS sequence (opt2) from hemagglutinin__InfluenzaA__ADU59601

SEQ ID NO: 102319 - RNA, 1701 nt, Artificial Sequence; identical to SEQ ID NO: 98705
  derived and/or modified CDS sequence (opt2) from hemagglutinin__InfluenzaA__ADU59612

SEQ ID NO: 102320 - RNA, 1701 nt, Artificial Sequence; identical to SEQ ID NO: 98705
  derived and/or modified CDS sequence (opt2) from hemagglutinin__InfluenzaA__ADU59768

SEQ ID NO: 102321 - RNA, 1701 nt, Artificial Sequence; identical to SEQ ID NO: 98705
  derived and/or modified CDS sequence (opt2) from hemagglutinin__InfluenzaA__ADU59769

SEQ ID NO: 102322 - RNA, 1701 nt, Artificial Sequence; identical to SEQ ID NO: 98705
  derived and/or modified CDS sequence (opt2) from hemagglutinin__InfluenzaA__ADU59771

SEQ ID NO: 102323 - RNA, 1701 nt, Artificial Sequence; identical to SEQ ID NO: 98705
  derived and/or modified CDS sequence (opt2) from hemagglutinin__InfluenzaA__ADU59772

SEQ ID NO: 102324 - RNA, 1701 nt, Artificial Sequence; identical to SEQ ID NO: 98705
  derived and/or modified CDS sequence (opt2) from hemagglutinin__InfluenzaA__ADU59774

SEQ ID NO: 102325 - RNA, 1701 nt, Artificial Sequence; identical to SEQ ID NO: 98705
  derived and/or modified CDS sequence (opt2) from hemagglutinin__InfluenzaA__ADU59906

SEQ ID NO: 102326 - RNA, 1701 nt, Artificial Sequence; identical to SEQ ID NO: 98705
  derived and/or modified CDS sequence (opt2) from hemagglutinin__InfluenzaA__ADU59916

SEQ ID NO: 102327 - RNA, 1701 nt, Artificial Sequence; identical to SEQ ID NO: 98705
  derived and/or modified CDS sequence (opt2) from hemagglutinin__InfluenzaA__ADU76756

SEQ ID NO: 102328 - RNA, 1701 nt, Artificial Sequence; identical to SEQ ID NO: 98705
  derived and/or modified CDS sequence (opt2) from hemagglutinin__InfluenzaA__ADU76757

SEQ ID NO: 102329 - RNA, 1701 nt, Artificial Sequence; identical to SEQ ID NO: 98705
  derived and/or modified CDS sequence (opt2) from hemagglutinin__InfluenzaA__ADU76758

SEQ ID NO: 102330 - RNA, 1701 nt, Artificial Sequence; identical to SEQ ID NO: 98705
  derived and/or modified CDS sequence (opt2) from hemagglutinin__InfluenzaA__ADU76759

SEQ ID NO: 102331 - RNA, 1701 nt, Artificial Sequence; identical to SEQ ID NO: 99065
  derived and/or modified CDS sequence (opt2) from hemagglutinin__InfluenzaA__ADU76761

SEQ ID NO: 102332 - RNA, 1701 nt, Artificial Sequence; identical to SEQ ID NO: 98705
  derived and/or modified CDS sequence (opt2) from hemagglutinin__InfluenzaA__ADU76762

SEQ ID NO: 102333 - RNA, 1701 nt, Artificial Sequence
  derived and/or modified CDS sequence (opt2) from hemagglutinin__InfluenzaA__ADU76764
augaaggccauccucgucguccuccucuacaccuucgccaccgccaacgccgacacccucugcaucggcuaccacgccaacaacuccaccgacaccgucgacaccguccucgagaagaacgucaccgucacccacuccgucaaccuccucgaggacaagcacaacggcaagcucugcaagcuccgcggcgucgccccccuccaccucggcaagugcaacaucgccggcuggauccucggcaaccccgagugcgagucccucuccaccgccuccuccugguccuacaucgucgaggccuccuccuccaacaacggcaccugcuaccccggcgacuucaucgacuacgaggagcuccgcgagcagcucuccuccgucuccuccuucgagcgcuucgagaucuuccccaagaccuccuccuggcccaaccacgacuccaacaagggcgucaccgccgccugcccccacgccggcgccaaguccuucuacaagaaccucaucuggcucgucaagaagggcaacuccuaccccaagcucuccaaguccuacaucaacgacaagggcaaggagguccucguccucuggggcauccaccaccccuccaccuccgccgaccagcagucccucuaccagaacgccgacgccuacgucuucgucggcaccucccgcuacuccaagaaguucaagcccgagaucgccauccgccccaagguccgcgaccaggagggccgcaugaacuacuacuggacccucgucgagcccggcgacaagaucaccuucgaggccaccggcaaccucgucgucccccgcuacgccuucgccauggagcgcaacgccggcuccggcaucaucaucuccgacacccccguccacgacugcaacaccaccugccagacccccaagggcgccaucaacaccucccuccccuuccagaacauccaccccaucaccaucggcaagugccccaaguacgucaaguccaccaagcuccgccucgccaccggccuccgcaacguccccuccauccagucccgcggccucuucggcgccaucgccggcuucaucgagggcggcuggaccggcauggucgacggcugguacggcuaccaccaccagaacgagcagggcuccggcuacgccgccgaccucaaguccacccagaacgccaucgacgagaucaccaacaaggucaacuccgucaucgagaagaugaacacccaguucaucgccgucggcaaggaguucaaccaccucgagaagcgcaucgagaaccucaacaagaaggucgacgacggcuuccucgacaucuggaccuacaacgccgagcuccucguccuccucgagaacgagcgcacccucgacuaccacgacuccaacgucaagaaccucuacgagaagguccgcucccagcucaagaacaacgccaaggagaucggcaacggcugcuucgaguucuaccacaagugcgacaacaccugcauggaguccgucaagaacggcaccuacgacuaccccaaguacuccgaggaggccaagcucaaccgcgaggagaucgacggcgucaagcucgaguccacccgcaucuaccagauccucgccaucuacuccaccgucgccuccucccucguccucgucgucucccucggcgccaucuccuucuggaugugcuccaacggcucccuccagugccgcaucugcaucuga

SEQ ID NO: 102334 - RNA, 1701 nt, Artificial Sequence
  derived and/or modified CDS sequence (opt2) from hemagglutinin__InfluenzaA__ADU76765
augaaggccauccucaucguccuccucuacaccuucgccaccgccaacgccgacacccucugcaucggcuaccacgccaacaacuccaccgacaccgucgacaccguccucgagaagaacgucaccgucacccacuccgucaaccuccucgaggacaagcacaacggcaagcucugcaagcuccgcggcgucgccccccuccaccucggcaagugcaacaucgccggcuggauccucggcaaccccgagugcgagucccucuccaccgccuccuccugguccuacaucgucgagaccuccuccuccgacaacggcaccugcuaccccggcgacuucaucgacuacgaggagcuccgcgagcagcucuccuccgucuccuccuucgagcgcuucgagaucuuccccaagaccuccuccuggcccaaccacgacuccaacaagggcgucaccgccgccugcccccacgccggcgccaaguccuucuacaagaaccucaucuggcucgucaagaagggcaacuccuaccccaagcucuccaaguccuacaucaacgacaagggcaaggagguccucguccucuggggcauccaccaccccuccaccuccgccgaccagcagucccucuaccagaacgccgacgccuacgucuucgucggcaccucccgcuacuccaagaaguucaagcccgagaucgccauccgccccaagguccgcgaccaggagggccgcaugaacuacuacuggacccucgucgagcccggcgacaagaucaccuucgaggccaccggcaaccucgucgucccccgcuacgccuucgccauggagcgcaacgccggcuccggcaucaucaucuccgacacccccguccacgacugcaacaccaccugccagacccccaagggcgccaucaacaccucccuccccuuccagaacauccaccccaucaccaucggcaagugccccaaguacgucaaguccaccaagcuccgccucgccaccggccuccgcaacguccccuccauccagucccgcggccucuucggcgccaucgccggcuucaucgagggcggcuggaccggcauggucgacggcugguacggcuaccaccaccagaacgagcagggcuccggcuacgccgccgaccucaaguccacccagaacgccaucgacgagaucaccaacaaggucaacuccgucaucgagaagaugaacacccaguucaccgccgucggcaaggaguucaaccaccucgagaagcgcaucgagaaccucaacaagaaggucgacgacggcuuccucgacaucuggaccuacaacgccgagcuccucguccuccucgagaacgagcgcacccucgacuaccacgacuccaacgucaagaaccucuacgagaagguccgcucccagcucaagaacaacgccaaggagaucggcaacggcugcuucgaguucuaccacaagugcgacaacaccugcauggaguccgucaagaacggcaccuacgacuaccccaaguacuccgaggaggccaagcucaaccgcgaggagaucgacggcgucaagcucgaguccacccgcaucuaccagauccucgccaucuacuccuccgucgccuccucccucguccucgucgucucccucggcgccaucuccuucuggaugugcuccaacggcucccuccagugccgcaucugcaucuga

SEQ ID NO: 102335 - RNA, 1701 nt, Artificial Sequence; identical to SEQ ID NO: 100302
  derived and/or modified CDS sequence (opt2) from hemagglutinin__InfluenzaA__ADU76766

SEQ ID NO: 102336 - RNA, 1701 nt, Artificial Sequence
  derived and/or modified CDS sequence (opt2) from hemagglutinin__InfluenzaA__ADU76767
augaaggccauccucgucguccuccucuacaccuucgccaccgccaacgccgacacccucugcaucggcuaccacgccaacaacuccaccgacaccgucgacaccguccucgagaagaacgucaccgucacccacuccgucaaccuccucgaggacaagcacaacggcaagcucugcaagcuccgcggcgucgccccccuccaccucggcaagugcaacaucgccggcuggauccucggcaaccccgagugcgagucccucuccaccgccuccuccugguccuacaucgucgagaccuccuccuccgacaacggcaccugcuaccccggcgacuucaucgacuacgaggagcuccgcgagcagcucuccuccgucuccuccuucgagcgcuucgagaucuuccccaagaccuccuccuggcccaaccacgacuccaacaagggcgucaccgccgccugcccccacgccggcgccaaguccuucuacaagaaccucaucuggcucgucaagaagggcaacuccuaccccaagcucuccaaguccuacaucaacgacaagggcaaggagguccucguccucuggggcauccaccaccccuccaccuccgccgaccagcagucccucuaccagaacgccgacgccuacgucuucgucggcaccucccgcuacuccaagaaguucaagcccgagaucgccauccgccccaagguccgcgagcaggagggccgcaugaacuacuacuggacccucgucgagcccggcgacaagaucaccuucgaggccaccggcaaccucgucgucccccgcuacgccuucgccauggagcgcaacgccggcuccggcaucaucaucuccgacacccccguccacgacugcaacaccaccugccagacccccaagggcgccaucaacaccucccuccccuuccagaacauccaccccaucaccaucggcaagugccccaaguacgucaaguccaccaagcuccgccucgccaccggccuccgcaacguccccuccauccagucccgcggccucuucggcgccaucgccggcuucaucgagggcggcuggaccggcauggucgacggcugguacggcuaccaccaccagaacgagcagggcuccggcuacgccgccgaccucaaguccacccagaacgccaucgacaagaucaccaacaaggucaacuccgucaucgagaagaugaacacccaguucaccgccgucggcaaggaguucaaccaccucgagaagcgcaucgagaaccucaacaagaaggucgacgacggcuuccucgacaucuggaccuacaacgccgagcuccucguccuccucgagaacgagcgcacccucgacuaccacgacuccaacgucaagaaccucuacgagaagguccgcucccagcucaagaacaacgccaaggagaucggcaacggcugcuucgaguucuaccacaagugcgacaacaccugcauggaguccgucaagaacggcaccuacgacuaccccaaguacuccgaggaggccaagcucaaccgcgaggagaucgacggcgucaagcucgaguccacccgcaucuaccagauccucgccaucuacuccaccgucgccuccucccucguccucgucgucucccucggcgccaucuccuucuggaugugcuccaacggcucccuccagugccgcaucugcaucuga

SEQ ID NO: 102337 - RNA, 1701 nt, Artificial Sequence
  derived and/or modified CDS sequence (opt2) from hemagglutinin__InfluenzaA__ADU76768
augaaggccauccucgucguccuccucuacaccuucgccaucgccaacgccgacacccucugcaucggcuaccacgccaacaacuccaccgacaccgucgacaccguccucgagaagaacgucaccgucacccacuccgucaaccuccucgaggacaagcacaacggcaagcucugcaagcuccgcggcgucgccccccuccaccucggcaagugcaacaucgccggcuggauccucggcaaccccgagugcgagucccucuccaccgccuccuccugguccuacaucgucgagaccuccuccuccgacaacggcaccugcuaccccggcgacuucaucgacuacgaggagcuccgcgagcagcucuccuccgucuccuccuucgagcgcuucgagaucuuccccaagaccuccuccuggcccaaccacgacuccaacaagggcgucaccgccgccugcccccacgccggcgccaaguccuucuacaagaaccucaucuggcucgucaagaagggcaacuccuaccccaagcucuccaaguccuacaucaacgacaagggcaaggagguccucguccucuggggcauccaccaccccuccaccuccgccgaccagcagucccucuaccagaacgccgacgccuacgucuucgucggcaccuccaaguacuccaagaaguucaagcccgagaucgccauccgccccaagguccgcgaccaggagggccgcaugaacuacuacuggacccucgucgagcccggcgacaagaucaccuucgaggccaccggcaaccucgucgucccccgcuacgccuucgccauggagcgcaacgccggcuccggcaucaucaucuccgacacccccguccacgacugcaacaccaccugccagacccccaagggcgccaucaacaccucccuccccuuccagaacauccaccccaucaccaucggcaagugccccaaguacgucaaguccaccaagcuccgccucgccaccggccuccgcaacguccccuccauccagucccgcggccucuucggcgccaucgccggcuucaucgagggcggcuggaccggcauggucgacggcugguacggcuaccaccaccagaacgagcagggcuccggcuacgccgccgaccucaaguccacccagcacgccaucgacgagaucaccaacaaggucaacuccgucaucgagaagaugaacacccaguucaccgccgucggcaaggaguucaaccaccucgagaagcgcaucgagaaccucaacaagaaggucgacgacggcuuccucgacaucuggaccuacaacgccgagcuccucguccuccucgagaacgagcgcacccucgacuaccacgacuccaacgucaagaaccucuacgagaagguccgcucccagcucaagaacaacgccaaggagaucggcaacggcugcuucgaguucuaccacaagugcgacaacaccugcauggaguccgucaagaacggcaccuacgacuaccccaaguacuccgaggaggccaagcucaaccgcgaggagaucaacggcgucaagcucgaguccacccgcaucuaccagauccucgccaucuacuccaccgucgccuccucccucguccucgucgucucccucggcgccaucuccuucuggaugugcuccaacggcucccuccagugccgcaucugcaucuga

SEQ ID NO: 102338 - RNA, 1701 nt, Artificial Sequence; identical to SEQ ID NO: 98705
  derived and/or modified CDS sequence (opt2) from hemagglutinin__InfluenzaA__ADU76769

SEQ ID NO: 102339 - RNA, 1701 nt, Artificial Sequence; identical to SEQ ID NO: 98705
  derived and/or modified CDS sequence (opt2) from hemagglutinin__InfluenzaA__ADU76770

SEQ ID NO: 102340 - RNA, 1701 nt, Artificial Sequence; identical to SEQ ID NO: 98705
  derived and/or modified CDS sequence (opt2) from hemagglutinin__InfluenzaA__ADU76771

SEQ ID NO: 102341 - RNA, 1701 nt, Artificial Sequence; identical to SEQ ID NO: 99450
  derived and/or modified CDS sequence (opt2) from hemagglutinin__InfluenzaA__ADU76772

SEQ ID NO: 102342 - RNA, 1701 nt, Artificial Sequence; identical to SEQ ID NO: 98705
  derived and/or modified CDS sequence (opt2) from hemagglutinin__InfluenzaA__ADU76774

SEQ ID NO: 102343 - RNA, 1701 nt, Artificial Sequence; identical to SEQ ID NO: 98705
  derived and/or modified CDS sequence (opt2) from hemagglutinin__InfluenzaA__ADU76775

SEQ ID NO: 102344 - RNA, 1701 nt, Artificial Sequence; identical to SEQ ID NO: 98705
  derived and/or modified CDS sequence (opt2) from hemagglutinin__InfluenzaA__ADU76776

SEQ ID NO: 102345 - RNA, 1701 nt, Artificial Sequence; identical to SEQ ID NO: 98705
  derived and/or modified CDS sequence (opt2) from hemagglutinin__InfluenzaA__ADU76777

SEQ ID NO: 102346 - RNA, 1701 nt, Artificial Sequence; identical to SEQ ID NO: 98705
  derived and/or modified CDS sequence (opt2) from hemagglutinin__InfluenzaA__ADU76778

SEQ ID NO: 102347 - RNA, 1701 nt, Artificial Sequence; identical to SEQ ID NO: 101563
  derived and/or modified CDS sequence (opt2) from hemagglutinin__InfluenzaA__ADU76779

SEQ ID NO: 102348 - RNA, 1701 nt, Artificial Sequence; identical to SEQ ID NO: 98705
  derived and/or modified CDS sequence (opt2) from hemagglutinin__InfluenzaA__ADU76780

SEQ ID NO: 102349 - RNA, 1701 nt, Artificial Sequence; identical to SEQ ID NO: 100302
  derived and/or modified CDS sequence (opt2) from hemagglutinin__InfluenzaA__ADU76781

SEQ ID NO: 102350 - RNA, 1701 nt, Artificial Sequence; identical to SEQ ID NO: 99065
  derived and/or modified CDS sequence (opt2) from hemagglutinin__InfluenzaA__ADU76782

SEQ ID NO: 102351 - RNA, 1701 nt, Artificial Sequence
  derived and/or modified CDS sequence (opt2) from hemagglutinin__InfluenzaA__ADU76784
augaaggccauccucgucguccuccucuacaccuucgccaccgccaacgccgacacccucugcaucggcuaccacgccaacaacuccaccgacaccgucgacaccguccucgagaagaacgucaccgucacccacuccgucaaccuccucgaggacaagcacaacggcaagcucugcaagcuccgcggcgucgccccccuccaccucggcaagugcaacaucgccggcuggauccucggcaaccccgagugcgagucccucuccaccgccuccuccugguccuacaucgucgagaccuccuccuccaacaacggcaccugcuaccccggcgacuucaucgacuacgaggagcuccgcgagcagcucuccuccgucuccuccuucgagcgcuucgagaucuuccccaagaccuccuccuggcccaaccacgacuccaacaagggcgucaccgccgccugcccccacgccggcgccaaguccuucuacaagaaccucaucuggcucgucaagaagggcaacuccuaccccaagcucuccaaguccuacaucaacgacaagggcaaggagguccucguccucuggggcauccaccaccccuccaccuccgccgaccagcagucccucuaccagaacgccgacgccuacgucuucgucggcaccucccgcuacuccaagaaguucaagcccgagaucgccauccgccccaagguccgcgaccaggagggccgcaugaacuacuacuggacccucgucgagcccggcgacaagaucaccuucgaggccaccggcaaccucgucgucccccgcuacgccuucgccauggagcgcaacgccggcuccggcaucaucaucuccgacacccccguccacgacugcaacaccaccugccagacccccaagggcgccaucaacaccucccuccccuuccagaacauccaccccaucaccaucggcaagugccccaaguacgucaaguccaccaagcuccgccucgccaccggccuccgcaacguccccuccauccagucccgcggccucuucggcgccaucgccggcuucaucgagggcggcuggaccggcauggucgacggcugguacggcuaccaccaccagaacgagcagggcuccggcuacgccgccgaccucaaguccacccagaacgccaucgacgagaucaccaacaaggucaacuccgucaucgagaagaugaacacccaguucaccgccgucggcaaggaguucaaccaccucgagaagcgcaucgagaaccucaacaagaaggucgacgacggcuuccucgacaucuggaccuacaacgccgagcuccucguccuccucgagaacgagcgcacccucgacuaccacgacuccaacgucaagaaccucuacgagaagguccgcucccagcucaagaacaacgccaaggagaucggcaacggcugcuucgaguucuaccacaagugcgacaacaccugcauggaguccgucaagaacggcaccuacgacuaccccaaguacuccgaggaggccaagcucaaccgcgaggagaucgacggcgucaagcucgaguccacccgcaucuaccagauccucgccaucuacuccaccgucgccuccucccucguccucgucgucucccucggcgccaucuccuucuggaugugcuccaacggcucccuccagugccgcaucugcaucuga

SEQ ID NO: 102352 - RNA, 1701 nt, Artificial Sequence; identical to SEQ ID NO: 98705
  derived and/or modified CDS sequence (opt2) from hemagglutinin__InfluenzaA__ADU76785

SEQ ID NO: 102353 - RNA, 1701 nt, Artificial Sequence; identical to SEQ ID NO: 98705
  derived and/or modified CDS sequence (opt2) from hemagglutinin__InfluenzaA__ADU76786

SEQ ID NO: 102354 - RNA, 1701 nt, Artificial Sequence
  derived and/or modified CDS sequence (opt2) from hemagglutinin__InfluenzaA__ADU76787
augaaggccauccucgucguccuccucuacaccuucgccaccgccaacgccgacacccucugcaucggcuaccacgccaacaacuccaccgacaccgucgacaccguccucgagaagaacgucaccgucacccacuccgucaaccuccucgaggacaagcacaacggcaagcucugcaagcuccgcggcgucgccccccuccaccucggcaagugcaacaucgccggcuggauccucggcaaccccgagugcgagucccucuccaccgccuccuccugguccuacaucgucgagaccuccuccuccgacaacggcaccugcuaccccggcgacuucaucgacuacgaggagcuccgcgagcagcucuccuccgucuccuccuucgagcgcuucgagaucuuccccaagaccuccuccuggcccaaccacgacuccaacaagggcgucaccgccgccugcccccacgccggcgccaaguccuucuacaagaaccucaucuggcucgucaagaagggcaacuccuaccccaagcucuccaaguccuacaucaacgacaagggcaaggagguccucguccucuggggcauccaccaccccuccaccuccgccgaccagcagucccucuaccagaacgccgacgccuacgucuucgucggcaccucccgcuacuccaagaaguucaagcccgagaucgccauccgccccaagguccgcgagcaggagggccgcaugaacuacuacuggacccucgucgagcccggcgacaagaucaccuucgaggccaccggcaaccucgucgucccccgcuacgccuucgccauggagcgcaacgccggcuccggcaucaucaucuccgacacccccguccacgacugcaacaccaccugccagacccccaagggcgccaucaacaccucccuccccuuccacaacauccacuccaucaccaucggcaagugccccaaguacgucaaguccaccaagcuccgccucgccaccggccuccgcaacguccccuccauccagucccgcggccucuucggcgccaucgccggcuucaucgagggcggcuggaccggcauggucgacggcugguacggcuaccaccaccagaacgagcagggcuccggcuacgccgccgaccucaaguccacccagaacgccaucgacgagaucaccaacaaggucaacuccgucaucgagaagaugaacacccaguucaccgccgucggcaaggaguucaaccaccucgagaagcgcaucgagaaccucaacaagaaggucgacgacggcuuccucgacaucuggaccuacaacgccgagcuccucguccuccucgagaacgagcgcacccucgacuaccacgacuccaacgucaagaaccucuacgagaagguccgcucccagcucaagaacaacgccaaggagaucggcaacggcugcuucgaguucuaccacaagugcgacaacaccugcauggaguccgucaagaacggcaccuacgacuaccccaaguacuccgaggaggccaagcucaaccgcgaggagaucgacggcgucaagcucgaguccacccgcaucuaccagauccucgccaucuacuccaccgucgccuccucccucguccucgucgucucccucggcgccaucuccuucuggaugugcuccaacggcucccuccagugccgcaucugcaucuga

SEQ ID NO: 102355 - RNA, 1701 nt, Artificial Sequence; identical to SEQ ID NO: 102336
  derived and/or modified CDS sequence (opt2) from hemagglutinin__InfluenzaA__ADU76788

SEQ ID NO: 102356 - RNA, 1701 nt, Artificial Sequence; identical to SEQ ID NO: 102336
  derived and/or modified CDS sequence (opt2) from hemagglutinin__InfluenzaA__ADU76789

SEQ ID NO: 102357 - RNA, 1701 nt, Artificial Sequence; identical to SEQ ID NO: 98705
  derived and/or modified CDS sequence (opt2) from hemagglutinin__InfluenzaA__ADU76790

SEQ ID NO: 102358 - RNA, 1701 nt, Artificial Sequence; identical to SEQ ID NO: 98705
  derived and/or modified CDS sequence (opt2) from hemagglutinin__InfluenzaA__ADU76791

SEQ ID NO: 102359 - RNA, 1701 nt, Artificial Sequence; identical to SEQ ID NO: 102336
  derived and/or modified CDS sequence (opt2) from hemagglutinin__InfluenzaA__ADU76792

SEQ ID NO: 102360 - RNA, 1701 nt, Artificial Sequence
  derived and/or modified CDS sequence (opt2) from hemagglutinin__InfluenzaA__ADU76793
augaaggccauccucgucguccuccucuacaccuucgccaccgccaacgccgacacccucugcaucggcuaccacgccaacaacuccaccgacaccgucgacaccguccucgagaagaacgucaccgucacccacuccgucaaccuccucgaggacaagcacaacggcaagcucugcaagcuccgcggcgucgccccccuccaccucggcaagugcaacaucgccggcuggauccucggcaaccccgagugcgagucccucuccaccgccuccuccugguccuacaucgucgagaccuccuccuccgacaacggcaccugcuaccccggcgacuucaucgacuacgaggagcuccgcgagcagcucuccuccgucuccuccuucgagaaguucgagaucuuccccaagaccuccuccuggcccaaccacgacuccaacaagggcgucaccgccgccugcccccacgccggcaccaaguccuucuacaagaaccucaucuggcucgucaagaagggcaacuccuaccccaagcucuccaaguccuacaucaacgacaagggcaaggagguccucguccucuggggcauccaccaccccuccaccuccgccgaccagcagucccucuaccagaacgccgacgccuacgucuucgucggcaccucccgcuacuccaagaaguucaagcccgagaucgccauccgccccaagguccgcgaccaggagggccgcaugaacuacuacuggacccucgucgagcccggcgacaagaucaccuucgaggccaccggcaaccucgucgucccccgcuacgccuucgccauggagcgcaacgccggcuccggcaucaucaucuccgacacccccguccacgacugcaacaccaccugccagacccccaagggcgccaucaacaccucccuccccuuccagaacauccaccccaucaccaucggcaagugccccaaguacgucaaguccaccaagcuccgccucgccaccggccuccgcaacguccccuccauccagucccgcggccucuucggcgccaucgccggcuucaucgagggcggcuggaccggcauggucgacggcugguacggcuaccaccaccagaacgagcagggcuccggcuacgccgccgaccucaaguccacccagaacgccaucgacaagaucaccaacaaggucaacuccgucaucgagaagaugaacacccaguucaccgccgucggcaaggaguucaaccaccucgagaagcgcaucgagaaccucaacaagaaggucgacgacggcuuccucgacaucuggaccuacaacgccgagcuccucguccuccucgagaacgagcgcacccucgacuaccacgacuccaacgucaagaaccucuacgagaagguccgcucccagcucaagaacaacgccaaggagaucggcaacggcugcuucgaguucuaccacaagugcgacaacaccugcauggaguccgucaagaacggcaccuacgacuaccccaaguacuccgaggaggccaagcucaaccgcgaggagaucgacggcgucaagcucgaguccacccgcaucuaccagauccucgccaucuacuccaccgucgccuccucccucguccucgucgucucccucggcgccaucuccuucuggaugugcuccaacggcucccuccagugccgcaucugcaucuga

SEQ ID NO: 102361 - RNA, 1701 nt, Artificial Sequence
  derived and/or modified CDS sequence (opt2) from hemagglutinin__InfluenzaA__ADU85911
augaaggccaucaucgucguccuccucuacaccuucgccaccgccgacgccgacacccucugcaucggcuaccacgccaacaacuccaccgacaccgucgacaccguccucgagaagaacgucaccgucacccacuccgucaaccuccucgagaacaagcacaacggcaagcucugcaagcucggcggcaucgccccccuccaccucggcaagugcgacaucgccggcuggcuccucggcaaccccgagugcgagucccucuucaccgccuccuccugguccuacaucgucgagacccccaacuccgacaacggcaccugcuaccccggcgacuucaucaacuacgaggagcuccgcgagcaccucuccuccgucuccuccuucgagcgcuucgagaucuuccccaaggccaacuccuggcccaaccacgacaccaacaagggcgucaccgccgccugccccuacgccggcgccaacuccuucuaccgcaaccucaucuggcucgucaagaagggcaacuccuaccccaagcucuccaaguccuacaucaacaacaagaagaaggagguccucgucaucuggggcauccaccacccccccaccuccaccgaccagcagacccucuaccagaacgccgacgccuacgucuucgucggcuccuccaaguacuccaagcgcuucaagcccgagaucgccgcccgccccaagguccgcgaccaggccggccgcauggacuacuacuggacccucaucgagcccggcgacaccaucaccuucgaggccaccggcaaccucgucgucccccgcuacgccuucgccaugaagcgcggcuccggcuccggcaucaucgucuccgacgcccccguccacgacugcaacaccaccugccagacccccaagggcgccaucaacaccucccuccccuuccagaacauccaccccgucaccaucggcgagugccccaaguacgucaaguccaccaagcuccgcauggccaccggccuccgcaacauccccuccauccagucccgcggccucuucggcgccaucgccggcuuccucgagggcggcuggaccggcaugaucgacggcugguacggcuaccaccaccagaacgagcagggcuccggcuacgccgccgaccagaaguccacccagaacgccaucgacggcaucaccaacaaggucaacuccaucaucgagaagaugaacacccaguucaccgccgucggcaaggaguucucccagcucgagaagcgcaucgagucccucaacaacaaggucgacgacggcuuccucgacaucuggaccuacaacgccgagcuccucguccuccucgagaacgagcgcacccucgacuaccacgacuccaacgucaagaaccucuacgagaagguccgcucccagcucaagaacaacgccaaggagaucggcaacggcugcuucgaguucuaccacaagugcgacaacaccugcauggaguccgucaagaacggcaccuacgacuaccccaaguacuccgaggaggccaagcucaaccgcgaggagaucgacggcgucaagcucgaguccgcccgcaucuaccagauccucgccaucuacuccaccgucgccuccucccucguccuccucgucucccucggcgccaucuccuucuggaugugcuccaacggcucccuccagugccgcaucugcaucuga

SEQ ID NO: 102362 - RNA, 1701 nt, Artificial Sequence; identical to SEQ ID NO: 99869
  derived and/or modified CDS sequence (opt2) from hemagglutinin__InfluenzaA__ADV17283

SEQ ID NO: 102363 - RNA, 1701 nt, Artificial Sequence; identical to SEQ ID NO: 99869
  derived and/or modified CDS sequence (opt2) from hemagglutinin__InfluenzaA__ADV17293

SEQ ID NO: 102364 - RNA, 1701 nt, Artificial Sequence
  derived and/or modified CDS sequence (opt2) from hemagglutinin__InfluenzaA__ADV17303
augaaggccauccucgucguccuccucuacaccuucgccaccgccaacgccgacacccucugcaucggcuaccacgccaacaacuccaccgacaccgucgacaccguccucgagaagaacgucaccgucacccacuccgucaaccuccucgaggacaagcacaacggcaagcucugcaagcuccgcggcgucgccccccuccaccucggcaagugcaacaucgccggcuggauccucggcaaccccgagugcgagucccucuccaccgccuccuccugguccuacaucgucgagaccuccuccuccgacaacggcaccugcuaccccggcgacuucaucgacuacgaggagcuccgcgagcagcucuccuccgucuccuccuucgagcgcuucgagaucuuccccaagaccuccuccuggcccaaccacgacuccaacaagggcgucaccgccgccugcccccacgccggcgccaaguccuucuacaagaaccucaucuggcucgucaagaagggcaacuccuaccccaagcucuccaaguccuacaucaacgacaagggcaaggagguccucguccucuggggcauccaccaccccuccaccuccgccgaccagcagucccucuaccagaacgccgacgccuacgucuucgucggcaccucccgcuacuccaagaaguucaagcccgagaucgccauccgccccaagguccgcgaccaggagggccgcaugaacuacuacuggacccucgucgagcccggcgacaagaucaccuucgaggccaccggcaaccucgucgucccccgcuacgccuucgccauggagcgcaacgccggcuccggcaucaucaucuccgacacccccguccacgacugcaacaccaccugccagacccccaagggcgccaucaacaccucccuccccuuccagaacauccaccccaucaccaucggcaagugccccaaguacgucaaguccaccaagcuccgccucgccaagggccuccgcaacguccccuccauccagucccgcggccucuucggcgccaucgccggcuucaucgagggcggcuggaccggcauggucgacggcugguacggcuaccaccaccagaacgagcagggcuccggcuacgccgccgaccucaaguccacccagaacgccaucgacgagaucaccaacaaggucaacuccgucaucgagaagaugaacacccaguucaccgccgucggcaaggaguucaaccaccucgagaagcgcaucgagaaccucaacaagaaggucgacgacggcuuccucgacaucuggaccuacaacgccgagcuccucguccuccucgagaacgagcgcacccucgacuaccacgacuccaacgucaagaaccucuacgagaagguccgcucccagcucaagaacaacgccaaggagaucggcaacggcugcuucgaguucuaccacaagugcgacaacaccugcauggaguccgucaagaacggcaccuacgacuaccccaaguacuccgaggaggccaagcucaaccgcgaggagaucgacggcgucaagcucgaguccacccgcaucuaccagauccucgccaucuacuccaccgucgccuccucccucguccucgucgucucccucggcgccaucuccuucuggaugugcuccaacggcucccuccagugccgcaucugcaucuga

SEQ ID NO: 102365 - RNA, 1701 nt, Artificial Sequence; identical to SEQ ID NO: 99869
  derived and/or modified CDS sequence (opt2) from hemagglutinin__InfluenzaA__ADV17313

SEQ ID NO: 102366 - RNA, 1701 nt, Artificial Sequence
  derived and/or modified CDS sequence (opt2) from hemagglutinin__InfluenzaA__ADV17323
augaaggccauccucgucguccuccucuacaccuucgccaccaccaacgccgacacccucugcaucggcuaccacgccaacaacuccaccgacaccgucgacaccguccucgagaagaacgucaccgucacccacuccgucaaccuccucgaggacaagcacaacggcaagcucugcaagcuccgcggcgucgccccccuccaccucggcaagugcaacaucgccggcuggauccucggcaaccccgagugcgagucccucuccaccgccuccuccugguccuacaucgucgagaccuccuccuccgacaacggcaccugcuaccccggcgacuucaucgacuacgaggagcuccgcgagcagcucuccuccgucuccuccuucgagcgcuucgagaucuuccccaagaccaacuccuggcccaaccacgacuccaacaagggcgucaccgccgccugcccccacgccggcgccaaguccuucuacaagaaccucaucuggcucgucaagaagggcaacuccuaccccaagcucuccaaguccuacaucaacgacaagggcaaggagguccucguccucuggggcauccaccaccccuccaccuccgccgaccagcagggccucuaccagaacgccgacgccuacgucuucgucggcaccucccgcuacuccaagaaguucaagcccgagaucgccauccgccccaagguccgcgaccaggagggccgcaugaacuacuacuggacccucgucgagcccggcgacaagaucaccuucgaggccaccggcaaccucgucgucccccgcuacgccuucgccauggagcgcaacgccggcuccggcaucaucaucuccgacacccccguccacgacugcaacaccaccugccagacccccgagggcgccaucaacaccucccuccccuuccagaacauccaccccaucaccaucggcaagugccccaaguacgucaaguccaccaagcuccgccucgccaccggccuccgcaacguccccuccauccagucccgcggccucuucggcgccaucgccggcuucaucgagggcggcuggaccggcauggucgacggcugguacggcuaccaccaccagaacgagcagggcuccggcuacgccgccgaccucaaguccacccagaacgccaucgacaagaucaccaacaaggucaacuacgucaucgagaagaugaacacccaguucaccgccgucggcaaggaguucaaccaccucgagaagcgcaucgagaaccucaacaagaaggucgacgacggcuuccucgacaucuggaccuacaacgccgagcuccucguccuccucgagaacgagcgcacccucgacuaccacgacuccaacgucaagaaccucuacgagaagguccgcucccagcucaagaacaacgccaaggagaucggcaacggcugcuucgaguucuaccacaagugcgacaacaccugcauggaguccgucaagaacggcaccuacgacuaccccaaguacuccgaggaggccaagcucaaccgcgaggagaucgacggcgucaagcucgaguccacccgcaucuaccagauccucgccaucuacuccaccgucgccuccucccucguccucgucgucucccucggcgccaucuccuucuggaugugcuccaacggcucccuccagugccgcaucugcaucuga

SEQ ID NO: 102367 - RNA, 1701 nt, Artificial Sequence
  derived and/or modified CDS sequence (opt2) from hemagglutinin__InfluenzaA__ADV17333
augaaggccauccucgucguccuccucuacaccuucgccaccgccaacgccgacacccucugcaucggcuaccacgccaacaacuccaccgacaccgucgacaccguccucgagaagaacgucaccgucacccacuccgucaaccuccucgaggacaagcacaacggcaagcucugcaagcuccgcggcgucgccccccuccaccucggcaagugcaacaucgccggcuggauccucggcaaccccgagugcgagucccucuccaccgccuccuccugguccuacaucgucgagaccuccuccuccgacaacggcaccugcuaccccggcgacuucaucgacuacgaggagcuccgcgagcagcucuccuccgucuccuccuucgagcgcuucgagaucuuccccaagaccuccuccuggcccaaccacgacuccaacaagggcgucaccgccgccugcccccacgccggcgccaaguccuucuacaagaaccucaucuggcucgucaagaagggcaacuccuaccccaagcucuccaaguccuacaucaacgacaagggcaaggagguccucguccucuggggcauccaccaccccuccaccuccgccgaccagcagaaccucuaccagaacgccgacgccuacgucuucgucggcaccucccgcuacuccaagaaguucaagcccgagaucgccauccgccccaagguccgcgaccaggagggccgcaugaacuacuacuggacccucgucgagcccggcgacaagaucaccuucgaggccaccggcaaccucgucguccuccgcuacgccuucgccauggagcgcaacgccggcuccggcaucaucaucuccgacacccccguccacgacugcaacaccaccugccagacccccaagggcgccaucaacaccucccuccccuuccagaacauccaccccaucaccaucggcaagugccccaaguacgucaaguccaccaagcuccgccucgccaccggccuccgcaacguccccuccauccagucccgcggccucuucggcgccaucgccggcuucaucgagggcggcuggaccggcauggucgacggcugguacggcuaccaccaccagaacgagcagggcuccggcuacgccgccgaccucaaguccacccagaacgccaucgacaagaucaccaacaaggucaacuccgucaucgagaagaugaacacccaguucaccgccgucggcaaggaguucaaccaccucgagaagcgcaucgagaaccucaacaagaaggucgacgacggcuuccucgacaucuggaccuacaacgccgagcuccucguccuccucgagaacgagcgcacccucgacuacuacgacuccaacgucaagaaccucuacgagaagguccgcucccagcucaagaacaacgccaaggagaucggcaacggcugcuucgaguucuaccacaagugcgacaacaccugcauggaguccgucaagaacggcaccuacgacuaccccaaguacuccgaggaggccaagcucaaccgcgaggagaucgacggcgucaagcucgaguccacccgcaucuaccagauccucgucaucuacuccaccgucgccuccucccucguccucgucgucucccucggcgccaucuccuucuggaugugcuccaacggcucccuccagugccgcaucugcaucuga

SEQ ID NO: 102368 - RNA, 1701 nt, Artificial Sequence; identical to SEQ ID NO: 98705
  derived and/or modified CDS sequence (opt2) from hemagglutinin__InfluenzaA__ADV19019

SEQ ID NO: 102369 - RNA, 1701 nt, Artificial Sequence; identical to SEQ ID NO: 99190
  derived and/or modified CDS sequence (opt2) from hemagglutinin__InfluenzaA__ADV41677

SEQ ID NO: 102370 - RNA, 1701 nt, Artificial Sequence
  derived and/or modified CDS sequence (opt2) from hemagglutinin__InfluenzaA__ADV58939
augaaggccauccucgucguccuccucuacaccuucgccaccgccaacgccgacacccucugcaucggcuaccacgccaacaacuccaccgacaccgucgacaccguccucgagaagaacgucaccgucacccacuccgucaaccuccucgaggacaagcacaacggcaagcucugcaagcuccgcggcgucgccccccuccaccucggcaagugcaacaucgccggcuggauccucggcaaccccgagugcgagucccucuccaccgccuccuccugguccuacaucgucgagaccuccuccuccgacaacggcaccugcuaccccggcgacuucaucgacuacgaggagcuccgcgagcagcucuccuccgucuccuccuucgagcgcuucgagaucuuccccaagaccuccuccuggcccaaccacgacuccaacaagggcgucaccgccgccugcccccacgccggcgccaagggcuucuacaagaaccucaucuggcucgucaagaagggcaacuccuaccccaagcucuccaaguccuacaucaacgacaagggcaaggagguccucguccucuggggcauccaccaccccuccaccaccgccgaccagcagucccucuaccagaacgccgacaccuacgucuucgucggcaccucccgcuacuccaagaaguucaagcccgagaucgccauccgccccaagguccgcgaccaggagggccgcaugaacuacuacuggacccucgucgagcccggcgacaagaucaccuucgaggccaccggcaaccucgucgucccccgcuacgccuucgccauggagcgcaacgccggcuccggcaucaucaucuccgacacccccguccacgacugcaacaccaccugccagacccccaagggcgccaucaacaccucccuccccuuccagaacauccaccccaucaccaucggcaagugccccaaguacgucaaguccaccaagcuccgccucgccaccggccuccgcaacguccccuccauccagucccgcggccucuucggcgccaucgccggcuucaucgagggcggcuggaccggcauggucgacggcugguacggcuaccaccaccagaacgagcagggcuccggcuacgccgccgaccucaaguccacccagaacgccaucgacaagaucaccaacaaggucaacuccgucaucgagaagaugaacacccaguucaccgccgucggcaaggaguucaaccaccucgagaagcgcaucgagaaccucaacaagaaggucgacgacggcuuccucgacaucuggaccuacaacgccgagcuccucguccuccucgagaacgagcgcacccucgacuaccacgacuccaacgucaagaaccucuacgagaagguccgcaaccagcucaagaacaacgccaaggagaucggcaacggcugcuucgaguucuaccacaagugcgacaacaccugcauggaguccgucaagaacgagaccuacgacuaccccaaguacuccgaggaggccaagcucaaccgcgaggagaucgacggcgucaagcucgaguccacccgcaucuaccagauccucgccaucuacuccaccgucgccuccucccucguccucgucgucucccucggcgccaucuccuucuggaugugcuccaacggcucccuccagugccgcaucugcaucuga

SEQ ID NO: 102371 - RNA, 1698 nt, Artificial Sequence
  derived and/or modified CDS sequence (opt2) from hemagglutinin__InfluenzaA__ADV69074
augaaggucaagcuccucguccuccucugcaccuucaccgccaccuacgccgacaccaucugcaucggcuaccacgccaacaacuccaccgacaccgucgacaccguccucgagaagaacgucaccgucacccacuccgucaaccuccucgaggacucccacaacggcaagcucugccuccucaagggcaucgccccccuccagcucggcaacugcaacgucgccggcuggauccucggcaaccccgagugcgagcuccucaucuccaaggaguccugguccuacaucgucgagacccccgaccccgagaacggcaccugcuaccccggcuacuucaccgacuacgaggagcuccgcgagcagcucuccuccgucuccuccuucaagcgcuucgagaucuuccccaaggaguccuccuggcccaaccacaccgucaccggcgucuccgccuccugcucccacaacggcaaguccuccuucuaccgcaaccuccucuggcucaccgucaagaacggccucuaccccaaccucuccaaguccuacaccaacgacaaggagaaggagguccucguccucuggggcguccaccacccccccuccaucggcgaccagcgcacccucuaccacaccgagaacgccuacgucuccgucgucuccucccacuacucccgccgcuucacccccgagaucgucaagcgccccaagguccgcgaccaggagggccgcaucaacuacuacuggacccuccucgagcccggcgacaccaucaucugcgaggccaacggcaaccucaucgccccccgcuacgccuucgcccucucccgcggccucggcuccggcaucaucaccuccaacgcccccaugggcgagugcaacgccaagugccagaccccccagggcgccaucaacuccucccuccccuuccagaacguccaccccgucaccaucggcgagugccccaaguacgucaaguccgccaagcuccgcauggucaccggccuccgcaacacccccuccauccagucccgcggccucuucggcgccaucgccggcuucaucgagggcggcuggaccggcauggucgacggcugguacggcuaccaccaccagaacgagcagggcuccggcuacgccgccgaccagaaguccacccagaacgccaucaacggcaucaccaacaaggucaacuccgucaucgagaagaugaacacccaguucaccgccgucggcaaggaguucaacaagcucgagcgccgcauggagaaccucaacaagaaggucgacgacggcuuccucgacaucuggaccuacaacgccgagcuccucguccuccucgagaacgagcgcacccucgacuuccacgacuccaacgucaagaaccucuacgagaaggucaagucccagcucaagaacaacgccaaggagaucggcaacggcugcuucgaguucuaccacaagugcaacgacgagugcauggaguccgucaagaacggcaccuacgacuaccccaaguacuccgaggaguccaagcucaaccgcgagaagaucgacggcgucaagcucgaguccauggaggucuaccagauccucgccaucuacuccaccgucgccuccucccucgucuuccucgucgcccucggcgccaucugcuucuggaugugcuccaacggcucccuccagugcaagaucugcaucuga

SEQ ID NO: 102372 - RNA, 1698 nt, Artificial Sequence
  derived and/or modified CDS sequence (opt2) from hemagglutinin__InfluenzaA__ADV69075
augaaggucaagcuccucguccuccucugcaccuucaccgccaccuacgccgacaccaucugcaucggcuaccacgccaacaacuccaccgacaccgucgacaccguccucgagaagaacgucaccgucacccacuccgucaaccuccucgaggacucccacaacggcaagcucugccuccucaagggcaucgccccccuccagcucggcaacugcaacgucgccggcuggauccucggcaaccccgagugcgagcuccucaucuccaaggaguccugguccuacaucgucgagacccccgaccccgagaacggcaccugcuaccccggcuacgucaccgacuacgaggagcuccgcgagcagcucuccuccgucuccuccuucaagcgcuucgagaucuuccccaaggaguccuccuggcccaaccacaccgucaccggcgucuccgccuccugcucccacaacggcaaguccuccuucuaccgcaaccuccucuggcucaccgucaagaacggccucuaccccaaccucuccaaguccuacaccaacgacaaggagaaggagguccucguccucuggggcguccaccacccccccuccaucggcgaccagcgcacccucuaccacaccgagaacgccuacgucuccgucgucuccucccacuacucccgccgcuucacccccgagaucgucaagcgccccaagguccgcgaccaggagggccgcaucaacuacuacuggacccuccucgagcccggcgacaccaucaucugcgaggccaacggcaaccucaucgccccccgcuacgccuucgcccucucccgcggcuucggcuccggcaucaucaccuccaacgcccccaugggcgagugcaacgccaagugccagaccccccagggcgccaucaacuccucccuccccuuccagaacguccaccccgucaccaucggcgagugccccaaguacgucaaguccgccaagcuccgcauggucaccggccuccgcaacacccccuccauccagucccgcggccucuucggcgccaucgccggcuucaucgagggcggcuggaccggcauggucgacggcugguacggcuaccaccaccccaacgagcagggcuccggcuacgccgccgaccagaaguccacccagaacgccaucaacggcaucaccaacaaggucaacuccgucaucgagaagaugaacacccaguucaccgccgucggcaaggaguucaacaagcucgagcgccgcauggagaaccucaacaagaaggucgacgacggcuuccucgacaucuggaccuacaacgccgagcuccucguccuccucgagaacgagcgcacccucgacuuccacgacuccaacgucaagaaccucuacgagaaggucaagucccagcucaagaacaaggucaaggagaucggcaacggcugcuucgaguucuaccacaagugcaacgacgagugcauggaguccgucaagaacggcaccuacgacuaccccaaguacuccgaggaguccaagcucaaccgcgagaagaucgacggcgucaagcucgaguccauggaggucuaccagauccucgccaucuacuccaccgucgccuccucccucgucuuccucgucgcccucggcgccaucugcuucuggaugugcuccaacggcucccuccagugcaagaucugcaucuga

SEQ ID NO: 102373 - RNA, 1698 nt, Artificial Sequence
  derived and/or modified CDS sequence (opt2) from hemagglutinin__InfluenzaA__ADV69077
augaaggucaagcuccucguccuccucugcaccuucaccgccaccuacgccgacaccaucugcaucggcuaccacgccaacaacuccaccgacaccgucgacaccguccucgagaagaacgucaccgucacccacuccgucaaccuccucgaggacucccacaacggcaagcucugccuccucaagggcaucgccccccuccagcucggcaacugcaacgucgccggcuggauccucggcaaccccgagugcgagcuccucaucuccaaggaguccugguccuacaucgucgagacccccgaccccgagaacggcaccugcuaccccggcuacuucaccgacuacgaggagcuccgcgagcagcucuccuccgucuccuccuucaagcgcuucgagaucuuccccaaggaguccuccuggcccaaccacaccgucaccggcgucuccgccuccugcucccacaacggcaaguccuccuucuaccgcaaccuccucuggcucaccgucaagaacggccucuaccccaaccucuccaaguccuacaccaacgacaaggagaaggagguccucguccucuggggcguccaccacccccccuccaucggcgaccagcgcacccucuaccacaccgagaacgccuacgucuccgucgucuccucccacuacucccgccgcuucacccccgagaucgucaagcgccccaagguccgcgaccaggagggccgcaucaacuacuacuggacccuccucgagcccggcgacaccaucaucuucgaggccaacggcaaccucaucgccccccgcuacgccuucgcccucucccgcggcuucggcuccggcaucaucaccuccaacgcccccaugggcgagugcaacgccaagugccagaccccccagggcgccaucaacuccucccuccccuuccagaacguccaccccgucaccaucggcgagugccccaaguacgucaaguccgccaagcuccgcauggucaccggccuccgcaacacccccuccauccagucccgcggccucuucggcgccaucgccggcuucaucgagggcggcuggaccggcauggucgacggcugguacggcuaccaccaccagaacgagcagggcuccggcuacgccgccgaccagaaguccacccagaacgccaucaacggcaucaccaacaaggucaacuccgucaucgagaagaugaacacccaguucaccgccgucggcaaggaguucaacaagcucgagcgccgcauggagaaccucaacaagaaggucgacgacggcuuccucgacaucuggaccuacaacgccgagcuccucguccuccucgagaacgagcgcacccucgacuuccacgacuccaacgucaagaaccucuacgagaaggucaagucccagcucaagaacaacgccaaggagaucggcaacggcugcuucgaguucuaccacaagugcaacgacgagugcauggaguccgucaagaacggcaccuacgacuaccccaaguacuccgaggaguccaagcucaaccgcgagaagaucgacggcgucaagcucgaguccauggaggucuaccagauccucgccaucuacuccaccgucgccuccucccucgucuuccucgucgcccucggcgccaucugcuucuggaugugcuccaacggcucccuccagugcaagaucugcaucuga

SEQ ID NO: 102374 - RNA, 1698 nt, Artificial Sequence
  derived and/or modified CDS sequence (opt2) from hemagglutinin__InfluenzaA__ADV69078
augaaggucaagcuccucauccuccucugcaccuucaccgccaccuacgccgacaccaucugcaucggcuaccacgccaacaacuccaccgacaccgucgacaccguccucgagaagaacgucaccgucacccacuccgucaaccuccucgaggacucccacaacggcaagcucugccuccucaagggcaucgccccccuccagcucggcaacugcuccgucgccggcuggauccucggcaaccccgagugcgagucccucaucuccaagaaguccugguccuacaucgucgagacccccaaccccgagaacggcgccugcuaccccggcgaguucgccgacuacgaggagcuccgcgagcagcucuccuccgucuccuccuucgagcgcuucgagaucuuccccaaggaguccuccuggcccaaccacaccgccgccggcgucuccgccuccugcucccacaacggcgagaaguccuucuaccgcaaccucaucuggcucaccaagaagaacggccucuaccccaaccucuccaaguccuacgagaacgacaaggagaaggagguccucauccucuggggcguccaccacccccccaacaucgagaaccagcgcacccucuaccgcaccgagaacgccuacgucuccgucgucuccucccacuacuccggccgcuucacccccgagaucaccaagcgccccaagguccgcaaccaggagggccgcaucaacuacuacuggacccuccucgagcccggcgacaccaucaucuucgaggccaacggcaaccucaucgcccccugguacgccuucacccucucccgcggccucggcuccggcaucaucaccuccaacgcccccauggacgagugcgacgccaagugccagaccccccagggcgccaucaacuccucccuccccuuccagaacguccaccccgucaccaucggcgagugccccaaguacguccgcuccuccaagcuccgcauggucaccggccuccgcaacauccccuccauccagucccgcggccucuucggcgccaucgccggcuucaucgagggcggcuggaccggcauggucgacggcugguacggcuaccaccaccagaacgagcagggcuccggcuacgccgccgaccaggaguccacccagaacgccaucaacggcaucaccaacaaggucaacuccgucaucgagaagaugaacacccaguucaccgccgucggcaaggaguucaacaagcucgagcgccgcauggagaaccucaacaagaaggucgacgacggcuuccucgacaucuggaccuacaacgccgagcuccucguccuccucgagaacgagcgcacccucgacuuccacgacuccaacgucaagucccucuacgagaaggucaagucccagcucaagaacaacgccaaggagaucggcaacggcugcuucgaguucuaccacaagugcaacaacgagugcauggaguccgucaagaacggcaccuacgacuaccccaaguacuccgaggaguccaagcucaaccgcgagaagaucgacggcgucaagcucgacuccaugggcgucuaccgcauccucgccaucuacuccaccgucgccuccucccucguccuccucgucucccucggcgccaucuccuucuggaugugcuccaacggcucccuccagugccgcaucugcaucuga

SEQ ID NO: 102375 - RNA, 1698 nt, Artificial Sequence
  derived and/or modified CDS sequence (opt2) from hemagglutinin__InfluenzaA__ADV69079
augaaggucaagcuccucauccuccucugcaccuucaccgccaccuacgccgacaccaucugcaucggcuaccacgccaacaacuccaccgacaccgucgacaccguccucgagaagaacgucaccgucacccacuccgucaaccuccucgaggacucccacaacggcaagcucugccuccucaagggcaucgccccccuccagcucggcaacugcuccgucgccggcuggauccucggcaaccccgagugcgagcuccucaucuccaagaaguccugguccuacaucgucaagacccccaaccccgagaacggcuccugcuaccccggcuacuucgccgacuacgaggagcuccgcgagcagcucuccuccgucuccuccuucgagcgcuucgagauguuccccaaggaguccuccuggcccaaccacaacgucaacggcgucuccgccuccugcucccacaacggcaagcgcuccuucuaccgcaaccuccucuggcucaccggcaagaacggccucuaccccaaccucaccaaguccuacgagaacaacaacgagaaggagguccucauccucuggggcguccaccaccccuccaacaucggcgaccagcgcacccucuaccacaccgagaacgccuacgucuccgucauguccucccacuacucccgccgcuucacccccgagaucaacaagcgccccaagguccgcgaccaggagggccgcaucaacuacuacuggacccuccucgagcccggcgacaccaucaucuucgaggccaacggcaaccucaucgcccccugguacgccuucgcccucucccgcggcuucggcuccggcaucaucaccuccuccgcccccauggacgagugcgacgccaagugccagaccccccgcggcgccaucaacuccucccuccccuuccagaacguccaccccgucaccaucggcgagugccccaaguacguccgcuccgccaagcuccgcauggucaccggccuccgcaacauccccuccauccagucccgcggccucuucggcgccaucgccggcuucaucgagggcggcuggaccggcauggucgacggcugguacggcuaccaccaccagaacgagcagggcuccggcuacgccgccgaccaggaguccacccagaacgccaucaacggcaucaccaacaaggucaacuccgucaucgagaagaugaacacccaguucaccgccgucggcaaggaguucaacaagcucgagcgccgcauggagaaccucaacaagaaggucgacgacggcuuccucgacaucuggaccuacaacgccgagcuccucguccuccucgagaacgagcgcacccucgacuuccacgacuccaacgucaagucccucuacgagaaggucaagucccagcucaagaacaacgccaaggagaucggcaacggcugcuucgaguucuaccacaagugcaacaacgagugcauggaguccgucaagaacggcaccuacgacuaccccaaguacuccgaggaguccaagcucaaccgcgagaagaucgacggcgucaagcucgacuccaugggcgucuaccagauccucgccaucuacuccaccgucgccuccucccucguccuccucgucucccucggcgccaucuccuucuggaugugcuccaacggcucccuccagugccgcaucugcaucuga

SEQ ID NO: 102376 - RNA, 1698 nt, Artificial Sequence
  derived and/or modified CDS sequence (opt2) from hemagglutinin__InfluenzaA__ADV69080
augaaggucaagcuccucauccuccucugcaccuucaccgccaccuacgccgacaccaucugcaucggcuaccacgccaacaacuccaccgacaccgucgacaccguccucgagaagaacgucaccgucacccacuccgucaaccuccucgaggacucccacaacggcaagcucugccuccucaagggcaucgccccccuccagcucggcaacugcuccgucgccggcuggauccucggcaaccccgagugcgagucccucaucuccaagaaguccugguccuacaucgucgagacccccaaccccgagaacggcgccugcuaccccggcgaguucgccgacuacgaggagcuccgcgagcagcucuccuccgucuccuccuucgagcgcuucgagaucuuccccaaggaguccuccuggcccaaccacaccgccgccggcgucuccgccuccugcucccacaacggcgagcgcuccuucuaccgcaaccucaucuggcucaccaugaagaacggccucuaccccaaccuccgcaaguccuacgagaacgacaaggagaaggagguccucauccucuggggcguccaccacccccccaacaucgagaaccagcgcacccucuaccacaccgagaacgccuacgucuccgucgucuccucccacuacuccggccgcuucacccccgagaucaccaagcgccccaagguccgcgaccaggagggccgcaucaacuacuacuggacccuccucgagcccggcgacaccaucaucuucgaggccaacggcaaccucaucgcccccugguacgccuucacccucucccgcggccucggcuccggcaucaucaccuccaacgcccccauggacgccugcgacgccaagugccagaccccccagggcgccaucaacuccucccuccccuuccagaacguccaccccgucaccaucggcgagugccccaaguacguccgcuccgccaagcuccgcauggucaccggccuccgcaacauccccuccauccagucccgcggccucuucggcgccaucgccggcuucaucgagggcggcuggaccggcauggucgacggcugguacggcuaccaccaccagaacgagcagggcuccggcuacgccgccgaccaggaguccacccagaacgccaucaacggcaucaccaacaaggucaacuccgucaucgagaagaugaacacccaguucaccgccgucggcaaggaguucaacaagcucgagcgccgcaucgagaaccucaacaagaaggucgacgacggcuucaucgacaucuggaccuacaacgccgagcuccucguccuccucgagaacgagcgcacccucgacuuccacgacuccaacgucaagucccucuacgagaaggucaagucccagcucaagaacaacgccaaggagaucggcaacggcugcuucgaguucuaccacaagugcaacaacgagugcauggaguccgucaagaacggcaccuacgacuaccccaaguacuccgaggaguccaagcucaaccgcgagaagaucgacggcgucaagcucgacuccaugggcgucuaccgcauccucgccaucuacuccaccgucgccuccucccucguccuccucgucucccucggcgccaucuccuucuggaugugcuccaacggcucccuccagugccgcaucugcaucuga

SEQ ID NO: 102377 - RNA, 1698 nt, Artificial Sequence
  derived and/or modified CDS sequence (opt2) from hemagglutinin__InfluenzaA__ADV69081
augaaggucaagcuccucguccuccucugcaccuucaccgccaccuacgccgacaccaucugcaucggcuaccacgccaacaacuccaccgacaccgucgacaccguccucgagaagaacgucaccgucacccacuccgucaaccuccucgaggacucccacaacggcaagcucugccuccucaagggcaucgccccccuccagcucggcaacugcaacgucgccggcuggauccucggcaaccccgagugcgagcuccucaucuccaaggaguccugguccuacaucgucgagacccccaaccccgagaacggcaccugcuaccccggcuacuucaccgacuacgaggagcuccgcgagcagcucuccuccgucuccuccuucaagcgcuucgagaucuuccccaaggaguccuccuggcccaaccacaccgucaccggcgucuccgccuccugcucccacaacggcgaguccuccuucuaccgcaaccuccucuggcucaccgucaagaacggccucuaccccaagcucuccaaguccuacaccaacgacaaggagaaggagguccucguccucuggggcguccaccacccccccaacauccgcgaccagcgcacccucuaccacaccgagaacgccuacgucuccgucgucuccucccacuacucccgccgcuucacccccgagaucgucaagcgccccaagguccgcgaccaggagggccgcaucaacuacuacuggacccuccucgagcccggcgacaccaucaucuucgaggccaacggcaaccucaucgccccccgcuacgccuucgcccucucccgcggcuucggcuccggcaucaucaccuccaacgcccccaugggcgagugcaacgccaagugccagaccccccagggcgccaucaucuccucccuccccuuccagaacguccaccccgucaccaucggcgagugccccaaguacgucaaguccgccaagcuccgcauggucaccggccuccgcaacacccccuccauccagucccgcggccucuucggcgccaucgccggcuucaucgagggcggcuggaccggcauggucgacggcugguacggcuaccaccaccagaacgagcagggcuccggcuacgccgccgaccagaaguccacccagaacgccaucaacggcaucaccaacaaggucaacuccgucaucgagaagaugaacacccaguucaccgccgucggcaaggaguucaacaagcucgagcgccgcauggagaaccucaacaagaaggucgacgacggcuuccucgacaucuggaccuacaacgccgagcuccucguccuccucgagaacgagcgcacccucgacuuccacgacuccaacgucaagaaccucuacgagaaggucaagucccagcucaagaacaacgccaaggagaucggcaacggcugcuucgaguucuaccacaagugcaacgacgagugcauggaguccgucaagaacggcaccuacgacuaccccaaguacuccgaggaguccaagcucaaccgcgagaagaucgacggcgucaagcucgaguccauggaggucuaccagauccucgccaucuacuccaccgucgccuccucccucgucuuccucgucgcccucggcgccaucugcuucuggaugugcuccaacggcucccuccagugcaagaucugcaucuga

SEQ ID NO: 102378 - RNA, 1698 nt, Artificial Sequence
  derived and/or modified CDS sequence (opt2) from hemagglutinin__InfluenzaA__ADV69083
augaaggucaagcucaugguccuccucugcaccuucaccgccaccuacgccgacaccaucugcgucggcuaccacgccaacaacuccaccgacaccgucgacaccguccucgagaagaacgucaccgucacccacuccgucaaccuccucgaggacucccacaacggcaagcucugccuccucaagggcaucgccccccuccagcucggcuccugcuccgucgccggcuggauccucggcaaccccgagugcgagcuccucaucuccaaggaguccugguccuacaucgucgagacccccaaccccgagaacggcaccugcuaccccggcuacuucaccgacuacgaggagcuccgcgagcagcucuccuccgucuccuccuucaagcgcuucgagaucuuccccaaggaguccuccuggcccaaccacaacgucaccggcgucuccuccuccugcucccacaacggcaaguccuccuucuaccgcaaccuccucuggcucaccgucaagaacggccucuaccccaaccucuccaaguccuacaccaacaagaaggagaaggagguccucguccucuggggcguccaccaccccuccaacaucggcgaccagcgcgcccucuaccacaccgagaacgccuacgucuccgucgucuccucccacuacucccgccgcuucacccccgagaucgccaagcgccccaagguccgcaaccaggagggccgcaucaacuacuacuggacccuccucgagcccggcgacaccaucauccucgaggccaacggcaaccucaucgccccccgcuacgccuucgagcucuccaagggccucggcuccggcaucaucaccuccaacgcccccaugggcgagugcaacgccaagugccagaccccccagggcgccaucaacuccucccuccccuuccagaacguccaccccgucaccaucggcgagugccccaaguacgucaaguccgccaagcuccgcauggucaccggccuccgcaacacccccuccauccagucccgcggccucuucggcgccaucgccggcuucaucgagggcggcuggaccggcauggucgacggcugguacggcuaccaccaccagaacgagcagggcuccggcuacgccgccgaccagcaguccacccagaacgccaucaacggcaucaccaacaaggucaacuccgucaucgagaagaugaacacccaguucaccgccgucggcaaggaguucaacaagcucgagcgccgcauggagaaccucaacaagaaggucgacgacggcuuccucgacaucuggaccuacaacgccgagcuccucguccuccucgagaacgagcgcacccucgacuuccacgacuccaacgucaagaaccucuacgagaaggucaagucccagcucaagaacaacgccaaggagaucggcaacggcugcuucgaguucuaccacaagugcaacgacgagugcauggaguccgucaagaacggcaccuacgacuaccccaaguacuccgaggaguccaagcucaaccgcgagaagaucgacggcgucaagcucgaguccaugggcgucuacaacauccucgccaucuacuccaccgucgccuccucccucguccuccucgucucccucggcgccaucuccuucuggaugugcuccaacggcucccuccagugccgcaucugcaucuga

SEQ ID NO: 102379 - RNA, 1698 nt, Artificial Sequence
  derived and/or modified CDS sequence (opt2) from hemagglutinin__InfluenzaA__ADV69084
augaaggucaagcucaugguccuccucugcaccuucaccgccaccuacgccgacaccaucugcgucggcuaccacgccaacaacuccaccgacaccgucgacaccguccucgagaagaacgucaccgucacccacuccgucaaccuccucgaggacucccacaacggcaagcucugccuccucaagggcaucgccccccuccagcucggcuccugcuccgucgccggcuggauccucggcaaccccgagugcgagcuccucaucuccaaggaguccugguccuacaucgucgagacccccaaccccgagaacggcaccugcuaccccggcuacuucaccgacuacgaggagcuccgcgagcagcucuccuccgucuccuccuucaagcgcuucgagaucuuccccaaggaguccuccuggcccaaccacaacgucaccggcgucuccuccuccugcucccacaacggcaaguccuccuucuaccgcaaccuccucuggcucaccgucaagaacggccucuaccccaaccucuccaaguccuacaccaacaagaaggagaaggagguccucauccucuggggcguccaccaccccuccaacauccgcgaccagcgcgcccucuacuacaccgagaacgccuacgucuccgucgucuccucccacuacucccgccgcuucacccccgagaucgccaagcgccccaagguccgcaaccaggagggccgcaucaacuacuacuggacccuccucgagcccggcgacaccaucaucuucgaggccaacggcaaccucaucgccccccgcuacgccuucgagcucuccaagggcuucggcuccggcaucaucaccuccgacgcccccaugggcgagugcaacgccaagugccagaccccccagggcgccaucaacuccucccuccccuuccagaacguccaccccgucaccaucggcgagugccccaaguacguccgcuccgccaagcuccgcauggucaccggccuccgcaacacccccuccauccagucccgcggccucuucggcgccaucgccggcuucaucgagggcggcuggaccggcauggucgacggcugguacggcuaccaccaccagaacgagcagggcuccggcuacgccgccgaccagcaguccacccagaacgccaucaacggcaucaccaacaaggucaacuccgucaucgagaagaugaacacccaguucaccgccgucggcaaggaguucaacaagcucgagcgccgcauggagaaccucaacaagaagaucgacgacggcuuccucgacaucuggaccuacaacgccgagcuccucguccuccucgagaacgagcgcacccucgacuuccacgacuccaacgucaagaaccucuacgagaaggucaagucccagcucaagaacaacgccaaggagaucggcaacggcugcuucgaguucuaccacaagugcaacgacgagugcauggaguccgucaagaacggcaccuacgacuaccccaaguacuccgaggaguccaagcucaaccgcgagaagaucgacggcgucaagcucgaguccaugggcgucuacaacauccucgccaucuacuccaccgucgccuccucccucguccuccucgucucccucggcgccaucuccuucuggaugugcuccaacggcucccuccagugccgcaucugcaucuga

SEQ ID NO: 102380 - RNA, 1698 nt, Artificial Sequence
  derived and/or modified CDS sequence (opt2) from hemagglutinin__InfluenzaA__ADV69085
augaaggucaagcucaugguccuccucugcaccuucaccgccaccuacgccgacaccaucugcgucggcuaccacgccaacaacuccaccgacaccgucgacaccguccucgagaagaacgucaccgucacccacuccgucaaccuccucgaggacucccacaacggcaagcucugccuccucaagggcaucgccccccuccagcucggcuccugcuccgucgccggcuggauccucggcaaccccgagugcgagcuccucaucuccaaggaguccugguccuacaucgucgagacccccaaccccgagaacggcaccugcuaccccggcuacuucaccgacuacgaggagcuccgcgagcagcucuccuccgucuccuccuucaagcgcuucgagaucuuccccaaggaguccuccuggcccaaccacaccgucaccggcgucuccuccuccugcucccacaacggcaaguccuccuucuaccgcaaccuccucuggcucaccaugaagaacggccucuaccccaaccucuccaaguccuacaccaacaagaaggagaaggagguccucguccucuggggcguccaccaccccuccaacaucggcgaccagcgcgcccucuaccacaccgagaacgccuacgucuccgucgucuccucccacuacucccgccgcuucacccccgagaucgccaagcgccccaagguccgcaaccaggagggccgcaucaacuacuacuggacccuccucgagcccggcgacaccaucaucuucgaggccaacggcaaccucaucgccccccgcuacgccuucgagcucuccaagggcuucggcuccggcaucaucaccuccaacgcccccaugggcgagugcaacgccaagugccagaccccccagggcgccaucaacuccucccuccccuuccagaacguccaccccgucaccaucggcgagugccccaaguacguccgcuccuccaagcuccgcauggucaccggccuccgcaacacccccuccauccagucccgcggccucuucggcgccaucgccggcuucaucgagggcggcuggaccggcauggucgacggcugguacggcuaccaccaccagaacgagcagggcuccggcuacgccgccgaccagcaguccacccagaacgccaucaacggcaucaccaacaaggucaacuccgucaucgagaagaugaacacccaguucaccgccgucggcaaggaguucaacaagcucgagcgccgcauggagaaccucaacaagaagaucgacgacggcuuccucgacaucuggaccuacaacgccgagcuccucguccuccucgagaacgagcgcacccucgacuuccacgacuccaacgucaagaaccucuacgagaaggucaagucccagcucaagaacaacgccaaggagaucggcaacggcugcuucgaguucuaccacaagugcaacgacgagugcauggaguccgucaagaacggcaccuacgacuaccccaaguacuccgaggaguccaagcucaaccgcgagaagaucgacggcgucaagcucgaguccaugggcgucuacaacauccucgccaucuacuccaccgucgccuccucccucguccuccucgucucccucggcgccaucuccuucuggaugugcuccaacggcucccuccagugccgcaucugcaucuga

SEQ ID NO: 102381 - RNA, 1698 nt, Artificial Sequence
  derived and/or modified CDS sequence (opt2) from hemagglutinin__InfluenzaA__ADV69086
augaaggucaagcuccucguccuccucugcaccuucaccgccaccuacgccgacaccaucugcaucggcuaccacgccaacaacuccaccgacaccgucgacaccguccucgagaagaacgucaccgucacccacuccgucaaccuccucgaggacucccacaacggcaagcucugccuccucaagggcaucgccccccuccagcucggcaacugcaacgucgccggcuggauccucggcaaccccgagugcgagcuccucaucuccaaggaguccugguccuacaucgucgagacccccaaccccgagaacggcaccugcuaccccggcuacuucaccgacuacgaggagcuccgcgagcagcucuccuccgucuccuccuucaagcgcuucgagaucuuccccaaggaguccuccuggcccaagcacaccgucaccggcgucuccgccuccugcucccacaacggcaaguccuccuucuaccgcaaccuccucuggcucaccggcaagaacggccucuaccccaaccucuccaaguccuacaccaacgacaaggagaaggagguccucguccucuggggcguccaccaccccuccaacaucggcgaccagcgcgcccucuaccacaaggagaacgccuacgucuccgucgucuccucccacuacucccgccgcuucacccccgagaucgucaagcgccccaagguccgcgaccaggagggccgcaucaacuacuacuggacccuccucgagcccggcgacaccaucaucuucgaggccaacggcaaccucaucgccccccgcuacgccuucgcccucucccgcggcuucggcuccggcaucaucaccuccaacgcccccauggacgagugcaacaccaagugccagaccccccagggcgccaucaacuccucccuccccuuccagaacguccaccccgucaccaucggcgagugccccaaguacgucaaguccgccaagcuccgcauggucaccggccuccgcaacacccccuccauccagucccgcggccucuucggcgccaucgccggcuucaucgagggcggcuggaccggcauggucgacggcugguacggcuaccaccaccagaacgagcagggcuccggcuacgccgccgaccagaaguccacccagaacgccaucaacggcaucaccaacaaggucaacuccgucaucgagaagaugaacacccaguucaccgccgucggcaaggaguucaacaagcucgagcgccgcauggagaaccucaacaagaaggucgacgacggcuuccucgacaucuggaccuacaacgccgagcuccucguccuccucgagaacgagcgcacccucgacuuccacgacuccaacgucaagaaccucuacgagaaggucaagucccagcucaagaacaacgccaaggagaucggcaacggcugcuucgaguucuaccacaagugcaacgacgagugcauggaguccgucaagaacggcaccuacgacuaccccaaguacuccgaggaguccaagcucaaccgcgagaagaucgacggcgucaagcucgaguccauggaggucuaccagauccucgccaucuacuccaccgucgccuccucccucgucuuccucgucucccucggcgccaucugcuucuggaugugcuccaacggcucccuccagugccgcaucugcaucuga

SEQ ID NO: 102382 - RNA, 1698 nt, Artificial Sequence
  derived and/or modified CDS sequence (opt2) from hemagglutinin__InfluenzaA__ADV69087
augaaggucaagcucaugguccuccucugcaccuucaccgccaccuacgccgacaccaucugcgucggcuaccacgccaacaacuccaccgacaccgucgacaccguccucgagaagaacgucaccgucacccacuccgucaaccuccucgaggacucccacaacggcaagcucugccuccucaagggcaucgccccccuccagcucggcuccugcuccgucgccggcuggauccucggcaaccccgagugcgagcuccucaucuccaaggaguccugguccuacaucgucgagacccccaaccccgagaacggcaccugcuaccccggcuacuucaccgacuacgaggagcuccgcgagcagcucuccuccgucuccuccuucaagcgcuucgagaucuuccccaaggaguccuccuggcccaaccacaccgucaacggcgucuccuccuccugcucccacaacggcgaguccuccuucuaccgcaaccuccucuggcucaccgucaaggacggccucuaccccaaccucuccaaguccuacaccaacaagaaggagaaggagguccucguccucuggggcguccaccaccccuccaacaucggcgaccagcgcgcccucuaccacaccgagaacgccuacgucuccgucgucuccucccacuacucccgccgcuucacccccgagaucgccaagcgccccaagguccgcaaccaggagggccgcaucaacuacuacuggacccuccucgagcccggcgacaccaucaucuucgaggccaacggcaaccucaucgccccccgcuacgccuucgagcucuccaagggcuucggcuccggcaucaucaccuccaacgcccccaugggcgagugcaacgccaagugccagaccccccagggcgccaucaacuccucccuccccuuccagaacguccaccccgucaccaucggcgagugccccaaguacguccgcuccaccaagcuccgcauggucaccggccuccgcaacacccccuccauccagucccgcggccucuucggcgccaucgccggcuucaucgagggcggcuggaccggcauggucgacggcugguacggcuaccaccaccagaacgagcagggcuccggcuacgccgccgaccagcaguccacccagaacgccaucaacggcaucaccaacaaggucaacuccgucaucgagaagaugaacacccaguucaccgccgucggcaaggaguucaacaagcucgagcgccgcauggagaaccucaacaagaagaucgacgacggcuuccucgacaucuggaccuacaacgccgagcuccucguccuccucgagaacgagcgcacccucgacuuccacgacuccaacgucaagaaccucuacgagaaggucaagucccagcucaagaacaacgccaaggagaucggcaacggcugcuucgaguucuaccacaagugcaacgacgagugcauggaguccgucaagaacggcaccuacgacuaccccaaguacuccgaggaguccaagcucaaccgcgagaagaucgacggcgucaagcucgaguccaugggcgucuacaacauccucgccaucuacuccaccgucgccuccucccucguccuccucgucucccucggcgccaucuccuucuggaugugcuccaacggcucccuccagugccgcaucugcaucuga

SEQ ID NO: 102383 - RNA, 1698 nt, Artificial Sequence
  derived and/or modified CDS sequence (opt2) from hemagglutinin__InfluenzaA__ADV69088
augaaggucaagcuccucauccuccucugcaccuucaccgccaccuacgccgacaccaucugcaucggcuaccacgccaacaacuccaccgacaccgucgacaccguccucgagaagaacgucaccgucacccacuccgucaaccuccucgaggacucccacaacggcaagcucugccuccucaagggcaucgccccccuccagcucggcaacugcuccgucaccggcuggauccucggcaaccccgagugcgagcuccucaucuccaagaaguccugguccuacaucgucgagacccccaaccccgagaacggcgccugcuaccccggcuacuucgccgacuacgaggagcuccgcgagcagcucuccuccgucuccuccuucgagcgcuucgagaucuuccccaaggaguccuccuggcccaaccacaacgucaacggcgucuccgccuccugcucccacaacggcaaguccuccuucuaccgcaaccuccucuggcucaccggcaagaacggccucuaccccucccucaccaaguccuacgccaacgacaaggagaaggagguccucauccucuggggcguccaccaccccuccaacaucggcgaccagcgcacccucuaccacaccgagaacgccuacgucuccgucauguccucccacuacucccgccgcuucacccccgagaucuccaagcgccccaagguccgcgaccaggagggccgcaucaacuacuacuggacccuccucgagcccggcgacaccaucaucuucgaggccaacggcaaccucaucgcccccugguacgccuucgcccucucccgcggcuucggcuccggcaucaucaccuccuccgcccccauggacgccugcgacgccaagugccagaccccccagggcgccaucaacuccucccuccccuuccagaacguccaccccgucaccaucggcgagugccccaaguacguccgcuccaccaagcuccgcauggucaccggccuccgcaacauccccuccauccagucccgcggccucuucggcgccaucgccggcuucaucgagggcggcuggaccggcauggucgacggcugguacggcuaccaccaccagaacgagcagggcuccggcuacgccgccgaccaggaguccacccagaacgcccuccacggcaucaccaacaaggucaacuccgucaucgagaagaugaacacccaguucaccgccgucggcaaggaguucaacaagcucgagcgccgcauggagaaccucaacaagaaggucgacgacggcuuccucgacaucuggaccuacaacgccgagcuccucguccuccucgagaacgagcgcacccucgacuuccacgacuccaacgucaagucccucuacgagaaggucaagauccagcucaagaacaacgccaaggagaucggcaacggcugcuucgaguucuaccacaagugcaacaacgagugcauggaguccguccgcaacggcaccuacgacuaccccaaguacuccgaggaguccaagcucaaccgcgagaagaucgacggcgucaagcucgacuccaugggcgucuaccagauccucgccaucuacuccaccgucgccuccucccucguccuccucgucucccucggcgccaucuccuucuggaugugcuccaacggcucccuccagugccgcaucugcaucuga

SEQ ID NO: 102384 - RNA, 1698 nt, Artificial Sequence
  derived and/or modified CDS sequence (opt2) from hemagglutinin__InfluenzaA__ADV69089
augaaggucaagcuccucauccuccucugcaccuucaccgccaccuacgccgacaccaucugcaucggcuaccacgccaacaacuccaccgacaccgucgacaccguccucgagaagaacgucaccgucacccacuccgucaaccuccucgaggacucccacaacggcaagcucugccuccucaagggcaucgccccccuccagcucggcaacugcuccgucgccggcuggauccucggcaaccccgagugcgagcuccucaucuccaagaaguccugguccuacaucgucgagacccccaaccccgagaacggcgccugcuaccccggcuacuucgccgacuacgaggagcuccgcgagcagcucuccuccgucuccuccuucgagcgcuucgagaucuuccccaaggaguccuccuggcccaaccacaacgucaacggcgucuccgccuccugcucccacaacggcaaguccuccuucuaccgcaaccuccucuggcucaccggcaagaacggccucuaccccaaccucaccaaguccuacgccaacaacaaggagaaggagguccucauccucuggggcguccaccaccccuccaacaucggcgaccagcgcacccucuaccacaccgagaacgccuacgucuccgucauguccucccacuacucccgccgcuucacccccgagaucaccaagcgccccaagauccgcgaccaggagggccgcaucaacuacuacuggacccuccucgagcccggcgacaccaucaucuacgaggccaacggcaaccucaucgcccccugguacgccuucgcccucucccgcggcuucggcuccggcaucaucaccuccuccgcccccauggacgagugcgacgccaagugccagaccccccagggcgccaucaacuccucccuccccuuccagaacguccaccccgucaccaucggcgagugccccaaguacguccgcuccgccaagcuccgcauggucaccggccuccgcaacauccccuccauccagucccgcggccucuucggcgccaucgccggcuucaucgagggcggcuggaccggcauggucaacggcugguacggcuaccgccuccacaacgaccagggcuccggcuacgccgccgaccagaaguccacccagaacgcccucaacggcaucaccaacaaggucaacuccgucaucgagaagaugaacacccaguucaccgccgucggcaaggaguucaacaagcucgagcgccgcauggagaaccucaacaagaaggucgacgacggcuuccucgacaucuggaccuacaacgccgagaugcucguccuccucgagaacgagcgcacccucgacuuccacgacuccaacgucaagucccucuacgagcgcgucaagauccagcucaagaacaacgccaaggagaucggcaacggcugcuucgaguucuaccacaagugcaacaacgagugcauggaguccguccgcaacggcaccuacgacuaccccaaguacuccgaggaguccaagcucaaccgcgagaagaucgacggcgucaagcucgacuccaugggcgucuaccagauccucgccaucuacuccaccgucgccuccucccucguccuccucgucucccucggcgccaucuccuucuggaugugcuccaacggcucccuccagugccgcaucugcaucuga

SEQ ID NO: 102385 - RNA, 1698 nt, Artificial Sequence
  derived and/or modified CDS sequence (opt2) from hemagglutinin__InfluenzaA__ADV69090
augaaggucaagcuccucguccuccucugcaccuucaccgccaccuacgccgacaccaucugcaucggcuaccacgccaacaacuccaccgacaccgucgacaccguccucgagaagaacgucaccgucacccacuccgucaaccuccucgaggacucccacaacggcaagcucugccuccucaagggcaucgccccccuccagcucggcaacugcuccgucgccggcuggauccucggcaaccccgagugcgagucccucaucuccaaggaguccugguccuacaucgucgagacccccaaccccgagaacggcaccugcuaccccggcuacuucgccgacuacgaggagcuccgcgagcagcucuccuccgucuccuccuucgagcgcuucgagaucuuccccaaggaguccuccuggcccaaccacaccgucaccggcgucuccgccuccugcucccacaacggcaaguccuccuucuaccgcaaccuccucuggcucacccgcaagaacggccucuaccccaaccucuccaaguccuacgccaacaacaaggagaaggagguccucguccucuggggcguccaccacccccccaaccucggcgaccagcgcgcccucuaccacaccgagaacgccuacgucuccgucgucuccucccacuacucccgccgcuucacccccgagaucgccaagcgccccaagguccgcgaccaggagggccgcaucaacuacuacuggacccuccucgagcccggcgacaccaucaucuucgaggccaacggcaaccucaucgccccccgcuucgccuucgcccucucccgcggcuucggcuccggcaucaucaccuccaacgcccccauggacgagugcgacgccaagugccagaccccccagggcgccaucaacuccucccuccccuuccagaacguccaccccgucaccaucggcgagugccccaaguacguccgcuccaccaagcuccgcauggucaccggccuccgcaacauccccuccauccagucccgcggccucuucggcgccaucgccggcuucaucgagggcggcuggaccggcauggucgacggcugguacggcuaccaccaccagaacgagcagggcuccggcuacgccgccgaccagaaguccacccagaacgccaucaacggcaucaccaacaaggucaacuccgucaucgagaagaugaacacccaguucaccgccgucggcaaggaguucaacaagcucgagcgccgcauggagaaccucaacaagaaggucgacgacggcuuccucgacaucuggaccuacaacgccgagcuccucguccuccucgagaacgagcgcacccucgacuuccacgacuccaacgucaagaaccucuacgagaaggucaagucccagcucaagaacaacgccaaggagaucggcaacggcugcuucgaguucuaccacaagugcaacgacgagugcauggaguccgucaagaacggcaccuacgacuaccccaaguacuccgaggaguccaagcucaaccgcgagaagaucgacggcgucaagcucgaguccaugggcgucuaccagauccucgccaucuacuccaccgucgccuccucccucguccuccucgucucccucggcgccaucuccuucuggaugugcuccaacggcucccuccagugccgcaucugcaucuga

SEQ ID NO: 102386 - RNA, 1698 nt, Artificial Sequence
  derived and/or modified CDS sequence (opt2) from hemagglutinin__InfluenzaA__ADV69091
augaaggucaagcuccucguccuccucugcaccuucaccgccaccuacgccgacaccaucugcaucggcuaccacgccaacaacuccaccgacaccgucgacaccguccucgagaagaacgucaccgucacccacuccgucaaccuccucgaggacucccacaacggcaagcucugccuccucaagggcaucgccccccuccagcucggcaacugcaacgucgccggcuggauccucggcaaccccgagugcgagcuccucaucuccaaggaguccugguccuacaucgucgagacccccaaccccgagaacggcaccugcuaccccggcuacuucaccgacuacgaggagcuccgcgagcagcucuccuccgucuccuccuucaagcgcuucgagaucuuccccaaggaguccuccuggcccaaccacaccgucaccggcgucuccgccuccugcucccacaacggcaaguccuccuucuaccgcaaccuccucuggcucacccgcaagaacggccucuaccccaaccucuccaaguccuacaccaacgacaaggagaaggagguccucguccucuggggcguccaccaccccuccaacaucggcgaccagcgcgcccucuaccacaaggagaacgccuacgucuccgucgucuccucccacuacucccgccgcuucacccccgagaucgucaagcgccccaagguccgcgaccaggagggccgcaucaacuacuacuggacccuccucgagcccggcgacaccaucaucuucgaggccaacggcaaccucaucgccccccgcuacgccuucgcccucucccgcggcuucggcuccggcaucaucaccuccaacgcccccauggacgagugcaacaccaagugccagaccccccagggcgccaucaacuccucccuccccuuccagaacguccaccccgucaccaucggcgagugccccaaguacgucaaguccgccaagcuccgcauggucaccggccuccgcaacacccccuccauccagucccgcggccucuucggcgccaucgccggcuucaucgagggcggcuggaccggcauggucgacggcugguacggcuaccaccaccagaacgagcagggcuccggcuacgccgccgaccagaaguccacccagaacgccaucaacggcaucaccaacaaggucaacuccgucaucgagaagaugaacacccaguucaccgccgucggcaaggaguucaacaagcucgagcgccgcauggagaaccucaacaagaaggucgacgacggcuuccucgacaucuggaccuacaacgccgagcuccucguccuccucgagaacgagcgcacccucgacuuccacgacuccaacgucaagaaccucuacgagaaggucaagaaccagcucaagaacaacgccaaggagaucggcaacggcugcuucgaguucuaccacaagugcaacgacgagugcauggaguccgucaagaacggcaccuacgacuaccccaaguacuccgaggaguccaagcucaaccgcgagaagaucgacggcgucaagcucgaguccauggaggucuaccagauccucgccaucuacuccaccgucgccuccucccucgucuuccucgucucccucggcgccaucugcuucuggaugugcuccaacggcucccuccagugccgcaucugcaucuga

SEQ ID NO: 102387 - RNA, 1698 nt, Artificial Sequence
  derived and/or modified CDS sequence (opt2) from hemagglutinin__InfluenzaA__ADV69092
augaaggucaagcuccucguccuccucugcaccuucaccgccaccuacgccgacaccaucugcaucggcuaccacgccaacaacuccaccgacaccgucgacaccguccucgagaagaacgucaccgucacccacuccgucaaccuccucgaggacucccacaacggcaagcucugccuccucaagggcaucgccccccuccagcucggcaacugcaacgucgccggcuggauccucggcaaccccgagugcgagcuccucaucuccaaggaguccugguccuacaucgucgagacccccaaccccgagaacggcaccugcuaccccggcuacuucaccgacuacgaggagcuccgcgagcagcucuccuccgucuccuccuucaagcgcuucgagaucuuccccaaggaguccuccuggcccaaccacaccgucaccggcgucuccgccuccugcucccacaacggcaaguccuccuucuaccgcaaccuccucuggcucaccggcaagaacggccucuaccccaaccucuccaaguccuacaccaacgacaaggagaaggagguccucguccucuggggcguccaccaccccuccaacaucggcgaccagcgcgcccucuaccacaaggagaacgccuacgucuccgucgucuccucccacuacucccgccgcuucacccccgagaucgucaagcgccccaagguccgcgaccaggagggccgcaucaacuacuacuggacccuccucgagcccggcgacaccaucaucuucgaggccaacggcaaccucaucgccccccgcuacgccuucgcccucucccgcggcuucggcuccggcaucaucaccuccaacgcccccauggacgagugcaacaccaagugccagaccccccagggcgccaucaacuccucccuccccuuccagaacguccaccccgucaccaucggcgagugccccaaguacgucaaguccgccaagcuccgcauggucaccggccuccgcaacacccucuccauccaguccaagggccucuucggcgccaucgccggcuucaucgagggcggcuggaccggcauggucgacggcugguacggcuaccaccaccagaacgagcagggcuccggcuacgccgccgaccagaaguccacccagaacgccaucaacggcaucaccaacaaggucaacuccgucaucgagaagaugaacacccaguucaccgccgucggcaaggaguucaacaagcucgagcgccgcauggagaaccucaacaagaaggucgacgacggcuuccucgacaucuggaccuacaacgccgagcuccucguccuccucgagaacgagcgcacccucgacuuccacgacuccaacgucaagaaccucuacgagaaggucaagucccagcucaagaacaacgccaaggagaucggcaacggcugcuucgaguucuaccacaagugcaacgacgagugcauggaguccgucaagaacggcaccuacgacuaccccaaguacuccgaggaguccaagcucaaccgcgagaagaucgacggcgucaagcucgaguccauggaggucuaccagauccucgccaucuacuccaccgucgccuccucccucgucuuccucgucucccucggcgccaucugcuucuggaugugcuccaacggcucccuccagugccgcaucugcaucuga

SEQ ID NO: 102388 - RNA, 1698 nt, Artificial Sequence
  derived and/or modified CDS sequence (opt2) from hemagglutinin__InfluenzaA__ADV69093
augaaggucaagcucaugguccuccucugcaccuucaccgccaccuacgccgacaccaucugcgucggcuaccacgccaacaacuccaccgacaccgucgacaccguccucgagaagaacgucaccgucacccacuccgucaaccuccucgaggacucccacaacggcaagcucugccuccucaagggcaucgccccccuccagcucggcuccugcuccgucgccggcuggauccucggcaaccccgagugcgagcuccucaucuccaaggaguccugguccuacaucgucgagacccccaaccccgagaacggcaccugcuaccccggcuacgucaccgacuacgaggagcuccgcgagcagcucuccuccgucuccuccuucaagcgcuucgagaucuuccccaaggaguccuccuggcccaaccacaccgucaccggcgucuccuccuccugcucccacaacggcaaguccuccuucuaccgcaaccuccucuggcucaccgucaagaacggccucuaccccaaccucuccaaguccuacaccaacaagaaggagaaggagguccucguccucuggggcguccaccaccccuccaacaucggcgaccagcgcgcccucuaccacaccgagaacgccuacgucuccgucgucuccucccacuacucccgccgcuucacccccgagaucgccaagcgccccaagguccgcaaccaggagggccgcaucaacuacuacuggacccuccucgagcccggcgacaccaucaucuucgaggccaacggcaaccucaucgccccccgcuacgccuucgagcucuccaagggcuucggcuccggcaucaucaccuccaacgcccccaugggcgagugcaacgccaagugccagaccccccagggcgccaucaacuccucccuccccuuccagaacguccaccccgucaccaucggcgagugccccaaguacgucaaguccgccaagcuccgcauggucaccggccuccgcaacacccccuccauccagucccgcggccucuucggcgccaucgccggcuucaucgagggcggcuggaccggcauggucgacggcugguacggcuaccaccaccagaacgagcagggcuccggcuacgccgccgaccagcaguccacccagaacgccaucaacggcaucaccaacaaggucaacuccgucaucgagaagaugaacacccaguucaccgccgucggcaaggaguucaacaagcucgagcgccgcauggagaaccucaacaagcgcgucgacgacggcuuccucgacaucuggaccuacaacgccgagcuccucguccuccucgagaacgagcgcacccucgacuuccacgacuccaacgucaagaaccucuacgagaaggucaagucccagcucaagaacaacgccaaggagaucggcaacggcugcuucgaguucuaccacaagugcaacgacgagugcauggaguccgucaagaacggcaccuacgacuaccccaaguacuccgaggaguccaagcucaaccgcgagaagaucgacggcgucaagcucgaguccaugggcgucuacaacauccucgccaucuacuccaccgucgccuccucccucguccuccucgucucccucggcgccaucuccuucuggaugugcuccaacggcucccuccagugccgcaucugcaucuga

SEQ ID NO: 102389 - RNA, 1698 nt, Artificial Sequence
  derived and/or modified CDS sequence (opt2) from hemagglutinin__InfluenzaA__ADV69094
augaaggucaagcucaugguccuccucugcaccuucaccgccaccuacgccgacaccaucugcgucggcuaccacgccaacaacuccaccgacaccgucgacaccguccucgagaagaacgucaccgucacccacuccgucaaccuccucgaggacucccacaacggcaagcucugccuccucaagggcaucgccccccuccagcucggcuccugcuccgucgccggcuggauccucggcaaccccgagugcgagcuccucaucuccaaggaguccugguccuacaucgucgagacccccaaccccgagaacggcaccugcuaccccggcuacuucaccgacuacgaggagcuccgcgagcagcucuccuccgucuccuccuucaagcgcuucgagaucuuccccaaggaguccuccuggcccaaccacaccgucaccggcgucuccuccuccugcucccacaacggcaaguccuccuucuaccgcaaccuccucuggcucaccgucaagaacggccucuaccccaaccucuccaaguccuacaccaacaagaaggagaaggagguccucguccucuggggcguccaccaccccuccaacaucggcgaccagcgcgcccucuaccacaccgagaacgccuacgucuccgucgucuccucccacuacucccgccgcuucacccccgagaucgccaagcgccccaagguccgcaaccaggagggccgcaucaacuacuacuggacccuccucgagcccggcgacaccaucaucuucgaggccaacggcaaccucaucgccccccgcuacgccuucgagcucuccaagggcuucggcuccggcaucaucaccuccaacgcccccaugggcgagugcaacgccaagugccagaccccccagggcgccaucaacuccucccuccccuuccagaacguccaccccgucaccaucggcgagugccccaaguacgucaaguccgccaagcuccgcauggucaccggccuccgcaacacccccuccauccagucccgcggccucuucggcgccaucgccggcuucaucgagggcggcuggaccggcaugguccacggcugguacggcuaccaccaccagaacgagcagggcuccggcuacgccgccgagcagcaguccacccaguacgccaucaacggcaucaccaacaaggucaacuccgucaucgagaagaugaacacccaguucaccgccgucggcaaggaguucaacaagcucgagcgccgcauggagaaccucaacaagcgcgucgacgacggcuuccucgacaucuggaccuacaacgccgagcuccucguccuccucgagaacgagcgcacccucgacuuccacgacuccaacgucaagaaccucuacgagaaggucaagucccagcucaagaacaacgccaaggagaucggcaacggcugcuucgaguucuaccacaagugcaacgacgagugcauggaguccgucaagaacggcaccuacgacuaccccaaguacuccgaggaguccaagcucaaccgcgagaagaucgacggcgucaagcucgaguccaugggcgucuacaacauccucgccaucuacuccaccgucgccuccucccucguccuccucgucucccucggcgccaucuccuucuggaugugcuccaacggcucccuccagugccgcaucugcaucuga

SEQ ID NO: 102390 - RNA, 1698 nt, Artificial Sequence
  derived and/or modified CDS sequence (opt2) from hemagglutinin__InfluenzaA__ADV69095
augaaggucaagcucaugguccuccucugcaccuucaccgccaccuacgccgacaccaucugcgucggcuaccacgccaacaacuccaccgacaccgucgacaccguccucgagaagaacgucaccgucacccacuccgucaaccuccucgaggacucccacaacggcaagcucugccuccucaagggcaucgccccccuccagcucggcuccugcuccgucgccggcuggauccucggcaaccccgagugcgagcuccucaucuccaaggaguccugguccuacaucgucgagccccccaaccccgagaacggcaccugcuaccccggcuacuucaccgacuacgaggagcuccgcgagcagcucuccuccgucuccuccuucaagcgcuucgagaucuuccccaaggaguccuccuggcccaaccacaccgucaacggcgucuccuccuccugcucccacaacggcgaguccuccuucuaccgcaaccuccucuggcucaccgucaaggacggccucuaccccaaccucuccaaguccuacaccaacaagaaggagaaggagguccucguccucuggggcguccaccaccccuccaacaucggcgaccagcgcgcccucuaccacaccgagaacgccuacgucuccgucgucuccucccacuacucccgccgcuucacccccgagaucgccaagcgccccaagguccgcaaccaggagggccgcaucaacuacuacuggacccuccucgagcccggcgacaccaucaucuucgaggccaacggcaaccucaucgccccccgcuacgccuucgagcucuccaagggcuucggcuccggcaucaucaccuccaacgcccccaugggcgagugcaacgccaagugccagaccccccagggcgccaucaacuccucccuccccuuccagaacguccaccccgucaccaucggcgagugccccaaguacguccgcuccaccaagcuccgcauggucaccggccuccgcaacacccccuccauccagucccgcggccucuucggcgccaucgccggcuucaucgagggcggcuggaccggcauggucgacggcugguacggcuaccaccaccagaacgagcagggcuccggcuacgccgccgaccagcaguccacccagaacgccaucaacggcaucaccaacaaggucaacuccgucaucgagaagaugaacacccaguucaccgccgucggcaaggaguucaacaagcucgagcgccgcauggagaaccucaacaagaagaucgacgacggcuuccucgacaucuggaccuacaacgccgagcuccucguccuccucgagaacgagcgcacccucgacuuccacgacuccaacgucaagaaccucuacgagaaggucaagucccagcucaagaacaacgccaaggagaucggcaacggcugcuucgaguucuaccacaagugcaacgacgagugcauggaguccgucaagaacggcaccuacgacuaccccaaguacuccgaggaguccaagcucaaccgcgagaagaucgacggcgucaagcucgaguccaugggcgucuacaacauccucgccaucuacuccaccgucgccuccucccucguccuccucgucucccucggcgccaucuccuucuggaugugcuccaacggcucccuccagugccgcaucugcaucuga

SEQ ID NO: 102391 - RNA, 1698 nt, Artificial Sequence
  derived and/or modified CDS sequence (opt2) from hemagglutinin__InfluenzaA__ADV69096
augaaggucaagcucaugguccuccucugcaccuucaccgccaccuacgccgacaccaucugcgucggcuaccacgccaacaacuccaccgacaccgucgacaccguccucgagaagaacgucaccgucacccacuccgucaaccuccucgaggacucccacaacggcaagcucugccuccucaagggcaucgccccccuccagcucggcuccugcuccgucgccggcuggauccucggcaaccccgagugcgagcuccucaucuccaaggaguccugguccuacaucgucgagacccccaaccccgagaacggcaccugcuaccccggcuacgucaccgacuacgaggagcuccgcgagcagcucuccuccgucuccuccuucaagcgcuucgagaucuuccccaaggaguccuccuggcccaaccacaccgucaccggcgucuccuccuccugcucccacaacggcaaguccuccuucuaccgcaaccuccucuggcucaccgucaagaacggccucuaccccaaccucuccaaguccuacaccaacaagaaggagaaggagguccucguccucuggggcguccaccaccccuccaacaucggcgaccagcgcgcccucuaccacaccgagaacgccuacgucuccgucgucuccucccacuacucccgccgcuucacccccgagaucgccaagcgccccaagguccgcaaccaggagggccgcaucaacuacuacuggacccuccucgagcccggcgacaccaucaucuucgaggccaacggcaaccucaucgccccccgcuacgccuucgagcucuccaagggcuucggcuccggcaucaucaccuccaacgcccccaugggcgagugcaacgccaagugccagacccccaagggcgccaucaacuccucccuccccuuccagaacguccaccccgucaccaucggcgagugccccaaguacgucaaguccgccaagcuccgcauggucaccggccuccgcaacacccccuccauccagucccgcggccucuucggcgccaucgccggcuucaucgagggcggcuggaccggcauggucgacggcugguacggcuaccaccaccagaacgagcagggcuccggcuacgccgccgaccagcaguccacccagaacgccaucaacggcaucaccaacaaggucaacuccgucaucgagaagaugaacacccaguucaccgccgucggcaaggaguucaacaagcucgagcgccgcauggagaaccucaacaagaaggucgacgacggcuuccucgacaucuggaccuacaacgccgagcuccucguccuccucgagaacgagcgcacccucgacuuccacgaguccaacgucaagaaccucuacgagaaggucaagucccagcucaagaacaacgccaaggagaucggcaacggcugcuucgaguucuaccacaagugcaacgacgagugcauggaguccgucaagaacggcaccuacgacuaccccaaguacuccgaggaguccaagcucaaccgcgagaagaucgacggcgucaagcucgaguccaugggcgucuacaacauccucgccaucuacuccaccgucgccuccucccucguccuccucgucucccucggcgccaucuccuucuggaugugcuccaacggcucccuccagugccgcaucugcaucuga

SEQ ID NO: 102392 - RNA, 1698 nt, Artificial Sequence
  derived and/or modified CDS sequence (opt2) from hemagglutinin__InfluenzaA__ADV69097
augaaggucaagcuccucauccuccucugcaccuucaccgccaccuacgccgacaccaucugcaucggcuaccacgccaacaacuccaccgacaccgucgacaccguccucgagaagaacgucaccgucacccacuccgucaaccuccucgaggacucccacaacggcaagcucugccuccucaagggcaucgccccccuccagcucggcaacugcuccgucgccggcuggauccucggcaaccccgagugcgagcuccucaucuccaagaaguccugguccuacaucgucgagacccccaaccccggcaacggcgccugcuaccccggcuacuucgccgacuacgaggagcuccgcgagcagcucuccuccgucuccuccuucgagcgcuucgagaucuuccccaaggaguccuccugguccaaccacaacgucaacggcgucuccgccuccugcucccacaacggcaaguccuccuucuaccgcaaccuccucuggcucaccggcaagaacggccucuaccccacccucaccaaguccuacgccaacgacaaggagaaggagguccucauccucuggggcguccaccaccccuccaacaucggcgaccagcgcacccucuaccacaccgagaacgccuacgucuccgucauguccucccacuacucccgccgcuucacccccgagaucuccaagcgccccaagguccgcgaccaggagggccgcaucaacuacuacuggacccuccucgagcccggcgacaccaucaucuucgaggccaacggcaaccucaucgcccccugguacgccuucgcccucucccgcggcuucggcuccggcaucaucaccuccaacgcccccauggacgagugcgacgccaagugccagaccccccagggcgccaucaacuccucccuccccuuccagaacauccaccccgucaccaucggcgagugccccaaguacguccgcuccgccaagcuccgcauggucaccggccuccgcaacacccccuccauccagucccgcggccucuucggcgccaucgccggcuucaucgagggcggcuggaccggcauggucgacggcugguacggcuaccaccaccagaacgagcagggcuccggcuacgccgccgaccaggaguccacccagaacgccaucaacgagaucaccaacaaggagaacuccgucaucgagaagaugaacacccaguucaccuccgucggcaaggaguucaacaagcucgagcgccgcauggagaaccucaacaagaaggucgacgacggcuuccucgacaucuggaccuacaacgccgagcuccucguccuccucgagaacgagcgcacccucgacuuccacgacuccaacgucaagucccucuacgagaaggucaagauccagcucaagaacaacgccaaggagaucggcaacggcugcuucgaguucuaccacaagugcaacaacgagugcauggaguccguccgcaacggcaccuacgacuaccccaaguacuccgaggaguccaagcucaaccgcgagaagaucgacggcgucaagcucgacuccaugggcgucuaccagauccucgccaucuacuccaccgucgccuccucccucguccuccucgucucccucggcgccaucuccuucuggaugugcuccaacggcucccuccagugccgcaucugcaucuga

SEQ ID NO: 102393 - RNA, 1698 nt, Artificial Sequence
  derived and/or modified CDS sequence (opt2) from hemagglutinin__InfluenzaA__ADV69098
augaaggucaagcucaucguccuccucugcaccuucaccgccaccuacgccgacaccaucugcgucggcuaccacgccaacaacuccaccgacaccgucgacaccguccucgagaagaacgucaccgucacccacuccgucaaccuccucgaggacucccacaacggcaagcucugccuccucaagggcaucgccccccuccagcucggcuccugcuccgucgccggcuggauccucggcaaccccgagugcgagcuccucaucuccaaggaguccugguccuacaucgucgagacccccaaccccgagaacggcaccugcuaccccggcuacuucaccgacuacgaggagcuccgcgagcagcucuccuccgucuccuccuucaagcgcuucgagaucuuccccaaggaguccuccuggcccaaccacaccgucaccggcgucuccuccuccugcucccacaacggcaacuccuccuucuaccgcaaccuccucuggcucaccgucaagaacggccucuaccccaaccucuccaaguccuacaccaacaagaaggagaaggagguccucguccucuggggcguccaccaccccuccaacaucgaggaccagcgcgcccucuaccacaccgagaacgccuacgucuccgucgucuccucccacuacucccgccgcuucaaccccgagaucgccaagcgccccaagguccgcaaccaggagggccgcaucaacuacuacuggacccuccucgagcccggcgacaccaucaucuucgaggccaacggcaaccucaucgccccccgcuacgccuucgagcucuccaagggcuucggcuccggcaucaucaccuccaacgcccccaugggcgagugcaacgccaagugccagaccccccagggcgccaucaacuccaaccuccccuuccagaacguccaccccgucaccaucggcgagugccccaaguacguccgcuccgccaagcuccgcauggucaccggccuccgcaacacccccuccauccagucccgcggccucuucggcgccaucgccggcuucaucgagggcggcuggaccggcauggucgacggcugguacggcuaccaccaccacaacgagcagggcuccggcuacgccgccaaccagaaguccacccccaacgccaucaacggcaucaccaacaaggucaacuccgucaucgagaagaugaacacccaguucaccgccgucggcaaggaguucaacaagcucgagcgccgcauggagaaccucaacaagaaggucgacgacggcuuccucgacaucuggaccuacaacgccgagcuccucguccuccucgagaacgagcgcacccucgacuuccacgacuccaacgucaagaaccucuacgagaagguccgcucccagcucaagaacaacgccaaggagaucggcaacggcugcuucgaguucuaccacaagugcaacgacgagugcauggaguccgucaagaacggcaccuacgacuaccccaaguacuccgaggaguccaagcucaaccgcgagaagaucgacggcgucaagcucgaguccaugggcgucuacaacauccucgccaucuacuccaccgucgccuccucccucguccuccucgucucccucggcgccaucuccuucuggaugugcuccaacggcucccuccagugccgcaucugcaucuga

SEQ ID NO: 102394 - RNA, 1698 nt, Artificial Sequence
  derived and/or modified CDS sequence (opt2) from hemagglutinin__InfluenzaA__ADV69099
augaaggucaagcucaucguccuccucugcaccuucaccgccaccuacgccgacaccaucugcgucggcuaccacgccaacaacuccaccgacaccgucgacaccguccucgagaagaacgucaccgucacccacuccgucaaccuccucgaggacucccacaacggcaagcucugccuccucaagggcaucgccccccuccagcucggcuccugcuccgucgccggcuggauccucggcaaccccgagugcgagcuccucaucuccaaggaguccugguccuacaucgucgagacccccaaccccgagaacggcaccugcuaccccggcuacuucaccgacuacgaggagcuccgcgagcagcucuccuccgucuccuccuucaagcgcuucgagaucuuccccaaggaguccuccuggcccaaccacaccgucaccggcgucuccuccuccugcucccacaacggcaacuccuccuucuaccgcaaccuccucuggcucaccgucaagaacggccucuaccccaaccucuccaaguccuacaccaacaagaaggagaaggagguccucguccucuggggcguccaccaccccuccaacaucgaggaccagcgcgcccucuaccacaccgagaacgccuacgucuccgucgucuccucccacuacucccgccgcuucaaccccgagaucgccaagcgccccaagguccgcaaccaggagggccgcaucaacuacuacuggacccuccucgagcccggcgacaccaucaucuucgaggccaacggcaaccucaucgccccccgcuacgccuucgagcucuccaagggcuucggcuccggcaucaucaccuccaacgcccccaugggcgagugcaacgccaagugccagaccccccagggcgccaucaacuccaaccuccccuuccagaacguccaccccgucaccaucggcgagugccccaaguacguccgcuccgccaagcuccgcauggucaccggccuccgcaacacccccuccauccagucccgcggccucuucggcgccaucgccggcuucaucgagggcggcuggaccggcauggucaacggcugguacggcuaccaccaccacaacgagcagggcuccggcuacgccgccaaccagcaguccccccccaacgccaucaacggcaucaccaacaaggucaacuccgucaucgagaagaugaacacccaguucaccgccgucggcaaggaguucaacaagcucgagcgccgcauggagaaccucaacaagaaggucgacgacggcuuccucgacaucuggaccuacaacgccgagcuccucguccuccucgagaacgagcgcacccucgacuuccacgacuccaacgucaagaaccucuacgagaagguccgcucccagcucaagaacaacgccaaggagaucggcaacggcugcuucgaguucuaccacaagugcaacgacgagugcauggaguccgucaagaacggcaccuacgacuaccccaaguacuccgaggaguccaagcucaaccgcgagaagaucgacggcgucaagcucgaguccaugggcgucuacaacauccucgccaucuacuccaccgucgccuccucccucguccuccucgucucccucggcgccaucuccuucuggaugugcuccaacggcucccuccagugccgcaucugcaucuga

SEQ ID NO: 102395 - RNA, 1698 nt, Artificial Sequence
  derived and/or modified CDS sequence (opt2) from hemagglutinin__InfluenzaA__ADV69100
augaaggucaagcuccucauccuccucugcaccuucaccgccaccuacgccgacaccaucugcaucggcuaccacgccaacaacuccaccgacaccgucgacaccguccucgagaagaacgucaccgucacccacuccgucaaccuccucgaggacucccacaacggcaagcucugccuccucaagggcaucgccccccuccagcucggcaacugcuccgucgccggcuggauccucggcaaccccgagugcgagucccucaucuccaagaaguccugguccuacaucgucgagacccccaagcccgagaacggcaccugcuaccccggcgaguucgccgacuacgaggagcuccgcgagcagcucuccuccgucuccuccuucgagcgcuucgagaucuuccccaaggaguccuccuggcccaaccacaccgccgccggcgucuccgccuccugcucccacaacggcgagcgcuccuucuacaagaaccucaucuggcucaccgucaagaacggccucuaccccaaccucuccaaguccuacaagaacgacaaggagaaggagguccucauccucuggggcguccaccacccccccaacaucgagaaccagcgcacccucuaccacaccgagaacaccuacgucuccgucgucuccucccacuacuccggccgcuucacccccgagaucaccaagcgccccaagguccgcgaccaggagggccgcaucaacuacuacuggacccuccucgagcccggcgacaccaucaucuucgaggccaacggcaaccucaucgcccccugguacgccuucacccucucccgcggccucggcuccggcaucgucaccuccaacgcccccauggacaagugcgacgccaagugccagaccccccacggcgccaucaacuccucccuccccuuccagaacguccaccccgucaccaucggcgagugccccaaguacguccgcuccgccaagcuccgcauggucaccggccuccgcaacauccccuccauccagucccgcggccucuucggcgccaucgccggcuucaucgagggcggcuggaccggcauggucgacggcugguacggcuaccaccaccagaacgagcagggcuccggcuacgccgccgaccaggaguccacccagaacgccaucaacggcaucaccaacaaggucaacuccgucaucgagaagaugaacacccaguucaccgccgucggcaaggaguucaacaagcucgagcgccgcauggagaaccucaacaagaaggucgacgacggcuuccucgacaucuggaccuacaacgccgagcuccucguccuccucgagaacgagcgcacccucgacuuccacgacuccaacgucaagucccucuacgagaaggucaagucccagcucaagaacaacgccaaggagaucggcaacggcugcuucgaguucuaccacaagugcaacaacgagugcauggaguccgucaagaacggcaccuacgacuaccccaaguacuccgaggaguccaagcucaaccgcgagaagaucgacggcgucaagcucgacuccaugggcgucuaccgcauccucgccaucuacuccaccgucgccuccucccucguccuccucgucucccucggcgccaucuccuucuggaugugcuccaacggcucccuccagugccgcaucugcaucuga

SEQ ID NO: 102396 - RNA, 1698 nt, Artificial Sequence
  derived and/or modified CDS sequence (opt2) from hemagglutinin__InfluenzaA__ADV69101
augaaggucaagcuccucauccucuucugcaccuucaccgccaccuacgccgacaccaucugcaucggcuaccacgccaacaacuccaccgacaccgucgacaccguccucgagaagaacgucaccgucacccacuccgucaaccuccucgaggacucccacaacggcaagcucugccuccucaagggcaucgccccccuccagcucggcaacugcuccgucgccggcuggauccucggcaaccccgagugcgagucccucaucuccaagaaguccugguccuacaucgucgagacccccaaccccgagaacggcgccugcuaccccggcgaguucgccgacuacgaggagcuccgcgagcagcucuccuccgucuccuccuucgagcgcuucgagaucuuccccaaggaguccuccuggcccaaccacaccgccaccggcgucuccgccuccugcucccacaacggcgagcgcuccuucuaccgcaaccucaucuggcucaccgucaagaacggccucuaccccaaccucuccaaguccuacgagaacgacaaggagaaggagguccucauccucuggggcguccaccacccccccaacaucgagaaccagcgcacccucuaccacaccgagaacgccuacgucuccgucgucuccucccacuacuccggccgcuucacccccgagaucaccaagcgccccaagguccgcgaccaggagggccgcaucaacuacuacuggacccuccucgagcccggcgacaccaucaucuucgaggccaacggcaaccucaucgcccccugguacgccuucacccucucccgcggccucggcuccggcaucaucaccuccaacgcccccauggacgagugcgacuccaagugccagaccccccagggcgccaucaacuccucccuccccuuccagaacguccaccccgucaccaucggcgagugccccaaguacguccgcuccgccaagcuccgcauggucaccggccuccgcaacauccccuccauccagucccgcggccucuucggcgccaucgccggcuucaucgagggcggcuggaccggcauggucgacggcugguacggcuaccaccaccagaacgagcagggcuccggcuacgccgccgaccaggaguccacccagaacgccaucaacggcaucaccaacaaggucaacuccgucaucgagaagaugaacccccaguucaccgccgucggcaaggaguucaacaagcucgagcgccgcauggagaaccucaacaagaaggucgacgacggcuuccucgacaucuggaccuacaacgccgagcuccucguccuccucgagaacgagcgcacccucgacuuccacgacuccaacgucaagucccucuacgagaaggucaagucccagcucaagaacaacgccaaggagaucggcaacggcugcuucgaguucuaccacaagugcaacaacgagugcauggaguccgucaagaacggcaccuacgacuaccccaaguacuccgaggaguccaagcucaaccgcgagaagaucgacggcgucaagcucgacuccaugggcgucuaccgcauccucgccaucuacuccaccgucgccuccucccucguccuccucgucucccucggcgccaucuccuucuggaugugcuccaacggcucccuccagugccgcaucugcaucuga

SEQ ID NO: 102397 - RNA, 1698 nt, Artificial Sequence
  derived and/or modified CDS sequence (opt2) from hemagglutinin__InfluenzaA__ADV69102
augaaggucaagcuccucauccucuucugcaccuucaccgccaccuacgccgacaccaucugcaucggcuaccacgccaacaacuccaccgacaccgucgacaccguccucgagaagaacgucaccgucacccacuccgucaaccuccucgaggacucccacaacggcaagcucugccuccucaagggcaucgccccccuccagcucggcaacugcuccgucgccggcuggauccucggcaaccccgagugcgagucccucaucuccaagaaguccugguccuacaucgucgagacccccaaccccgagaacggcgccugcuaccccggcgaguucgccgacuacgaggagcuccgcgagcagcucuccuccgucuccuccuucgagcgcuucgagaucuuccccaaggaguccuccuggcccaaccacaccgccaccggcgucuccgccuccugcucccacaacggcgagcgcuccuucuaccgcaaccucaucuggcucaccgucaagaacggccucuaccccaaccucuccaaguccuacgagaacgacaaggagaaggagguccucauccucuggggcguccaccacccccccaacaucgagaaccagcgcacccucuaccacaccgagaacgccuacgucuccgucgucuccucccacuacuccggccgcuucacccccgagaucaccaagcgccccaagguccgcgaccaggagggccgcaucaacuacuacuggacccuccucgagcccggcgacaccaucaucuucgaggccaacggcaaccucaucgcccccugguacgccuucacccucuccaccggccucggcuccggcaucaucaccuccaacgcccccauggacgagugcgacuccaagugccagaccccccagggcgccaucaacuccucccuccccuuccagaacguccaccccgucaccaucggcgagugccccaaguacguccgcuccgccaagcuccgcauggucaccggccuccgcaacauccccuccauccagucccgcggccucuucggcgccaucgccggcuucaucgagggcggcuggaccggcauggucgacggcugguacggcuaccaccaccagaacgagcagggcuccggcuacgccgccgaccaggaguccacccagaacgccaucaacggcaucaccaacaaggucaacuccgucaucgagaagaugaacacccaguucaccgccgucggcaaggaguucaacaagcucgagcgccgcauggagaaccucaacaagaaggucgacgacggcuuccucgacaucuggaccuacaacgccgagcuccucguccuccucgagaacgagcgcacccucgacuuccacgacuccaacgucaagucccucuacgagaaggucaagucccagcucaagaacaacgccaaggagaucggcaacggcugcuucgaguucuaccacaagugcaacaacgagugcauggaguccgucaagaacggcaccuacgacuaccccaaguacuccgaggaguccaagcucaaccgcgagaagaucgacggcgucaagcucgacuccaugggcgucuaccgcauccucgccaucuacuccaccgucgccuccucccucguccuccucgucucccucggcgccaucuccuucuggaugugcuccaacggcucccuccagugccgcaucugcaucuga

SEQ ID NO: 102398 - RNA, 1698 nt, Artificial Sequence
  derived and/or modified CDS sequence (opt2) from hemagglutinin__InfluenzaA__ADV69103
augaaggucaagcucaugguccuccucugcaccuucaccgccaccuacgccgacaccaucugcgucggcuaccacgccaacaacuccaccgacaccgucgacaccguccucgagaagaacgucaccgucacccacuccgucaaccuccucgaggacucccacaacggcaagcucugccuccucaagggcaucgccccccuccagcucggcuccugcuccgucgccggcuggauccucggcaaccccgagugcgagcuccucaucuccaaggaguccugguccuacaucgucgagacccccaaccccgagaacggcaccugcuaccccggcuacuucaccgacuacgaggagcuccgcgagcagcucuccuccgucuccuccuucaagcgcuucgagaucuuccccaaggaguccuccuggcccaaccacaacgucaccggcgucuccuccuccugcucccacaacggcaaguccuccuucuaccgcaaccuccucuggcucaccgucaagaacggccucuaccccaaccucuccaaguccuacaccaacaagaaggagaaggagguccucguccucuggggcguccaccaccccuccaacaucggcgaccagcgcgcccucuaccacaccgagaacgccuacgucuccgucgucuccucccacuacucccgccgcuucacccccgagaucgccaagcgccccaagguccgcaaccaggagggccgcaucaacuacuacuggacccuccucgagcccggcgacaccaucaucuucgaggccaacggcaaccucaucgccccccgcuacgccuucgagcucuccaagggcuucggcuccggcaucaucaccuccaacgcccccaucggcgagugcaacgccaagugccagaccccccagggcgccaucaacuccucccuccccuuccagaacgucaaccccgucaccaucggcgagugccccaaguacgucaaguccgccaagcuccgcauggucaccggccuccgcaacacccccuccauccagucccgcggccucuucggcgccaucgccggcuucaucgagggcggcuggaccggcauggucgacggcugguacggcuaccaccaccagaacgagcagggcuccggcuacgccgccgaccagcaguccacccagaacgccaucaacggcaucaccaacaaggucaacuccgucaucgagaagaugaacacccaguucaccgccgucggcaaggaguucaacaagcucgagcgccgcauggagaaccucaacaagaaggucgacgacggcuuccucgacaucuggaccuacaacgccgagcuccucguccuccucgagaacgagcgcacccucgacuuccacgacuccaacgucaagaaccucuacgagaaggucaagucccagcucaagaacaacgccaaggagaucggcaacggcugcuucgaguucuaccacaagugcaacgacgagugcauggaguccgucaagaacggcaccuacgacuaccccaaguacuccgaggaguccaagcucaaccgcgagaagaucgacggcgucaagcucgaguccaugggcgucuacaacauccucgccaucuacuccaccgucgccuccucccucguccuccucgucucccucggcgccaucuccuucuggaugugcuccaacggcucccuccagugccgcaucugcaucuga

SEQ ID NO: 102399 - RNA, 1698 nt, Artificial Sequence
  derived and/or modified CDS sequence (opt2) from hemagglutinin__InfluenzaA__ADV69104
augaaggucaagcuccucauccucuucugcaccuucaccgccaccuacgccgacaccaucugcaucggcuaccacgccaacaacuccaccgacaccgucgacaccguccucgagaagaacgucaccgucacccacuccgucaaccuccucgaggacucccacaacggcaagcucugccuccucaagggcaucgccccccuccagcucggcaacugcuccgucgccggcuggauccucggcaaccccgagugcgagucccucaucuccaagaaguccugguccuacaucgucgagacccccaaccccgagaacggcgccugcuaccccggcgaguucgccgacuacgaggagcuccgcgagcagcucuccuccgucuccuccuucgagcgcuucgagaucuuccccaaggaguccuccuggcccaaccacaccgccaccggcgucuccgccuccugcucccacaacggcgagcgcuccuucuaccgcaaccucaucuggcucaccgucaagaacggccucuaccccaaccucuccaaguccuacgagaacgacaaggagaaggagguccucauccucuggggcguccaccacccccccaacaucgagaaccagcgcacccucuaccacaccgagaacgccuacgucuccgucgucuccucccacuacuccggccgcuucacccccgagaucaccaagcgccccaagguccgcgaccaggagggccgcaucaacuacuacuggacccuccucgagcccggcgacaccaucaucuucgaggccaacggcaaccucaucgcccccugguacgccuucacccucucccgcggccucggcuccggcaucaucaccuccaacgcccccauggacgagugcgacuccaagugccagaccccccagggcgccaucaacuccucccuccccuuccagaacguccaccccgucaccaucggcgagugccccaaguacguccgcuccgccaagcuccgcauggucaccggccuccgcaacauccccuccauccagucccgcggccucuucggcgccaucgccggcuucaucgagggcggcuggaccggcauggucgacggcugguacggcuaccaccaccagaacgagcagggcuccggcuacgccgccgaccaggaguccacccagaacgccaucaacggcaucaccaacaaggucaacuccgucaucgagaagaugaacacccaguucaccgccgucggcaaggaguucaacaagcucgagcgccgcauggagaaccucaacaagaaggucgacgacggcuuccucgacaucuggaccuacaacgccgagcuccucguccuccucgagaacgagcgcacccucgacuuccacgacuccaacgucaagucccucuacgagaaggucaagucccagcucaagaacaacgccaaggagaucggcaacggcugcuucgaguucuaccacaagugcaacaacgagugcauggaguccgucaagaacggcaccuacgacuaccccaaguacuccgaggaguccaagcucaaccgcgagaagaucgacggcgucaagcucgacuccaugggcgucuaccgcauccucgccaucuacuccaccgucgccuccucccucguccuccucgucucccucggcgccaucuccuucuggaugugcuccaacggcucccuccagugccgcaucugcaucuga

SEQ ID NO: 102400 - RNA, 1698 nt, Artificial Sequence
  derived and/or modified CDS sequence (opt2) from hemagglutinin__InfluenzaA__ADV69105
augaaggucaagcuccucauccuccucugcaccuucaccgccaccuacgccgacaccaucugcaucggcuaccacgccaacaacuccaccgacaccgucgacaccguccucgagaagaacgucaccgucacccacuccgucaaccuccucgaggacucccacaacggcaagcucugccuccucaagggcaucgccccccuccagcucggcaacugcuccgucgccggcuggauccucggcaaccccgagugcgagucccucaucuccaagaaguccugguccuacaucgucgagacccccaaccccgagaacggcgccugcuaccccggcgaguucgccgacuacgaggagcuccgcgagcagcucuccuccgucuccuccuucgagcgcuucgagaucuuccccaaggaguccuccuggcccaaccacaccgccgccggcgucuccgccuccugcucccacaacggcgagcgcuccuucuaccgcaaccucaucuggcucaccgucaagaacggccucuaccccaaccucuccaaguccuacaagaacgacaaggagaaggagguccucaucaucuggggcguccaccacccccccaacaucgagaaccagcgcacccucuaccacaccgagaacgccuacgucuccgucgucuccucccacuacuccggccgcuucacccccgagaucaccaagcgccccaagguccgcgaccaggagggccgcaucaacuacuacuggacccuccucgagcccggcgacaccaucaucuucgaggccaacggcaaccucaucgcccccugguacgccuucacccucucccgcggccucggcuccggcaucaucaccuccaacgcccccauggacgagugcgacgccaagugccagaccccccagggcgccaucaacuccucccuccccuuccagaacguccaccccgucaccaucggcgagugccccaaguacguccgcuccgccaagcuccgcauggucaccggccuccgcaacauccccuccauccagucccgcggccucuucggcgccaucgccggcuucaucgagggcggcuggaccggcauggucgacggcugguacggcuaccaccaccagaacgagcagggcuccggcuacgccgccgaccaggaguccacccagaacgccaucaacggcaucaccaacaaggucaacuccgucaucgagaagaugaacacccaguucaccgccgucggcaaggaguucaacaagcucgagcgccgcauggagaaccucaacaagaaggucgacgacggcuuccucgacaucuggaccuacaacgccgagcuccucguccuccucgagaacgagcgcacccucgacuuccacgacuccaacgucaagucccucuacgagaaggucaagucccagcucaagaacaacgccaaggagaucggcaacggcugcuucgaguucuaccacaagugcaacaacgagugcauggaguccgucaagaacggcaccuacgacuaccccaaguacuccgaggaguccaagcucaaccgcgagaagaucgacggcgucaagcucgacuccaugggcgucuaccgcauccucgccaucuacuccaccgucgccuccucccucguccuccucgucucccucggcgccaucuccuucuggaugugcuccaacggcucccuccagugccgcaucugcaucuga

SEQ ID NO: 102401 - RNA, 1698 nt, Artificial Sequence
  derived and/or modified CDS sequence (opt2) from hemagglutinin__InfluenzaA__ADV69106
augaaggucaagcuccucauccuccucugcaccuucaccgccaccuacgccgacaccaucugcaucggcuaccacgccaacaacuccaccgacaccgucgacaccguccucgagaagaacgucaccgucacccacuccgucaaccuccucgaggacucccacaacggcaagcucugccuccucaagggcaucgccccccuccagcucggcaacugcuccgucgccggcuggauccucggcaaccccgagugcgagucccucaucuccaagaaguccugguccuacaucgucgagacccccaaccccggcaacggcgccugcuaccccggcuacuucgccgacuacgaggagcuccgcgagcagcucuccuccgucuccuccuucgagcgcuucgagauguuccccaaggaguccuccuggcccaaccacaacgucaacggcgucuccgccuccugcucccacaacggcaaguccuccuucuaccgcaaccuccucuggcucacccgcaagaacggccucuaccccaaccucaccaaguccuacgccaacaacaacgacaaggagguccucauccucuggggcguccaccaccccuccaacaucggcgaccagcgcacccucuaccacaccgagaacgccuacgucuccgucauguccucccacuacucccgccgcuucacccccgagaucaccaagcgccccaagguccgcgaccaggagggccgcaucaacuacuacuggacccuccucgagcccggcgacaccaucaucuucgaggccaacggcaaccucaucgcccccugguacgccuucgcccucucccgcuccuucggcuccggcaucaucaccuccuccgcccccauggacgagugcgacgccaagugccagaccccccagggcgccaucaacuccucccuccccuuccagaacguccaccccgucaccaucggcgagugccccaaguacguccgcuccgccaagcucaagauggucaccggccuccgcaacauccccuccauccagucccgcggccucuucggcgccaucgccggcuucaucgagggcggcuggaccggcauggucgacggcugguacggcuaccaccaccagaacgagcagggcuccggcuacgccgccgaccaggaguccacccagaacgccaucaacggcaucaccaacaaggucaacuccgucaucgagaagaugaacacccaguucaccgccgucggcaaggaguucaacaagcucgagaagcgcauggagaaccucaacaagaaggucgacgacggcuuccucgacaucuggaccuacaacgccgagcuccucguccuccucgagaacgagcgcacccucgacuuccacgacuccaacgucaagucccucuacgagaaggucaagauccagcucaagaacaacgccaaggagaucggcaacggcugcuucgaguucuaccacaagugcaacaacgagugcauggaguccguccgcaacggcaccuacgacuaccccaaguacuccgaggaguccaagcucaaccgcgagaagaucgacggcgucaagcucgacuccaugggcgucuaccagauccucgccaucuacuccaccgucgccuccucccucguccuccucgucucccucggcgccaucuccuucuggaugugcuccaacggcucccuccagugccgcaucugcaucuga

SEQ ID NO: 102402 - RNA, 1698 nt, Artificial Sequence
  derived and/or modified CDS sequence (opt2) from hemagglutinin__InfluenzaA__ADV69107
augaaggucaagcuccucauccuccucugcaccuucaccgccaccuacgccgacaccaucugcaucggcuaccacgccaacaacuccaccgacaccgucgacaccguccucgagaagaacgucaccgucacccacuccgucaaccuccucgaggacucccacaacggcaagcucugccuccucaagggcaucgccccccuccagcucggcaacugcuccgucgccggcuggauccucggcaaccccgagugcgagucccucaucuccaaggaguccugguccuacaucgucgagacccccaacuccgacaacggcgccugcuaccccggccaguucaccgacuacgaggagcuccgcgagcagcucuccuccgucuccuccuucgagcgcuucgagaucuuccccaaggaguccuccuggcccaaccacaccgucaccggcgucuccgccuccugcucccacaacggcgagcgcuccuucuaccgcaaccucaucuggcucaccgucaagaacggccucuaccccaaccucuccaaguccuacgagaacgacaaggagaaggagguccucauccucuggggcguccaccacccccccaacaucggcgaccagcgcacccucuaccacaccgagaacgccuacaucuccgucgucuccucccacuacuccggccgcuucacccccgagaucaccaagcgccccaagguccgcgaccaggagggccgcaucaacuacuacuggacccuccucgagcccggcgacaccaucaucuucgaggccaacggcaaccucaucgcccccugguacgccuucgcccucucccgcggccucggcuccggcaucaucaccuccaacgcccccauggacaagugcgacgccaagugccagaccccccagggcgccaucaacuccucccuccccuuccagaacguccaccccgucaccaucggcgagugccccaaguacguccgcuccaccaagcuccgcauggucaccggccuccgcaacauccccuccauccagucccgcggccucuucggcgccaucgccggcuucaucgagggcggcuggaccggcauggucgacggcugguacggcuaccaccaccagaacgagcagggcuccggcuacgccgccgaccaggaguccacccagaacgccaucaacggcaucaccaacaaggucaacuccgucaucgagaagaugaacacccaguucaccgccgucggcaaggaguucaacaagcucgagcgccgcauggagaaccucaacaagaaggucgacgacggcuuccucgacaucuggaccuacaacgccgagcuccucguccuccucgagaacgagcgcacccucgacuuccacgacuccaacgucaagucccucuacgagaaggucaagucccagcucaagaacaacgccaaggagaucggcaacggcugcuucgaguucuaccacaagugcaacaacgagugcauggaguccguccgcaacggcaccuacgacuaccccaaguacuccgaggaguccaagcucaaccgcgagaagaucgacggcgucaagcucgacuccaugggcgucuaccgcauccucgccaucuacuccaccgccgccuccucccucguccuccucgucucccucggcgccaucuccuucuggaugugcuccaacggcucccuccagugccgcaucugcaucuga

SEQ ID NO: 102403 - RNA, 1698 nt, Artificial Sequence
  derived and/or modified CDS sequence (opt2) from hemagglutinin__InfluenzaA__ADV69108
augaaggucaagcuccucguccuccucugcaccuucaccgccaccuacgccgacaccaucugcgucggcuaccacgccaacaacuccaccgacaccgucgacaccguccucgagaagaacgucaccgucacccacuccgucaaccuccucgaggacucccacaacggcaagcucugccuccucaagggcaucgccccccuccagcucggcuccugcuccgucgccggcuggauccucggcaaccccgagugcgagcuccucaucuccaaggaguccugguccuacaucgucgagacccccaaccccgagaacggcaccugcuaccccggcuacuucaccgacuacgaggagcuccgcgagcagcucuccuccgucuccuccuucaagcgcuucgagaucuuccccaaggaguccuccuggcccaaccacaccgucaccggcgucuccuccuccugcucccacaacggcaaguccuccuucuaccgcaaccuccucuggcucaccaugaagaacggccucuaccccaaccucuccaaguccuacaccaacaagaaggagaaggagguccucguccucuggggcguccaccaccccuccaacaucggcgaccagcgcgcccucuaccacaccgagaacgccuacgucuccgucgucuccucccacuacucccgccgcuucacccccgagaucgccaagcgccccaagguccgcaaccaggagggccgcaucaacuacuacuggacccuccucgagcccgaggacaccaucaucuucgaggccaacggcaaccucaucgccccccgcuacgccuucgagcucuccaagggcuucggcuccggcaucaucaccuccaacgcccccaugggcgagugcaacgccaagugccagaccccccagggcgccaucaacuccucccuccccuuccagaacguccaccccgucaccaucggcgagugccccaaguacguccgcuccuccaagcuccgcauggucaccggccuccgcaacacccccuccauccagucccgcggccucuucggcgccaucgccggcuucaucgagggcggcuggaccggcauggucgacggcugguacggcuaccaccaccagaacgagcagggcuccggcuacgccgccgaccagcaguccacccagaacgccaucaacggcaucaccaacaaggucaacuccgucaucgagaagaugaacacccaguucaccgccgucggcaaggaguucaacaagcucgagcgccgcauggagaaccucaacaagaagaucgacgacggcuuccucgacaucuggaccuacaacgccgagcuccucguccuccucgagaacgagcgcacccucgacuuccacgacuccaacgucaagaaccucuacgagaaggucaagucccagcucaagaacaacgccaaggagaucggcaacggcugcuucgaguucuaccacaagugcaacgacgagugcauggaguccgucaagaacggcaccuacgacuaccccaaguacuccgaggaguccaagcucaaccgcgagaagaucgacggcgucaagcucgaguccaugggcgucuacaacauccucgccaucuacuccaccgucgccuccucccucguccuccucgucucccucggcgccaucuccuucuggaugugcuccaacggcucccuccagugccgcaucugcaucuga

SEQ ID NO: 102404 - RNA, 1698 nt, Artificial Sequence
  derived and/or modified CDS sequence (opt2) from hemagglutinin__InfluenzaA__ADV69109
augaaggucaagcuccucauccuccucugcaccuucaaggccaccuacgccgacaccaucugcaucggcuaccacgccaacaacuccaccgagaccgucgacaccguccucgagaagaacgucaccgucacccacuccgucaaccuccucgaggacucccacaacggcaagcucugccuccucaagggcaucgccccccuccagcucggcaacugcuccgucgccggcuggauccucggcaaccccgagugcgagucccucaucuccaagaaguccugguccuacaucgucgagacccccaaccccgagaacggcgccugcuaccccggcgaguucgccgacuacgaggagcuccgcgagcagcucuccuccgucuccuccuucgagcgcuucgagaucuuccccaaggaguccuccuggcccaaccacaccgccaccggcgucuccgccuccugcucccacaacggcgagcgcuccuucuaccgcaaccucaucuggcucaccgucaagaacggccucuaccccaaccucuccaaguccuacgagaacgacaagaagaaggagguccucauccucuggggcguccaccacccccccaacaucgagaaccagcgcacccucuaccacaccgagaacgccuacgucuccgucgucuccucccacuacuccggccgcuucacccccgagaucaccaagcgccccaagguccgcgaccaggagggccgcaucaacuacuacuggacccuccucgagcccggcgacaccaucaucuucgaggccaacggcaaccucaucgcccccugguacgccuucacccucucccgcggccucggcuccggcaucaucaccuccaacgcccccauggacgagugcgacgccaagugccagacccccaagggcgccaucaacuccucccuccccuuccagaacguccaccccgucaccaucggcgagugccccaaguacguccgcuccgccaagcuccgcauggucaccggccuccgcaacauccccuccauccagucccgcggccucuucggcgccaucgccggcuucaucgagggcggcuggaccggcauggucgacggcugguacggcuaccaccaccagaacgagcagggcuccggcuacgccgccgaccaggaguccacccagaacgccaucaacggcaucaccaacaaggucaacuccgucaucgagaagaugaacacccaguucaccgccgucggcaaggaguucaacaagcucgagcgccgcauggagaaccucaacaagaaggucgacgacggcuuccucgacaucuggaccuacaacgccgagcuccucguccuccucgagaacgagcgcacccucgacuuccacgacuccaacgucaagucccucuacgagaaggucaagucccagcucaagaacaacgccaaggagaucggcaacggcugcuucgaguucuaccacaagugcaacaacgagugcauggaguccgucaagaacggcaccuacgacuaccccaaguacuccgaggaguccaagcucaaccgcgagaagaucgacggcgucaagcucgacuccaugggcgucuaccgcauccucgccaucuacuccaccgucgccuccucccucguccuccucgucucccucggcgccaucuccuucuggaugugcuccaacggcucccuccagugccgcaucugcaucuga

SEQ ID NO: 102405 - RNA, 1701 nt, Artificial Sequence
  derived and/or modified CDS sequence (opt2) from hemagglutinin__InfluenzaA__ADV76579
augaagaccaucaucgcccucuccuacauccucugccucgucuucgcccagaagcuccccggcaacgacgacuccaccgccacccucugccucggccaccacgccguccccaacggcaccaucgucaagaccaucaccaacgaccagaucgaggucaccaacgccaccgagcucguccaguccuccuccaccggcgagaucugcgacuccccccaccagauccucgacggcgagaacugcacccucaucgacgcccuccucggcgacccccagugcgacggcuuccagaacaagaagugggaccucuucgucgagcgcuccaaggccuacuccaacugcuaccccuacgacguccccgacuacgccucccuccgcucccucgucgccuccuccggcacccucgaguucaacaacgaguccuucaacuggaccggcgucacccagaacggcaccuccuccgccugcauccgccgcuccaacaacuccuucuucucccgccucaacuggcucacccaccuccgcuucaaguaccccgcccucaacgucaccaugcccaacaacgagcaguucgacaagcucuacaucuggggcguccaccaccccggcaccgacaacgaccagaucuuccucuacgcccaggccuccggccgcaucaccgucuccaccaagcgcucccagcagaccgucauccccaacaucggcucccgcccccgcguccgcaacauccccucccgcaucuccaucuacuggaccaucgucaagcccggcgacauccuccucaucaacuccaccggcaaccucaucgccccccgcggcuacuucaagauccgcuccggcaaguccuccaucaugcgcuccgacgcccccaucggcaagugcaacuccgagugcaucacccccaacggcuccauccccaacgacaagcccuuccagaacgucaaccgcaucaccuacggcgccugcccccgcuacgucaagcagaacacccucaagcucgccaccggcaugcgcaacguccccgagaagcagacccgcggcaucuucggcgccaucgccggcuucaucgagaacggcugggagggcauggucgacggcugguacggcuuccgccaccagaacuccgagggccgcggccaggccgccgaccucaaguccacccaggccgccaucgaccagaucaacggcaagcucaaccgccucaucggcaagaccaacgagaaguuccaccagaucgagaaggaguucuccgaggucgagggccgcauccaggaccucgagaaguacgucgaggacaccaagaucgaccucugguccuacaacgccgagcuccucgucgcccucgagaaccagcacaccaucgaccucaccgacuccgagaugaacaagcucuucgagaagaccaagaagcagcuccgcgagaacgccgaggacaugggcaacggcugcuucaagaucuaccacaagugcgacaacgccugcaucggcuccauccgcaacggcaccuacgaccacgacgucuaccgcgacgaggcccucaacaaccgcuuccagaucaagggcgucgagcucaaguccggcuacaaggacuggauccucuggaucuccuucgccaucuccugcuuccuccucugcgucgcccuccucggcuucaucaugugggccugccagaagggcaacauccgcugcaacaucugcaucuga

SEQ ID NO: 102406 - RNA, 1701 nt, Artificial Sequence; identical to SEQ ID NO: 99624
  derived and/or modified CDS sequence (opt2) from hemagglutinin__InfluenzaA__ADV76587

SEQ ID NO: 102407 - RNA, 1701 nt, Artificial Sequence; identical to SEQ ID NO: 99624
  derived and/or modified CDS sequence (opt2) from hemagglutinin__InfluenzaA__ADV76598

SEQ ID NO: 102408 - RNA, 1701 nt, Artificial Sequence; identical to SEQ ID NO: 99447
  derived and/or modified CDS sequence (opt2) from hemagglutinin__InfluenzaA__ADV76609

SEQ ID NO: 102409 - RNA, 1701 nt, Artificial Sequence; identical to SEQ ID NO: 99624
  derived and/or modified CDS sequence (opt2) from hemagglutinin__InfluenzaA__ADV76620

SEQ ID NO: 102410 - RNA, 1701 nt, Artificial Sequence
  derived and/or modified CDS sequence (opt2) from hemagglutinin__InfluenzaA__ADV76631
augaagaccaucaucgcccucuccuacauccucugccucgucuucgcccagaagcuccccggcaacgacaacuccaccgccacccucugccucggccaccacgccguccccaacggcaccaucgucaagaccaucaccaacgaccagaucgaggucaccaacgccaccgagcucguccaguccuccuccaccggcgagaucugcgacuccccccaccagauccucgacggcaagaacugcacccucaucgacgcccuccucggcgacccccagugcgacggcuuccagaacaagaagugggaccucuucgucgagcgcuccaaggccuacuccaacugcuaccccuacgacguccccgacuacgccucccuccgcucccucgucgccuccuccggcacccucgaguucaacaacgaguccuucaacuggaccggcgucacccagaacggcaccuccuccgccugcauccgccgcuccaagaacuccuucuucucccgccucaacuggcucacccaccucaacuucaaguaccccgcccucaacgucaccaugcccaacaacgagcaguucgacaagcucuacaucuggggcguccaccaccccggcaccgacaaggaccagaucuuccucuacgcccaggccuccggccgcaucaccgucuccaccaagcgcucccagcagaccgucauccccaacaucggcucccgcccccgcguccgcaacauccccucccgcaucuccaucuacuggaccauggucaagcccggcgacauccuccucaucaacuccaccggcaaccucaucgccccccgcggcuacuucaagauccgcuccggcaaguccuccaucaugcgcuccgacacccccaucggcaagugcaacuccgagugcaucacccccaacggcuccauccccaacgacaagcccuuccagaacgucaaccgcaucaccuacggcgccugcccccgcuacgucaagcagaacacccucaagcucgccaccggcaugcgcaacguccccgagaagcagacccgcggcaucuucggcgccaucgccggcuucaucgagaacggcugggagggcauggucgacggcugguacggcuuccgccaccagaacuccgagggccgcggccaggccgccgaccucaaguccacccaggccgccaucgaccagaucaacggcaagcucaaccgccucaucggcaaggccaacgagaaguuccaccagaucgagaaggaguucuccgaggucgagggccgcauccaggaccucgagaaguacgucgaggacaccaagaucgaccucugguccuacaacgccgagcuccucgucgcccucgagaaccagcacaccaucgaccucaccgacuccgagaugaacaagcucuucgagaagaccaagaagcagcuccgcgagaacgccgaggacaugggcaacggcugcuucaagaucuaccacaagugcgacaacgccugcaucggcuccauccgcaacggcaccuacgaccacgacgucuaccgcgacgaggcccucaacaaccgcuuccagaucaagggcgucgagcucaaguccggcuacaaggacuggauccucuggaucuccuucgccaucuccugcuuccuccucugcgucgcccuccucggcuucaucaugugggccugccagaagggcaacauccgcugcaacaucugcaucuga

SEQ ID NO: 102411 - RNA, 1701 nt, Artificial Sequence; identical to SEQ ID NO: 101628
  derived and/or modified CDS sequence (opt2) from hemagglutinin__InfluenzaA__ADV76642

SEQ ID NO: 102412 - RNA, 1701 nt, Artificial Sequence; identical to SEQ ID NO: 101632
  derived and/or modified CDS sequence (opt2) from hemagglutinin__InfluenzaA__ADV76664

SEQ ID NO: 102413 - RNA, 1701 nt, Artificial Sequence
  derived and/or modified CDS sequence (opt2) from hemagglutinin__InfluenzaA__ADV76673
augaagaccaucaucgcccucuccuacaucuucugccucgcccucggccaggaccuccccggcaacgacaacuccaccgccacccucugccucggccaccacgccguccccaacggcacccucgucaagaccaucaccgacgaccagaucgaggucaccaacgccaccgagcucguccaguccuccuccaccggcaagaucugcaacaacccccaccgcauccucgacggcaucgacugcacccucaucgacgcccuccucggcgacccccacugcgacgucuuccagaacgagaccugggaccucuucgucgagcgcuccaaggccuucuccaacugcuaccccuacgacguccccgacuacgccucccuccgcucccucgucgccuccuccggcacccucgaguucaucaccgagggcuucaccuggaccggcgucacccagaacggcggcuccaacgccugcaagcgcggccccggcuccggcuucuucucccgccucaacuggcucaccaaguccggcuccaccuaccccguccucaacgucaccaugcccaacaacgacaacuucgacaagcucuacaucuggggcguccaccaccccuccaccaaccaggagcagaccucccucuacguccaggccuccggccgcgucaccgucuccacccgccgcucccagcagaccaucauccccaacaucgagucccgccccuggguccgcggccucuccucccgcaucuccaucuacuggaccaucgucaaccccggcgacguccucgucaucaacuccaacggcaaccucaucgccccccgcggcuacuucaagaugcgcaccggcaaguccuccaucaugcgcuccgacgcccccaucgacaccugcaucuccgagugcaucacccccaacggcuccauccccaacgacaagcccuuccagaacgucaacaagaucaccuacggcgccugccccaaguacgucaagcagaacacccucaagcucgccaccggcaugcgcaacguccccgagaagcagacccgcggccucuucggcgccaaggccggcuucaucgagaacggcugggagggcaugaucgacggcugguacggcuuccgccaccagaacuccgagggcaccggccaggccgccgaccucaaguccacccaggccgccaucgaccagaucaacggcaagcucaaccgcgucaucgagaagaccaacgagaaguuccaccagaucgagaaggaguucuccgaggucgagggccgcauccaggaccucgagaaguacgucgaggacaccaagaucgaccucugguccuacaacgccgagcuccucgucgcccucgagaaccagcacaccaucgaccucaccgacuccgagaugaacaagcucuucgagaagacccgccgccagcuccgcgagaacgccgaggacaugggcaacggcugcuucaagaucuaccacaagugcgacaacgccugcaucgaguccauccgcaacggcaccuacgaccacgacgucuaccgcgacgaggcccucaacaaccgcuuccagaucaagggcgucgagcucaaguccggcuacaaggacuggauccucuggaucuccuucgccaucuccugcuuccuccucugcgucguccuccucggcuucaucaugugggccugccagcgcggcaacauccgcugcaacaucugcaucuga

SEQ ID NO: 102414 - RNA, 1701 nt, Artificial Sequence
  derived and/or modified CDS sequence (opt2) from hemagglutinin__InfluenzaA__ADV76682
augaagaccaucaucgcccucuccuacauccucugccucgucuucgcccagaagcuccccggcaacgacaacuccaccgccacccucugccucggccaccacgccguccccaacggcaccaucgucaagaccaucaccaacgaccagaucgaggucaccaacgccaccgagcucguccaguccuccuccaccggcgagaucugcgacuccccccaccagauccucgacggcgagaacugcacccucaucgacgcccuccucggcgacccccagugcgacggcuuccagaacaagaagugggaccucuucgucgagcgcuccaaggccuacuccaacugcuaccccuacgacguccccgacuacgccucccuccgcucccucgucgccuccuccggcacccucgaguucaacaacgaguccuucaacuggaccggcgucacccagaacggcaccuccuccgccugcauccgccgcuccaacaacuccuucuucucccgccucaacuggcucacccaccucaacuucaaguaccccgcccucaacgucaccaugcccaacaacgagcaguucgacaagcucuacaucuggggcguccaccaccccggcaccgacaaggaccagaucuuccucuacgcccaggccuccggccgcaucaccgucuccaccaagcgcucccagcaggccgucauccccaacaucggcucccgcccccgcguccgcaacauccccucccgcaucuccaucuacuggaccaucgucaagcccggcgacauccuccucaucaacuccaccggcaaccucaucgccccccgcggcuacuucaagauccgcuccggcgaguccuccaucaugcgcuccgacgcccccaucggcaagugcaacuccgagugcaucacccccaacggcuccauccccaacgacaagcccuuccagaacgucaaccgcaucaccuacggcgccugcccccgcuacgucaagcagaacacccucaagcucgccaccggcaugcgcaacguccccgagaagcagacccgcggcaucuucggcgccaucgccggcuucaucgagaacggcugggagggcauggucgacggcugguacggcuuccgccaccagaacuccgagggccgcggccaggccgccgaccucaaguccacccaggccgccaucgaccagaucaacggcaagcucaaccgccucaucggcaagaccaacgagaaguuccaccagaucgagaaggaguucuccgaggucgagggccgcauccaggaccucgagaaguacgucgaggacaccaagaucgaccucugguccuacaacgccgagcuccucgucgcccucgagaaccagcacaccaucgaccucaccgacuccgagaugaacaagcucuucgagaagaccaagaagcagcuccgcgagaacgccgaggacaugggcaacggcugcuucaagaucuaccacaagugcgacaacgccugcaucggcuccauccgcaacggcaccuacgaccacgacgucuaccgcgacgaggcccucaacaaccgcuuccagaucaagggcgucgagcucaaguccggcuacaaggacuggauccucuggaucuccuucgccaucuccugcuuccuccucugcgucgcccuccucggcuucaucaugugggccugccagaagggcaacauccgcugcaacaucugcaucuga

SEQ ID NO: 102415 - RNA, 1701 nt, Artificial Sequence; identical to SEQ ID NO: 99649
  derived and/or modified CDS sequence (opt2) from hemagglutinin__InfluenzaA__ADV76694

SEQ ID NO: 102416 - RNA, 1701 nt, Artificial Sequence; identical to SEQ ID NO: 99447
  derived and/or modified CDS sequence (opt2) from hemagglutinin__InfluenzaA__ADV76705

SEQ ID NO: 102417 - RNA, 1701 nt, Artificial Sequence; identical to SEQ ID NO: 99649
  derived and/or modified CDS sequence (opt2) from hemagglutinin__InfluenzaA__ADV76716

SEQ ID NO: 102418 - RNA, 1701 nt, Artificial Sequence
  derived and/or modified CDS sequence (opt2) from hemagglutinin__InfluenzaA__ADV76727
augaagaccaucaucgcccucuccuacauccucugccucgucuucgcccagaagcuccccggcaacgacaacuccaccgccacccucugccucggccaccacgccguccccaacggcaccaucgucaagaccaucaccaacgaccagaucgaggucaccaacgccaccgagcucguccaguccuccuccaccggcgagaucugcgacuccccccaccagauccucgacggcaagaacugcacccucaucgacgcccuccucggcgacccccagugcgacggcuuccagaacaagaagugggaccucuucgucgagcgcuccaaggccuacuccaacugcuaccccuacgacguccccgacuacgccucccuccgcucccucgucgccuccuccggcacccucgaguucaacaacgaguccuucaacuggaccggcgucacccagaacggcaaguccuccgccugcauccgccgcuccaagaacuccuucuucucccgccucaacuggcucacccaccucaacuucaaguaccccgcccucaacgucaccaugcccaacaacgagcaguucgacaagcucuacaucuggggcguccaccaccccggcaccgacaaggaccagaucuuccucuacgcccaggccuccggccgcaucaccgucuccaccaagcgcucccagcagaccgucauccccaacaucggcucccgcccccgcguccgcaacauccccucccgcaucuccaucuacuggaccaucgucaagcccggcgacauccuccucaucaacuccaccggcaaccucaucgccccccgcggcuacuucaagauccgcuccggcaaguccuccaucaugcgcuccgacgcccccaucggcaagugcaacuccgagugcaucacccccaacggcuccauccccaacgacaagcccuuccagaacgucaaccgcaucaccuacggcgccugcccccgcuacgucaagcagaacacccucaagcucgccaccggcaugcgcaacguccccgagaagcagacccgcggcaucuucggcgccaucgccggcuucaucgagaacggcugggagggcauggucgacggcugguacggcuuccgccaccagaacuccgagggccgcggccaggccgccgaccucaaguccacccaggccgccaucgaccagaucaacggcaagcucaaccgccucaucggcaagaccaacgagaaguuccaccagaucgagaaggaguucuccgaggucgagggccgcauccaggaccucgagaaguacgucgaggacaccaagaucgaccucugguccuacaacgccgagcuccucgucgcccucgagaaccagcacaccaucgaccucaccgacuccgagaugaacaagcucuucgagaagaccaagaagcagcuccgcgagaacgccgaggacaugggcaacggcugcuucaagaucuaccacaagugcgacaacgccugcaucggcuccauccgcaacggcaccuacgaccacgacgucuaccgcgacgaggcccucaacaaccgcuuccagaucaagggcgucgagcucaaguccggcuacaaggacuggauccucuggaucuccuucgccaucuccugcuuccuccucugcgucgcccuccucggcuucaucaugugggccugccagaagggcaacauccgcugcaacaucugcaucuga

SEQ ID NO: 102419 - RNA, 1701 nt, Artificial Sequence
  derived and/or modified CDS sequence (opt2) from hemagglutinin__InfluenzaA__ADV91009
augaaggccauccucgccguccuccucuacaccuucgccaccgccaacgccgacacccucugcaucggcuaccacgccaacaacuccaccgacaccgucgacaccguccucgagaagaacgucaccgucacccacuccgucaaccuccucgaggacaagcacaacggcaagcucugcaagcuccgcggcaucgccccccuccaccucggcaagugcaacaucgccggcuggauccucggcaaccccgagugcgagucccucuccaccgccuccuccugguccuacaucgucgagacccccuccuccgacaacggcaccugcuaccccggcgacuucaucgacuacgaggagcuccgcgagcagcucuccuccgucuccuccuucgagcgcuucgagaucuuccccaagaccuccuccuggcccaaccacgacuccaacaagggcgucaccgccgccugcccccacgccggcgccaaguccuucuacaagaaccucaucuggcucgucaagaagggcaacuccuaccccaagcucuccaaguccuacaucaacgacaagggcaagaagguccucguccucuggggcauccaccaccccuccaccuccgccgaccagcagucccucuaccagaacgccgacgccuacgucuucgucggcaccucccgcuacuccaagaaguucaagcccgagaucgccauccgccccaagguccgcgaccaggagggccgcaugaacuacuacuggacccucgucgagcccggcgacaagaucaccuucgaggccaccggcaaccucgucgucccccgcuacgccuucgccauggagcgcaacgccggcuccggcaucaucaucuccgacacccccguccacgacugcaacaccaccugccagacccccaagggcgccaucaacaccucccuccccuuccagaacauccaccccaucaccaucggcaagugccccaaguacgucgaguccaccaagcuccgccucgccaccggccuccgcaacguccccuccauccagucccgcggccucuucggcgccaucgccggcuucaucgagggcggcuggaccggcauggucgacggcugguacggcuaccaccaccagaacgagcagggcuccggcuacgccgccgaccucaaguccacccagaacgccaucgacaagaucaccaacaaggucaacuccgucaucgagaagaugaacacccaguucaccgccgucggcaaggaguucaaccaccucgagaagcgcaucgagaaccucaacaagaaggucgacgacggcuuccucgacaucuggaccuacaacgccgagcuccucguccuccucgagaacgagcgcacccucgacuaccacgacuccaacgucaagaaccucuacgagaagguccgcucccagcucaagaacaacgccaaggagaucggcaacggcugcuucgaguucuaccacaagugcgacaacaccugcauggaguccgucaagaacggcaccuacgacuaccccaaguacuccgaggaggccaagcucaaccgcgaggagaucgacggcgucaagcucgaguccacccgcaucuaccagauccucgccaucuacuccaccgucgccuccucccucguccucgucgucucccucggcgccaucuccuucuggaugugcuccaacggcucccuccagugccgcaucugcaucuga

SEQ ID NO: 102420 - RNA, 1701 nt, Artificial Sequence
  derived and/or modified CDS sequence (opt2) from hemagglutinin__InfluenzaA__ADV91010
augaaggccauccucgucguccuccucuacaccuucgccaccgccaacgccgacacccucugcaucggcuaccacgccaacaacuccaccgacaccgucgacaccguccucgagaagaacgucaccgucacccacuccgucaaccuccucgaggacaagcacaacggcaagcucugcaagcuccgcggcgucgccccccuccaccucggcaagugcaacaucgccggcuggauccucggcaaccccgagugcgagucccucuccaccgccuccuccugguccuacaucgucgagaccuccuccuccgacaacggcaccugcuaccccggcgacuucaccgacuacgaggagcuccgcgagcagcucuccuccgucuccuccuucgagcgcuucgagaucuuccccaagaccuccuccuggcccaaccacgacuccaacaagggcgucaccaccgccugcccccacgccggcgccaaguccuucuacaagaaccucaucuggcucgucaagaagggcaacuccuaccccaagcucuccaaguccuacaucaacgacaagggcaaggagguccucguccucuggggcauccaccacccccccaccuccgccgaccagcagucccucuaccagaacgccgacgccuacgucuucgucggcaccucccgcuacuccaagaaguucaagcccgagaucgccauccgccccaagguccgcgaccaggagggccgcaugaacuacuacuggacccucgucgagcccggcgacaagaucaccuucgaggccaccggcaaccucgucgucccccgcuacgccuucgccauggagcgcaacgccggcuccggcaucaucaucuccgacacccccguccacgacugcaacaccaccugccagacccccaagggcgccaucaacaccucccuccccuuccagaacauccaccccaucaccaucggcaagugccccaaguacgucaaguccaccaagcuccgccucgccaccggccuccgcaacguccccuccauccagucccgcggccucuucggcgccaucgccggcuucaucgagggcggcuggaccggcauggucgacggcugguacggcuaccaccaccagaacgagcagggcuccggcuacgccgccgaccucaaguccacccagaacgccaucgacgagaucaccaacaaggucaacuccgucaucgagaagaugaacacccaguucaccgccgucggcaaggaguucaaccaccucgagaagcgcaucgagaaccucaacaagaaggucgacgacggcuuccucgacaucuggaccuacaacgccgagcuccucguccuccucgagaacgagcgcacccucgacuaccacgacuccaacgucaagaaccucuacgagaagguccgcucccagcucaagaacaacgccaaggagaucggcaacggcugcuucgaguucuaccacaagugcgacaacaccugcauggaguccgucaagaacggcaccuacgacuaccccaaguacuccgaggaggccaagcucaaccgcgaggagaucgacggcgucaagcucgaguccacccgcaucuaccagauccucgccaucuacuccaccgucgccuccucccucguccucgucgucucccucggcgccaucuccuucuggaugugcuccaacggcucccuccagugccgcaucugcaucuga

SEQ ID NO: 102421 - RNA, 1701 nt, Artificial Sequence
  derived and/or modified CDS sequence (opt2) from hemagglutinin__InfluenzaA__ADW01407
auggaggccaagcucuucguccucuucugcgccuucaccgcccucaaggccgacaccaucugcgucggcuaccacgccaacaacuccaccgacaccgucgacaccauccucgagaagaacgucaccgucacccacuccgucaaccuccucgagaacucccacaacggcaagcucugcucccucaacggcaagaucccccuccagcucggcaacugcaacgucgccggcuggauccucggcaaccccaagugcgaccuccuccucaccgccaacuccugguccuacaucaucgagaccuccaacuccaagaacggcgccugcuaccccggcgaguucgccgacuacgaggagcucaaggagcagcucuccaccgucuccuccuucgagcgcuucgagaucuuccccaaggccaccuccuggcccaaccacgacaccacccgcggcaccaccgucgccugcucccacuccggcgccaacuccuucuaccgcaaccuccucuggaucgucaagaagggcaacuccuaccccaagcucuccaaguccuacaccaacaacaagggcaaggagguccucgucaucuggggcguccaccacccccccaccgacuccgaccagcagacccucuaccagaacaaccacaccuacgucuccgucggcuccuccaaguacuacaagcgccucacccccgagaucgucgcccgccccaagguccgcgagcaggccggccgcaugaacuacuacuggacccuccucgaccagggcgacaccaucaccuucgaggccaccggcaaccucaucgcccccuggcacgccuucgcccucaagaagggcuccuccuccggcaucaugcgcuccgacgcccagguccacaacugcaccaccaagugccagaccccccacggcgcccucaagggcaaccuccccuuccagaacguccaccccgucaccaucggcgagugccccaaguacgucaaguccacccagcuccgcauggccaccggccuccgcaacauccccuccauccagucccgcggccucuucggcgccaucgccggcuucaucgagggcggcuggaccggcauggucgacggcugguacggcuaccaccaccgcaacgagcagggcuccggcuacgccgccgaccagaaguccacccagaucgccaucgacggcaucuccaacaaggucaacuccgucaucgagaagaugaacauccaguucaccuccgucggcaaggaguucaacucccucgagaagcgcauggagaaccucaacaagaaggucgacgacggcuuccucgacgucuggaccuacaacgccgagcuccucauccuccucgagaacgagcgcacccucgacuuccacgaccucaacgucaagaaccucuacgagaaggucaagucccagcuccgcaacaacgccaaggagaucggcaacggcugcuucgaguucuaccacaagugcgacaacgagugcauggaguccgucaagaacggcaccuacaacuaccccaaguacuccgaggaguccaagcucaaccgcgaggagaucgacggcgucaagcucgaguccaugggcauccaccagauccucgccaucuacuccaccgucgccuccucccucguccuccucgucucccucggcgccaucuccuucuggaugugcuccaacggcucccuccagugccgcgucugcaucuga

SEQ ID NO: 102422 - RNA, 1698 nt, Artificial Sequence; identical to SEQ ID NO: 99167
  derived and/or modified CDS sequence (opt2) from hemagglutinin__InfluenzaA__ADW09101

SEQ ID NO: 102423 - RNA, 1698 nt, Artificial Sequence
  derived and/or modified CDS sequence (opt2) from hemagglutinin__InfluenzaA__ADW09111
augaaggucaagcuccucguccuccucugcaccuucaccgccaccuacgccgacaccaucugcaucggcuaccacgccaacaacuccaccgacaccgucgacaccguccucgagaagaacgucaccgucacccacuccgucaaccuccucgagaacucccacaacggcaagcucugccuccucaagggcaucgccccccuccagcucggcaacugcuccgucgccggcuggauccucggcaaccccgagugcgagcuccucaucuccaaggaguccugguccuacaucgucgagaagcccaaccccgagaacggcaccugcuaccccggccacuucgccgacuacgaggagcuccgcgagcagcucuccuccgucuccuccuucgagcgcuucgagaucuuccccaaggaguccuccuggcccaaccacaccgucaccggcgucuccgccuccugcucccacaacggcgaguccuccuucuaccgcaaccuccucuggcucaccggcaagaacggccucuaccccaaccucuccaaguccuacgccaacaacaaggagaaggagguccucguccucuggggcguccaccacccccccaacaucgucgaccagaagacccucuaccgcaccgagaacgccuacgucuccgucgucuccucccacuacucccgcaaguucacccccgagaucgccaagcgccccaagguccgcgaccaggagggccgcaucaacuacuacuggacccuccucgagcccggcgacaccaucaucuucgaggccaacggcaaccucaucgccccccgcuacgccuucgcccucucccgcggcuucggcuccggcaucaucaacuccaacgcccccauggacaagugcgacgccaagugccagaccccccgcggcgccaucaacuccucccuccccuuccagaacguccaccccgucaccaucggcgagugccccaaguacguccgcuccgccaagcuccgcauggucaccggccuccgcaacauccccuccauccagucccgcggccucuucggcgccaucgccggcuucaucgagggcggcuggaccggcauggucgacggcugguacggcuaccaccaccagaacgaccagggcuccggcuacgccgccgaccagaaguccacccagaacgccaucaacggcaucaccaacaaggucaacuccgucaucgagaagaugaacacccaguucaccgccgucggcaaggaguucaacaagcucgagcgccgcauggagaaccucaacaagaaggucgacgacggcuucaucgacaucuggaccuacaacgccgagcuccucguccuccucgagaacgagcgcacccucgacuuccacgacuccaacgucaagaaccucuacgagaaggucaagucccagcucaagaacaacgccaaggagaucggcaacggcugcuucgaguucuaccacaagugcaacgacgagugcauggaguccgucaagaacggcaccuacgacuaccccaaguacuccgaggaguccaagcucaaccgcgagaagaucgacggcgucaagcucgaguccaugggcgucuaccagauccucgccaucuacuccaccgucgccuccucccucguccuccucgucucccucggcgccaucuccuucuggaugugcuccaacggcucccuccagugccgcaucugcaucuga

SEQ ID NO: 102424 - RNA, 1698 nt, Artificial Sequence
  derived and/or modified CDS sequence (opt2) from hemagglutinin__InfluenzaA__ADW09120
augaaggucaagcuccucguccuccucugcaccuucaccgccaccuacgccgacaccaucugcaucggcuaccacgccaacaacuccaccgacaccgucgacaccguccucgagaagaacgucaccgucacccacuccgucaaccuccucgagaacucccacaacggcaagcucugccuccucaagggcaucgccccccuccagcucggcaacugcuccgucgccggcuggauccucggcaaccccgagugcgagcuccucaucuccaaggaguccugguccuacaucgucgagaagcccaaccccgagaacggcaccugcuaccccggccacuucgccgacuacgaggagcuccgcgagcagcucuccuccgucuccuccuucgagcgcuucgagaucuuccccaaggaguccuccuggcccaaccacaccgucaccggcgucuccgccuccugcucccacaacggcgaguccuccuucuaccgcaaccuccucuggcucaccgucaagaacggccucuaccccaaccucuccaaguccuacgccaacaacaaggagaaggagguccucguccucuggggcguccaccacccccccaacaucgucgaccagaagacccucuaccacaccgagaacgccuacgucuccgucgucuccucccacuacucccgcaaguucacccccgagaucgccaagcgccccaagguccgcgaccaggagggccgcaucaacuacuacuggacccuccucgagcccggcgacaccaucaucuucgaggccaacggcaaccucaucgccccccgcuacgccuucgcccucuccaagggcuucggcuccggcaucaucaacuccaacgcccccauggacaagugcgacgccaagugccagaccccccgcggcgccaucaacuccucccuccccuuccagaacguccaccccgucaccaucggcgagugccccaaguacguccgcuccgccaagcuccgcauggucaccggccuccgcaacauccccuccauccagucccgcggccucuucggcgccaucgccggcuucaucgagggcggcuggaccggcauggucgacggcugguacggcuaccaccaccagaacgagcagggcuccggcuacgccgccgaccagaaguccacccagaacgccaucaacggcaucaccaacaaggucaacuccgucaucgagaagaugaacacccaguucaccgccgucggcaaggaguucaacaagcucgagcgccgcauggagaaccucaacaagaaggucgacgacggcuucaucgacaucuggaccuacaacgccgagcuccucguccuccucgagaacgagcgcacccucgacuuccacgacuccaacgucaagaaccucuacgagaaggucaagucccagcucaagaacaacgccaaggagaucggcaacggcugcuucgaguucuaccacaagugcaacgacgagugcauggaguccgucaagaacggcaccuacgacuaccccaaguacuccgaggaguccaagcucaaccgcgagaagaucgacggcgucaagcucgaguccaugggcgucuaccagauccucgccaucuacuccaccgucgccuccucccucguccuccucgucucccucggcgccaucuccuucuggaugugcuccaacggcucccuccagugccgcaucugcaucuga

SEQ ID NO: 102425 - RNA, 1698 nt, Artificial Sequence; identical to SEQ ID NO: 99652
  derived and/or modified CDS sequence (opt2) from hemagglutinin__InfluenzaA__ADW09131

SEQ ID NO: 102426 - RNA, 1698 nt, Artificial Sequence
  derived and/or modified CDS sequence (opt2) from hemagglutinin__InfluenzaA__ADW09153
augaaggucaagcuccucguccuccucugcaccuucaccgccaccuacgccgacaccaucugcaucggcuaccacgccaacaacuccaccgacaccgucgacaccguccucgagaagaacgucaccgucacccacuccgucaaccuccucgagaacucccacaacggcaagcucugccuccucaagggcaucgccccccuccagcucggcaacugcuccgucgccggcuggauccucggcaaccccgagugcgagcuccucaucuccaaggaguccugguccuacaucgucgagaagcccaaccccgagaacggcaccugcuaccccggccacuucgccgacuacgaggagcuccgcgagcagcucuccuccgucuccuccuucgagcgcuucgagaucuuccccaaggaguccuccuggcccaaccacaccgucaccggcgucuccgccuccugcucccacaacggcgaguccuccuucuaccgcaaccuccucuggcucaccgucaagaacggccucuaccccaaccucuccaaguccuacgccaacaacaaggagaaggagguccucguccucuggggcguccaccacccccccaacaucgucgaccagaagacccucuaccgcaccgagaacgccuacgucuccgucgucuccucccacuacucccgcaaguucacccccgagaucgccaagcgccccaagguccgcgaccaggagggccgcaucaacuacuacuggacccuccucgagcccggcgacaccaucaucuucgaggccaacggcaaccucaucgccccccgcuacgccuucgcccucucccgcggcuucggcuccggcaucaucaacuccaacgcccccauggacaagugcgacgccaagugccagaccccccgcggcgccaucaacuccucccuccccuuccagaacguccaccccgucaccaucggcgagugccccaaguacguccgcuccgccaagcuccgcauggucaccggccuccgcaacauccccuccauccagucccgcggccucuucggcgccaucgccggcuucaucgagggcggcuggaccggcauggucgacggcugguacggcuaccaccaccagaacgagcagggcuccggcuacgccgccgaccagaaguccacccaggacgccaucaacggcaucaccaacaaggucaacuccgucaucgagaagaugaacacccaguucaccgccgucggcaaggaguucaacaagcucgagcgccgcauggagaaccucaacaagaaggucgacgacggcuucaucgacaucuggaccuacaacgccgagcuccucguccuccucgagaacgagcgcacccucgacuuccacgacuccaacgucaagaaccucuacgagaaggucaagucccagcucaagaacaacgccaaggagaucggcaacggcugcuucgaguucuaccacaagugcaacgacgagugcauggaguccgucaagaacggcaccuacgacuaccccaaguacuccgaggaguccaagcucaaccgcgagaagaucgacggcgucaagcucgaguccaugggcgucuaccagauccucgccaucuacuccaccgucgccuccucccucguccuccucgucucccucggcgccaucuccuucuggaugugcuccaacggcucccuccagugccgcaucugcaucuga

SEQ ID NO: 102427 - RNA, 1698 nt, Artificial Sequence; identical to SEQ ID NO: 99652
  derived and/or modified CDS sequence (opt2) from hemagglutinin__InfluenzaA__ADW09164

SEQ ID NO: 102428 - RNA, 1698 nt, Artificial Sequence
  derived and/or modified CDS sequence (opt2) from hemagglutinin__InfluenzaA__ADW09186
augaaggucaagcuccucguccuccucugcaccuucaccgccaccuacgccgacaccaucugcaucggcuaccacgccaacaacuccaccgacaccgucgacaccguccucgagaagaacgucaccgucacccacuccgucaaccuccucgagaacucccacaacggcaagcucugccuccucaagggcaucgccccccuccagcucggcaacugcuccgucgccggcuggauccucggcaaccccgagugcgagcuccucaucuccaaggaguccugguccuacaucgucgagaagcccaaccccgagaacggcaccugcuaccccggccacuucgccgacuacgaggagcuccgcgagcagcucuccuccgucuccuccuucgagcgcuucgagaucuuccccaaggaguccuccuggcccaaccacaccgucaccggcgucuccgccuccugcucccacaacggcgaguccuccuucuaccgcaaccuccucuggcucaccggcaagaacggccucuaccccaaccucuccaaguccuacgccaacaacaaggagaaggagguccucguccucuggggcguccaccacccccccaacaucgucgaccagaagacccucuaccgcaccgagaacgccuacgucuccgucgucuccucccacuacucccgcaaguucacccccgagaucgccaagcgccccaagguccgcgaccaggagggccgcaucaacuacuacuggacccuccucgagcccggcgacaccaucaucuucgaggccaacggcaaccucaucgccccccgcuacgccuucgcccucucccgcggcuucggcuccggcaucaucaacuccaacgcccccauggacaagugcgacgccaagugccagaccccccagggcgccaucaacuccucccuccccuuccagaacguccaccccgucaccaucggcgagugccccaaguacguccgcuccgccaagcuccgcauggucaccggccuccgcaacacccccuccauccagucccgcggccucuucggcgccaucgccggcuucaucgagggcggcuggaccggcauggucgacggcugguacggcuaccaccaccagaacgagcagggcuccggcuacgccgccgaccagaaguccacccagaacgccaucaacggcaucaccaacaaggucaacuccgucaucgagaagaugaacacccaguucaccgccgucggcaaggaguucaacaagcucgagcgccgcauggagaaccucaacaagaaggucgacgacggcuucaucgacaucuggaccuacaacgccgagcuccucguccuccucgagaacgagcgcacccucgacuuccacgacuccaacgucaagaaccucuacgagaaggucaagucccagcucaagaacaacgccaaggagaucggcaacggcugcuucgaguucuaccacaagugcaacgacgagugcauggaguccgucaagaacggcaccuacgacuaccccaaguacuccgaggaguccaagcucaaccgcgagaagaucgacggcgucaagcucgaguccaugggcgucuaccagauccucgccaucuacuccaccgucgccuccucccucguccuccucgucucccucggcgccaucuccuucuggaugugcuccaacggcucccuccagugccgcaucugcaucuga

SEQ ID NO: 102429 - RNA, 1698 nt, Artificial Sequence; identical to SEQ ID NO: 99167
  derived and/or modified CDS sequence (opt2) from hemagglutinin__InfluenzaA__ADW09197

SEQ ID NO: 102430 - RNA, 1698 nt, Artificial Sequence; identical to SEQ ID NO: 99652
  derived and/or modified CDS sequence (opt2) from hemagglutinin__InfluenzaA__ADW09208

SEQ ID NO: 102431 - RNA, 1698 nt, Artificial Sequence; identical to SEQ ID NO: 99652
  derived and/or modified CDS sequence (opt2) from hemagglutinin__InfluenzaA__ADW09219

SEQ ID NO: 102432 - RNA, 1698 nt, Artificial Sequence; identical to SEQ ID NO: 99167
  derived and/or modified CDS sequence (opt2) from hemagglutinin__InfluenzaA__ADW09230

SEQ ID NO: 102433 - RNA, 1698 nt, Artificial Sequence
  derived and/or modified CDS sequence (opt2) from hemagglutinin__InfluenzaA__ADW09241
augaaggucaagcuccucguccuccucugcaccuucaccgccaccuacgccgacaccaucugcaucggcuaccacgccaacaacuccaccgacaccgucgacaccguccucgagaagaacgucaccgucacccacuccgucaaccuccucgagaacucccacaacggcaagcucugccuccucaagggcaucgccccccuccagcucggcaacugcuccgucgccggcuggauccucggcaaccccgagugcgagcuccucaucuccaaggaguccugguccuacaucgucgagaagcccaaccccgagaacggcaccugcuaccccggccacuucgccgacuacgaggagaugcgcgagcagcucuccuccgucuccuccuucgagcgcuucgagaucuuccccaaggaguccuccuggcccaaccacaccgucaccggcgucuccgccuccugcucccacaacggcgaguccuccuucuaccgcaaccuccucuggcucaccgucaagaacggccucuaccccaaccucuccaaguccuacgccaacaacaaggagaaggagguccucguccucuggggcguccaccacccccccaacaucgucgaccagaagacccucuaccgcaccgagaacgccuacgucuccgucgucuccucccacuacucccgcaaguucacccccgagaucgccaagcgccccaagguccgcgaccaggagggccgcaucaacuacuacuggacccuccucgagcccggcgacaccaucaucuucgaggccaacggcaaccucaucgccccccgcuacgccuucgcccucucccgcggcuucggcuccggcaucaucaacuccaacgcccccauggacaagugcgacgccaagugccagaccccccgcggcgccaucaacuccucccuccccuuccagaacguccaccccgucaccaucggcgagugccccaaguacguccgcuccgccaagcuccgcauggucaccggccuccgcaacauccccuccauccagucccgcggccucuucggcgccaucgccggcuucaucgagggcggcuggaccggcauggucgacggcugguacggcuaccaccaccagaacgagcagggcuccggcuacgccgccgaccagaaguccacccagaacgccaucaacggcaucaccaacaaggucaacuccgucaucgagaagaugaacacccaguucaccgccgucggcaaggaguucaacaagcucgagcgccgcauggagaaccucaacaagaaggucgacgacggcuucaucgacaucuggaccuacaacgccgagcuccucguccuccucgagaacgagcgcacccucgacuuccacgacuccaacgucaagaaccucuacgagaaggucaagucccagcucaagaacaacgccaaggagaucggcaacggcugcuucgaguucuaccacaagugcaacgacgagugcauggaguccgucaagaacggcaccuacgacuaccccaaguacuccgaggaguccaagcucaaccgcgagaagaucgacggcgucaagcucgaguccaugggcgucuaccagauccucgccaucuacuccaccgucgccuccucccucguccuccucgucucccucggcgccaucuccuucuggaugugcuccaacggcucccuccagugccgcaucugcaucuga

SEQ ID NO: 102434 - RNA, 1698 nt, Artificial Sequence; identical to SEQ ID NO: 99652
  derived and/or modified CDS sequence (opt2) from hemagglutinin__InfluenzaA__ADW09252

SEQ ID NO: 102435 - RNA, 1698 nt, Artificial Sequence
  derived and/or modified CDS sequence (opt2) from hemagglutinin__InfluenzaA__ADW09274
augaaggucaagcuccucguccuccucugcaccuucaccgccaccuacgccgacaccaucugcaucggcuaccacgccaacaacuccaccgacaccgucgacaccguccucgagaagaacgucaccgucacccacuccgucaaccuccucgagaacucccacaacggcaagcucugccuccucaagggcaucgccccccuccagcucggcaacugcuccgucgccggcuggauccucggcaaccccgagugcgagcuccucaucuccaaggaguccugguccuacaucgucgagaagcccaaccccgagaacggcaccugcuaccccggccacuucgccgacuacgaggagcuccgcgagcagcucuccuccgucuccuccuucgagcgcuucgagaucuuccccaaggaguccuccuggcccaaccacaccgucaccggcgucuccgccuccugcucccacaacggcgaguccuccuucuaccgcaaccuccucuggcucaccgucaagaacggccucuaccccaaccucuccaagcccuacgccaacaacaaggagaaggagguccucguccucuggggcguccaccacccccccaacaucgucgaccagaagacccucuaccgcaccgagaacgccuacgucuccgucgucuccucccacuacucccgcaaguucacccccgagaucgccaagcgccccaagguccgcgaccaggagggccgcaucaacuacuacuggacccuccucgagcccggcgacaccaucaucuucgaggccaacggcaaccucaucgccccccgcuacgccuucgcccucucccgcggcuucggcuccggcaucaucaacuccaacgcccccauggacaagugcgacgccaagugccagaccccccgcggcgccaucaacuccucccuccccuuccagaacguccaccccgucaccaucggcgagugccccaaguacguccgcuccgccaagcuccgcauggucaccggccuccgcaacauccccuccauccagucccgcggccucuucggcgccaucgccggcuucaucgagggcggcuggaccggcauggucgacggcugguacggcuaccaccaccagaacgagcagggcuccggcuacgccgccgaccagaaguccacccagaacgccaucaacggcaucaccaacaaggucaacuccgucaucgagaagaugaacacccaguucaccgccgucggcaaggaguucaacaagcucgagcgccgcauggagaaccucaacaagaaggucgacgacggcuucaucgacaucuggaccuacaacgccgagcuccucguccuccucgagaacgagcgcacccucgacuuccacgacuccaacgucaagaaccucuacgagaaggucaagucccagcucaagaacaacgccaaggagaucggcaacggcugcuucgaguucuaccacaagugcaacgacgagugcauggaguccgucaagaacggcaccuacgacuaccccaaguacuccgaggaguccaagcucaaccgcgagaagaucgacggcgucaagcucgaguccaugggcgucuaccagauccucgccaucuacuccaccgucgccuccucccucguccuccucgucucccucggcgccaucuccuucuggaugugcuccaacggcucccuccagugccgcaucugcaucuga

SEQ ID NO: 102436 - RNA, 1698 nt, Artificial Sequence
  derived and/or modified CDS sequence (opt2) from hemagglutinin__InfluenzaA__ADW09285
augaaggucaagcuccucguccuccucugcaccuucaccgccaccuacgccgacaccaucugcaucggcuaccacgccaacaacuccaccgacaccgucgacaccguccucgagaagaacgucaccgucacccacuccgucaaccuccucgagaacucccacaacggcaagcucugccuccucaagggcaucgccccccuccagcucggcaacugcuccgucgccggcuggauccucggcaaccccgagugcgagcuccucaucuccaaggaguccugguccuacaucgucgagaagcccaaccccgagaacggcaccugcuaccccggccacuucgccgacuacgaggagcuccgcgagcagcucuccuccgucuccuccuucgagcgcuucgagaucuuccccaaggaguccuccuggcccaaccacaccgucaccggcgucuccgccuccugcucccacaacggcgaguccuccuucuaccgcaaccuccucuggcucaccggcaagaacggccucuaccccaaccucuccaaguccuacgccaacaacaaggagaaggagguccucguccucuggggcguccaccacccccccaacaucgucgaccagaagacccucuaccgcaccgagaacgccuacgucuccgucgucuccucccacuacucccgcaaguucacccccgagaucgccaagcgccccaagguccgcgaccaggagggccgcaucaacuacuacuggacccuccucgagcccggcgacaccaucaccuucgaggccaacggcaaccucaucgccccccgcuacgccuucgcccucucccgcggcuucggcuccggcaucaucaacuccaacgcccccauggacaagugcgacgccaagugccagaccccccagggcgccaucaacuccucccuccccuuccagaacguccaccccgucaccaucggcgagugccccaaguacguccgcuccgccaagcuccgcauggucaccggccuccgcaacauccccuccauccagucccgcggccucuucggcgccaucgccggcuucaucgagggcggcuggaccggcauggucgacggcugguacggcuaccaccaccagaacgagcagggcuccggcuacgccgccgaccagaaguccacccagaacgccaucaacggcaucaccaacaaggucaacuccgucaucgagaagaugaacacccaguucaccgccgucggcaaggaguucaacaagcucgagcgccgcauggagaaccucaacaagaaggucgacgacggcuucaucgacaucuggaccuacaacgccgagcuccucguccuccucgagaacgagcgcacccucgacuuccacgacuccaacgucaagaaccucuacgagaaggucaagucccagcucaagaacaacgccaaggagaucggcaacggcugcuucgaguucuaccacaagugcaacgacgagugcauggaguccgucaagaacggcaccuacgacuaccccaaguacuccgaggaguccaagcucaaccgcgagaagaucgacggcgucaagcucgaguccaugggcgucuaccagauccucgccaucuacuccaccgucgccuccucccucguccuccucgucucccucggcgccaucuccuucuggaugugcuccaacggcucccuccagugccgcaucugcaucuga

SEQ ID NO: 102437 - RNA, 1698 nt, Artificial Sequence; identical to SEQ ID NO: 99652
  derived and/or modified CDS sequence (opt2) from hemagglutinin__InfluenzaA__ADW09296

SEQ ID NO: 102438 - RNA, 1698 nt, Artificial Sequence; identical to SEQ ID NO: 99167
  derived and/or modified CDS sequence (opt2) from hemagglutinin__InfluenzaA__ADW09307

SEQ ID NO: 102439 - RNA, 1698 nt, Artificial Sequence
  derived and/or modified CDS sequence (opt2) from hemagglutinin__InfluenzaA__ADW09327
augaaggucaagcuccucguccuccucugcaccuucaccgccaccuacgccgacaccaucugcaucggcuaccacgccaacaacuccaccgacaccgucgacaccguccucgagaagaacgucaccgucacccacuccgucaaccuccucgagaacucccacaacggcaagcucugccuccucaagggcaucgccccccuccagcucggcaacugcuccgucgccggcuggauccucggcaaccccgagugcgagcuccucaucuccaaggaguccugguccuacaucgucgagaagcccaaccccgagaacggcaccugcuaccccggccacuucgccgacuacgaggagcuccgcgagcagcucuccuccgucuccuccuucgagcgcuucgagaucuuccccaaggaguccuccuggcccaaccacaccgucaccggcgucuccgccuccugcucccacaacggcgaguccuccuucuaccgcaaccuccucuggcucaccggcaagaacggccucuaccccaaccucuccaaguccuacgccaacaacaaggagaaggagguccucguccucuggggcguccaccacccccccaacaucgucgaccagaagacccucuaccgcaccgagaacgccuacgucuccgucgucuccucccacuacucccgcaaguucacccccgagaucgccaagcgccccaagguccgcgaccaggagggccgcaucaacuacuacuggacccuccucgagcccggcgacaccaucaucuucgaggccaacggcaaccucaucgccccccgcuacgccuucgcccucucccgcggcuucggcuccggcaucaucaacuccaacgcccccauggacaagugcgacgccaagugccagaccccccagggcgccaucaacuccucccuccccuuccagaacguccaccccgucaccaucggcgagugccccaaguacguccgcuccgccaagcuccgcauggucaccggccuccgcaacauccccuccauccagucccgcggccucuucggcgccaucgccggcuucaucgagggcggcuggaccggcauggucgacggcugguacggcuaccaccaccagaacgagcagggcuccggcuacgccgccgaccagaaguccacccagaacgccaucaacggcaucaccaacaaggucaacuccgucaucgagaagaugaacacccaguucaccgccgucggcaaggaguucaacaagcucgagcgccgcauggagaaccucaacaagaaggucgacgacggcuucaucgacaucuggaccuacaacgccgagcuccucguccuccucgagaacgagcgcacccucgacuuccacgacuccaacgucaagaaccucuacgagaaggucaagucccagcucaagaacaacgccaaggagaucggcaacggcugcuucgaguucuaccacaagugcaacaacgagugcauggaguccgucaagaacggcaccuacgacuaccccaaguacuccgaggaguccaagcucaaccgcgagaagaucgacggcgucaagcucgaguccaugggcgucuaccagauccucgccaucuacuccaccgucgccuccucccucguccuccucgucucccucggcgccaucuccuucuggaugugcuccaacggcucccuccagugccgcaucugcaucuga

SEQ ID NO: 102440 - RNA, 1698 nt, Artificial Sequence; identical to SEQ ID NO: 99652
  derived and/or modified CDS sequence (opt2) from hemagglutinin__InfluenzaA__ADW10483

SEQ ID NO: 102441 - RNA, 1698 nt, Artificial Sequence
  derived and/or modified CDS sequence (opt2) from hemagglutinin__InfluenzaA__ADW10494
augaaggucaagcuccucguccuccucugcaccuucaccgccaccuacgccgacaccaucugcaucggcuaccacgccaacaacuccaccgacaccgucgacaccguccucgagaagaacgucaccgucacccacuccgucaaccuccucgagaacucccacaacggcaagcucugccuccucaagggcaucgccccccuccagcucggcaacugcuccgucgccggcuggauccucggcaaccccgagugcgagcuccucaucuccaaggaguccugguccuacaucgucgagaagcccaaccccgagaacggcaccugcuaccccggccacuucgccgacuacgaggagcuccgcgagcagcucuccuccgucuccuccuucgagcgcuucgagaucuuccccaaggaguccuccuggcccaaccacaccgucaccggcgucuccgccuccugcucccacaacggcgaguccuccuucuaccgcaaccuccucuggcucaccggcaagaacggccucuaccccaaccucuccaaguccuacgccaacaacaaggagaaggagguccucguccucuggggcguccaccacccccccaacaucgucgaccagaagacccucuaccgcaccgagaacgccuacgucuccgucgucuccucccacuacucccgcaaguucacccccgagaucgccaagcgccccaagguccgcgaccaggagggccgcaucaacuacuacuggacccuccucgagcccggcgacaccaucaucuucgaggccaacggcaaccucaucgccccccgcuacgccuucgcccucucccgcggcuucggcuccggcaucaucaacuccaacgcccccauggacaagugcgacgccaagugccagaccccccagggcgccaucaacuccucccuccccuuccagaacguccaccccgucaccaucggcgagugccccaaguacguccgcuccgccaagcuccgcauggucaccggccuccgcaacauccccuccauccagucccgcggccucuucggcgccaucgccggcuucaucgagggcggcuggaccggcauggucgacggcugguacggcuaccaccaccagaacgagcagggcuccggcuacgccgccgaccagaaguccacccagaacgccaucaacggcaucaccaacaaggucaacuccgucaucgagaagaugaacacccaguucaccgccgucggcaaggaguucaacaagcucgagcgccgcauggagaaccucaacaagaaggucgacgacggcuucaucgacaucuggaccuacaacgccgagcuccucguccuccucgagaacgagcgcacccucgacuuccacgacuccaacgucaagaaccucuacgagaaggucaagaaccagcucaagaacaacgccaaggagaucggcaacggcugcuucgaguucuaccacaagugcaacgacgagugcauggaguccgucaagaacggcaccuacgacuaccccaaguacuccgaggaguccaagcucaaccgcgagaagaucgacggcgucaagcucgaguccaugggcgucuaccagauccucgccaucuacuccaccgucgccuccucccucguccuccucgucucccucggcgccaucuccuucuggaugugcuccaacggcucccuccagugccgcaucugcaucuga

SEQ ID NO: 102442 - RNA, 1698 nt, Artificial Sequence; identical to SEQ ID NO: 99652
  derived and/or modified CDS sequence (opt2) from hemagglutinin__InfluenzaA__ADW10505

SEQ ID NO: 102443 - RNA, 1698 nt, Artificial Sequence; identical to SEQ ID NO: 99652
  derived and/or modified CDS sequence (opt2) from hemagglutinin__InfluenzaA__ADW10516

SEQ ID NO: 102444 - RNA, 1698 nt, Artificial Sequence
  derived and/or modified CDS sequence (opt2) from hemagglutinin__InfluenzaA__ADW10527
augaaggucaagcuccucguccuccucugcaccuucaccgccaccuacgccgacaccaucugcaucggcuaccacgccaacaacuccaccgacaccgucgacaccguccucgagaagaacgucaccgucacccacuccgucaaccuccucgagaacucccacaacggcaagcucugccuccucaagggcaucgccccccuccagcucggcaacugcuccgucgccggcuggauccucggcaaccccgagugcgagcuccucaucuccaaggaguccugguccuacaucgucgagaagcccaaccccgagaacggcaccugcuaccccggccacuucgccgacuacgaggagcuccgcgagcagcucuccuccgucuccuccuucgagcgcuucgagaucuuccccaaggaguccuccuggcccaaccacaccgucaccggcgucuccgccuccugcucccacaacggcgaguccuccuucuaccgcaaccuccucuggcucaccggcaagaacggccucuaccccaaccucuccaaguccuacgccaacaacaaggagaaggagguccucguccucuggggcguccaccacccccccaacaucgucgaccagaagacccucuaccgcaccgagaacgccuacgucuccgucgucuccucccacuacucccgcaaguucacccccgagaucgccaagcgccccaagguccgcgaccaggagggccgcaucaacuacuacuggacccuccucgagcccggcgacaccaucaucuucgaggccaacggcaaccucaucgccccccgcuacgccuucgcccucucccgcggcuucggccucggcaucaucaacuccaacgcccccauggacaagugcgacgccaagugccagaccccccagggcgccaucaacuccucccuccccuuccagaacguccaccccgucaccaucggcgagugccccaaguacguccgcuccgccaagcuccgcauggucaccggccuccgcaacauccccuccauccagucccgcggccucuucggcgccaucgccggcuucaucgagggcggcuggaccggcauggucgacggcugguacggcuaccaccaccagaacgagcagggcuccggcuacgccgccgaccagaaguccacccagaacgccaucaacggcaucaccaacaaggucaacuccgucaucgagaagaugaacacccaguucaccgccgucggcaaggaguucaacaagcucgagcgccgcauggagaaccucaacaagaaggucgacgacggcuucaucgacaucuggaccuacaacgccgagcuccucguccuccucgagaacgagcgcacccucgacuuccacgacuccaacgucaagaaccucuacgagaaggucaagucccagcucaagaacaacgccaaggagaucggcaacggcugcuucgaguucuaccacaagugcaacgacgagugcauggaguccgucaagaacggcaccuacgacuaccccaaguacuccgaggaguccaagcucaaccgcgagaagaucgacggcgucaagcucgaguccaugggcgucuaccagauccucgccaucuacuccaccgucgccuccucccucguccuccucgucucccucggcgccaucuccuucuggaugugcuccaacggcucccuccagugccgcaucugcaucuga

SEQ ID NO: 102445 - RNA, 1698 nt, Artificial Sequence
  derived and/or modified CDS sequence (opt2) from hemagglutinin__InfluenzaA__ADW10538
augaaggucaagcuccucguccuccucugcaccuucaccgccaccuacgccgacaccaucugcaucggcuaccacgccaacaacuccaccgacaccgucgacaccguccucgagaagaacgucaccgucacccacuccgucaaccuccucgagaacucccacaacggcaagcucugccuccucaagggcaucgccccccuccagcucggcaacugcuccgucgccggcuggauccucggcaaccccgagugcgagcuccucaucuccaaggaguccugguccuacaucgucgagaagcccaaccccgagaacggcaccugcuaccccggccacuucgccgacuacgaggagcuccgcgagcagcucuccuccgucuccuccuucgagcgcuucgagaucuuccccaaggaguccuccuggcccaaccacaccgucaccggcgucuccgccuccugcucccacaacggcgaguccuccuucuaccgcaaccuccucuggcucaccggcaagaacggccucuaccccaaccucuccaaguccuacgccaacaacaaggagaaggagguccucguccucuggggcguccaccacccccccaacaucgucgaccagaagacccucuaccgcaccgagaacgccuacgucuccgucauguccucccacuacucccgcaaguucacccccgagaucgccaagcgccccaagguccgcgaccaggagggccgcaucaacuacuacuggacccuccucgagcccggcgacaccaucaucuucgaggccaacggcaaccucaucgccccccgcuacgccuucgcccucucccgcggcuucggcuccggcaucaucaacuccaacgcccccauggacaagugcgacgccaagugccagaccccccagggcgccaucaacuccucccuccccuuccagaacguccaccccgucaccaucggcgagugccccaaguacguccgcuccgccaagcuccgcauggucaccggccuccgcaacauccccuccauccagucccgcggccucuucggcgccaucgccggcuucaucgagggcggcuggaccggcauggucgacggcugguacggcuaccaccaccagaacgagcagggcuccggcuacgccgccgaccagaaguccacccagaacgccaucaacggcaucaccaacaaggucaacuccgucaucgagaagaugaacacccaguucaccgccgucggcaaggaguucaacaagcucgagcgccgcauggagaaccucaacaagaaggucgacgacggcuucaucgacaucuggaccuacaacgccgagcuccucguccuccucgagaacgagcgcacccucgacuuccacgacuccaacgucaagaaccucuacgagaaggucaagucccagcucaagaacaacgccaaggagaucggcaacggcugcuucgaguucuaccacaagugcaacgacgagugcauggaguccgucaagaacggcaccuacgacuaccccaaguacuccgaggaguccaagcucaaccgcgagaagaucgacggcgucaagcucgaguccaugggcgucuaccagauccucgccaucuacuccaccgucgccuccucccucguccuccucgucucccucggcgccaucuccuucuggaugugcuccaacggcucccuccagugccgcaucugcaucuga

SEQ ID NO: 102446 - RNA, 1698 nt, Artificial Sequence; identical to SEQ ID NO: 99652
  derived and/or modified CDS sequence (opt2) from hemagglutinin__InfluenzaA__ADW10549

SEQ ID NO: 102447 - RNA, 1698 nt, Artificial Sequence
  derived and/or modified CDS sequence (opt2) from hemagglutinin__InfluenzaA__ADW10560
augaaggucaagcuccucguccuccucugcaccuucaccgccaccuacgccgacaccaucugcaucggcuaccacgccaacaacuccaccgacaccgucgacaccgucuucgagaagaacgucaccgucacccacuccgucaaccuccucgagaacucccacaacggcaagcucugccuccucaagggcaucgccccccuccagcucggcaacugcuccgucgccggcuggauccucggcaaccccgagugcgagcuccucaucuccaaggaguccugguccuacaucgucgagaagcccaaccccgagaacggcaccugcuaccccggccacuucgccgacuacgaggagcuccgcgagcagcucuccuccgucuccuccuucgagcgcuucgagaucuuccccaaggaguccuccuggcccaaccacaccgucaccggcgucuccgccuccugcucccacaacggcgagcgcuccuucuaccgcaaccuccucuggcucaccggcaagaacggccucuaccccaaccucuccaaguccuacgccaacaacaaggagaaggagguccucguccucuggggcguccaccacccccccgacaucggcgaccagaagacccucuaccacaccgagaacgccuacgucuccgucgucuccucccacuacucccgcaaguucacccccgagaucgccaagcgccccaagguccgcgaccaggagggccgcaucaacuacuacuggacccuccucgagcccggcgacaccaucaucuucgaggccaacggcaaccucaucgccccccgcuacgccuucgcccucucccgcggcuucggcuccggcaucaucaacuccaacgcccccauggacaagugcgacgccaagugccagaccccccagggcgccaucaacuccucccuccccuuccagaacguccaccccgucaccaucggcgagugccccaaguacguccgcuccgccaagcuccgcauggucaccggccuccgcaacauccccuccauccagucccgcggccucuucggcgccaucgccggcuucaucgagggcggcuggaccggcauggucgacggcugguacggcuaccaccaccagaacgagcagggcuccggcuacgccgccgaccagaaguccacccagaacgccaucaacggcaucaccaacaaggucaacuccgucaucgagaagaugaacacccaguucaccgccgucggcaaggaguucaacaagcucgagcgccgcauggagaaccucaacaagaaggucgacgacggcuucaucgacaucuggaccuacaacgccgagcuccucguccuccucgagaacgagcgcacccucgacuuccacgacuccaacgucaagaaccucuacgagaaggucaagucccagcucaagaacaacgccaaggagaucggcaacggcugcuucgaguucuaccacaagugcaacgacgagugcauggaguccgucaagaacggcaccuacgacuaccccaaguacuccgaggaguccaagcucaaccgcgagaagaucgacggcgucaagcucgaguccaugggcgucuaccagauccucgccaucuacuccaccgucgccuccucccucguccuccucgucucccucggcgccaucuccuucuggaugugcuccaacggcucccuccagugccgcaucugcaucuga

SEQ ID NO: 102448 - RNA, 1698 nt, Artificial Sequence; identical to SEQ ID NO: 101989
  derived and/or modified CDS sequence (opt2) from hemagglutinin__InfluenzaA__ADW10571

SEQ ID NO: 102449 - RNA, 1698 nt, Artificial Sequence; identical to SEQ ID NO: 99167
  derived and/or modified CDS sequence (opt2) from hemagglutinin__InfluenzaA__ADW10582

SEQ ID NO: 102450 - RNA, 1698 nt, Artificial Sequence; identical to SEQ ID NO: 99652
  derived and/or modified CDS sequence (opt2) from hemagglutinin__InfluenzaA__ADW10593

SEQ ID NO: 102451 - RNA, 1698 nt, Artificial Sequence; identical to SEQ ID NO: 99652
  derived and/or modified CDS sequence (opt2) from hemagglutinin__InfluenzaA__ADW10604

SEQ ID NO: 102452 - RNA, 1698 nt, Artificial Sequence; identical to SEQ ID NO: 99652
  derived and/or modified CDS sequence (opt2) from hemagglutinin__InfluenzaA__ADW10615

SEQ ID NO: 102453 - RNA, 1698 nt, Artificial Sequence
  derived and/or modified CDS sequence (opt2) from hemagglutinin__InfluenzaA__ADW10626
augaaggucaagcuccucguccuccucugcaccuucaccgccaccuacgccgacaccaucugcaucggcuaccacgccaacaacuccaccgacaccgucgacaccguccucgagaagaacgucaccgucacccacuccgucaaccuccucgagaacucccacaacggcaagcucugccuccucaagggcaucgccccccuccagcucggcaacugcuccgucgccggcuggauccucggcaaccccgagugcgagcuccucaucuccaaggaguccugguccuacaucgucgagaagcccaaccccgagaacggcaccugcuaccccggccacuucgccgacuacgaggagcuccgcgagcagcucuccuccgucuccuccuucgagcgcuucgagaucuuccccaaggaguccuccuggcccaaccacaccgucaccggcgucuccgccuccugcucccacaacggcgaguccuccuucuaccgcaaccuccucuggcucaccgucaagaacggccucuaccccaaccucuccaaguccuacgccaacaacaaggagaaggagguccucguccucuggggcguccaccacccccccuccaucgucgaccagaagacccucuaccgcaccgagaacgccuacgucuccgucgucuccucccacuacucccgcaaguucacccccgagaucgccaagcgccccaagguccgcgaccaggagggccgcaucaacuacuacuggacccuccucgagcccggcgacaccaucaucuucgaggccaacggcaaccucaucgccccccgcuacgccuucgcccucucccgcggcuucggcuccggcaucaucaacuccaacgcccccauggacaagugcgacgccaagugccagaccccccgcggcgccaucaacuccucccuccccuuccagaacguccaccccgucaccaucggcgagugccccaaguacguccgcuccgccaagcuccgcauggucaccggccuccgcaacauccccuccauccagucccgcggccucuucggcgccaucgccggcuucaucgagggcggcuggaccggcauggucgacggcugguacggcuaccaccaccagaacgagcagggcuccggcuacgccgccgaccagaaguccacccagaacgccaucaacggcaucaccaacaaggucaacuccgucaucgagaagaugaacacccaguucaccgccgucggcaaggaguucaacaagcucgagcgccgcauggagaaccucaacaagaaggucgacgacggcuucaucgacaucuggaccuacaacgccgagcuccucguccuccucgagaacgagcgcacccucgacuuccacgacuccaacgucaagaaccucuacgagaaggucaagucccagcucaagaacaacgccaaggagaucggcaacggcugcuucgaguucuaccacaagugcaacgacgagugcauggaguccgucaagaacggcaccuacgacuaccccaaguacuccgaggaguccaagcucaaccgcgagaagaucgacggcgucaagcucgaguccaugggcgucuaccagauccucgccaucuacuccaccgucgccuccucccucguccuccucgucucccucggcgccaucuccuucuggaugugcuccaacggcucccuccagugccgcaucugcaucuga

SEQ ID NO: 102454 - RNA, 1698 nt, Artificial Sequence
  derived and/or modified CDS sequence (opt2) from hemagglutinin__InfluenzaA__ADW10721
augaaggucaagcuccucguccuccucugcaccuucaccgccaccuacgccgacaccaucugcaucggcuaccacgccaacaacuccaccgacaccgucgacaccguccucgagaagaacgucaccgucacccacuccgucaaccuccucgagaacucccacaacggcaagcucugccuccucaagggcaucgccccccuccagcucggcaacugcuccgucgccggcuggauccucggcaaccccgagugcgagcuccucaucuccaaggaguccugguccuacaucgucgagaagcccaaccccgagaacggcaccugcuaccccggccacuucgccgacuacgaggagcuccgcgagcagcucuccuccgucuccuccuucaagcgcuucgagaucuuccccaaggaguccuccuggcccaaccacaccgucaccggcgucuccgccuccugcucccacaacggcgaguccuccuucuaccgcaaccuccucuggcucaccgucaagaacggccucuaccccaaccucuccaaguccuacgccaacaacaaggagaaggagguccucguccucuggggcguccaccacccccccaacaucgucgaccagcgcacccucuaccacaccgagaacgccuacgucuccgucgucuccucccacuacucccgcaaguucacccccgagaucgccaagcgccccaagguccgcaaccaggagggccgcaucaacuacuacuggacccuccucgagcccggcgacaccaucaucuucgaggccaacggcaaccucaucgccccccgcuacgccuucgcccucucccgcggcuucggcuccggcaucaucaacuccaacgcccccauggacaagugcgacgccaagugccagaccccccgcggcgccaucaacuccucccuccccuuccagaacguccaccccgucaccaucggcgagugccccaaguacguccgcuccgccaagcuccgcauggucaccggccuccgcaacauccccuccauccagucccgcggccucuucggcgccaucgccggcuucaucgagggcggcuggaccggcauggucgacggcugguacggcuaccaccaccagaacgagcagggcuccggcuacgccgccgaccagaaguccacccagaacgccaucaacggcaucaccaacaaggucaacuccgucaucgagaagaugaacacccaguucaccgccgucggcaaggaguucaacaagcucgagcgccgcauggagaaccucaacaagaaggucgacgacggcuucaucgacaucuggaccuacaacgccgagcuccucguccuccucgagaacgagcgcacccucgacuuccacgacuccaacgucaagaaccucuacgagaaggucaagucccagcucaagaacaacgccaaggagaucggcaacggcugcuucgaguucuaccacaagugcaacgacgagugcauggaguccgucaagaacggcaccuacgacuaccccaaguacuccgaggaguccaagcucaaccgcgagaagaucgacggcgucaagcucgaguccaugggcgucuaccagauccucgccaucuacuccaccgucgccuccucccucguccuccucgucucccucggcgccaucuccuucuggaugugcuccaacggcucccuccagugccgcaucugcaucuga

SEQ ID NO: 102455 - RNA, 1698 nt, Artificial Sequence
  derived and/or modified CDS sequence (opt2) from hemagglutinin__InfluenzaA__ADW10743
augaaggucaagcuccucguccuccucugcaccuucaccgccaccuacgccgacaccaucugcaucggcuaccacgccaacaacuccaccgacaccgucgacaccguccucgagaagaacgucaccgucacccacuccgucaaccuccucgagaacucccacaacggcaagcucugccuccucaagggcaucgccccccuccagcucggcaacugcuccgucgccggcuggauccucggcaaccccgagugcgagcuccucaucuccaaggaguccugguccuacaucgucgagaagcccaaccccgagaacggcaccugcuaccccggccacuucgccgacuacgaggagcuccgcgagcagcucuccuccgucuccuccuucgagcgcuucgagaucuuccccaaggaguccuccuggcccaaccacaccgucaccggcgucuccgccuccugcucccacaacggcgaguccuccuucuaccgcaaccuccucuggcucaccgucaagaacggccucuaccccaaccucuccaaguccuacgccaacaacaaggagaaggagguccucguccucuggggcguccaccacccccccaacaucgucgaccagaagacccucuaccgcaccgagaacaccuacgucuccgucgucuccucccacuacucccgcaaguucacccccgagaucgccaagcgccccaagauccgcgaccaggagggccgcaucaacuacuacuggacccuccucgagcccggcgacaccaucaucuucgaggccaacggcaaccucaucgccccccgcuacgccuucgcccucucccgcggcuucggcuccggcaucaucaacuccaacgcccccauggacaagugcgacgccaagugccagaccccccgcggcgccaucaacuccucccuccccuuccagaacguccaccccgucaccaucggcgagugccccaaguacguccgcuccgucaagcuccgcauggucaccggccuccgcaacauccccuccauccagucccgcggccucuucggcgccaucgccggcuucaucgagggcggcuggaccggcauggucgacggcugguacggcuaccaccaccagaacgagcagggcuccggcuacgccgccgaccagaaguccacccagaacgccaucaacggcaucaccaacaaggucaacuccgucaucgagaagaugaacacccaguucaccgccgucggcaaggaguucaacaagcucgagcgccgcauggagaaccucaacaagaaggucgacgacggcuucaucgacaucuggaccuacaacgccgagcuccucguccuccucgagaacgagcgcacccucgacuuccacgacuccaacgucaagaaccucuacgagaaggucaagucccagcucaagaacaacgccaaggagaucggcaacggcugcuucgaguucuaccacaagugcaacgacgagugcauggaguccgucaagaacggcaccuacgacuaccccaaguacuccgaggaguccaagcucaaccgcgagaagaucgacggcgucaagcucgaguccaugggcgucuaccagauccucgccaucuacuccaccgucgccuccucccucguccuccucgucucccucggcgccaucuccuucuggaugugcuccaacggcucccuccagugccgcaucugcaucuga

SEQ ID NO: 102456 - RNA, 1698 nt, Artificial Sequence
  derived and/or modified CDS sequence (opt2) from hemagglutinin__InfluenzaA__ADW10754
augaaggucaagcuccucguccuccucugcaccuucaccgccaccuacgccgacaccaucugcaucggcuaccacgccaacaacuccaccgacaccgucgacaccguccucgagaagaacgucaccgucacccacuccgucaaccuccucgagaacucccacaacggcaagcucugccuccucaagggcaucgccccccuccagcucggcaacugcuccgucgccggcuggauccucggcaaccccgagugcgagcuccucaucuccaaggaguccugguccuacaucgucgagaagcccaaccccgagaacggcaccugcuaccccggccacuucgccgacuacgaggagcuccgcgagcagcucuccuccgucuccuccuucgagcgcuucgagaucuuccccaaggaguccuccuggcccaaccacaccgucaccggcgucuccgccuccugcucccacaacggcgagaacuccuucuaccgcaaccuccucuggcucaccggcaagaacggccucuaccccaaccucuccaaguccuacgccaacaacaaggagaaggagguccucguccucuggggcguccaccacccccccaacaucgccgaccagaagacccucuaccacaccgagaacgccuacgucuccgucgucuccucccacuacucccgcaaguucacccccgagaucgccaagcgccccaagguccgcgaccaggagggccgcaucaacuacuacuggacccuccucgagcccggcgacaccaucaucuucgaggccaacggcaaccucaucgccccccgcuacgccuucgcccucucccgcggcuucggcuccggcaucaucaacuccaacgcccccauggacaagugcgacgccaagugccagaccccccagggcgccaucaacuccucccuccccuuccagaacguccaccccgucaccaucggcgagugccccaaguacguccgcuccgccaagcuccgcauggucaccggccuccgcaacauccccuccguccagucccgcggccucuucggcgccaucgccggcuucaucgagggcggcuggaccggcauggucgacggcugguacggcuaccaccaccagaacgagcagggcuccggcuacgccgccgaccagaaguccacccagaacgccaucaacggcaucaccaacaaggucaacuccgucaucgagaagaugaacacccaguucaccgccgucggcaaggaguucaacaagcucgagcgccgcauggagaaccucaacaagaaggucgacgacggcuucaucgacaucuggaccuacaacgccgagcuccucguccuccucgagaacgagcgcacccucgacuuccacgacuccaacgucaagaaccucuacgagaaggucaagucccagcucaagaacaacgccaaggagaucggcaacggcugcuucgaguucuaccacaagugcaacgacgagugcauggaguccgucaagaacggcaccuacgacuaccccaaguacuccgaggaguccaagcucaaccgcgagaagaucgacggcgucaagcucgaguccaugggcgucuaccagauccucgccaucuacuccaccgucgccuccucccucguccuccucgucucccucggcgccaucuccuucuggaugugcuccaacggcucccuccagugccgcaucugcaucuga

SEQ ID NO: 102457 - RNA, 1698 nt, Artificial Sequence
  derived and/or modified CDS sequence (opt2) from hemagglutinin__InfluenzaA__ADW10765
augaaggucaagcuccucguccuccucugcaccuucaccgccaccuacgccgacaccaucugcaucggcuaccacgccaacaacuccaccgacaccgucgacaccguccucgagaagaacgucaccgucacccacuccgucaaccuccucgagaacucccacaacggcaagcucugccuccucaagggcaucgccccccuccagcucggcaacugcuccgucgccggcuggauccucggcaaccccgagugcgagcuccucaucuccaaggaguccugguccuacaucgucgagaagcccaaccccgagaacggcaccugcuaccccggccacuucgccgacuacgaggagcuccgcgagcagcucuccuccgucuccuccuucgagcgcuucgagaucuuccccaaggaguccuccuggcccaaccacaccgucaccggcgucuccgccuccugcucccacaacggcgaguccuccuucuaccgcaaccuccucuggcucaccgucaagaacggccucuaccccaaccucuccaaguccuacgccaacaacaaggagaaggagguccucguccucuggggcguccaccacccccccaacaucgucgaccagaagacccucuaccacaccgagaacgccuacgucuccgucgucuccucccacuacucccgcaaguucacccccgagaucgccaagcgccccaagguccgcaaccaggagggccgcaucaacuacuacuggacccuccucgagcccggcgacaccaucaucuucgaggccaacggcaaccucaucgccccccgcuacgccuucgcccucucccgcggcuucggcuccggcaucaucaacuccaacgcccccauggacaagugcgacgccaagugccagaccccccgcggcgccaucaacuccucccuccccuuccagaacguccaccccgucaccaucggcgagugccccaaguacguccgcuccgccaagcuccgcauggucaccggccuccgcaacauccccuccauccagucccgcggccucuucggcgccaucgccggcuucaucgagggcggcuggaccggcauggucgacggcugguacggcuaccaccaccagaacgagcagggcuccggcuacgccgccgaccagaaguccacccagaacgccaucaacggcaucaccaacaaggucaacuccgucaucgagaagaugaacacccaguucaccgccgucggcaaggaguucaacaagcucgagcgccgcauggagaaccucaacaagaaggucgacgacggcuucaucgacaucuggaccuacaacgccgagcuccucguccuccucgagaacgagcgcacccucgacuuccacgacuccaacgucaagaaccucuacgagaaggucaagucccagcucaagaacaacgccaaggagaucggcaacggcugcuucgaguucuaccacaagugcaacgacgagugcauggaguccgucaagaacggcaccuacgacuaccccaaguacuccgaggaguccaagcucaaccgcgagaagaucgacggcgucaagcucgaguccaugggcgucuaccagauccucgccaucuacuccaccgucgccuccucccucguccuccucgucucccucggcgccaucuccuucuggaugugcuccaacggcucccuccagugccgcaucugcaucuga

SEQ ID NO: 102458 - RNA, 1698 nt, Artificial Sequence
  derived and/or modified CDS sequence (opt2) from hemagglutinin__InfluenzaA__ADW10776
augaaggucaagcuccucguccuccucugcaccuucaccgccaccuacgccgacaccaucugcaucggcuaccacgccaacaacuccaccgacaccgucgacaccguccucgagaagaacgucaccgucacccacuccgucaaccuccucgagaacucccacaacggcaagcucugccuccucaagggcaucgccccccuccagcucggcaacugcuccgucgccggcuggauccucggcaaccccgagugcgagcuccucaucuccaaggaguccugguccuacaucgucgagaagcccaaccccgagaacggcaccugcuaccccggccacuucgccgacuacgaggagcuccgcgagcagcucuccuccgucuccuccuucgagcgcuucgagaucuuccccaaggaguccuccuggcccaaccacaccgucaccggcgucuccgccuccugcucccacaacggcgaguccuccuucuaccgcaaccuccucuggcucaccggcaagaacggccucuaccccaaccucuccaaguccuacgccaacgacaaggagaaggagguccucguccucuggggcguccaccacccccccaacaucgucgaccagaagacccucuaccgcaccgagaacgccuacgucuccgucgucuccucccacuacucccgcaaguucacccccgagaucgccaagcgccccaagguccgcgaccaggagggccgcaucaacuacuacuggacccuccucgagcccggcgacaccaucaucuucgaggccaacggcaaccucaucgccccccgcuacgccuucgcccucucccgcggcuucggcuccggcaucaucaacuccaacgcccccauggacaagugcgacgccaagugccagaccccccagggcgccaucaacuccucccuccccuuccagaacguccaccccgucaccaucggcgagugccccaaguacguccgcuccgccaagcuccgcauggucaccggccuccgcaacauccccuccauccagucccgcggccucuucggcgccaucgccggcuucaucgagggcggcuggaccggcauggucgacggcugguacggcuaccaccaccagaacgagcagggcuccggcuacgccgccgaccagaaguccacccagaacgccaucaacggcaucaccaacaaggucaacuccgucaucgagaagaugaacacccaguucaccgccgucggcaaggaguucaacaagcucgagcgccgcauggagaaccucaacaagaaggucgacgacggcuucaucgacaucuggaccuacaacgccgagcuccucguccuccucgagaacgagcgcacccucgacuuccacgacuccaacgucaagaaccucuacgagaaggucaagucccagcucaagaacaacgccaaggagaucggcaacggcugcuucgaguucuaccacaagugcaacgacgagugcauggaguccgucaagaacggcaccuacgacuaccccaaguacuccgaggaguccaagcucaaccgcgagaagaucgacggcgucaagcucgaguccaugggcgucuaccagauccucgccaucuacuccaccgucgccuccucccucguccuccucgucucccucggcgccaucuccuucuggaugugcuccaacggcucccuccagugccgcaucugcaucuga

SEQ ID NO: 102459 - RNA, 1698 nt, Artificial Sequence
  derived and/or modified CDS sequence (opt2) from hemagglutinin__InfluenzaA__ADW10787
augaaggucaagauccucguccuccucugcaccuucaccgccaccuacgccgacaccaucugcaucggcuaccacgccaacaacuccaccgacaccgucgacaccguccucgagaagaacgucaccgucacccacuccgucaaccuccucgagaacucccacaacggcaagcucugccuccucaagggcaucgccccccuccagcucggcaacugcuccgucgccggcuggauccucggcaaccccgagugcgagcuccucaucuccaaggaguccugguccuacaucgucgagaagcccaaccccgagaacggcaccugcuaccccggccacuucgccgacuacgaggagcuccgcgagcagcucuccuccgucuccuccuucgagcgcuucgagaucuuccccaaggaguccuccuggcccaaccacaccgucaccggcgucuccgccuccugcucccacaacggcgaguccuccuucuaccgcaaccuccucuggcucaccgucaagaacggccucuaccccaaccucuccaaguccuacgccaacaacaaggagaaggagguccucguccucuggggcguccaccacccccccaacaucgucgaccagaagacccucuaccgcaccgagaacgccuacgucuccgucgucuccucccacuacucccgcaaguucacccccgagaucgccaagcgccccaagguccgcgaccaggagggccgcaucaacuacuacuggacccuccucgagcccggcgacaccaucaucuucgaggccaacggcaaccucaucgccccccgcuacgccuucgcccucucccgcggcuucggcuccggcaucaucaacuccaacgcccccauggacaagugcgacgccaagugccagaccccccgcggcgccaucaacuccucccuccccuuccagaacguccaccccgucaccaucggcgagugccccaaguacguccgcuccgccaagcuccgcauggucaccggccuccgcaacauccccuccauccagucccgcggccucuucggcgccaucgccggcuucaucgagggcggcuggaccggcauggucgacggcugguacggcuaccaccaccagaacgagcagggcuccggcuacgccgccgaccagaaguccacccagaacgccaucaacggcaucaccaacaaggucaacuccgucaucgagaagaugaacacccaguucaccgccgucggcaaggaguucaacaagcucgagcgccgcauggagaaccucaacaagaaggucgacgacggcuucaucgacaucuggaccuacaacgccgagcuccucguccuccucgagaacgagcgcacccucgacuuccacgacuccaacgucaagaaccucuacgagaaggucaagucccagcucaagaacaacgccaaggagaucggcaacggcugcuucgaguucuaccacaagugcaacgacgagugcauggaguccgucaagaacggcaccuacgacuaccccaaguacuccgaggaguccaagcucaaccgcgagaagaucgacggcgucaagcucgaguccaugggcgucuaccagauccucgccaucuacuccaccgucgccuccucccucguccuccucgucucccucggcgccaucuccuucuggaugugcuccaacggcucccuccagugccgcaucugcaucuga

SEQ ID NO: 102460 - RNA, 1698 nt, Artificial Sequence
  derived and/or modified CDS sequence (opt2) from hemagglutinin__InfluenzaA__ADW10798
augaaggucaagcuccucguccuccucugcaccuucaccgccaccuacgccgacaccaucugcaucggcuaccacgccaacaacuccaccgacaccgucgacaccguccucgagaagaacgucaccgucacccacuccgucaaccuccucgagaacucccacaacggcaagcucugccuccucaagggcaucgccccccuccagcucggcaacugcuccgucgccggcuggauccucggcaaccccgagugcgagcuccucaucuccaaggaguccugguccuacaucgucgagaagcccaaccccgagaacggcaccugcuaccccggccacuucgccgacuacgaggagcuccgcgagcagcucuccuccgucuccuccuucgagcgcuucgagaucuuccccaaggaguccuccuggcccaaccacaccgucaccggcgucuccgccuccugcucccacaacggcgaguccuccuucuaccgcaaccuccucuggcucaccggcaagaacggccucuaccccaaccucuccaaguccuacgccaacaacaaggagaaggagguccucguccucuggggcguccaccacccccccaacaucgucgaccagaagacccucuaccgcaccgagaacgccuacgucuccgucgucuccucccacuacucccgcaaguucacccccgagaucgccaagcgccccaagguccgcgaccaggagggccgcaucaacuacuacuggacccuccucgagcccggcgacaccaucaucuucgaggccaacggcaaccucaucgccccccgcuacgccuucgcccucucccgcggcuucggcuccggcaucaucaacuccaacgcccccaugggcaagugcgacgccaagugccagaccccccagggcgccaucaacuccucccuccccuuccagaacguccaccccgucaccaucggcgagugccccaaguacguccgcuccgccaagcuccgcauggucaccggccuccgcaacauccccuccauccagucccgcggccucuucggcgccaucgccggcuucaucgagggcggcuggaccggcauggucgacggcugguacggcuaccaccaccagaacgagcagggcuccggcuacgccgccgaccagaaguccacccagaacgccaucaacggcaucaccaacaaggucaacuccgucaucgagaagaugaacacccaguucaccgccgucggcaaggaguucaacaagcucgagcgccgcgucgagaaccucaacaagaaggucgacgacggcuucaucgacaucuggaccuacaacgccgagcuccucguccuccucgagaacgagcgcacccucgacuuccacgacuccaacgucaagaaccucuacgagaaggucaagucccagcucaagaacaacgccaaggagaucggcaacggcugcuucgaguucuaccacaagugcaacgacgagugcauggaguccgucaagaacggcaccuacgacuaccccaaguacuccgaggaguccaagcucaaccgcgagaagaucgacggcgucaagcucgaguccaugggcgucuaccagauccucgccaucuacuccaccgucgccuccucccucguccuccucgucucccucggcgccaucuccuucuggaugugcuccaacggcucccuccagugccgcaucugcaucuga

SEQ ID NO: 102461 - RNA, 1698 nt, Artificial Sequence; identical to SEQ ID NO: 102457
  derived and/or modified CDS sequence (opt2) from hemagglutinin__InfluenzaA__ADW10809

SEQ ID NO: 102462 - RNA, 1698 nt, Artificial Sequence; identical to SEQ ID NO: 99652
  derived and/or modified CDS sequence (opt2) from hemagglutinin__InfluenzaA__ADW10820

SEQ ID NO: 102463 - RNA, 1698 nt, Artificial Sequence; identical to SEQ ID NO: 99167
  derived and/or modified CDS sequence (opt2) from hemagglutinin__InfluenzaA__ADW10831

SEQ ID NO: 102464 - RNA, 1698 nt, Artificial Sequence
  derived and/or modified CDS sequence (opt2) from hemagglutinin__InfluenzaA__ADW10842
augaaggucaagcuccucguccuccucugcaccuucaccgccaccuacgccgacaccaucugcaucggcuaccacgccaacaacuccaccgacaccgucgacaccguccucgagaagaacgucaccgucacccacuccgucaaccuccucgagaacucccacaacggcaagcucugccuccucaagggcaucgccccccuccagcucggcaacugcuccgucgccggcuggauccucggcaaccccgagugcgagcuccucaucuccaaggaguccugguccuacaucgucgagaagcccaaccccgagaacggcaccugcuaccccggccacuucgccgacuacgaggagcuccgcgagcagcucuccuccgucuccuccuucgagcgcuucgagaucuuccccaaggaguccuccuggcccaaccacaccgucaccggcgucuccgccuccugcucccacaacggcgaguccuccuucuaccgcaaccuccucuggcucaccgucaagaacggccucuaccccaaccucuccaaguccuacgccaacaacaaggagaaggagguccucguccucuggggcguccaccacccccccaacaucgucgaccagaagacccucuaccgcaccgagaacgccuacgucuccgucgucuccucccacuacucccgcaaguucgcccccgagaucgccaagcgccccaagguccgcgaccaggagggccgcaucaacuacuacuggacccuccucgagcccggcgacaccaucaucuucgaggccaacggcaaccucaucgccccccgcuacgccuucgcccucucccgcggcuucggcuccggcaucaucaacuccaacgcccccauggacaagugcgacgccaagugccagaccccccgcggcgccaucaacuccucccuccccuuccagaacguccaccccgucaccaucggcgagugccccaaguacguccgcuccgccaagcuccgcauggucaccggccuccgcaacauccccuccauccagucccgcggccucuucggcgccaucgccggcuucaucgagggcggcuggaccggcauggucgacggcugguacggcuaccaccaccagaacgagcagggcuccggcuacgccgccgaccagaaguccacccagaacgccaucaacggcaucaccaacaaggucaacuccgucaucgagaagaugaacacccaguucaccgccgucggcaaggaguucaacaagcucgagcgccgcauggagaaccucaacaagaaggucgacgacggcuucaucgacaucuggaccuacaacgccgagcuccucguccuccucgagaacgagcgcacccucgacuuccacgacuccaacgucaagaaccucuacgagaaggucaagucccagcucaagaacaacgccaaggagaucggcaacggcugcuucgaguucuaccacaagugcaacgacgagugcauggaguccgucaagaacggcaccuacgacuaccccaaguacuccgaggaguccaagcucaaccgcgagaagaucgacggcgucaagcucgaguccaugggcgucuaccagauccucgccaucuacuccaccgucgccuccucccucguccuccucgucucccucggcgccaucuccuucuggaugugcuccaacggcucccuccagugccgcaucugcaucuga

SEQ ID NO: 102465 - RNA, 1698 nt, Artificial Sequence; identical to SEQ ID NO: 102008
  derived and/or modified CDS sequence (opt2) from hemagglutinin__InfluenzaA__ADW10853

SEQ ID NO: 102466 - RNA, 1698 nt, Artificial Sequence; identical to SEQ ID NO: 102457
  derived and/or modified CDS sequence (opt2) from hemagglutinin__InfluenzaA__ADW10864

SEQ ID NO: 102467 - RNA, 1698 nt, Artificial Sequence; identical to SEQ ID NO: 102457
  derived and/or modified CDS sequence (opt2) from hemagglutinin__InfluenzaA__ADW10875

SEQ ID NO: 102468 - RNA, 1698 nt, Artificial Sequence; identical to SEQ ID NO: 99652
  derived and/or modified CDS sequence (opt2) from hemagglutinin__InfluenzaA__ADW10886

SEQ ID NO: 102469 - RNA, 1698 nt, Artificial Sequence
  derived and/or modified CDS sequence (opt2) from hemagglutinin__InfluenzaA__ADW10897
augaaggucaagcuccucguccuccucugcaccuucaccgccaccuacgccgacaccaucugcaucggcuaccacgccaacaacuccaccgacaccgucgacaccguccucgagaagaacgucaccgucacccacuccgucaaccuccucgagaacucccacaacggcaagcucugccuccucaagggcaucgccccccuccagcucggcaacugcuccgucgccggcuggauccucggcaaccccgagugcgagcuccucaucuccaaggaguccugguccuacaucgucgagaagcccaaccccgagaacggcaccugcuaccccggccacuucgccgacuacgaggagcuccgcgagcagcucuccuccgucuccuccuucgagcgcuucgagaucuuccccaaggaguccuccuggcccaaccacaccgucaccggcgucuccgccuccugcucccacaacggcgaguccuccuucuaccgcaaccuccucuggcucaccggcaagaacggccucuaccccaaccucuccaaguccuacgccaacaacaaggagaaggagguccucguccucuggggcguccaccacccccccuccaucuccgaccagaagacccucuaccacaccgagaacgccuacgucuccgucgucuccucccacuacucccgcaaguucacccccgagaucgccaagcgccccaagguccgcgaccaggagggccgcaucaacuacuacuggacccuccucgagcccggcgacaccaucaucuucgaggccaacggcaaccucaucgccccccgcuacgccuucgcccucucccgcggcuucggcuccggcaucaucaacuccaacgcccccauggacaagugcgacaccaagugccagaccccccagggcgccaucaacuccucccuccccuuccagaacguccaccccgucaccaucggcgagugccccaaguacguccgcuccgccaagcuccgcauggucaccggccuccgcaacauccccuccauccagucccgcggccucuucggcgccaucgccggcuucaucgagggcggcuggaccggcauggucgacggcugguacggcuaccaccaccagaacgagcagggcuccggcuacgccgccgaccagaaguccacccagaacgccaucaacggcaucaccaacaaggucaacuccgucaucgagaagaugaacacccaguucaccgccgucggcaaggaguucaacaagcucgagcgccgcauggagaaccucaacaagaaggucgacgacggcuucaucgacaucuggaccuacaacgccgagcuccucguccuccucgagaacgagcgcacccucgacuuccacgacuccaacgucaagaaccucuacgagaaggucaagucccagcucaagaacaacgccaaggaggucggcaacggcugcuucgaguucuaccacaagugcaacgacgagugcauggaguccgucaagaacggcaccuacgacuaccccaaguacuccgaggaguccaagcucaaccgcgagaagaucgacggcgucaagcucgaguccaugggcgucuaccagauccucgccaucuacuccaccgucgccuccucccucguccuccucgucucccucggcgccaucuccuucuggaugugcuccaacggcucccuccagugccgcaucugcaucuga

SEQ ID NO: 102470 - RNA, 1701 nt, Artificial Sequence
  derived and/or modified CDS sequence (opt2) from hemagglutinin__InfluenzaA__ADW23115
augaagaccaucaucgcccucuccuacauccucugccucgucuucgcccagaagcuccccggcaacggcaacuccaccgccacccucugccucggccaccacgccguccccaacggcaccaucgucaagaccaucaccaacgaccagaucgaggucaccaacgccaccgagcucguccaguccuccuccaccggcgagaucugcgacuccccccaccagauccucgacggcgagaacugcacccucaucgacgcccuccucggcgacccccagugcgacggcuuccagaacaagaagugggaccucuucgucgagcgcuccaaggccuacuccaacugcuaccccuacgacguccccgacuacgccucccuccgcucccucgucgccuccuccggcacccucgaguucaacaacgaguccuucaacuggaccggcgucacccagaacggcaccuccuccgccugcauccgccgcuccaacaacuccuucuucucccgccucaacuggcucacccacuccaaguucaaguaccccgcccucaacgucaccaugcccaacaacgagcaguucgacaagcucuacaucuggggcguccaccaccccggcaccgacaacgaccagaucuuccucuacgcccaggccuccggccgcaucaccgucuccaccaagcgcucccagcagaccgucauccccaacaucggcucccgcccccgcguccgcaacauccccucccgcaucuccaucuacuggaccaucgucaagcccggcgacauccuccucaucaacuccaccggcaaccucaucgccccccgcggcuacuucaagauccgcuccggcaaguccuccaucaugcgcuccgacgcccccaucggcaagugcaacuccgagugcaucacccccaacggcuccauccccaacgacaagcccuuccagaacgucaaccgcaucaccuacggcgccugcccccgcuacgucaagcagaacacccucaagcucgccaccggcaugcgcaacguccccgagaagcagacccgcggcaucuucggcgccaucgccggcuucaucgagaacggcugggagggcauggucgacggcugguacggcuuccgccaccagaacuccgagggccgcggccaggccgccgaccucaaguccacccaggccgccaucgaccagaucaacggcaagcucaaccgccucaucggcaagaccaacgagaaguuccaccagaucgagaaggaguucuccgaggucgagggccgcauccaggaccucgagaaguacgucgaggacaccaagaucgaccucugguccuacaacgccgagcuccucgucgcccucgagaaccagcacaccaucgaccucaccgacuccgagaugaacaagcucuucgagaagaccaagaagcagcuccgcgagaacgccgaggacaugggcaacggcugcuucaagaucuaccacaagugcgacaacgccugcaucggcuccauccgcaacggcaccuacgaccacgacgucuaccgcgacgaggcccucaacaaccgcuuccagaucaagggcgucgagcucaaguccggcuacaaggacuggauccucuggaucuccuucgccaucuccugcuuccuccucugcgucgcccuccucggcuucaucaugugggccugccagaagggcaacauccgcugcaacaucugcaucuga

SEQ ID NO: 102471 - RNA, 1701 nt, Artificial Sequence
  derived and/or modified CDS sequence (opt2) from hemagglutinin__InfluenzaA__ADW54481
augaaggccauccucgucguccuccucuacaccuucgccaccgccaacgccgacacccucugcaucggcuaccacgccaacaacuccaccgacaccgucgacaccguccucgagaagaacgucaccgucacccacuccgucaaccuccucgaggacaagcacaacggcaagcucugcaagcuccgcggcgucgccccccuccaccucggcaagugcaacaucgccggcuggauccucggcaaccccgagugcgagucccucuccaccgccuccuccugguccuacaucgucgagaccuccuccuccgacaacggcaccugcuaccccggcgacuucaucgacuacgaggagcuccgcgagcagcucuccuccgucuccuccuucgagcgcuucgagaucuuccccaagaccuccuccuggcccaaccacgacuccaacaagggcgucaccgccgccugcccccacgccggcgccaaguccuucuacaagaaccucaucuggcucgucaagaagggcaacuccuaccccaagcucuccaaguccuacaucaacgacaagggcaaggagguccucguccucuggggcauccaccaccccuccaccaccgccgaccagcagucccucuaccagaacgccgacaccuacgucuucgucggcaccucccgcuacuccaagaaguucaagcccgagaucgccauccgccccaagguccgcgaccaggagggccgcaugaacuacuacuggacccucgucgagcccggcgacaagaucaccuucgaggccaccggcaaccucgucgucccccgcuacgccuucgccauggagcgcaacgccggcuccggcaucaucaucuccgacacccccguccacgacugcaacaccaccugccagacccccaagggcgccaucaacaccucccuccccuuccagaacauccaccccaucaccaucggcaagugccccaaguacgucaaguccaccaagcuccgccucgccaccggccuccgcaacguccccuccauccagucccgcggccucuucggcgccaucgccggcuucaucgagggcggcuggaccggcauggucgacggcugguacggcuaccaccaccagaacgagcagggcuccggcuacgccgccgaccucaaguccacccagaacgccaucgacaagaucaccaacaaggucaacuccgucaucgagaagaugaacacccaguucaccgccgucggcaaggaguucaaccaccucgagaagcgcaucgagaaccucaacaagaaggucgacgacggcuuccucgacaucuggaccuacaacgccgagcuccucguccuccucgagaacgagcgcacccucgacuaccacgacuccaacgucaagaaccucuacgagaagguccgcaaccagcucaagaacaacgccaaggagaucggcaacggcugcuucgaguucuaccacaagugcgacaacaccugcauggaguccgucaagaacggcaccuacgacuaccccaaguacuccgaggaggccaagcucaaccgcgaggagaucgacggcgucaagcucgaguccacccgcaucuaccagauccucgccaucuacuccaccgucgccuccucccucguccucgucgucucccucggcgccaucuccuucuggaugugcuccaacggcucccuccagugccgcaucugcaucuga

SEQ ID NO: 102472 - RNA, 1701 nt, Artificial Sequence
  derived and/or modified CDS sequence (opt2) from hemagglutinin__InfluenzaA__ADW54512
augaaggccauccucgucguccuccucuacaccuucgccaccgccaacgccgacacccucugcaucggcuaccacgccaacaacuccaccgacaccgucgacaccguccucgagaagaacgucaccgucacccacuccgucaaccuccucgaggacaagcacaacggcaagcucugcaagcuccgcggcgucgccccccuccaccucggcaagugcaacaucgccggcuggauccucggcaaccccgagugcgagucccucuccaccgccuccuccugguccuacaucgucgagaccuccuccuccgacaacggcaccugcuaccccggcgacuucaucgacuacgaggagcuccgcgagcagcucuccuccgucuccuccuucaagcgcuucgagaucuuccccaagaccuccuccuggcccaaccacgacuccaacaagggcgucaccaccgccugcccccacgccggcgccaaguccuucuacaagaaccucaucuggcucgucaagaagggcaacuccuaccccaagcucuccaaguccuacaucaacgacaagggcaaggagguccucguccucuggggcauccaccacccccccaccuccgccgaccagcagucccucuaccagaacgccgacgccuacgucuucgucggcaccucccgcuacuccaagaaguucaagcccgagaucgccauccgccccaagguccgcgaccaggagggccgcaugaacuacuacuggacccucgucgagcccggcgacaagaucaccuucgaggccaccggcaaccucgucgucccccgcuacgccuucgccauggagcgcaacgccggcuccggcaucaucaucuccgacacccccguccacgacugcaacaccaccugccagacccccaagggcgccaucaacaccucccuccccuuccagaacauccaccccaucaccaucggcaagugccccaaguacgucaaguccaccaagcuccgccucgccaccggccuccgcaacguccccuccauccagucccgcggccucuucggcgccaucgccggcuucaucgagggcggcuggaccggcauggucgacggcugguacggcuaccaccaccagaacgagcagggcuccggcuacgccgccgaccucaaguccacccagaacgccaucgacgagaucaccaacaaggucaacuccgucaucgagaagaugaacacccaguucaccgccgucggcaaggaguucaaccaccucgagaagcgcaucgagaaccucaacaagaaggucgacgacggcuuccucgacaucuggaccuacaacgccgagcuccucguccuccucgagaacgagcgcacccucgacuaccacgacuccaacgucaagaaccucuacgagaagguccgcucccagcucaagaacaacgccaaggagaucggcaacggcugcuucgaguucuaccacaagugcgacaacaccugcauggaguccgucaagaacggcaccuacgacuaccccaaguacuccgaggaggccaagcucaaccgcgaggagaucgacggcgucaagcucgaguccacccgcaucuaccagauccucgccaucuacuccaccgucgccuccucccucguccucgucgucucccucggcgccaucuccuucuggaugugcuccaacggcucccuccagugccgcaucugcaucuga

SEQ ID NO: 102473 - RNA, 1701 nt, Artificial Sequence
  derived and/or modified CDS sequence (opt2) from hemagglutinin__InfluenzaA__ADW54527
augaaggccauccucgucguccuccucuacaccuucgccaccgccuccgccgacacccucugcaucggcuaccacgccaacaacuccaccgacaccgucgacaccguccucgagaagaacgucaccgucacccacuccgucaaccuccucgaggacaagcacaacggcaagcucugcaagcuccgcggcgucgccccccuccaccucggcaagugcaacaucgccggcuggauccucggcaaccccgagugcgagucccucuccaccgccuccuccugguccuacaucgucgagaccuccuccuccgacaacggcaccugcuaccccggcgacuucaucgacuacgaggagcuccgcgagcagcucuccuccgucuccuccuucgagcgcuucgagaucuuccccaagaccuccuccuggcccaaccacgacuccaacaagggcgucaccaccgccugcccccacgccggcgccaaguccuucuacaagaaccucaucuggcucgucaagaagggcaacuccuaccccaagcucuccaaguccuacaucaacgacaagggcaaggagguccucguccucuggggcauccaccacccccccaccuccgccgaccagcagucccucuaccagaacgccgacgccuacgucuucgucggcaccucccgcuacuccaagaaguucaagcccgagaucgccauccgccccaagguccgcgaccaggagggccgcaugaacuacuacuggacccucgucgagcccggcgacaagaucaccuucgaggccaccggcaaccucgucgucccccgcuacgccuucgccauggagcgcaacgccggcuccggcaucaucaucuccgacacccccguccacgacugcaacaccaccugccagacccccaacggcgccaucaacaccucccuccccuuccagaacauccaccccaucaccaucggcaagugccccaaguacgucaaguccaccaagcuccgccucgccaccggccuccgcaacguccccuccauccagucccgcggccucuucggcgccaucgccggcuucaucgagggcggcuggaccggcauggucgacggcugguacggcuaccaccaccagaacgagcagggcuccggcuacgccgccgaccucaaguccacccagaacgccaucgacgagaucaccaacaaggucaacuccgucaucgagaagaugaacacccaguucaccgccgucggcaaggaguucaaccaccucgagaagcgcaucgagaaccucaacaagaaggucgacgacggcuuccucgacaucuggaccuacaacgccgagcuccucguccuccucgagaacgagcgcacccucgacuaccacgacuccaacgucaagaaccucuacgagaagguccgcucccagcucaagaacaacgccaaggagaucggcaacggcugcuucgaguucuaccacaagugcgacaacaccugcauggaguccgucaagaacggcaccuacgacuaccccaaguacuccgaggaggccaagcucaaccgcgaggagaucgacggcgucaagcucgaguccacccgcaucuaccagauccucgccaucuacuccaccgucgccuccucccucguccucgucgucucccucggcgccaucuccuucuggaugugcuccaacggcucccuccagugccgcaucugcaucuga

SEQ ID NO: 102474 - RNA, 1701 nt, Artificial Sequence; identical to SEQ ID NO: 102471
  derived and/or modified CDS sequence (opt2) from hemagglutinin__InfluenzaA__ADW65825

SEQ ID NO: 102475 - RNA, 1701 nt, Artificial Sequence
  derived and/or modified CDS sequence (opt2) from hemagglutinin__InfluenzaA__ADW82135
augaagaccaucaucgcccucuccuacauccucugccucgucuucgcccagaagcuccccggcaacgacaacuccaccgccacccucugccucggccaccacgccguccccaacggcaccgucgucaagaccaucaccaacgaccagaucgaggucaccaacgccaccgagcucguccaguccuccuccaccggcgagaucugcgacuccccccaccagauccucgacggcaagaacugcacccucaucgacgcccuccucggcgacccccagugcgacggcuuccagaacaagaagugggaccucuucgucgagcgcuccaaggccuacuccaacugcuaccccuacgacguccccgacuacgccucccuccgcucccucgucgccuccuccggcacccucgaguucaacaacgaguccuucaacuggaccggcgucacccagaacggcaccuccuccgccugcauccgccgcuccaagaacuccuucuucucccgccucaacuggcucacccaccucaacuucaaguacaccgcccucaacgucaccaugcccaacaacgagcaguucgacaagcucuacaucuggggcguccaccaccccggcaccgacaaggaccagaucuuccucuacgcccaggccuccggccgcaucaccgucuccaccaagcgcucccagcagaccgucauccccaacaucggcucccgcccccgcguccgcaacauccccucccgcaucuccaucuacuggaccaucgucaagcccggcgacauccuccucaucaacuccaccggcaaccucaucgccccccgcggcuacuucaagauccgcuccggcaaguccuccaucaugcgcuccgacgcccccaucggcaagugcaacuccgagugcaucacccccaacggcuccauccccaacgacaagcccuuccagaacgucaaccgcaucaccuacggcgccugcccccgcuacgucaagcagaacacccucaagcucgccaccggcaugcgcaacguccccgagaagcagacccgcggcaucuucggcgccaucgccggcuucaucgagaacggcugggagggcauggucgacggcugguacggcuuccgccaccagaacuccgagggccgcggccaggccgccgaccucaaguccacccaggccgccaucgaccagaucaacggcaagcucaaccgccucaucggcaagaccaacgagaaguuccaccagaucgagaaggaguucuccgaggucgagggccgcauccaggaccucgagaaguacgucgaggacaccaagaucgaccucugguccuacaacgccgagcuccucgucgcccucgagaaccagcacaccaucgaccucaccgacuccgagaugaacaagcucuucgagaagaccaagaagcagcuccgcgagaacgccgaggacaugggcaacggcugcuucaagaucuaccacaagugcgacaacgccugcaucggcuccauccgcaacggcaccuacgaccacgacgucuaccgcgacgaggcccucaacaaccgcuuccagaucaagggcgucgagcucaaguccggcuacaaggacuggauccucuggaucuccuucgccaucuccugcuuccuccucugcgucgcccuccucggcuucaucaugugggccugccagaagggcaacauccgcugcaacaucugcaucuga

SEQ ID NO: 102476 - RNA, 1701 nt, Artificial Sequence; identical to SEQ ID NO: 102475
  derived and/or modified CDS sequence (opt2) from hemagglutinin__InfluenzaA__ADW82155

SEQ ID NO: 102477 - RNA, 1701 nt, Artificial Sequence; identical to SEQ ID NO: 102475
  derived and/or modified CDS sequence (opt2) from hemagglutinin__InfluenzaA__ADW82166

SEQ ID NO: 102478 - RNA, 1701 nt, Artificial Sequence; identical to SEQ ID NO: 102475
  derived and/or modified CDS sequence (opt2) from hemagglutinin__InfluenzaA__ADW82177

SEQ ID NO: 102479 - RNA, 1701 nt, Artificial Sequence; identical to SEQ ID NO: 98705
  derived and/or modified CDS sequence (opt2) from hemagglutinin__InfluenzaA__ADW82188

SEQ ID NO: 102480 - RNA, 1701 nt, Artificial Sequence; identical to SEQ ID NO: 98705
  derived and/or modified CDS sequence (opt2) from hemagglutinin__InfluenzaA__ADW82198

SEQ ID NO: 102481 - RNA, 1701 nt, Artificial Sequence; identical to SEQ ID NO: 98705
  derived and/or modified CDS sequence (opt2) from hemagglutinin__InfluenzaA__ADW82208

SEQ ID NO: 102482 - RNA, 1701 nt, Artificial Sequence; identical to SEQ ID NO: 98705
  derived and/or modified CDS sequence (opt2) from hemagglutinin__InfluenzaA__ADW82218

SEQ ID NO: 102483 - RNA, 1701 nt, Artificial Sequence; identical to SEQ ID NO: 98705
  derived and/or modified CDS sequence (opt2) from hemagglutinin__InfluenzaA__ADW82228

SEQ ID NO: 102484 - RNA, 1701 nt, Artificial Sequence; identical to SEQ ID NO: 98705
  derived and/or modified CDS sequence (opt2) from hemagglutinin__InfluenzaA__ADW82238

SEQ ID NO: 102485 - RNA, 1701 nt, Artificial Sequence; identical to SEQ ID NO: 98705
  derived and/or modified CDS sequence (opt2) from hemagglutinin__InfluenzaA__ADW82248

SEQ ID NO: 102486 - RNA, 1701 nt, Artificial Sequence; identical to SEQ ID NO: 98705
  derived and/or modified CDS sequence (opt2) from hemagglutinin__InfluenzaA__ADW82258

SEQ ID NO: 102487 - RNA, 1701 nt, Artificial Sequence
  derived and/or modified CDS sequence (opt2) from hemagglutinin__InfluenzaA__ADW82268
augaaggccauccucgucguccuccucuacaccuucgccaccgccaacgccgacacccucugcaucggcuaccacgccaacaacuccaccgacaccgucgacaccguccucgagaagaacgucaccgucacccacuccgucaaccuccucgaggacaagcacaacggcaagcucugcaagcuccgcggcgucgccccccuccaccucggcaagugcaacaucgccggcuggauccucggcaaccccgagugcgagucccucuccaccgccuccuccugguccuacaucgucgagaccuccuccuccgacaacggcaccugcuaccccggcgacuucaucgacuacgaggagcuccgcgagcagcucuccuccgucuccuccuucgagcgcuucgagaucuuccccaagaccuccuccuggcccaaccacgacuccaacaagggcgucaccgccgccugcccccacgccggcgccaaguccuucuacaagaaccucaucuggcucgucaagaagggcaacuccuaccccaagcucuccaaguccuacaucaacgacaagggcaaggagguccucguccucuggggcauccaccaccccuccaccuccgccgaccagcagucccucuaccagaacgccgacgccuacgucuucgucggcaccucccgcuacuccaagaaguucaagcccgagaucgccauccgccccaagguccgcgaccaggagggccgcaugaacuacuacuggacccucgucgagcccggcgacaagaucaccuucgaggccaccggcaaccucgucgucccccgcuacgccuucgccauggagcgcaacgccggcuccggcaucaucaucuccgacacccccguccacgacugcaacaccaccugccagacccccaagggcgccaucaacaccucccuccccuuccagaacauccaccccaucaccaucggcaagugccccaaguacgucaaguccaccaagcuccgccucgccaccggccuccgcaacguccccuccauccagucccgcggccucuucggcgccaucgccggcuucaucgagggcggcuggaccggcauggucgacggcugguacggcuaccaccaccagaacgagcagggcuccggcuacgccgccgaccucaaguccacccagaacgccaucgacgagaucaccaacaaggucaacuccgucaucgagaagaugaacacccaguucaccgccgucggcaaggaguucaaccaccucgagaagcgcaucgagaaccucaacaagaaggucgacgacggcuuccucgacaucuggaccuacaacgccgagcuccucguccuccucgagaacgagcgcacccucgacuaccacgacuccaacgucaagaaccucuacgagaagguccgcucccagcucaagaacaacgccaaggagaucggcaacggcugcuucgaguucuaccacaagugcgacaacaccugcauggaguccgucaagaacggcaccuacgacuaccccaaguacuccgaggaggccaagcucaaccgcgaggagaucgacggcgucaagcucgaguccacccgcauccaccagauccucgccaucuacuccaccgucgccuccucccucguccucgucgucucccucggcgccaucuccuucuggaugugcuccaacggcucccuccagugccgcaucugcaucuga

SEQ ID NO: 102488 - RNA, 1701 nt, Artificial Sequence; identical to SEQ ID NO: 102475
  derived and/or modified CDS sequence (opt2) from hemagglutinin__InfluenzaA__ADW93760

SEQ ID NO: 102489 - RNA, 1701 nt, Artificial Sequence
  derived and/or modified CDS sequence (opt2) from hemagglutinin__InfluenzaA__ADW95319
augaaggccauccucgucguccuccucuacaccuucgccaccgccaacgccgacacccucugcaucggcuaccacgccaacaacuccaccgacaccgucgacaccguccucgagaagaacgucaccgucacccacuccgucaaccuccucgaggacaagcacaacggcaagcucugcaagcuccgcggcgucgccccccuccaccucggcaagugcaacaucgccggcuggauccucggcaaccccgagugcgagucccucuccaccgccuccuccugguccuacaucgucgagaccuccuccuccgacaacggcaccugcuaccccggcgacuucaucgacuacgaggagcuccgcgagcagcucuccuccgucuccuccuucgagcgcuucgagaucuuccccaagaccuccuccuggcccaaccacgacuccaacaagggcgucaccgccgccugcccccacgccggcgccaagggcuucuacaagaaccucaucuggcucgucaagaagggcaacuccuaccccaagcucuccaaguccuacaucaacgacaagggcaaggagguccucguccucuggggcauccaccaccccuccaccaccgccgaccagcagucccucuaccagaacgccgacaccuacgucuucgucggcaccucccgcuacuccaagaaguucaagcccgagaucgccauccgccccaagguccgcgaccaggagggccgcaugaacuacuacuggacccucgucgagcccggcgacaagaucaccuucgaggccaccggcaaccucgucgucccccgcuacgccuucgccauggagcgcaacgccggcuccggcaucaucaucuccgacacccccguccacgacugcaacaccaccugccagacccccaagggcgccaucaacaccucccuccccuuccagaacauccaccccaucaccaucggcaagugccccaaguacgucaaguccaccaagcuccgccucgccaccggccuccgcaacguccccuccauccagucccgcggccucuucggcgccaucgccggcuucaucgagggcggcuggaccggcauggucgacggcugguacggcuaccaccaccagaacgagcagggcuccggcuacgccgccgaccucaaguccacccagaacgccaucgacgagaucaccaacaaggucaacuccgucaucgagaagaugaacacccaguucaccgccgucggcaaggaguucaaccaccucgagaagcgcaucgagaaccucaacaagaaggucgacgacggcuuccucgacaucuggaccuacaacgccgagcuccucguccuccucgagaacgagcgcacccucgacuaccacgacuccaacgucaagaaccucuacgagaagguccgcaaccagcucaagaacaacgccaaggagaucggcaacggcugcuucgaguucuaccacaagugcgacaacaccugcauggaguccgucaagaacggcaccuacgacuaccccaaguacuccgaggaggccaagcucaaccgcgaggagaucgacggcgucaagcucgaguccacccgcaucuaccagauccucgccaucuacuccaccgucgccuccucccucguccucgucgucucccucggcgccaucuccuucuggaugugcuccaacggcucccuccagugccgcaucugcaucuga

SEQ ID NO: 102490 - RNA, 1701 nt, Artificial Sequence
  derived and/or modified CDS sequence (opt2) from hemagglutinin__InfluenzaA__ADW95332
augaaggccauccucgucguccuccucuacaccuucgccaccgccaacgccgacacccucugcaucggcuaccacgccaacaacuccaccgacaccgucgacaccguccucgagaagaacgucaccgucacccacuccgucaaccuccucgaggacaagcacaacggcaagcucugcaagcuccgcggcgucgccccccuccaccucggcaagugcaacaucgccggcuggauccucggcaaccccgagugcgagucccucuccaccgccuccuccugguccuacaucgucgagaccuccuccuccgacaacggcaccugcuaccccggcgacuucaucgacuacgaggagcuccgcgagcagcucuccuccgucuccuccuucgagcgcuucgagaucuuccccaagaccuccuccuggcccaaccacgacuccaacaagggcgucaccgccgccugcccccacgccggcgccaagggcuucuacaagaaccucaucuggcucgucaagaagggcaacuccuaccccaagcucuccaaguccuacaucaacgacaagggcaaggagguccucguccucuggggcauccaccaccccuccaccaccgccgaccagcagucccucuaccagaacgccgacaccuacgucuucgucggcaccucccgcuacuccaagaaguucaagcccgagaucgccauccgccccaagguccgcgaccaggagggccgcaugaacuacuacuggacccucgucgagcccggcgacaagaucaccuucgaggccaccggcaaccucgucgucccccgcuacgccuucgccauggagcgcaacgccggcuccggcaucaucaucuccgacacccccguccacgacugcaacaccaccugccagacccccaagggcgccaucaacaccucccuccccuuccagaacauccaccccaucaccaucggcaagugccccaaguacgucaaguccaccaagcuccgccucgccaccggccuccgcaacguccccuccauccagucccgcggccucuucggcgccaucgccggcuucaucgagggcggcuggaccggcauggucgacggcugguacggcuaccaccaccagaacgagcagggcuccggcuacgccgccgaccucaaguccacccagaacgccaucgacaagaucaccaacaaggucaacuccgucaucgagaagaugaacacccaguucaccgccgucggcaaggaguucaaccaccucgagaagcgcaucgagaaccucaacaagaaggucgacgacggcuuccucgacaucuggaccuacaacgccgagcuccucguccuccucgagaacgagcgcacccucgacuaccacgacuccaacgucaagaaccucuacgagaagguccgcaaccagcucaagaacaacgccaaggagaucggcaacggcugcuucgaguucuaccacaagugcgacaacaccugcauggaguccgucaagaacggcaccuacgacuaccccaaguacuccgaggaggccaagcucaaccgcgaggagaucgacggcgucaagcucgaguccacccgcaucuaccagauccucgccaucuacuccaccgucgccuccucccucguccucgucgucucccucggcgccaucuccuucuggaugugcuccaacggcucccuccagugccgcaucugcaucuga

SEQ ID NO: 102491 - RNA, 1701 nt, Artificial Sequence
  derived and/or modified CDS sequence (opt2) from hemagglutinin__InfluenzaA__ADX21078
augaagaccaucaucgcccucuccuacauccucugccucgucuucgcccagaagcuccccggcaacgacaacuccaccgccacccucugccucggccaccacgccguccccaacggcaccgucgucaagaccaucaccaacgaccagaucgaggucaccaacgccaccgagcucguccaguccuccuccaccggcgagaucugcgacuccccccaccagauccucgacggcaagaacugcacccucaucgacgcccuccucggcgacccccagugcgacggcuuccagaacaagaagugggaccucuucgucgagcgcuccaaggccuacuccaacugcuaccccuacgacguccccgacuacgccucccuccgcucccucgucgccuccuccggcacccucgaguucaacaacgaguccuucaacuggaccggcgucacccagaacggcaccuccuccgccugcauccgccgcuccaagaacuccuucuucucccgccucaacuggcucacccaccucaacuucaaguacaccgcccucaacgucaccaugcccaacaacgagcaguucgacaagcucuacaucuggggcguccaccaccccggcaccgacaaggaccagaucuuccucuacgcccaggccuccggccgcaucaccgucuccaccaagcgcucccagcagaccgucauccccaacaucggcucccgcccccgcguccgcaacauccccucccgcaucuccaucuacuggaccaucgucaagcccggcgacauccuccucaucaacuccaccggcaaccucaucgccccccgcggcuacuucaagauccgcuccggcaaguccuccaucaugcgcuccgacgcccccaucggcaagugcaacuccgagugcaucacccccaacggcuccauccccaacgacaagcccuuccagaacgucaaccgcaucaccuacggcgccugcccccgcuacgucaagcagaacacccucaagcucgccaccggcaugcgcaacguccccgagaagcagacccgcggcaucuucggcgccaucgccggcuucaucgagaacggcugggagggcauggucgacggcugguacggcuuccgccaccagaacuccgagggccgcggccaggccgccgaccucaaguccacccaggccgccaucgaccagaucaacggcaagcucaaccgccucauccgcaagaccaacgagaaguuccaccagaucgagaaggaguucuccgaggucgagggccgcauccaggaccucgagaaguacgucgaggacaccaagaucgaccucugguccuacaacgccgagcuccucgucgcccucgagaaccagcacaccaucgaccucaccgacuccgagaugaacaagcucuucgagaagaccaagaagcagcuccgcgagaacgccgaggacaugggcaacggcugcuucaagaucuaccacaagugcgacaacgccugcaucggcuccauccgcaacggcaccuacgaccacgacgucuaccgcgacgaggcccucaacaaccgcuuccagaucaagggcgucgagcucaaguccggcuacaaggacuggauccucuggaucuccuucgccaucuccugcuuccuccucugcgucgcccuccucggcuucaucaugugggccugccagaagggcaacauccgcugcaacaucugcaucuga

SEQ ID NO: 102492 - RNA, 1701 nt, Artificial Sequence; identical to SEQ ID NO: 102491
  derived and/or modified CDS sequence (opt2) from hemagglutinin__InfluenzaA__ADX21088

SEQ ID NO: 102493 - RNA, 1701 nt, Artificial Sequence
  derived and/or modified CDS sequence (opt2) from hemagglutinin__InfluenzaA__ADX21098
augaaggccauccucgucguccuccucuacaccuucgccaccgccaacgccgacacccucugcaucggcuaccacgccaacaacuccaccgacaccgucgacaccguccucgagaagaacgucaccgucacccacuccgucaaccuccucgaggacaagcacaacggcaagcucugcaagcuccgcggcgucgccccccuccaccucggcaagugcaacaucgccggcuggauccucggcaaccccgagugcgagucccucuccaccgccuccuccugguccuacaucgucgagaccuccuccuccgacaacggcaccugcuaccccggcgacuucaucgacuacgaggagcuccgcgagcagcucuccuccgucuccuccuucgagcgcuucgagaucuuccccaagaccuccuccuggcccaaccacgacuccaacaagggcgucaccgccgccugcccccacgccggcgccaaguccuucuacaagaaccucaucuggcucgucaagaagggcaacuccuaccccaagcucuccaaguccuacaucaacgacaagggcaaggagguccucguccucuggggcauccaccaccccuccaccuccgccgaccagcagucccucuaccagaacgccgacgccuacgucuucgucggcaccucccgcuacuccaagaaguucaagcccgagaucgccauccgccccaagguccgcgaccaggagggccgcaugaacuacuacuggacccucgucgagcccggcgacaagaucaccuucgaggccaccggcaaccucgucgucccccgcuacgccuucgccauggagcgcaacgccggcuccggcaucaucaucuccgacacccccguccacgacugcuccaccaccugccagacccccaagggcgccaucaacaccucccuccccuuccagaacauccaccccaucaccaucggcaagugccccaaguacgucaaguccaccaagcuccgccucgccaccggccuccgcaacguccccuccauccagucccgcggccucuucggcgccaucgccggcuucaucgagggcggcuggaccggcauggucgacggcugguacggcuaccaccaccagaacgagcagggcuccggcuacgccgccgaccucaaguccacccagaacgccaucgacgagaucaccaacaaggucaacuccgucaucgagaagaugaacacccaguucaccgccgucggcaaggaguucaaccaccucgagaagcgcaucgagaaccucaacaagaaggucgacgacggcuuccucgacaucuggaccuacaacgccgagcuccucguccuccucgagaacgagcgcacccucgacuaccacgacuccaacgucaagaaccucuacgagaagguccgcucccagcucaagaacaacgccaaggagaucggcaacggcugcuucgaguucuaccacaagugcgacaacaccugcauggaguccgucaagaacggcaccuacgacuaccccaaguacuccgaggaggccaagcucaaccgcgaggagaucgacggcgucaagcucgaguccacccgcauccaccagauccucgccaucuacuccaccgucgccuccucccucguccucgucgucucccucggcgccaucuccuucuggaugugcuccaacggcucccuccagugccgcaucugcaucuga

SEQ ID NO: 102494 - RNA, 1701 nt, Artificial Sequence; identical to SEQ ID NO: 99624
  derived and/or modified CDS sequence (opt2) from hemagglutinin__InfluenzaA__ADX36109

SEQ ID NO: 102495 - RNA, 1701 nt, Artificial Sequence
  derived and/or modified CDS sequence (opt2) from hemagglutinin__InfluenzaA__ADX96278
augaaggccauccucgucguccuccucuacaccuucgccaccgccaacgccgacacccucugcaucggcuaccacgccaacaacuccaccgacaccgucgacaccguccucgagaagaacgucaccgucacccacuccgucaacauccucgaggacaagcacaacggcaagcucugcaagcuccgcggcgucgccccccuccaccucggcaagugcaacaucgccggcuggauccucggcaaccccgagugcgagucccucuccaccgccuccuccugguccuacaucgucgagaccuccuccuccgacaacggcaccugcuaccccggcgacuucaucgacuacgaggagcuccgcgagcagcucuccuccgucuccuccuucgagcgcuucgagaucuuccccaagaccuccuccuggcccaaccacgacuccaacaagggcgucaccgccgccugcccccacgccggcgccaagggcuucuacaagaaccucaucuggcucgucaagaagggcaacuccuaccccaagcucuccaaguccuacaucaacgacaagggcaaggagguccucguccucuggggcauccaccaccccuccaccuccgccgaccagcagucccucuaccagaacgccgacgccuacgucuucgucggcuccucccgcuacuccaagaaguucaagcccgagaucgccauccgccccaagguccgcgaccaggagggccgcaugaacuacuacuggacccucgucgagcccggcgacaagaucaccuucgaggccaccggcaaccucgucgucccccgcuacgccuucgccauggagcgcaacgccggcuccggcaucaucaucuccgacacccccguccacgacugcaacaccaccugccagacccccaagggcgccgucaacaccucccuccccuuccagaacauccaccccaucaccaucggcaagugccccaaguacgucaaguccaccaagcuccgccucgccaccggccuccgcaacguccccuccauccagucccgcggccucuucggcgccaucgccggcuucaucgagggcggcuggaccggcauggucgacggcugguacggcuaccaccaccagaacgagcagggcuccggcuacgccgccgaccucaaguccacccagaacgccaucgacgagaucaccaacaaggucaacuccgucaucgagaagaugaacacccaguucaccgccgucggcaaggaguucaaccaccucgagaagcgcaucgagaaccucaacaagaaggucgacgacggcuuccucgacaucuggaccuacaacgccgagcuccucguccuccucgagaacgagcgcacccucgacuaccacgacuccaacgucaagaaccucuacgagaagguccgcucccagcucaagaacaacgccaaggaggucggcaacggcugcuucgaguucuaccacaagugcgacaacaccugcauggaguccgucaagaacggcaccuacgacuaccccaaguacuccgaggaggccaagcucaaccgcgaggagaucgacggcgucaagcucgaguccacccgcaucuaccagauccucgccaucuacuccaccgccgccuccucccucguccucgucgucucccucggcgccaucuccuucuggaugugcuccaacggcucccuccagugccgcaucugcaucuga

SEQ ID NO: 102496 - RNA, 1701 nt, Artificial Sequence
  derived and/or modified CDS sequence (opt2) from hemagglutinin__InfluenzaA__ADX96288
augaaggccauccucgucguccuccucuacaccuucgccaccgccaacgccgacacccucugcaucggcuaccacgccaacaacuccaccgacaccgucgacaccguccucgagaagaacgucaccgucacccacuccgucaacauccucgaggacaagcacaacggcaagcucugcaagcuccgcggcgucgccccccuccaccucggcaagugcaacaucgccggcuggauccucggcaaccccgagugcgagucccucuccaccgccuccuccugguccuacaucgucgagaccuccuccuccgacaacggcaccugcuaccccggcgacuucaucgacuacgaggagcuccgcgagcagcucuccuccgucuccuccuucgagcgcuucgagaucuuccccaagaccuccuccuggcccaaccacgacuccaacaagggcgucaccgccgccugcccccacgccggcgccaaguccuucuacaagaaccucaucuggcucgucaagcagggcaacuccuaccccaagcucuccaaguccuacaucaacgacaagggcaaggagguccucguccucuggggcauccaccaccccuccaccuccgccgaccagcagucccucuaccagaacgccgacgccuacgucuucgucggcuccucccgcuacuccaagaaguucaagcccgagaucgccauccgccccaagguccgcgaccaggagggccgcaugaacuacuacuggacccucgucgagcccggcgacaagaucaccuucgaggccaccggcaaccucgucgucccccgcuacgccuucgccauggagcgcaacgccggcuccggcaucaucaucuccgacacccccguccacgacugcaacaccaccugccagacccccaagggcgccaucaacaccucccuccccuuccagaacauccaccccaucaccaucggcaagugccccaaguacgucaaguccaccaagcuccgccucgccaccggccuccgcaacguccccuccauccagucccgcggccucuucggcgccaucgccggcuucaucgagggcggcuggaccggcauggucgacggcugguacggcuaccaccaccagaacgagcagggcuccggcuacgccgccgaccucaaguccacccagaacgccaucgacgagaucaccaacaaggucaacuccgucaucgagaagaugaacacccaguucaccgccgucggcaaggaguucaaccaccucgagaagcgcaucgagaaccucaacaagaaggucgacgacggcuuccucgacaucuggaccuacaacgccgagcuccucguccuccucgagaacgagcgcacccucgacuaccacgacuccaacgucaagaaccucuacgagaagguccgcucccagcucaagaacaacgccaaggaggucggcaacggcugcuucgaguucuaccacaagugcgacaacaccugcauggaguccgucaagaacggcaccuacgacuaccccaaguacuccgaggaggccaagcucaaccgcgaggagaucgacggcgucaagcucgaguccacccgcaucuaccagauccucgccaucuacuccaccgccgccuccucccucguccucgucgucucccucggcgccaucuccuucuggaugugcuccaacggcucccuccagugccgcaucugcaucuga

SEQ ID NO: 102497 - RNA, 1701 nt, Artificial Sequence
  derived and/or modified CDS sequence (opt2) from hemagglutinin__InfluenzaA__ADX96298
augaaggccauccucgucguccuccucuacaccuucgccaccgccaacgccgacacccucugcaucggcuaccacgccaacaacuccaccgacaccgucgacaccguccucgagaagaacgucaccgucacccacuccgucaacauccucgaggacaagcacaacggcaagcucugcaagcuccgcggcgucgccccccuccaccucggcaagugcaacaucgccggcuggauccucggcaaccccgagugcgagucccucuccaccgccuccuccugguccuacaucgucgagaccuccuccuccgacaacggcaccugcuaccccggcgacuucaucgacuacgaggagcuccgcgagcagcucuccuccgucuccuccuucgagcgcuucgagaucuuccccaagaccuccuccuggcccaaccacgacuccaacaagggcgucaccgccgccugcccccacgccggcgccaaguccuucuacaagaaccucaucuggcucgucaagaagggcaacuccuaccccaagcucuccaaguccuacaucaacgacaagggcaaggagguccucguccucuggggcauccaccaccccuccaccuccgccgaccagcagucccucuaccagaacgccgacgccuacgucuucgucggcaccucccgcuacuccaagaaguucaagcccgagaucgucauccgccccaagguccgcgaccaggagggccgcaugaacuacuacuggacccucgucgagcccggcgacaagaucaccuucgaggccaccggcaaccucgucgucccccgcuacgccuucgccauggagcgcaacgccggcuccggcaucaucaucuccgacacccccguccacgacugcaacaccaccugccagacccccaagggcgccaucaacaccucccuccccuuccagaacauccaccccaucaccaucggcaagugccccaaguacgucaaguccaccaagcuccgccucgccaccggccuccgcaacguccccuccauccagucccgcggccucuucggcgccaucgccggcuucaucgagggcggcuggaccggcauggucgacggcugguacggcuaccaccaccagaacgagcagggcuccggcuacgccgccgaccucaaguccacccagaacgccaucgacgagaucaccaacaaggucaacuccgucaucgagaagaugaacacccaguucaccgccgucggcaaggaguucaaccaccucgagaagcgcaucgagaaccucaacaagaaggucgacgacggcuuccucgacaucuggaccuacaacgccgagcuccucguccuccucgagaacgagcgcacccucgacuaccacgacuccaacgucaagaaccucuacgagaagguccgcucccagcucaagaacaacgccaaggagaucggcaacggcugcuucgaguucuaccacaagugcgacaacaccugcauggaguccgucaagaacggcaccuacgacuaccccaaguacuccgaggaggccaagcucaaccgcgaggagaucgacggcgucaagcucgaguccacccgcaucuaccagauccucgccaucuacuccaccgucgccuccucccucguccucgucgucucccucggcgccaucuccuucuggaugugcuccaccggcucccuccagugccgcaucugcaucuga

SEQ ID NO: 102498 - RNA, 1701 nt, Artificial Sequence; identical to SEQ ID NO: 100302
  derived and/or modified CDS sequence (opt2) from hemagglutinin__InfluenzaA__ADX96308

SEQ ID NO: 102499 - RNA, 1701 nt, Artificial Sequence
  derived and/or modified CDS sequence (opt2) from hemagglutinin__InfluenzaA__ADX96318
augaaggccauccucgucguccuccucuacaccuucgccaccgccaacgccgacacccucugcaucggcuaccacgccaacaacuccaccgacaccgucgacaccguccucgagaagaacgucaccgucacccacuccgucaaccuccucgaggacaagcacaacggcaagcucugcaagcuccgcggcgucgccccccuccaccucggcaagugcaacaucgccggcuggauccucggcaaccccgagugcgagucccucuccaccgccuccuccugguccuacaucgucgagaccuccuccuccgacaacggcaccugcuaccccggcgacuucaucgacuacgaggagcuccgcgagcagcucuccuccgucuccuccuucgagcgcuucgagaucuuccccaagaccuccuccuggcccaaccacgacuccaacaagggcgucaccgccgccugcccccacgccggcgccaaguccuucuacaagaaccucaucuggcucgucaagaagggcaacuccuaccccaagcucuccaaguccuacaucaacgacaagggcaaggagguccucguccucuggggcauccaccaccccuccaccuccgccgaccagcagucccucuaccagaacgccgacuccuacgucuucgucggcaccucccgcuacuccaagaaguucaagcccgagaucgccauccgccccaagguccgcgaccaggagggccgcaugaacuacuacuggacccucgucgagcccggcgacaagaucaccuucgaggccaccggcaaccucgucgucccccgcuacgccuucgccauggagcgcaacgccggcuccggcaucaucaucuccgacacccccguccacgacugcaacaccaccugccagacccccaagggcgccaucaacaccucccuccccuuccagaacauccaccccaucaccaucggcaagugccccaaguacgucaaguccaccaagcuccgccucgccaccggccuccgcaacguccccuccauccagucccgcggccucuucggcgccaucgccggcuucaucgagggcggcuggaccggcauggucgacggcugguacggcuaccaccaccagaacgagcagggcuccggcuacgccgccgaccucaaguccacccagaacgccaucgacaagaucaccaacaaggucaacuccgucaucgagaagaugaacacccaguucaccgccgucggcaaggaguucaaccaccucgagaagcgcaucgagaaccucaacaagaaggucgacgacggcuuccucgacaucuggaccuacaacgccgagcuccucguccuccucgagaacgagcgcacccucgacuaccacgacuccaacgucaagaaccucuacgagaagguccgcucccagcucaagaacaacgccaaggagaucggcaacggcugcuucgaguucuaccacaagugcgacaacaccugcauggaguccgucaagaacggcaccuacgacuaccccaaguacuccgaggaggccaagcucaaccgcgaggagaucgacggcgucaagcucgaguccacccgcaucuaccagauccucgccaucuacuccaccgucgccuccucccucguccucgucgucucccucggcgccaucuccuucuggaugugcuccaacggcucccuccagugccgcaucugcaucuga

SEQ ID NO: 102500 - RNA, 1701 nt, Artificial Sequence
  derived and/or modified CDS sequence (opt2) from hemagglutinin__InfluenzaA__ADX96328
augaaggccauccucgucguccuccucuacaccuucgccaccgccaacgccgacacccucugcaucggcuaccacgccaacaacuccaccgacaccgucgacaccguccucgagaagaacgucaccgucacccacuccgucaaccuccucgaggacaagcacaacggcaagcucugcaagcuccgcggcgucgccccccuccaccucggcaagugcaacaucgccggcuggauccucggcaaccccgagugcgagucccucuccaccgccuccuccugguccuacaucgucgagaccuccuccuccgacaacggcaccugcuaccccggcgacuucaucgacuacgaggagcuccgcgagcagcucuccuccgucuccuccuucgagcgcuucgagaucuuccccaagaccuccuccuggcccaaccacgacuccaacaagggcgucaccgccgccugcccccacgccggcgccaaguccuucuacaagaaccucaucuggcucgucaagaagggcaacuccuaccccaagcucuccaaguccuacaucaacgacaagggcaaggagguccucguccucuggggcauccaccaccccuccaccuccgccgaccagcagucccucuaccagaacgccgacgccuacgucuucgucggcaccucccgcuacuccaagaaguucaagcccgagaucgccauccgccccaagguccgcgaccaggagggccgcaugaacuacuacuggacccucgucgagcccggcgacaagaucaccuucgaggccaccggcaaccucgucgccccccgcuacgccuucgccauggagcgcaacgccggcuccggcaucaucaucuccgacacccccguccacgacugcaacaccaccugccagacccccaagggcgccaucaacaccucccuccccuuccagaacauccaccccaucaccaucggcaagugccccaaguacgucaaguccaccaagcuccgccucgccaccggccuccgcaacguccccuccauccagucccgcggccucuucggcgccaucgccggcuucaucgagggcggcuggaccggcauggucgacggcugguacggcuaccaccaccagaacgagcagggcuccggcuacgccgccgaccucaaguccacccagaacgccaucgacaagaucaccaacaaggucaacuccgucaucgagaagaugaacacccaguucaccgccgucggcaaggaguucaaccaccucgagaagcgcaucgagaaccucaacaagaaggucgacgacggcuuccucgacaucuggaccuacaacgccgagcuccucguccuccucgagaacgagcgcacccucgacuaccacgacuccaacgucaagaaccucuacgagaagguccgcucccagcucaagaacaacgccaaggagaucggcaacggcugcuucgaguucuaccacaagugcgacaacaccugcauggaguccgucaagaacggcaccuacgacuaccccaaguacuccgaggaggccaagcucaaccgcgaggagaucgacggcgucaagcucgaguccacccgcaucuaccagauccucgccaucuacuccaccgucgccuccucccucguccucgucgucucccucggcgccaucuccuucuggaugugcuccaacggcucccuccagugccgcaucugcaucuga

SEQ ID NO: 102501 - RNA, 1701 nt, Artificial Sequence
  derived and/or modified CDS sequence (opt2) from hemagglutinin__InfluenzaA__ADX96347
augaaggccauccucgucguccuccucuacaccuucgccaccgccaacgccgacacccucugcaucggcuaccacgccaacaacuccaccgacaccgucgacaccguccucgagaagaacgucaccgucacccacuccgucaaccuccucgaggacaagcacaacggcaagcucugcaagcuccgcggcgucgccccccuccaccucggcaagugcaacaucgccggcuggauccucggcaaccccgagugcgagucccucuccaccgccuccuccugguccuacaucgucgagaccuccuccuccgacaacggcaccugcuaccccggcgacuucaucgacuacgaggagcuccgcgagcagcucuccuccgucuccuccuucgagcgcuucgagaucuuccccaagaccuccuccuggcccaaccacgacuccaacaagggcgucaccgccgccugcccccacgccggcgccaaguccuucuacaagaaccucaucuggcucgucaagaagggcaacuccuaccccaagcucuccaaguccuacaucaacgacaagggcaaggagguccucguccucuggggcauccaccaccccuccaccuccgccgaccagcagucccucuaccagaacgccgacgccuacgucuucgucggcaccucccgcuacuccaagaaguucaagcccgagaucgccauccgccccaagguccgcgaccaggagggccgcaugaacuacuacuggacccucgucgagcccggcgacaagaucaccuucgaggccaccggcaaccucgucgucccccgcuacgccuucgccauggagcgcaacgccggcuccggcaucaucaucuccgacacccccguccacaacugcaacaccaccugccagacccccaagggcgccaucaacaccucccuccccuuccagaacauccaccccaucaccaucggcaagugccccaaguacgucaaguccaccaagcuccgccucgccaccggccuccgcaacguccccuccauccagucccgcggccucuucggcgccaucgccggcuucaucgagggcggcuggaccggcauggucgacggcugguacggcuaccaccaccagaacgagcagggcuccggcuacgccgccgaccucaaguccacccagaacgccaucgacaagaucaccaacaaggucaacuccgucaucgagaagaugaacacccaguucaccgccgucggcaaggaguucaaccaccucgagaagcgcaucgagaaccucaacaagaaggucgacgacggcuuccucgacaucuggaccuacaacgccgagcuccucguccuccucgagaacgagcgcacccucgacuaccacgacuccaacgucaagaaccucuacgagaagguccgcucccagcucaagaacaacgccaaggagaucggcaacggcugcuucgaguucuaccacaagugcgacaacaccugcauggaguccgucaagaacggcaccuacgacuaccccaaguacuccgaggaggccaagcucaaccgcgaggagaucgacggcgucaagcucgaguccacccgcaucuaccagauccucgccaucuacuccaccgucgccuccucccucguccucgucgucucccucggcgccaucuccuucuggaugugcuccaacggcucccuccagugccgcaucugcaucuga

SEQ ID NO: 102502 - RNA, 1701 nt, Artificial Sequence
  derived and/or modified CDS sequence (opt2) from hemagglutinin__InfluenzaA__ADX96357
augaaggccauccucgucguccuccucuacaccuucgccaccgccaacgccgacacccucugcaucggcuaccacgccaacaacuccaccgacaccgucgacaccguccucgagaagaacgucaccgucacccacuccgucaacauccucgaggacaagcacaacggcaagcucugcaagcuccgcggcgucgccccccuccaccucggcaagugcaacaucgccggcuggauccucggcaaccccgagugcgagucccucuccaccgccuccuccugguccuacaucgucgagaccuccuccuccgacaacggcaccugcuaccccggcgacuucaucgacuacgaggagcuccgcgagcagcucuccuccgucuccuccuucgagcgcuucgagaucuuccccaagaccuccuccuggcccaaccacgacuccaacaagggcgucaccgccgccugcccccacgccggcgccaaguccuucuacaagaaccucaucuggcucgucaagaagggcaacuccuaccccaagcucuccaaguccuacaucaacgacaagggcaaggagguccucguccucuggggcauccaccaccccuccaccuccgccgaccagcagucccucuaccagaacgccgacgccuacgucuucgucggcaccucccgcuacuccaagaaguucaagcccgagaucgucauccgccccaagguccgcgaccaggagggccgcaugaacuacuacuggacccucgucgagcccggcgacaagaucaccuucgaggccaccggcaaccucgucgucccccgcuacgccuucgccauggagcgcaacgccggcuccggcaucaucaucuccgacacccccguccacgacugcaacaccaccugccagacccccaagggcgccaucaacaccucccuccccuuccagaacauccaccccaucaccaucggcaagugccccaaguacgucaaguccaccaagcuccgccucgccaccggccuccgcaacguccccuccauccagucccgcggccucuucggcgccaucgccggcuucaucgagggcggcuggaccggcauggucgacggcugguacggcuaccaccaccagaacgagcagggcuccggcuacgccgccgaccucaaguccacccagaacgccaucgacgagaucaccaacaaggucaacuccgucaucgagaagaugaacacccaguucaccgccgucggcaaggaguucaaccaccucgagaagcgcaucgagaaccucaacaagaaggucgacgacggcuuccucgacaucuggaccuacaacgccgagcuccucguccuccucgagaacgagcgcacccucgacuaccacgacuccaacgucaagaaccucuacgagaagguccgcucccagcucaagaacaacgccaaggagaucggcaacggcugcuucgaguucuaccacaagugcgacaacaccugcauggaguccgucaagaacggcaccuacgacuaccccaaguacuccgaggaggccaagcucaaccgcgaggagaucgacggcgucaagcucgaguccacccgcaucuaccagauccucgccaucuacuccaccgucgccuccucccucguccucgucgucucccucggcgccaucuccuucuggaugugcuccaacggcucccuccagugccgcaucugcaucuga

SEQ ID NO: 102503 - RNA, 1701 nt, Artificial Sequence; identical to SEQ ID NO: 101642
  derived and/or modified CDS sequence (opt2) from hemagglutinin__InfluenzaA__ADX96367

SEQ ID NO: 102504 - RNA, 1701 nt, Artificial Sequence
  derived and/or modified CDS sequence (opt2) from hemagglutinin__InfluenzaA__ADX96378
augaaggccauccucgucguccuccucuacaccuucgccaccgccaacgccgacacccucugcaucggcuaccacgccaacaacuccaccgacaccgucgacaccguccucgagaagaacgucaccgucacccacuccgucaaccuccucgaggacaagcacaacggcaagcucugcaagcuccgcggcgucgccccccuccaccucggcaagugcaacaucgccggcuggauccucggcaaccccgagugcgagucccucuccaccgccuccuccugguccuacaucgucgagaccuccuccuccgacaacggcaccugcuaccccggcgacuucaucgacuacgaggagcuccgcgagcagcucuccuccgucuccuccuucgagcgcuucgagaucuuccccaagaccuccuccuggcccaaccacgacuccaacaagggcgucaccgccgccugcccccacgccggcgccaaguccuucuacaagaaccucaucuggcucgucaagaagggcaacuccuaccccaagcucuccaaguccuacaucaacgacaagggcaaggagguccucguccucuggggcauccaccaccccuccaccuccgccgaccagcagucccucuaccagaacgccgacgccuacgucuucgucggcaccucccgcuacuccaagaaguucaagcccgagaucgccauccgccccaagguccgcgaccaggagggccgcaugaacuacuacuggacccucgucgagcccggcgacaagaucaccuucgaggccaccggcaaccucgucgucccccgcuacgccuucgccauggagcgcaacgccggcuccggcaucaucaucuccgacacccccauccacgacugcaacaccaccugccagacccccaagggcgccaucaacaccucccuccccuuccagaacauccaccccaucaccaucggcaagugccccaaguacgucaaguccaccaagcuccgccucgccaccggccuccgcaacguccccuccauccagucccgcggccucuucggcgccaucgccggcuucaucgagggcggcuggaccggcauggucgacggcugguacggcuaccaccaccagaacgagcagggcuccggcuacgccgccgaccucaaguccacccagaacgccaucgacgagaucaccaacaaggucaacuccgucaucgagaagaugaacacccaguucaccgccgucggcaaggaguucaaccaccucgagaagcgcaucgagaaccucaacaagaaggucgacgacggcuuccucgacaucuggaccuacaacgccgagcuccucguccuccucgagaacgagcgcacccucgacuaccacgacuccaacgucaagaaccucuacgagaagguccgcucccagcucaagaacaacgccaaggagaucggcaacggcugcuucgaguucuaccacaagugcgacaacaccugcauggaguccgucaagaacggcaccuacgacuaccccaaguacuccgaggaggccaagcucaaccgcgaggagaucgacggcgucaagcucgaguccacccgcaucuaccagauccucgccaucuacuccaccgucgccuccucccucguccucgucgucucccucggcgccaucuccuucuggaugugcuccaacggcucccuccagugccgcaucugcaucuga

SEQ ID NO: 102505 - RNA, 1701 nt, Artificial Sequence; identical to SEQ ID NO: 102504
  derived and/or modified CDS sequence (opt2) from hemagglutinin__InfluenzaA__ADX96398

SEQ ID NO: 102506 - RNA, 1701 nt, Artificial Sequence
  derived and/or modified CDS sequence (opt2) from hemagglutinin__InfluenzaA__ADX96408
augaaggccauccucgucguccuccucuacaccuucgccaccgccaacgccgacacccucugcaucggcuaccacgccaacaacuccaccgacaccgucgacaccguccucgagaagaacgucaccgucacccacuccgucaacauccucgaggacaagcacaacggcaagcucugcaagcuccgcggcgucgccccccuccaccucggcaagugcaacaucgccggcuggauccucggcaaccccgagugcgagucccucuccaccgccuccuccugguccuacaucgucgagaccuccuccuccgacaacggcaccugcuaccccggcgacuucaucgacuacgaggagcuccgcgagcagcucuccuccgucuccuccuucgagcgcuucgagaucuuccccaagaccuccuccuggcccaaccacgacuccaacaagggcgucaccgccgccugcccccacgccggcgccaaguccuucuacaagaaccucaucuggcucgucaagaagggcaacuccuaccccaagcucuccaaguccuacaucaacgacaagggcaaggagguccucguccucuggggcauccaccaccccuccaccuccgccgaccagcagucccucuaccagaacgccgacgccuacgucuucgucggcaccucccgcuacuccaagaaguucaagcccgagaucgccauccgccccaagguccgcgaccaggagggccgcaugaacuacuacuggacccucgucgagcccggcgacaagaucaccuucgaggccaccggcaaccucgucgucccccgcuacgccuucgccauggagcgcaacgccggcuccggcaucaucaucuccgacacccccauccacgacugcaacaccaccugccagacccccaagggcgccaucaacaccucccuccccuuccagaacauccaccccaucaccaucggcaagugccccaaguacgucaaguccaccaagcuccgccucgccaccggccuccgcaacguccccuccauccagucccgcggccucuucggcgccaucgccggcuucaucgagggcggcuggaccggcauggucgacggcugguacggcuaccaccaccagaacgagcagggcuccggcuacgccgccgaccucaaguccacccagaacgccaucgacgagaucaccaacaaggucaacuccgucaucgagaagaugaacacccaguucaccgccgucggcaaggaguucaaccaccucgagaagcgcaucgagaaccucaacaagaaggucgacgacggcuuccucgacaucuggaccuacaacgccgagcuccucguccuccucgagaacgagcgcacccucgacuaccacgacuccaacgucaagaaccucuacgagaagguccgcucccagcucaagaacaacgccaaggagaucggcaacggcugcuucgaguucuaccacaagugcgacaacaccugcauggaguccgucaagaacggcaccuacgacuaccccaaguacuccgaggaggccaagcucaaccgcgaggagaucgacggcgucaagcucgaguccacccgcaucuaccagauccucgccaucuacuccaccgucgccuccucccucguccucgucgucucccucggcgccaucuccuucuggaugugcuccaacggcucccuccagugccgcaucugcaucuga

SEQ ID NO: 102507 - RNA, 1701 nt, Artificial Sequence; identical to SEQ ID NO: 99018
  derived and/or modified CDS sequence (opt2) from hemagglutinin__InfluenzaA__ADX96427

SEQ ID NO: 102508 - RNA, 1701 nt, Artificial Sequence
  derived and/or modified CDS sequence (opt2) from hemagglutinin__InfluenzaA__ADX96437
augaaggccauccucgucguccuccucuacaccuucgccaccgccaacgccgacacccucugcaucggcuaccacgccaacaacuccaccgacaccgucgacaccguccucgagaagaacgucaccgucacccacuccgucaacauccucgaggacaagcacaacggcaagcucugcaagcuccgcggcgucgccccccuccaccucggcaagugcaacaucgccggcuggauccucggcaaccccgagugcgagucccucuccaccgccuccuccugguccuacaucgucgagaccuccuccuccgacaacggcaccugcuaccccggcgacuucaucgacuacgaggagcuccgcgagcagcucuccuccgucuccuccuucgagcgcuucgagaucuuccccaagaccuccuccuggcccaaccacgacuccaacaagggcgucaccgccgccugcccccacgccggcgccaaguccuucuacaagaaccucaucuggcucgucaagaagggcaacuccuaccccaagcucuccaaguccuacaucaacgacaagggcaaggagguccucguccucuggggcauccaccaccccuccaccuccgccgaccagcagucccucuaccagaacgccgacgccuacgucuucgucggcuccucccgcuacuccaagaaguucaagcccgagaucgccauccgccccaagguccgcgaccaggagggccgcaugaacuacuacuggacccucgucgagcccggcgacaagaucaccuucgaggccaccggcaaccucgucgucccccgcuacgccuucgccauggagcgcaacgccggcuccggcaucaucaucuccgacacccccguccacgacugcaacaccaccugccagacccccaagggcgccaucaacaccucccuccccuuccagaacauccaccccaucaccaucggcaagugccccaaguacgucaaguccaccaagcuccgccucgccaccggccuccgcaacguccccuccauccagucccgcggccucuucggcgccaucgccggcuucaucgagggcggcuggaccggcauggucgacggcugguacggcuaccaccaccagaacgagcagggcuccggcuacgccgccgaccucaaguccacccagaacgccaucgacgagaucaccaacaaggucaacuccgucaucgagaagaugaacacccaguucaccgccgucggcaaggaguucaaccaccucgagaagcgccucgagaaccucaacaagaaggucgacgacggcuuccucgacaucuggaccuacaacgccgagcuccucguccuccucgagaacgagcgcacccucgacuaccacgacuccaacgucaagaaccucuacgagaagguccgcucccagcucaagaacaacgccaaggaggucggcaacggcugcuucgaguucuaccacaagugcgacaacaccugcauggaguccgucaagaacggcaccuacgacuaccccaaguacuccgaggaggccaagcucaaccgcgaggagaucgacggcgucaagcucgaguccacccgcaucuaccagauccucgccaucuacuccaccgccgccuccucccucguccucgucgucucccucggcgccaucuccuucuggaugugcuccaacggcucccuccagugccgcaucugcaucuga

SEQ ID NO: 102509 - RNA, 1701 nt, Artificial Sequence; identical to SEQ ID NO: 98692
  derived and/or modified CDS sequence (opt2) from hemagglutinin__InfluenzaA__ADX96447

SEQ ID NO: 102510 - RNA, 1701 nt, Artificial Sequence; identical to SEQ ID NO: 98705
  derived and/or modified CDS sequence (opt2) from hemagglutinin__InfluenzaA__ADX96497

SEQ ID NO: 102511 - RNA, 1701 nt, Artificial Sequence
  derived and/or modified CDS sequence (opt2) from hemagglutinin__InfluenzaA__ADX96507
augaaggccauccucgucguccuccucuacaccuucgccaccgccaacgccgacacccucugcaucggcuaccacgccaacaacuccaccgacaccgucgacaccguccucgagaagaacgucaccgucacccacuccgucaaccuccucgaggacaagcacaacggcaagcucugcaagcuccgcggcgucgccccccuccaccucggcaagugcaacaucgccggcuggauccucggcaaccccgagugcgagucccucuccaccgccuccuccugguccuacaucgucgagaccuccuccuccgacaacggcaccugcuaccccggcgacuucaucgacuacgaggagcuccgcgagcagcucuccuccgucuccuccuucgagcgcuucgagaucuuccccaagaccuccuccuggcccaaccacgacuccaacaagggcgucaccgccgccugcccccacgccggcgccaaguccuucuacaagaaccucaucuggcucgucaagaagggcaacuccuaccccaagcucuccaaguccuacaucaacgacaagggcaaggagguccucguccucuggggcauccaccaccccuccaccuccgccgaccagcagucccucuaccagaacgccgacgccuacgucuucgucggcaccucccgcuacuccaagaaguucaagcccgagaucgccauccgccccaagguccgcgaccaggagggccgcaugaacuacuacuggacccucgucgagcccggcgacaagaucaccuucgaggccaccggcaaccucgucgucccccgcuacgccuucgccauggagcgcaacgccggcuccggcaucaucaucuccgacacccccguccacgacugcaacaccaccugccagacccccaagggcgccaucaacaccucccuccccuuccagaacauccaccccaucaccaucggcaagugccccaaguacgucaaguccaccaagcuccgccucgccaccggccuccgcaacguccccuccauccagucccgcggccucuucggcgccaucgccggcuucaucgagggcggcuggaccggcauggucgacggcugguacggcuaccaccaccagaacgagcagggcuccggcuacgccgccgaccucaaguccacccagaacgccaucgacgagaucaccaacaaggucaacuccgucaucgagaagaugaacacccaguucaccgccgucggcaaggaguucaaccaccucgagaagcgcaucgagaaccucaacaagaaggucgacgacggcuuccucgacaucuggaccuacaacgccgagcuccucguccuccucgagaacgagcgcacccucgacuaccacgacuccaacgucaagaaccucuacgagaagguccgcucccagcucaagaacaacgccaaggagaucggcaacggcugcuucgaguucuaccacaagugcgacaacaccugcauggaguccgucaagaacggcaccuacgacuaccccaaguacuccgaggaggccaagcucaaccgcgaggagaucgacggcgucaagcucgaguccacccgcaucuaccagauccucgccaucuacuccaccgucgccuccucccucguccucgucgucucccucggcgccaucuccuucuggaugugcuccaccggcucccuccagugccgcaucugcaucuga

SEQ ID NO: 102512 - RNA, 1701 nt, Artificial Sequence; identical to SEQ ID NO: 102511
  derived and/or modified CDS sequence (opt2) from hemagglutinin__InfluenzaA__ADX96517

SEQ ID NO: 102513 - RNA, 1701 nt, Artificial Sequence
  derived and/or modified CDS sequence (opt2) from hemagglutinin__InfluenzaA__ADX96527
augaaggccauccucgucguccuccucuacaccuucgccaccgccaacgccgacacccucugcaucggcuaccacgccaacaacuccaccgacaccgucgacaccguccucgagaagaacgucaccgucacccacuccgucaaccuccucgaggacaagcacaacggcaagcucugcaagcuccgcggcgucgccccccuccaccucggcaagugcaacaucgccggcuggauccucggcaaccccgagugcgagucccucuccaccgccuccuccugguccuacaucgucgagaccuccuccuccgacaacggcaccugcuaccccggcgacuucaucgacuacgaggagcuccgcgagcagcucuccuccgucuccuccuucgagcgcuucgagaucuuccccaagaccuccuccuggcccaaccacgacuccaacaagggcgucaccgccgccugcccccacgccggcgccaaguccuucuacaagaaccucaucuggcucgucaagaagggcaacuccuaccccaagcucuccaaguccuacaucaacgacaagggcaaggagguccucguccucuggggcauccaccaccccuccaccuccgccgaccagcagucccucuaccagaacgccgacgccuacgucuucgucggcaccucccgcuacuccaagaaguucaagcccgagaucgccauccgccccaagguccgcgaccaggagggccgcaugaacuacuacuggacccucgucgagcccggcgacaagaucaccuucgaggccaccggcaaccucgucgucccccgcuacgccuucgccauggagcgcaacgccggcuccggcaucaucaucuccgacacccccguccacgacugcaacaccaccugccagacccccaagggcgccaucaacaccucccuccccuuccagaacauccaccccaucaccaucggcaagugccccaaguacgucaaguccaccaagcuccgccucgccaccggccuccgcaacguccccuccauccagucccgcggccucuucggcgccaucgccggcuucaucgagggcggcuggaccggcauggucgacggcugguacggcuaccaccaccagaacgagcagggcuccggcuacgccgccgaccucaaguccacccagaacgccaucgacgagaucaccaacaaggucaacuccgucaucgagaagaugaacacccaguucaccgccgucggcaaggaguucaaccaccucgagaagcgcaucgagaaccucaacaagaaggucgacgacggcuuccucgacaucuggaccuacaacgccgagcuccucguccuccucgagaacgagcgcacccucgacuaccacgacuccaacgucaagaaccucuacgagaagguccgcucccagcucaagaacaacgccaaggagaucggcaacggcugcuucgaguucuuccacaagugcgacaacaccugcauggaguccgucaagaacggcaccuacgacuaccccaaguacuccgaggaggccaagcucaaccgcgaggagaucgacggcgucaagcucgaguccacccgcaucuaccagauccucgccaucuacuccaccgucgccuccucccucguccucgucgucucccucggcgccaucuccuucuggaugugcuccaacggcucccuccagugccgcaucugcaucuga

SEQ ID NO: 102514 - RNA, 1701 nt, Artificial Sequence; identical to SEQ ID NO: 98705
  derived and/or modified CDS sequence (opt2) from hemagglutinin__InfluenzaA__ADX96537

SEQ ID NO: 102515 - RNA, 1701 nt, Artificial Sequence; identical to SEQ ID NO: 98705
  derived and/or modified CDS sequence (opt2) from hemagglutinin__InfluenzaA__ADX96547

SEQ ID NO: 102516 - RNA, 1701 nt, Artificial Sequence; identical to SEQ ID NO: 99806
  derived and/or modified CDS sequence (opt2) from hemagglutinin__InfluenzaA__ADX96557

SEQ ID NO: 102517 - RNA, 1701 nt, Artificial Sequence; identical to SEQ ID NO: 98705
  derived and/or modified CDS sequence (opt2) from hemagglutinin__InfluenzaA__ADX96587

SEQ ID NO: 102518 - RNA, 1701 nt, Artificial Sequence; identical to SEQ ID NO: 98692
  derived and/or modified CDS sequence (opt2) from hemagglutinin__InfluenzaA__ADX96597

SEQ ID NO: 102519 - RNA, 1701 nt, Artificial Sequence; identical to SEQ ID NO: 98692
  derived and/or modified CDS sequence (opt2) from hemagglutinin__InfluenzaA__ADX96607

SEQ ID NO: 102520 - RNA, 1701 nt, Artificial Sequence
  derived and/or modified CDS sequence (opt2) from hemagglutinin__InfluenzaA__ADX96627
augaaggccauccucgucguccuccucuacaccuucgccaccgccaacgccgacacccucugcaucggcuaccacgccaacaacuccaccgacaccgucgacaccguccucgagaagaacgucaccgucacccacuccgucaaccuccucgaggacaagcacaacggcaagcucugcaagcuccgcggcgucgccccccuccaccucggcaagugcaacaucgccggcuggauccucggcaaccccgagugcgagucccucuccaccgccuccuccugguccuacaucgucgagaccuccuccuccgacaacggcaccugcuaccccggcgacuucaucgacuacgaggagcuccgcgagcagcucuccuccgucuccuccuucgagcgcuucgagaucuuccccaagaccuccuccuggcccaaccacgacuccaacaagggcgucaccgccgccugcccccacgccggcgccaaguccuucuacaagaaccucaucuggcucgucaagaagggcaacuccuaccccaagcucuccaaguccuacaucaacgacaagggcaaggagguccucguccucuggggcauccaccaccccuccaccuccgccgaccagcagucccucuaccagaacgccgacgccuacgucuucgucggcaccucccgcuacuccaagaaguucaagcccgagaucgccauccgccccaagguccgcgaccaggagggccgcaugaacuacuacuggacccucgucgagcccggcgacaagaucaccuucgaggccaccggcaaccucgucgucccccgcuacgccuucgccauggagaagaacgccggcuccggcaucaucaucuccgacacccccguccacgacugcaacaccaccugccagacccccaagggcgccaucaacaccucccuccccuuccagaacauccaccccaucaccaucggcaagugccccaaguacgucaaguccaccaagcuccgccucgccaccggccuccgcaacguccccuccauccagucccgcggccucuucggcgccaucgccggcuucaucgagggcggcuggaccggcauggucgacggcugguacggcuaccaccaccagaacgagcagggcuccggcuacgccgccgaccucaaguccacccagaacgccaucgacgagaucaccaacaaggucaacuccgucaucgagaagaugaacacccaguucaccgccgucggcaaggaguucaaccaccucgagaagcgcaucgagaaccucaacaagaaggucgacgacggcuuccucgacaucuggaccuacaacgccgagcuccucguccuccucgagaacgagcgcacccucgacuaccacgacuccaacgucaagaaccucuacgagaagguccgcucccagcucaagaacaacgccaaggagaucggcaacggcugcuucgaguucuaccacaagugcgacaacaccugcauggaguccgucaagaacggcaccuacgacuaccccaaguacuccgaggaggccaagcucaaccgcgaggagaucgacggcgucaagcucgaguccacccgcaucuaccagauccucgccaucuacuccaccgucgccuccucccucguccucgucgucucccucggcgccaucuccuucuggaugugcuccaccggcucccuccagugccgcaucugcaucuga

SEQ ID NO: 102521 - RNA, 1701 nt, Artificial Sequence; identical to SEQ ID NO: 99152
  derived and/or modified CDS sequence (opt2) from hemagglutinin__InfluenzaA__ADX96637

SEQ ID NO: 102522 - RNA, 1701 nt, Artificial Sequence; identical to SEQ ID NO: 98705
  derived and/or modified CDS sequence (opt2) from hemagglutinin__InfluenzaA__ADX96647

SEQ ID NO: 102523 - RNA, 1701 nt, Artificial Sequence; identical to SEQ ID NO: 98692
  derived and/or modified CDS sequence (opt2) from hemagglutinin__InfluenzaA__ADX96657

SEQ ID NO: 102524 - RNA, 1701 nt, Artificial Sequence; identical to SEQ ID NO: 98705
  derived and/or modified CDS sequence (opt2) from hemagglutinin__InfluenzaA__ADX96667

SEQ ID NO: 102525 - RNA, 1701 nt, Artificial Sequence
  derived and/or modified CDS sequence (opt2) from hemagglutinin__InfluenzaA__ADX96677
augaaggccauccucgucguccuccucuacaccuucgccaccgccaacgccgacacccucugcaucggcuaccacgccaacaacuccaccgacaccgucgacaccguccucgagaagaacgucaccgucacccacuccgucaaccuccucgaggacaagcacaacggcaagcucugcaagcuccgcggcgucgccccccuccaccucggcaagugcaacaucgccggcuggauccucggcaaccccgagugcgagucccucuccaccgccuccuccugguccuacaucgucgagaccuccuccuccgacaacggcaccugcuaccccggcgacuucaucgacuacgaggagcuccgcgagcagcucuccuccgucuccuccuucgagcgcuucgagaucuuccccaagaccuccuccuggcccaaccacgacuccaacaagggcgucaccgccgccugcccccacgccggcgccaaguccuucuacaagaaccucaucuggcucgucaagaagggcaacuccuaccccaagcucuccaaguccuacaucaacgacaagggcaaggagguccucguccucuggggcauccaccaccccuccaccuccgccgaccagcagucccucuaccagaacgccgacgccuacgucuucgucggcuccucccgcuacuccaagaaguucaagcccgagaucgccauccgccccaagguccgcgaccaggagggccgcaugaacuacuacuggaccgucgucgagcccggcgacaagaucaccuucgaggccaccggcaaccucgucgucccccgcuacgccuucgccauggagcgcaacgccggcuccggcaucaucaucuccgacacccccguccacgacugcaacaccaccugccagacccccaagggcgccaucaacaccucccuccccuuccacaacauccaccccaucaccaucggcaagugccccaaguacgucaaguccaccaagcuccgccucgccaccggccuccgcaacguccccuccauccagucccgcggccucuucggcgccaucgccggcuucaucgagggcggcuggaccggcauggucgacggcugguacggcuaccaccaccagaacgagcagggcuccggcuacgccgccgaccucaaguccacccagaacgccaucgacgagaucaccaacaaggucaacuccgucaucgagaagaugaacacccaguucaccgccgucggcaaggaguucaaccaccucgagaagcgcaucgagaaccucaacaagaaggucgacgacggcuuccucgacaucuggaccuacaacgccgagcuccucguccuccucgagaacgagcgcacccucgacuaccacgacuccaacgucaagaaccucuacgagaagguccgcucccagcucaagaacaacgccaaggagaucggcaacggcugcuucgaguucuaccacaagugcgacaacaccugcauggaguccgucaagaacggcaccuacgacuaccccaaguacuccgaggaggccaagcucaaccgcgaggagaucgacggcgucaagcucgaguccacccgcaucuaccagauccucgccaucuacuccaccgucgccuccucccucguccucgucgucucccucggcgccaucuccuucuggaugugcuccaacggcucccuccagugccgcaucugcaucuga

SEQ ID NO: 102526 - RNA, 1701 nt, Artificial Sequence
  derived and/or modified CDS sequence (opt2) from hemagglutinin__InfluenzaA__ADX96687
augaaggccauccucgucguccuccucuacaccuucgccaccgccaacgccgacacccucugcaucggcuaccacgccaacaacuccaccgacaccgucgacaccguccucgagaagaacgucaccgucacccacuccgucaaccuccucgaggacaagcacaacggcaagcucugcaagcuccgcggcgucgccccccuccaccucggcaagugcaacaucgccggcuggauccucggcaaccccgagugcgagucccucuccaccgccuccuccugguccuacaucgucgagaccuccuccuccgacaacggcaccugcuaccccggcgacuucaucgacuacgaggagcuccgcgagcagcucuccuccgucuccuccuucaagcgcuucgagaucuuccccaagaccuccuccuggcccaaccacgacuccaacaagggcgucaccgccgccugcccccacgccggcgccaaguccuucuacaagaaccucaucuggcucgucaagaagggcaacuccuaccccaagcucuccaaguccuacaucaacgacaagggcaaggagguccucguccucuggggcauccaccaccccuccaccuccgccgaccagcagucccucuaccagaacgccgacgccuacgucuucgucggcaccucccgcuacuccaagaaguucaagcccgagaucgccauccgccccaagguccgcgaccaggagggccgcaugaacuacuacuggacccucgucgagcccggcgacaagaucaccuucgaggccaccggcaaccucgucgucccccgcuacgccuucgccauggagcgcaacgccggcuccggcaucaucaucuccgacacccccgucuacgacugcaacaccaccugccagacccccaagggcgccaucaacaccucccuccccuuccagaacauccaccccaucaccaucggcaagugccccaaguacgucaaguccaccaagcuccgccucgccaccggccuccgcaacguccccuccauccagucccgcggccucuucggcgccaucgccggcuucaucgagggcggcuggaccggcauggucgacggcugguacggcuaccaccaccagaacgagcagggcuccggcuacgccgccgaccucaaguccacccagaacgccaucgacgagaucaccaacaaggucaacuccgucaucgagaagaugaacacccaguucaccgccgucggcaaggaguucaaccaccucgagaagcgcaucgagaaccucaacaagaaggucgacgacggcuuccucgacaucuggaccuacaacgccgagcuccucguccuccucgagaacgagcgcacccucgacuaccacgacuccaacgucaagaaccucuacgagaagguccgcucccagcucaagaacaacgccaaggagaucggcaacggcugcuucgaguucuaccacaagugcgacaacaccugcauggaguccgucaagaacggcaccuacgacuaccccaaguacuccgaggaggccaagcucaaccgcgaggagaucgacggcgucaagcucgaguccacccgcaucuaccagauccucgccaucuacuccaccgucgccuccucccucguccucgucgucucccucggcgccaucuccuucuggaugugcuccaacggcucccuccagugccgcaucugcaucuga

SEQ ID NO: 102527 - RNA, 1701 nt, Artificial Sequence; identical to SEQ ID NO: 98705
  derived and/or modified CDS sequence (opt2) from hemagglutinin__InfluenzaA__ADX96697

SEQ ID NO: 102528 - RNA, 1701 nt, Artificial Sequence
  derived and/or modified CDS sequence (opt2) from hemagglutinin__InfluenzaA__ADX96707
augaaggccauccucgucguccuccucuacaccuucgccaccgccaacgccgacacccucugcaucggcuaccacgccaacaacuccaccgacaccgucgacaccguccucgagaagaacgucaccgucacccacuccgucaaccuccucgaggacaagcacaacggcaagcucugcaagcuccgcggcgucgccccccuccaccucggcaagugcaacaucgccggcuggauccucggcaaccccgagugcgagucccucuccaccgccuccuccugguccuacaucgucgagaccuccuccuccgacaacggcaccugcuaccccggcgacuucaucgacuacgaggagcuccgcgagcagcucuccuccgucuccuccuucgagcgcuucgagaucuuccccaagaccuccuccuggcccaaccacgacuccaacaagggcgucaccgccgccugcccccacgccggcgccaaguccuucuacaagaaccucaucuggcucgucaagaagggcaacuccuaccccaagcucuccaaguccuacaucaacgacaagggcaaggagguccucguccucuggggcauccaccaccccuccaccuccgccgaccagcagucccucuaccagaacgccgacgccuacgucuucgucggcaccucccgcuacuccaagaaguucaagcccgagaucgccauccgccccaagguccgcgaccaggagggccgcaugaacuacuacuggacccucgucgagcccggcgacaagaucaccuucgaggccaccggcaaccucgucgucccccgcuacgccuucgccauggagcgcaacgccggcuccggcaucaucaucuccgacacccccguccacgacugcgacaccaccugccagacccccaagggcgccaucaacaccucccuccccuuccagaacauccaccccaucaccaucggcaagugccccaaguacgucaaguccaccaagcuccgccucgccaccggccuccgcaacguccccuccauccagucccgcggccucuucggcgccaucgccggcuucaucgagggcggcuggaccggcauggucgacggcugguacggcuaccaccaccagaacgagcagggcuccggcuacgccgccgaccucaaguccacccagaacgccaucgacaagaucaccaacaaggucaacuccgucaucgagaagaugaacacccaguucaccgccgucggcaaggaguucaaccaccucgagaagcgcaucgagaaccucaacaagaaggucgacgacggcuuccucgacaucuggaccuacaacgccgagcuccucguccuccucgagaacgagcgcacccucgacuaccacgacuccaacgucaagaaccucuacgagaagguccgcucccagcucaagaacaacgccaaggagaucggcaacggcugcuucgaguucuaccacaagugcgacaacaccugcauggaguccgucaagaacggcaccuacgacuaccccaaguacuccgaggaggccaagcucaaccgcgaggagaucgacggcgucaagcucgaguccacccgcaucuaccagauccucgccaucuacuccaccgucgccuccucccucguccucgucgucucccucggcgccaucuccuucuggaugugcuccaccggcucccuccagugccgcaucugcaucuga

SEQ ID NO: 102529 - RNA, 1701 nt, Artificial Sequence; identical to SEQ ID NO: 99865
  derived and/or modified CDS sequence (opt2) from hemagglutinin__InfluenzaA__ADX96727

SEQ ID NO: 102530 - RNA, 1701 nt, Artificial Sequence
  derived and/or modified CDS sequence (opt2) from hemagglutinin__InfluenzaA__ADX96737
augaaggccauccucgucguccuccucuacaccuucgccaccgccaacgccgacacccucugcaucggcuaccacgccaacaacuccaccgacaccgucgacaccguccucgagaagaacgucaccgucacccacuccgucaaccuccucgaggacaagcacaacggcaagcucugcaagcuccgcggcgucgccccccuccaccucggcaagugcaacaucgccggcuggauccucggcaaccccgagugcgagucccucuccaccgccuccuccugguccuacaucgucgagaccuccuccuccgacaacggcaccugcuaccccggcgacuucaucgacuacgaggagcuccgcgagcagcucuccuccgucuccuccuucgagcgcuucgagaucuuccccaagaccuccuccuggcccaaccacgacuccaacaagggcgucaccgccgccugcccccacgccggcgccaaguccuucuacaagaaccucaucuggcucgucaagaagggcaacuccuaccccaagcucuccaaguccuacaucaacgacaagggcaaggagguccucguccucuggggcauccaccaccccuccaccuccgccgaccagcagucccucuaccagaacgccgacgccuacgucuucgucggcaccucccgcuacuccaagaaguucaagcccgagaucgccauccgccccaaggucaaggagcaggagggccgcaugaacuacuacuggacccucgucgagcccggcgacaagaucaccuucgaggccaccggcaaccucgucgucccccgcuacgccuucgccauggagcgcaaggccggcuccggcaucaucaucuccgacacccccguccacgacugcaacaccaccugccagacccccaagggcgccaucaacaccucccuccccuuccagaacauccacuccaucaccaucggcaagugccccaaguacgucaaguccaccaagcuccgccucgccaccggccuccgcaacguccccuccauccagucccgcggccucuucggcgccaucgccggcuucaucgagggcggcuggaccggcauggucgacggcugguacggcuaccaccaccagaacgagcagggcuccggcuacgccgccgaccucaaguccacccagaacgccaucgacgagaucaccaacaaggucaacuccgucaucgagaagaugaacacccaguucaccgccgucggcaaggaguucaaccaccucgagaagcgcaucgagaaccucaacaagaaggucgacgacggcuuccucgacaucuggaccuacaacgccgagcuccucguccuccucgagaacgagcgcacccucgacuaccacgacuccaacgucaagaaccucuacgagaagguccgcucccagcucaagaacaacgccaaggagaucggcaacggcugcuucgaguucuaccacaagugcgacaacaccugcauggaguccgucaagaacggcaccuacgacuaccccaaguacuccgaggaggccaagcucaaccgcgaggagaucgacggcgucaagcucgaguccacccgcaucuaccagauccucgccaucuacuccaccgucgccuccucccucguccucgucaucucccucggcgccaucuccuucuggaugugcuccaccggcucccuccagugccgcaucugcaucuga

SEQ ID NO: 102531 - RNA, 1701 nt, Artificial Sequence; identical to SEQ ID NO: 98705
  derived and/or modified CDS sequence (opt2) from hemagglutinin__InfluenzaA__ADX96747

SEQ ID NO: 102532 - RNA, 1701 nt, Artificial Sequence
  derived and/or modified CDS sequence (opt2) from hemagglutinin__InfluenzaA__ADX96757
augaaggccauccucgucguccuccucuacaccuucgccaccgccaacgccgacacccucugcaucggcuaccacgccaacaacuccaccgacaccgucgacaccguccucgagaagaacgucaccgucacccacuccgucaaccuccucgaggacaagcacaacggcaagcucugcaagcuccgcggcgucgccccccuccaccucggcaagugcaacaucgccggcuggauccucggcaaccccgagugcgagucccucuccaccgccuccuccugguccuacaucgucgagaccuccuccuccggcaacggcaccugcuaccccggcgacuucaucgacuacgaggagcuccgcgagcagcucuccuccgucuccuccuucgagcgcuucgagaucuuccccaagaccuccuccuggcccaaccacgacuccaacaagggcgucaccgccgccugcccccacgccggcgccaaguccuucuacaagaaccucaucuggcucgucaagaagggcaacuccuaccccaagcucuccaaguccuacaucaacgacaagggcaaggagguccucguccucuggggcauccaccaccccuccaccuccgccgaccagcagucccucuaccagaacgccgacgccuacgucuucgucggcaccucccgcuacuccaagaaguucaagcccgagaucgccauccgccccaagguccgcgaccaggagggccgcaugaacuacuacuggacccucgucguccccggcgacaagaucaccuucgaggccaccggcaaccucgucgucccccgcuacgccuucgccauggagcgcaacgccggcuccggcaucaucaucuccgacacccccguccacgacugcaacaccaccugccagacccccaagggcgccaucaacaccucccuccccuuccagaacauccaccccaucaccaucggcaagugccccaaguacgucaaguccaccaagcuccgccucgccaccggccuccgcaacguccccuccauccagucccgcggccucuucggcgccaucgccggcuucaucgagggcggcuggaccggcauggucgacggcugguacggcuaccaccaccagaacgagcagggcuccggcuacgccgccgaccucaaguccacccagaacgccaucgacgagaucaccaacaaggucaacuccgucaucgagaagaugaacacccaguucaccgccgucggcaaggaguucaaccaccucgagaagcgcaucgagaaccucaacaagaaggucgacgacggcuuccucgacaucuggaccuacaacgccgagcuccucguccuccucgagaacgagcgcacccucgacuaccacgacuccaacgucaagaaccucuacgagaagguccgcucccagcucaagaacaacgccaaggagaucggcaacggcugcuucgaguucuaccacaagugcgacaacaccugcauggaguccgucaagaacggcaccuacgacuaccccaaguacuccgaggaggccaagcucaaccgcgaggagaucgacggcgucaagcucgaguccacccgcaucuaccagauccucgccaucuacuccaccgucgccuccucccucguccucgucgucucccucggcgccaucuccuucuggaugugcuccaccggcucccuccagugccgcaucugcaucuga

SEQ ID NO: 102533 - RNA, 1701 nt, Artificial Sequence
  derived and/or modified CDS sequence (opt2) from hemagglutinin__InfluenzaA__ADX96767
augaaggccauccucgucguccuccucuacaccuucgccaccgccaacgccgacacccucugcaucggcuaccacgccaacaacuccaccgacaccgucgacaccguccucgagaagaacgucaccgucacccacuccgucaaccuccucgaggacaagcacaacggcaagcucugcaagcuccgcggcgucgccccccuccaccucggcaagugcaacaucgccggcuggauccucggcaaccccgagugcgagucccucuccaccgccuccuccugguccuacaucgucgagaccuccuccuccgacaacggcaccugcuaccccggcgacuucaucgacuacgaggagcuccgcgagcagcucuccuccgucuccuccuucgagcgcuucgagaucuuccccaagaccuccuccuggcccaaccacgacuccaacaagggcgucaccgccgccugcccccacgccggcgccaaguccuucuacaagaaccucaucuggcucgucaagaagggcaacuccuaccccaagcucuccaaguccuacaucaacgacaagggcaaggagguccucguccucuggggcauccaccaccccuccaccuccgccgaccagcagucccucuaccagaacgccgacgccuacgucuucgucggcaccucccgcuacuccaagaaguucaagcccgagaucgccauccgccccaagguccgcgaccaggagggccgcaugaacuacuacuggacccucgucgaguccggcgacaagaucaccuucgaggccaccggcaaccucgucgucccccgcuacgccuucgccauggagcgcaacgccggcuccggcaucaucaucuccgacacccccguccacgacugcaacaccaccugccagacccccaagggcgccaucaacaccucccuccccuuccagaacauccaccccaucaccaucggcaagugccccaaguacgucaaguccaccaagcuccgccucgccaccggccuccgcaacguccccuccauccagucccgcggccucuucggcgccaucgccggcuucaucgagggcggcuggaccggcauggucgacggcugguacggcuaccaccaccagaacgagcagggcuccggcuacgccgccgaccucaaguccacccagaacgccaucgacgagaucaccaacaaggucaacuccgucaucgagaagaugaacacccaguucaccgccgucggcaaggaguucaaccaccucgagaagcgcaucgagaaccucaacaagaaggucgacgacggcuuccucgacaucuggaccuacaacgccgagcuccucguccuccucgagaacgagcgcacccucgacuaccacgacuccaacgucaagaagcucuacgagaagguccgcucccagcucaagaacaacgccaaggagaucggcaacggcugcuucgaguucuaccacaagugcgacaacaccugcauggaguccgucaagaacggcaccuacgacuaccccaaguacuccgaggaggccaagcucaaccgcgaggagaucgacggcgucaagcucgaguccacccgcaucuaccagauccucgccaucuacuccaccgucgccuccucccucguccucgucgucucccucggcgccaucuccuucuggaugugcuccaccggcucccuccagugccgcaucugcaucuga

SEQ ID NO: 102534 - RNA, 1701 nt, Artificial Sequence
  derived and/or modified CDS sequence (opt2) from hemagglutinin__InfluenzaA__ADX96777
augaaggccauccucgucguccuccucuacaccuucgccaccgccaacgccgacacccucugcaucggcuaccacgccaacaacuccaccgacaccgucgacaccguccucgagaagaacgucaccgucacccacuccgucaaccuccucgaggacaagcacaacggcaagcucugcaagcuccgcggcgucgccccccuccaccucggcaagugcaacaucgccggcuggauccucggcaaccccgagugcgagucccucuccaccgccuccuccugguccuacaucgucgagaccuccuccuccgacaacggcaccugcuaccccggcgacuucaucgacuacgaggagcuccgcgagcagcucuccuccgucuccuccuucgagcgcuucgagaucuuccccaagaccuccuccuggcccaaccacgacuccaacaagggcgucaccgccgccugcccccacgccggcgccaaguccuucuacaagaaccucaucuggcucgucaagaagggcaacuccuaccccaagcucuccaaguccuacaucaacgacaagggcaaggagguccucguccucuggggcauccaccaccccuccaccuccgccgaccagcagucccucuaccagaacgccgacgccuacgucuucgucggcaccucccgcuacuccaagaaguucaagcccgagaucgccauccgccccaagguccgcgaccaggagggccgcaugaacuacuacuggacccucgucguccccggcgacaagaucaccuucgaggccaccggcaaccucgucgucccccgcuacgccuucgccauggagcgcaacgccggcuccggcaucaucaucuccgacacccccguccacgacugcaacaccaccugccagacccccaagggcgccaucaacaccucccuccccuuccagaacauccacuccaucaccaucggcaagugccccaaguacgucaaguccaccaagcuccgccucgccaccggccuccgcaacguccccuccauccagucccgcggccucuucggcgccaucgccggcuucaucgagggcggcuggaccggcauggucgacggcugguacggcuaccaccaccagaacgagcagggcuccggcuacgccgccgaccucaaguccacccagaacgccaucgacgagaucaccaacaaggucaacuccgucaucgagaagaugaacacccaguucaccgccgucggcaaggaguucaaccaccucgagaagcgcaucgagaaccucaacaagaaggucgacgacggcuuccucgacaucuggaccuacaacgccgagcuccucguccuccucgagaacgagcgcacccucgacuaccacgacuccaacgucaagaaccucuacgagaagguccgcucccagcucaagaacaacgccaaggagaucggcaacggcugcuucgaguucuaccacaagugcgacaacaccugcauggaguccgucaagaacggcaccuacgacuaccccaaguacuccgaggaggccaagcucaaccgcgaggagaucgacggcgucaagcucgaguccacccgcaucuaccagauccucgccaucuacuccaccgucgccuccucccucguccucgucgucucccucggcgccaucuccuucuggaugugcuccaacggcucccuccagugccgcaucugcaucuga

SEQ ID NO: 102535 - RNA, 1701 nt, Artificial Sequence; identical to SEQ ID NO: 98705
  derived and/or modified CDS sequence (opt2) from hemagglutinin__InfluenzaA__ADX96787

SEQ ID NO: 102536 - RNA, 1701 nt, Artificial Sequence; identical to SEQ ID NO: 101932
  derived and/or modified CDS sequence (opt2) from hemagglutinin__InfluenzaA__ADX96797

SEQ ID NO: 102537 - RNA, 1701 nt, Artificial Sequence
  derived and/or modified CDS sequence (opt2) from hemagglutinin__InfluenzaA__ADX96807
augaaggccauccucgucguccuccucuacaccuucgccaccgccaacgccgacacccucugcaucggcuaccacgccaacaacuccaccgacaccgucgacaccguccucgagaagaacgucaccgucacccacuccgucaacauccucgaggacaagcacaacggcaagcucugcaagcuccgcggcgucgccccccuccaccucggcaagugcaacaucgccggcuggauccucggcaaccccgagugcgagucccucuccaccgccuccuccugguccuacaucgucgagaccuccuccuccgacaacggcaccugcuaccccggcgacuucaucgacuacgaggagcuccgcgagcagcucuccuccgucuccuccuucgagcgcuucgagaucuuccccaagaccuccuccuggcccaaccacgacuccaacaagggcgucaccgccgccugcccccacgccggcgccaaguccuucuacaagaaccucaucuggcucgucaagaagggcaacuccuaccccaagcucuccaaguccuacaucaacgacaagggcaaggagguccucguccucuggggcauccaccaccccuccaccuccgccgaccagcagucccucuaccagaacgccgacgccuacgucuucgucggcuccucccgcuucuccaagaaguucaagcccgagaucgccauccgccccaagguccgcgaccaggagggccgcaugaacuacuacuggacccucgucgagcccggcgacaagaucaccuucgaggccaccggcaaccucgucgucccccgcuacgccuucgccauggagcgcaacgccggcuccggcaucaucaucuccgacacccccguccacgacugcaacaccaccugccagacccccaagggcgccaucaacaccucccuccccuuccagaacauccaccccaucaccaucggcaagugccccaaguacgucaaguccaccaagcuccgccucgccaccggccuccgcaacguccccuccauccagucccgcggccucuucggcgccaucgccggcuucaucgagggcggcuggaccggcauggucgacggcugguacggcuaccaccaccagaacgagcagggcuccggcuacgccgccgaccucaaguccacccagaacgccaucgacgagaucaccaacaaggucaacuccgucaucgagaagaugaacacccaguucaccgccgucggcaaggaguucaaccaccucgagaagcgcaucgagaaccucaacaagaaggucgacgacggcuuccucgacaucuggaccuacaacgccgagcuccucguccuccucgagaacgagcgcacccucgacuaccacgacuccaacgucaagaaccucuacgagaagguccgcucccagcucaagaacaacgccaaggaggucggcaacggcugcuucgaguucuaccacaagugcgacaacaccugcauggaguccgucaagaacggcaccuacgacuaccccaaguacuccgaggaggccaagcucaaccgcgaggagaucgacggcgucaagcucgaguccacccgcaucuaccagauccucgccaucuacuccaccgucgccuccucccucguccucgucgucucccucggcgccaucuccuucuggaugugcuccaacggcucccuccagugccgcaucugcaucuga

SEQ ID NO: 102538 - RNA, 1701 nt, Artificial Sequence; identical to SEQ ID NO: 98692
  derived and/or modified CDS sequence (opt2) from hemagglutinin__InfluenzaA__ADX96817

SEQ ID NO: 102539 - RNA, 1701 nt, Artificial Sequence
  derived and/or modified CDS sequence (opt2) from hemagglutinin__InfluenzaA__ADX96837
augaaggccauccucgucguccuccucuacaccuucgccaccgccaacgccgacacccucugcaucggcuaccacgccaacaacuccaccgacaccgucgacaccguccucgagaagaacgucaccgucacccacuccgucaacauccucgaggacaagcacaacggcaagcucugcaagcuccgcggcgucgccccccuccaccucggcaagugcaacaucgccggcuggauccucggcaaccccgagugcgagucccucuccaccgccuccuccugguccuacaucgucgagaccuccuccuccgacaacggcaccugcuaccccggcgacuucaucgacuacgaggagcuccgcgagcagcucuccuccgucuccuccuucgagcgcuucgagaucuuccccaagaccuccuccuggcccaaccacgacuccaacaagggcgucaccgccgccugccccuacgccggcgccaaguccuucuacaagaaccucaucuggcucgucaagaagggcaacuccuaccccaagcucuccaaguccuacaucaacgacaagggcaaggagguccucguccucuggggcauccaccaccccuccaccuccgccgaccagcagucccucuaccagaacgccgacgccuacgucuucgucggcuccucccgcuacuccaagaaguucaagcccgagaucgccauccgccccaagguccgcgaccaggagggccgcaugaacuacuacuggacccucgucgagcccggcgacaagaucaccuucgaggccaccggcaaccucgucgucccccgcuacgccuucgccauggagcgcaacgccggcuccggcaucaucaucuccgacacccccguccacgacugcaacaccaccugccagacccccaagggcgccaucaacaccucccuccccuuccagaacauccaccccaucaccaucggcaagugccccaaguacgucaaguccaccaagcuccgccucgccaccggccuccgcaacguccccuccauccagucccgcggccucuucggcgccaucgccggcuucaucgagggcggcuggaccggcauggucgacggcugguacggcuaccaccaccagaacgagcagggcuccggcuacgccgccgaccucaaguccacccagaacgccaucgacgagaucaccaacaaggucaacuccgucaucgagaagaugaacacccaguucaccgccgucggcaaggaguucaaccaccucgagaagcgcaucgagaaccucaacaagaaggucgacgacggcuuccucgacaucuggaccuacaacgccgagcuccucguccuccucgagaacgagcgcacccucgacuaccacgacuccaacgucaagaaccucuacgagaagguccgcucccagcucaagaacaacgccaaggaggucggcaacggcugcuucgaguucuaccacaagugcgacaacaccugcauggaguccgucaagaacggcaccuacgacuaccccaaguacuccgaggaggccaagcucaaccgcgaggagaucgacggcgucaagcucgaguccacccgcaucuaccagauccucgccaucuacuccaccgucgccuccucccucguccucgucgucucccucggcgccaucuccuucuggaugugcuccaccggcucccuccagugccgcaucugcaucuga

SEQ ID NO: 102540 - RNA, 1701 nt, Artificial Sequence; identical to SEQ ID NO: 98705
  derived and/or modified CDS sequence (opt2) from hemagglutinin__InfluenzaA__ADX96847

SEQ ID NO: 102541 - RNA, 1701 nt, Artificial Sequence; identical to SEQ ID NO: 98705
  derived and/or modified CDS sequence (opt2) from hemagglutinin__InfluenzaA__ADX96857

SEQ ID NO: 102542 - RNA, 1701 nt, Artificial Sequence; identical to SEQ ID NO: 98885
  derived and/or modified CDS sequence (opt2) from hemagglutinin__InfluenzaA__ADX96867

SEQ ID NO: 102543 - RNA, 1701 nt, Artificial Sequence; identical to SEQ ID NO: 101642
  derived and/or modified CDS sequence (opt2) from hemagglutinin__InfluenzaA__ADX96877

SEQ ID NO: 102544 - RNA, 1701 nt, Artificial Sequence
  derived and/or modified CDS sequence (opt2) from hemagglutinin__InfluenzaA__ADX96897
augaaggccauccucgucguccuccucuacaccuucgccaccgccaacgccgacacccucugcaucggcuaccacgccaacaacuccaccgacaccgucgacaccguccucgagaagaacgucaccgucacccacuccgucaaccuccucgaggacaagcacaacggcaagcucugcaagcuccgcggcgucgccccccuccaccucggcaagugcaacaucgccggcuggauccucggcaaccccgagugcgagucccucuccaccgccuccuccugguccuacaucgucgagaccuccuccuccgacaacggcaccugcuaccccggcgacuucaucgacuacgaggagcuccgcgagcagcucuccuccgucuccuccuucgagcgcuucgagaucuuccccaagaccuccuccuggcccaaccacgacuccaacaagggcgucaccgccgccugcccccacgccggcgccaaguccuucuacaagaaccucaucuggcucgucaagaagggcaacuccuaccccaagcucuccaaguccuacaucaacgacaagggcaaggagguccucguccucuggggcauccaccaccccuccaccuccgccgaccagcagucccucuaccagaacgccgacgccuacgucuucgucggcaccucccgcuacuccaagaaguucaagcccgagaucgccauccgccccaagguccgcgaccaggagggccgcaugaacuacuacuggacccucgucgagcccggcgacaagaucaccuucgaggccaccggcaaccucgucgucccccgcuacgccuucgccauggagcgcaacgccggcuccggcaucaucaucuccgacacccccauccacgacugcaacaccaccugccagacccccaagggcgccaucaacaccucccuccccuuccagaacauccaccccaucaccaucggcaagugccccaaguacgucaaguccaccaagcuccgccucgccaccggccuccgcaacguccccuccauccagucccgcggccucuucggcgccaucgccggcuucaucgagggcggcuggaccggcauggucgacggcugguacggcuaccaccaccagaacgagcagggcuccggcuacgccgccgaccucaaguccacccagaacgccaucgacaagaucaccaacaaggucaacuccgucaucgagaagaugaacacccaguucaccgccgucggcaaggaguucaaccaccucgagaagcgcaucgagaaccucaacaagaaggucgacgacggcuuccucgacaucuggaccuacaacgccgagcuccucguccuccucgagaacgagcgcacccucgacuaccacgacuccaacgucaagaaccucuacgagaagguccgcucccagcucaagaacaacgccaaggagaucggcaacggcugcuucgaguucuaccacaagugcgacaacaccugcauggaguccgucaagaacggcaccuacgacuaccccaaguacuccgaggaggccaagcucaaccgcgaggagaucgacggcgucaagcucgaguccacccgcaucuaccagauccucgccaucuacuccaccgucgccuccucccucguccucgucgucucccucggcgccaucuccuucuggaugugcuccaacggcucccuccagugccgcaucugcaucuga

SEQ ID NO: 102545 - RNA, 1701 nt, Artificial Sequence
  derived and/or modified CDS sequence (opt2) from hemagglutinin__InfluenzaA__ADX96907
augaaggccauccucgucguccuccucuacaccuucgccaccgccaacgccgacacccucugcaucggcuaccacgccaacaacuccaccgacaccgucgacaccguccucgagaagaacgucaccgucacccacuccgucaaccuccucgaggacaagcacuccggcaagcucugcaagcuccgcggcgucgccccccuccaccucggcaagugcaacaucgccggcuggauccucggcaaccccgagugcgagucccucuccaccgccuccuccugguccuacaucgucgagaccuccuccuccgacaacggcaccugcuaccccggcgacuucaucgacuacgaggagcuccgcgagcagcucuccuccgucuccuccuucgagcgcuucgagaucuuccccaagaccuccuccuggcccaaccacgacuccuccaagggcgucaccgccgccugcccccacgccggcgccaaguccuucuacaagaaccucaucuggcucgucaagaagggcaacuccuaccccaagcucuccaaguccuacaucaacgacaagggcaaggagguccucguccucuggggcauccaccaccccuccaccuccgccgaccagcagucccucuaccagaacgccgacgccuacgucuucgucggcaccucccgcuacuccaagaaguucaagcccgagaucgccauccgccccaagguccgcgaccaggagggccgcaugaacuacuacuggacccucgucgagcccggcgacaagaucaccuucgaggccaccggcaaccucgucgucccccgcuacgccuucgccauggagcgcaacgccggcuccggcaucaucaucuccgacacccccguccacgacugcaacaccaccugccagacccccaagggcgccaucaacaccucccuccccuuccagaacauccaccccaucaccaucggcaagugccccaaguacgucaaguccaccaagcuccgccucgccaccggccuccgcaacguccccuccauccagucccgcggccucuucggcgccaucgccggcuucaucgagggcggcuggaccggcauggucgacggcugguacggcuaccaccaccagaacgagcagggcuccggcuacgccgccgaccucaaguccacccagaacgccaucgacaagaucaccaacaaggucaacuccgucaucgagaagaugaacacccaguucaccgccgucggcaaggaguucaaccaccucgagaagcgcaucgagaaccucaacaagaaggucgacgacggcuuccucgacaucuggaccuacaacgccgagcuccucguccuccucgagaacgagcgcacccucgacuaccacgacuccaacgucaagaaccucuacgagaagguccgcucccagcucaagaacaacgccaaggagaucggcaacggcugcuucgaguucuaccacaagugcgacaacaccugcauggaguccgucaagaacggcaccuacgacuaccccaaguacuccgaggaggccaagcucaaccgcgaggagaucgacggcgucaagcucgaguccacccgcaucuaccagauccucgccaucuacuccaccgucgccuccucccucguccucgucgucucccucggcgccaucuccuucuggaugugcuccaacggcucccuccagugccgcaucugcaucuga

SEQ ID NO: 102546 - RNA, 1701 nt, Artificial Sequence
  derived and/or modified CDS sequence (opt2) from hemagglutinin__InfluenzaA__ADX96927
augaaggccauccucgucguccuccucuacaccuucgccaccgccaacgccgacacccucugcaucggcuaccacgccaacaacuccaccgacaccgucgacacccuccucgagaagaacgucaccgucacccacuccgucaaccuccucgaggacaagcacaacggcaagcucugcaagcuccgcggcgucgccccccuccaccucggcaagugcaacaucgccggcuggauccucggcaaccccgagugcgagucccucuccaccgccuccuccugguccuacaucgucgagaccuccuccuccgacaacggcaccugcuaccccggcgacuucaucgacuacgaggagcuccgcgagcagcucuccuccgucuccuccuucgagcgcuucgagaucuuccccaagaccuccuccuggcccaaccacgacuccaacaagggcgucaccgccgccugcccccacgccggcgccaaguccuucuacaagaaccucaucuggcucgucaagaagggcaacuccuaccccaagcucuccaaguccuacaucaacgacaagggcaaggagguccucguccucuggggcauccaccaccccuccaccuccgccgaccagcagucccucuaccagaacgccgacgccuacgucuucgucggcaccucccgcuacuccaagaaguucaagcccgagaucgccauccgccccaagguccgcgaccaggagggccgcaugaacuacuacuggacccucgucgagcccggcgacaagaucaccuucgaggccaccggcaaccucgucgucccccgcuacgccuucgccauggaccgcaacgccggcuccggcaucaucaucuccgacacccccguccacgacugcaacaccaccugccagacccccaagggcgccaucaacaccucccuccccuuccagaacauccaccccaucaccaucggcaagugccccaaguacgucaaguccaccaagcuccgccucgccaccggccuccgcaacguccccuccauccagucccgcggccucuucggcgccaucgccggcuucaucgagggcggcuggaccggcauggucgacggcugguacggcuaccaccaccagaacgagcagggcuccggcuacgccgccgaccucaaguccacccagaacgccaucgacgagaucaccaacaaggucaacuccgucaucgagaagaugaacacccaguucaccgccgucggcaaggaguucaaccaccucgagaagcgcaucgagaaccucaacaagaaggucgacgacggcuuccucgacaucuggaccuacaacgccgagcuccucguccuccucgagaacgagcgcacccucgacuaccacgacuccaacgucaagaaccucuacgagaagguccgcucccagcucaagaacaacgccaaggagaucggcaacggcugcuucgaguucuaccacaagugcgacaacaccugcauggaguccgucaagaacggcaccuacgacuaccccaaguacuccgaggaggccaagcucaaccgcgaggagaucgacggcgucaagcucgaguccacccgcaucuaccagauccucgccaucuacuccaccgucgccuccucccucguccucgucgucucccucggcgccaucuccuucuggaugugcuccaacggcucccuccagugccgcaucugcaucuga

SEQ ID NO: 102547 - RNA, 1701 nt, Artificial Sequence; identical to SEQ ID NO: 100125
  derived and/or modified CDS sequence (opt2) from hemagglutinin__InfluenzaA__ADX96937

SEQ ID NO: 102548 - RNA, 1701 nt, Artificial Sequence; identical to SEQ ID NO: 98692
  derived and/or modified CDS sequence (opt2) from hemagglutinin__InfluenzaA__ADX96947

SEQ ID NO: 102549 - RNA, 1701 nt, Artificial Sequence; identical to SEQ ID NO: 99869
  derived and/or modified CDS sequence (opt2) from hemagglutinin__InfluenzaA__ADX96957

SEQ ID NO: 102550 - RNA, 1701 nt, Artificial Sequence; identical to SEQ ID NO: 99018
  derived and/or modified CDS sequence (opt2) from hemagglutinin__InfluenzaA__ADX96967

SEQ ID NO: 102551 - RNA, 1701 nt, Artificial Sequence; identical to SEQ ID NO: 98885
  derived and/or modified CDS sequence (opt2) from hemagglutinin__InfluenzaA__ADX96977

SEQ ID NO: 102552 - RNA, 1701 nt, Artificial Sequence
  derived and/or modified CDS sequence (opt2) from hemagglutinin__InfluenzaA__ADX96987
augaaggccauccucgucguccuccucuacaccuucgccaccgccaacgccgacacccucugcaucggcuaccacgccaacaacuccaccgacaccgucgacaccguccucgagaagaacgucaccgucacccacuccgucaacauccucgaggacaagcacaacggcaagcucugcaagcuccgcggcgucgccccccuccaccucggcaagugcaacaucgccggcuggauccucggcaaccccgagugcgagucccucuccaccgccuccuccugguccuacaucgucgagaccuccuccuccgacaacggcaccugcuaccccggcgacuucaucgacuacgaggagcuccgcgagcagcucuccuccgucuccuccuucgagcgcuucgagaucuuccccaagaccuccuccuggcccaaccacgacuccaacaagggcgucaccgccgccugcccccacgccggcgccaaguccuucuacaagaaccucaucuggcucgucaagaagggcaacuccuaccccaagcucuccaaguccuacaucaacgacaagggcaaggagguccucguccucuggggcauccaccaccccuccaccuccgccgaccagcagucccucuaccagaacgccgacgccuacgucuucgucggcuccucccgcuacuccaagaaguucaagcccgagaucgccauccgccccaagguccgcgaccaggagggccgcaugaacuacuacuggacccucgucgagcccggcgacaagaucaccuucgaggccaccggcaaccucgucgucccccgcuacgccuucgccauggagcgcaacgccggcuccggcaucaucaucuccgacacccccguccacgacugcaacaccaccugccagacccccaagggcgccaucaacaccucccuccccuuccagaacauccaccccaucaccaucggcaagugccccaaguacgucaaguccaccaagcuccgccucgccaccggccuccgcaacguccccuccauccagucccgcggccucuucggcgccaucgccggcuucaucgagggcggcuggaccggcauggucgacggcugguacggcuaccaccaccagaacgagcagggcuccggcuacgccgccgaccucaaguccacccagaacgccaucgacgagaucaccaacaaggucaacuccgucaucgagaagaugaacacccaguucaccgccgucggcaaggaguucaaccaccucgagaagcgcaucgagaaccucaacaagaaggucgacgacggcuuccucgacaucuggaccuacaacgccgagcuccucguccuccucgagaacgagcgcacccucgacuaccacgacuccaacgucaagaaccucuacgagaagguccgcucccagcucaagaacaacgccaaggagaucggcaacggcugcuucgaguucuaccacaagugcgacaacaccugcauggaguccgucaagaacggcaccuacgacuaccccaaguacuccgaggaggccaagcucaaccgcgaggagaucgacggcaucaagcucgaguccacccgcaucuaccagauccucgccaucuacuccaccgucgccuccucccucguccucgucgucucccucggcgccaucuccuucuggaugugcuccaacggcucccuccagugccgcaucugcaucuga

SEQ ID NO: 102553 - RNA, 1701 nt, Artificial Sequence; identical to SEQ ID NO: 98885
  derived and/or modified CDS sequence (opt2) from hemagglutinin__InfluenzaA__ADX96997

SEQ ID NO: 102554 - RNA, 1701 nt, Artificial Sequence
  derived and/or modified CDS sequence (opt2) from hemagglutinin__InfluenzaA__ADX97007
augaaggccauccucgucguccuccucuacaccuucgccaccgccaacgccgacacccucugcaucggcuaccacgccaacaacuccaccgacaccgucgacaccguccucgagaagaacgucaccgucacccacuccgucaaccuccucgaggacaagcacaacggcaagcucugcaagcuccgcggcgucgccccccuccaccucggcaagugcaacaucgccggcuggauccucggcaaccccgagugcgagucccucuccaccgccuccuccugguccuacaucgucgagaccuccuccuccgacaacggcaccugcuaccccggcgacuucaucgacuacgaggagcuccgcgagcagcucuccuccgucuccuccuucgagcgcuucgagaucuuccccaagaccuccuccuggcccaaccacgacuccaacaagggcgucaccgccgccugcccccacgccggcgccaaguccuucuacaagaaccucaucuggcucgucaagaagggcaacuccuaccccaagcucuccaaguccuacaucaacgacaagggcaaggagguccucguccucuggggcauccaccaccccuccaccuccgccgaccagcagucccucuaccagaacgccgacgccuacgucuucgucggcaccucccgcuacuccaagaaguucaagcccgagaucgccauccgccccaagguccgcgaccaggagggccgcaugaacuacuacuggacccucgucgagcccggcgacaagaucaccuucgaggccaccggcaaccucgucgucccccgcuacgccuucgccauggagcgcaacgccggcuccggcaucaucaucuccgacgcccccguccacgacugcaacaccaccugccagacccccaagggcgccaucaacaccucccuccccuuccagaacauccaccccaucaccaucggcaagugccccaaguacgucaaguccaccaagcuccgccucgccaccggccuccgcaacguccccuccauccagucccgcggccucuucggcgccaucgccggcuucaucgagggcggcuggaccggcauggucgacggcugguacggcuaccaccaccagaacgagcagggcuccggcuacgccgccgaccucaaguccacccagaacgccaucgacgagaucaccaacaaggucaacuccgucaucgagaagaugaacacccaguucaccgccgucggcaaggaguucaaccaccucgagaagcgcaucgagaaccucaacaagaaggucgacgacggcuuccucgacaucuggaccuacaacgccgagcuccucguccuccucgagaacgagcgcacccucgacuaccacgacuccaacgucaagaaccucuacgagaagguccgcucccagcucaagaacaacgccaaggagaucggcaacggcugcuucgaguucuaccacaagugcgacaacaccugcauggaguccgucaagaacggcaccuacgacuaccccaaguacuccgaggaggccaagcucaaccgcgaggagaucgacggcgucaagcucgaguccacccgcaucuaccagauccucgccaucuacuccaccgucgccuccucccucguccucgucgucucccucggcgccaucuccuucuggaugugcuccaacggcucccuccagugccgcaucugcaucuga

SEQ ID NO: 102555 - RNA, 1701 nt, Artificial Sequence; identical to SEQ ID NO: 102504
  derived and/or modified CDS sequence (opt2) from hemagglutinin__InfluenzaA__ADX97018

SEQ ID NO: 102556 - RNA, 1701 nt, Artificial Sequence
  derived and/or modified CDS sequence (opt2) from hemagglutinin__InfluenzaA__ADX97028
augaaggccauccucgucguccuccucuacaccuucgccaccgccaacgccgacacccucugcaucggcuaccacgccaacaacuccaccgacaccgucgacaccguccucgagaagaacgucaccgucacccacuccgucaacauccucgaggacaagcacaacggcaagcucugcaagcuccgcggcgucgccccccuccaccucggcaagugcaacaucgccggcuggauccucggcaaccccgagugcgagucccucuccaccgccuccuccugguccuacaucgucgagaccuccuccuccgacaacggcaccugcuaccccggcgacuucaucgacuacgaggagcuccgcgagcagcucuccuccgucuccuccuucgagcgcuucgagaucuuccccaagaccuccuccuggcccaaccacgacuccaacaagggcgucaccgccgccugcccccacgccggcgccaaguccuucuacaagaaccucaucuggcucgucaagcagggcaacuccuaccccaagcucuccaaguccuacaucaacgacaagggcaaggagguccucguccucuggggcauccaccaccccuccaccaccgccgaccagcagucccucuaccagaacgccgacgccuacgucuucgucggcuccucccgcuacuccaagaaguucaagcccgagaucgccauccgccccaagguccgcgaccaggagggccgcaugaacuacuacuggacccucgucgagcccggcgacaagaucaccuucgaggccaccggcaaccucgucgucccccgcuacgccuucgccauggagcgcaacgccggcuccggcaucaucaucuccgacacccccguccacgacugcaacaccaccugccagacccccaagggcgccaucaacaccucccuccccuuccagaacauccaccccaucaccaucggcaagugccccaaguacgucaaguccaccaagcuccgccucgccaccggccuccgcaacguccccuccauccagucccgcggccucuucggcgccaucgccggcuucaucgagggcggcuggaccggcauggucgacggcugguacggcuaccaccaccagaacgagcagggcuccggcuacgccgccgaccucaaguccacccagaacgccaucgacgagaucaccaacaaggucaacuccgucaucgagaagaugaacacccaguucaccgccgucggcaaggaguucaaccaccucgagaagcgcaucgagaaccucaacaagaaggucgacgacggcuuccucgacaucuggaccuacaacgccgagcuccucguccuccucgagaacgagcgcacccucgacuaccacgacuccaacgucaagaaccucuacgagaagguccgcucccagcucaagaacaacgccaaggaggucggcaacggcugcuucgaguucuaccacaagugcgacaacaccugcauggaguccgucaagaacggcaccuacgacuaccccaaguacuccgaggaggccaagcucaaccgcgaggagaucgacggcgucaagcucgaguccacccgcaucuaccagauccucgccaucuacuccaccgccgccuccucccucguccucgucgucucccucggcgccaucuccuucuggaugugcuccaacggcucccuccagugccgcaucugcaucuga

SEQ ID NO: 102557 - RNA, 1701 nt, Artificial Sequence; identical to SEQ ID NO: 101258
  derived and/or modified CDS sequence (opt2) from hemagglutinin__InfluenzaA__ADX98640

SEQ ID NO: 102558 - RNA, 1701 nt, Artificial Sequence; identical to SEQ ID NO: 100257
  derived and/or modified CDS sequence (opt2) from hemagglutinin__InfluenzaA__ADX98650

SEQ ID NO: 102559 - RNA, 1701 nt, Artificial Sequence
  derived and/or modified CDS sequence (opt2) from hemagglutinin__InfluenzaA__ADX98665
augaaggccauccucgucguccuccucuacaccuucgccaccgccaacgccgacacccucugcaucggcuaccacgccaacaacuccaccgacaccgucgacaccguccucgagaagaacgucaccgucacccacuccgucaaccuccucgaggacaagcacaacggcaagcucugcaagcuccgcggcgucgccccccuccaccucggcaagugcaacaucgccggcuggauccucggcaaccccgagugcgagucccucuccaccgccuccuccugguccuacaucgucgagaccuccuccuccggcaacggcaccugcuaccccggcgacuucaucgacuacgaggagcuccgcgagcagcucuccuccgucuccuccuucgagcgcuucgagaucuuccccaagaccuccuccuggcccaaccacgacuccaacaagggcgucaccgccgccugcccccacgccggcgccaaguccuucuacaagaaccucaucuggcucgucaagaagggcaacuccuaccccaagcucuccaaguccuacaucaacgacaagggcaaggagguccucguccucuggggcauccaccaccccuccaccuccgccgaccagcagucccucuaccagaacgccgacgccuacgucuucgucggcaccucccgcuacuccaagaaguucaagcccgagaucgccauccgccccaagguccgcgaccaggagggccgcaugaacuacuacuggacccucgucgagcccggcgacaagaucaccuucgaggccaccggcaaccucgucgucccccgcuacgccuucgccauggagcgcaacgccggcuccggcaucaucaucuccgacacccccguccacgacugcaacaccaccugccagacccccaagggcgccaucaacaccucccuccccuuccagaacauccaccccaucaccaucggcaagugccccaaguacgucaaguccaccaagcuccgccucgccaccggccuccgcaacguccccuccauccagucccgcggccucuucggcgccaucgccggcuucaucgagggcggcuggaccggcauggucgacggcugguacggcuaccaccaccagaacgagcagggcuccggcuacgccgccgaccucaaguccacccagaacgccaucgacgagaucaccaacaaggucaacuccgucaucgagaagaugaacacccaguucaccgccgucggcaaggaguucaaccaccucgagaagcgcaucgagaaccucaacaagaaggucgacgacggcuuccucgacaucuggaccuacaacgccgagcuccucguccuccucgagaacgagcgcacccucgacuaccacgacuccaacgucaagaaccucuacgagaagguccgcucccagcucaagaacaacgccaaggagaucggcaacggcugcuucgaguucuaccacaagugcgacaacaccugcauggaguccgucaagaacggcaccuacgacuaccccaaguacuccgaggaggccaagcucaaccgcgaggagaucgacggcgucaagcucgaguccacccgcaucuaccagauccucgccaucuacuccaccgccgccuccucccucguccucgucgucucccucggcgccaucuccuucuggaugugcuccaacggcucccuccagugccgcaucugcaucuga

SEQ ID NO: 102560 - RNA, 1701 nt, Artificial Sequence; identical to SEQ ID NO: 99869
  derived and/or modified CDS sequence (opt2) from hemagglutinin__InfluenzaA__ADX98675

SEQ ID NO: 102561 - RNA, 1701 nt, Artificial Sequence; identical to SEQ ID NO: 99869
  derived and/or modified CDS sequence (opt2) from hemagglutinin__InfluenzaA__ADX98695

SEQ ID NO: 102562 - RNA, 1701 nt, Artificial Sequence; identical to SEQ ID NO: 100257
  derived and/or modified CDS sequence (opt2) from hemagglutinin__InfluenzaA__ADX98729

SEQ ID NO: 102563 - RNA, 1701 nt, Artificial Sequence; identical to SEQ ID NO: 101588
  derived and/or modified CDS sequence (opt2) from hemagglutinin__InfluenzaA__ADX98739

SEQ ID NO: 102564 - RNA, 1701 nt, Artificial Sequence; identical to SEQ ID NO: 101337
  derived and/or modified CDS sequence (opt2) from hemagglutinin__InfluenzaA__ADX98748

SEQ ID NO: 102565 - RNA, 1701 nt, Artificial Sequence; identical to SEQ ID NO: 98705
  derived and/or modified CDS sequence (opt2) from hemagglutinin__InfluenzaA__ADX98758

SEQ ID NO: 102566 - RNA, 1701 nt, Artificial Sequence; identical to SEQ ID NO: 99058
  derived and/or modified CDS sequence (opt2) from hemagglutinin__InfluenzaA__ADX98767

SEQ ID NO: 102567 - RNA, 1701 nt, Artificial Sequence; identical to SEQ ID NO: 100302
  derived and/or modified CDS sequence (opt2) from hemagglutinin__InfluenzaA__ADX98777

SEQ ID NO: 102568 - RNA, 1701 nt, Artificial Sequence
  derived and/or modified CDS sequence (opt2) from hemagglutinin__InfluenzaA__ADX98785
augaaggccauccucgucguccuccucuacacccucgccaccgccaacgccgacacccucugcaucggcuaccacgccaacaacuccaccgacaccgucgacaccguccucgagaagaacgucaccgucacccacuccgucaaccuccucgaggacaagcacaacggcaagcucugcaagcuccgcggcaucgccccccuccaccucggcaagugcaacaucgccggcuggauccucggcaaccccgagugcgagucccucuccaccgccuccuccugguccuacaucgucgagaccuccuccuccgacaacggcaccugcuaccccggcgacuucaucgacuacgaggagcuccgcgagcagcucuccuccgucuccuccuucgagcgcuucgagaucuuccccaagaccuccuccuggcccaaccacgacuccaacaagggcgucaccgccgccugcccccacgccggcgccaaguccuucuacaagaaccucaucuggcucgucaagaagggcaacuccuaccccaagcucuccaaguccuacaucaacgacaagggcaaggagguccucguccucuggggcauccaccaccccuccaccuccgccgaccagcagucccucuaccagaacgccgacgccuacgucuucgucggcaccucccgcuacuccaagaaguucaagcccgagaucgccauccgccccaagguccgcgaccaggagggccgcaugaacuacuacuggacccucgucgagcccggcgacaagaucaccuucgaggccaccggcaaccucgucgucccccgcuacgccuucgccauggagcgcaacgccggcuccggcaucaucaucuccgacacccccguccacgacugcaacaccaccugccagacccccaagggcgccaucaacaccucccuccccuuccagaacauccaccccaucaccaucggcaagugccccaaguacgucaaguccaccaagcuccgccucgccaccggccuccgcaacguccccuccauccagucccgcggccucuucggcgccaucgccggcuucaucgagggcggcuggaccggcauggucgacggcugguacggcuaccaccaccagaacgagcagggcuccggcuacgccgccgaccucaaguccacccagaacgccaucgacgagaucaccaacaaggucaacuccgucaucgagaagaugaacacccaguucaccgccgucggcaaggaguucaaccaccucgagaagcgcaucgagaaccucaacaagaaggucgacgacggcuuccucgacaucuggaccuacaacgccgagcuccucguccuccucgagaacgagcgcacccucgacuaccacgacuccaacgucaagaaccucuacgagaagguccgcucccagcucaagaacaacgccaaggagaucggcaacggcugcuucgaguucuaccacaagugcgacaacaccugcauggaguccgucaagaacggcaccuacgacuaccccaaguacuccgaggaggccaagcucaaccgcgaggagaucggcggcgucaagcucgaguccacccgcaucuaccagauccucgccaucuacuccaccgucgccuccucccucguccucgucgucucccucggcgccaucuccuucuggaugugcuccaacggcucccuccagugccgcaucugcaucuga

SEQ ID NO: 102569 - RNA, 1701 nt, Artificial Sequence; identical to SEQ ID NO: 99806
  derived and/or modified CDS sequence (opt2) from hemagglutinin__InfluenzaA__ADX98792

SEQ ID NO: 102570 - RNA, 1701 nt, Artificial Sequence; identical to SEQ ID NO: 99806
  derived and/or modified CDS sequence (opt2) from hemagglutinin__InfluenzaA__ADX98806

SEQ ID NO: 102571 - RNA, 1701 nt, Artificial Sequence; identical to SEQ ID NO: 101746
  derived and/or modified CDS sequence (opt2) from hemagglutinin__InfluenzaA__ADX98818

SEQ ID NO: 102572 - RNA, 1701 nt, Artificial Sequence; identical to SEQ ID NO: 98705
  derived and/or modified CDS sequence (opt2) from hemagglutinin__InfluenzaA__ADX98828

SEQ ID NO: 102573 - RNA, 1701 nt, Artificial Sequence; identical to SEQ ID NO: 102096
  derived and/or modified CDS sequence (opt2) from hemagglutinin__InfluenzaA__ADX98843

SEQ ID NO: 102574 - RNA, 1701 nt, Artificial Sequence
  derived and/or modified CDS sequence (opt2) from hemagglutinin__InfluenzaA__ADX98853
augaaggccauccucgucguccuccucuacaccuucgccaccgccaacgccgacacccucugcaucggcuaccacgccaacaacuccaccgacaccgucgacaccguccucgagaagaacgucaccgucacccacuccgucaaccuccucgaggacaagcacaacggcaagcucugcaagcuccgcggcgucgccccccuccaccucggcaagugcaacaucgccggcuggauccucggcaaccccgagugcgagucccucuccaucgccuccuccugguccuacaucgucgagaccuccuccuccgacaacggcaccugcuaccccggcgacuucaucgacuacgaggagcuccgcgagcagcucuccuccgucuccuccuucgagcgcuucgagaucuuccccaagaccuccuccuggcccaaccacgacuccaacaagggcgucaccgccgccugcccccacgccggcgccaaguccuucuacaagaaccucaucuggcucgucaagaagggcaacuccuaccccaagcucuccaaguccuacaucaacgacaagggcaaggagguccucguccucuggggcauccaccaccccuccaccuccgccgaccagcagucccucuaccagaacgccgacgccuacgucuucgucggcaccucccgcuacuccaagaaguucaagcccgagaucgccauccgccccaagguccgcgaccaggagggccgcaugaacuaccacuggacccucgucgagcccggcgacaagaucaccuucgaggccaccggcaaccucgucgucccccgcuacgccuucgccauggagcgcaacgccggcuccggcaucaucaucuccgacacccccguccacgacugcaacaccaccugccagacccccaagggcgccaucaacaccucccuccccuuccagaacauccaccccaucaccaucggcaagugccccaaguacgucaaguccaccaagcuccgccucgccaccggccuccgcaacguccccuccauccagucccgcggccucuucggcgccaucgccggcuucaucgagggcggcuggaccggcauggucgacggcugguacggcuaccaccaccagaacgagcagggcuccggcuacgccgccgaccucaaguccacccagaacgccaucgacaagaucaccaacaaggucaacuccgucaucgagaagaugaacacccaguucaccgccgucggcaaggaguucaaccaccucgagaagcgcaucgagaaccucaacaagaaggucgacgacggcuuccucgacaucuggaccuacaacgccgagcuccucguccuccucgagaacgagcgcacccucgacuaccacgacuccaacgucaagaaccucuacgagaagguccgcucccagcucaagaacaacgccaaggagaucggcaacggcugcuucgaguucuaccacaagugcgacaacaccugcauggaguccgucaagaacggcaccuacgacuaccccaaguacuccgaggaggccaagcucaaccgcgaggagaucgacggcgucaagcucgaguccacccgcaucuaccagauccucgccaucuacuccaccgucgccuccucccucguccucgucgucucccucggcgccaucuccuucuggaugugcuccaacggcucccuccagugccgcaucugcaucuga

SEQ ID NO: 102575 - RNA, 1701 nt, Artificial Sequence; identical to SEQ ID NO: 99869
  derived and/or modified CDS sequence (opt2) from hemagglutinin__InfluenzaA__ADX98860

SEQ ID NO: 102576 - RNA, 1701 nt, Artificial Sequence; identical to SEQ ID NO: 101257
  derived and/or modified CDS sequence (opt2) from hemagglutinin__InfluenzaA__ADX98870

SEQ ID NO: 102577 - RNA, 1701 nt, Artificial Sequence
  derived and/or modified CDS sequence (opt2) from hemagglutinin__InfluenzaA__ADX98880
augaaggccauccucgucguccuccucuacaccuucgccaccgccaacgccgacacccucugcaucggcuaccacgccaacaacuccaccgacaccgucgacaccguccucgagaagaacgucaccgucacccacuccgucaaccuccucgaggacaagcacaacggcaagcucugcaagcuccgcggcgucgccccccuccaccucggcaagugcaacaucgccggcuggauccucggcaaccccgagugcgagucccucuccaccgccuccuccugguccuacaucgucgagaccuccuccuccgacaacggcaccugcuaccccggcgacuucaucgacuacgaggagcuccgcgagcagcucuccuccgucuccuccuucgagcgcuucgagaucuuccccaagaccuccuccuggcccaaccacgacuccaacaagggcgucaccgccgccugcccccacgccggcgccaaguccuucuacaagaaccucaucuggcucgucaagaagggcaacuccuaccccaagcucuccaaguccuacaucaacgacaagggcaaggagguccucguccucuggggcauccaccaccccuccaccuccgccgaccagcagucccucuaccagaacgccgacgccuacgucuucgucggcaccucccgcuacuccaagaaguucaagcccgagaucgccauccgccccaagguccgcgaccaggagggccgcaugaacuacuacuggacccucgucgagcccggcgacaagaucaccuucgaggccaccggcaaccucgucgucccccgcuacgccuucgccauggagcgcaacgccggcuccggcaucaucaucuccgacacccccguccacgacugcaacaccaccugccagacccccaagggcgccaucaacaccucccuccccuuccagaacauccaccccaucaccaucggcaagugccccaaguacgucaaguccaccaagcuccgccucgccaccggccuccgcaacguccccuccauccagucccgcggccucuucggcgccaucgccggcuucaucgagggcggcuggaccggcauggucgacggcugguacggcuaccaccaccagaacgagcagggcuccggcuacgccgccgaccucaaguccacccagaacgccaucgacgagaucaccaacaaggucaacuccaucaucgagaagaugaacacccaguucaccgccgucggcaaggaguucaaccaccucgagaagcgcaucgagaaccucaacaagaaggucgacgacggcuuccucgacaucuggaccuacaacgccgagcuccucguccuccucgagaacgagcgcacccucgacuaccacgacuccaacgucaagaaccucuacgagaagguccgcucccagcucaagaacaacgccaaggagaucggcaacggcugcuucgaguucuaccacaagugcgacaacaccugcauggaguccgucaagaacggcaccuacgacuaccccaaguacuccgaggaggccaagcucaaccgcgaggagaucgacggcgucaagcucgaguccacccgcaucuaccagauccucgccaucuacuccaccgucgccuccucccucguccucgucgucucccucggcgccaucuccuucuggaugugcuccaacggcucccuccagugccgcaucugcaucuga

SEQ ID NO: 102578 - RNA, 1701 nt, Artificial Sequence
  derived and/or modified CDS sequence (opt2) from hemagglutinin__InfluenzaA__ADX98890
augaaggccauccucgucguccuccucuacaccuucgccaccgccaacgccgacacccucugcaucggcuaccacgccaacaacuccaccgacaccgucgacaccguccucgagaagaacgucaccgucacccacuccgucaaccuccucgaggacaagcacaacggcaagcucugcaagcuccgcggcgucgccccccuccaccucggcaagugcaacaucgccggcuggauccucggcaaccccgagugcgagucccucuccaccgccuccuccugguccuacaucgucgagaccuccuccuccgacaacggcaccugcuaccccggcgacuucaucgacuacgaggagcuccgcgagcagcucuccuccgucuccuccuucgagcgcuucgagaucuuccccaagaccuccuccuggcccaaccacgacuccaacaagggcgucaccgccgccugcccccacgccggcgccaaguccuucuacaagaaccucaucuggcucgucaagaagggcaacuccuaccccaagcucuccaaguccuacaucaacgacaagggcaaggagguccucguccucuggggcauccaccaccccuccaccuccgccgaccagcagucccucuaccagaacgccgacgccuacgucuucgucggcaccucccgcuacuccaagaaguucaagcccgagaucgccauccgccccaagguccgcgaccaggagggccgcaugaacuacuacuggacccucgucgagcccggcgacaagaucaccuucgaggccaccggcaaccucgucgucccccgcuacgccuucgccauggagcgcaacgccgaguccggcaucaucaucuccgacacccccguccacgacugcaacaccaccugccagacccccaagggcgccaucaacaccucccuccccuuccagaacauccaccccaucaccaucggcaagugccccaaguacgucaaguccaccaagcuccgccucgccaccggccuccgcaacguccccuccauccagucccgcggccucuucggcgccaucgccggcuucaucgagggcggcuggaccggcauggucgacggcugguacggcuaccaccaccagaacgagcagggcuccggcuacgccgccgaccucaaguccacccagaacgccaucgacaagaucaccaacaaggucaacuccgucaucgagaagaugaacacccaguucaccgccgucggcaaggaguucaaccaccucgagaagcgcaucgagaaccucaacaagaaggucgacgacggcuuccucgacaucuggaccuacaacgccgagcuccucguccuccucgagaacgagcgcacccucgacuaccacgacuccaacgucaagaaccucuacgagaagguccgcucccagcucaagaacaacgccaaggagaucggcaacggcugcuucgaguucuaccacaagugcgacaacaccugcauggaguccgucaagaacggcaccuacgacuaccccaaguacuccgaggaggccaagcucaaccgcgaggagaucgacggcgucaagcucgaguccacccgcaucuaccagauccucgccaucuacuccaccgucgccuccucccucguccucgucgucucccucggcgccaucuccuucuggaugugcuccaacggcucccuccagugccgcaucugcaucuga

SEQ ID NO: 102579 - RNA, 1701 nt, Artificial Sequence; identical to SEQ ID NO: 100257
  derived and/or modified CDS sequence (opt2) from hemagglutinin__InfluenzaA__ADX98900

SEQ ID NO: 102580 - RNA, 1701 nt, Artificial Sequence
  derived and/or modified CDS sequence (opt2) from hemagglutinin__InfluenzaA__ADX98910
augaaggccauccucgucguccuccucuacaccuucgccaccgccaacgccgacacccucugcaucggcuaccacgccaacaacuccaccgacaccgucgacaccguccucgagaagaacgucaccgucacccacuccgucaaccuccucgaggacaagcacaacggcaagcucugcaagcuccgcggcgucgccccccuccaccucggcaagugcaacaucgccggcuggauccucggcaaccccgagugcgagucccucuccaccgccaucuccugguccuacaucgucgagaccuccuccuccgacaacggcaccugcuaccccggcgacuucaucgacuacgaggagcuccgcgagcagcucuccuccgucuccuccuucgagcgcuucgagaucuuccccaagaccuccuccuggcccaaccacgacuccaacaagggcgucaccgccgccugcccccacgccggcgccaaguccuucuacaagaaccucaucuggcucgucaagaagggcaacuccuaccccaagcucuccaaguccuacaucaacgacaagggcaaggagguccucguccucuggggcauccaccaccccuccaccuccgccgaccagcagucccucuaccagaacgccgacgccuacgucuucgucggcaccucccgcuacuccaagaaguucaagcccgagaucgccauccgccccaagguccgcgaccaggagggccgcaugaacuacuacuggacccucgucgagcccggcgacaagaucaccuucgaggccaccggcaaccucgucgucccccgcuacgccuucgccauggagcgcaacgccggcuccggcaucaucaucuccgacacccccguccacgacugcaacaccaccugccagacccccaagggcgccaucaacaccucccuccccuuccagaacauccaccccaucaccaucggcaagugccccaaguacgucaaguccaccaagcuccgccucgccaccggccuccgcaacguccccuccauccagucccgcggccucuucggcgccaucgccggcuucaucgagggcggcuggaccggcauggucgacggcugguacggcuaccaccaccagaacgagcagggcuccggcuacgccgccgaccucaaguccacccagaacgccaucgacaagaucaccaacaaggucaacuccgucaucgagaagaugaacacccaguucaccgccgucggcaaggaguucaaccaccucgagaagcgcaucgagaaccucaacaagaaggucgacgacggcuuccucgacaucuggaccuacaacgccgagcuccucguccuccucgagaacgagcgcacccucgacuaccacgacuccaacgucaagaaccucuacgagaagguccgcucccagcucaagaacaacgccaaggagaucggcaacggcugcuucgaguucuaccacaagugcgacaacaccugcauggaguccgucaagaacggcaccuacgacuaccccaaguacuccgaggaggccaagcucaaccgcgaggagaucgacggcgucaagcucgaguccacccgcaucuaccagauccucgccaucuacuccaccgucgccuccucccucguccucgucgucucccucggcgccaucuccuucuggaugugcuccaacggcucccuccagugccgcaucugcaucuga

SEQ ID NO: 102581 - RNA, 1701 nt, Artificial Sequence; identical to SEQ ID NO: 100257
  derived and/or modified CDS sequence (opt2) from hemagglutinin__InfluenzaA__ADX98920

SEQ ID NO: 102582 - RNA, 1701 nt, Artificial Sequence; identical to SEQ ID NO: 99869
  derived and/or modified CDS sequence (opt2) from hemagglutinin__InfluenzaA__ADX98930

SEQ ID NO: 102583 - RNA, 1701 nt, Artificial Sequence; identical to SEQ ID NO: 99496
  derived and/or modified CDS sequence (opt2) from hemagglutinin__InfluenzaA__ADX98940

SEQ ID NO: 102584 - RNA, 1701 nt, Artificial Sequence; identical to SEQ ID NO: 101325
  derived and/or modified CDS sequence (opt2) from hemagglutinin__InfluenzaA__ADX98950

SEQ ID NO: 102585 - RNA, 1701 nt, Artificial Sequence; identical to SEQ ID NO: 101306
  derived and/or modified CDS sequence (opt2) from hemagglutinin__InfluenzaA__ADX98960

SEQ ID NO: 102586 - RNA, 1701 nt, Artificial Sequence
  derived and/or modified CDS sequence (opt2) from hemagglutinin__InfluenzaA__ADX98970
augaaggccauccucgucguccuccucuacaccuucgccaccgccaacgccgacacccucugcaucggcuaccacgccaacaacuccaccgacaccgucgacaccguccucgagaagaacgucaccgucacccacuccgucaaccuccucgaggacaagcacaacggcaagcucugcaagcuccgcggcgucgccccccuccaccucggcaagugcaacaucgccggcuggauccucggcaaccccgagugcgagucccucuccaccgccuccuccugguccuacaucgucgagaccuccuccuccgacaacggcaccugcuaccccggcgacuucaucgacuacgaggagcuccgcgagcagcucuccuccgucuccuccuucgagcgcuucgagaucuuccccaagaccuccuccuggcccaaccacgacuccaacaagggcgucaccgccgccugcccccacgccggcgccaaguccuucuacaagaaccucaucuggcucgucaagaagggcaacuccuaccccaagcucuccaaguccuacaucaacgacaagggcaaggagguccucguccucuggggcauccaccaccccuccaccuccgccgaccagcagggccucuaccagaacgccgacgccuacgucuucgucggcaccucccgcuacuccaagaaguucaagcccgagaucgccauccgccccaagguccgcgaccaggagggccgcaugaacuacuacuggacccucgucgagcccggcgacaagaucaccuucgaggccaccggcaaccucgucgucccccgcuacgccuucgccauggagcgcaacgccggcuccggcaucaucaucuccgacacccccguccacgacugcaacaccaccugccagacccccaagggcgccaucaacaccucccuccccuuccagaacauccaccccaucaccaucggcaagugccccaaguacgucaaguccaccaagcuccgccucgccaccggccuccgcaacauccccuccauccagucccgcggccucuucggcgccaucgccggcuucaucgagggcggcuggaccggcauggucgacggcugguacggcuaccaccaccagaacgagcagggcuccggcuacgccgccgaccucaaguccacccagaacgccaucgacaagaucaccaacaaggucaacuccgucaucgagaagaugaacacccaguucaccgccgucggcaaggaguucaaccaccucgagaagcgcaucgagaaccucaacaagaaggucgacgacggcuuccucgacaucuggaccuacaacgccgagcuccucguccuccucgagaacgagcgcacccucgacuaccacgacuccaacgucaagaaccucuacgagaagguccgcucccagcucaagaacaacgccaaggagaucggcaacggcugcuucgaguucuaccacaagugcgacaacaccugcauggaguccgucaagaacggcaccuacgacuaccccaaguacuccgaggaggccaagcucaaccgcgaggagaucgacggcgucaagcucgaguccacccgcaucuaccagauccucgccaucuacuccaccgucgccuccucccucguccucgucgucucccucggcgccaucuccuucuggaugugcuccaacggcucccuccagugccgcaucugcaucuga

SEQ ID NO: 102587 - RNA, 1701 nt, Artificial Sequence; identical to SEQ ID NO: 99806
  derived and/or modified CDS sequence (opt2) from hemagglutinin__InfluenzaA__ADX98980

SEQ ID NO: 102588 - RNA, 1701 nt, Artificial Sequence; identical to SEQ ID NO: 98705
  derived and/or modified CDS sequence (opt2) from hemagglutinin__InfluenzaA__ADX98990

SEQ ID NO: 102589 - RNA, 1701 nt, Artificial Sequence; identical to SEQ ID NO: 99869
  derived and/or modified CDS sequence (opt2) from hemagglutinin__InfluenzaA__ADX99000

SEQ ID NO: 102590 - RNA, 1698 nt, Artificial Sequence
  derived and/or modified CDS sequence (opt2) from hemagglutinin__InfluenzaA__ADX99581
augaaggccaaccuccucguccuccucuccgcccucgccgccgccgacgccgacaccaucugcaucggcuaccacgccaacaacuccaccgacaccgucgacaccguccucgagaagaacgucaccgucacccacuccgucaaccuccucgaggacucccacaacggcaagcucugccgccucaagggcaucgccccccuccagcucggcaagugcaacaucgccggcuggcuccucggcaaccccgagugcgacccccuccuccccguccgcuccugguccuacaucgucgagacccccaacuccgagaacggcaucugcuaccccggcgacuucaucgacuacgaggagcuccgcgagcagcucuccuccgucuccuccuucgagcgcuucgagaucuuccccaaggaguccuccuggcccaaccacaacaccaacggcgucaccgccgccugcucccacgagggcaaguccuccuucuaccgcaaccuccucuggcucaccgagaaggagggcuccuaccccaagcucaagaacuccuacgucaacaagaagggcaaggagguccucguccucuggggcauccaccacccccccaacuccaaggagcagcagaaccucuaccagaacgagaacgccuacgucuccgucgucaccuccaacuacaaccgccgcuucacccccgagaucgccgagcgccccaagguccgcgaccaggccggccgcaugaacuacuacuggacccuccucaagcccggcgacaccaucaucuucgaggccaacggcaaccucaucgcccccauguacgccuucgcccucucccgcggcuucggcuccggcaucaucaccuccaacgccuccaugcacgagugcaacaccaagugccagaccccccucggcgccaucaacuccucccuccccuaccagaacauccaccccgucaccaucggcgagugccccaaguacguccgcuccgccaagcuccgcauggucaccggccuccgcaacacccccuccauccagucccgcggccucuucggcgccaucgccggcuucaucgagggcggcuggaccggcaugaucgacggcugguacggcuaccaccaccagaacgagcagggcuccggcuacgccgccgaccagaaguccacccagaacgccaucaacggcaucaccaacaaggucaacaccgucaucgagaagaugaacauccaguucaccgccgucggcaaggaguucaacaagcucgagaagcgcauggagaaccucaacaagaaggucgacgacggcuuccucgacaucuggaccuacaacgccgagcuccucguccuccucgagaacgagcgcacccucgacuuccacgacuccaacgucaagaaccucuacgagaaggucaagucccagcucaagaacaacgccaaggagaucggcaacggcugcuucgaguucuaccacaagugcgacaacgagugcauggaguccguccgcaacggcaccuacgacuaccccaaguacuccgaggaguccaagcucaaccgcgagaaggucgacggcgucaagcucgaguccaugggcaucuaccagauccucgccaucuacuccaccgucgccuccucccucguccuccucgucucccucggcgccaucuccuucuggaugugcuccaacggcucccuccagugccgcaucugcaucuga

SEQ ID NO: 102591 - RNA, 1698 nt, Artificial Sequence; identical to SEQ ID NO: 102590
  derived and/or modified CDS sequence (opt2) from hemagglutinin__InfluenzaA__ADX99592

SEQ ID NO: 102592 - RNA, 1698 nt, Artificial Sequence; identical to SEQ ID NO: 102590
  derived and/or modified CDS sequence (opt2) from hemagglutinin__InfluenzaA__ADX99603

SEQ ID NO: 102593 - RNA, 1698 nt, Artificial Sequence
  derived and/or modified CDS sequence (opt2) from hemagglutinin__InfluenzaA__ADX99614
augaaggccaaccuccucguccuccucuccgcccucgccgccgccgacgccgacaccaucugcaucggcuaccacgccaacaacuccaccgacaccgucgacaccguccucgagaagaacgucaccgucacccacuccgucaaccuccucgaggacucccacaacggcaagcucugccgccucaagggcaucgccccccuccagcucggcaagugcaacaucgccggcuggcuccucggcaaccccgagugcgacccccuccuccccguccgcuccugguccuacaucgucgagacccccaacuccgagaacggcaucugcuaccccggcgacuucaucgacuacgaggagcuccgcgagcagcucuccuccgucuccuccuucgagcgcuucgagaucuuccccaaggaguccuccuggcccaaccacaacaccaacggcgucaccgccgccugcucccacgagggcaaguccuccuucuaccgcaaccuccucuggcucaccgagaagaagggcuccuaccccaagcucaagaacuccuacgucaacaagaagggcaaggagguccucguccucuggggcauccaccacccccccaacuccaaggagcagcagaaccucuaccagaacgagaacgccuacgucuccgucgucaccuccaacuacaaccgccgcuucacccccgagaucgccgagcgccccaagguccgcgaccaggccggccgcaugaacuacuacuggacccuccucaagcccggcgacaccaucaucuucgaggccaacggcaaccucaucgcccccauguacgccuucgcccucucccgcggcuucggcuccggcaucaucaccuccaacgccuccaugcacgagugcaacaccaagugccagaccccccucggcgccaucaacuccucccuccccuaccagaacauccaccccgucaccaucggcgagugccccaaguacguccgcuccgccaagcuccgcauggucaccggccuccgcaacacccccuccauccagucccgcggccucuucggcgccaucgccggcuucaucgagggcggcuggaccggcaugaucgacggcugguacggcuaccaccaccagaacgagcagggcuccggcuacgccgccgaccagaaguccacccagaacgccaucaacggcaucaccaacaaggucaacaccgucaucgagaagaugaacauccaguucaccgccgucggcaaggaguucaacaagcucgagaagcgcauggagaaccucaacaagaaggucgacgacggcuuccucgacaucuggaccuacaacgccgagcuccucguccuccucgagaacgagcgcacccucgacuuccacgacuccaacgucaagaaccucuacgagaaggucaagucccagcucaagaacaacgccaaggagaucggcaacggcugcuucgaguucuaccacaagugcgacaacgagugcauggaguccguccgcaacggcaccuacgacuaccccaaguacuccgaggaguccaagcucaaccgcgagaaggucgacggcgucaagcucgaguccaugggcaucuaccagauccucgccaucuacuccaccgucgccuccucccucguccuccucgucucccucggcgccaucuccuucuggaugugcuccaacggcucccuccagugccgcaucugcaucuga

SEQ ID NO: 102594 - RNA, 1698 nt, Artificial Sequence
  derived and/or modified CDS sequence (opt2) from hemagglutinin__InfluenzaA__ADX99625
augaaggccaaccuccucguccuccucuccgcccucgccgccgccgacgccgacaccaucugcaucggcuaccacgccaacaacuccaccgacaccgucgacaccguccucgagaagaacgucaccgucacccacuccgucaaccuccucgaggacucccacaacggcaagcucugccgccucaagggcaucgccccccuccagcucggcaagugcaacaucgccggcuggcuccucggcaaccccgagugcgacccccuccuccccguccgcuccugguccuacaucgucgagacccccaacuccgagaacggcaucugcuaccccggcgacuucaucgacuacgaggagcuccgcgagcagcucuccuccgucuccuccuucgagcgcuucgagaucuuccccaaggaguccuccuggcccaaccacaacaccaacggcgucaccgccgccugcucccacgagggcaaguccuccuucuaccgcaaccuccucuggcucaccgagaaggagggcuccuaccccaagcucaagaacuccuacgucaacaagaagggcaaggagguccucguccucuggggcauccaccacccccccaacuccaaggagcagcagaaccucuaccagaacgagaacgccuacgucuccgucgucaccuccaacuacaaccgccgcuucacccccgagaucgccgagcgccccaagguccgcgaccaggccggccgcaugaacuacuacuggacccuccucaagcccggcgacaccaucaucuucggcgccaacggcaaccucaucgcccccauguacgccuucgcccucucccgcggcuucggcuccggcaucaucaccuccaacgccuccaugcacgagugcaacaccaagugccagaccccccucggcgccaucaacuccucccuccccuaccagaacauccaccccgucaccaucggcgagugccccaaguacguccgcuccgccaagcuccgcauggucaccggccuccgcaacacccccuccauccagucccgcggccucuucggcgccaucgccggcuucaucgagggcggcuggaccggcaugaucgacggcugguacggcuaccaccaccagaacgagcagggcuccggcuacgccgccgaccagaaguccacccagaacgccaucaacggcaucaccaacaaggucaacaccgucaucgagaagaugaacauccaguucaccgccgucggcaaggaguucaacaagcucgagaagcgcauggagaaccucaacaagaaggucgacgacggcuuccucgacaucuggaccuacaacgccgagcuccucguccuccucgagaacgagcgcacccucgacuuccacgacuccaacgucaagaaccucuacgagaaggucaagucccagcucaagaacaacgccaaggagaucggcaacggcugcuucgaguucuaccacaagugcgacaacgagugcauggaguccguccgcaacggcaccuacgacuaccccaaguacuccgaggaguccaagcucaaccgcgagaaggucgacggcgucaagcucgaguccaugggcaucuaccagauccucgccaucuacuccaccgucgccuccucccucguccuccucgucucccucggcgccaucuccuucuggaugugcuccaacggcucccuccagugccgcaucugcaucuga

SEQ ID NO: 102595 - RNA, 1698 nt, Artificial Sequence
  derived and/or modified CDS sequence (opt2) from hemagglutinin__InfluenzaA__ADX99636
augaaggccaaccuccucguccuccucuccgcccucgccgccgccgacgccgacaccaucugcaucggcuaccacgccaacaacuccaccgacaccgucgacaccguccucgagaagaacgucaccgucacccacuccgucaaccuccucgaggacucccacaacggcaagcucugccgccucaagggcaucgccccccuccagcucggcaagugcaacaucgccggcuggcuccucggcaaccccgagugcgacccccuccuccccguccgcuccugguccuacaucgucgagacccccaacuccgagaacggcaucugcuaccccggcgacuucaucgacuacgaggagcuccgcgagcagcucuccuccgucuccuccuucgagcgcuucgagaucuuccccaaggaguccuccuggcccaaccacaacaccaacggcgucaccgccgccugcucccacgagggcaaguccuccuucuaccgcaaccuccucuggcucaccaagaaggagggcuccuaccccaagcucaagaacuccuacgucaacaagaagggcaaggagguccucguccucuggggcauccaccacccccccaacuccaaggagcagcagaaccucuaccagaacgagaacgccuacgucuccgucgucaccuccaacuacaaccgccgcuucacccccgagaucgccgagcgccccaagguccgcgaccaggccggccgcaugaacuacuacuggacccuccucaagcccggcgacaccaucaucuucgaggccaacggcaaccucaucgcccccauguacgccuucgcccucucccgcggcuucggcuccggcaucaucaccuccaacgccuccaugcacgagugcaacaccaagugccagaccccccucggcgccaucaacuccucccuccccuaccagaacauccaccccgucaccaucggcgagugccccaaguacguccgcuccgccaagcuccgcauggucaccggccuccgcaacacccccuccauccagucccgcggccucuucggcgccaucgccggcuucaucgagggcggcuggaccggcaugaucgacggcugguacggcuaccaccaccagaacgagcagggcuccggcuacgccgccgaccagaaguccacccagaacgccaucaacggcaucaccaacaaggucaacaccgucaucgagaagaugaacauccaguucaccgccgucggcaaggaguucaacaagcucgagaagcgcauggagaaccucaacaagaaggucgacgacggcuuccucgacaucuggaccuacaacgccgagcuccucguccuccucgagaacgagcgcacccucgacuuccacgacuccaacgucaagaaccucuacgagaaggucaagucccagcucaagaacaacgccaaggagaucggcaacggcugcuucgaguucuaccacaagugcgacaacgagugcauggaguccguccgcaacggcaccuacgacuaccccaaguacuccgaggaguccaagcucaaccgcgagaaggucgacggcgucaagcucgaguccaugggcaucuaccagauccucgccaucuacuccaccgucgccuccucccucguccuccucgucucccucggcgccaucuccuucuggaugugcuccaacggcucccuccagugccgcaucugcaucuga

SEQ ID NO: 102596 - RNA, 1698 nt, Artificial Sequence; identical to SEQ ID NO: 99314
  derived and/or modified CDS sequence (opt2) from hemagglutinin__InfluenzaA__ADX99647

SEQ ID NO: 102597 - RNA, 1698 nt, Artificial Sequence
  derived and/or modified CDS sequence (opt2) from hemagglutinin__InfluenzaA__ADX99680
augaaggccaaccuccucguccuccucugcgcccucgccgccgccgacgccgacaccaucugcaucggcuaccacgccaacaacuccaccgacaccgucgacaccguccucgagaagaacgucaccgucacccacuccgucaaccuccucgaggacucccacaacggcaagcucugccgccucaagggcaucgccccccuccagcucggcaagugcaacaucgccggcuggcuccucggcaaccccgagugcgacccccuccuccccguccgcuccugguccuacaucgucgagacccccaacuccgagaacggcaucugcuaccccggcgacuucaucgacuacgaggagcuccgcgagcagcucuccuccgucuccuccuucgagcgcuucgagaucuuccccaaggaguccuccugguccaaccacaacaccaacggcgucaccgccgccugcucccacgagggcaaguccuccuucuaccgcaaccuccucuggcucaccgagaaggagggcuccuaccccaagcucaagaacuccuacgucaacaagaagggcaaggagguccucguccucuggggcauccaccacccccccaacuccaaggagcagcagaaccucuaccagaacgagaacgccuacgucuccgucgucaccuccaacuacaaccgccgcuucacccccgagaucgccgagcgccccaagguccgcgaccaggccggccgcaugaacuacuacuggacccuccucaagcccggcgacaccaucaucuucgaggccaacggcaaccucaucgcccccauguacgccuucgcccucucccgcggcuucggcuccggcaucaucaccuccaacgccuccaugcacgagugcaacaccaagugccagaccccccucggcgccaucaacuccucccuccccuaccagaacauccaccccgucaccaucggcgagugccccaaguacguccgcuccgccaagcuccgcauggucaccggccuccgcaacauccccuccauccagucccgcggccucuucggcgccaucgccggcuucaucgagggcggcuggaccggcaugaucgacggcugguacggcuaccaccaccagaacgagcagggcuccggcuacgccgccgaccagaaguccacccagaacgccaucaacggcaucaccaacaaggucaacaccgucaucgagaagaugaacauccaguucaccgccgucggcaaggaguucaacaagcucgagaagcgcauggagaaccucaacaagaaggucgacgacggcuuccucgacaucuggaccuacaacgccgagcuccucguccuccucgagaacgagcgcacccucgacuuccacgacuccaacgucaagaaccucuacgagaaggucaagucccagcucaagaacaacgccaaggagaucggcaacggcugcuucgaguucuaccacaagugcgacaacgagugcauggaguccguccgcaacggcaccuacgacuaccccaaguacuccgaggaguccaagcucaaccgcgagaaggucgacggcgucaagcucgaguccaugggcaucuaccagauccucgccaucuacuccaccgucgccuccucccucguccuccucgucucccucggcgccaucuccuucuggaugugcuccaacggcucccuccagugccgcaucugcaucuga

SEQ ID NO: 102598 - RNA, 1698 nt, Artificial Sequence
  derived and/or modified CDS sequence (opt2) from hemagglutinin__InfluenzaA__ADX99702
augaaggccaaccuccucguccuccucugcgcccucgccgccgccgacgccgacaccaucugcaucggcuaccacgccaacaacuccaccgacaccgucgacaccguccucgagaagaacgucaccgucacccacuccgucaaccuccucgaggacucccacaacggcaagcucugccgccucaagggcaucgccccccuccagcucggcaagugcaacaucgccggcuggcuccucggcaaccccgagugcgacccccuccuccccguccgcuccugguccuacaucgucgagacccccaacuccgagaacggcaucugcuaccccggcgacuucaucgacuacgaggagcuccgcgagcagcucuccuccgucuccuccuucgagcgcuucgagaucuuccccaaggaguccuccuggcccaaccacaacaccaacggcgucaccgccgccugcucccacgagggcaaguccuccuucuaccgcaaccuccucuggcucaccgagaaggagggcuccuaccccaagcucaagaaguccuacgucaacaagaagggcaaggagguccucguccucuggggcauccaccacccccccaacuccaaggagcagcagaaccucuaccagaacgagaacgccuacgucuccgucgucaccuccaacuacaaccgccgcuucacccccgagaucgccgagcgccccaagguccgcgaccaggccggccgcaugaacuacuacuggacccuccucaagcccggcgacaccaucaucuucgaggccaacggcaaccucaucgcccccauguacgccuucgcccucucccgcggcuucggcuccggcaucaucaccuccaacgccuccaugcacgagugcaacaccaagugccagaccccccucggcgccaucaacuccucccuccccuaccagaacauccaccccgucaccaucggcgagugccccaaguacguccgcuccgccaagcuccgcauggucaccggccuccgcaacauccccuccauccagucccgcggccucuucggcgccaucgccggcuucaucgagggcggcuggaccggcaugaucgacggcugguacggcuaccaccaccagaacgagcagggcuccggcuacgccgccgaccagaaguccacccagaacgccaucaacggcaucaccaacaaggucaacaccgucaucgagaagaugaacauccaguucaccgccgucggcaaggaguucaacaagcucgagaagcgcauggagaaccucaacaagaaggucgacgacggcuuccucgacaucuggaccuacaacgccgagcuccucguccuccucgagaacgagcgcacccucgacuuccacgacuccaacgucaagaaccucuacgagaaggucaagucccagcucaagaacaacgccaaggagaucggcaacggcugcuucgaguucuaccacaagugcgacaacgagugcauggaguccguccgcaacggcaccuacgacuaccccaaguacuccgaggaguccaagcucaaccgcgagaaggucgacggcgucaagcucgaguccaugggcaucuaccagauccucgccaucuacuccaccgucgccuccucccucguccuccucgucucccucggcgccaucuccuucuggaugugcuccaacggcucccuccagugccgcaucugcaucuga

SEQ ID NO: 102599 - RNA, 1698 nt, Artificial Sequence; identical to SEQ ID NO: 102598
  derived and/or modified CDS sequence (opt2) from hemagglutinin__InfluenzaA__ADX99843

SEQ ID NO: 102600 - RNA, 1698 nt, Artificial Sequence
  derived and/or modified CDS sequence (opt2) from hemagglutinin__InfluenzaA__ADX99854
augaaggccaaccuccucguccuccucugcgcccucgccgccgccgacgccgacaccaucugcaucggcuaccacgccaacaacuccaccgacaccgucgacaccguccucgagaagaacgucaccgucacccacuccgucaaccuccucgaggacucccacaacggcaagcucugccgccucaagggcaucgccccccuccagcucggcaagugcaacaucgccggcuggcuccucggcaaccccgagugcgacccccuccuccccguccgcuccugguccuacaucgucgagacccccaacuccgagaacggcaucugcuaccccggcgacuucaucgacuacgaggagcuccgcgagcagcucuccuccgucuccuccuucgagcgcuucgagaucuuccccaaggaguccuccuggcccaaccacaacaccaacggcgucaccgccgccugcucccacgagggcaaguccuccuucuaccgcaaccuccucuggcucaccgagaaggagggcuccuaccucaagcucaagaacuccuacgucaacaagaagggcaaggagguccucguccucuggggcauccaccacccccccaacuccaaggagcagcagaaccucuaccagaacgagaacgccuacgucuccgucgucaccuccaacuacaaccgccgcuucacccccgagaucgccgagcgccccaagguccgcgaccaggccggccgcaugaacuacuacuggacccuccucaagcccggcgacaccaucaucuucgaggccaacggcaaccucaucgcccccauguacgccuucgcccucucccgcggcuucggcuccggcaucaucaccuccaacgccuccaugcacgagugcaacaccaagugccagaccccccucggcgccaucaacuccucccuccccuaccagaacauccaccccgucaccaucggcgagugccccaaguacguccgcuccgccaagcuccgcauggucaccggccuccgcaacauccccuccauccagucccgcggccucuucggcgccaucgccggcuucaucgagggcggcuggaccggcaugaucgacggcugguacggcuaccaccaccagaacgagcagggcuccggcuacgccgccgaccagaaguccacccagaacgccaucaacggcaucaccaacaaggucaacaccgucaucgagaagaugaacauccaguucaccgccgucggcaaggaguucaacaagcucgagaagcgcauggagaaccucaacaagaaggucgacgacggcuuccucgacaucuggaccuacaacgccgagcuccucguccuccucgagaacgagcgcacccucgacuuccacgacuccaacgucaagaaccucuacgagaaggucaagucccagcucaagaacaacgccaaggagaucggcaacggcugcuucgaguucuaccacaagugcgacaacgagugcauggaguccguccgcaacggcaccuacgacuaccccaaguacuccgaggaguccaagcucaaccgcgagaaggucgacggcgucaagcucgaguccaugggcaucuaccagauccucgccaucuacuccaccgucgccuccucccucguccuccucgucucccucggcgccaucuccuucuggaugugcuccaacggcucccuccagugccgcaucugcaucuga

SEQ ID NO: 102601 - RNA, 1698 nt, Artificial Sequence
  derived and/or modified CDS sequence (opt2) from hemagglutinin__InfluenzaA__ADX99865
augaaggccaaccuccucguccuccucugcgcccucgccgccgccgacgccgacaccaucugcaucggcuaccacgccaacaacuccaccgacaccgucgacaccguccucgagaagaacgucaccgucacccacuccgucaaccuccucgaggacucccacaacggcaagcucugccgccucaagggcaucgccccccuccagcucggcaagugcaacaucgccggcuggcuccucggcaaccccgagugcgacccccuccuccccguccgcuccugguccuacaucgucgagacccccaacuccgagaacggcaucugcuaccccggcgacuucaucgacuacgaggagcuccgcgagcagcucuccuccgucuccuccuucgagcgcuucgagaucuuccccaaggaguccuccuggcccaaccacaacaccaacggcgucaccgccgccugcucccacgagggcaaguccuccuucuaccgcaaccuccucuggcucaccgagaaggagggcuccuaccccaagcagaagaacuccuacgucaacaagaagggcaaggagguccucguccucuggggcauccaccacccccccaacuccaaggagcagcagaaccucuaccagaacgagaacgccuacgucuccgucgucaccuccaacuacaaccgccgcuucacccccgagaucgccgagcgccccaagguccgcgaccaggccggccgcaugaacuacuacuggacccuccucaagcccggcgacaccaucaucuucgaggccaacggcaaccucaucgcccccauguacgccuucgcccucucccgcggcuucggcuccggcaucaucaccuccaacgccuccaugcacgagugcaacaccaagugccagaccccccucggcgccaucaacuccucccuccccuaccagaacauccaccccgucaccaucggcgagugccccaaguacguccgcuccgccaagcuccgcauggucaccggccuccgcaacauccccuccauccagucccgcggccucuucggcgccaucgccggcuucaucgagggcggcuggaccggcaugaucgacggcugguacggcuaccaccaccagaacgagcagggcuccggcuacgccgccgaccagaaguccacccagaacgccaucaacggcaucaccaacaaggucaacaccgucaucgagaagaugaacauccaguucaccgccgucggcaaggaguucaacaagcucgagaagcgcauggagaaccucaacaagaaggucgacgacggcuuccucgacaucuggaccuacaacgccgagcuccucguccuccucgagaacgagcgcacccucgacuuccacgacuccaacgucaagaaccucuacgagaaggucaagucccagcucaagaacaacgccaaggagaucggcaacggcugcuucgaguucuaccacaagugcgacaacgagugcauggaguccguccgcaacggcaccuacgacuaccccaaguacuccgaggaguccaagcucaaccgcgagaaggucgacggcgucaagcucgaguccaugggcaucuaccagauccucgccaucuacuccaccgucgccuccucccucguccuccucgucucccucggcgccaucuccuucuggaugugcuccaacggcucccuccagugccgcaucugcaucuga

SEQ ID NO: 102602 - RNA, 1698 nt, Artificial Sequence
  derived and/or modified CDS sequence (opt2) from hemagglutinin__InfluenzaA__ADX99887
augaaggccaaccuccucguccuccucugcgcccucgccgccgccgacgccgacaccaucugcaucggcuaccacgccaacaacuccaccgacaccgucgacaccguccucgagaagaacgucaccgucacccacuccgucaaccuccucgaggacucccacaacggcaagcucugccgccucaagggcaucgccccccuccagcucggcaagugcaacaucgccggcuggcuccucggcaaccccgagugcgacccccuccuccccguccgcuccugguccuacaucgucgagacccccaacuccgagaacggcaucugcuaccccggcgacuucaucgacuacgaggagcuccgcgagcagcucuccuccgucuccuccuucgagcgcuucgagaucuuccccaaggaguccuccuggcccaaccacaacaccaacggcgucaccgccgccugcucccacgagggcaaguccuccuucuaccgcaaccuccucuggcucaccgagaaggagggcuccuaccccaagcucgagaacuccuacgucaacaagaagggcaaggagguccucguccucuggggcauccaccacccccccaacuccaaggagcagcagaaccucuaccagaacgagaacgccuacgucuccgucgucaccuccaacuacaaccgccgcuucacccccgagaucgccgagcgcuccaagguccgcgaccaggccggccgcaugaacuacuacuggacccuccucaagcccggcgacaccaucaucuucgaggccaacggcaaccucaucgcccccauguacgccuucgcccucucccgcggcuucggcuccggcaucaucaccuccaacgccuccaugcacgagugcaacaccaagugccagaccccccucggcgccaucaacuccucccuccccuaccagaacauccaccccgucaccaucggcgagugccccaaguacguccgcuccgccaagcuccgcauggucaccggccuccgcaacauccccuccauccagucccgcggccucuucggcgccaucgccggcuucaucgagggcggcuggaccggcaugaucgacggcugguacggcuaccaccaccagaacgagcagggcuccggcuacgccgccgaccagaaguccacccagaacgccaucaacggcaucaccaacaaggucaacaccgucaucgagaagaugaacauccaguucaccgccgucggcaaggaguucaacaagcucgagaagcgcauggagaaccucaacaagaaggucgacgacggcuuccucgacaucuggaccuacaacgccgagcuccucguccuccucgagaacgagcgcacccucgacuuccacgacuccaacgucaagaaccucuacgagaaggucaagucccagcucaagaacaacgccaaggagaucggcaacggcugcuucgaguucuaccacaagugcgacaacgagugcauggaguccguccgcaacggcaccuacgacuaccccaaguacuccgaggaguccaagcucaaccgcgagaaggucgacggcgucaagcucgaguccaugggcaucuaccagauccucgccaucuacuccaccgucgccuccucccucguccuccucgucucccucggcgccaucuccuucuggaugugcuccaacggcucccuccagugccgcaucugcaucuga

SEQ ID NO: 102603 - RNA, 1698 nt, Artificial Sequence
  derived and/or modified CDS sequence (opt2) from hemagglutinin__InfluenzaA__ADX99898
augaaggccaaccuccucguccuccucugcgcccucgccgccgccgacgccgacaccaucugcaucggcuaccacgccaacaacuccaccgacaccgucgacaccguccucgagaagaacgucaccgucacccacuccgucaaccuccucgaggacucccacaacggcaagcucugccgccucaagggcaucgccccccuccagcucggcaagugcaacaucgccggcuggcuccucggcaaccccgagugcgacccccuccuccccguccgcuccugguccuacaucgucgagacccccaacuccgagaacggcaucugcuaccccggcgacuucaucgacuacgaggagcuccgcgagcagcucuccuccgucuccuccuucgagcgcuucgagaucuuccccaaggaguccuccuggcccaaccacaacaccaacggcgucaccgccgccugcucccacgagggcaaguccuccuucuaccgcaaccuccucuggcucaccgagaaggagggcuccuaccccaagcucaagaacuacuacgucaacaagaagggcaaggagguccucguccucuggggcauccaccacccccccaacuccaaggagcagcagaaccucuaccagaacgagaacgccuacgucuccgucgucaccuccaacuacaaccgccgcuucacccccgagaucgccgagcgccccaagguccgcgaccaggccggccgcaugaacuacuacuggacccuccucaagcccggcgacaccaucaucuucgaggccaacggcaaccucaucgcccccauguacgccuucgcccucucccgcggcuucggcuccggcaucaucaccuccaacgccuccaugcacgagugcaacaccaagugccagaccccccucggcgccaucaacuccucccuccccuaccagaacauccaccccgucaccaucggcgagugccccaaguacguccgcuccgccaagcuccgcauggucaccggccuccgcaacauccccuccauccagucccgcggccucuucggcgccaucgccggcuucaucgagggcggcuggaccggcaugaucgacggcugguacggcuaccaccaccagaacgagcagggcuccggcuacgccgccgaccagaaguccacccagaacgccaucaacggcaucaccaacaaggucaacaccgucaucgagaagaugaacauccaguucaccgccgucggcaaggaguucaacaagcucgagaagcgcauggagaaccucaacaagaaggucgacgacggcuuccucgacaucuggaccuacaacgccgagcuccucguccuccucgagaacgagcgcacccucgacuuccacgacuccaacgucaagaaccucuacgagaaggucaagucccagcucaagaacaacgccaaggagaucggcaacggcugcuucgaguucuaccacaagugcgacaacgagugcauggaguccguccgcaacggcaccuacgacuaccccaaguacuccgaggaguccaagcucaaccgcgagaaggucgacggcgucaagcucgaguccaugggcaucuaccagauccucgccaucuacuccaccgucgccuccucccucguccuccucgucucccucggcgccaucuccuucuggaugugcuccaacggcucccuccagugccgcaucugcaucuga

SEQ ID NO: 102604 - RNA, 1698 nt, Artificial Sequence
  derived and/or modified CDS sequence (opt2) from hemagglutinin__InfluenzaA__ADX99909
augaaggccaaccuccucguccuccucugcgcccucgccgccgccgacgccgacaccaucugcaucggcuaccacgccaacaacuccaccgacaccgucgacaccguccucgagaagaacgucaccgucacccacuccgucaaccuccucgaggacucccacaacggcaagcucugccgccucaagggcaucgccccccuccagcucggcaagugcaacaucgccggcuggcuccucggcaaccccgagugcgacccccuccuccccguccgcuccugguccuacaucgucgagacccccaacuccgagaacggcaucugcuaccccggcgacuucaucgacuacgaggagcuccgcgagcagcucuccuccgucuccuccuucgagcgcuucgagaucuuccccaaggaguccuccuggcccaaccacaacaccaacggcgucaccgccgccugcucccacgagggcaaguccuccuucuaccgcaaccuccucuggcucaccgagaaggagggcuccuaccccaagcucaagaacuucuacgucaacaagaagggcaaggagguccucguccucuggggcauccaccacccccccaacuccaaggagcagcagaaccucuaccagaacgagaacgccuacgucuccgucgucaccuccaacuacaaccgccgcuucacccccgagaucgccgagcgccccaagguccgcgaccaggccggccgcaugaacuacuacuggacccuccucaagcccggcgacaccaucaucuucgaggccaacggcaaccucaucgcccccauguacgccuucgcccucucccgcggcuucggcuccggcaucaucaccuccaacgccuccaugcacgagugcaacaccaagugccagaccccccucggcgccaucaacuccucccuccccuaccagaacauccaccccgucaccaucggcgagugccccaaguacguccgcuccgccaagcuccgcauggucaccggccuccgcaacauccccuccauccagucccgcggccucuucggcgccaucgccggcuucaucgagggcggcuggaccggcaugaucgacggcugguacggcuaccaccaccagaacgagcagggcuccggcuacgccgccgaccagaaguccacccagaacgccaucaacggcaucaccaacaaggucaacaccgucaucgagaagaugaacauccaguucaccgccgucggcaaggaguucaacaagcucgagaagcgcauggagaaccucaacaagaaggucgacgacggcuuccucgacaucuggaccuacaacgccgagcuccucguccuccucgagaacgagcgcacccucgacuuccacgacuccaacgucaagaaccucuacgagaaggucaagucccagcucaagaacaacgccaaggagaucggcaacggcugcuucgaguucuaccacaagugcgacaacgagugcauggaguccguccgcaacggcaccuacgacuaccccaaguacuccgaggaguccaagcucaaccgcgagaaggucgacggcgucaagcucgaguccaugggcaucuaccagauccucgccaucuacuccaccgucgccuccucccucguccuccucgucucccucggcgccaucuccuucuggaugugcuccaacggcucccuccagugccgcaucugcaucuga

SEQ ID NO: 102605 - RNA, 1698 nt, Artificial Sequence; identical to SEQ ID NO: 102604
  derived and/or modified CDS sequence (opt2) from hemagglutinin__InfluenzaA__ADX99920

SEQ ID NO: 102606 - RNA, 1698 nt, Artificial Sequence
  derived and/or modified CDS sequence (opt2) from hemagglutinin__InfluenzaA__ADX99931
augaaggccaaccuccucguccuccucugcgcccucgccgccgccgacgccgacaccaucugcaucggcuaccacgccaacaacuccaccgacaccgucgacaccguccucgagaagaacgucaccgucacccacuccgucaaccuccucgaggacucccacaacggcaagcucugccgccucaagggcaucgccccccuccagcucggcaagugcaacaucgccggcuggcuccucggcaaccccgagugcgacccccuccuccccguccgcuccugguccuacaucgucgagacccccaacuccgagaacggcaucugcuaccccggcgacuucaucgacuacgaggagcuccgcgagcagcucuccuccgucuccuccuucgagcgcuucgagaucuuccccaaggaguccuccuggcccaaccacaacaccaacggcgucaccgccgccugcucccacgagggcaaguccuccuucuaccgcaaccuccucuggcucaccgagaaggagggcuccuaccccaagcucgagaacuccuacgucaacaagaagggcaaggagguccucguccucuggggcauccaccacccccccaacuccaaggagcagcagaaccucuaccagaacgagaacgccuacgucuccgucgucaccuccaacuacaaccgccgcuucacccccgagaucgccggccgccccaagguccgcgaccaggccggccgcaugaacuacuacuggacccuccucaagcccggcgacaccaucaucuucgaggccaacggcaaccucaucgcccccauguacgccuucgcccucucccgcggcuucggcuccggcaucaucaccuccaacgccuccaugcacgagugcaacaccaagugccagaccccccucggcgccaucaacuccucccuccccuaccagaacauccaccccgucaccaucggcgagugccccaaguacguccgcuccgccaagcuccgcauggucaccggccuccgcaacauccccuccauccagucccgcggccucuucggcgccaucgccggcuucaucgagggcggcuggaccggcaugaucgacggcugguacggcuaccaccaccagaacgagcagggcuccggcuacgccgccgaccagaaguccacccagaacgccaucaacggcaucaccaacaaggucaacaccgucaucgagaagaugaacauccaguucaccgccgucggcaaggaguucaacaagcucgagaagcgcauggagaaccucaacaagaaggucgacgacggcuuccucgacaucuggaccuacaacgccgagcuccucguccuccucgagaacgagcgcacccucgacuuccacgacuccaacgucaagaaccucuacgagaaggucaagucccagcucaagaacaacgccaaggagaucggcaaccgcugcuucgaguucuaccacaagugcgacaacgagugcauggaguccguccgcaacggcaccuacgacuaccccaaguacuccgaggaguccaagcucaaccgcgagaaggucgacggcgucaagcucgaguccaugggcaucuaccagauccucgccaucuacuccaccgucgccuccucccucguccuccucgucucccucggcgccaucuccuucuggaugugcuccaacggcucccuccagugccgcaucugcaucuga

SEQ ID NO: 102607 - RNA, 1698 nt, Artificial Sequence
  derived and/or modified CDS sequence (opt2) from hemagglutinin__InfluenzaA__ADX99964
augaaggccaaccuccucguccuccucugcgcccucgccgccgccgacgccgacaccaucugcaucggcuaccacgccaacaacuccaccgacaccgucgacaccguccucgagaagaacgucaccgucacccacuccgucaaccuccucgaggacucccacaacggcaagcucugccgccucaagggcaucgccccccuccagcucggcaagugcaacaucgccggcuggcuccucggcaaccccgagugcgacccccuccuccccguccgcuccugguccuacaucgucgagacccccaacuccgagaacggcaucugcuaccccggcgacuucaucgacuacgaggagcuccgcgagcagcucuccuccgucuccuccuucgagcgcuucgagaucuuccccaaggaguccuccuggcccaagcacaacaccaacggcgucaccgccgccugcucccacgagggcaaguccuccuucuaccgcaaccuccucuggcucaccgagaaggagggcuccuaccccaagcucaagaacuccuacgucaacaagaagggcaaggagguccucguccucuggggcauccaccacccccccaacuccaaggagcagcagaaccucuaccagaacgagaacgccuacgucuccgucgucaccuccaacuacaaccgccgcuucacccccgagaucgccgagcgccccaagguccgcgaccaggccggccgcaugaacuacuacuggacccuccucaagcccggcgacaccaucaucuucgaggccaacggcaaccucaucgcccccauguacgccuucgcccucucccgcggcuucggcuccggcaucaucaccuccaacgccuccaugcacgagugcaacaccaagugccagaccccccucggcgccaucaacuccucccuccccuaccagaacauccaccccgucaccaucggcgagugccccaaguacguccgcuccgccaagcuccgcauggucaccggccuccgcaacauccccuccauccagucccgcggccucuucggcgccaucgccggcuucaucgagggcggcuggaccggcaugaucgacggcugguacggcuaccaccaccagaacgagcagggcuccggcuacgccgccgaccagaaguccacccagaacgccaucaacggcaucaccaacaaggucaacaccgucaucgagaagaugaacauccaguucaccgccgucggcaaggaguucaacaagcucgagaagcgcauggagaaccucaacaagaaggucgacgacggcuuccucgacaucuggaccuacaacgccgagcuccucguccuccucgagaacgagcgcacccucgacuuccacgacuccaacgucaagaaccucuacgagaaggucaagucccagcucaagaacaacgccaaggagaucggcaacggcugcuucgaguucuaccacaagugcgacaacgagugcauggaguccguccgcaacggcaccuacgacuaccccaaguacuccgaggaguccaagcucaaccgcgagaaggucgacggcgucaagcucgaguccaugggcaucuaccagauccucgccaucuacuccaccgucgccuccucccucguccuccucgucucccucggcgccaucuccuucuggaugugcuccaacggcucccuccagugccgcaucugcaucuga

SEQ ID NO: 102608 - RNA, 1698 nt, Artificial Sequence
  derived and/or modified CDS sequence (opt2) from hemagglutinin__InfluenzaA__ADX99975
augaaggccaaccuccucguccuccucugcgcccucgccgccgccgacgccgacaccaucugcaucggcuaccacgccaacaacuccaccgacaccgucgacaccguccucgagaagaacgucaccgucacccacuccgucaaccuccucgaggacucccacaacggcaagcucugccgccucaagggcaucgccccccuccagcucggcaagugcaacaucgccggcuggcuccucggcaaccccgagugcgacccccuccuccccguccgcuccugguccuacaucgucgagacccccaacuccgagaacggcaucugcuaccccggcgacuucaucgacuacgaggagcuccgcgagcagcucuccuccgucuccuccuucgagcgcuucgagaucuuccccaaggaguccuccuggcccaaccacaacaccaacggcgucaccgccaccugcucccacgagggcaaguccuccuucuaccgcaaccuccucuggcucaccgagaaggagggcuccuaccccgagcucaagaacuccuacgucaacaagaagggcaaggagguccucguccucuggggcauccaccacccccccaacuccaaggagcagcagaaccucuaccagaacgagaacgccuacgucuccgucgucaccuccaacuacaaccgccgcuucacccccgagaucgccgagcgccccaagguccgcgaccaggccggccgcaugaacuacuacuggacccuccucaagcccggcgacaccaucaucuucgaggccaacggcaaccucaucgcccccauguacgccuucgcccucucccgcggcuucggcuccggcaucaucaccuccaacgccuccaugcacgagugcaacaccaagugccagaccccccucggcgccaucaacuccucccuccccuaccagaacauccaccccgucaccaucggcgagugccccaaguacguccgcuccgccaagcuccgcauggucaccggccuccgcaacauccccuccauccagucccgcggccucuucggcgccaucgccggcuucaucgagggcggcuggaccggcaugaucgacggcugguacggcuaccaccaccagaacgagcagggcuccggcuacgccgccgaccagaaguccacccagaacgccaucaacggcaucaccaacaaggucaacaccgucaucgagaagaugaacauccaguucaccgccgucggcaaggaguucaacaagcucgagaagcgcauggagaaccucaacaagaaggucgacgacggcuuccucgacaucuggaccuacaacgccgagcuccucguccuccucgagaacgagcgcacccucgacuuccacgacuccaacgucaagaaccucuacgagaaggucaagucccagcucaagaacaacgccaaggagaucggcaacggcugcuucgaguucuaccacaagugcgacaacgagugcauggaguccguccgcaacggcaccuacgacuaccccaaguacuccgaggaguccaagcucaaccgcgagaaggucgacggcgucaagcucgaguccaugggcaucuaccagauccucgccaucuacuccaccgucgccuccucccucguccuccucgucucccucggcgccaucuccuucuggaugugcuccaacggcucccuccagugccgcaucugcaucuga

SEQ ID NO: 102609 - RNA, 1698 nt, Artificial Sequence
  derived and/or modified CDS sequence (opt2) from hemagglutinin__InfluenzaA__ADX99986
augaaggccaaccuccucguccuccucugcgcccucgccgccgccgacgccgacaccaucugcaucggcuaccacgccaacaacuccaccgacaccgucgacaccguccucgagaagaacgucaccgucacccacuccgucaaccuccucgaggacucccacaacggcaagcucugccgccucaagggcaucgccccccuccagcucggcaagugcaacaucgccggcuggcuccucggcaaccccaagugcgacccccuccuccccguccgcuccugguccuacaucgucgagacccccaacuccgagaacggcaucugcuaccccggcgacuucaucgacuacgaggagcuccgcgagcagcucuccuccgucuccuccuucgagcgcuucgagaucuuccccaaggaguccuccuggcccaaccacaacaccaacggcgucaccgccgccugcucccacgagggcaaguccuccuucuaccgcaaccuccucuggcucaccgagaaggagggcuccuaccccaagcucgagaacuccuacgucaacaagaagggcaaggagguccucguccucuggggcauccaccacccccccaacuccaaggagcagcagaaccucuaccagaacgagaacgccuacgucuccgucgucaccuccaacuacaaccgccgcuucacccccgagaucgccgagcgccccaagguccgcgaccaggccggccgcaugaacuacuacuggacccuccucaagcccggcgacaccaucaucuucgaggccaacggcaaccucaucgcccccauguacgccuucgcccucucccgcggcuucggcuccggcaucaucaccuccaacgccuccaugcacgagugcaacaccaagugccagaccccccucggcgccaucaacuccucccuccccuaccagaacauccaccccgucaccaucggcgagugccccaaguacguccgcuccgccaagcuccgcauggucaccggccuccgcaacauccccuccauccagucccgcggccucuucggcgccaucgccggcuucaucgagggcggcuggaccggcaugaucgacggcugguacggcuaccaccaccagaacgagcagggcuccggcuacgccgccgaccagaaguccacccagaacgccaucaacggcaucaccaacaaggucaacaccgucaucgagaagaugaacauccaguucaccgccgucggcaaggaguucaacaagcucgagaagcgcauggagaaccucaacaagaaggucgacgacggcuuccucgacaucuggaccuacaacgccgagcuccucguccuccucgagaacgagcgcacccucgacuuccacgacuccaacgucaagaaccucuacgagaaggucaagucccagcucaagaacaacgccaaggagaucggcaacggcugcuucgaguucuaccacaagugcgacaacgagugcauggaguccguccgcaacggcaccuacgacuaccccaaguacuccgaggaguccaagcucaaccgcgagaaggucgacggcgucaagcucgaguccaugggcaucuaccagauccucgccaucuacuccaccgucgccuccucccucguccuccucgucucccucggcgccaucuccuucuggaugugcuccaacggcucccuccagugccgcaucugcaucuga

SEQ ID NO: 102610 - RNA, 1698 nt, Artificial Sequence
  derived and/or modified CDS sequence (opt2) from hemagglutinin__InfluenzaA__ADX99997
augaaggccaaccuccucguccuccucugcgcccucgccgccgccgacgccgacaccaucugcaucggcuaccacgccaacaacuccaccgacaccgucgacaccguccucgagaagaacgucaccgucacccacuccgucaaccuccucgaggacucccacaacggcaagcucugccgccucaagggcaucgccccccuccagcucggcaagugcaacaucgccggcuggcuccucggcaaccccgagugcgacccccuccuccccguccgcuccugguccuacaucgucgagacccccaacuccgagaacggcaucugcuaccccggcgacuucaucgacuacgaggagcuccgcgagcagcucuccuccgucuccuccuucgagcgcuucgagaucuuccccaaggaguccuccuggcccaaccacaacaccaacggcgucaccgccgccugcucccacgagggcaaguccuccuucuaccgcaaccuccucuggcucaccgagaaggagggcuccuaccccaagcucgagaacuccuacgucaacaagaagggcaaggagguccucguccucuggggcauccaccacccccccaacuccaaggagcagcagaaccucuaccagaacgagaacgccuacgucuccgucgucaccuccaacuacaaccgccgcuucacccccgagaucgccgagcgccccaagguccgcgaccaggccggccgcaugaaguacuacuggacccuccucaagcccggcgacaccaucaucuucgaggccaacggcaaccucaucgcccccauguacgccuucgcccucucccgcggcuucggcuccggcaucaucaccuccaacgccuccaugcacgagugcaacaccaagugccagaccccccucggcgccaucaacuccucccuccccuaccagaacauccaccccgucaccaucggcgagugccccaaguacguccgcuccgccaagcuccgcauggucaccggccuccgcaacauccccuccauccagucccgcggccucuucggcgccaucgccggcuucaucgagggcggcuggaccggcaugaucgacggcugguacggcuaccaccaccagaacgagcagggcuccggcuacgccgccgaccagaaguccacccagaacgccaucaacggcaucaccaacaaggucaacaccgucaucgagaagaugaacauccaguucaccgccgucggcaaggaguucaacaagcucgagaagcgcauggagaaccucaacaagaaggucgacgacggcuuccucgacaucuggaccuacaacgccgagcuccucguccuccucgagaacgagcgcacccucgacuuccacgacuccaacgucaagaaccucuacgagaaggucaagucccagcucaagaacaacgccaaggagaucggcaacggcugcuucgaguucuaccacaagugcgacaacgagugcauggaguccguccgcaacggcaccuacgacuaccccaaguacuccgaggaguccaagcucaaccgcgagaaggucgacggcgucaagcucgaguccaugggcaucuaccagauccucgccaucuacuccaccgucgccuccucccucguccuccucgucucccucggcgccaucuccuucuggaugugcuccaacggcucccuccagugccgcaucugcaucuga

SEQ ID NO: 102611 - RNA, 1698 nt, Artificial Sequence
  derived and/or modified CDS sequence (opt2) from hemagglutinin__InfluenzaA__ADY00009
augaaggccaaccuccucguccuccucugcgcccucgccgccgccgacgccgacaccaucugcaucggcuaccacgccaacaacuccaccgacaccgucgacaccguccucgagaagaacgucaccgucacccacuccgucaaccuccucgaggacucccacaacggcaagcucugccgccucaagggcaucgccccccuccagcucggcaagugcaacaucgccggcuggcuccucggcaaccccgagugcgacccccuccuccccguccgcuccugguccuacaucgucgagacccccaacuccgagaacggcaucugcuaccccggcgacuucaucgacuacgaggagcuccgcgagcagcucuccuccgucuccuccuucgagcgcuucgagaucuuccccaaggaguccuccuggcccaaccacaacaccaacggcgucaccgccgccugcucccacgagggcaaguccuccuucuaccgcaaccuccucuggcucaccgagaagaagggcuccuaccccaagcucgagaacuccuacgucaacaagaagggcaaggagguccucguccucuggggcauccaccacccccccaacuccaaggagcagcagaaccucuaccagaacgagaacgccuacgucuccgucgucaccuccaacuacaaccgccgcuucacccccgagaucgccgagcgccccaagguccgcgaccaggccggccgcaugaacuacuacuggacccuccucaagcccggcgacaccaucaucuucgaggccaacggcaaccucaucgcccccauguacgccuucgcccucucccgcggcuucggcuccggcaucaucaccuccaacgccuccaugcacgagugcaacaccaagugccagaccccccucggcgccaucaacuccucccuccccuaccagaacauccaccccgucaccaucggcgagugccccaaguacguccgcuccgccaagcuccgcauggucaccggccuccgcaacauccccuccauccagucccgcggccucuucggcgccaucgccggcuucaucgagggcggcuggaccggcaugaucgacggcugguacggcuaccaccaccagaacgagcagggcuccggcuacgccgccgaccagaaguccacccagaacgccaucaacggcaucaccaacaaggucaacaccgucaucgagaagaugaacauccaguucaccgccgucggcaaggaguucaacaagcucgagaagcgcauggagaaccucaacaagaaggucgacgacggcuuccucgacaucuggaccuacaacgccgagcuccucguccuccucgagaacgagcgcacccucgacuuccacgacuccaacgucaagaaccucuacgagaaggucaagucccagcucaagaacaacgccaaggagaucggcaacggcugcuucgaguucuaccacaagugcgacaacgagugcauggaguccguccgcaacggcaccuacgacuaccccaaguacuccgaggaguccaagcucaaccgcgagaaggucgacggcgucaagcucgaguccaugggcaucuaccagauccucgccaucuacuccaccgucgccuccucccucguccuccucgucucccucggcgccaucuccuucuggaugugcuccaacggcucccuccagugccgcaucugcaucuga

SEQ ID NO: 102612 - RNA, 1698 nt, Artificial Sequence; identical to SEQ ID NO: 99314
  derived and/or modified CDS sequence (opt2) from hemagglutinin__InfluenzaA__ADY00020

SEQ ID NO: 102613 - RNA, 1698 nt, Artificial Sequence
  derived and/or modified CDS sequence (opt2) from hemagglutinin__InfluenzaA__ADY04727
augaaggccaagcuccucguccuccucugcaccuucaccgccaccuacgccgacaccaucugcaucggcuaccacgccaacaacuccaccgacaccgucgacaccguccucgagaagaacgucaccgucacccacuccgucaaccuccucgaggacucccacaacggcaagcucugccuccucaagggcaucgccccccuccagcucggcaacugcuccgucgccggcuggauccucggcaaccccgagugcgagcuccucaucuccaaggaguccugguccuacaucgucgagacccccaaccccgagaacggcaccugcuaccccggcuacuucgccgacuacgaggagcuccgcgagcagcucuccuccgucuccuccuucgagcgcuucgagaucuuccccaagggcuccuccuggcccaaccacaccgucaccggcgucuccgccuccugcucccacaacggcaaguccuccuucuaccgcaaccuccucuggcucaccggcaagaacggccucuaccccaaccucuccauguccuacgucaacaacaaggagaaggagguccucguccucuggggcguccaccacccccccaacaucggcaaccagcgcgcccucuaccacaccgagaacgccuacgucuccgucgucuccucccacuacucccgccgcuucacccccgagaucgccaagcgccccaagguccgcgaccaggagggccgcaucaacuacuacuggacccuccucgagcccggcgacaccaucaucuucgaggccaacggcaaccucaucgcccccugguacgccuucgcccucucccgcggcuucggcuccggcaucaucaccuccaacgcccccaugggcgagugcgacgccaagugccagaccccccagggcgccaucaacuccucccuccccuuccagaacguccaccccgucaccaucggcgagugccccaaguacguccgcuccgccaagcuccgcauggucaccggccuccgcaacauccccuccauccagucccgcggccucuucggcgccaucgccggcuucaucgagggcggcuggaccggcauggucgacggcugguacggcuaccaccaccagaacgagcagggcuccggcuacgccgccgaccagaaguccacccagaacgccaucaacggcaucaccaacaaggucaacuccgucaucgagaagaugaacacccaguucaccgccgucggcaaggaguucaacaagcucgagcgccgcauggagaaccucaacaagaaggucgacgacggcuuccucgacaucuggaccuacaacgccgagcuccucguccuccucgagaacgagcgcacccucgacuuccacgacuccaaccucaagaaccucuacgagaaggucaagucccagcucaagaacaacgccaaggagaucggcaacggcugcuucgaguucuaccacaagugcaacaacgagugcauggaguccgucaagaacggcaccuacgacuaccccaaguacuccgaggaguccaagcucaaccgcgagaagaucgacggcgucaagcucgaguccaugggcgucuaccagauccucgccaucuacuccaccgucgccuccucccucguccuccucgucucccucggcgccaucuccuucuggaugugcuccaacggcucccuccagugccgcaucugcaucuga

SEQ ID NO: 102614 - RNA, 1701 nt, Artificial Sequence; identical to SEQ ID NO: 99649
  derived and/or modified CDS sequence (opt2) from hemagglutinin__InfluenzaA__ADY11836

SEQ ID NO: 102615 - RNA, 1701 nt, Artificial Sequence; identical to SEQ ID NO: 99624
  derived and/or modified CDS sequence (opt2) from hemagglutinin__InfluenzaA__ADY17654

SEQ ID NO: 102616 - RNA, 1701 nt, Artificial Sequence
  derived and/or modified CDS sequence (opt2) from hemagglutinin__InfluenzaA__ADY17665
augaagaccaucaucgcccucuccuacauccucugccucaucuucgcccagaagcuccccggcaacgacaacuccaccgccacccucugccucggccaccacgccguccccaacggcaccaucgucaagaccaucaccaacgaccagaucgaggucaccaacgccaccgagcucguccaguccuccuccaccggcgagaucugcgacuccccccaccagauccucgacggcaagaacugcacccucaucgacgcccuccucggcgacccccagugcgacggcuuccagaacaagaagugggaccucuucgucgagcgcuccaaggccuacuccaacugcuaccccuacgacguccccgacuacgccucccuccgcucccucgucgccuccuccggcacccucgaguucaacaacgaguccuucaacuggaccggcgucacccaggacggcaccuccuccgccugcauccgccgcuccaagaacuccuucuucucccgccucaacuggcucacccaccucaacuucaaguaccccgcccucaacgucaccaugcccaacaacgagcaguucgacaagcucuacaucuggggcguccaccaccccggcaccgacaaggaccagaucuuccucuacgcccaggccuccggccgcaucaccgucuccaccaagcgcucccagcagaccgccauccccaacaucggcucccgcccccgcguccgcaacauccccucccgcaucuccaucuacuggaccaucgucaagcccggcgacauccuccucaucaacuccaccggcaaccucaucgccccccgcggcuacuucaagauccgcuccggcaaguccuccaucaugcgcuccgacgcccccaucggcaagugcaacuccgagugcaucacccccaacggcuccauccccaacgacaagcccuuccagaacgucaaccgcaucaccuacggcgccugcccccgcuacgucaagcagaacacccucaagcucgccaccggcaugcgcaacguccccgagaagcagacccgcggcaucuucggcgccaucgccggcuucaucgagaacggcugggagggcauggucgacggcugguacggcuuccgccaccagaacuccgagggccgcggccaggccgccgaccucaaguccacccaggccgccaucgaccagaucaacggcaagcucaaccgccucaucggcaagaccaacgagaaguuccaccagaucgagaaggaguucuccgaggucgagggccgcauccaggaccucgagaaguacgucgaggacaccaagaucgaccucugguccuacaacgccgagcuccucgucgcccucgagaaccagcacaccaucgaccucaccgacuccgagaugaacaagcucuucgagaagaccaagaagcagcuccgcgagaacgccgaggacaugggcaacggcugcuucaagaucuaccacaagugcgacaacgccugcaucggcuccauccgcaacggcaccuacgaccacgacgucuaccgcgacgaggcccucaacaaccgcuuccagaucaagggcgucgagcucaaguccggcuacaaggacuggauccucuggaucuccuucgccaucuccugcuuccuccucugcgucgcccuccucggcuucaucaugugggccugccagaagggcaacauccgcugcaacaucugcaucuga

SEQ ID NO: 102617 - RNA, 1701 nt, Artificial Sequence; identical to SEQ ID NO: 99649
  derived and/or modified CDS sequence (opt2) from hemagglutinin__InfluenzaA__ADY17676

SEQ ID NO: 102618 - RNA, 1701 nt, Artificial Sequence
  derived and/or modified CDS sequence (opt2) from hemagglutinin__InfluenzaA__ADY17687
augaagaccaucaucgcccucuccuacauccucugccucgucuucgcccagaagcuccccggcaacgacaacuccaccgccacccucugccucggccaccacgccguccccaacggcaccaucgucaagaccaucaccaacgaccagaucgaggucaccaacgccaccgagcucguccaguccuccuccaccggcgagaucugcgacuccccccaccagauccucgacggcaagaacugcacccucaucgacgcccuccucggcgacccccagugcgacggcuuccagaacaagaagugggaccucuucgucgagcgcuccaaggccuacuccaacugcuaccccuacgacguccccgacuacgccucccuccgcucccucgucgccuccuccggcacccucgaguucaacaacgaguccuucaacuggaccggcgucacccaggacggcaccuccuccgccugcauccgccgcuccaagaacuccuucuucucccgccucaacuggcucacccaccucaacuucaaguaccccgcccucaacgucaccaugcccaacaacgagcaguucgacaagcucuacaucuggggcguccaccaccccggcaccgacaaggaccagaucuuccucuacgcccaggccuccggccgcaucaccgucuccaccaagcgcucccagcagaccgccauccccaacaucggcucccgcccccgcguccgcaacauccccucccgcaucuccaucuacuggaccaucgucaagcccggcgacauccuccucaucaacuccaccggcaaccucaucgccccccgcggcuacuucaagauccgcuccggcaaguccuccaucaugcgcuccgacgcccccaucggcaagugcaacuccgagugcaucacccccaacggcuccauccccaacgacaagcccuuccagaacgucaaccgcaucaccuacggcgccugcccccgcuacgucaagcagaacacccucaagcucgccaccggcaugcgcaacguccccgagaagcagacccgcggcaucuucggcgccaucgccggcuucaucgagaacggcugggagggcauggucgacggcugguacggcuuccgccaccagaacuccgagggccgcggccaggccgccgaccucaaguccacccaggccgccaucgaccagaucaacggcaagcucaaccgccucaucggcaagaccaacgagaaguuccaccagaucgagaaggaguucuccgaggucgagggccgcauccaggaccucgagaaguacgucgaggacaccaagaucgaccucugguccuacaacgccgagcuccucgucgcccucgagaaccagcacaccaucgaccucaccgacuccgagaugaacaagcucuucgagaagaccaagaagcagcuccgcgagaacgccgaggacaugggcaacggcugcuucaagaucuaccacaagugcgacaacgccugcaucggcuccauccgcaacggcaccuacgaccacgacgucuaccgcgacgaggcccucaacaaccgcuuccagaucaagggcgucgagcucaaguccggcuacaaggacuggauccucuggaucuccuucgccaucuccugcuuccuccucugcgccgcccuccucggcuucaucaugugggccugccagaagggcaacauccgcugcaacaucugcaucuga

SEQ ID NO: 102619 - RNA, 1701 nt, Artificial Sequence; identical to SEQ ID NO: 99624
  derived and/or modified CDS sequence (opt2) from hemagglutinin__InfluenzaA__ADY17698

SEQ ID NO: 102620 - RNA, 1701 nt, Artificial Sequence
  derived and/or modified CDS sequence (opt2) from hemagglutinin__InfluenzaA__ADY38719
augaagaccaucaucgcccucuccuacauccucugccucgucuucacccagaagcuccccggcaacgacaacuccaccgccacccucugccucggccaccacgccguccccaacggcaccaucgucaagaccaucaccaacgaccagaucgaggucaccaacgccaccgagcucguccaguccuccuccaccggcgagaucugcgacuccccccaccagauccucgacggcaagaacugcacccucaucgacgcccuccucggcgacccccagugcgacggcuuccagaacaagaagugggaccucuucgucgagcgcuccaaggccuacuccaacugcuaccccuacgacguccccgacuacgccucccuccgcucccucgucgccuccuccggcacccucgaguucaacaacgaguccuucaacuggaccggcgucacccagaacggcaccuccuccgccugcauccgccgcuccaagaacuccuucuucucccgccucaacuggcucacccaccucaacuucaaguaccccgcccucaacgucaccaugcccaacaacgagcaguucgacaagcucuacaucuggggcguccaccaccccggcaccgacaaggaccagaucuuccucuacgcccaggccuccggccgcaucaccgucuccaccaagcgcucccagcagaccgccauccccaacaucggcucccgcccccgcguccgcaacauccccucccgcaucuccaucuacuggaccaucgucaagcccggcgacauccuccucaucaacuccaccggcaaccucaucgccccccgcggcuacuucaagauccgcuccggcaaguccuccaucaugcgcuccgacgcccccaucggcaagugcaacuccgagugcaucacccccaacggcuccauccccaacgacaagcccuuccagaacgucaaccgcaucaccuacggcgccugcccccgcuacgucaagcagaacacccucaagcucgccaccggcaugcgcaacguccccgagaagcagacccgcggcaucuucggcgccaucgccggcuucaucgagaacggcugggagggcauggucgacggcugguacggcuuccgccaccagaacuccgagggccgcggccaggccgccgaccucaaguccacccaggccgccaucgaccagaucaacggcaagcucaaccgccucaucggcaagaccaacgagaaguuccaccagaucgagaaggaguucuccgaggucgagggccgcauccaggaccucgagaaguacgucgaggacaccaagaucgaccucugguccuacaacgccgagcuccucgucgcccucgagaaccagcacaccaucgaccucaccgacuccgagaugaacaagcucuucgagaagaccaagaagcagcuccgcgagaacgccgaggacaugggcaacggcugcuucaagaucuaccacaagugcgacaacgccugcaucggcuccauccgcaacggcaccuacgaccacgacgucuaccgcgacgaggcccucaacaaccgcuuccagaucaagggcgucgagcucaaguccggcuacaaggacuggauccucuggaucuccuucgccaucuccugcuuccuccucugcgucgcccuccucggcuucaucaugugggccugccagaagggcaacauccgcugcaacaucugcaucuga

SEQ ID NO: 102621 - RNA, 1701 nt, Artificial Sequence; identical to SEQ ID NO: 98705
  derived and/or modified CDS sequence (opt2) from hemagglutinin__InfluenzaA__ADY38750

SEQ ID NO: 102622 - RNA, 1701 nt, Artificial Sequence; identical to SEQ ID NO: 99869
  derived and/or modified CDS sequence (opt2) from hemagglutinin__InfluenzaA__ADY38760

SEQ ID NO: 102623 - RNA, 1701 nt, Artificial Sequence
  derived and/or modified CDS sequence (opt2) from hemagglutinin__InfluenzaA__ADZ04607
augaaggccauccucgucguccuccucuacaccuucgccaccgccaacgccgacacccucugcaucggcuaccacgccaacaacuccaccgacaccgucgacaccguccucgagaagaacgucaccgucacccacuccgucaaccuccucgaggacaagcacaacggcaagcucugcaagcuccgcggcgucgccccccuccaccucggcaagugcaacaucgccggcuggauccucggcaaccccgagugcgagucccucuccaccgccuccuccugguccuacaucgucgagaccuccuccuccgacaacggcaccugcuaccccggcgacuucaucgacuacgaggagcuccgcgagcagcucuccuccgucuccuccuucgagcgcuucgagaucuuccccaagaccuccuccuggcccaaccacgacuccaacaagggcgucaccgccgccugcccccacgccggcgccaaguccuucuacaagaaccucaucuggcucgucaagaagggcaacuccuaccccaagcucuccaaguccuacaucaacgacaagggcaaggagguccucguccucuggggcauccaccaccccuccaccuccgccgaccagcagucccucuaccagaacgccgacgccuacgucuucgucggcaccucccgcuacuccaagaaguucaagcccgagaucgccauccgccccaagguccgcgaccaggagggccgcaugaacuacuacuggacccucgucgagcccggcgacaagaucaccuucgaggccaccggcaaccucgucgucccccgcuacgccuucgccauggagcgcaacgccggcuccggcaucaucaucuccgacacccccguccacgacugcaacaccaccugccagacccccaagggcgccaucaacaccucccuccccuuccagaacauccaccccaucaccaucggcaagugccccaaguacgucaaguccaccaagcuccgccucgccaccggccuccgcaacguccccuccauccagucccgcggccucuucggcgccaucgccggcuucaucgagggcggcuggaccggcauggucgacggcugguacggcuaccaccaccagaacgagcagggcuccggcuacgccgccgaccucaaguccacccagaacgccaucgacgagaucaccaacaaggucaacuccgucaucgagaagaugaacacccaguucaccgccgucggcaaggaguucaaccaccucgagaagcgcaucgagaaccucaacaagaaggucgacgacggcuuccucgacaucuggaccuacaacgccgagcuccucguccuccucgagaacgagcgcacccucgacuaccacgacuccaacgucaagaaccucuacgagaagguccgcucccagcucaagaacaacgccaaggagaucggcaacggcugcuucgaguucuaccacaagugcgacaacaccugcauggaguccgucaagaacggcaccuacgacuaccccaaguacuccgaggaggccaagcucaaccgcgaggagaucgacggcgucaagcucgaguccacccgcgucuaccagauccucgccaucuacuccaccgucgccuccucccucguccucgucgucucccucggcgccaucuccuucuggaugugcuccaacggcucccuccagugccgcaucugcaucuga

SEQ ID NO: 102624 - RNA, 1698 nt, Artificial Sequence; identical to SEQ ID NO: 101999
  derived and/or modified CDS sequence (opt2) from hemagglutinin__InfluenzaA__ADZ05834

SEQ ID NO: 102625 - RNA, 1698 nt, Artificial Sequence
  derived and/or modified CDS sequence (opt2) from hemagglutinin__InfluenzaA__ADZ05845
augaaggucaagcuccucguccuccucugcaccuucaccgccaccuacgccgacaccaucugcaucggcuaccacgccaacaacuccaccgacaccgucgacaccguccucgagaagaacgucaccgucacccacuccgucaaccuccucgaggacucccacaacggcaagcucugccuccucaagggcaucgccccccuccagcucggcaacugcuccgucgccggcuggauccucggcaaccccgagugcgagcuccucaucuccaaggaguccugguccuacaucgucgagaagcccaaccccgagaacggcaccugcuaccccggccacuucgccgacuacgaggagcuccgcgagcagcucuccuccgucuccuccuucgagcgcuucgagaucuuccccaaggaguccuccuggcccaaccacaccgucaccggcgucuccgccuccugcucccacaacggcgagaacuccuucuaccgcaaccuccucuggcucaccggcaagaacggccucuaccccaaccucuccaaguccuacgccaacaacaaggagaaggagguccucguccucuggggcguccaccacccccccaacauggccgaccagaagacccucuaccacaccgagaacgccuacgucuccgucgucuccucccacuacucccgcaaguucacccccgagaucgccaagcgccccaagguccgcgaccaggagggccgcaucaacuacuacuggacccuccucgagcccggcgacaccaucaucuucgaggccaacggcaaccucaucgccccccgcuacgccuucgcccucucccgcggcuucggcuccggcaucaucaacuccaacgcccccauggacaagugcgacgccaagugccagaccccccagggcgccaucaacuccucccuccccuuccagaacguccaccccgucaccaucggcgagugccccaaguacguccgcuccgccaagcuccgcauggucaccggccuccgcaacauccccuccauccagucccgcggccucuucggcgccaucgccggcuucaucgagggcggcuggaccggcauggucgacggcugguacggcuaccaccaccagaacgagcagggcuccggcuacgccgccgaccagaaguccacccagaacgccaucaacggcaucaccaacaaggucaacuccgucaucgagaagaugaacacccaguucaccgccgucggcaaggaguucaacaagcucgagcgccgcauggagaaccucaacaagaaggucgacgacggcuucaucgacaucuggaccuacaacgccgagcuccucguccuccucgagaacgagcgcacccucgacuuccacgacuccaacgucaagaaccucuacgagaaggucaagucccagcucaagaacaacgccaaggagaucggcaacggcugcuucgaguucuaccacaagugcaacgacgagugcauggaguccgucaagaacggcaccuacgacuaccccaaguacuccgaggaguccaagcucaaccgcgagaagaucgacggcgucaagcucgaguccaugggcgucuaccagauccucgccaucuacuccaccgucgccuccucccucguccuccucgucucccucggcgccaucuccuucuggaugugcuccaacggcucccuccagugccgcaucugcaucuga

SEQ ID NO: 102626 - RNA, 1701 nt, Artificial Sequence; identical to SEQ ID NO: 98470
  derived and/or modified CDS sequence (opt2) from hemagglutinin__InfluenzaA__ADZ05855

SEQ ID NO: 102627 - RNA, 1701 nt, Artificial Sequence
  derived and/or modified CDS sequence (opt2) from hemagglutinin__InfluenzaA__ADZ47838
augaaggccauccucgucguccuccucuacacccucgccaccgccaacgccgacacccucugcaucggcuaccacgccaacaacuccaccgacaccgucgacaccguccucgagaagaacgucaccgucacccacuccgucaaccuccucgaggacaagcacaacggcaagcucugcaagcuccgcggcgucgccccccuccaccucggcaagugcaacaucgccggcuggauccucggcaaccccgagugcgagucccucuccaccgccuccuccugguccuacaucgucgagaccuccuccuccgacaacggcaccugcuaccccggcgacuucaucgacuacgaggagcuccgcgagcagcucuccuccgucuccuccuucgagcgcuucgagaucuuccccaagaccuccuccuggcccaaccacgacuccaacaagggcgucaccgccgccugcccccacgccggcgccaaguccuucuacaagaaccucaucuggcucgucaagaagggcaacuccuaccccaagcucuccaaguccuacaucaacgacaagggcaaggagguccucguccucuggggcauccaccaccccuccaccuccgccgaccagcagucccucuaccagaacgccgacgccuacgucuucgucggcaccucccgcuacuccaagaaguucaagcccgagaucgccauccgccccaagguccgcgagcaggagggccgcaugaacuacuacuggacccucgucgagcccggcgacaagaucaccuucgaggccaccggcaaccucgucgucccccgcuacgccuucgccauggagcgcaacgccggcuccggcaucaucaucuccgacacccccguccacgacugcaacaccaccugccagacccccaagggcgccaucaacaccucccuccccuuccagaacauccacuccaucaccaucggcaagugccccaaguacgucaaguccaccaagcuccgccucgccaccggccuccgcaacguccccuccauccagucccgcggccucuucggcgccaucgccggcuucaucgagggcggcuggaccggcauggucgacggcugguacggcuaccaccaccagaacgagcagggcuccggcuacgccgccgaccucaaguccacccagaacgccaucgacgagaucaccaacaaggucaacuccgucaucgagaagaugaacacccaguucaccgccgucggcaaggaguucaaccaccucgagaagcgcaucgagaaccucaacaagaaggucgacgacggcuuccucgacaucuggaccuacaacgccgagcuccucguccuccucgagaacgagcgcacccucgacuaccacgacuccaacgucaagaaccucuacgagaagguccgcucccagcucaagaacaacgccaaggagaucggcaacggcugcuucgaguucuaccacaagugcgacaacaccugcauggaguccgucaagaacggcaccuacgacuaccccaaguacuccgaggaggccaagcucaaccgcgaggagaucgacggcgucaagcucgaguccacccgcaucuaccagauccucgccaucuacuccaccgucgccuccuccuucguccucaucgucucccucggcgccaucuccuucuggaugugcuccaacggcucccuccagugccgcaucugcaucuga

SEQ ID NO: 102628 - RNA, 1701 nt, Artificial Sequence; identical to SEQ ID NO: 99877
  derived and/or modified CDS sequence (opt2) from hemagglutinin__InfluenzaA__ADZ47858

SEQ ID NO: 102629 - RNA, 1698 nt, Artificial Sequence
  derived and/or modified CDS sequence (opt2) from hemagglutinin__InfluenzaA__ADZ53100
augaaggucaagcuccucguccuccucugcaccuucaccgccaccuacgccgacaccaucugcaucggcuaccacgccaacaacuccaccgacaccgucgacaccguccucgagaagaacgucaccgucacccacuccgucaaccuccucgagaacucccacaacggcaagcucugccuccucaagggcaucgccccccuccagcucggcaacugcuccgucgccggcuggauccucggcaaccccgagugcgagcuccucaucuccaaggagaccugguccuacaucgucgagaagcccaaccccgagaacggcaccugcuaccccggccacuucgccgacuacgaggagcuccgcgagcagcucuccuccgucuccuccuucgagcgcuucgagaucuuccccaaggaguccuccuggcccaaccacaccgucaccggcgucuccgccuccugcucccacaacggcgaguccuccuucuaccgcaaccuccucuggcucaccggcaagaacggccucuaccccaaccucuccaaguccuacgccaacaacaaggagaaggagguccucguccucuggggcguccaccacccccccuccaucaacgaccagaagacccucuaccacaccgagaacgccuacgucuccgucgucuccucccacuacucccgcaaguucacccccgagaucgccaagcgccccaagguccgcgaccaggagggccgcaucaacuacuacuggacccuccucgagccccgcgacaccaucaucuucgaggccaacggcaaccucaucgccccccgcuacgccuucgcccucucccgcggcuucggcuccggcaucaucaacuccaacgcccccauggacaagugcgacgccaagugccagaccccccagggcgccaucaacuccucccuccccuuccagaacguccaccccgucaccaucggcgagugccccaaguacguccgcuccgccaagcuccgcauggucaccggccuccgcaacauccccuccauccagucccgcggccucuucggcgccaucgccggcuucaucgagggcggcuggaccggcauggucgacggcugguacggcuaccaccaccagaacgagcagggcuccggcuacgccgccgaccagaaguccacccagaacgccaucaacggcaucaccaacaaggucaacuccgucaucgagaagaugaacacccaguucaccgccgucggcaaggaguucaacaagcucgagcgccgcauggagaaccucaacaagaaggucgacgacggcuucaucgacaucuggaccuacaacgccgagcuccucguccuccucgagaacgagcgcacccucgacuuccacgacuccaacgucaagaaccucuacgagaaggucaagucccagcucaagaacaacgccaaggagaucggcaacggcugcuucgaguucuaccacaagugcaacgacgagugcauggaguccgucaagaacggcaccuacgacuaccccaaguacuccgaggaguccaagcucaaccgcgagaagaucgacggcgucaagcucgaguccaugggcgucuaccagauccucgccaucuacuccaccgucgccuccucccucguccuccucgucucccucggcgccaucuccuucuggaugugcuccaacggcucccuccagugccgcaucugcaucuga

SEQ ID NO: 102630 - RNA, 1701 nt, Artificial Sequence; identical to SEQ ID NO: 99152
  derived and/or modified CDS sequence (opt2) from hemagglutinin__InfluenzaA__ADZ53123

SEQ ID NO: 102631 - RNA, 1701 nt, Artificial Sequence; identical to SEQ ID NO: 98947
  derived and/or modified CDS sequence (opt2) from hemagglutinin__InfluenzaA__ADZ53125

SEQ ID NO: 102632 - RNA, 1701 nt, Artificial Sequence; identical to SEQ ID NO: 99329
  derived and/or modified CDS sequence (opt2) from hemagglutinin__InfluenzaA__ADZ53127

SEQ ID NO: 102633 - RNA, 1701 nt, Artificial Sequence; identical to SEQ ID NO: 98692
  derived and/or modified CDS sequence (opt2) from hemagglutinin__InfluenzaA__ADZ53131

SEQ ID NO: 102634 - RNA, 1701 nt, Artificial Sequence; identical to SEQ ID NO: 98705
  derived and/or modified CDS sequence (opt2) from hemagglutinin__InfluenzaA__ADZ53133

SEQ ID NO: 102635 - RNA, 1701 nt, Artificial Sequence; identical to SEQ ID NO: 98947
  derived and/or modified CDS sequence (opt2) from hemagglutinin__InfluenzaA__ADZ53135
